United States Patent Application Publication US 2013/0267429 A1 - sequence listing, part 6

SEQ ID NO: 116435 - DNA, 60 bp, Artificial
  Synthetic oligonucleotide
agcagtagcagtactattcccgaatgcacagccattcgaacatcatgcaacagtgggatt

SEQ ID NO: 116436 - DNA, 60 bp, Artificial
  Synthetic oligonucleotide
tccgttaggcaagagtacgcaataccagttggaccagtctttccaccaggtatgaactgg

SEQ ID NO: 116437 - DNA, 60 bp, Artificial
  Synthetic oligonucleotide
tcgtcggaatacatagaaaactggaatttgcaaaatagaagacagaggacaggtttcact

SEQ ID NO: 116438 - DNA, 60 bp, Artificial
  Synthetic oligonucleotide
cacctcaatcagactcgctaagaaagctgtcagccattaaattcaaaagaataaattttg

SEQ ID NO: 116439 - DNA, 52 bp, Artificial
  Synthetic oligonucleotide
tccgttaggcaagagtacgcaataccagttggaccagtctttccaccaggta

SEQ ID NO: 116440 - DNA, 60 bp, Artificial
  Synthetic oligonucleotide
tatgaactggactgatttaatcaccaattattcaccgtctagggaggacaatttgcaacg

SEQ ID NO: 116441 - DNA, 60 bp, Artificial
  Synthetic oligonucleotide
ctatcattccagttaatgagaccaccaaacatgacaccagcagtagcagtactattcccg

SEQ ID NO: 116442 - DNA, 60 bp, Artificial
  Synthetic oligonucleotide
gaggaccaagctaacaacttggtatccaactttggtgagtatgtagctatatcaagctgt

SEQ ID NO: 116443 - DNA, 60 bp, Artificial
  Synthetic oligonucleotide
gcagtagcagtactattcccgaatgcacagccattcgaacatcatgcaacagtgggattg

SEQ ID NO: 116444 - DNA, 60 bp, Artificial
  Synthetic oligonucleotide
cggcaagaaatacaattgattatttcgtggattttgtagacaatgtatgcatggatgaga

SEQ ID NO: 116445 - DNA, 60 bp, Artificial
  Synthetic oligonucleotide
agagtgatcaattcagctgacggggcaactacatggtttttcaacccagtgattctcagg

SEQ ID NO: 116446 - DNA, 60 bp, Artificial
  Synthetic oligonucleotide
gattctcaggccgaataacgttgaagtggagtttctattgaatggacagataataaacac

SEQ ID NO: 116447 - DNA, 60 bp, Artificial
  Synthetic oligonucleotide
taataaacacttatcaagcaagatttggaactatcgtagctagaaattttgatactatta

SEQ ID NO: 116448 - DNA, 60 bp, Artificial
  Synthetic oligonucleotide
gatactattagactatcattccagttaatgagaccaccaaacatgacaccagcagtagca

SEQ ID NO: 116449 - DNA, 60 bp, Artificial
  Synthetic oligonucleotide
gggtttgatatatcttagcataacaattgtatagaggggaccacaacccggtcacatcat

SEQ ID NO: 116450 - DNA, 60 bp, Artificial
  Synthetic oligonucleotide
tagggtttgatatatcttagcataacaattgtatagaggggaccacaacccggtcacatc

SEQ ID NO: 116451 - DNA, 60 bp, Artificial
  Synthetic oligonucleotide
tgcaagttatgtccaaaagatcacggtcattaattcacagctttttactatagggtttga

SEQ ID NO: 116452 - DNA, 51 bp, Artificial
  Synthetic oligonucleotide
cttgccgacctcaactacacattgagtgtaatcactttaatgaatgacaca

SEQ ID NO: 116453 - DNA, 56 bp, Artificial
  Synthetic oligonucleotide
cttgccgacctcaactacacattgagtgtaatcactttaatgaatgacacattgca

SEQ ID NO: 116454 - DNA, 52 bp, Artificial
  Synthetic oligonucleotide
cttgccgacctcaactacacattgagtgtaatcactttaatgaatgacacat

SEQ ID NO: 116455 - DNA, 60 bp, Artificial
  Synthetic oligonucleotide
cttgccgacctcaactacacattgagtgtaatcactttaatgaatgacacattacattct

SEQ ID NO: 116456 - DNA, 59 bp, Artificial
  Synthetic oligonucleotide
cttgccgacctcaactacacattgagtgtaatcactttaatgaatgacacattacattc

SEQ ID NO: 116457 - DNA, 56 bp, Artificial
  Synthetic oligonucleotide
cttgccgacttcaactacacattgagtgtaatcactttaatgaatgacacattaca

SEQ ID NO: 116458 - DNA, 60 bp, Artificial
  Synthetic oligonucleotide
ttagattgttttgctttgtctgctttggatatgcgccaaggaaggatgggacgataccag

SEQ ID NO: 116459 - DNA, 60 bp, Artificial
  Synthetic oligonucleotide
gcgagggtgctactacgctgggagctatcaatgcaagcacgctctatcatgtttagattg

SEQ ID NO: 116460 - DNA, 60 bp, Artificial
  Synthetic oligonucleotide
cgctcaggcaatggctaatatgtgggataactagacagtgactatcattttgattcgaaa

SEQ ID NO: 116461 - DNA, 60 bp, Artificial
  Synthetic oligonucleotide
ggactggcatctgggaaaatgatgactggcaggagggaatctatctgttagcgagggtgc

SEQ ID NO: 116462 - DNA, 60 bp, Artificial
  Synthetic oligonucleotide
cggcaggtaaaggaaacagtaggatcttgcagcttcacaggttttagtggcccagtgttc

SEQ ID NO: 116463 - DNA, 60 bp, Artificial
  Synthetic oligonucleotide
acgcggtggatgactgggttgctccagatatttatccaatgagaagacctagaatggaga

SEQ ID NO: 116464 - DNA, 60 bp, Artificial
  Synthetic oligonucleotide
gcgctgattcgtactgcgatacagattcataggtgggtaagagggactggcatctgggaa

SEQ ID NO: 116465 - DNA, 60 bp, Artificial
  Synthetic oligonucleotide
gctttcccatacctatacataccagtgaactacggccagatggtgcaaccaattaggata

SEQ ID NO: 116466 - DNA, 60 bp, Artificial
  Synthetic oligonucleotide
ggctgtgcaacaatatctacgagttggctatcttgaagaaagacgttatgtcacgcaact

SEQ ID NO: 116467 - DNA, 56 bp, Artificial
  Synthetic oligonucleotide
aacttcgagtatgtgagaggattcatgcagggccgacataagtgccaactgtgctt

SEQ ID NO: 116468 - DNA, 60 bp, Artificial
  Synthetic oligonucleotide
gccatatgacgaaaatattgctgaaaaaatccaaacatgtggtagggaattattggataa

SEQ ID NO: 116469 - DNA, 60 bp, Artificial
  Synthetic oligonucleotide
caaaatgtttcaagcattgtcgccacagtggacgtgctcgcatctgcggcgtaattgcct

SEQ ID NO: 116470 - DNA, 60 bp, Artificial
  Synthetic oligonucleotide
gcggcgtaattgcctgtttgatggagtgtgtgcgaagcagcatttcgaagaagtgatgaa

SEQ ID NO: 116471 - DNA, 60 bp, Artificial
  Synthetic oligonucleotide
ggagaagtgagcgtgtgggtatacgcatactactcggatggatcagtgctcgtaatcaac

SEQ ID NO: 116472 - DNA, 60 bp, Artificial
  Synthetic oligonucleotide
tccatcgacccaaagctatactgtgattataatattgtgctaattaaattcgcttctggt

SEQ ID NO: 116473 - DNA, 60 bp, Artificial
  Synthetic oligonucleotide
gacccaaagctatactgtgattataatattgtgctaattaaattcgcttctggtgaggag

SEQ ID NO: 116474 - DNA, 60 bp, Artificial
  Synthetic oligonucleotide
tatactgtgattataatattgtgctaattaaattcgcttctggtgaggagttggacatat

SEQ ID NO: 116475 - DNA, 60 bp, Artificial
  Synthetic oligonucleotide
cggcaagggcggttgaaggcggctataaactgaagaaagatataaacgcactgagtggaa

SEQ ID NO: 116476 - DNA, 60 bp, Artificial
  Synthetic oligonucleotide
ggcccgaaacatttccaaagacgtgcaataatgggtgcgattaaggtaggtgtaagctta

SEQ ID NO: 116477 - DNA, 58 bp, Artificial
  Synthetic oligonucleotide
gcgatcaaagataagactggtgcgacgacactaatggactacatcacacaaccagtta

SEQ ID NO: 116478 - DNA, 60 bp, Artificial
  Synthetic oligonucleotide
caatacattcaaaaattacgattcacgcgcgctgtttataacactttacctctagtgccc

SEQ ID NO: 116479 - DNA, 60 bp, Artificial
  Synthetic oligonucleotide
ccaacgccgacattgaacgctactagttcaaaatatgagacgcaagacgtgattatgcct

SEQ ID NO: 116480 - DNA, 60 bp, Artificial
  Synthetic oligonucleotide
cgccgaccatggaaactttacagagacccgacggtggattcacctcaagacatatcgaaa

SEQ ID NO: 116481 - DNA, 60 bp, Artificial
  Synthetic oligonucleotide
agaatttttcgccgaccatggaaactttacagagacccgacggtggattcacctcaagac

SEQ ID NO: 116482 - DNA, 60 bp, Artificial
  Synthetic oligonucleotide
acagcacaccaacagtttgctgggcttcaagagttgcagaaggaaggcacttcatttagg

SEQ ID NO: 116483 - DNA, 60 bp, Artificial
  Synthetic oligonucleotide
cgcaagcactatttagcgtaggagaatatcatgttacagcacaccaacagtttgctgggc

SEQ ID NO: 116484 - DNA, 60 bp, Artificial
  Synthetic oligonucleotide
cgcaagcactatttagcgtaggagaatatcatgttaccgcacaccaacagtttgctgggc

SEQ ID NO: 116485 - DNA, 60 bp, Artificial
  Synthetic oligonucleotide
ccttctcgcaagcactatttagcgtaggagaatatcatgttaccgcacaccaacagtttg

SEQ ID NO: 116486 - DNA, 60 bp, Artificial
  Synthetic oligonucleotide
gtttgctgggcttcaagagttgcagaaggaaggcacttcatttaggttgtcgacggatgg

SEQ ID NO: 116487 - DNA, 60 bp, Artificial
  Synthetic oligonucleotide
caacagtttgctgggcttcaagagttgcagaaggaaggcacttcatttaggttgtcgacg

SEQ ID NO: 116488 - DNA, 60 bp, Artificial
  Synthetic oligonucleotide
gctactagctcaaaatatgagacgcaagacgtgattatgcctttcgctgaaatgtacgca

SEQ ID NO: 116489 - DNA, 53 bp, Artificial
  Synthetic oligonucleotide
agagcctgtggtccccttggttagggatttggcaaggcggaaaagttccagct

SEQ ID NO: 116490 - DNA, 60 bp, Artificial
  Synthetic oligonucleotide
cgacggatggatggttgtacccaaatgaacgtccaggacaggtatactattcgcaagctg

SEQ ID NO: 116491 - DNA, 60 bp, Artificial
  Synthetic oligonucleotide
gttgtcgacggatggatggttgtatccaaatgaacgtccaggacaggtatactattcgca

SEQ ID NO: 116492 - DNA, 60 bp, Artificial
  Synthetic oligonucleotide
ttcatttaggttgtcgacggatggatggttgtacccaaatgaacgtccaggacaggtata

SEQ ID NO: 116493 - DNA, 60 bp, Artificial
  Synthetic oligonucleotide
gctgggcttcaagagttgcagaaggaaggcacttcatttaggttgtcgacggatggatgg

SEQ ID NO: 116494 - DNA, 60 bp, Artificial
  Synthetic oligonucleotide
acacttaggtactacggagaaaacagcatgcttacttcacgtagacacgattcgcccgcc

SEQ ID NO: 116495 - DNA, 60 bp, Artificial
  Synthetic oligonucleotide
cgggtgacgctgaagtattcgatcttcgtatcttagaaattttgaatcaaaagagcggat

SEQ ID NO: 116496 - DNA, 60 bp, Artificial
  Synthetic oligonucleotide
gacaggtatactattcgcaagctgatgcagcacgattcgcaaaattcgcagcgcctttga

SEQ ID NO: 116497 - DNA, 60 bp, Artificial
  Synthetic oligonucleotide
cgacggatggatggttgtatccaaatgaacgtccaggacaggtatactattcgcaagctg

SEQ ID NO: 116498 - DNA, 60 bp, Artificial
  Synthetic oligonucleotide
cgggtgacgctgaagtattcgatcttcgtatcttagagattttgaatcaaaagagcggat

SEQ ID NO: 116499 - DNA, 60 bp, Artificial
  Synthetic oligonucleotide
aagagcggattgttcagtttgaatcaggatgtatcacttttcccttggatagatataatg

SEQ ID NO: 116500 - DNA, 60 bp, Artificial
  Synthetic oligonucleotide
aagagcggattgttcagtttaaatcaggatgtatcacttttcccttggatagatataatg

SEQ ID NO: 116501 - DNA, 60 bp, Artificial
  Synthetic oligonucleotide
gattatgcctttcgctgaaatgtacgcaacgtacgccaatctgtcacatgatataatggg

SEQ ID NO: 116502 - DNA, 60 bp, Artificial
  Synthetic oligonucleotide
tatgagacgcaagacgtgattatgcctttcgctgaaatgtacgcaacgtacgccaatctg

SEQ ID NO: 116503 - DNA, 60 bp, Artificial
  Synthetic oligonucleotide
gttgaggtgacatatacacttaggtactacggagaaaacagcatgcttacttcacgtaga

SEQ ID NO: 116504 - DNA, 60 bp, Artificial
  Synthetic oligonucleotide
ggttaaagcgatcaaagataagactggtgcgacgacactaatggactacatcacacaacc

SEQ ID NO: 116505 - DNA, 60 bp, Artificial
  Synthetic oligonucleotide
caatacattcaaaaattacgattcacgcgcgctgttaataacactttacctctagtgccc

SEQ ID NO: 116506 - DNA, 60 bp, Artificial
  Synthetic oligonucleotide
acacttaggtactacggagaaaacagcatgcttacttcacgtagacacgattcgcctgcc

SEQ ID NO: 116507 - DNA, 60 bp, Artificial
  Synthetic oligonucleotide
gccgacattgaacgctactagttcaaaatatgagacgcaagacgtgattatgcctttcgc

SEQ ID NO: 116508 - DNA, 60 bp, Artificial
  Synthetic oligonucleotide
cttatacgatcaggctcatgtgaaagatacctctgtccaagagtaatgttgtatgcctcg

SEQ ID NO: 116509 - DNA, 60 bp, Artificial
  Synthetic oligonucleotide
cttatacgatcaggctcatgtgaaagatacctctgtccaagagtaatgttgtatgcttcg

SEQ ID NO: 116510 - DNA, 60 bp, Artificial
  Synthetic oligonucleotide
cgccaatctgtcacatgatataatgggatatgaaggacgtgaaatatcaagagcacatgc

SEQ ID NO: 116511 - DNA, 60 bp, Artificial
  Synthetic oligonucleotide
atataatgggatatgaaggacgtgaaatatcaagagcacatgcttcacaatatcttaatt

SEQ ID NO: 116512 - DNA, 60 bp, Artificial
  Synthetic oligonucleotide
cgctgaaatgtacgcaacgtacgccaatctgtcacatgatataatgggatatgaaggacg

SEQ ID NO: 116513 - DNA, 60 bp, Artificial
  Synthetic oligonucleotide
aatgtacgcaacgtacgccaatctgtcacatgatataatgggatatgaaggacgtgaaat

SEQ ID NO: 116514 - DNA, 60 bp, Artificial
  Synthetic oligonucleotide
gagtagcaatgttgaatttctacgcaaaaatgtcgacgtgaaaatgcgcgacttaaactt

SEQ ID NO: 116515 - DNA, 60 bp, Artificial
  Synthetic oligonucleotide
acttaaacttatacgatcaggctcatgtgaaagatacctctgtccaagagtaatgttgta

SEQ ID NO: 116516 - DNA, 52 bp, Artificial
  Synthetic oligonucleotide
gacgtgaaatatcaagagcacatgcttcacaatatctcaattattataaaag

SEQ ID NO: 116517 - DNA, 60 bp, Artificial
  Synthetic oligonucleotide
gagtagtaatgttgaatttctacgaaaaaatgtcgacgtgaaaatgcgcgacttaaactt

SEQ ID NO: 116518 - DNA, 60 bp, Artificial
  Synthetic oligonucleotide
gcggattgttcagtttgaatcaggatgtatcacttttcccttggatagatataatgcttg

SEQ ID NO: 116519 - DNA, 60 bp, Artificial
  Synthetic oligonucleotide
gcggattgttcagtttaaatcaggatgtatcacttttcccttggatagatataatgcttg

SEQ ID NO: 116520 - DNA, 60 bp, Artificial
  Synthetic oligonucleotide
gttgggtgatttgacacagatagtaactgagtgcttgtgggttgcttctgtagcaataac

SEQ ID NO: 116521 - DNA, 60 bp, Artificial
  Synthetic oligonucleotide
acagatagtaactgagtgcttgtgggttgcttctgtagcaataactgggcggacatgccg

SEQ ID NO: 116522 - DNA, 60 bp, Artificial
  Synthetic oligonucleotide
acagatagtaactgagtgcttgtgggttgcttctatagcaataactggacggacatgccg

SEQ ID NO: 116523 - DNA, 60 bp, Artificial
  Synthetic oligonucleotide
tagcaataactgggcggacatgccgtgaaatacttacgtcacaagttggagttgaggtga

SEQ ID NO: 116524 - DNA, 60 bp, Artificial
  Synthetic oligonucleotide
tagcaataactggacggacatgccgtgaaatacttacgtcacaagttggagttgaggtga

SEQ ID NO: 116525 - DNA, 60 bp, Artificial
  Synthetic oligonucleotide
ctggacggacatgccgtgaaatacttacgtcacaagttggagttgaggtgacatatacac

SEQ ID NO: 116526 - DNA, 60 bp, Artificial
  Synthetic oligonucleotide
ctgggcggacatgccgtgaaatacttacgtcacaagttggagttgaggtgacatatacac

SEQ ID NO: 116527 - DNA, 60 bp, Artificial
  Synthetic oligonucleotide
ggctatcaactaactaccatcacatcatgccgcagcatgtcaaggatcgtggtgtcatca

SEQ ID NO: 116528 - DNA, 60 bp, Artificial
  Synthetic oligonucleotide
acaaacatacctcagcgagactatttgtggggtgatgacgcctacgcaatgctaaccata

SEQ ID NO: 116529 - DNA, 60 bp, Artificial
  Synthetic oligonucleotide
cggacagcgccttaacaacttctggtcctttgcgagcttttctatgttactcaaccgccg

SEQ ID NO: 116530 - DNA, 60 bp, Artificial
  Synthetic oligonucleotide
atgcgtaacatgcttgctggctggaacactaactattttgctttcaatgtagacgctgag

SEQ ID NO: 116531 - DNA, 60 bp, Artificial
  Synthetic oligonucleotide
ggtccacgcgcacgcaacgttcttatagacgcacttgaagcaattcctatcgataatggt

SEQ ID NO: 116532 - DNA, 60 bp, Artificial
  Synthetic oligonucleotide
gtttcttaactgggctttaaccgcagatgtggatctgggtgattactccaaactagctta

SEQ ID NO: 116533 - DNA, 60 bp, Artificial
  Synthetic oligonucleotide
cggtatcaaacctcataatgacaagggattagcggagtggtcaaaggaagcacagttacg

SEQ ID NO: 116534 - DNA, 59 bp, Artificial
  Synthetic oligonucleotide
tgctgctgatgcgcccatacctgaagagaccgagagtttacttttaaatgatacaatgc

SEQ ID NO: 116535 - DNA, 60 bp, Artificial
  Synthetic oligonucleotide
tgtggcgcaggacgcagaaggaaatcttccaactgctggtgacctaatgaaacgtgcaca

SEQ ID NO: 116536 - DNA, 60 bp, Artificial
  Synthetic oligonucleotide
tgataggaatatcgttgaactgatcagagagcgcgaggttattgctacagacgctggtca

SEQ ID NO: 116537 - DNA, 60 bp, Artificial
  Synthetic oligonucleotide
ggaagcacagttacgtaatactcccgagggagctgatacagaatcactgctgcgtagtcg

SEQ ID NO: 116538 - DNA, 60 bp, Artificial
  Synthetic oligonucleotide
ggatggatgattggggcaagccaatgaagtacaagtatgtcactgaaagtgatgtcggta

SEQ ID NO: 116539 - DNA, 60 bp, Artificial
  Synthetic oligonucleotide
taacgctgggtcggctgagggatacgttcgatcatgtttggcgaccttgcccgttgatgg

SEQ ID NO: 116540 - DNA, 60 bp, Artificial
  Synthetic oligonucleotide
cgaccttgcccgttgatggttatatgtcacacatgaaacgcatagcgctcgaaggaatcg

SEQ ID NO: 116541 - DNA, 60 bp, Artificial
  Synthetic oligonucleotide
gaagtgtctcagtatgagcgcgtacattgggatgctataatgcggaccattctacctcca

SEQ ID NO: 116542 - DNA, 60 bp, Artificial
  Synthetic oligonucleotide
ccggtggacatgttaacatgattttgacaggatttccagcgccaaattccaagctatggc

SEQ ID NO: 116543 - DNA, 60 bp, Artificial
  Synthetic oligonucleotide
atcactgctgcgtagtcgaattccttttaccgaagcggattccggtccaccgtatataac

SEQ ID NO: 116544 - DNA, 60 bp, Artificial
  Synthetic oligonucleotide
tccaaataaacagcaagatgtcgaaatcgctaacacacaagagacgcaatggatgcatgc

SEQ ID NO: 116545 - DNA, 60 bp, Artificial
  Synthetic oligonucleotide
gcagtaacgcgcccactcctatgcatttgcgacttgggaataggtatgagacaatcgagc

SEQ ID NO: 116546 - DNA, 60 bp, Artificial
  Synthetic oligonucleotide
ataacgtacataccttgcaccaatcgcgatgagtaggaaattgggcagtaacgcgcccac

SEQ ID NO: 116547 - DNA, 60 bp, Artificial
  Synthetic oligonucleotide
cgtgcacacagaaagttacgtgagcaaactcgtcatgatctttacaagaagaacaaacat

SEQ ID NO: 116548 - DNA, 60 bp, Artificial
  Synthetic oligonucleotide
ggatgcatgcatgcaaactcgctcttgatctggctacagaagagcagttcgagcgcgcgg

SEQ ID NO: 116549 - DNA, 60 bp, Artificial
  Synthetic oligonucleotide
ccaaccgaaagttcgtacttccctgtaattattagatcgtcaaaagaagcagagttccca

SEQ ID NO: 116550 - DNA, 60 bp, Artificial
  Synthetic oligonucleotide
accgtaaagttcgaagataactacgtactgcaactcatgtgcgcgtcttacgacattcca

SEQ ID NO: 116551 - DNA, 60 bp, Artificial
  Synthetic oligonucleotide
cacctgaaggtgcggttcaagagttaaaagctttgtcaaattcacgatctggaggtgctg

SEQ ID NO: 116552 - DNA, 60 bp, Artificial
  Synthetic oligonucleotide
ctcgacaattgcaatggctgcacatctaattctcaatccggtgacacttaaacatagatc

SEQ ID NO: 116553 - DNA, 60 bp, Artificial
  Synthetic oligonucleotide
gatagagagacagacgccccttttgttatgtcgtctaatcgtaagaactcgacaattgca

SEQ ID NO: 116554 - DNA, 60 bp, Artificial
  Synthetic oligonucleotide
aggatcgtggtgtcatcaaacgtcctgcagtggatcagcccgaacacataggggccagac

SEQ ID NO: 116555 - DNA, 60 bp, Artificial
  Synthetic oligonucleotide
cgttcagtgcctgcacgtattcttcgtttgatctataacatgccattaccaatgcagtca

SEQ ID NO: 116556 - DNA, 60 bp, Artificial
  Synthetic oligonucleotide
ataatgaacgatatcaacttgccctaaataagggcgtcgtagtgcatgacagccgaaccc

SEQ ID NO: 116557 - DNA, 60 bp, Artificial
  Synthetic oligonucleotide
ggtggtggaattcagatgaccaacatgttaatcttgtctactatcatacaggctagccgt

SEQ ID NO: 116558 - DNA, 60 bp, Artificial
  Synthetic oligonucleotide
gcgtcgtaccgctattgaccatgagaatccagctagatattcgatgggtgacagtggatc

SEQ ID NO: 116559 - DNA, 60 bp, Artificial
  Synthetic oligonucleotide
ctacagacgctggtcaagtgatggacacgcttaatggttcatggtcaggacgtggcgttc

SEQ ID NO: 116560 - DNA, 60 bp, Artificial
  Synthetic oligonucleotide
agtggtcagctgataatgacgcaagtgctaaggttggtgttacgtgtagtgaagcgtggt

SEQ ID NO: 116561 - DNA, 60 bp, Artificial
  Synthetic oligonucleotide
ttgggtacacagcctggcaaaattggtaaacagatatcaaaagtatcgtccccagtcgca

SEQ ID NO: 116562 - DNA, 60 bp, Artificial
  Synthetic oligonucleotide
ggcgcacgtgatgcacgttggaccgaagcatgcagacatctacctttctcactagcgtct

SEQ ID NO: 116563 - DNA, 60 bp, Artificial
  Synthetic oligonucleotide
gcgcggtatctattgtgaaggaatggtcgattgaggatcgtaaacatgacaatccaaccg

SEQ ID NO: 116564 - DNA, 60 bp, Artificial
  Synthetic oligonucleotide
cccacgtcgcgttcagccttcagaacatgtatggtgtgatgaaactgattgtgttaccgt

SEQ ID NO: 116565 - DNA, 60 bp, Artificial
  Synthetic oligonucleotide
cccagtcgcacgtgcactcggtgccacttcaaaagaagtgatggtcccacgtcgcgttca

SEQ ID NO: 116566 - DNA, 60 bp, Artificial
  Synthetic oligonucleotide
catgtgcgcgtcttacgacattccaacaaactgggaatcactcgaaaataagatgtttga

SEQ ID NO: 116567 - DNA, 60 bp, Artificial
  Synthetic oligonucleotide
aaaggccgcgtgttactcgaatcatggatcaagggtaatcctccagcaatcccatcttgg

SEQ ID NO: 116568 - DNA, 60 bp, Artificial
  Synthetic oligonucleotide
cactagcgtctacttatgtaacgtggctcatgttattaaccgaacaggcagctgggaatg

SEQ ID NO: 116569 - DNA, 60 bp, Artificial
  Synthetic oligonucleotide
aaaagaacactgttacctcagctggtattcaggatatgatcatagcgcgtacaaacatac

SEQ ID NO: 116570 - DNA, 60 bp, Artificial
  Synthetic oligonucleotide
tgtagcaacgagatacgtattcgcctgccaattccagaattatcctacgatgtctgaatg

SEQ ID NO: 116571 - DNA, 60 bp, Artificial
  Synthetic oligonucleotide
ccgttctggtcacagccaaagtgtatgaaaatgcttctggcatacacaggcgttcatgcc

SEQ ID NO: 116572 - DNA, 56 bp, Artificial
  Synthetic oligonucleotide
actacgaagcgcagtacatgtgcagtttgtctcgttattggctgatgaattcaatg

SEQ ID NO: 116573 - DNA, 60 bp, Artificial
  Synthetic oligonucleotide
tctgtgaagtgtgctgaattagatcgtataaccgaatttctgcaaatggtgatgtctgac

SEQ ID NO: 116574 - DNA, 60 bp, Artificial
  Synthetic oligonucleotide
cgccacatcgttttagagccgatttgcatgctgaagacataatggggctcctaaagaaag

SEQ ID NO: 116575 - DNA, 60 bp, Artificial
  Synthetic oligonucleotide
gcgttcatgccagacctaacgtacttactataaaggatctgacggcaaagttttcgccac

SEQ ID NO: 116576 - DNA, 60 bp, Artificial
  Synthetic oligonucleotide
ggggctcctaaagaaagtccctacacacatgcaggcgcaagctctgtccttcgttggttt

SEQ ID NO: 116577 - DNA, 60 bp, Artificial
  Synthetic oligonucleotide
tgctgatgaaaggtgaggacgcagccctaactgtcagaccaggccgcatcgcataaatcc

SEQ ID NO: 116578 - DNA, 60 bp, Artificial
  Synthetic oligonucleotide
attgggtattgatgaaaggtgaggacgcagccctaactgtcagaccaggccgcatcgcat

SEQ ID NO: 116579 - DNA, 60 bp, Artificial
  Synthetic oligonucleotide
cagatcttgaccaagtggcagtctatccgtaccggttcagacaccattaacccagcctca

SEQ ID NO: 116580 - DNA, 60 bp, Artificial
  Synthetic oligonucleotide
aatccaatacagatcttgaccaagtggcagtctatccgtaccggttcagacactatcaac

SEQ ID NO: 116581 - DNA, 60 bp, Artificial
  Synthetic oligonucleotide
gtaatgaatccaatacagatcttgaccaagtggcagtctatccgtaccggttcagacacc

SEQ ID NO: 116582 - DNA, 60 bp, Artificial
  Synthetic oligonucleotide
cggcgctaagctcttccagcagatgtctttgttctctacgctcgacagtgagttgctctc

SEQ ID NO: 116583 - DNA, 60 bp, Artificial
  Synthetic oligonucleotide
cccagcctcattctcagtcgtcgttcgcgctggtaattgggtattgatgaaaggtgagga

SEQ ID NO: 116584 - DNA, 60 bp, Artificial
  Synthetic oligonucleotide
cactatcaacccagcctcattctcagtcgtcgttcgcgctggtaactgggtgctgatgaa

SEQ ID NO: 116585 - DNA, 60 bp, Artificial
  Synthetic oligonucleotide
ttcagacaccattaacccagcctcattctcagtcgtcgttcgcgctggtaattgggtatt

SEQ ID NO: 116586 - DNA, 60 bp, Artificial
  Synthetic oligonucleotide
cttgaccaagtggcagtctatccgtaccggttcagacactatcaacccagcctcattctc

SEQ ID NO: 116587 - DNA, 60 bp, Artificial
  Synthetic oligonucleotide
gcttgcattcttaacattccagttgaagttggagttggacgcactggccgatcaacgctc

SEQ ID NO: 116588 - DNA, 60 bp, Artificial
  Synthetic oligonucleotide
aacttcctttggtgctaagctcttccagcagatgtctttgttctctacgctcgacagtga

SEQ ID NO: 116589 - DNA, 60 bp, Artificial
  Synthetic oligonucleotide
ggaaactcatgcttgcattcttaacattccagttgaagttggagttggacgcactggccg

SEQ ID NO: 116590 - DNA, 60 bp, Artificial
  Synthetic oligonucleotide
catgcttgcattcttgacattccagttgaagttggagttggacgcactggctgatcaacg

SEQ ID NO: 116591 - DNA, 60 bp, Artificial
  Synthetic oligonucleotide
gtgtctcgagaaacgctgcgggtactgggtctcagaccatactacgcgggtttgctctct

SEQ ID NO: 116592 - DNA, 60 bp, Artificial
  Synthetic oligonucleotide
gtgtctcgagaaacgctgcgggtactgggtcccagaccatactacgtgggtttgctctct

SEQ ID NO: 116593 - DNA, 60 bp, Artificial
  Synthetic oligonucleotide
ggtgtggagtccagatctgatcaacgcatgactaaagatgttgctgaagactcgtctaga

SEQ ID NO: 116594 - DNA, 60 bp, Artificial
  Synthetic oligonucleotide
gagtccagatctgatcaacgcatgactaaagatgttgctgaagactcatccagatcactg

SEQ ID NO: 116595 - DNA, 60 bp, Artificial
  Synthetic oligonucleotide
gcttaatttttcctgttgagacgtgatcatggagcgttctatgcgtgtcggtgtctcgag

SEQ ID NO: 116596 - DNA, 60 bp, Artificial
  Synthetic oligonucleotide
ctgttgagacgtgatcatggagcgttctatgcgtgtcggtgtctcgagaaacgctgcggg

SEQ ID NO: 116597 - DNA, 60 bp, Artificial
  Synthetic oligonucleotide
cttcggcgctaagctcttccagcagatgtctttgttctctacgctcgacagtgagttgct

SEQ ID NO: 116598 - DNA, 60 bp, Artificial
  Synthetic oligonucleotide
ggtgctaagctcttccagcagatgtctttgttctctacgctcgacagtgagttgctctca

SEQ ID NO: 116599 - DNA, 60 bp, Artificial
  Synthetic oligonucleotide
gctgatgaaaggtgaggacgcagccctaactgtcagaccaggccgcatcgcataaatcca

SEQ ID NO: 116600 - DNA, 60 bp, Artificial
  Synthetic oligonucleotide
aaggtgaggacgcagccctaactgtcagaccaggccgcatcgcataaatccatgatcatg

SEQ ID NO: 116601 - DNA, 60 bp, Artificial
  Synthetic oligonucleotide
caacgcatgactaaagatgttgctgaagactcatccagatcactgaatgagctgcctagt

SEQ ID NO: 116602 - DNA, 60 bp, Artificial
  Synthetic oligonucleotide
tgccctggaaactcatgcttgcattcttgacattccagttgaagttggagttggacgcac

SEQ ID NO: 116603 - DNA, 60 bp, Artificial
  Synthetic oligonucleotide
tttgctctcttacggtgtgtactatcagctgattcacgtcaagctactcgcgctgttcaa

SEQ ID NO: 116604 - DNA, 60 bp, Artificial
  Synthetic oligonucleotide
tttgctctcttacgttgtgtactatcagctgattcacgtcaagctactcgcgctgttcaa

SEQ ID NO: 116605 - DNA, 60 bp, Artificial
  Synthetic oligonucleotide
tgtgtactatcagctgattcacgtcaagctactcgcgctgttcaatcccactttccaggc

SEQ ID NO: 116606 - DNA, 60 bp, Artificial
  Synthetic oligonucleotide
gtgtgtactatcagctgattcacgtcaagctactcgcgctgttcaatcccactttccagg

SEQ ID NO: 116607 - DNA, 60 bp, Artificial
  Synthetic oligonucleotide
cgaggtaatgattttgggttggagggtcaaattgatctcctcgctgctgagcttgttccc

SEQ ID NO: 116608 - DNA, 60 bp, Artificial
  Synthetic oligonucleotide
gccaatgcgaggtaacgatttcgggctagagggtcaaattgatctcctcgctgctgagct

SEQ ID NO: 116609 - DNA, 60 bp, Artificial
  Synthetic oligonucleotide
ctcctcgctgctgagcttgttcccttcagtttcatgctgccattcctcgttaacgatgac

SEQ ID NO: 116610 - DNA, 60 bp, Artificial
  Synthetic oligonucleotide
attgatctcctcgctgctgagcttgttcccttcagtttcatgctgccgttcctcgttaac

SEQ ID NO: 116611 - DNA, 60 bp, Artificial
  Synthetic oligonucleotide
cgctgctgagcttgttcccttcagtttcatgctgccattcctcgttaacgatgacgcctc

SEQ ID NO: 116612 - DNA, 60 bp, Artificial
  Synthetic oligonucleotide
cctcgctgctgagcttgttcccttcagtttcatgctgccgttcctcgttaacgatgatgc

SEQ ID NO: 116613 - DNA, 60 bp, Artificial
  Synthetic oligonucleotide
gcctcttcccaaacgttgtcgcaatggaggtgtgcttgcccaacggtcatcagatcgtgg

SEQ ID NO: 116614 - DNA, 60 bp, Artificial
  Synthetic oligonucleotide
gcctcttcccaaacgttgtcgcaatggaggtgtgcttacccaatggtcatcaggtcgtgg

SEQ ID NO: 116615 - DNA, 60 bp, Artificial
  Synthetic oligonucleotide
gctatttttgcctcttcccaaacgttgtcgcaatggaggtgtgcttacccaatggtcatc

SEQ ID NO: 116616 - DNA, 60 bp, Artificial
  Synthetic oligonucleotide
gctatttttgcctcttcccaaacgttgtcgcaatggaggtgtgcttgcccaacggtcatc

SEQ ID NO: 116617 - DNA, 60 bp, Artificial
  Synthetic oligonucleotide
gggagatgaattgtcgagcgacagtggcccattactttcaatattcgctttacaagaaat

SEQ ID NO: 116618 - DNA, 60 bp, Artificial
  Synthetic oligonucleotide
aagggagatgaattgtcgagcgacagtggcccattactttcaatattcgctttacaagaa

SEQ ID NO: 116619 - DNA, 60 bp, Artificial
  Synthetic oligonucleotide
caaaatatggcacgacagcttgatattgccttagctgattttcttctctacatgtacaac

SEQ ID NO: 116620 - DNA, 60 bp, Artificial
  Synthetic oligonucleotide
ccaaatccgcgaattgcatcaataacgcttacccagagaataacaacgactggccctttt

SEQ ID NO: 116621 - DNA, 60 bp, Artificial
  Synthetic oligonucleotide
gcgcttgttcagaatccgtatatcgcatatacaatcggcttcagggatatattgaggcgg

SEQ ID NO: 116622 - DNA, 60 bp, Artificial
  Synthetic oligonucleotide
taggcgcttgttcagagtccgtatatcgcatatacaatcggcttcagggatatattgagg

SEQ ID NO: 116623 - DNA, 60 bp, Artificial
  Synthetic oligonucleotide
atggcacgacagcttgatattgccttagctgattttcttctttacatgtataacacaagg

SEQ ID NO: 116624 - DNA, 60 bp, Artificial
  Synthetic oligonucleotide
acaagtccatatttaaagggagatgaattgtcgagcgacagtggcccattactttcaata

SEQ ID NO: 116625 - DNA, 60 bp, Artificial
  Synthetic oligonucleotide
cgcatcatggatattacgcaagcgcttaaggtgggtaccaagctagctgctccgaccgtg

SEQ ID NO: 116626 - DNA, 60 bp, Artificial
  Synthetic oligonucleotide
cacgacagcttgatattgccttagctgattttcttctttacatgtataacacaaggatcc

SEQ ID NO: 116627 - DNA, 60 bp, Artificial
  Synthetic oligonucleotide
gacagcttgatattgccttagctgattttcttctctacatgtacaacacgaggatccagg

SEQ ID NO: 116628 - DNA, 60 bp, Artificial
  Synthetic oligonucleotide
tagatttccgaataggacgtgggcagtatgattgtaacgcttttcgcaccaatttccaaa

SEQ ID NO: 116629 - DNA, 60 bp, Artificial
  Synthetic oligonucleotide
tccgaataggacgtgggcagtatgattgtaacgcttttcgcaccaatttccaaactggtg

SEQ ID NO: 116630 - DNA, 60 bp, Artificial
  Synthetic oligonucleotide
ctggtgcgggatacaatggatggggattggtagatgttgaaaatagagaaccagcaccat

SEQ ID NO: 116631 - DNA, 60 bp, Artificial
  Synthetic oligonucleotide
aaatagagaaccagcaccatatgatcatgtacaacgctttatacgatattgtaacattga

SEQ ID NO: 116632 - DNA, 60 bp, Artificial
  Synthetic oligonucleotide
tcatggatgacgaaggttgggttaggttcggaggtgtattgagaaccgttcgagttaagt

SEQ ID NO: 116633 - DNA, 60 bp, Artificial
  Synthetic oligonucleotide
agaattgatgttaacggatcaggtgtacatgttccgcgatatgctacctgaaccaaggtt

SEQ ID NO: 116634 - DNA, 60 bp, Artificial
  Synthetic oligonucleotide
ttcttcgactcgcggccccctgaggagatactacaagcgttgccgttcgattatcagacg

SEQ ID NO: 116635 - DNA, 60 bp, Artificial
  Synthetic oligonucleotide
catggatgacgaaggttgggttaggttcggaggtgtattgagaaccgttcgagttaagtt

SEQ ID NO: 116636 - DNA, 60 bp, Artificial
  Synthetic oligonucleotide
cgaatcttccggattcgttggtactaattaatccaacctacgttatgaccaaggttttca

SEQ ID NO: 116637 - DNA, 60 bp, Artificial
  Synthetic oligonucleotide
tactcgaatcttccggattcgttggtactaattaatccaacctacgttatgaccaaggtt

SEQ ID NO: 116638 - DNA, 60 bp, Artificial
  Synthetic oligonucleotide
ggattcgttggtactaattaatccgacctacgttatgaccaaggttttcataaataagcg

SEQ ID NO: 116639 - DNA, 60 bp, Artificial
  Synthetic oligonucleotide
cttccggattcgttggtactaattaatccgacctacgttatgaccaaggttttcataaat

SEQ ID NO: 116640 - DNA, 60 bp, Artificial
  Synthetic oligonucleotide
ggaagatgcgcatcatggatattacgcaagcgcttaaggtgggtaccaagctagctgctc

SEQ ID NO: 116641 - DNA, 60 bp, Artificial
  Synthetic oligonucleotide
gaccaaggttttcataaataagcgaatagttgaaagagtacgggtgggacaagcattagc

SEQ ID NO: 116642 - DNA, 60 bp, Artificial
  Synthetic oligonucleotide
caaccaccgagatatgctccgagtgccccgatgccgtcatcaatgccaaccgttgccctt

SEQ ID NO: 116643 - DNA, 60 bp, Artificial
  Synthetic oligonucleotide
gatggtctgtgcgaagagcgaaagagggctaaatcagcagattgacatgattaagaagga

SEQ ID NO: 116644 - DNA, 60 bp, Artificial
  Synthetic oligonucleotide
tgtgaggctaaggcagatcaaacgtcatgttaatgaacagattctcccaaagttaaagag

SEQ ID NO: 116645 - DNA, 52 bp, Artificial
  Synthetic oligonucleotide
tacacatgacgttgttggtcgccgctgtcgtagcgttgttgacgtcggtatg

SEQ ID NO: 116646 - DNA, 60 bp, Artificial
  Synthetic oligonucleotide
cgacacacacctttccggcgagaattcgactctcatcgctaactcgatgcacaacatggc

SEQ ID NO: 116647 - DNA, 60 bp, Artificial
  Synthetic oligonucleotide
aaaacgagatgcaaatatacggagatatacccattaaagtatggtgttgtttcatcaacg

SEQ ID NO: 116648 - DNA, 60 bp, Artificial
  Synthetic oligonucleotide
gacacacacctttccggcgagaattcgactcttatcgctaattcgatgcacaatatggct

SEQ ID NO: 116649 - DNA, 60 bp, Artificial
  Synthetic oligonucleotide
atatcgactagggatatccttcagactcgtgatttacactcactatgtatgccaactcct

SEQ ID NO: 116650 - DNA, 60 bp, Artificial
  Synthetic oligonucleotide
cagaaccaggacatcagatcgatcccgtaatacaagcggtttctggaattttcggcaaac

SEQ ID NO: 116651 - DNA, 60 bp, Artificial
  Synthetic oligonucleotide
ttcggcaaactattgttttcatatggaccaagattattcaatattacacgtaccatggca

SEQ ID NO: 116652 - DNA, 60 bp, Artificial
  Synthetic oligonucleotide
gatttactttgcgctatgctacccgaatcaggttgttttagatataaggccagaaccagg

SEQ ID NO: 116653 - DNA, 60 bp, Artificial
  Synthetic oligonucleotide
cgctatgctacccgaatcaggttgttttagatataaggccagaaccaggacatcagatcg

SEQ ID NO: 116654 - DNA, 60 bp, Artificial
  Synthetic oligonucleotide
acaataacttcacggattacaacgaacacagctttcgcgcagttacagtcaatggtacca

SEQ ID NO: 116655 - DNA, 60 bp, Artificial
  Synthetic oligonucleotide
cacggattacaacgaacacagctttcgcgcagttacagtcaatggtaccaacggaagcag

SEQ ID NO: 116656 - DNA, 60 bp, Artificial
  Synthetic oligonucleotide
ccgacgggaatttacatatctcctcccgcaagaatcgcttcagtgacaataacttcacgg

SEQ ID NO: 116657 - DNA, 60 bp, Artificial
  Synthetic oligonucleotide
gtgcctaggagctcaatatcaaatttagtcttaaacgcggccttaggatttccgacggga

SEQ ID NO: 116658 - DNA, 61 bp, Artificial
  Synthetic oligonucleotide
cagaacaaagtcttaggatacgtattaatatacaatgtaacgcgagattatttaccagacc

SEQ ID NO: 116659 - DNA, 60 bp, Artificial
  Synthetic oligonucleotide
tgctggagagtgtatacgcatcacatttatcgatgatgaagcttgctactagaagattga

SEQ ID NO: 116660 - DNA, 60 bp, Artificial
  Synthetic oligonucleotide
tagtgtagatgagaagaaagggccaatgccacagataacagttagattacagaacaaagt

SEQ ID NO: 116661 - DNA, 60 bp, Artificial
  Synthetic oligonucleotide
tggaaggtagttttaaaagaaattccagaaccattgcgtgatattattgatctagtggga

SEQ ID NO: 116662 - DNA, 60 bp, Artificial
  Synthetic oligonucleotide
ttaataacgcactggacgtaaccttccgagtttttcagtcgtatcggagtaaagtcagac

SEQ ID NO: 116663 - DNA, 60 bp, Artificial
  Synthetic oligonucleotide
ttacaagcaggaactcagcttgcaagtttggcgtcgacggaggcgtagtggtcccacgga

SEQ ID NO: 116664 - DNA, 60 bp, Artificial
  Synthetic oligonucleotide
cgcgagattatttaccagaccaatatgttagctatttaccagcgaagaatttgacagagg

SEQ ID NO: 116665 - DNA, 60 bp, Artificial
  Synthetic oligonucleotide
ccgtgatttgctatcagctttttcaatgcctgatgaccaatttcgagaaatggcggatag

SEQ ID NO: 116666 - DNA, 60 bp, Artificial
  Synthetic oligonucleotide
ggaactcagcttgcaagtttggcgtcgacggaggcgtagtggtcccacggatagtctgga

SEQ ID NO: 116667 - DNA, 60 bp, Artificial
  Synthetic oligonucleotide
gtcccacggatagtctggaattcagccccccaagcgagtccttcgggacgtggtgtatcg

SEQ ID NO: 116668 - DNA, 60 bp, Artificial
  Synthetic oligonucleotide
aaagaaattccagaaccattgcgtgatattattgatctagtgggacagaagcactttatg

SEQ ID NO: 116669 - DNA, 60 bp, Artificial
  Synthetic oligonucleotide
tctagtgggacagaagcactttatgagtatgggtgatattgctatttgggtgaattcgga

SEQ ID NO: 116670 - DNA, 60 bp, Artificial
  Synthetic oligonucleotide
cagggagaggtttcacgagttccagagttgattcagttggtgtgagagttacgccatacg

SEQ ID NO: 116671 - DNA, 60 bp, Artificial
  Synthetic oligonucleotide
agcagcgttcagggaatcattaacgtggctaaaaacatattcacattacaagggtattat

SEQ ID NO: 116672 - DNA, 60 bp, Artificial
  Synthetic oligonucleotide
agggtattatgtacgaccagagctatttaaccgatatattttcaagcgagagcatttatt

SEQ ID NO: 116673 - DNA, 60 bp, Artificial
  Synthetic oligonucleotide
acggtgaagaggttgtgacgtctgattgtttagggatagatactgcgaacatgtttactt

SEQ ID NO: 116674 - DNA, 60 bp, Artificial
  Synthetic oligonucleotide
tggatatatataacggagcttgtgacgatgcgttatataaagttcattcaacactgatga

SEQ ID NO: 116675 - DNA, 60 bp, Artificial
  Synthetic oligonucleotide
tctagtaatgaatcaaacgaatgatcggccgctaatggatatatataacggagcttgtga

SEQ ID NO: 116676 - DNA, 60 bp, Artificial
  Synthetic oligonucleotide
gtctatcatatacgttaccaacgaatccaaaagtgatatgggaagtgcctaggagctcaa

SEQ ID NO: 116677 - DNA, 60 bp, Artificial
  Synthetic oligonucleotide
tacacattctatctgcatgatttgctaatggaggcgcttgttagaacgggtcatgtcaca

SEQ ID NO: 116678 - DNA, 60 bp, Artificial
  Synthetic oligonucleotide
cgccatacgatcatgtatcacgacgtatttgttatttaggctatgactccgaagaggtgt

SEQ ID NO: 116679 - DNA, 60 bp, Artificial
  Synthetic oligonucleotide
tgactgatgaccggcgtacgatcatacgagggcagactggagagccactagattttgttg

SEQ ID NO: 116680 - DNA, 60 bp, Artificial
  Synthetic oligonucleotide
gattttgttgtctcacaaggaggacgtcagtttgattgtaatcaattggcgaatgacccg

SEQ ID NO: 116681 - DNA, 60 bp, Artificial
  Synthetic oligonucleotide
ccggcgtacgatcatacgagggcagactggagagccactagattttgttgtctcacaagg

SEQ ID NO: 116682 - DNA, 60 bp, Artificial
  Synthetic oligonucleotide
gaatgacccgaatacagggagaggtttcacgagttccagagttgattcagttggtgtgag

SEQ ID NO: 116683 - DNA, 60 bp, Artificial
  Synthetic oligonucleotide
caaggaggacgtcagtttgattgtaatcaattggcgaatgacccgaatacagggagaggt

SEQ ID NO: 116684 - DNA, 60 bp, Artificial
  Synthetic oligonucleotide
tggtcctttactttctgtttttgcgttacaggaaattctcgataaaataagagagtctca

SEQ ID NO: 116685 - DNA, 60 bp, Artificial
  Synthetic oligonucleotide
gaagatagtgtaaacccttttctatcaggtacggagttgaaaaatgatgatggtccttta

SEQ ID NO: 116686 - DNA, 60 bp, Artificial
  Synthetic oligonucleotide
ctggtaatacgcttttttgaaagtatgccgcctcaagaagtgagagaagctctacctttt

SEQ ID NO: 116687 - DNA, 60 bp, Artificial
  Synthetic oligonucleotide
gcttgacgcgggagactacatccgtattggatgttcattacgccctctggtaatacgctt

SEQ ID NO: 116688 - DNA, 60 bp, Artificial
  Synthetic oligonucleotide
gctcgtaaaagccggggaaggaaaacttaaatctgcgatacgccaaatgcttgacgcggg

SEQ ID NO: 116689 - DNA, 60 bp, Artificial
  Synthetic oligonucleotide
catgtcacagaaaagaattacttagaggcgattaaacagcataacgtagttaggtttgca

SEQ ID NO: 116690 - DNA, 60 bp, Artificial
  Synthetic oligonucleotide
tgaattcggatcaaaagcaagattcacttttatatcattgtgatgaggttgcatggcagt

SEQ ID NO: 116691 - DNA, 60 bp, Artificial
  Synthetic oligonucleotide
gaatttgacagaggtaatcgttaacccgagagtttttgaacgtgtcgaagttaataacgc

SEQ ID NO: 116692 - DNA, 60 bp, Artificial
  Synthetic oligonucleotide
tttgaaagtatgccgcctcaagaagtgagagaagctctaccttttgtttatagtgtagat

SEQ ID NO: 116693 - DNA, 57 bp, Artificial
  Synthetic oligonucleotide
aattgagtttttgaatgtaatactagaacgtgtgaaatttattcgtgatgaaggttc

SEQ ID NO: 116694 - DNA, 60 bp, Artificial
  Synthetic oligonucleotide
gtacgcaatatttaaacggtgaagaggttgtgacgtctgattgtttagggatagatactg

SEQ ID NO: 116695 - DNA, 60 bp, Artificial
  Synthetic oligonucleotide
gtggttataagatcttgaagaagcctcctgtttcatatagatatataagtgcacaatccg

SEQ ID NO: 116696 - DNA, 57 bp, Artificial
  Synthetic oligonucleotide
ttttgcgttacaggaaattctcgataaaataagagagtctcagttgcgtggtcagat

SEQ ID NO: 116697 - DNA, 60 bp, Artificial
  Synthetic oligonucleotide
gagagtctcagttgcgtggtcagattgcaggacaagagattgaaaccgcggctccagata

SEQ ID NO: 116698 - DNA, 60 bp, Artificial
  Synthetic oligonucleotide
tcaaagaacgtgtgtctgtcataggcgagaatgcgaaatgtgaggatccaattgagtttt

SEQ ID NO: 116699 - DNA, 60 bp, Artificial
  Synthetic oligonucleotide
gtgcacaatccgaatctcgacttttccgtgttaataatttcaaagaacgtgtgtctgtca

SEQ ID NO: 116700 - DNA, 60 bp, Artificial
  Synthetic oligonucleotide
gcaactgctcgaggattaccgcaaaagtgggatgatggatgaggccgtgaagcaatccgc

SEQ ID NO: 116701 - DNA, 60 bp, Artificial
  Synthetic oligonucleotide
gcaactgcttgaggattaccgcaaaagtgggatgatggatgaggccgtgaagcaatccgc

SEQ ID NO: 116702 - DNA, 60 bp, Artificial
  Synthetic oligonucleotide
ggggtgcaactgcttgaggattaccgcaaaagtgggatgatggatgaggccgtgaagcaa

SEQ ID NO: 116703 - DNA, 60 bp, Artificial
  Synthetic oligonucleotide
cgaagttgctgtcaacgtgattgttgagttctcttttgacattttgttctttctttgtgg

SEQ ID NO: 116704 - DNA, 60 bp, Artificial
  Synthetic oligonucleotide
ttttgttctttctttgtggactactcggatttgagttaagcccaaccgctcgacgcctta

SEQ ID NO: 116705 - DNA, 60 bp, Artificial
  Synthetic oligonucleotide
cttccttagattttatgcgtgacgggcagggtagtcgctgaggacctcgccggcttacgg

SEQ ID NO: 116706 - DNA, 60 bp, Artificial
  Synthetic oligonucleotide
tattggtcttccttagattttatgcgtgacgggcagggtagtcgctgaggacctcgccgg

SEQ ID NO: 116707 - DNA, 60 bp, Artificial
  Synthetic oligonucleotide
ttcgacagtacgcaatgtctcgaagacatcaccacttgcctcccaacgctcccgtgatca

SEQ ID NO: 116708 - DNA, 60 bp, Artificial
  Synthetic oligonucleotide
gtgtcgtcacgacgacggaatgactctagagatgattcgacagtacgcaatgtctcgaag

SEQ ID NO: 116709 - DNA, 60 bp, Artificial
  Synthetic oligonucleotide
gttgaacttgaacatgtgtcgtcacgacgacggaatgactctagagatgattcgacagta

SEQ ID NO: 116710 - DNA, 60 bp, Artificial
  Synthetic oligonucleotide
gttctttctttgtggactactcggatttgagttaagcccaaccgctcgacgccttatttt

SEQ ID NO: 116711 - DNA, 58 bp, Artificial
  Synthetic oligonucleotide
tcacatatgtgagaccccgctctcgacgcgtgtggcgccctctgctcctagcgctagt

SEQ ID NO: 116712 - DNA, 59 bp, Artificial
  Synthetic oligonucleotide
ctcacatatgtgagaccccgctctcgacgcgtgtggcgccctctgctcctagcgctagt

SEQ ID NO: 116713 - DNA, 60 bp, Artificial
  Synthetic oligonucleotide
ttttacaagaataacgaaactgcaagaaatacgagtgtcgccgggtttttgaaacgtcac

SEQ ID NO: 116714 - DNA, 60 bp, Artificial
  Synthetic oligonucleotide
gaaacgtcacgaagttgctgtcaacgtgattgttgagttctcttttgacattttgttctt

SEQ ID NO: 116715 - DNA, 60 bp, Artificial
  Synthetic oligonucleotide
cccgtgatcactttgacggagatccacgagaacccgcccccccagcttattctcccgccg

SEQ ID NO: 116716 - DNA, 60 bp, Artificial
  Synthetic oligonucleotide
cgccggcttacggaatgatgacgtcctagcatcattctcccgggacgggtaattgcagtc

SEQ ID NO: 116717 - DNA, 60 bp, Artificial
  Synthetic oligonucleotide
tgtctcgaagacatcaccacttgcctcccaacgctcccgtgatcactttgacggagatcc

SEQ ID NO: 116718 - DNA, 60 bp, Artificial
  Synthetic oligonucleotide
acctcgccggcttacggaatgatgacgtcctagcatcattctcccgggacgggtaattgc

SEQ ID NO: 116719 - DNA, 60 bp, Artificial
  Synthetic oligonucleotide
aagaaaagatgaaacacaatcaagatagagttgaagagctgagtctagtgcgtgtagatg

SEQ ID NO: 116720 - DNA, 60 bp, Artificial
  Synthetic oligonucleotide
cgcatcgtacgcagaagcgtttcgtgatgatgtgaggttgagacaaattaaacgccatgt

SEQ ID NO: 116721 - DNA, 60 bp, Artificial
  Synthetic oligonucleotide
aatcaaatacgttcacacaaccctagtgtgtttgatttgcatcataattcaggaataatt

SEQ ID NO: 116722 - DNA, 60 bp, Artificial
  Synthetic oligonucleotide
gagatccacagtgttgggtggatcaaacacctagatcgttttctagggagccgggataac

SEQ ID NO: 116723 - DNA, 60 bp, Artificial
  Synthetic oligonucleotide
aatatggcgacagctagaatgacctccatttgtgggagatccacagtgttgggtggatca

SEQ ID NO: 116724 - DNA, 60 bp, Artificial
  Synthetic oligonucleotide
cgctcaagcatttaaagatagagttggcgtcaatgagacgtaggtatgcgatactacgtg

SEQ ID NO: 116725 - DNA, 60 bp, Artificial
  Synthetic oligonucleotide
aagaacgctcaagcatttaaagatagagttggcgtcaatgagacgtaggtatgcgatact

SEQ ID NO: 116726 - DNA, 60 bp, Artificial
  Synthetic oligonucleotide
ctacgtgtagtgatctttatgagcgggtgcgtaacgatggctacctcgatggcgggcggg

SEQ ID NO: 116727 - DNA, 60 bp, Artificial
  Synthetic oligonucleotide
atgcgatactacgtgtagtgatctttatgagcgggtgcgtaacgatggctacctcgatgg

SEQ ID NO: 116728 - DNA, 60 bp, Artificial
  Synthetic oligonucleotide
atcatatgtttccgcggctagtatgtcttggagtggggatacgagcgttctattaaaaga

SEQ ID NO: 116729 - DNA, 60 bp, Artificial
  Synthetic oligonucleotide
ccttagtggagatggttggctgtcgaagacgattcacggtttgaatttgctgtgtaccac

SEQ ID NO: 116730 - DNA, 60 bp, Artificial
  Synthetic oligonucleotide
tattaaaagaggtaaaatatggcgacagctagaatgacctccatttgtgggagatccaca

SEQ ID NO: 116731 - DNA, 60 bp, Artificial
  Synthetic oligonucleotide
catatgtttccgcggctagtatgtcttggagtggggatacgagcgttctattaaaagagg

SEQ ID NO: 116732 - DNA, 60 bp, Artificial
  Synthetic oligonucleotide
gtttaaattatcccttgtcatgagtctagctacgatcgccgaaaattatatgatgcataa

SEQ ID NO: 116733 - DNA, 60 bp, Artificial
  Synthetic oligonucleotide
ccacagtgttgggtggatcaaacacctagatcgttttctagggagccgggataacgactt

SEQ ID NO: 116734 - DNA, 60 bp, Artificial
  Synthetic oligonucleotide
gcattacgtgatccagaaccgatacgtcaaataaagaaacatgttggattaagaacgctc

SEQ ID NO: 116735 - DNA, 60 bp, Artificial
  Synthetic oligonucleotide
cgtgatccagaaccgatacgtcaaataaagaaacatgttggattaagaacgctcaagcat

SEQ ID NO: 116736 - DNA, 60 bp, Artificial
  Synthetic oligonucleotide
gtccatgtcgcttgggatacttaatcaagccatgtcaagtacaactggtgcaagtcgggc

SEQ ID NO: 116737 - DNA, 60 bp, Artificial
  Synthetic oligonucleotide
ccatgtcgcttgggatacttaatcaagccatgtcaagtacaactggtgcaagtcgggctc

SEQ ID NO: 116738 - DNA, 60 bp, Artificial
  Synthetic oligonucleotide
caagtcgggctcttaaggatgaaaaagcagcgtttggtgcgatggcggaagcattacgtg

SEQ ID NO: 116739 - DNA, 53 bp, Artificial
  Synthetic oligonucleotide
aaaagcagcgtttggtgcgatggcggaagcattacgtgatccagaaccgatac

SEQ ID NO: 116740 - DNA, 60 bp, Artificial
  Synthetic oligonucleotide
tgtcatgagtctagctacgatcgccgaaaattatatgatgcataatggaaatcagagagc

SEQ ID NO: 116741 - DNA, 60 bp, Artificial
  Synthetic oligonucleotide
tgatgcataatggaaatcagagagcaattgtaccgtatgttccacccccttatgcgtatg

SEQ ID NO: 116742 - DNA, 60 bp, Artificial
  Synthetic oligonucleotide
tatgcgtatgcaaatgctccgacgcttggtggtcaggcgggtgaaatggagtccatgtcg

SEQ ID NO: 116743 - DNA, 60 bp, Artificial
  Synthetic oligonucleotide
caaatgctccgacgcttggtggtcaggcgggtgaaatggagtccatgtcgcttgggatac

SEQ ID NO: 116744 - DNA, 60 bp, Artificial
  Synthetic oligonucleotide
agaattcgacattatatatcagatagaaaattgtggtctcagtagcatacttaattgtcg

SEQ ID NO: 116745 - DNA, 60 bp, Artificial
  Synthetic oligonucleotide
ggattatcatacgcgacaatcaagtatgctactgagaccacaattttctatctgatatat

SEQ ID NO: 116746 - DNA, 60 bp, Artificial
  Synthetic oligonucleotide
ggtggattatcatatgcgacaattaagtatgctactgagaccacaattttctatctgata

SEQ ID NO: 116747 - DNA, 60 bp, Artificial
  Synthetic oligonucleotide
tttagcgctaatgtttcctggacagattatacttgatctaaaaattgatcctggtgagag

SEQ ID NO: 116748 - DNA, 60 bp, Artificial
  Synthetic oligonucleotide
ggctcatatgatcttgataattgcggctgtggtagcgttgataacgtcagccagtacgtt

SEQ ID NO: 116749 - DNA, 60 bp, Artificial
  Synthetic oligonucleotide
tgataattgcggctgtggtagcgttgataacgtcagccagtacgttgacgagtgacttgg

SEQ ID NO: 116750 - DNA, 60 bp, Artificial
  Synthetic oligonucleotide
taagcacaggagttgaggagctctgtcccgggagggacactgtgcggtgggaaacgttag

SEQ ID NO: 116751 - DNA, 57 bp, Artificial
  Synthetic oligonucleotide
acaggagttgaggagctctgtcccgggagggacactgtggggtgggaaacgttagcc

SEQ ID NO: 116752 - DNA, 56 bp, Artificial
  Synthetic oligonucleotide
caggagttgaggagctctgtcccgggagggacactgtggggtgggaaacgttagcc

SEQ ID NO: 116753 - DNA, 60 bp, Artificial
  Synthetic oligonucleotide
gcgtgtgggtatacgcatactactcagacggatcagtgctcgtaatcaacaagaactcgc

SEQ ID NO: 116754 - DNA, 60 bp, Artificial
  Synthetic oligonucleotide
gagcgtgtgggtatacgcatactactcagacggatcagtgctcgtaatcaacaagaactc

SEQ ID NO: 116755 - DNA, 60 bp, Artificial
  Synthetic oligonucleotide
gcatactactcggatggatcagtgctcgtaatcaacaagaactcgcaatacaaggttggc

SEQ ID NO: 116756 - DNA, 60 bp, Artificial
  Synthetic oligonucleotide
ggatgatggatgaggccgtgaagcaatctgcattggttaattcggaaagagttagattgg

SEQ ID NO: 116757 - DNA, 60 bp, Artificial
  Synthetic oligonucleotide
gaatgatggatgaggccgtgaagcaatctgcattggttaattcggaaagagttagattgg

SEQ ID NO: 116758 - DNA, 60 bp, Artificial
  Synthetic oligonucleotide
atttaatcagaagaatataaaaacgctagatgaatgggagaacggaaaaaatccatatga

SEQ ID NO: 116759 - DNA, 60 bp, Artificial
  Synthetic oligonucleotide
atttaatcagaagaatataaaaacgctagatgagtgggagaacggaaaaaatccatatga

SEQ ID NO: 116760 - DNA, 60 bp, Artificial
  Synthetic oligonucleotide
attcaatcagaagaatataaaaacgctagatgaatgggagaacggaaaaaatccatatga

SEQ ID NO: 116761 - DNA, 60 bp, Artificial
  Synthetic oligonucleotide
gcttcatttacgttaaatagatcacaacccgcgcatgataatttaatgggtacgatgtgg

SEQ ID NO: 116762 - DNA, 60 bp, Artificial
  Synthetic oligonucleotide
tgaacatatagttcagctccgcagagtattaacgacggctacaataactctcttaccaga

SEQ ID NO: 116763 - DNA, 60 bp, Artificial
  Synthetic oligonucleotide
gttcagctccgcagagtattaacgacggctacaataactctcttaccagatgctgaaaga

SEQ ID NO: 116764 - DNA, 60 bp, Artificial
  Synthetic oligonucleotide
tcttaccagatgctgaaagatttagttttcctagagtaattaattcagctgatggagcaa

SEQ ID NO: 116765 - DNA, 53 bp, Artificial
  Synthetic oligonucleotide
attaaattcagttagattattaaagcatggtccagacacttataacagcaatc

SEQ ID NO: 116766 - DNA, 60 bp, Artificial
  Synthetic oligonucleotide
atcggcattctctacacctgaaataactggaccacatacgaatacagtaattgaatggag

SEQ ID NO: 116767 - DNA, 57 bp, Artificial
  Synthetic oligonucleotide
ggcttaaaaagtagagatcgatggcgtcttcactgtacgcacaattaatctcacaaa

SEQ ID NO: 116768 - DNA, 60 bp, Artificial
  Synthetic oligonucleotide
actacacctatgctcaattgccacctacaacgtggggatctgggtcaatacttaaatcgg

SEQ ID NO: 116769 - DNA, 51 bp, Artificial
  Synthetic oligonucleotide
aaaagtagagatcgatggcgtcttcactgtacgcacaattaatctcacaaa

SEQ ID NO: 116770 - DNA, 60 bp, Artificial
  Synthetic oligonucleotide
cttaaatcggcattctctacacctgaaataactggaccacatacgaatacagtaattgaa

SEQ ID NO: 116771 - DNA, 60 bp, Artificial
  Synthetic oligonucleotide
ctacacctatgctcaattgccacctacaacgtggggatctgggtcaatacttaaatcggc

SEQ ID NO: 116772 - DNA, 54 bp, Artificial
  Synthetic oligonucleotide
tattagaatcagttccggctattacttcatcggttaaggatgttgctgctagtg

SEQ ID NO: 116773 - DNA, 51 bp, Artificial
  Synthetic oligonucleotide
tttagcgagttcagttgcattaagtgatatactttccctcgctatgtcacc

SEQ ID NO: 116774 - DNA, 60 bp, Artificial
  Synthetic oligonucleotide
atactagaagagtagcatcagggacaggatttgcttattcagacggtcatgtagctaata

SEQ ID NO: 116775 - DNA, 60 bp, Artificial
  Synthetic oligonucleotide
tattttcagatacctgtaggatcatatcctggattacattcatcaaggttgcaacttgtt

SEQ ID NO: 116776 - DNA, 60 bp, Artificial
  Synthetic oligonucleotide
tcagagatgtcatattattttcagatacctgtaggatcatatcctggattacattcatca

SEQ ID NO: 116777 - DNA, 60 bp, Artificial
  Synthetic oligonucleotide
gttcgcgatgtacgagcggatataggaggatttcagtattcttattcgtcagagatgtca

SEQ ID NO: 116778 - DNA, 60 bp, Artificial
  Synthetic oligonucleotide
agaatggatttagagagaaaaatcaatgatttacgtgatgacttcaatgctttagcgagt

SEQ ID NO: 116779 - DNA, 60 bp, Artificial
  Synthetic oligonucleotide
ccgaactaccaaactccaatagcttcatctagtactgtaagaatggatttagagagaaaa

SEQ ID NO: 116780 - DNA, 60 bp, Artificial
  Synthetic oligonucleotide
taccaagtaatccgaactaccaaactccaatagcttcatctagtactgtaagaatggatt

SEQ ID NO: 116781 - DNA, 60 bp, Artificial
  Synthetic oligonucleotide
agtagcatcagggacaggatttgcttattcagacggtcatgtagctaatacagttggaac

SEQ ID NO: 116782 - DNA, 61 bp, Artificial
  Synthetic oligonucleotide
gagcaggagaaaatgttaatgctcatgtgactataagtttcaataatgtaaaagaacgagc

SEQ ID NO: 116783 - DNA, 60 bp, Artificial
  Synthetic oligonucleotide
atgttcgcgatgtacgagcggatataggaggatttcagtattcttattcgtcagagatgt

SEQ ID NO: 116784 - DNA, 60 bp, Artificial
  Synthetic oligonucleotide
gcaatgtaaaatattatctgaaattgtgaaaggtggaggatggggatatgactatactag

SEQ ID NO: 116785 - DNA, 60 bp, Artificial
  Synthetic oligonucleotide
tacactagagcaggagaaaatgttaatgctcatgtgactataagtttcaataatgtaaaa

SEQ ID NO: 116786 - DNA, 60 bp, Artificial
  Synthetic oligonucleotide
ttagtaaggactcattgtggcaagaagttcaatacgtacgtgatataactttgcaatgta

SEQ ID NO: 116787 - DNA, 60 bp, Artificial
  Synthetic oligonucleotide
ttgcaatgtaaaatattatctgaaattgtgaaaggtggaggatggggatatgactatact

SEQ ID NO: 116788 - DNA, 60 bp, Artificial
  Synthetic oligonucleotide
ggaaaattggaatcacgagtttccaagaagtaatcctggtattaatattaatatgtatac

SEQ ID NO: 116789 - DNA, 60 bp, Artificial
  Synthetic oligonucleotide
gaatgataactcaaaattaggggatggtcctattaatgttagtaatattattagtaagga

SEQ ID NO: 116790 - DNA, 60 bp, Artificial
  Synthetic oligonucleotide
agggatctacacagttagaaaaacaagtcgtaacattcaactggaacgtgggtggtatac

SEQ ID NO: 116791 - DNA, 60 bp, Artificial
  Synthetic oligonucleotide
ggtggtatactaattaaaccaataaattcaagtagaatgagaatttgcatgtcaggaatg

SEQ ID NO: 116792 - DNA, 60 bp, Artificial
  Synthetic oligonucleotide
actaatgttgctaggaataataattcgttgaactatagtgatattacttcggccatgatg

SEQ ID NO: 116793 - DNA, 60 bp, Artificial
  Synthetic oligonucleotide
gctaggaataataattcgttgaactatagtgatattacttcggccatgatggtttcaact

SEQ ID NO: 116794 - DNA, 60 bp, Artificial
  Synthetic oligonucleotide
ggccatgatggtttcaactactaacagattacaaattactgatgtagatactttttcaga

SEQ ID NO: 116795 - DNA, 53 bp, Artificial
  Synthetic oligonucleotide
ttatagaatgatagaaaataatactgttcatgaaataacgcctacaagaagat

SEQ ID NO: 116796 - DNA, 59 bp, Artificial
  Synthetic oligonucleotide
gcattagtgatgatatcatatacaaattagtggcatctgacgctcctactattttgtca

SEQ ID NO: 116797 - DNA, 60 bp, Artificial
  Synthetic oligonucleotide
ccactcatacggaatagaattactaatctaataaatcaatgcaaattgtaaacagtgatg

SEQ ID NO: 116798 - DNA, 61 bp, Artificial
  Synthetic oligonucleotide
gaacgatcatagctagaaattttgatacaattagattgtcatttcagttgatgagaccacc

SEQ ID NO: 116799 - DNA, 60 bp, Artificial
  Synthetic oligonucleotide
tttcagttgatgagaccaccaaatatgacaccagcggtagcggcgttatttccaaatgcg

SEQ ID NO: 116800 - DNA, 60 bp, Artificial
  Synthetic oligonucleotide
gttgatgagaccaccaaatatgacaccagcggtagcggcgttatttccaaatgcgcagcc

SEQ ID NO: 116801 - DNA, 60 bp, Artificial
  Synthetic oligonucleotide
ggattacttggaacaactctactaaatttagatgctaactacgtcgaaacggcccgcaat

SEQ ID NO: 116802 - DNA, 60 bp, Artificial
  Synthetic oligonucleotide
aattttgattttggattacttggaacaactctactaaatttagatgctaactacgtcgaa

SEQ ID NO: 116803 - DNA, 60 bp, Artificial
  Synthetic oligonucleotide
cagatcacaaccggctcatgataacttgatgggtacgatgtggctcaatgcgggatcaga

SEQ ID NO: 116804 - DNA, 60 bp, Artificial
  Synthetic oligonucleotide
gcgcagccatttgaacatcacgcaacagtaggactcacgcttagaattgaatctgcagtt

SEQ ID NO: 116805 - DNA, 60 bp, Artificial
  Synthetic oligonucleotide
cgggatcagaaattcaggtcgctggattcgactactcatgtgcaataaacgcgccagcta

SEQ ID NO: 116806 - DNA, 60 bp, Artificial
  Synthetic oligonucleotide
gaaagatttagttttccaagagtgattaattcagctgacggagcgactacatggtacttc

SEQ ID NO: 116807 - DNA, 60 bp, Artificial
  Synthetic oligonucleotide
ccaagagtgattaattcagctgacggagcgactacatggtacttcaatccagtgattctt

SEQ ID NO: 116808 - DNA, 60 bp, Artificial
  Synthetic oligonucleotide
atggtacttcaatccagtgattcttagaccaaataacgttgaagtagagtttctactaaa

SEQ ID NO: 116809 - DNA, 60 bp, Artificial
  Synthetic oligonucleotide
atgctagcaaatgtgacatctgttagacaagaatacgcgataccagttggaccagttttt

SEQ ID NO: 116810 - DNA, 60 bp, Artificial
  Synthetic oligonucleotide
cagtttgtgaatcagtacttgccgacgcaagcgaaacaatgctagcaaatgtgacatctg

SEQ ID NO: 116811 - DNA, 55 bp, Artificial
  Synthetic oligonucleotide
tagcaaatgtgacatctgttagacaagaatacgcgataccagttggaccagtttt

SEQ ID NO: 116812 - DNA, 60 bp, Artificial
  Synthetic oligonucleotide
gaattgaatctgcagtttgtgaatcagtacttgccgacgcaagcgaaacaatgctagcaa

SEQ ID NO: 116813 - DNA, 60 bp, Artificial
  Synthetic oligonucleotide
caatccagtgattcttagaccaaataacgttgaagtagagtttctactaaacgggcagat

SEQ ID NO: 116814 - DNA, 60 bp, Artificial
  Synthetic oligonucleotide
tccaaatgcgcagccatttgaacatcacgcaacagtaggactcacgcttagaattgaatc

SEQ ID NO: 116815 - DNA, 60 bp, Artificial
  Synthetic oligonucleotide
ggctcatgataacttgatgggtacgatgtggctcaatgcgggatcagaaattcaggtcgc

SEQ ID NO: 116816 - DNA, 51 bp, Artificial
  Synthetic oligonucleotide
ttggtgagtatgtagctacgtcaagctgtttgaactctgtaagtaaggatg

SEQ ID NO: 116817 - DNA, 60 bp, Artificial
  Synthetic oligonucleotide
caagatttggaacgatcatagctagaaattttgatacaattagattgtcatttcagttga

SEQ ID NO: 116818 - DNA, 60 bp, Artificial
  Synthetic oligonucleotide
gagttccaaactggaggaattggtaatctaccgattagaaattggaattttgattttgga

SEQ ID NO: 116819 - DNA, 57 bp, Artificial
  Synthetic oligonucleotide
accatggatggaaacatagcttggtagaggctctcccatgctcaatgcaatataccc

SEQ ID NO: 116820 - DNA, 60 bp, Artificial
  Synthetic oligonucleotide
gagggatcagtagtgcaatataatcgtgagtgatgtgtagcatgctctaccatggatgga

SEQ ID NO: 116821 - DNA, 60 bp, Artificial
  Synthetic oligonucleotide
atgagggatcagtagtgcaatataatcgtgagtgatgtgtagcatgctctaccatggatg

SEQ ID NO: 116822 - DNA, 60 bp, Artificial
  Synthetic oligonucleotide
atgtgggataaaagcccaaacatcaaagataatctatgttgtcagattactgttttggaa

SEQ ID NO: 116823 - DNA, 60 bp, Artificial
  Synthetic oligonucleotide
gggaacttacaggaatattttatgaacaattcgttagagaagatagtcatacacgttgtg

SEQ ID NO: 116824 - DNA, 60 bp, Artificial
  Synthetic oligonucleotide
gaagatttcaagaattaaagtggagatgtgatatgatagctaacaaagcaatgaacacaa

SEQ ID NO: 116825 - DNA, 60 bp, Artificial
  Synthetic oligonucleotide
tgttttggaaaatatataatgtgattaacaatctagtaaataaagtgataaatagagaga

SEQ ID NO: 116826 - DNA, 60 bp, Artificial
  Synthetic oligonucleotide
ggcattttgttcatcacaaatcacgatggaaggaactagtgaaagtccagtgttagatga

SEQ ID NO: 116827 - DNA, 60 bp, Artificial
  Synthetic oligonucleotide
tacagatgggaacttacaggaatattttatgaacaattcgttagagaagatagtcataca

SEQ ID NO: 116828 - DNA, 60 bp, Artificial
  Synthetic oligonucleotide
cacaaatcacgatggaaggaactagtgaaagtccagtgttagatgaattcgaagtcaaca

SEQ ID NO: 116829 - DNA, 60 bp, Artificial
  Synthetic oligonucleotide
ttgcgaaacattttaacaggtatgcttcgatggcgatacagcaatatttgagagttggtt

SEQ ID NO: 116830 - DNA, 53 bp, Artificial
  Synthetic oligonucleotide
aaaagtgtcgctgccatgctatccgggctgatccaaaggttcgaggaggaaaa

SEQ ID NO: 116831 - DNA, 60 bp, Artificial
  Synthetic oligonucleotide
gttaaaaagtgtcgctgccatgctatccgggctgatccaaaggttcgaggaggaaaaaat

SEQ ID NO: 116832 - DNA, 60 bp, Artificial
  Synthetic oligonucleotide
ggcgtcatgactccagctcaacagaatcaagtcgaggcattggcagatcaaactcaacgg

SEQ ID NO: 116833 - DNA, 60 bp, Artificial
  Synthetic oligonucleotide
ttaagacgtgatggcgtcatgactccagctcaacagaatcaagtcgaggcattggcagat

SEQ ID NO: 116834 - DNA, 60 bp, Artificial
  Synthetic oligonucleotide
ggcagatcaaactcaacggttcaagcgggataaacttgaaacatgggctagggaagacga

SEQ ID NO: 116835 - DNA, 60 bp, Artificial
  Synthetic oligonucleotide
attggcagatcaaactcaacggttcaagcgggataaacttgaaacatgggctagggaaga

SEQ ID NO: 116836 - DNA, 60 bp, Artificial
  Synthetic oligonucleotide
cctgcggtgtcacgtaacattcatggttggactgggcgaactggtaatcagctgcatggt

SEQ ID NO: 116837 - DNA, 60 bp, Artificial
  Synthetic oligonucleotide
acctgcggtgtcacgtaacattcatggttggactgggcgaactggtaatcagctgcatgg

SEQ ID NO: 116838 - DNA, 60 bp, Artificial
  Synthetic oligonucleotide
aagtgagacgaatggtgactgaattctgtgataggttaagacgtgatggcgtcatgactc

SEQ ID NO: 116839 - DNA, 60 bp, Artificial
  Synthetic oligonucleotide
agctgcatggtttacaagtgagacgaatggtgactgaattctgtgataggttaagacgtg

SEQ ID NO: 116840 - DNA, 60 bp, Artificial
  Synthetic oligonucleotide
ctagggaagacgatcaatacaaccaagctcatccaaactctacgatgttccgtacgaaac

SEQ ID NO: 116841 - DNA, 60 bp, Artificial
  Synthetic oligonucleotide
gcaccgagtgtaccagcaattgagtgccgtaacgttactcaacttaacggggttcggtcc

SEQ ID NO: 116842 - DNA, 60 bp, Artificial
  Synthetic oligonucleotide
gcgacgattacccattcttagcacgtgatccaagatttaagcaccgagtgtaccagcaat

SEQ ID NO: 116843 - DNA, 60 bp, Artificial
  Synthetic oligonucleotide
gtgtatgattgcgacgattacccattcttagcacgtgatccaagatttaagcaccgagtg

SEQ ID NO: 116844 - DNA, 60 bp, Artificial
  Synthetic oligonucleotide
ctggcacagcccgctttgcaggcgcaagcagatcgagtgtatgattgcgacgattaccca

SEQ ID NO: 116845 - DNA, 60 bp, Artificial
  Synthetic oligonucleotide
ccccaccacaagttctggcacagcccgctttgcaggcgcaagcagatcgagtgtatgatt

SEQ ID NO: 116846 - DNA, 60 bp, Artificial
  Synthetic oligonucleotide
ggtactcttcagataccatttcggcctaaccaccgatggggggatatcaggttcctgcgc

SEQ ID NO: 116847 - DNA, 60 bp, Artificial
  Synthetic oligonucleotide
ggattggataagtctagggcgaggtctagctacatcggctctcgttccaaccgctggttc

SEQ ID NO: 116848 - DNA, 60 bp, Artificial
  Synthetic oligonucleotide
tcaatttctggattggataagtctagggcgaggtctagctacatcggctctcgttccaac

SEQ ID NO: 116849 - DNA, 60 bp, Artificial
  Synthetic oligonucleotide
tggagtggggatgtgagtcagcttcttatgaactattttgggcacacatttgcggagatt

SEQ ID NO: 116850 - DNA, 54 bp, Artificial
  Synthetic oligonucleotide
tgagtgccgtaacgttactcaacttaacggggttcggtccaatttcgtacgttc

SEQ ID NO: 116851 - DNA, 60 bp, Artificial
  Synthetic oligonucleotide
atgcgaggatgactcagatcgtgctgtctttgttttggctgtcgtatgttggagtgatcc

SEQ ID NO: 116852 - DNA, 60 bp, Artificial
  Synthetic oligonucleotide
tggctgtcgtatgttggagtgatccatcagcagaacacgtatcgggcatcctactttcag

SEQ ID NO: 116853 - DNA, 60 bp, Artificial
  Synthetic oligonucleotide
ggagtgatccatcagcagaacacgtatcgggcatcctactttcagtgcaatcggcgaggt

SEQ ID NO: 116854 - DNA, 60 bp, Artificial
  Synthetic oligonucleotide
aaccattccgcacggattaggccgggtaatcgcagcttattcgtcatgccgacgagtcca

SEQ ID NO: 116855 - DNA, 60 bp, Artificial
  Synthetic oligonucleotide
gagtggggatgtgagtcagcttcttatgaactattttgggcacacatttgcggagattgc

SEQ ID NO: 116856 - DNA, 60 bp, Artificial
  Synthetic oligonucleotide
tgcggagattgcatacacgttgtgtcaagcttcagctaacaggccttgggagcatgatgg

SEQ ID NO: 116857 - DNA, 60 bp, Artificial
  Synthetic oligonucleotide
gcggagattgcatacacgttgtgtcaagcttcagctaacaggccttgggagcatgatggc

SEQ ID NO: 116858 - DNA, 60 bp, Artificial
  Synthetic oligonucleotide
agcatgatggcacatatgcgaggatgactcagatcgtgctgtctttgttttggctgtcgt

SEQ ID NO: 116859 - DNA, 60 bp, Artificial
  Synthetic oligonucleotide
cattccgcacggattaggccgggtaatcgcagcttattcgtcatgccgacgagtccagac

SEQ ID NO: 116860 - DNA, 57 bp, Artificial
  Synthetic oligonucleotide
ttaattctaagctcgacattgacgggatgcctatgctcgggttcgcaactacctctt

SEQ ID NO: 116861 - DNA, 60 bp, Artificial
  Synthetic oligonucleotide
ctcagtcaaccaagaaatacttcgatgctactcttttcgttggcaagactgtctccggtc

SEQ ID NO: 116862 - DNA, 60 bp, Artificial
  Synthetic oligonucleotide
gtatctgaagttgtacgctctgtttggtgctcggatacccaacatcagtcgacacccgcc

SEQ ID NO: 116863 - DNA, 60 bp, Artificial
  Synthetic oligonucleotide
tgcccggatacccaacatcagtcgacacccgcccgtcggtaaggaatatgcatctcccga

SEQ ID NO: 116864 - DNA, 60 bp, Artificial
  Synthetic oligonucleotide
agtaccccgtgtggtcgttcatttacatgggccttcctccgatccttctccccggccaga

SEQ ID NO: 116865 - DNA, 55 bp, Artificial
  Synthetic oligonucleotide
cctcccgcgtcccctcactgttggatgttcccactcgctggattaaagccgggcg

SEQ ID NO: 116866 - DNA, 60 bp, Artificial
  Synthetic oligonucleotide
cgtgaacaccggagctgtttggtggattccccctcccggtcggactaactgcgtgacggt

SEQ ID NO: 116867 - DNA, 60 bp, Artificial
  Synthetic oligonucleotide
cccagccttggtcgtgaacaccggagctgtttggtggattccccctcctggtcggactaa

SEQ ID NO: 116868 - DNA, 60 bp, Artificial
  Synthetic oligonucleotide
ccgagctccagcacctttcactcgcactttcaggttcacaaccacttactgataagatat

SEQ ID NO: 116869 - DNA, 60 bp, Artificial
  Synthetic oligonucleotide
ccaatgtatatcacctgctcgatcacctcacctttcgatcctccgtggttatcccaaact

SEQ ID NO: 116870 - DNA, 60 bp, Artificial
  Synthetic oligonucleotide
tttcactcgcactttcaggttcacaaccacttactgataagatatttaccgccgctgccg

SEQ ID NO: 116871 - DNA, 60 bp, Artificial
  Synthetic oligonucleotide
cctgctcgatcacctcacctttcgatcctccgtggttatcccaaactctaacttcgtcgg

SEQ ID NO: 116872 - DNA, 60 bp, Artificial
  Synthetic oligonucleotide
ccaagcatatcacttgctcgatcacctcacctttcgatcctccgtggttatcccaaactc

SEQ ID NO: 116873 - DNA, 60 bp, Artificial
  Synthetic oligonucleotide
gcagcgctacaaactgaacgggaactattacgccccagccttggtcgtgaacaccggagc

SEQ ID NO: 116874 - DNA, 60 bp, Artificial
  Synthetic oligonucleotide
gctcgatcacctcacctttcgatcctccgtggttatcccaaactctatcttcgtcggtcg

SEQ ID NO: 116875 - DNA, 60 bp, Artificial
  Synthetic oligonucleotide
gtcatgacccaagctcagcagaatcaagttgaagcgttggcagatcagactcaacagttt

SEQ ID NO: 116876 - DNA, 60 bp, Artificial
  Synthetic oligonucleotide
cccaagctcagcagaatcaagttgaagcgttggcagatcagactcaacagtttaagaggg

SEQ ID NO: 116877 - DNA, 60 bp, Artificial
  Synthetic oligonucleotide
aggtgagacgaatggtgactgaattttgtgacaggttgagacgcgatggtgtcatgaccc

SEQ ID NO: 116878 - DNA, 60 bp, Artificial
  Synthetic oligonucleotide
ggtgactgaattttgtgacaggttgagacgcgatggtgtcatgacccaagctcagcagaa

SEQ ID NO: 116879 - DNA, 60 bp, Artificial
  Synthetic oligonucleotide
taacatccatggctggactggtagagctggtaaccaattgcatgggttccaggtgagacg

SEQ ID NO: 116880 - DNA, 60 bp, Artificial
  Synthetic oligonucleotide
gctggactggtagagctggtaaccaattgcatgggttccaggtgagacgaatggtgactg

SEQ ID NO: 116881 - DNA, 60 bp, Artificial
  Synthetic oligonucleotide
ggttcacagctgccactgattgacaataattcagtacctgcagtgtcgcgtaacatccat

SEQ ID NO: 116882 - DNA, 60 bp, Artificial
  Synthetic oligonucleotide
gccactgattgacaataattcagtacctgcagtgtcgcgtaacatccatggctggactgg

SEQ ID NO: 116883 - DNA, 60 bp, Artificial
  Synthetic oligonucleotide
tggacgtcaatttgatcctgagttcaacgttgacggggtgtttgtgttcgggttcacagc

SEQ ID NO: 116884 - DNA, 60 bp, Artificial
  Synthetic oligonucleotide
tcctgagttcaacgttgacggggtgtttgtgttcgggttcacagctgccactgattgaca

SEQ ID NO: 116885 - DNA, 60 bp, Artificial
  Synthetic oligonucleotide
aactatttcgggcacacgtttgcagagattgcatacacattgtgtcaagcctcggctaat

SEQ ID NO: 116886 - DNA, 60 bp, Artificial
  Synthetic oligonucleotide
gtgtacgactgcgatgattatccatttctagcgcgtgatccaagattcaaacatcgggtg

SEQ ID NO: 116887 - DNA, 60 bp, Artificial
  Synthetic oligonucleotide
atcaaatgagttgccttctaagtggcactctccagattccgttccgtcctaaccaccgat

SEQ ID NO: 116888 - DNA, 60 bp, Artificial
  Synthetic oligonucleotide
gaggggtttagctacatcggctctcgttccgacggctgggtcaagatactatcaaatgag

SEQ ID NO: 116889 - DNA, 60 bp, Artificial
  Synthetic oligonucleotide
ggtaattcaccatggcagttaacacagtttttagactggataagccttgggaggggttta

SEQ ID NO: 116890 - DNA, 60 bp, Artificial
  Synthetic oligonucleotide
gtgccaattaacgacgaactatcttcacatctactccgagctggtaattcaccatggcag

SEQ ID NO: 116891 - DNA, 60 bp, Artificial
  Synthetic oligonucleotide
cagatcgagtgtacgactgcgatgattatccatttctagcgcgtgatccaagattcaaac

SEQ ID NO: 116892 - DNA, 60 bp, Artificial
  Synthetic oligonucleotide
ccaccgatggggagacattaggttcttacgcttagtgtggtcagctcctactctcgatgg

SEQ ID NO: 116893 - DNA, 60 bp, Artificial
  Synthetic oligonucleotide
aaccaccgatggggagacattaggttcttacgcttagtgtggtcagctcctactctcgat

SEQ ID NO: 116894 - DNA, 60 bp, Artificial
  Synthetic oligonucleotide
gttgccttctaagtggcactctccagattccgttccgtcctaaccaccgatggggagaca

SEQ ID NO: 116895 - DNA, 60 bp, Artificial
  Synthetic oligonucleotide
ccgggtaatcgtagcttattcgttatgccaactagcccagattggaacatggacgtcaat

SEQ ID NO: 116896 - DNA, 60 bp, Artificial
  Synthetic oligonucleotide
accgggtaatcgtagcttattcgttatgccaactagcccagattggaacatggacgtcaa

SEQ ID NO: 116897 - DNA, 60 bp, Artificial
  Synthetic oligonucleotide
ctcggctaataggccttgggaatatgacggtacatatgctaggatgactcagattgtgtt

SEQ ID NO: 116898 - DNA, 60 bp, Artificial
  Synthetic oligonucleotide
ggcacacgtttgcagagattgcatacacattgtgtcaagcctcggctaataggccttggg

SEQ ID NO: 116899 - DNA, 60 bp, Artificial
  Synthetic oligonucleotide
agattgtgttatccttgttctggctatcgtatgtcggtgtaatccatcagcagaatacgt

SEQ ID NO: 116900 - DNA, 60 bp, Artificial
  Synthetic oligonucleotide
agattgtgttatccttgttctggctatcgtatgtcggtgtaattcatcagcagaatacgt

SEQ ID NO: 116901 - DNA, 60 bp, Artificial
  Synthetic oligonucleotide
ttgtgttatccttgttctggctatcgtatgtcggtgtaattcatcagcagaatacgtatc

SEQ ID NO: 116902 - DNA, 60 bp, Artificial
  Synthetic oligonucleotide
ttgtgttatccttgttctggctatcgtatgtcggtgtaatccatcagcagaatacgtatc

SEQ ID NO: 116903 - DNA, 60 bp, Artificial
  Synthetic oligonucleotide
gtgtggattctttcttgttcgttgaaccattccgcacaaattagaccgggtaatcgtagc

SEQ ID NO: 116904 - DNA, 60 bp, Artificial
  Synthetic oligonucleotide
gctgaggtgtggattctttcttgttcgttgaaccattccgcacaaattagaccgggtaat

SEQ ID NO: 116905 - DNA, 60 bp, Artificial
  Synthetic oligonucleotide
tgcaaaatgtgccaattaacgacgaactatcttcacatctactccgagctggtaattcac

SEQ ID NO: 116906 - DNA, 60 bp, Artificial
  Synthetic oligonucleotide
ccttatctgatcgtcttggagtgagggggtccccccacacacctcacgactgaccacaca

SEQ ID NO: 116907 - DNA, 60 bp, Artificial
  Synthetic oligonucleotide
ggctcatcccaactccacaatgttccgtacgaaaccatttacgaatgcgcaatggggacg

SEQ ID NO: 116908 - DNA, 60 bp, Artificial
  Synthetic oligonucleotide
ataatcaggctcatcccaactccacaatgttccgtacgaaaccatttacgaatgcgcaat

SEQ ID NO: 116909 - DNA, 60 bp, Artificial
  Synthetic oligonucleotide
catgacataagatgcttgattcgttgtttagaactcttacttagttggtgcaggcgctac

SEQ ID NO: 116910 - DNA, 60 bp, Artificial
  Synthetic oligonucleotide
caatggactacatcctccgaacatcacttaatttcgtcatgacataagatgcttgattcg

SEQ ID NO: 116911 - DNA, 60 bp, Artificial
  Synthetic oligonucleotide
tcgggtgaatggtggacggatgcttatctcacgaccagctctgggttcagggctgttcaa

SEQ ID NO: 116912 - DNA, 60 bp, Artificial
  Synthetic oligonucleotide
ggcttgaagcttgtcagaccgagtttgggatgacggagcccattgattataatgcgatta

SEQ ID NO: 116913 - DNA, 60 bp, Artificial
  Synthetic oligonucleotide
actatttggcttgaagcttgtcagaccgagtttgggatgacggagcccattgattataat

SEQ ID NO: 116914 - DNA, 60 bp, Artificial
  Synthetic oligonucleotide
acatcgttcaattcaatggactacatcctccgaacatcacttaatttcgtcatgacataa

SEQ ID NO: 116915 - DNA, 51 bp, Artificial
  Synthetic oligonucleotide
tgattataatgcgattaaacttgcaaacagttattcactcaagaatcaacg

SEQ ID NO: 116916 - DNA, 60 bp, Artificial
  Synthetic oligonucleotide
cggaattagatggtatgcttcaagatgctcttactcatcgggtgaatggtggacggatgc

SEQ ID NO: 116917 - DNA, 60 bp, Artificial
  Synthetic oligonucleotide
ttttgcaaagagacggaattagatggtatgcttcaagatgctcttactcatcgggtgaat

SEQ ID NO: 116918 - DNA, 60 bp, Artificial
  Synthetic oligonucleotide
ttgcaactaacggtataaaaggtaatccttctgaagccatccacctgaatactatttggc

SEQ ID NO: 116919 - DNA, 60 bp, Artificial
  Synthetic oligonucleotide
cggtataaaaggtaatccttctgaagccatccacctgaatactatttggcttgaagcttg

SEQ ID NO: 116920 - DNA, 60 bp, Artificial
  Synthetic oligonucleotide
gggtgaatggtggacggatgcttatctcacgaccagctctgggttcagggctgttcaaag

SEQ ID NO: 116921 - DNA, 60 bp, Artificial
  Synthetic oligonucleotide
agaaaggatctgatcggattgattcactcaatagccacttatctcatgtccggagttggt

SEQ ID NO: 116922 - DNA, 60 bp, Artificial
  Synthetic oligonucleotide
cggattgattcactcaatagccacttatctcatgtccggagttggtagttattgtggatc

SEQ ID NO: 116923 - DNA, 60 bp, Artificial
  Synthetic oligonucleotide
ggctgttcaaagtacaagatgtatttactcaaggcacacctcgtgttgttagaaaggatc

SEQ ID NO: 116924 - DNA, 60 bp, Artificial
  Synthetic oligonucleotide
gtacaagatgtatttactcaaggcacacctcgtgttgttagaaaggatctgatcggattg

SEQ ID NO: 116925 - DNA, 60 bp, Artificial
  Synthetic oligonucleotide
acatgatcaaacttgttgagtcattccaaattggatatctaacactagagcaagtacgac

SEQ ID NO: 116926 - DNA, 50 bp, Artificial
  Synthetic oligonucleotide
gattgataggccggaaaacttcagcatcgtttgtaacacatatccgacac

SEQ ID NO: 116927 - DNA, 60 bp, Artificial
  Synthetic oligonucleotide
cggagttggtagttattgtggatcagtcgatgcttggacacgttcgttaactatctggga

SEQ ID NO: 116928 - DNA, 60 bp, Artificial
  Synthetic oligonucleotide
acctaagtggtatgaacatgatcaaacttgttgagtcattccaaattggatatctaacac

SEQ ID NO: 116929 - DNA, 60 bp, Artificial
  Synthetic oligonucleotide
taccaatgtcgactgggcgccgatgaccattatgtacccatgtctgggctgaggatccgg

SEQ ID NO: 116930 - DNA, 55 bp, Artificial
  Synthetic oligonucleotide
acccatgtctgggctgaggatccgggtgctccactcggcacagtggcgactcatc

SEQ ID NO: 116931 - DNA, 60 bp, Artificial
  Synthetic oligonucleotide
tatcacacgccgagtttgcgttggaatgctcccgtcacggttaatttgatgcgagtagac

SEQ ID NO: 116932 - DNA, 60 bp, Artificial
  Synthetic oligonucleotide
cgccgagtttgcgttggaatgctcccgtcacggttaatttgatgcgagtagacgattggc

SEQ ID NO: 116933 - DNA, 60 bp, Artificial
  Synthetic oligonucleotide
cgttctcacactgagaaatcgatcggtcacgccaacattcaagtttcctctggagttgaa

SEQ ID NO: 116934 - DNA, 54 bp, Artificial
  Synthetic oligonucleotide
cattcaagtttcctctggagttgaatagtgctgataactcagtgagcattcata

SEQ ID NO: 116935 - DNA, 60 bp, Artificial
  Synthetic oligonucleotide
gcactcggctactgcgtctcatgtacgaggctgtggacttcgtggttactaacaacgttc

SEQ ID NO: 116936 - DNA, 60 bp, Artificial
  Synthetic oligonucleotide
cgtggttactaacaacgttctcacactgagaaatcgatcggtcacgccaacattcaagtt

SEQ ID NO: 116937 - DNA, 60 bp, Artificial
  Synthetic oligonucleotide
gtatcgatgtggtagcgccaccgcttgtgatacagtctactggtagcactcggctactgc

SEQ ID NO: 116938 - DNA, 60 bp, Artificial
  Synthetic oligonucleotide
tctactggtagcactcggctactgcgtctcatgtacgaggctgtggacttcgtggttact

SEQ ID NO: 116939 - DNA, 60 bp, Artificial
  Synthetic oligonucleotide
ttgtgggtacggggatgtggttcgaccgcaataatgttctgcagttattcttatcgaacc

SEQ ID NO: 116940 - DNA, 60 bp, Artificial
  Synthetic oligonucleotide
ccctcgaggcatctcgtatcgatgtggtagcgccaccgcttgtgatacagtctactggta

SEQ ID NO: 116941 - DNA, 60 bp, Artificial
  Synthetic oligonucleotide
caaggacaactgggtggattatctgtacgcgtgtcagccattgaatcgggagttagtgag

SEQ ID NO: 116942 - DNA, 60 bp, Artificial
  Synthetic oligonucleotide
gggtggattatctgtacgcgtgtcagccattgaatcgggagttagtgagaacggcaatcg

SEQ ID NO: 116943 - DNA, 60 bp, Artificial
  Synthetic oligonucleotide
agttagtgagaacggcaatcgaattgatagactcgagcgagatgtctccggcatatcggc

SEQ ID NO: 116944 - DNA, 60 bp, Artificial
  Synthetic oligonucleotide
cggcaatcgaattgatagactcgagcgagatgtctccggcatatcggctagcgttagcgg

SEQ ID NO: 116945 - DNA, 55 bp, Artificial
  Synthetic oligonucleotide
gctattcgcactcatgtcggatctagtgcagctcataagaagggagatcttactg

SEQ ID NO: 116946 - DNA, 60 bp, Artificial
  Synthetic oligonucleotide
aagacatctctgctgatgtcaacaggatcagtaacatcgttgattcaatccaaggacaac

SEQ ID NO: 116947 - DNA, 60 bp, Artificial
  Synthetic oligonucleotide
ctctgctgatgtcaacaggatcagtaacatcgttgattcaatccaaggacaactgggtgg

SEQ ID NO: 116948 - DNA, 60 bp, Artificial
  Synthetic oligonucleotide
gcatatcggctagcgttagcggaatcgattcgcgtttatccgagctgggtgaccgagtca

SEQ ID NO: 116949 - DNA, 60 bp, Artificial
  Synthetic oligonucleotide
ggctagcgttagcggaatcgattcgcgtttatccgagctgggtgaccgagtcaatgttgc

SEQ ID NO: 116950 - DNA, 60 bp, Artificial
  Synthetic oligonucleotide
aacatatacagcgcataccaatgtcgactgggcgccgatgaccattatgtacccatgtct

SEQ ID NO: 116951 - DNA, 60 bp, Artificial
  Synthetic oligonucleotide
cgcagagtggaatgccggggaactagagatcacgaatcatggcggaacatatacagcgca

SEQ ID NO: 116952 - DNA, 60 bp, Artificial
  Synthetic oligonucleotide
gacgattggctcattttgagttttactcggttttcgacgagcggcgatcttagcgtcagg

SEQ ID NO: 116953 - DNA, 60 bp, Artificial
  Synthetic oligonucleotide
gcgagtagacgattggctcattttgagttttactcggttttcgacgagcggcgatcttag

SEQ ID NO: 116954 - DNA, 60 bp, Artificial
  Synthetic oligonucleotide
gcgtcaggaaagtttgtattgaacttcgtaactggtttgtctccagggtgggcgactggg

SEQ ID NO: 116955 - DNA, 60 bp, Artificial
  Synthetic oligonucleotide
gcgatcttagcgtcaggaaagtttgtattgaacttcgtaactggtttgtctccagggtgg

SEQ ID NO: 116956 - DNA, 60 bp, Artificial
  Synthetic oligonucleotide
ggcgactgggagtaccgagccctcgacaactactaacccactgtcaacgacgtttgctgc

SEQ ID NO: 116957 - DNA, 60 bp, Artificial
  Synthetic oligonucleotide
tccagggtgggcgactgggagtaccgagccctcgacaactactaacccactgtcaacgac

SEQ ID NO: 116958 - DNA, 60 bp, Artificial
  Synthetic oligonucleotide
ggagtcgcagagtggaatgccggggaactagagatcacgaatcatggcggaacatataca

SEQ ID NO: 116959 - DNA, 52 bp, Artificial
  Synthetic oligonucleotide
tgtcaacgacgtttgctgcaattcagttcatcaatgggtgcatctcgcgtag

SEQ ID NO: 116960 - DNA, 60 bp, Artificial
  Synthetic oligonucleotide
attgctgcgatagacacgcgtctcacgacactggagaccgatgccgtgacgtcggttggt

SEQ ID NO: 116961 - DNA, 60 bp, Artificial
  Synthetic oligonucleotide
gatgtccgccaaactattgctgcgatagacacgcgtctcacgacactggagaccgatgcc

SEQ ID NO: 116962 - DNA, 60 bp, Artificial
  Synthetic oligonucleotide
ggatcattgaatacgagggtgacgactgaattgaacgatgtccgccaaactattgctgcg

SEQ ID NO: 116963 - DNA, 60 bp, Artificial
  Synthetic oligonucleotide
ttactaatgaccttggatcattgaatacgagggtgacgactgaattgaacgatgtccgcc

SEQ ID NO: 116964 - DNA, 60 bp, Artificial
  Synthetic oligonucleotide
ccttgagcgagcatcaagactggaaactgaagtatcagccattactaatgaccttggatc

SEQ ID NO: 116965 - DNA, 60 bp, Artificial
  Synthetic oligonucleotide
ggataatctccttgagcgagcatcaagactggaaactgaagtatcagccattactaatga

SEQ ID NO: 116966 - DNA, 60 bp, Artificial
  Synthetic oligonucleotide
gcagaacagcgaattggccagttggatacagtcacggataatctccttgagcgagcatca

SEQ ID NO: 116967 - DNA, 60 bp, Artificial
  Synthetic oligonucleotide
gaccgagtcaatgttgcagaacagcgaattggccagttggatacagtcacggataatctc

SEQ ID NO: 116968 - DNA, 60 bp, Artificial
  Synthetic oligonucleotide
cgattaaggttattgtgggtacggggatgtggttcgaccgcaataatgttctgcagttat

SEQ ID NO: 116969 - DNA, 60 bp, Artificial
  Synthetic oligonucleotide
gaccgatgccgtgacgtcggttggtcaagggcttcagaagactgggaactcgattaaggt

SEQ ID NO: 116970 - DNA, 60 bp, Artificial
  Synthetic oligonucleotide
gctacgtggcaatgtccaaagtgcaaacctagacacgcaaagaaagttatcgaatctcgt

SEQ ID NO: 116971 - DNA, 60 bp, Artificial
  Synthetic oligonucleotide
attgaaccagccacttatgctactatagtatatttatggctaacgggagaggacgagatc

SEQ ID NO: 116972 - DNA, 60 bp, Artificial
  Synthetic oligonucleotide
tgctggctgcgtagatgattatttcgcatttatgcatgccgcttactgcgtactatcaaa

SEQ ID NO: 116973 - DNA, 60 bp, Artificial
  Synthetic oligonucleotide
cgaacacctgaggaaccatggcgtcagctagctcgatcctatggattgattttcattagt

SEQ ID NO: 116974 - DNA, 60 bp, Artificial
  Synthetic oligonucleotide
gacattttgtccacatcacgaacatggcagctcgacttcctatcgacgccttcggcatgt

SEQ ID NO: 116975 - DNA, 60 bp, Artificial
  Synthetic oligonucleotide
gaagaaggaggtttgtaccatgcactttacaacgcctgcaaagaacagaaaagtactcca

SEQ ID NO: 116976 - DNA, 60 bp, Artificial
  Synthetic oligonucleotide
tgcaaagaacagaaaagtactccatcttttgttgccagcccctcaaaccctgctcctgtg

SEQ ID NO: 116977 - DNA, 60 bp, Artificial
  Synthetic oligonucleotide
ttttgccgttccctggtactcagttgacgcgagagactgttttacgcaaggcattggtac

SEQ ID NO: 116978 - DNA, 60 bp, Artificial
  Synthetic oligonucleotide
ccgattctgcccattgtgccccctctcccttgcctcagcgtgcgcgaaagattagaccaa

SEQ ID NO: 116979 - DNA, 60 bp, Artificial
  Synthetic oligonucleotide
ttgaagccttattatcggtctatggaagagtgttttgttccagcgtgcgatattgaatca

SEQ ID NO: 116980 - DNA, 56 bp, Artificial
  Synthetic oligonucleotide
cccctctcccttgcctcagcgtgcgcgaaagattagaccaacggaagcgcggcgtc

SEQ ID NO: 116981 - DNA, 60 bp, Artificial
  Synthetic oligonucleotide
tattgaatcatatcgtactagtgtaattgttcaaccattgccgcagaatgttttgccgtt

SEQ ID NO: 116982 - DNA, 60 bp, Artificial
  Synthetic oligonucleotide
gctctgacccaacagaaggttcaatggatgaggtgacccaccagactgaaaccttgtccc

SEQ ID NO: 116983 - DNA, 60 bp, Artificial
  Synthetic oligonucleotide
ttgtgctattcaaacgtgtgacgattatggaccggcaccaagtgatgggagcgagagcgc

SEQ ID NO: 116984 - DNA, 60 bp, Artificial
  Synthetic oligonucleotide
gcattggtacgagagtgtgagcgtgttgctcctagtcaggcgcctgatccagaagagttg

SEQ ID NO: 116985 - DNA, 60 bp, Artificial
  Synthetic oligonucleotide
cgattttgattcatggctcgtgggtaagaagtgaagagcatgacggaggcttgtttgtgc

SEQ ID NO: 116986 - DNA, 60 bp, Artificial
  Synthetic oligonucleotide
ttctgaagaagcgattttgattcatggctcgtgggtaagaagtgaagagcatgacggagg

SEQ ID NO: 116987 - DNA, 60 bp, Artificial
  Synthetic oligonucleotide
cagatatgctttctgccctttgataccacctccttgtcctgaagattctgaagaagcgat

SEQ ID NO: 116988 - DNA, 60 bp, Artificial
  Synthetic oligonucleotide
cgactacaaggagtcttttgcacatcttggcactgatttcaacagatatgctttctgccc

SEQ ID NO: 116989 - DNA, 60 bp, Artificial
  Synthetic oligonucleotide
ggatgaaaatggtcgactacaaggagtcttttgcacatcttggcactgatttcaacagat

SEQ ID NO: 116990 - DNA, 60 bp, Artificial
  Synthetic oligonucleotide
cattagtgaagttggtgcattggcatccactcatgttgcctctctagacgctgatttggc

SEQ ID NO: 116991 - DNA, 60 bp, Artificial
  Synthetic oligonucleotide
actgatgatgcctgtagtgaatgtaccacctgaaggagttgataaggacctgttggcggt

SEQ ID NO: 116992 - DNA, 60 bp, Artificial
  Synthetic oligonucleotide
gagcttcgcgagagatgatgagtcagactgatttgcgtttgttagaactgatgatgcctg

SEQ ID NO: 116993 - DNA, 60 bp, Artificial
  Synthetic oligonucleotide
tcgtcctggttatggagctgaggcattagagcatgcgagatatgtctctgcagccggcgt

SEQ ID NO: 116994 - DNA, 52 bp, Artificial
  Synthetic oligonucleotide
tggatgagtggggctgcgcagtgtgtgacgagtgggtagaacggttgcagtc

SEQ ID NO: 116995 - DNA, 60 bp, Artificial
  Synthetic oligonucleotide
aagcaacagtgatggatattttaaccggttaggcgtggatgagtggggctgcgcagtgtg

SEQ ID NO: 116996 - DNA, 60 bp, Artificial
  Synthetic oligonucleotide
tgttggcggtgtacaaagcaacagtgatggatattttaaccggttaggcgtggatgagtg

SEQ ID NO: 116997 - DNA, 60 bp, Artificial
  Synthetic oligonucleotide
gcctgtagtgaatgtaccacctgaaggagttgataaggacctgttggcggtgtacaaagc

SEQ ID NO: 116998 - DNA, 60 bp, Artificial
  Synthetic oligonucleotide
aggttacgcgatgcttcgtcctggttatggagctgaggcattagagcatgcgagatatgt

SEQ ID NO: 116999 - DNA, 60 bp, Artificial
  Synthetic oligonucleotide
atagtcgagatgagccacctgaggacgaaggaaaccgtgcaagtgctcgacccaaatcta

SEQ ID NO: 117000 - DNA, 60 bp, Artificial
  Synthetic oligonucleotide
atggccctacactgcctatagatgcggcgaaggatttgtcagtagcttcagagtcggagg

SEQ ID NO: 117001 - DNA, 60 bp, Artificial
  Synthetic oligonucleotide
ttgtcagtagcttcagagtcggaggacgaagtctcgatgtctcaaagtgatgcccctccc

SEQ ID NO: 117002 - DNA, 60 bp, Artificial
  Synthetic oligonucleotide
cccaaatctagtccatgtgatacgtgtactgacgactcgtctttgcttcagtccttgctc

SEQ ID NO: 117003 - DNA, 60 bp, Artificial
  Synthetic oligonucleotide
tcagtacacctcttcatggccctacactgcctatagatgcggcgaaggatttgtcagtag

SEQ ID NO: 117004 - DNA, 60 bp, Artificial
  Synthetic oligonucleotide
atgacggaggcttgtttgtgctattcaaacgtgtgacgattatggaccggcaccaagtga

SEQ ID NO: 117005 - DNA, 60 bp, Artificial
  Synthetic oligonucleotide
cgagatgagccacctgaggacgaaggaaaccgtgcaagtgctcgacccaaatctagtcca

SEQ ID NO: 117006 - DNA, 60 bp, Artificial
  Synthetic oligonucleotide
accttgtccctagactcgataccccctccagatttctctagggctccagtgattgtgact

SEQ ID NO: 117007 - DNA, 60 bp, Artificial
  Synthetic oligonucleotide
gaacagaaaagtactccatcttttgttgccagcccctcaaaccctgctcctgtgtcactt

SEQ ID NO: 117008 - DNA, 60 bp, Artificial
  Synthetic oligonucleotide
actggaagctgggcactatcgtggaattctgtcaagctgttggtttgaatcgaacacctg

SEQ ID NO: 117009 - DNA, 60 bp, Artificial
  Synthetic oligonucleotide
gctgggcactatcgtggaattctgtcaagctgttggtttgaatcgaacacctgaggaacc

SEQ ID NO: 117010 - DNA, 60 bp, Artificial
  Synthetic oligonucleotide
cgtactagtgtaattgttcaaccattgccgcagaatgttttgccgttccctggtactcag

SEQ ID NO: 117011 - DNA, 60 bp, Artificial
  Synthetic oligonucleotide
ccacatcacgaacatggcagctcgacttcctatcgacgccttcggcatgtcagtgattca

SEQ ID NO: 117012 - DNA, 60 bp, Artificial
  Synthetic oligonucleotide
ttatacagtatcttgaagaaggaggtttgtaccatgcactttacaacgcctgcaaagaac

SEQ ID NO: 117013 - DNA, 60 bp, Artificial
  Synthetic oligonucleotide
cagagtcggaggacgaagtctcgatgtctcaaagtgatgcccctcccgaaacggcaatgg

SEQ ID NO: 117014 - DNA, 60 bp, Artificial
  Synthetic oligonucleotide
tgcccctcccgaaacggcaatggatgtatccgccaatcataagccgaacaccgattctgc

SEQ ID NO: 117015 - DNA, 60 bp, Artificial
  Synthetic oligonucleotide
agaagagttgctagactcggatacagtaaagatttgtgagggcagagcgaaggtgatgta

SEQ ID NO: 117016 - DNA, 60 bp, Artificial
  Synthetic oligonucleotide
ctcggatacagtaaagatttgtgagggcagagcgaaggtgatgtatgagtccattccttc

SEQ ID NO: 117017 - DNA, 60 bp, Artificial
  Synthetic oligonucleotide
aggtgatgtatgagtccattccttctcatcttcgtggagttgaaattgagtcagttgctc

SEQ ID NO: 117018 - DNA, 60 bp, Artificial
  Synthetic oligonucleotide
ccattccttctcatcttcgtggagttgaaattgagtcagttgctcctgagtctaacgagg

SEQ ID NO: 117019 - DNA, 60 bp, Artificial
  Synthetic oligonucleotide
gctcctgagtctaacgaggtctcagtcatctatcctcgacctcagatttctatgcctgat

SEQ ID NO: 117020 - DNA, 60 bp, Artificial
  Synthetic oligonucleotide
agaattcgcacatacgtaaggaaaaggactattatggagcgagaatctggaggttacgcg

SEQ ID NO: 117021 - DNA, 60 bp, Artificial
  Synthetic oligonucleotide
cgtaaggaaaaggactattatggagcgagaatctggaggttacgcgatgcttcgtcctgg

SEQ ID NO: 117022 - DNA, 60 bp, Artificial
  Synthetic oligonucleotide
ccgttccctggtactcagttgacgcgagagactgttttacgcaaggcattggtacgagag

SEQ ID NO: 117023 - DNA, 60 bp, Artificial
  Synthetic oligonucleotide
caactaagactcgcggtgttcgtgatgaggcatggaccttattctacaacactaatggtc

SEQ ID NO: 117024 - DNA, 60 bp, Artificial
  Synthetic oligonucleotide
ccggtgcctggtttgacctcactcagtatccacgttgggcgaatcgtcgtagagagcttg

SEQ ID NO: 117025 - DNA, 60 bp, Artificial
  Synthetic oligonucleotide
gctatttagtgcactgttacctccagttttggtgaatcaggacgcctggcgtgatgctaa

SEQ ID NO: 117026 - DNA, 60 bp, Artificial
  Synthetic oligonucleotide
tcaggtttggttgctgctccggatccacctcgtgcgcctccctacgtcccagtttccggt

SEQ ID NO: 117027 - DNA, 60 bp, Artificial
  Synthetic oligonucleotide
tcgtcgtagagagcttgagaccaaatacccattgctgctacgcattactctgctgaacat

SEQ ID NO: 117028 - DNA, 60 bp, Artificial
  Synthetic oligonucleotide
tgagaccaaatacccattgctgctacgcattactctgctgaacatgatgcagaacggtcc

SEQ ID NO: 117029 - DNA, 60 bp, Artificial
  Synthetic oligonucleotide
gtcgaactcaccatggcagaagcaatatagtccattggctttgagcttaacgtcctccac

SEQ ID NO: 117030 - DNA, 60 bp, Artificial
  Synthetic oligonucleotide
atcaagagtcaatgctatttagtgcactgttacctccagttttggtgaatcaggacgcct

SEQ ID NO: 117031 - DNA, 60 bp, Artificial
  Synthetic oligonucleotide
cgcgggttacccacggaccaacgacaacttacatcgttactcacctcgtcgaactcacca

SEQ ID NO: 117032 - DNA, 60 bp, Artificial
  Synthetic oligonucleotide
tcacctcgtcgaactcaccatggcagaagcaatatagtccattggctttgagcttaacgt

SEQ ID NO: 117033 - DNA, 60 bp, Artificial
  Synthetic oligonucleotide
ccagtttccggtgcctggtttgacctcactcagtatccacgttgggcgaatcgtcgtaga

SEQ ID NO: 117034 - DNA, 60 bp, Artificial
  Synthetic oligonucleotide
ccttattctacaacactaatggtcagagactcaatatcacgcagaggcattttggctatt

SEQ ID NO: 117035 - DNA, 60 bp, Artificial
  Synthetic oligonucleotide
tccagtcccaatggagtcccagtgcgtgagttgcagctgttggcctgtgctaccgaatgc

SEQ ID NO: 117036 - DNA, 60 bp, Artificial
  Synthetic oligonucleotide
gtcccagtgcgtgagttgcagctgttggcctgtgctaccgaatgcatccgctctcacgtt

SEQ ID NO: 117037 - DNA, 60 bp, Artificial
  Synthetic oligonucleotide
aggctttttcttctcaactaagactcgcggtgttcgtgatgaggcatggaccttattcta

SEQ ID NO: 117038 - DNA, 60 bp, Artificial
  Synthetic oligonucleotide
ctctggattctctcctacatcggtgtcgttcatcagaatgcgacaattgcaggctttttc

SEQ ID NO: 117039 - DNA, 58 bp, Artificial
  Synthetic oligonucleotide
ctctggattctctcctacatcggtgtcgttcatcagaatgcgacaattgcaggctttt

SEQ ID NO: 117040 - DNA, 60 bp, Artificial
  Synthetic oligonucleotide
gccccggagtctagttacgatcaacagatgcgcatgatggtctctctctggattctctcc

SEQ ID NO: 117041 - DNA, 60 bp, Artificial
  Synthetic oligonucleotide
cgttcgccccggagtctagttacgatcaacagatgcgcatgatggtctctctctggattc

SEQ ID NO: 117042 - DNA, 60 bp, Artificial
  Synthetic oligonucleotide
cagggaaatcgcaatggtgctggctcagtcctgctctaatatgccgttcgccccggagtc

SEQ ID NO: 117043 - DNA, 60 bp, Artificial
  Synthetic oligonucleotide
cgggctccttggtcaatttcgctatgtcgtgttatggtaaggatttcagggaaatcgcaa

SEQ ID NO: 117044 - DNA, 60 bp, Artificial
  Synthetic oligonucleotide
aatatgttatcgggctccttggtcaatttcgctatgtcgtgttatggtaaggatttcagg

SEQ ID NO: 117045 - DNA, 60 bp, Artificial
  Synthetic oligonucleotide
cagaacggtcctctcgtctatgtggagacgtggcctaatatgttatcgggctccttggtc

SEQ ID NO: 117046 - DNA, 60 bp, Artificial
  Synthetic oligonucleotide
tgctgaacatgatgcagaacggtcctctcgtctatgtggagacgtggcctaatatgttat

SEQ ID NO: 117047 - DNA, 60 bp, Artificial
  Synthetic oligonucleotide
gtttggcaatcgcgggttacccacggaccaacgacaacttacatcgttactcacctcgtc

SEQ ID NO: 117048 - DNA, 60 bp, Artificial
  Synthetic oligonucleotide
agtaggtcaagttattatgttggatgaggagttggagaaatacgaaatccgactcgacgt

SEQ ID NO: 117049 - DNA, 60 bp, Artificial
  Synthetic oligonucleotide
ggaactggtgacggaattgaacaataccacaaatctgactgcgaagaaagaatgtccgcg

SEQ ID NO: 117050 - DNA, 56 bp, Artificial
  Synthetic oligonucleotide
aaaactgcacacgtccactctccaccatggaagactatacactgcgcgaaagagaa

SEQ ID NO: 117051 - DNA, 60 bp, Artificial
  Synthetic oligonucleotide
gcaagttatcaaaagaccctttgaccccgatagttacctcaccgctgacctccatcttta

SEQ ID NO: 117052 - DNA, 60 bp, Artificial
  Synthetic oligonucleotide
cgttccactcacaattcatcctaccttgaacctgtcgctttccaacttactctattgggc

SEQ ID NO: 117053 - DNA, 60 bp, Artificial
  Synthetic oligonucleotide
ttaaaaaactgcacacgtccactctccaccatggaagactatacactgcgcgaaagagaa

SEQ ID NO: 117054 - DNA, 60 bp, Artificial
  Synthetic oligonucleotide
ggtgattatctaggattccgcgacggacaaagattcccctgcaaagaaacgattcacggt

SEQ ID NO: 117055 - DNA, 60 bp, Artificial
  Synthetic oligonucleotide
ttcacttgaggattggtgattatctaggattccgcgacggacaaagattcccctgcaaag

SEQ ID NO: 117056 - DNA, 60 bp, Artificial
  Synthetic oligonucleotide
attcacggtagacgcgatactattggaccattcatgcaaggtatgtcaggcaaatgggcc

SEQ ID NO: 117057 - DNA, 60 bp, Artificial
  Synthetic oligonucleotide
ctcaagaacgggaaaacgttgacgatccacatcgagcggaacctcttctttagccatgag

SEQ ID NO: 117058 - DNA, 60 bp, Artificial
  Synthetic oligonucleotide
aatcaagacggtcacagttcgttcgcccccgaaaatatgcgcaatgctctgctctactct

SEQ ID NO: 117059 - DNA, 60 bp, Artificial
  Synthetic oligonucleotide
gcaaggtatgtcaggcaaatgggccaaggaagattacatccatacgtacagtggtcgctt

SEQ ID NO: 117060 - DNA, 60 bp, Artificial
  Synthetic oligonucleotide
ccctgcaaagaaacgattcacggtagacgcgatactattggaccattcatgcaaggtatg

SEQ ID NO: 117061 - DNA, 60 bp, Artificial
  Synthetic oligonucleotide
cgctaatcaataactttatcatcccgagatgcctaccgtaccgcgatcaatatggcaagg

SEQ ID NO: 117062 - DNA, 60 bp, Artificial
  Synthetic oligonucleotide
ttatcatcccgagatgcctaccgtaccgcgatcaatatggcaaggactactaattgcgca

SEQ ID NO: 117063 - DNA, 60 bp, Artificial
  Synthetic oligonucleotide
gaccctttgaccccgatagttacctcaccgctgacctccatctttatctcaagaacggga

SEQ ID NO: 117064 - DNA, 60 bp, Artificial
  Synthetic oligonucleotide
tccatctttatctcaagaacgggaaaacgttgacgatccacatcgagcggaacctcttct

SEQ ID NO: 117065 - DNA, 60 bp, Artificial
  Synthetic oligonucleotide
ttgtttgaggaggggagtgatgcccccgaatcgaacttaaaagtgcgcgtgagagtgaaa

SEQ ID NO: 117066 - DNA, 60 bp, Artificial
  Synthetic oligonucleotide
gccgttccactcacaattcatcctaccttgaacctgtcgctttccaacttactctattgg

SEQ ID NO: 117067 - DNA, 54 bp, Artificial
  Synthetic oligonucleotide
gcttaccgcgaacattatttatctaactctgggcctggtaaatgcgatactcaa

SEQ ID NO: 117068 - DNA, 52 bp, Artificial
  Synthetic oligonucleotide
ccccgaatcgaacttaaaagtgcgcgtgagagtgaaagcgccacagaacatg

SEQ ID NO: 117069 - DNA, 60 bp, Artificial
  Synthetic oligonucleotide
tatggcaaggactactaattgcgcagaaatgagacgactaatggttgaggttgtttgagg

SEQ ID NO: 117070 - DNA, 60 bp, Artificial
  Synthetic oligonucleotide
taattgcgcagaaatgagacgactaatggttgaggttgtttgaggaggggagtgatgccc

SEQ ID NO: 117071 - DNA, 60 bp, Artificial
  Synthetic oligonucleotide
agctcaccaccctcgagcaaagactcgagcactccatcaaagccgccaaagccagtgtcg

SEQ ID NO: 117072 - DNA, 55 bp, Artificial
  Synthetic oligonucleotide
atcaaagccgccaaagccagtgtcgacagacatctcacgcgtcacgctgcagacc

SEQ ID NO: 117073 - DNA, 60 bp, Artificial
  Synthetic oligonucleotide
actttcccatattaccctgaacaatgcagaacgacttgtcaccggcaacgagctcaccac

SEQ ID NO: 117074 - DNA, 60 bp, Artificial
  Synthetic oligonucleotide
ttgtcaccggcaacgagctcaccaccctcgagcaaagactcgagcactccatcaaagccg

SEQ ID NO: 117075 - DNA, 60 bp, Artificial
  Synthetic oligonucleotide
cggagcaggtatggctcaggacttgatcaacatttcccaattggctaacagactttccca

SEQ ID NO: 117076 - DNA, 60 bp, Artificial
  Synthetic oligonucleotide
ccaattggctaacagactttcccatattaccctgaacaatgcagaacgacttgtcaccgg

SEQ ID NO: 117077 - DNA, 60 bp, Artificial
  Synthetic oligonucleotide
gctggtgcttatccagacctgacatgttggccgatcatgggggtatttgagtagagtcgt

SEQ ID NO: 117078 - DNA, 60 bp, Artificial
  Synthetic oligonucleotide
gttttagaagacatcggagcaggtatggctcaggacttgatcaacatttcccaattggct

SEQ ID NO: 117079 - DNA, 60 bp, Artificial
  Synthetic oligonucleotide
ttcatgccacggacaccctgatcatgttcgaacttccgggtgttgattcggctggtgctt

SEQ ID NO: 117080 - DNA, 60 bp, Artificial
  Synthetic oligonucleotide
gtatgatctacgcgccaccggtcgccgcgctcaaattcatgccacggacaccctgatcat

SEQ ID NO: 117081 - DNA, 60 bp, Artificial
  Synthetic oligonucleotide
ctccggtccaaccaggtatgatctacgcgccaccggtcgccgcgctcaaattcatgccac

SEQ ID NO: 117082 - DNA, 60 bp, Artificial
  Synthetic oligonucleotide
gccaagcgcttgaaatccactgaggtcaacgtgaagtggtacggtggctccggtccaacc

SEQ ID NO: 117083 - DNA, 60 bp, Artificial
  Synthetic oligonucleotide
gtggccaagcgcttgaaatccactgaggtcaacgtgaagtggtacggtggctccggtcca

SEQ ID NO: 117084 - DNA, 60 bp, Artificial
  Synthetic oligonucleotide
tcaaagtagataagggttcctggcacgacaccgcatacggcgcgttcaatcccgtggctt

SEQ ID NO: 117085 - DNA, 52 bp, Artificial
  Synthetic oligonucleotide
cgcgagagctatcggctttccgctatgccagtcgtgctccactcttgcgggg

SEQ ID NO: 117086 - DNA, 60 bp, Artificial
  Synthetic oligonucleotide
gggccacagtactaccgtgcctgtgccaactaagatcattgtcgaagcaactcaatgcac

SEQ ID NO: 117087 - DNA, 60 bp, Artificial
  Synthetic oligonucleotide
atcaaagtagataagggttcctggcacgacaccgcatacggcgcgttcaatcccgtggct

SEQ ID NO: 117088 - DNA, 60 bp, Artificial
  Synthetic oligonucleotide
cggacaccctgatcatgttcgaacttccgggtgttgattcggctggtgcttatccagacc

SEQ ID NO: 117089 - DNA, 60 bp, Artificial
  Synthetic oligonucleotide
gccacagtactaccgtgcctgtgccaactaagatcattgtcgaagcaactcaatgcaccc

SEQ ID NO: 117090 - DNA, 60 bp, Artificial
  Synthetic oligonucleotide
ccaaactgaaccagttggatgctgcttttggcgtggagtccagatctgatcaacgcatga

SEQ ID NO: 117091 - DNA, 60 bp, Artificial
  Synthetic oligonucleotide
cgctcagaactacaatcccaggcacacgtgacctccttcggcgctaagctcttccagcag

SEQ ID NO: 117092 - DNA, 60 bp, Artificial
  Synthetic oligonucleotide
ctcgagaaacgctgcgggtactgggtcccagaccatactacgtgggtttgctctcttacg

SEQ ID NO: 117093 - DNA, 60 bp, Artificial
  Synthetic oligonucleotide
gtttcgtgccaatgcgaggtaatgattttgggttggagggtcaaattgatctcctcgctg

SEQ ID NO: 117094 - DNA, 60 bp, Artificial
  Synthetic oligonucleotide
gccgactatgctctgacttgccatcatccgggtgacttgcctgctactttgactcctgtt

SEQ ID NO: 117095 - DNA, 60 bp, Artificial
  Synthetic oligonucleotide
ccgctgactgccttatccgcagaccgtactgtccgccatgttaatgtgtctaccgtgctc

SEQ ID NO: 117096 - DNA, 60 bp, Artificial
  Synthetic oligonucleotide
acttgccatcatccgggtgacttgcctgctactttgactcctgttggcctcgaagctgcc

SEQ ID NO: 117097 - DNA, 60 bp, Artificial
  Synthetic oligonucleotide
ttcctactcgccaattgtcatatgtcacctgattgctcgtgtaatgtctggtttcgtgcc

SEQ ID NO: 117098 - DNA, 60 bp, Artificial
  Synthetic oligonucleotide
ctcctgttggcctcgaagctgccagattggttattgcgaagttctcagaacgtggtatgg

SEQ ID NO: 117099 - DNA, 60 bp, Artificial
  Synthetic oligonucleotide
taacgatgacgcctcagctattgctgtaccgaccgctcgcgttgaggacatgcttcagga

SEQ ID NO: 117100 - DNA, 60 bp, Artificial
  Synthetic oligonucleotide
ctcattctcagtcgtcgttcgcgctggtaactgggtgctgatgaaaggtgaggacgcagc

SEQ ID NO: 117101 - DNA, 60 bp, Artificial
  Synthetic oligonucleotide
ctgaatgagctgcctagtagtgagaatcgtggcaggatgccctggaaactcatgcttgca

SEQ ID NO: 117102 - DNA, 60 bp, Artificial
  Synthetic oligonucleotide
gcactggccgatcaacgctcagaactacaatcccaggcacacgtgacctccttcggcgct

SEQ ID NO: 117103 - DNA, 60 bp, Artificial
  Synthetic oligonucleotide
cgctgttcaatcccactttccaggcttagggcgcatgaccaaatgtttgtctccgctgac

SEQ ID NO: 117104 - DNA, 60 bp, Artificial
  Synthetic oligonucleotide
agatttagtgcaatgcctgacggtactcattttatgattggaactgtccctgctcaatcg

SEQ ID NO: 117105 - DNA, 60 bp, Artificial
  Synthetic oligonucleotide
gaaaaaacgctacgcacgtccatctaacaaagcttctcctcaacctaactcttccgaatc

SEQ ID NO: 117106 - DNA, 60 bp, Artificial
  Synthetic oligonucleotide
atttagactgtttggtgaatgcattgacaaagtacgtgccttgaaagaaaagtatcctca

SEQ ID NO: 117107 - DNA, 60 bp, Artificial
  Synthetic oligonucleotide
ggagcgaggtgagcctgtgaaggagtctgttgttgaaaaccacgtggttcatgagatggt

SEQ ID NO: 117108 - DNA, 60 bp, Artificial
  Synthetic oligonucleotide
aatggcgggagtacttctggatactaagcgagaggcccaagcagaggctaacgtttatgg

SEQ ID NO: 117109 - DNA, 60 bp, Artificial
  Synthetic oligonucleotide
aaagctggaactttgaagcaagcggtgactaatgcaatggcgggagtacttctggatact

SEQ ID NO: 117110 - DNA, 60 bp, Artificial
  Synthetic oligonucleotide
agatgggcgaagcaaaaagctggaactttgaagcaagcggtgactaatgcaatggcggga

SEQ ID NO: 117111 - DNA, 60 bp, Artificial
  Synthetic oligonucleotide
gacgttaaacgagttggacatcatgtaggtctcgagcttgtggagcgaggtgagcctgtg

SEQ ID NO: 117112 - DNA, 60 bp, Artificial
  Synthetic oligonucleotide
acagagcatctacaaaaattagcaccattgataccaccgggggcagcagatacagttatg

SEQ ID NO: 117113 - DNA, 60 bp, Artificial
  Synthetic oligonucleotide
acgtttatggtagtatggtggggggtcgtcatgtgttagcccttcctccaacagagcatc

SEQ ID NO: 117114 - DNA, 60 bp, Artificial
  Synthetic oligonucleotide
ctttaagtgcttttcaactggtggatgggtcattaaacagggctgcggcgaagggactaa

SEQ ID NO: 117115 - DNA, 60 bp, Artificial
  Synthetic oligonucleotide
aactggtggatgggtcattaaacagggctgcggcgaagggactaaaatgggctgcggatc

SEQ ID NO: 117116 - DNA, 60 bp, Artificial
  Synthetic oligonucleotide
ccgaaagtcagcagccattatgctcttatccaccgctaaagctatgttgcctttaagtgc

SEQ ID NO: 117117 - DNA, 60 bp, Artificial
  Synthetic oligonucleotide
ggcgtttgctaaatcgccggacaaaagtcatcataatacgaactgtggtttaggacttgt

SEQ ID NO: 117118 - DNA, 60 bp, Artificial
  Synthetic oligonucleotide
ccgacgacgcatgtgatgagtgggtgtctactgcaatattagcgatgcctatgtggatgc

SEQ ID NO: 117119 - DNA, 60 bp, Artificial
  Synthetic oligonucleotide
ccctctggatgtggtgagtgcatggtctgaattgattagtccgttgactgtgtatttgcc

SEQ ID NO: 117120 - DNA, 60 bp, Artificial
  Synthetic oligonucleotide
agggggaggtagcaccggatcatgacatgaatattaatgtggttttaacggcggccatta

SEQ ID NO: 117121 - DNA, 60 bp, Artificial
  Synthetic oligonucleotide
gcggccattaagaagagctcgtctggtacgtcgtgtaaggtatatgtgggggcgtttgct

SEQ ID NO: 117122 - DNA, 60 bp, Artificial
  Synthetic oligonucleotide
ccaaatggttggatcagagggcaaaattaaaggtgtagtttcaggtacattagatggata

SEQ ID NO: 117123 - DNA, 60 bp, Artificial
  Synthetic oligonucleotide
gccaaggacttgtcacagggaaattaaaaaagggtcttaaagtgacactagcgaaggcgc

SEQ ID NO: 117124 - DNA, 60 bp, Artificial
  Synthetic oligonucleotide
gcgaaggcgcatcatggtcgagatacatctcctcaaacagtctgtataatttctggaagc

SEQ ID NO: 117125 - DNA, 60 bp, Artificial
  Synthetic oligonucleotide
ttctggaagcttcttttcttatgatcctgctgctgtgcatattggaggggagggggaggt

SEQ ID NO: 117126 - DNA, 60 bp, Artificial
  Synthetic oligonucleotide
gggaaggtatctctgggcatcgtggcggaattcagctgtatacactgactatgtaggagg

SEQ ID NO: 117127 - DNA, 60 bp, Artificial
  Synthetic oligonucleotide
gctgttaaagcgtggtgcagcaaaaatgaaggggatggtggctgggcatttaaggccgat

SEQ ID NO: 117128 - DNA, 60 bp, Artificial
  Synthetic oligonucleotide
tacggtccctaaactagattgcaatccaatcgaggctacagtcatagatcgattggcttt

SEQ ID NO: 117129 - DNA, 60 bp, Artificial
  Synthetic oligonucleotide
gattggctttctcgggaaggtatctctgggcatcgtggcggaattcagctgtatacactg

SEQ ID NO: 117130 - DNA, 60 bp, Artificial
  Synthetic oligonucleotide
cactcttgtccccttctgtatacagcttttctcattagtgatgggtggtctacggtccct

SEQ ID NO: 117131 - DNA, 60 bp, Artificial
  Synthetic oligonucleotide
gacagttaaactgggatcgtttatggcggggtttcgtgatgcgactaatgcgagtgggtg

SEQ ID NO: 117132 - DNA, 60 bp, Artificial
  Synthetic oligonucleotide
gtcgtagccaatttggagtcttttatatcaggggtgacatttcttaatcgtgtgcgcttg

SEQ ID NO: 117133 - DNA, 60 bp, Artificial
  Synthetic oligonucleotide
ggatatgaaaagataagaaaggctgctaactggttgggtggaacttatagtcgtccgtgg

SEQ ID NO: 117134 - DNA, 59 bp, Artificial
  Synthetic oligonucleotide
ttatagtcgtccgtggaaagttgaaactcgtgaaatgtcggaaatacagcaacgtattg

SEQ ID NO: 117135 - DNA, 60 bp, Artificial
  Synthetic oligonucleotide
atgacttcgattattgggggtacattcggccctgctggtgctcgatcaggcggtgatcac

SEQ ID NO: 117136 - DNA, 60 bp, Artificial
  Synthetic oligonucleotide
aaaccctacaatagcggagttcaattctatttatgacatgagaagctttatcgggttgcg

SEQ ID NO: 117137 - DNA, 60 bp, Artificial
  Synthetic oligonucleotide
taaggccgatgcttggagaggcagcgggggcagccgagcgagttatggcaagatgggcga

SEQ ID NO: 117138 - DNA, 60 bp, Artificial
  Synthetic oligonucleotide
tgctatgcaggatccgacgaacaagttagatgctaaagcgacattttcttgccaaggact

SEQ ID NO: 117139 - DNA, 60 bp, Artificial
  Synthetic oligonucleotide
gttcatgagatggttaatcgaacgaagacaggggttggccagattggagaggtgcgacgt

SEQ ID NO: 117140 - DNA, 60 bp, Artificial
  Synthetic oligonucleotide
gatggttaatcgaacgaagacaggggttggccagattggagaggtgcgacgtgagctggc

SEQ ID NO: 117141 - DNA, 60 bp, Artificial
  Synthetic oligonucleotide
ggtgcgacgtgagctggctaagtgttcagaggttatgaaagatgtctcgattgagaagat

SEQ ID NO: 117142 - DNA, 60 bp, Artificial
  Synthetic oligonucleotide
gaagatggtggctagacctgatgaagtgcgtggaacgtcctttcccattcatactcgagg

SEQ ID NO: 117143 - DNA, 60 bp, Artificial
  Synthetic oligonucleotide
ggcgagtgtattatagtgcctagaggattagataggtatttcatttttaacagagttagg

SEQ ID NO: 117144 - DNA, 60 bp, Artificial
  Synthetic oligonucleotide
gttcaagcgagtgttcgcatgttgagttagtccagttaggagttgagttcggcgagtgta

SEQ ID NO: 117145 - DNA, 60 bp, Artificial
  Synthetic oligonucleotide
gggtggtttgacaggagttgcggattgtccatggaatgggaccttcgcctttggagtcgc

SEQ ID NO: 117146 - DNA, 60 bp, Artificial
  Synthetic oligonucleotide
ggaagactctcttttaatatttcagcgctgctgaggggtggtttgacaggagttgcggat

SEQ ID NO: 117147 - DNA, 60 bp, Artificial
  Synthetic oligonucleotide
taggacttgttcctgcaattgatgacaaaggccagacgtatctgactgcatccggagtat

SEQ ID NO: 117148 - DNA, 60 bp, Artificial
  Synthetic oligonucleotide
cgagtgggtggaatcagggagtgtcatatttgatgagccatgatgtgtttcggatcgggt

SEQ ID NO: 117149 - DNA, 60 bp, Artificial
  Synthetic oligonucleotide
ggatcgtttatggcggggtttcgtgatgcgactaatgcgagtgggtggaatcagggagtg

SEQ ID NO: 117150 - DNA, 60 bp, Artificial
  Synthetic oligonucleotide
cggatcgggtatgccagtatcgttcctgattctgatcgacctccacaagtattatggcaa

SEQ ID NO: 117151 - DNA, 59 bp, Artificial
  Synthetic oligonucleotide
ggggtacattcggccctgctggtgctcgatcaggcggtgatcacatgctggtaaggcca

SEQ ID NO: 117152 - DNA, 60 bp, Artificial
  Synthetic oligonucleotide
gccagtatcgttcctgattctgatcgacctccacaagtattatggcaatctgcgcttagg

SEQ ID NO: 117153 - DNA, 51 bp, Artificial
  Synthetic oligonucleotide
gacatttgtcaaccatcagaatgggaaatcgagtttccacgtatagtcctc

SEQ ID NO: 117154 - DNA, 60 bp, Artificial
  Synthetic oligonucleotide
ccgagtacatttctgaggcaactgtggaggcaccactgacaccaataaaggatcgaggga

SEQ ID NO: 117155 - DNA, 60 bp, Artificial
  Synthetic oligonucleotide
ggatcgagggatcggcgattttgagttgcttcaacgtctgtttgtgatgtggctgcgggg

SEQ ID NO: 117156 - DNA, 60 bp, Artificial
  Synthetic oligonucleotide
gcctctgatggttaatgagttacgagctcaaaatactttagcacttgtgaaaacgaggta

SEQ ID NO: 117157 - DNA, 60 bp, Artificial
  Synthetic oligonucleotide
gttatcgcatggttctacgttaactacaaaaggttatgctaagaatccagtatgtgatgt

SEQ ID NO: 117158 - DNA, 52 bp, Artificial
  Synthetic oligonucleotide
atgctaagaatccagtatgtgatgtgtacctcgaacagatttcacttcaacc

SEQ ID NO: 117159 - DNA, 60 bp, Artificial
  Synthetic oligonucleotide
aaagttaacattaacatagtgaaactatcaacccaaaagccatatacgtatgaagcttat

SEQ ID NO: 117160 - DNA, 60 bp, Artificial
  Synthetic oligonucleotide
tgaagcttatttgttgttatcgcatggttctacgttaactacaaaaggttatgctaagaa

SEQ ID NO: 117161 - DNA, 60 bp, Artificial
  Synthetic oligonucleotide
agtgaggaaaagtttgatgacataacagagtttgtatgctatttaacagaattggtgatt

SEQ ID NO: 117162 - DNA, 51 bp, Artificial
  Synthetic oligonucleotide
attggtgattagtaatgctactattggattagtgaagatatcgatgccgac

SEQ ID NO: 117163 - DNA, 60 bp, Artificial
  Synthetic oligonucleotide
ttcaaggctttggtgatcgtggaataggaagagataggtttcggacaaaaattgaggacg

SEQ ID NO: 117164 - DNA, 60 bp, Artificial
  Synthetic oligonucleotide
ggtgtgacatattaatatctgatatagatcaagctgattatcaagatccgagtgaggaaa

SEQ ID NO: 117165 - DNA, 60 bp, Artificial
  Synthetic oligonucleotide
accagcaatggatgtactgaagttattttatggagacaaagcattatatattcaaggctt

SEQ ID NO: 117166 - DNA, 50 bp, Artificial
  Synthetic oligonucleotide
ttcaaggctttggtgatcgtggaataggaagagataggtttcggacaaaa

SEQ ID NO: 117167 - DNA, 60 bp, Artificial
  Synthetic oligonucleotide
gcatgcgcacaacataggttatcaagatgacgtttctgagttaatcgccaataatccaca

SEQ ID NO: 117168 - DNA, 60 bp, Artificial
  Synthetic oligonucleotide
catatgatactcttcttaaaagataatacatatcatggtgttattcaagcattacagaaa

SEQ ID NO: 117169 - DNA, 60 bp, Artificial
  Synthetic oligonucleotide
attacagaaacatccttttagtgcaacacacgttacttggcatttacataaacatatatt

SEQ ID NO: 117170 - DNA, 59 bp, Artificial
  Synthetic oligonucleotide
aacatatattcgtatttcattcaagagagaaattgttaaacaaactacttgcaacggga

SEQ ID NO: 117171 - DNA, 60 bp, Artificial
  Synthetic oligonucleotide
aatacaaaacaacaagatttacgtcttttaggaccgatgagacatgttagattaacacat

SEQ ID NO: 117172 - DNA, 60 bp, Artificial
  Synthetic oligonucleotide
gatttacgtcttttaggaccgatgagacatgttagattaacacatctctacaaacatact

SEQ ID NO: 117173 - DNA, 57 bp, Artificial
  Synthetic oligonucleotide
attaacacatctctacaaacatactaagctctggaacttacaatacattgaacgaga

SEQ ID NO: 117174 - DNA, 60 bp, Artificial
  Synthetic oligonucleotide
attaggcatgcatgcgcacaacataggttatcaagatgacgtttctgagttaatcgccaa

SEQ ID NO: 117175 - DNA, 60 bp, Artificial
  Synthetic oligonucleotide
aaattggagtaggttctatcgcatatgtacaagtttatactgatgttgtagcacggcata

SEQ ID NO: 117176 - DNA, 60 bp, Artificial
  Synthetic oligonucleotide
gagtaggttctatcgcatatgtacaagtttatactgatgttgtagcacggcatattaatg

SEQ ID NO: 117177 - DNA, 60 bp, Artificial
  Synthetic oligonucleotide
gcacggcatattaatgtaatgacaaagaatgatagttttcttatttcagctaacgcagat

SEQ ID NO: 117178 - DNA, 66 bp, Artificial
  Synthetic oligonucleotide
cacggcatattaatgtaatgacaaagaatgatagttttcttatttcagctaacgcagataaaacgg

SEQ ID NO: 117179 - DNA, 60 bp, Artificial
  Synthetic oligonucleotide
gcacaaagagaggggatagaccaactgagagaatgataacttacattgaagatgaccata

SEQ ID NO: 117180 - DNA, 60 bp, Artificial
  Synthetic oligonucleotide
gagaggggatagaccaactgagagaatgataacttacattgaagatgaccatattcgacg

SEQ ID NO: 117181 - DNA, 57 bp, Artificial
  Synthetic oligonucleotide
tagagatgtgtaattacgagcagctattacaattggtttctgataatacaggagtgc

SEQ ID NO: 117182 - DNA, 60 bp, Artificial
  Synthetic oligonucleotide
taccaggatgtgctagaatcgtgcgtactaagttcagggatcttgggtgataccggctct

SEQ ID NO: 117183 - DNA, 60 bp, Artificial
  Synthetic oligonucleotide
taacgcagataaaacggtttttaaagtacaagtatcaggttataaagcggtagagatgtg

SEQ ID NO: 117184 - DNA, 51 bp, Artificial
  Synthetic oligonucleotide
agtacaagtatcaggttataaagcggtagagatgtgtaattacgagcagct

SEQ ID NO: 117185 - DNA, 60 bp, Artificial
  Synthetic oligonucleotide
cactacctgaatttcttaccactcgaccgaaatatagatatgcatatacgaatacaaaac

SEQ ID NO: 117186 - DNA, 60 bp, Artificial
  Synthetic oligonucleotide
cgcatgttcagatatcatatagagcacaacgttatcagtttacagaaagtatacccaatc

SEQ ID NO: 117187 - DNA, 60 bp, Artificial
  Synthetic oligonucleotide
ccagttgaagtgtatgacacagtaggcattacacgagaatatccgcatgttcagatatca

SEQ ID NO: 117188 - DNA, 60 bp, Artificial
  Synthetic oligonucleotide
ttgcaatgcatatattatcaatacactgtagtactatcatcactcgttcggttatggtta

SEQ ID NO: 117189 - DNA, 60 bp, Artificial
  Synthetic oligonucleotide
ttagtaccatatcaaatgaaattaattatgataaaccaacgttatatcgtttagtagtgg

SEQ ID NO: 117190 - DNA, 60 bp, Artificial
  Synthetic oligonucleotide
tgcttttcctaatggttttggttcaacccatcaaaatgattatgattcatccacgtcagt

SEQ ID NO: 117191 - DNA, 60 bp, Artificial
  Synthetic oligonucleotide
gagttgctattatgaatcgtatgacagacggcactaatgagaacgcttatatgtatgagg

SEQ ID NO: 117192 - DNA, 60 bp, Artificial
  Synthetic oligonucleotide
tatcaaagagtattcctgtcgcgttactagagtcactaagtagaatacgaattgttggtg

SEQ ID NO: 117193 - DNA, 60 bp, Artificial
  Synthetic oligonucleotide
gcttttcctaatggttttggttcaacccatcaaaatgattatgattcatccacgtcagtg

SEQ ID NO: 117194 - DNA, 60 bp, Artificial
  Synthetic oligonucleotide
taaaacaccagttgaagtgtatgacacagtaggcattacacgagaatatccgcatgttca

SEQ ID NO: 117195 - DNA, 60 bp, Artificial
  Synthetic oligonucleotide
ttcctgtcgcgttactagagtcactaagtagaatacgaattgttggtggacgtgacttgg

SEQ ID NO: 117196 - DNA, 60 bp, Artificial
  Synthetic oligonucleotide
cgcacagtgctaattgatgataaagtaatattgagaaggaattttaacgctagtactgct

SEQ ID NO: 117197 - DNA, 60 bp, Artificial
  Synthetic oligonucleotide
caatattatgatgtatcgttcagtcaaagatatgttcgctgccatcgaatacataccaga

SEQ ID NO: 117198 - DNA, 60 bp, Artificial
  Synthetic oligonucleotide
tcaggttaaatgacaatattatgatgtatcgttcagtcaaagatatgttcgctgccatcg

SEQ ID NO: 117199 - DNA, 60 bp, Artificial
  Synthetic oligonucleotide
taaagattaacgttagattgatatcatcaagagagaatcagcctgtgtcatggaaaacgc

SEQ ID NO: 117200 - DNA, 60 bp, Artificial
  Synthetic oligonucleotide
cttaccaattgaacaatatatgttatacgataccacatgttggccattttcagagaagat

SEQ ID NO: 117201 - DNA, 60 bp, Artificial
  Synthetic oligonucleotide
cggatacgatttatgatagtgcgaaaaattcagactcaacggtaactccagaaattcgta

SEQ ID NO: 117202 - DNA, 60 bp, Artificial
  Synthetic oligonucleotide
gaccatattcgacgtattcaagcagtccttcctttgttacttgataatatattcgatgtg

SEQ ID NO: 117203 - DNA, 60 bp, Artificial
  Synthetic oligonucleotide
gatgaccatattcgacgtattcaagcagtccttcctttgttacttgataatatattcgat

SEQ ID NO: 117204 - DNA, 60 bp, Artificial
  Synthetic oligonucleotide
ccaggattacggattgtattctttggagttgaaacagaaccagcaatggatgtactgaag

SEQ ID NO: 117205 - DNA, 60 bp, Artificial
  Synthetic oligonucleotide
tcactcatttatccaggattacggattgtattctttggagttgaaacagaaccagcaatg

SEQ ID NO: 117206 - DNA, 60 bp, Artificial
  Synthetic oligonucleotide
gatgtgctagaatcgtgcgtactaagttcagggatcttgggtgataccggctcttggctg

SEQ ID NO: 117207 - DNA, 60 bp, Artificial
  Synthetic oligonucleotide
cttttaattcacgtcgtcgttgatggaactggcgcgtctattgccgtcaaccccggtgcc

SEQ ID NO: 117208 - DNA, 54 bp, Artificial
  Synthetic oligonucleotide
gtctattgccgtcaaccccggtgccgctcgtgacttgctgaaggcagaccagct

SEQ ID NO: 117209 - DNA, 60 bp, Artificial
  Synthetic oligonucleotide
gtgacgatatccacgagattgctcctgctcctaccgctatggcactggcattcactacca

SEQ ID NO: 117210 - DNA, 60 bp, Artificial
  Synthetic oligonucleotide
ttcactaccaaagttcttttaattcacgtcgtcgttgatggaactggcgcgtctattgcc

SEQ ID NO: 117211 - DNA, 60 bp, Artificial
  Synthetic oligonucleotide
tcctctaacgctcgcctctcgcgtagccatggtctgcgctggtctcgactgtgacgatat

SEQ ID NO: 117212 - DNA, 60 bp, Artificial
  Synthetic oligonucleotide
ctctcgcgtagccatggtctgcgctggtctcgactgtgacgatatccacgagattgctcc

SEQ ID NO: 117213 - DNA, 60 bp, Artificial
  Synthetic oligonucleotide
ctgtcccactccgcgtcgccacctccaccggcttggaactccccactgctcatctcgccc

SEQ ID NO: 117214 - DNA, 60 bp, Artificial
  Synthetic oligonucleotide
tcgccacctccaccggcttggaactccccactgctcatctcgcccagatgcccgttgacc

SEQ ID NO: 117215 - DNA, 60 bp, Artificial
  Synthetic oligonucleotide
attatggttatgatgtccggggaaccgtgcgacgtgacaccgctgccgctctggcgcctt

SEQ ID NO: 117216 - DNA, 60 bp, Artificial
  Synthetic oligonucleotide
ctggcgccttctgaactacccgacacctatcccatcgagtggctgggtctcatctgcggt

SEQ ID NO: 117217 - DNA, 60 bp, Artificial
  Synthetic oligonucleotide
actggtatgtctgccgcagctcgaaacttgaaccccatcgccaacgtcaagaacatgcgc

SEQ ID NO: 117218 - DNA, 60 bp, Artificial
  Synthetic oligonucleotide
aacatgcgccaacccggctacgtcaagcccgcccacaccgctactaacactgtcccactc

SEQ ID NO: 117219 - DNA, 60 bp, Artificial
  Synthetic oligonucleotide
gaacatgcgccaacccggctacgtcaagcccgcccacaccgctactaacactgtcccact

SEQ ID NO: 117220 - DNA, 60 bp, Artificial
  Synthetic oligonucleotide
gttattttgagcttaccgattgacaaccatcatggcacacacaggcaccgctactctgat

SEQ ID NO: 117221 - DNA, 58 bp, Artificial
  Synthetic oligonucleotide
ctactctgatcaatgccgagcgcacagatcgaactctccgcctcctcgaaacttttcc

SEQ ID NO: 117222 - DNA, 60 bp, Artificial
  Synthetic oligonucleotide
ccgattgacaaccatcatggcacacacaggcaccgctactctgatcaatgccgagcgcac

SEQ ID NO: 117223 - DNA, 60 bp, Artificial
  Synthetic oligonucleotide
acaggacacgtccgggcgtgatctcgtgtcttccgtgtactccgcgactggtatgtctgc

SEQ ID NO: 117224 - DNA, 60 bp, Artificial
  Synthetic oligonucleotide
tcagacaggacacgtccgggcgtgatctcgtgtcttccgtgtactccgcgactggtatgt

SEQ ID NO: 117225 - DNA, 60 bp, Artificial
  Synthetic oligonucleotide
gcagctcgaaacttgaaccccatcgccaacgtcaagaacatgcgccaacccggctacgtc

SEQ ID NO: 117226 - DNA, 59 bp, Artificial
  Synthetic oligonucleotide
ttgtttcgcgtgagggccttgccgatcggaggtatgtaagggtgtggtcaccacccgca

SEQ ID NO: 117227 - DNA, 60 bp, Artificial
  Synthetic oligonucleotide
aaaggagctgccctagaggtatcgggtaacggcgctgagttgtttcgcgtgagggccttg

SEQ ID NO: 117228 - DNA, 60 bp, Artificial
  Synthetic oligonucleotide
acatcgccctgaaaggagctgccctagaggtatcgggtaacggcgctgagttgtttcgcg

SEQ ID NO: 117229 - DNA, 60 bp, Artificial
  Synthetic oligonucleotide
actgcttcgccactggcagaaaccggagttgacccccgccatacccgttaacatcgccct

SEQ ID NO: 117230 - DNA, 60 bp, Artificial
  Synthetic oligonucleotide
tcactcacgcccaaaggccattccgtgacttccccgaactgcttcgccactggcagaaac

SEQ ID NO: 117231 - DNA, 60 bp, Artificial
  Synthetic oligonucleotide
atgcatctatgtgtcactcacgcccaaaggccattccgtgacttccccgaactgcttcgc

SEQ ID NO: 117232 - DNA, 60 bp, Artificial
  Synthetic oligonucleotide
cgcgactcagatcgagttggaccttgacatgctggccatgaatcagactgagcagaagct

SEQ ID NO: 117233 - DNA, 60 bp, Artificial
  Synthetic oligonucleotide
catctgcggtctaatcgcgactcagatcgagttggaccttgacatgctggccatgaatca

SEQ ID NO: 117234 - DNA, 60 bp, Artificial
  Synthetic oligonucleotide
ctacccgacacctatcccatcgagtggctgggtctcatctgcggtctaatcgcgactcag

SEQ ID NO: 117235 - DNA, 60 bp, Artificial
  Synthetic oligonucleotide
ctcttaggaagcttggtagcgagggcttgtcggcgtgagtatcgccatgctattagcgcc

SEQ ID NO: 117236 - DNA, 60 bp, Artificial
  Synthetic oligonucleotide
agtatcgccatgctattagcgccttgtggactagggtgatggatgcgtagggttgaagcc

SEQ ID NO: 117237 - DNA, 60 bp, Artificial
  Synthetic oligonucleotide
cgagctgtcagaccccaacagctccaaaatgttaattgatacggctattttttagttgac

SEQ ID NO: 117238 - DNA, 60 bp, Artificial
  Synthetic oligonucleotide
tttagttgacacatctgtgcttggccccggtataacacgggtcaccggagcgtgtgaagt

SEQ ID NO: 117239 - DNA, 60 bp, Artificial
  Synthetic oligonucleotide
tgtgcttggccccggtataacacgggtcaccggagcgtgtgaagtcacctcttaggaagc

SEQ ID NO: 117240 - DNA, 60 bp, Artificial
  Synthetic oligonucleotide
cgtgtgaagtcacctcttaggaagcttggtagcgagggcttgtcggcgtgagtatcgcca

SEQ ID NO: 117241 - DNA, 60 bp, Artificial
  Synthetic oligonucleotide
ggaggcccaatgaatacgtatataatgacgtatccatccacttttgaggagggggtagtc

SEQ ID NO: 117242 - DNA, 60 bp, Artificial
  Synthetic oligonucleotide
gggggtagtctatcttcagtatagatggtggactccttatgttgaacaatcgagctgtca

SEQ ID NO: 117243 - DNA, 60 bp, Artificial
  Synthetic oligonucleotide
tcagtatagatggtggactccttatgttgaacaatcgagctgtcagaccccaacagctcc

SEQ ID NO: 117244 - DNA, 51 bp, Artificial
  Synthetic oligonucleotide
cgagctgtcagaccccaacagctccaaaatgttaattgatacggctatttt

SEQ ID NO: 117245 - DNA, 60 bp, Artificial
  Synthetic oligonucleotide
aagcttggattgcaagcgatgttaaagaacgcgacattggcgccaatactatgaaagctg

SEQ ID NO: 117246 - DNA, 60 bp, Artificial
  Synthetic oligonucleotide
gcgatgttaaagaacgcgacattggcgccaatactatgaaagctgccatcttcgttcctg

SEQ ID NO: 117247 - DNA, 60 bp, Artificial
  Synthetic oligonucleotide
tatctcaactgctgctatgaatactgtcaattcattcagctataagagagaagcttggat

SEQ ID NO: 117248 - DNA, 60 bp, Artificial
  Synthetic oligonucleotide
ctgctgctatgaatactgtcaattcattcagctataagagagaagcttggattgcaagcg

SEQ ID NO: 117249 - DNA, 60 bp, Artificial
  Synthetic oligonucleotide
gatatctttatgttagttgacaacgagagttgtttggtaaatactcttcgagttccgatt

SEQ ID NO: 117250 - DNA, 60 bp, Artificial
  Synthetic oligonucleotide
gttgacaacgagagttgtttggtaaatactcttcgagttccgatttcagcattcatttgc

SEQ ID NO: 117251 - DNA, 60 bp, Artificial
  Synthetic oligonucleotide
atgaaagctgccatcttcgttcctggttctgtacttgcgaatgggatgatgcctaaagac

SEQ ID NO: 117252 - DNA, 60 bp, Artificial
  Synthetic oligonucleotide
ttcgttcctggttctgtacttgcgaatgggatgatgcctaaagacctagttccttacggg

SEQ ID NO: 117253 - DNA, 60 bp, Artificial
  Synthetic oligonucleotide
agttccgatttcagcattcatttgcgtgaggatactcaatacgttaagaattgaagtaat

SEQ ID NO: 117254 - DNA, 60 bp, Artificial
  Synthetic oligonucleotide
cagcattcatttgcgtgaggatactcaatacgttaagaattgaagtaatagggtcggaat

SEQ ID NO: 117255 - DNA, 60 bp, Artificial
  Synthetic oligonucleotide
cagcatctgactcattctcatattcaattctttggagaggatgggatagatacaaagaat

SEQ ID NO: 117256 - DNA, 60 bp, Artificial
  Synthetic oligonucleotide
tgttttcagcatctgactcattctcatattcaattctttggagaggatgggatagataca

SEQ ID NO: 117257 - DNA, 60 bp, Artificial
  Synthetic oligonucleotide
cacctatgatgacagaacgaatgtccttcatagacgtacgatgttttcagcatctgactc

SEQ ID NO: 117258 - DNA, 60 bp, Artificial
  Synthetic oligonucleotide
gaacaccttcacctatgatgacagaacgaatgtccttcatagacgtacgatgttttcagc

SEQ ID NO: 117259 - DNA, 60 bp, Artificial
  Synthetic oligonucleotide
ctcaacctcctcaaggatttattccaaaatctcacgttttgagaataaatatgtgttact

SEQ ID NO: 117260 - DNA, 60 bp, Artificial
  Synthetic oligonucleotide
ccgagaatgtcatgattacgtagttcgtatagtcaaattattgactcaacctcctcaagg

SEQ ID NO: 117261 - DNA, 60 bp, Artificial
  Synthetic oligonucleotide
agcattccgagaatgtcatgattacgtagttcgtatagtcaaattattgactcaacctcc

SEQ ID NO: 117262 - DNA, 60 bp, Artificial
  Synthetic oligonucleotide
ccgcgtctttgagagatgtgagagtgtcattaaatgaactagcagtcgtagcattccgag

SEQ ID NO: 117263 - DNA, 60 bp, Artificial
  Synthetic oligonucleotide
cccgcgtctttgagagatgtgagagtgtcattaaatgaactagcagtcgtagcattccga

SEQ ID NO: 117264 - DNA, 60 bp, Artificial
  Synthetic oligonucleotide
gttcaacttctagatatgggaagaatctcataaaaatgtctccttcgattcccgcgtctt

SEQ ID NO: 117265 - DNA, 60 bp, Artificial
  Synthetic oligonucleotide
attagcgccttgtggactagggtgatggatgcgtagggttgaagccgcagccccggcaaa

SEQ ID NO: 117266 - DNA, 60 bp, Artificial
  Synthetic oligonucleotide
gatgccctaaaacgtttaaatcttagagacttcgagtcaaatatctcaactgctgctatg

SEQ ID NO: 117267 - DNA, 60 bp, Artificial
  Synthetic oligonucleotide
atgaaatatgatgccctaaaacgtttaaatcttagagacttcgagtcaaatatctcaact

SEQ ID NO: 117268 - DNA, 60 bp, Artificial
  Synthetic oligonucleotide
ggtattttgctgattcctgtcaggcatggatgtgaataccgagggatttgtatctcttaa

SEQ ID NO: 117269 - DNA, 60 bp, Artificial
  Synthetic oligonucleotide
tatctcttaacgttaaaactgtcgtagaagaaaaagggcacgagatagtcatgaaatatg

SEQ ID NO: 117270 - DNA, 60 bp, Artificial
  Synthetic oligonucleotide
cctgtcaggcatggatgtgaataccgagggatttgtatctcttaacgttaaaactgtcgt

SEQ ID NO: 117271 - DNA, 60 bp, Artificial
  Synthetic oligonucleotide
acaagcggtattattaaatgtgttgggagcgggagattcaattccagatcctttaagtcc

SEQ ID NO: 117272 - DNA, 60 bp, Artificial
  Synthetic oligonucleotide
acaagcggtattattaaatgtgttgggagcgggagattcaattccagatcctttaagccc

SEQ ID NO: 117273 - DNA, 60 bp, Artificial
  Synthetic oligonucleotide
ccgctatagcttcggcaagggcggttgaaggcggctataaactgaagaaagtgataaacg

SEQ ID NO: 117274 - DNA, 60 bp, Artificial
  Synthetic oligonucleotide
atcagtatgaaattttagagaaagctgtgaagtcttatggcaaagtgattggagaagagg

SEQ ID NO: 117275 - DNA, 51 bp, Artificial
  Synthetic oligonucleotide
ggggagtcttatggtgaaactgtcaaacaagcggtattattaaatgtgttg

SEQ ID NO: 117276 - DNA, 60 bp, Artificial
  Synthetic oligonucleotide
accacaaatcaaacaagctatgaaagaggatcacgaagctataggaagtgaggagaccaa

SEQ ID NO: 117277 - DNA, 60 bp, Artificial
  Synthetic oligonucleotide
caagctatgaaagaggatcacgaagctataggaagtgaggagaccaagaggattcttcct

SEQ ID NO: 117278 - DNA, 60 bp, Artificial
  Synthetic oligonucleotide
gaaagatgaccagtatgaaattttagagaaagctgtgaagtcttatggcaaagtgattgg

SEQ ID NO: 117279 - DNA, 60 bp, Artificial
  Synthetic oligonucleotide
gtgcatgtgttacgaggtccgaaacatttccaaagacgtgcaataatgggtgcgattaag

SEQ ID NO: 117280 - DNA, 52 bp, Artificial
  Synthetic oligonucleotide
tgtaagcttaattggagagattgacttgcccgagtttatgcgttacgcgtga

SEQ ID NO: 117281 - DNA, 60 bp, Artificial
  Synthetic oligonucleotide
ggcgcgagtgtcatacatcaacgcagattagcgcgttcgcgaggtgcgcacccgatttat

SEQ ID NO: 117282 - DNA, 57 bp, Artificial
  Synthetic oligonucleotide
ggggagtcttatggtgaaactgtcaaacaagcggtattattaaatgtgttgggagcg

SEQ ID NO: 117283 - DNA, 60 bp, Artificial
  Synthetic oligonucleotide
gggaagacgtaaacgcatgaccttttcgcaggagtttctcacagactttagacgagcgga

SEQ ID NO: 117284 - DNA, 60 bp, Artificial
  Synthetic oligonucleotide
gcgcattcgcacagtttcataaatattcgagatatgatgcgatggattggtctaccttca

SEQ ID NO: 117285 - DNA, 60 bp, Artificial
  Synthetic oligonucleotide
cagacgagtgagaaaggtgggctaacctatgctacggttaagtatgctaacgatacgacg

SEQ ID NO: 117286 - DNA, 60 bp, Artificial
  Synthetic oligonucleotide
gagcgatggcggaaccaccagatgcagctacacctaaaacaagtccatatttaaagggag

SEQ ID NO: 117287 - DNA, 60 bp, Artificial
  Synthetic oligonucleotide
caagaactcgcaatacaaggttggcatttccgagactttcaaggcactcaaggagtatcg

SEQ ID NO: 117288 - DNA, 60 bp, Artificial
  Synthetic oligonucleotide
ctgttagtggcgtgcataagaacccatcatcatacaacgtcggatcagcacacaacgtaa

SEQ ID NO: 117289 - DNA, 60 bp, Artificial
  Synthetic oligonucleotide
ggcgtgcataagaacccatcatcatacaacgtcggatcagcacacaacgtaatggacgtc

SEQ ID NO: 117290 - DNA, 60 bp, Artificial
  Synthetic oligonucleotide
cgctcgctgttagtggcgtgcataagaacccatcatcatacaacgtcggatcagcacaca

SEQ ID NO: 117291 - DNA, 51 bp, Artificial
  Synthetic oligonucleotide
ggatggagaaatcgttggctatagtcattacttcgaactaccccacgagta

SEQ ID NO: 117292 - DNA, 60 bp, Artificial
  Synthetic oligonucleotide
ctaaagataactcggtctctgtgcccgatgattacttgcagcggtctcacccatgggagg

SEQ ID NO: 117293 - DNA, 60 bp, Artificial
  Synthetic oligonucleotide
tggctaaaggtaactcggtctctgtgcccgatgattacttgcagcggtctcacccatggg

SEQ ID NO: 117294 - DNA, 60 bp, Artificial
  Synthetic oligonucleotide
cgaagggcagcgcaacgattcttacgatgagtacaaggggaatcagagcatctactatcc

SEQ ID NO: 117295 - DNA, 60 bp, Artificial
  Synthetic oligonucleotide
cgaagggcagcgcaacgattcttacgatgagtacgaagtgaatcagagcatctactatcc

SEQ ID NO: 117296 - DNA, 51 bp, Artificial
  Synthetic oligonucleotide
ggatggagaaatcgttggctacagtcattacttcgaactaccccacgagta

SEQ ID NO: 117297 - DNA, 60 bp, Artificial
  Synthetic oligonucleotide
caaccgttactgggccgagcttgaactagtcaaccactacatctcaccgaatgcttaccc

SEQ ID NO: 117298 - DNA, 60 bp, Artificial
  Synthetic oligonucleotide
ctcggtctctgtgcccgatgattacttgcagcggtctcacccatgggaggcaaccggaat

SEQ ID NO: 117299 - DNA, 60 bp, Artificial
  Synthetic oligonucleotide
ctaaaggtaactcggtctctgtgcccgatgattacttgcagcggtctcacccatgggagg

SEQ ID NO: 117300 - DNA, 60 bp, Artificial
  Synthetic oligonucleotide
caaggttggcatttccgagactttcaaggcactcaaggagtatcgcgaagggcagcgcaa

SEQ ID NO: 117301 - DNA, 60 bp, Artificial
  Synthetic oligonucleotide
ggttggcatttccgagactttcaaggcactcaaggagtatcgcgaagggcagcgcaacga

SEQ ID NO: 117302 - DNA, 58 bp, Artificial
  Synthetic oligonucleotide
ctctgtgcccgatgattacttgcagcggtctcacccatgggaggcaaccggaattaag

SEQ ID NO: 117303 - DNA, 60 bp, Artificial
  Synthetic oligonucleotide
gtatcgcgaagggcagcgcaacgattcttacgatgagtacgaagtgaatcagagcatcta

SEQ ID NO: 117304 - DNA, 60 bp, Artificial
  Synthetic oligonucleotide
gcgaagggcagcgcaacgattcttacgatgagtacaaggggaatcagagcatctactatc

SEQ ID NO: 117305 - DNA, 60 bp, Artificial
  Synthetic oligonucleotide
cgctcgcagttagtggcgtgcataagaacccatcatcatacaacgtcggatcagcacaca

SEQ ID NO: 117306 - DNA, 60 bp, Artificial
  Synthetic oligonucleotide
cagttagtggcgtgcataagaacccatcatcatacaacgtcggatcagcacacaacgtaa

SEQ ID NO: 117307 - DNA, 60 bp, Artificial
  Synthetic oligonucleotide
cacaacgtaatggacgtcttccaatcttgcgacctagctctcagattctgcaaccgttac

SEQ ID NO: 117308 - DNA, 60 bp, Artificial
  Synthetic oligonucleotide
ggacgtcttccaatcttgcgacctagctctcagattctgcaaccgttactgggccgagct

SEQ ID NO: 117309 - DNA, 60 bp, Artificial
  Synthetic oligonucleotide
tacaacgtcggatcagcacacaacgtaatggacgtcttccaatcttgcgacctagctctc

SEQ ID NO: 117310 - DNA, 60 bp, Artificial
  Synthetic oligonucleotide
caacgtcggatcagcacacaacgtaatggacgtcttccaatcttgcgacctagctctcag

SEQ ID NO: 117311 - DNA, 60 bp, Artificial
  Synthetic oligonucleotide
aactcgcaatacaaggttggcatttccgagactttcaaggcactcaaggagtatcgcgaa

SEQ ID NO: 117312 - DNA, 60 bp, Artificial
  Synthetic oligonucleotide
gcaatacaaggttggcatttccgagactttcaaggcactcaaggagtatcgcgaagggca

SEQ ID NO: 117313 - DNA, 60 bp, Artificial
  Synthetic oligonucleotide
cctagctctcagattctgcaaccgttactgggccgagcttgaactagtcaaccactacat

SEQ ID NO: 117314 - DNA, 60 bp, Artificial
  Synthetic oligonucleotide
ctcagattctgcaaccgttactgggccgagcttgaactagtcaaccactacatctcaccg

SEQ ID NO: 117315 - DNA, 60 bp, Artificial
  Synthetic oligonucleotide
actttcaaggcactcaaggagtatcgcgaagggcagcgcaacgattcttacgatgagtac

SEQ ID NO: 117316 - DNA, 60 bp, Artificial
  Synthetic oligonucleotide
ggcactcaaggagtatcgcgaagggcagcgcaacgattcttacgatgagtacgaagtgaa

SEQ ID NO: 117317 - DNA, 60 bp, Artificial
  Synthetic oligonucleotide
aggagtatcgcgaagggcagcgcaacgattcttacgatgagtacgaagtgaatcagagca

SEQ ID NO: 117318 - DNA, 60 bp, Artificial
  Synthetic oligonucleotide
gagtatcgcgaagggcagcgcaacgattcttacgatgagtacgaagtgaatcagagcatc

SEQ ID NO: 117319 - DNA, 60 bp, Artificial
  Synthetic oligonucleotide
aagccgacgacactatcacccatgcatttacaattaaactaagcatatttaaccaagcaa

SEQ ID NO: 117320 - DNA, 60 bp, Artificial
  Synthetic oligonucleotide
ccgacgacactatcacccatgcatttacaattaaactaagcatatttaaccaagcaacac

SEQ ID NO: 117321 - DNA, 60 bp, Artificial
  Synthetic oligonucleotide
tcgattggtttagtcgaccagttgtcagaaaagttagcatcaacggaccaaaagcatagc

SEQ ID NO: 117322 - DNA, 60 bp, Artificial
  Synthetic oligonucleotide
cgattggtttagtcgaccagttgtcagaaaagttagcatcaacggaccaaaagcatagca

SEQ ID NO: 117323 - DNA, 60 bp, Artificial
  Synthetic oligonucleotide
acatcatgaagctacagctccgatgctcggagacacagagtatgtatacgttaagaacaa

SEQ ID NO: 117324 - DNA, 60 bp, Artificial
  Synthetic oligonucleotide
agctccgatgctcggagacacagagtatgtatacgttaagaacaacaattccgacctacc

SEQ ID NO: 117325 - DNA, 60 bp, Artificial
  Synthetic oligonucleotide
ttaagaacaacaattccgacctaccaaatacaggtgacatcgttaagcctaatcaactta

SEQ ID NO: 117326 - DNA, 60 bp, Artificial
  Synthetic oligonucleotide
ccgacctaccaaatacaggtgacatcgttaagcctaatcaacttaacggtgaagccaaat

SEQ ID NO: 117327 - DNA, 60 bp, Artificial
  Synthetic oligonucleotide
agtagttagcggagagtacataattactcaaattccagatgatccgaacagaattaagat

SEQ ID NO: 117328 - DNA, 60 bp, Artificial
  Synthetic oligonucleotide
gtagttagcggagagtacataattactcaaattccagatgatccgaacagaattaagatt

SEQ ID NO: 117329 - DNA, 60 bp, Artificial
  Synthetic oligonucleotide
ctaatcttgaatggttagagcccagatcagattacaaattcatgtacatgggagttgtgc

SEQ ID NO: 117330 - DNA, 60 bp, Artificial
  Synthetic oligonucleotide
caggggttttctggctaatgtcaccacggatgacgtctgctatccctccactattatctg

SEQ ID NO: 117331 - DNA, 60 bp, Artificial
  Synthetic oligonucleotide
catgattcagcatctttcgaagctatataaacgtggattttcttatagagtaaacgactc

SEQ ID NO: 117332 - DNA, 60 bp, Artificial
  Synthetic oligonucleotide
gaatgcagaacatgattcagcatctttcgaagctatataaacgtggattttcatatagag

SEQ ID NO: 117333 - DNA, 60 bp, Artificial
  Synthetic oligonucleotide
tcggggatgcagaacatgattcagcatctttcgaagctatataaacgtggattttcttat

SEQ ID NO: 117334 - DNA, 60 bp, Artificial
  Synthetic oligonucleotide
gcaggggttttctggctaatgtcaccacggatgacgtctgctatccctccactattatct

SEQ ID NO: 117335 - DNA, 60 bp, Artificial
  Synthetic oligonucleotide
gaggcccgtgagccgtcggtcgatttaagactaccattgtgtgcaggtattgacccatta

SEQ ID NO: 117336 - DNA, 60 bp, Artificial
  Synthetic oligonucleotide
tatcaggaatgcagaacatgattcagcatctttcgaagctatataaacgtggattttcat

SEQ ID NO: 117337 - DNA, 60 bp, Artificial
  Synthetic oligonucleotide
taattcacaaccctccgtcactatttgacgtacctcataaatggtaccagggcgcgcagg

SEQ ID NO: 117338 - DNA, 60 bp, Artificial
  Synthetic oligonucleotide
ttcacaaccctccgtcactatttgacgtacctcacaagtggtatcagggcgcgcaggagg

SEQ ID NO: 117339 - DNA, 60 bp, Artificial
  Synthetic oligonucleotide
gtatggagcggggataattcacaaccctccgtcactatttgacgtacctcataaatggta

SEQ ID NO: 117340 - DNA, 60 bp, Artificial
  Synthetic oligonucleotide
atggagcggggataattcacaaccctccgtcactatttgacgtacctcacaagtggtatc

SEQ ID NO: 117341 - DNA, 60 bp, Artificial
  Synthetic oligonucleotide
gggcttcaattccggtttaataccgatcaattccagatagttaataataacttgactctc

SEQ ID NO: 117342 - DNA, 53 bp, Artificial
  Synthetic oligonucleotide
ttcgatttaatactgatcaattccagatagttaataataacttgactctcaag

SEQ ID NO: 117343 - DNA, 60 bp, Artificial
  Synthetic oligonucleotide
gatatcaagaagtcatgaccttacggttgcgaagtgccatttatggcatattttgctacc

SEQ ID NO: 117344 - DNA, 60 bp, Artificial
  Synthetic oligonucleotide
ctagcggcaacgatctcaatactggaagaggaagtcacggaactggtgacggagttgaac

SEQ ID NO: 117345 - DNA, 60 bp, Artificial
  Synthetic oligonucleotide
gaagtcatgaccttacggttgcgaagtgccatttatggcatattttgctacctacaagct

SEQ ID NO: 117346 - DNA, 60 bp, Artificial
  Synthetic oligonucleotide
gatatcaagaagtcatgaccttacgggcgcgaagtgccatttatggcatattttgctacc

SEQ ID NO: 117347 - DNA, 60 bp, Artificial
  Synthetic oligonucleotide
tccgaggaaaatgctagcggcaacgatctcaatactggaagaggaagtcacggaactggt

SEQ ID NO: 117348 - DNA, 60 bp, Artificial
  Synthetic oligonucleotide
ggaaaatgctggcggcaacgatctcaatactggaagaggaagtcacggaactggtgacgg

SEQ ID NO: 117349 - DNA, 60 bp, Artificial
  Synthetic oligonucleotide
ccttttctcttgaacggtgatatccagcctggtagtaatgaacccacgctggggactcag

SEQ ID NO: 117350 - DNA, 60 bp, Artificial
  Synthetic oligonucleotide
gttttccgaggaaaatgctggcggcaacgatctcaatactggaagaggaagtcacggaac

SEQ ID NO: 117351 - DNA, 60 bp, Artificial
  Synthetic oligonucleotide
tgaccttacgggcgcgaagtgccatttatggcatattttgctacctacaagctctgactg

SEQ ID NO: 117352 - DNA, 60 bp, Artificial
  Synthetic oligonucleotide
gctaaagtgaccgtggtcatggcttcattcaagggattttccgccaacactgtcccagtc

SEQ ID NO: 117353 - DNA, 60 bp, Artificial
  Synthetic oligonucleotide
gctaaagtgaccgtggtcatggcttcattcaagggattctccgtcaacactgttccagtt

SEQ ID NO: 117354 - DNA, 60 bp, Artificial
  Synthetic oligonucleotide
cacgtcgacagaccgctgtggatacatgcttgggaagacttggttcaatagcgataccaa

SEQ ID NO: 117355 - DNA, 60 bp, Artificial
  Synthetic oligonucleotide
gtggctaaaacgggattttgtgtcgcaattgaaggcgagtttacgatattggcaaatcgt

SEQ ID NO: 117356 - DNA, 60 bp, Artificial
  Synthetic oligonucleotide
gctggggcatatcaatttgttgttcctgcttgggcatcggtgctaagtgtcactggtgca

SEQ ID NO: 117357 - DNA, 60 bp, Artificial
  Synthetic oligonucleotide
ctgcagctacttcaaggtcgaccacactgatgggttgaaatatatacccatggatgagag

SEQ ID NO: 117358 - DNA, 60 bp, Artificial
  Synthetic oligonucleotide
atattgtgctaattaaattcgcttctggtgaggagttggacatatctgaattagctgatc

SEQ ID NO: 117359 - DNA, 60 bp, Artificial
  Synthetic oligonucleotide
acgttgagatagtgttttcaggttttcaaggatcacatacatgtatgttcgcaagcttac

SEQ ID NO: 117360 - DNA, 60 bp, Artificial
  Synthetic oligonucleotide
ggcgtgtcaatttctatcttcaggaacgagttttctaccacttgaaaaagacgttgagat

SEQ ID NO: 117361 - DNA, 60 bp, Artificial
  Synthetic oligonucleotide
gtcactatcaatgagcaagagaatgaactaacacactacgtatttacaacgccaatgagc

SEQ ID NO: 117362 - DNA, 60 bp, Artificial
  Synthetic oligonucleotide
gataacacaaggcgctattaatcagtcgttaccacgtaatgtagtcaataataatgaggg

SEQ ID NO: 117363 - DNA, 60 bp, Artificial
  Synthetic oligonucleotide
gggataaagagaaacgtatgacactaaaacagatgatacaacaagtcactatcaatgagc

SEQ ID NO: 117364 - DNA, 60 bp, Artificial
  Synthetic oligonucleotide
cctactgggataaagagaaacgtatgacactaaaacagatgatacaacaagtcactatca

SEQ ID NO: 117365 - DNA, 60 bp, Artificial
  Synthetic oligonucleotide
ctatcaatgagcaagagaatgaactaacacactacgtatttacaacgccaatgagcatgc

SEQ ID NO: 117366 - DNA, 60 bp, Artificial
  Synthetic oligonucleotide
ttcacgtcctgctatttcctttgacagataataagtatgcagatttaccaaattatgttg

SEQ ID NO: 117367 - DNA, 60 bp, Artificial
  Synthetic oligonucleotide
taaaacgacagcagagattcgggaatatgtcgacgcaaacgaggagctaaaatcattgat

SEQ ID NO: 117368 - DNA, 61 bp, Artificial
  Synthetic oligonucleotide
caaacgaggagctaaaatcattgattacctacttatgtttgtgtactattgttggcttatg

SEQ ID NO: 117369 - DNA, 60 bp, Artificial
  Synthetic oligonucleotide
gtacgtcagccacctatggataatgtactttattgggcgtgtcaatttctatcttcagga

SEQ ID NO: 117370 - DNA, 54 bp, Artificial
  Synthetic oligonucleotide
tggcacattttcaagatactacgatcacacgagcttataatctgacgaattcca

SEQ ID NO: 117371 - DNA, 60 bp, Artificial
  Synthetic oligonucleotide
gtcctgctatttcctttgacagataataagtatgcagatttaccaaattatgttgcagtg

SEQ ID NO: 117372 - DNA, 60 bp, Artificial
  Synthetic oligonucleotide
gtctaccagacgcggaagttgcagcattaaaatggttttggaagtttttcacaagcatta

SEQ ID NO: 117373 - DNA, 60 bp, Artificial
  Synthetic oligonucleotide
gcaagcttacgacagatgaatctatcgccaatactttgcccgtattatgaacatatgact

SEQ ID NO: 117374 - DNA, 60 bp, Artificial
  Synthetic oligonucleotide
aattatgttgcagtgataacacaaggcgctattaatcagtcgttaccacgtaatgtagtc

SEQ ID NO: 117375 - DNA, 60 bp, Artificial
  Synthetic oligonucleotide
acaagcattaatctagtacgtcagccacctatggataatgtactttattgggcgtgtcaa

SEQ ID NO: 117376 - DNA, 60 bp, Artificial
  Synthetic oligonucleotide
acatatgactaattttaaaacgacagcagagattcgggaatatgtcgacgcaaacgagga

SEQ ID NO: 117377 - DNA, 60 bp, Artificial
  Synthetic oligonucleotide
caaacgaggagctaaaatcattgattacctacttatgtttgtgtactattgttggcttat

SEQ ID NO: 117378 - DNA, 60 bp, Artificial
  Synthetic oligonucleotide
gaagcggcggaactcttcaccgcaagccccattggacctgatggttgactgagaagccac

SEQ ID NO: 117379 - DNA, 60 bp, Artificial
  Synthetic oligonucleotide
gtaatgcaaaagcagtctcatcttacgatgatgccgcgcccaaccgctgtggttatgacg

SEQ ID NO: 117380 - DNA, 60 bp, Artificial
  Synthetic oligonucleotide
gtctcatcttacgatgatgccgcgcccaaccgctgtggttatgacgaaggacggaattgg

SEQ ID NO: 117381 - DNA, 60 bp, Artificial
  Synthetic oligonucleotide
agaggcgatctccgattcttcggatcccatcgggatgctcattaaggtagaggcgaacgc

SEQ ID NO: 117382 - DNA, 60 bp, Artificial
  Synthetic oligonucleotide
gcgaaaacgccacccgagagaatggagaaagccgcgcttaagggggcgcaagaggcgatc

SEQ ID NO: 117383 - DNA, 60 bp, Artificial
  Synthetic oligonucleotide
aggcgaacgcgtcgacgattagcgctctccaacatggtgagcgtaagctggcgagacgca

SEQ ID NO: 117384 - DNA, 60 bp, Artificial
  Synthetic oligonucleotide
gcgatctccgattcttcggatcccatcgggatgctcattaaggtagaggcgaacgcgtcg

SEQ ID NO: 117385 - DNA, 55 bp, Artificial
  Synthetic oligonucleotide
ggttatgacgaaggacggaattggagctgagagagttactctcatgccctccgcg

SEQ ID NO: 117386 - DNA, 54 bp, Artificial
  Synthetic oligonucleotide
tagcgctctccaacatggtgagcgtaagctggcgagacgcaagagcctgctttt

SEQ ID NO: 117387 - DNA, 60 bp, Artificial
  Synthetic oligonucleotide
cagccatctcttctatcgccaacctttcaattcatctggagcactacctccggatggcca

SEQ ID NO: 117388 - DNA, 60 bp, Artificial
  Synthetic oligonucleotide
gatgttggtttttacagccatctcttctatcgccaacctttcaattcatctggagcacta

SEQ ID NO: 117389 - DNA, 60 bp, Artificial
  Synthetic oligonucleotide
ggagcactacctccggatggccaatctctcttcgaacatgatatgtttaggttttgccac

SEQ ID NO: 117390 - DNA, 60 bp, Artificial
  Synthetic oligonucleotide
ttggatcgtagctccgggatgtaaggctctccagtaggcctggcgtggcagcgcaggttg

SEQ ID NO: 117391 - DNA, 60 bp, Artificial
  Synthetic oligonucleotide
gggatgtaaggctctccagtaggcctggcgtggcagcgcaggttgcgaacgagatgctta

SEQ ID NO: 117392 - DNA, 50 bp, Artificial
  Synthetic oligonucleotide
gcgcaggttgcgaacgagatgcttaccgcctgatgtctatcgggtcgaag

SEQ ID NO: 117393 - DNA, 60 bp, Artificial
  Synthetic oligonucleotide
tggagcactacctccggatggccaatctctcttcgaacatgatatgtttaggttttgcca

SEQ ID NO: 117394 - DNA, 60 bp, Artificial
  Synthetic oligonucleotide
ggaagcagctacgcaagcggttggcatatcaggcgacagctaagaatatctcagccgcgc

SEQ ID NO: 117395 - DNA, 60 bp, Artificial
  Synthetic oligonucleotide
gcgagacgcaagagcctgcttttttggctgcatctcacaacggtgatactgatgttggtt

SEQ ID NO: 117396 - DNA, 60 bp, Artificial
  Synthetic oligonucleotide
caagcggttggcatatcaggcgacagctaagaatatctcagccgcgcgtgctcctccacc

SEQ ID NO: 117397 - DNA, 60 bp, Artificial
  Synthetic oligonucleotide
tccggtgacttttggcgcggcactttggatttatcgccacatgactccgctcggtccatc

SEQ ID NO: 117398 - DNA, 60 bp, Artificial
  Synthetic oligonucleotide
aatgatgtggctatttccggtgacttttggcgcggcactttggatttatcgccacatgac

SEQ ID NO: 117399 - DNA, 60 bp, Artificial
  Synthetic oligonucleotide
gggagacaggtcaattcgtcacacctgacgtcatccgcctcggtaatgcgtactgctgcg

SEQ ID NO: 117400 - DNA, 60 bp, Artificial
  Synthetic oligonucleotide
ggcgcgcaagcccagatggaggtgagaacgcccaacttccactcgttcgttgaatcagct

SEQ ID NO: 117401 - DNA, 60 bp, Artificial
  Synthetic oligonucleotide
cctatgtcttctcgtgtggccagtgaggtgctgcgtaatgatgtggctatttccggtgac

SEQ ID NO: 117402 - DNA, 60 bp, Artificial
  Synthetic oligonucleotide
tccaggataaggaacctatgtcttctcgtgtggccagtgaggtgctgcgtaatgatgtgg

SEQ ID NO: 117403 - DNA, 60 bp, Artificial
  Synthetic oligonucleotide
gcttattttgtcttggcgcgcaagcccagatggaggtgagaacgcccaacttccactcgt

SEQ ID NO: 117404 - DNA, 60 bp, Artificial
  Synthetic oligonucleotide
tttgaagatgaccgcaccagtacttaacatctatgatcagttggataacgcccgtcgttc

SEQ ID NO: 117405 - DNA, 60 bp, Artificial
  Synthetic oligonucleotide
cgcaccagtacttaacatctatgatcagttggataacgcccgtcgttcagtgctctccgc

SEQ ID NO: 117406 - DNA, 60 bp, Artificial
  Synthetic oligonucleotide
ggtcttctgcctgactgtctgctaaacgttgctactcatgaccacacggctttgaagatg

SEQ ID NO: 117407 - DNA, 60 bp, Artificial
  Synthetic oligonucleotide
gcctgactgtctgctaaacgttgctactcatgaccacacggctttgaagatgaccgcacc

SEQ ID NO: 117408 - DNA, 57 bp, Artificial
  Synthetic oligonucleotide
ttgccagttttggctcgctcacaccagccctctctgcgcgtaggcatgccgctcgtg

SEQ ID NO: 117409 - DNA, 59 bp, Artificial
  Synthetic oligonucleotide
ctcactgtatcgctcactgccccatcagttagctcatggttaccactctgacactttcc

SEQ ID NO: 117410 - DNA, 60 bp, Artificial
  Synthetic oligonucleotide
cccgtcgttcagtgctctccgctacagtcactcagatgcctaaggaaacagccgacgcgc

SEQ ID NO: 117411 - DNA, 60 bp, Artificial
  Synthetic oligonucleotide
gctctccgctacagtcactcagatgcctaaggaaacagccgacgcgcacaagctgcaagg

SEQ ID NO: 117412 - DNA, 60 bp, Artificial
  Synthetic oligonucleotide
tctgctaacgaagctgagagtcgtctaatcggtcaccatcgcactatgctctgcaccctc

SEQ ID NO: 117413 - DNA, 60 bp, Artificial
  Synthetic oligonucleotide
gagagtcgtctaatcggtcaccatcgcactatgctctgcaccctcccagccattgagacg

SEQ ID NO: 117414 - DNA, 60 bp, Artificial
  Synthetic oligonucleotide
tattcgagagcaaccactccgattcttggaaagatgccagctgtgttttctgggatgctg

SEQ ID NO: 117415 - DNA, 60 bp, Artificial
  Synthetic oligonucleotide
gagagcaaccactccgattcttggaaagatgccagctgtgttttctgggatgctgactgg

SEQ ID NO: 117416 - DNA, 60 bp, Artificial
  Synthetic oligonucleotide
tctaggacttttgactcaagatcaaatttggagtggggtgtaatggtctacgattattcc

SEQ ID NO: 117417 - DNA, 60 bp, Artificial
  Synthetic oligonucleotide
ggcctgtcccattactctagggcgaccactccgattcttggaaagatgccagctgtgttt

SEQ ID NO: 117418 - DNA, 60 bp, Artificial
  Synthetic oligonucleotide
tggacggcattgaatctcatgatcgattcatccgacttggtgccgaacttcatgatgaga

SEQ ID NO: 117419 - DNA, 60 bp, Artificial
  Synthetic oligonucleotide
ggcaggatataaagaacaagtcaccactaaagacgaaattgagcaacagatggatagaat

SEQ ID NO: 117420 - DNA, 60 bp, Artificial
  Synthetic oligonucleotide
ggcaggatataaagaacaagttaccactaaagacgaaattgagcaacagatggatagaat

SEQ ID NO: 117421 - DNA, 60 bp, Artificial
  Synthetic oligonucleotide
tataaagaacaagttaccactaaagacgaaattgagcaacagatggatagaattgtaaaa

SEQ ID NO: 117422 - DNA, 60 bp, Artificial
  Synthetic oligonucleotide
agtaatttggtcataacagcaaagatgttacaacaaccaactggaggatataccacacta

SEQ ID NO: 117423 - DNA, 60 bp, Artificial
  Synthetic oligonucleotide
agtaatttggtcataacagcaaagatgttacaacaaccagcaggaggatataccacacta

SEQ ID NO: 117424 - DNA, 60 bp, Artificial
  Synthetic oligonucleotide
ttgatgattcaacgccagcaattcgcagatacgctgaagtcggtagtgcaagagatacgt

SEQ ID NO: 117425 - DNA, 60 bp, Artificial
  Synthetic oligonucleotide
gaagtcggtagtgcaagagatacgtctgaatcattagcttatagtcctcaaagacacagt

SEQ ID NO: 117426 - DNA, 60 bp, Artificial
  Synthetic oligonucleotide
tgatcaagaatcagcggttgtacgtgcagtgaataattcgacagcgaaactattgaccgc

SEQ ID NO: 117427 - DNA, 61 bp, Artificial
  Synthetic oligonucleotide
ggctcaaagtagaattaataatactgttaaaataaaccatttgctatcacggtatcgagcg

SEQ ID NO: 117428 - DNA, 60 bp, Artificial
  Synthetic oligonucleotide
cggttgggtctttatatccgattgaatatgagcagggtggactagatatgtctcagaagg

SEQ ID NO: 117429 - DNA, 60 bp, Artificial
  Synthetic oligonucleotide
tttgcgcatagtagacttcctgaaatttcacttggcgttggttcatcggtggcttttaac

SEQ ID NO: 117430 - DNA, 60 bp, Artificial
  Synthetic oligonucleotide
gcgatgtgatctattttgatgattcaacgccagcaattcgcagatacgctgaagtcggta

SEQ ID NO: 117431 - DNA, 60 bp, Artificial
  Synthetic oligonucleotide
gtctcagaaggtaatgtccgtgattgatttagctgactattattttagacatgaaaacgc

SEQ ID NO: 117432 - DNA, 60 bp, Artificial
  Synthetic oligonucleotide
ctgctgatgaaagagcaactgcaagaaatttagcagccgagcaattgcgcgcgggcatta

SEQ ID NO: 117433 - DNA, 60 bp, Artificial
  Synthetic oligonucleotide
cttggtgcagaaagagaaccggcgggaccaattttgcaagatttccataaatcaaaggat

SEQ ID NO: 117434 - DNA, 60 bp, Artificial
  Synthetic oligonucleotide
ttcaactaccaacaaaatatgcggatagacgaattcctactgatgagctacaaacgaaca

SEQ ID NO: 117435 - DNA, 60 bp, Artificial
  Synthetic oligonucleotide
gccatggaattatgttcagtacactgcgtcagattacagccacagtttatttcaactacc

SEQ ID NO: 117436 - DNA, 60 bp, Artificial
  Synthetic oligonucleotide
tcctaacatacgagcaagaataccgctttctgaagaccaccatttacaatcaacatttat

SEQ ID NO: 117437 - DNA, 60 bp, Artificial
  Synthetic oligonucleotide
gaacacaaacgattgatagactatcatccaactcttacacatacgattacgatgctaccc

SEQ ID NO: 117438 - DNA, 60 bp, Artificial
  Synthetic oligonucleotide
catcaggcatactatgcaattggtgcgtatggcatcgcaaaacccatacacagctgaagc

SEQ ID NO: 117439 - DNA, 55 bp, Artificial
  Synthetic oligonucleotide
ctgtacttcatactatagcggagatggtaaatgccagtggaacttcaatatttgt

SEQ ID NO: 117440 - DNA, 60 bp, Artificial
  Synthetic oligonucleotide
ccatttgctatcacggtatcgagcgctgttattccaaagagtatctgaaggtgagcgaat

SEQ ID NO: 117441 - DNA, 60 bp, Artificial
  Synthetic oligonucleotide
gcggattggcgattcatggtttcgttggtggcgtcaccaccttcatcctttcggcgaagg

SEQ ID NO: 117442 - DNA, 60 bp, Artificial
  Synthetic oligonucleotide
tcgcgtttgtcagagattgatccctttatgtcaacacgaacaagtacggcgtattactgc

SEQ ID NO: 117443 - DNA, 60 bp, Artificial
  Synthetic oligonucleotide
agatattgcagcatttagtttaaagtatggcgtacatctcgatgagtttggcggattggc

SEQ ID NO: 117444 - DNA, 60 bp, Artificial
  Synthetic oligonucleotide
ggcgtacatctcgatgagtttggcggattggcgattcatggtttcgttggtggcgtcacc

SEQ ID NO: 117445 - DNA, 60 bp, Artificial
  Synthetic oligonucleotide
tgcgtgttgaaccatccttcttagatattgcagcatttagtttaaagtatggcgtacatc

SEQ ID NO: 117446 - DNA, 60 bp, Artificial
  Synthetic oligonucleotide
gacgatagagtacaacaagacccacgcccgaatgagatattagcattgcgaacacaaaca

SEQ ID NO: 117447 - DNA, 60 bp, Artificial
  Synthetic oligonucleotide
tctaagtgatgaggtggttcttgaacgtatccaagatcttgttaatgtcgtgcgtgttga

SEQ ID NO: 117448 - DNA, 60 bp, Artificial
  Synthetic oligonucleotide
atacctcaggagatattatgatgcaacacgtcgcttcaaaaatctacgaagattggaaac

SEQ ID NO: 117449 - DNA, 60 bp, Artificial
  Synthetic oligonucleotide
tctccaaaaacattaagacatcttatgtactcactcaataataaaggttttgccacgaca

SEQ ID NO: 117450 - DNA, 60 bp, Artificial
  Synthetic oligonucleotide
ctcaagatgatttcccaatgcaaatggcagctgtcaaacaatattgtagggagggcgtgg

SEQ ID NO: 117451 - DNA, 52 bp, Artificial
  Synthetic oligonucleotide
aatgtactagctcatattgatcatgtacgtgttaatttccaaaagcgagcag

SEQ ID NO: 117452 - DNA, 60 bp, Artificial
  Synthetic oligonucleotide
tatacgcaacatggttaccaaacggggttggtttttcaaagaggacgcaaacgatggcgt

SEQ ID NO: 117453 - DNA, 60 bp, Artificial
  Synthetic oligonucleotide
aagacacagtaaattacaatgggaaaatgcatcatctgtaaatggcataatcgccggagt

SEQ ID NO: 117454 - DNA, 60 bp, Artificial
  Synthetic oligonucleotide
ggcgatagaggaatttctcctaacatacgagcaagaataccgctttctgaagaccaccat

SEQ ID NO: 117455 - DNA, 60 bp, Artificial
  Synthetic oligonucleotide
cctgaaatttcacttggcgttggttcatcggtggcttttaacattaatacagtcactcct

SEQ ID NO: 117456 - DNA, 60 bp, Artificial
  Synthetic oligonucleotide
gcatatactcttatttctccaaacaaagaaaggtatactgctgatgaaagagcaactgca

SEQ ID NO: 117457 - DNA, 60 bp, Artificial
  Synthetic oligonucleotide
ccgctttctgaagaccaccatttacaatcaacatttatcatttcagatatggatcaaacg

SEQ ID NO: 117458 - DNA, 60 bp, Artificial
  Synthetic oligonucleotide
cagatatggatcaaacgaggatagcagatggtgctaatattgatgagttaactttccaaa

SEQ ID NO: 117459 - DNA, 60 bp, Artificial
  Synthetic oligonucleotide
ggaagaaatttggcagaggcgtttgctttcccaatgaattcgattaaatacacagttcat

SEQ ID NO: 117460 - DNA, 60 bp, Artificial
  Synthetic oligonucleotide
gcaactgcaagaaatttagcagccgagcaattgcgcgcgggcattaacgaggctcaaagt

SEQ ID NO: 117461 - DNA, 60 bp, Artificial
  Synthetic oligonucleotide
gtatcgagcgctgttattccaaagagtatctgaaggtgagcgaatagagctaacgactgg

SEQ ID NO: 117462 - DNA, 60 bp, Artificial
  Synthetic oligonucleotide
gattgaattaaacaactcggggtttaaaattattgatcgcgtttgtcagagattgatccc

SEQ ID NO: 117463 - DNA, 60 bp, Artificial
  Synthetic oligonucleotide
tgccacgacacacatgtcatggcattataatattgtgcacacatttcattatacctcagg

SEQ ID NO: 117464 - DNA, 60 bp, Artificial
  Synthetic oligonucleotide
tcggcgaaggtctaatgtgttcatagttgtcttggtgagaaatacagtccatgaggttgg

SEQ ID NO: 117465 - DNA, 60 bp, Artificial
  Synthetic oligonucleotide
ggcgtcaccaccttcatcctttcggcgaaggtctaatgtgttcatagttgtcttggtgag

SEQ ID NO: 117466 - DNA, 60 bp, Artificial
  Synthetic oligonucleotide
caaacgaacattaaggatttcagaaacactatacaattgcctgcggttatgtccaatgat

SEQ ID NO: 117467 - DNA, 60 bp, Artificial
  Synthetic oligonucleotide
tgggcttgtacgcacgtgcagaacgcgattcatggcaaatagcgaaattgttaaatgagt

SEQ ID NO: 117468 - DNA, 60 bp, Artificial
  Synthetic oligonucleotide
aatacagtccatgaggttggtagtacaggccgcgactgggaagtcgaagcctccggcgga

SEQ ID NO: 117469 - DNA, 60 bp, Artificial
  Synthetic oligonucleotide
acctcagctgcagttattaaaatgcgcatatggaatgttgagtctccaaaaacattaaga

SEQ ID NO: 117470 - DNA, 60 bp, Artificial
  Synthetic oligonucleotide
cacagtgcatcgatcctgtaacaacgggtcaacactacttctcgagacgcactataacat

SEQ ID NO: 117471 - DNA, 60 bp, Artificial
  Synthetic oligonucleotide
ctgatgggaagatacagattgcagattatgaaccggtgcccgttctaagtgatgaggtgg

SEQ ID NO: 117472 - DNA, 60 bp, Artificial
  Synthetic oligonucleotide
gaaaccttagagccaaattctcaatacctagcgttgtttgtgatcatgactaatgttgat

SEQ ID NO: 117473 - DNA, 60 bp, Artificial
  Synthetic oligonucleotide
ttgcaatcaagatagacgatagagtacaacaagacccacgcccgaatgaaatattagcat

SEQ ID NO: 117474 - DNA, 66 bp, Artificial
  Synthetic oligonucleotide
gtagtagattatattaatcagattgtgcaagttatgtccaaaagatcacggtcattaaatcagcag

SEQ ID NO: 117475 - DNA, 58 bp, Artificial
  Synthetic oligonucleotide
gaaagcaagcgatgaagtgagtttagtgccttatcaggagcaggtgagaccgcccagt

SEQ ID NO: 117476 - DNA, 52 bp, Artificial
  Synthetic oligonucleotide
aagcgatgaagtgagtttagtgccttatcaggagcaggtgagaccgcccagt

SEQ ID NO: 117477 - DNA, 58 bp, Artificial
  Synthetic oligonucleotide
gaaggcaagcgatgaagtgagtttagtgccttatcaggagcaggtgagaccgcccagt

SEQ ID NO: 117478 - DNA, 60 bp, Artificial
  Synthetic oligonucleotide
gaaggcaagcgatgaagtgagtttagtgccttatcaggagcaggtgagaccgcccagtta

SEQ ID NO: 117479 - DNA, 58 bp, Artificial
  Synthetic oligonucleotide
gaaggcaagtgatgaagtgagtttagtgccttatcaggagcaggtgagaccgcccagt

SEQ ID NO: 117480 - DNA, 60 bp, Artificial
  Synthetic oligonucleotide
ccagatagagtgaagctccaaggtcactacgtcgtgggattggcaggtcccggagtagtg

SEQ ID NO: 117481 - DNA, 60 bp, Artificial
  Synthetic oligonucleotide
aagcgatgaagtgagtttagtgccttatcaggagcaggtgagaccgcccagttatgtgcc

SEQ ID NO: 117482 - DNA, 60 bp, Artificial
  Synthetic oligonucleotide
gcttatgctacaatgtttgaaatggttcgatgcattatcactctatgctatgcagaaaaa

SEQ ID NO: 117483 - DNA, 59 bp, Artificial
  Synthetic oligonucleotide
gcttatgctacaatgtttgaaatggttcgatgcattatcactctatgctatgcagaaaa

SEQ ID NO: 117484 - DNA, 60 bp, Artificial
  Synthetic oligonucleotide
gcttatgctacaatgtttgaaatggttcgatgcattatcactctatgctatgcagaaaag

SEQ ID NO: 117485 - DNA, 60 bp, Artificial
  Synthetic oligonucleotide
ggcttatgctacaatgtttgaaatggttcgatgcattatcactctatgctatgcagagaa

SEQ ID NO: 117486 - DNA, 60 bp, Artificial
  Synthetic oligonucleotide
gcaatgtcaaatacaacgggtgctacgcaaacacaaaaagcggagaaagctgcattcgca

SEQ ID NO: 117487 - DNA, 60 bp, Artificial
  Synthetic oligonucleotide
tgatacaatttatcagccgccaagatatgctccgagcgcgccaatgccatcatctatgcc

SEQ ID NO: 117488 - DNA, 60 bp, Artificial
  Synthetic oligonucleotide
atacaatttctcagccgccaagatatgctccgagcgcgccaatgccatcatctatgccca

SEQ ID NO: 117489 - DNA, 60 bp, Artificial
  Synthetic oligonucleotide
ccgccaaggtatgctccgagcgcgccaatgccatcatcgatgcccactgttgcacttgaa

SEQ ID NO: 117490 - DNA, 60 bp, Artificial
  Synthetic oligonucleotide
acgcggaagcgtttcgtgatgatgtgaggttaagacaaattaagcgacatgtgaatgagc

SEQ ID NO: 117491 - DNA, 58 bp, Artificial
  Synthetic oligonucleotide
tgggatcatcatgtaccgttaaagtgtgtccattaaatactcgaacattaggaattgg

SEQ ID NO: 117492 - DNA, 60 bp, Artificial
  Synthetic oligonucleotide
ggcggagaaagctgcattcgcatcgtacgcagaagcgtttcgtgatgatgtgagactaag

SEQ ID NO: 117493 - DNA, 60 bp, Artificial
  Synthetic oligonucleotide
acacaaaaggcggaaaaagctgcattcgcatcgtacgcagaagcgtttcgtgatgatgtg

SEQ ID NO: 117494 - DNA, 60 bp, Artificial
  Synthetic oligonucleotide
aaagctgcattcgcatcgtacgcagaagcgtttcgtgatgatgtgaggctaaggcagatc

SEQ ID NO: 117495 - DNA, 60 bp, Artificial
  Synthetic oligonucleotide
aaagctgcattcgcatcgtacgcagaagcgtttcgtgatgatgtgaggctaagacaaatc

SEQ ID NO: 117496 - DNA, 60 bp, Artificial
  Synthetic oligonucleotide
taatacgacaacggaggcgatacaaacgtatattaaacccttttgcgcggctttcggaat

SEQ ID NO: 117497 - DNA, 60 bp, Artificial
  Synthetic oligonucleotide
taatacaacaacggaggcgatacaaacgtatattaaacccttttgcgcggctttcggaat

SEQ ID NO: 117498 - DNA, 60 bp, Artificial
  Synthetic oligonucleotide
agcaatgtcaaatcaaacgggcgcaacaatggcgcagaaggtagaaaaagtagcatatgc

SEQ ID NO: 117499 - DNA, 60 bp, Artificial
  Synthetic oligonucleotide
gttgtctgcaatgaagagacgacgtgcaatagcacatatgaccttgatagtagccgcggt

SEQ ID NO: 117500 - DNA, 60 bp, Artificial
  Synthetic oligonucleotide
gttagttcccggtgtagagactagaatagaaatgaaggcgagtgacgaagtaagtttagt

SEQ ID NO: 117501 - DNA, 60 bp, Artificial
  Synthetic oligonucleotide
gttcccggtgtagagactagaatagaaatgaaggcgagtgacgaagtaagtttagtacca

SEQ ID NO: 117502 - DNA, 60 bp, Artificial
  Synthetic oligonucleotide
gcaatgaagagacgacgtgcaatagcacatatgaccttgatagtagccgcggtcatcgct

SEQ ID NO: 117503 - DNA, 60 bp, Artificial
  Synthetic oligonucleotide
cagttgaggcaatacagaattacgtgaaacctttttgtgcagcgtttggcattatcaacc

SEQ ID NO: 117504 - DNA, 60 bp, Artificial
  Synthetic oligonucleotide
ggcgaaaaatgagaagatgataggccagcagatagaccatacgagaaaagagataatgaa

SEQ ID NO: 117505 - DNA, 60 bp, Artificial
  Synthetic oligonucleotide
gagaagatgataggccagcagatagaccatacgagaaaagagataatgaagaaagacgca

SEQ ID NO: 117506 - DNA, 60 bp, Artificial
  Synthetic oligonucleotide
cgcctgaatacagaatccactactactaataacgctcagagtcccgtttctgaccctgtc

SEQ ID NO: 117507 - DNA, 60 bp, Artificial
  Synthetic oligonucleotide
cagatcacgcctgaatacagaatccactactactaataacgctcagagtcccgtttctga

SEQ ID NO: 117508 - DNA, 60 bp, Artificial
  Synthetic oligonucleotide
cagatgttgtctttgacgccgcagaggcaacttttgcagacacaagctccggtttgtcct

SEQ ID NO: 117509 - DNA, 60 bp, Artificial
  Synthetic oligonucleotide
ccgtttctgaccctgtcaatgcaagtgctaacgtaaaaacgtcaccagctggtacccaca

SEQ ID NO: 117510 - DNA, 60 bp, Artificial
  Synthetic oligonucleotide
ggtttgtcctcattgctaaaaactaagatgaagttttgattatcgattagtcgattgtct

SEQ ID NO: 117511 - DNA, 60 bp, Artificial
  Synthetic oligonucleotide
gtctttgacgccgcagaggcaacttttgcagacacaagctccggtttgtcctcattgcta

SEQ ID NO: 117512 - DNA, 60 bp, Artificial
  Synthetic oligonucleotide
attctcatctcagaatgagagtttagaatcggtggttgatagggtcatccacgccctgtc

SEQ ID NO: 117513 - DNA, 60 bp, Artificial
  Synthetic oligonucleotide
tcgattgtcttcgattctcatctcagaatgagagtttagaatcggtggttgatagggtca

SEQ ID NO: 117514 - DNA, 60 bp, Artificial
  Synthetic oligonucleotide
cgtagtcgacagctgcttcatcagaaagatgcaaaatggaagaggattatgtgttaccat

SEQ ID NO: 117515 - DNA, 60 bp, Artificial
  Synthetic oligonucleotide
catacgtagtcgacagctgcttcatcagaaagatgcaaaatggaagaggattatgtgtta

SEQ ID NO: 117516 - DNA, 60 bp, Artificial
  Synthetic oligonucleotide
gcacggtaattcacgtgatggctttgtaaaacgtcttgatgatgctgggaaaagtcgtgc

SEQ ID NO: 117517 - DNA, 60 bp, Artificial
  Synthetic oligonucleotide
gggttaagatgcacggtaattcacgtgatggctttgtaaaacgtcttgatgatgctggga

SEQ ID NO: 117518 - DNA, 55 bp, Artificial
  Synthetic oligonucleotide
tgtactacagacagttgaatgttgaagtcaatactttgaagaaggtgttagccaa

SEQ ID NO: 117519 - DNA, 51 bp, Artificial
  Synthetic oligonucleotide
ttttgggaagacgtacaacattggtcagctgtactacagacagttgaatgt

SEQ ID NO: 117520 - DNA, 60 bp, Artificial
  Synthetic oligonucleotide
cgcttcaaatcaattggcatgggtagagatgagaaattgtcatacgtagtcgacagctgc

SEQ ID NO: 117521 - DNA, 60 bp, Artificial
  Synthetic oligonucleotide
caactcgatacgcttcaaatcaattggcatgggtagagatgagaaattgtcatacgtagt

SEQ ID NO: 117522 - DNA, 60 bp, Artificial
  Synthetic oligonucleotide
gctgggaaaagtcgtgctactggcttgatcagagctttggatcattccaactcgatacgc

SEQ ID NO: 117523 - DNA, 60 bp, Artificial
  Synthetic oligonucleotide
gatgctgggaaaagtcgtgctactggcttgatcagagctttggatcattccaactcgata

SEQ ID NO: 117524 - DNA, 60 bp, Artificial
  Synthetic oligonucleotide
gctaatgctaaagaggctatgtcagctatgtgtgatgatgaagaacatgctgaaaaaata

SEQ ID NO: 117525 - DNA, 56 bp, Artificial
  Synthetic oligonucleotide
gctaatgctaaagaggctatgtcagctatgtgtgatgatgaagaacatgctgaaaa

SEQ ID NO: 117526 - DNA, 60 bp, Artificial
  Synthetic oligonucleotide
atgatgaatcactgttggatcagttagcggagcgtggccatgatgttgtcgctaatgcta

SEQ ID NO: 117527 - DNA, 60 bp, Artificial
  Synthetic oligonucleotide
tggatcagttagcggagcgtggccatgatgttgtcgctaatgctaaagaggctatgtcag

SEQ ID NO: 117528 - DNA, 60 bp, Artificial
  Synthetic oligonucleotide
tcatgattgcggtattggacgtacatgtagttgtggagctaaggcttgcgatgatgaatc

SEQ ID NO: 117529 - DNA, 60 bp, Artificial
  Synthetic oligonucleotide
gcggtattggacgtacatgtagttgtggagctaaggcttgcgatgatgaatcactgttgg

SEQ ID NO: 117530 - DNA, 60 bp, Artificial
  Synthetic oligonucleotide
ttatgtgttaccattgataacataaacaaactgattgaacacaagttagttcatgattgc

SEQ ID NO: 117531 - DNA, 60 bp, Artificial
  Synthetic oligonucleotide
gataacataaacaaactgattgaacacaagttagttcatgattgcggtattggacgtaca

SEQ ID NO: 117532 - DNA, 60 bp, Artificial
  Synthetic oligonucleotide
tgaaaaaatagctgtgactaagtcagatgcaaagttggatgataggattgtacaaggtaa

SEQ ID NO: 117533 - DNA, 60 bp, Artificial
  Synthetic oligonucleotide
gctgtgactaagtcagatgcaaagttggatgataggattgtacaaggtaagggatcacgt

SEQ ID NO: 117534 - DNA, 60 bp, Artificial
  Synthetic oligonucleotide
ctctgactattaaagaattggctaattcaaaatcacatatgacgtatgctgatactattg

SEQ ID NO: 117535 - DNA, 60 bp, Artificial
  Synthetic oligonucleotide
cacaatgcatactgcttcaatttttgggaagacgtacaacattggtcagctgtactacag

SEQ ID NO: 117536 - DNA, 51 bp, Artificial
  Synthetic oligonucleotide
ttcttcgatgagaaggaaaaccgtgatgttattgtgactgcttcggatttc

SEQ ID NO: 117537 - DNA, 53 bp, Artificial
  Synthetic oligonucleotide
cattttcaaagattctggtaactatttccttggcttagagaatattttccgca

SEQ ID NO: 117538 - DNA, 51 bp, Artificial
  Synthetic oligonucleotide
aaattgtgtcttagtgatgacgctggtgtgaacaaagctttgatctttatc

SEQ ID NO: 117539 - DNA, 60 bp, Artificial
  Synthetic oligonucleotide
agctcacaacgcagaggtggtgtttgtactcttttcgatgtattatacaattacctcgta

SEQ ID NO: 117540 - DNA, 60 bp, Artificial
  Synthetic oligonucleotide
caacgcagaggtggtgtttgtactcttttcgatgtattatacaattacctcgtacagcgc

SEQ ID NO: 117541 - DNA, 55 bp, Artificial
  Synthetic oligonucleotide
ttacctcgtacagcgcaaactgaatcaggagagtgagttcttaagctatggcacg

SEQ ID NO: 117542 - DNA, 60 bp, Artificial
  Synthetic oligonucleotide
catatacatcaatgggaagacagtgacttacgtgtgcaagaacgctgatgctctgactat

SEQ ID NO: 117543 - DNA, 60 bp, Artificial
  Synthetic oligonucleotide
gggaagacagtgacttacgtgtgcaagaacgctgatgctctgactattaaagaattggct

SEQ ID NO: 117544 - DNA, 60 bp, Artificial
  Synthetic oligonucleotide
tggatttggtgggctgcaaaatgtacctattaacgatgagcttgcttcacatctgttacg

SEQ ID NO: 117545 - DNA, 60 bp, Artificial
  Synthetic oligonucleotide
gctggtcagttatggcacgcgccgcgttcctattcaagaccgttggatttggtgggctgc

SEQ ID NO: 117546 - DNA, 60 bp, Artificial
  Synthetic oligonucleotide
ctggattagtctcgggagaggattggctacctctgcattagtgcctacggcgggatcgcg

SEQ ID NO: 117547 - DNA, 60 bp, Artificial
  Synthetic oligonucleotide
agtgcctacggcgggatcgcgttactatcaaatgagttgcctactgagtggtacgctgca

SEQ ID NO: 117548 - DNA, 60 bp, Artificial
  Synthetic oligonucleotide
gctattcgctggtcagttatggcacgcgccgcgttcctattcaagaccgttggatttggt

SEQ ID NO: 117549 - DNA, 60 bp, Artificial
  Synthetic oligonucleotide
ttgattctcagttcaacacttactggatgcctgtgttctgggtcccagttgcctttgatt

SEQ ID NO: 117550 - DNA, 60 bp, Artificial
  Synthetic oligonucleotide
ctcactcggcacagataagggctggaaatcgtagccttttcgtcatgcccactagccctg

SEQ ID NO: 117551 - DNA, 60 bp, Artificial
  Synthetic oligonucleotide
attgactcactcggcacagataagggctggaaatcgtagccttttcgtcatgcccactag

SEQ ID NO: 117552 - DNA, 60 bp, Artificial
  Synthetic oligonucleotide
gtcaagcttcggctaaccgaccatgggaacatgatggaacatatgcgcgtatgactcaaa

SEQ ID NO: 117553 - DNA, 60 bp, Artificial
  Synthetic oligonucleotide
tgtcaagcttcggctaaccgaccatgggaacatgatggaacatatgcgcgtatgactcaa

SEQ ID NO: 117554 - DNA, 60 bp, Artificial
  Synthetic oligonucleotide
ttggtcacactttcgccgaaatcgcgtacacattatgtcaagcttcggctaaccgaccat

SEQ ID NO: 117555 - DNA, 60 bp, Artificial
  Synthetic oligonucleotide
tactcatgaattattttggtcacactttcgccgaaatcgcgtacacattatgtcaagctt

SEQ ID NO: 117556 - DNA, 60 bp, Artificial
  Synthetic oligonucleotide
catacgtgcgggttgatgaggacatgtggagtggtgacgtgagccagttactcatgaatt

SEQ ID NO: 117557 - DNA, 60 bp, Artificial
  Synthetic oligonucleotide
gcctttgattgataacaactctgtcccaaacgtttctaggaacattcatggatggacggg

SEQ ID NO: 117558 - DNA, 60 bp, Artificial
  Synthetic oligonucleotide
acacttactggatgcctgtgttctgggtcccagttgcctttgattgataacaactctgtc

SEQ ID NO: 117559 - DNA, 60 bp, Artificial
  Synthetic oligonucleotide
gtgcctacggcgggatcgcgttactatcaaatgagttgcctactgagtggtacgctgcaa

SEQ ID NO: 117560 - DNA, 60 bp, Artificial
  Synthetic oligonucleotide
accgcccattcttgcgcaacctgcgatacaggcgcaagcggatagagcttacgactgtga

SEQ ID NO: 117561 - DNA, 60 bp, Artificial
  Synthetic oligonucleotide
cgcccattcttgcgcaacctgcgatacaggcgcaagcggatagagcttacgactgtgatg

SEQ ID NO: 117562 - DNA, 60 bp, Artificial
  Synthetic oligonucleotide
acgactgtgatgactatcctttccttgcacgtgatccccgcttcaaacatagagtatatc

SEQ ID NO: 117563 - DNA, 60 bp, Artificial
  Synthetic oligonucleotide
ggtgggctgcaaaatgtacctattaacgatgagcttgcttcacatctgttacgagctgga

SEQ ID NO: 117564 - DNA, 60 bp, Artificial
  Synthetic oligonucleotide
caattccttgactggattagtctcgggagaggattggctacctctgcattagtgcctacg

SEQ ID NO: 117565 - DNA, 60 bp, Artificial
  Synthetic oligonucleotide
caagcttgaggcctgggctttggaggacgatcaatataatcgcgcgcatccaaactcgac

SEQ ID NO: 117566 - DNA, 60 bp, Artificial
  Synthetic oligonucleotide
caaactcgacaatgtttaggactaagccatttaccaatgctcaatggggccggggaaata

SEQ ID NO: 117567 - DNA, 60 bp, Artificial
  Synthetic oligonucleotide
aatacagcagcgactagcgcagcgattgcggctctcatctaaccgtctggaagcgtgggg

SEQ ID NO: 117568 - DNA, 54 bp, Artificial
  Synthetic oligonucleotide
gtctggaagcgtgggggtccccccacaccctcctcggctgaccacctattcatc

SEQ ID NO: 117569 - DNA, 60 bp, Artificial
  Synthetic oligonucleotide
atcctttccttgcacgtgatccccgcttcaaacatagagtatatcagcaacttagtgcga

SEQ ID NO: 117570 - DNA, 60 bp, Artificial
  Synthetic oligonucleotide
atcatacgtgcgggttgatgaggacatgtggagtggtgacgtgagccagttactcatgaa

SEQ ID NO: 117571 - DNA, 58 bp, Artificial
  Synthetic oligonucleotide
cagatgcaaatagaagcgttaggggatcagacgcagcagttcaagcgtgacaagcttg

SEQ ID NO: 117572 - DNA, 60 bp, Artificial
  Synthetic oligonucleotide
cagatgcaaatagaagcgttaggggatcagacgcagcagttcaagcgtgacaagcttgag

SEQ ID NO: 117573 - DNA, 60 bp, Artificial
  Synthetic oligonucleotide
caactctgtcccaaacgtttctaggaacattcatggatggacgggccgaggtggtaatca

SEQ ID NO: 117574 - DNA, 60 bp, Artificial
  Synthetic oligonucleotide
ctgaatattgcgataggctgaggcgtgatggcgtgatgacccccgcgcagcagatgcaaa

SEQ ID NO: 117575 - DNA, 60 bp, Artificial
  Synthetic oligonucleotide
ttaggactaagccatttaccaatgctcaatggggccggggaaatacagcagcgactagcg

SEQ ID NO: 117576 - DNA, 60 bp, Artificial
  Synthetic oligonucleotide
cggggaaatacagcagcgactagcgcagcgattgcggctctcatctaaccgtctggaagc

SEQ ID NO: 117577 - DNA, 60 bp, Artificial
  Synthetic oligonucleotide
acagtctgtcaaagacggctgctggctgtccggtgagactcgggaatgagagttgcagtc

SEQ ID NO: 117578 - DNA, 55 bp, Artificial
  Synthetic oligonucleotide
caagcgacgtcgcgtgttggtctgattgagttgctccctgttgctgagatgactg

SEQ ID NO: 117579 - DNA, 59 bp, Artificial
  Synthetic oligonucleotide
ccttttgacttcgataaggtttcgtgtaaggtgggtggtgagtcgttgacgggcattgg

SEQ ID NO: 117580 - DNA, 60 bp, Artificial
  Synthetic oligonucleotide
gttattgatgaagcgagttcaggagtggcttttgcggaatgatcttgttaggcgtcgtga

SEQ ID NO: 117581 - DNA, 60 bp, Artificial
  Synthetic oligonucleotide
gagttgctgagggatactcccatactggactatatccggactgctttctgtgagggtcgt

SEQ ID NO: 117582 - DNA, 60 bp, Artificial
  Synthetic oligonucleotide
acagtctctaccgaagctagtgcagccgatcgtaatgatcgagaaaaatcgtcgtcttct

SEQ ID NO: 117583 - DNA, 60 bp, Artificial
  Synthetic oligonucleotide
tggccgcaatgattgagcagaaagttcaaatgtctggaagcgctggtctgggtgagtttt

SEQ ID NO: 117584 - DNA, 60 bp, Artificial
  Synthetic oligonucleotide
tcgtcttctgaacctgaagacaatgcaaaggaaacacttacgaagaaagactcgtcatcc

SEQ ID NO: 117585 - DNA, 60 bp, Artificial
  Synthetic oligonucleotide
gatgatggacaagtggtggatttactgtctgtaggcgaggagcgtactttaagccaatct

SEQ ID NO: 117586 - DNA, 60 bp, Artificial
  Synthetic oligonucleotide
cccaaacctgcgaggtatattgcaccatcatgctatttctattgaaaaggttgagacgtg

SEQ ID NO: 117587 - DNA, 60 bp, Artificial
  Synthetic oligonucleotide
acaagtgtacccgtttattgaccctgtggctaaccagtttgggcgtggatttgatttggc

SEQ ID NO: 117588 - DNA, 52 bp, Artificial
  Synthetic oligonucleotide
cacttttaccagctcactgctaaacaaattggagcattgggagcacaaggtg

SEQ ID NO: 117589 - DNA, 60 bp, Artificial
  Synthetic oligonucleotide
tcttgcttcttcccggatcagtatggggcattgatagcttcccgtggatatggtcatgat

SEQ ID NO: 117590 - DNA, 60 bp, Artificial
  Synthetic oligonucleotide
tctttaggggttccgacacctagcaaactggttttttcgctgcttggtgcaaaggtcgca

SEQ ID NO: 117591 - DNA, 60 bp, Artificial
  Synthetic oligonucleotide
gcgtcgtgagatacgtgacatcatatatcgtccatatgccaatgtgttgcgtttgccggg

SEQ ID NO: 117592 - DNA, 60 bp, Artificial
  Synthetic oligonucleotide
cggtgagtggaaagaattgcttcgtctgacgaatcctcagcagatctgtcagaaaattgt

SEQ ID NO: 117593 - DNA, 60 bp, Artificial
  Synthetic oligonucleotide
caaggtgcggacttgcttggacgtgtgcatgcgcaggggtctacatttcggggtggagca

SEQ ID NO: 117594 - DNA, 60 bp, Artificial
  Synthetic oligonucleotide
gttaacgagaatgatgttgtttccgggtgaccagctttacgtcgactgtctccgtacagc

SEQ ID NO: 117595 - DNA, 60 bp, Artificial
  Synthetic oligonucleotide
gagcggcggtttgataaccacttggagggtgtgcctttcgattcacctgttattgctgcg

SEQ ID NO: 117596 - DNA, 60 bp, Artificial
  Synthetic oligonucleotide
tttcatgagattcctcctattcaagtcgagatgactgggaatgtgaactacgtgtatgat

SEQ ID NO: 117597 - DNA, 60 bp, Artificial
  Synthetic oligonucleotide
aaggagtaactttctcgttgcggcccacaaatgacctaactttttcatcatttcatgaga

SEQ ID NO: 117598 - DNA, 60 bp, Artificial
  Synthetic oligonucleotide
accgtccgtccgtcggaatgtcaagttgataatggatgctgtatttgatcctgaattcgg

SEQ ID NO: 117599 - DNA, 60 bp, Artificial
  Synthetic oligonucleotide
agattgcattgcatccaattatcttctggtctcatcgtctcggacagggagtatggaggc

SEQ ID NO: 117600 - DNA, 60 bp, Artificial
  Synthetic oligonucleotide
aaggacctcaggaccgtcatgcactgacgactctttctaatttgctccgctggtacacac

SEQ ID NO: 117601 - DNA, 60 bp, Artificial
  Synthetic oligonucleotide
cggacagggagtatggaggcaatttccagctgtgcgagaggatcgtgagcggcggtttga

SEQ ID NO: 117602 - DNA, 60 bp, Artificial
  Synthetic oligonucleotide
agagcggtcaattgaacatagactgcgaggtgactaccgtgtgtattaccctagacctgg

SEQ ID NO: 117603 - DNA, 60 bp, Artificial
  Synthetic oligonucleotide
agcttcccgtggatatggtcatgatgttaccggaaaccgaatcgacagcattcgagacgg

SEQ ID NO: 117604 - DNA, 60 bp, Artificial
  Synthetic oligonucleotide
gacattttgttcctgaccgcaacagccgtagtcgttaaggcagcaatgtccgcccgtacc

SEQ ID NO: 117605 - DNA, 60 bp, Artificial
  Synthetic oligonucleotide
agccagacgttgcgttgaatccgtttactttacgtcaaggtgcggacttgcttggacgtg

SEQ ID NO: 117606 - DNA, 60 bp, Artificial
  Synthetic oligonucleotide
gaaactgcacgtactcgagcggagtatgatgtccaagtccgttgggaagcacctgggcgg

SEQ ID NO: 117607 - DNA, 60 bp, Artificial
  Synthetic oligonucleotide
ttattgctgcgtttgagccagacgttgcgttgaatccgtttactttacgtcaaggtgcgg

SEQ ID NO: 117608 - DNA, 60 bp, Artificial
  Synthetic oligonucleotide
gcaaaatgagaagatgaatgtcagtgcttatgttgatcttttgcagtcatgtcaaatggg

SEQ ID NO: 117609 - DNA, 60 bp, Artificial
  Synthetic oligonucleotide
ttattacagctgaggcgcatgcaaatgttatggaggagttgcaaaatgagaagatgaatg

SEQ ID NO: 117610 - DNA, 55 bp, Artificial
  Synthetic oligonucleotide
ctttaccttgtgaagttttgttgaatgatgctatcgccatactggaggagtatcg

SEQ ID NO: 117611 - DNA, 60 bp, Artificial
  Synthetic oligonucleotide
cgttcctgaggccctgactgtatttagtgaatatcaatggtttgcacgagaggttgccga

SEQ ID NO: 117612 - DNA, 60 bp, Artificial
  Synthetic oligonucleotide
tgggccaaatattgagtcgttttttaatcggaagtatcgggaggcagcgatttgtaattt

SEQ ID NO: 117613 - DNA, 51 bp, Artificial
  Synthetic oligonucleotide
ggcgtcgacgccagaaggaggaggaaattgttcaaaacttgggtgcgccgt

SEQ ID NO: 117614 - DNA, 60 bp, Artificial
  Synthetic oligonucleotide
gtgcattttcctttgttgtacaggatgtttcaaagtttagtggcatttactatgatttca

SEQ ID NO: 117615 - DNA, 60 bp, Artificial
  Synthetic oligonucleotide
atcattttgatcctaccttccgacctaagatatgctcagtattacgttgacacagtctgt

SEQ ID NO: 117616 - DNA, 60 bp, Artificial
  Synthetic oligonucleotide
cgagttcaggagtggcttttgcggaatgatcttgttaggcgtcgtgagatacgtgacatc

SEQ ID NO: 117617 - DNA, 60 bp, Artificial
  Synthetic oligonucleotide
ctgaccgcaacagccgtagtcgttaaggcagcaatgtccgcccgtaccaaagagaaaacc

SEQ ID NO: 117618 - DNA, 60 bp, Artificial
  Synthetic oligonucleotide
cgtcaactccttgagggactgagacttgtagccgaactttcaactggagagttgctgagg

SEQ ID NO: 117619 - DNA, 60 bp, Artificial
  Synthetic oligonucleotide
ctcaatctgttcggggttaaaattaaccatggtgtgctggctcaggttggagagcggtca

SEQ ID NO: 117620 - DNA, 60 bp, Artificial
  Synthetic oligonucleotide
cgagacggtgagcgaacgaagaagaactgcagatttgcaacttacacagtgctcgatccg

SEQ ID NO: 117621 - DNA, 60 bp, Artificial
  Synthetic oligonucleotide
gtgctcgatccgattcctaacggtcctccagataggacgagaagaaagtggttattgatg

SEQ ID NO: 117622 - DNA, 60 bp, Artificial
  Synthetic oligonucleotide
ctttctgtgagggtcgttttccatcccacatattcttcaagattctcaatctgttcgggg

SEQ ID NO: 117623 - DNA, 60 bp, Artificial
  Synthetic oligonucleotide
gagacgtgttttaaagcggcagagttggcgcaattttcttcgttcttaagtttgcgacca

SEQ ID NO: 117624 - DNA, 60 bp, Artificial
  Synthetic oligonucleotide
tcaaacaaccaatattcgaggtgggatattgcccccatctgtctcgaagcctattctgcc

SEQ ID NO: 117625 - DNA, 60 bp, Artificial
  Synthetic oligonucleotide
ctattctgccttgtgagggggttcatccttcttttatctttgctctgatgtcaatgtggc

SEQ ID NO: 117626 - DNA, 60 bp, Artificial
  Synthetic oligonucleotide
ggtgaaggatgcaagtggtcgaccacgagtgactgatgaaaatggcgtagtagtgaatgg

SEQ ID NO: 117627 - DNA, 60 bp, Artificial
  Synthetic oligonucleotide
gttcgacatacagatttgtggattacattaaaactagttccacacaagcgtatgggtcga

SEQ ID NO: 117628 - DNA, 60 bp, Artificial
  Synthetic oligonucleotide
tcaatccatcaaatgatggtgtggtgttttcagtaacggataacagcccgttttggatgt

SEQ ID NO: 117629 - DNA, 60 bp, Artificial
  Synthetic oligonucleotide
taaagctaataattatcaatatacatatatgagagacggcgtagaagttgttgctcatac

SEQ ID NO: 117630 - DNA, 60 bp, Artificial
  Synthetic oligonucleotide
tcaaaggcgtcactatggaaagaggttcaatataatagagacattgtgataagatttgtg

SEQ ID NO: 117631 - DNA, 52 bp, Artificial
  Synthetic oligonucleotide
gcaactaatactacagtgtaggatataaagctgtttgtatgaggatgtgacc

SEQ ID NO: 117632 - DNA, 60 bp, Artificial
  Synthetic oligonucleotide
atctgaatgataattatggcattacgagggagcaagcgttgaacatgttacgttcagatc

SEQ ID NO: 117633 - DNA, 60 bp, Artificial
  Synthetic oligonucleotide
aatgaactatcagctaatatagctttgtcccagctaatagatttagcactattgccactt

SEQ ID NO: 117634 - DNA, 60 bp, Artificial
  Synthetic oligonucleotide
gctgaattggttactgactcgccagtaatatcagcaattatagactttaaaacgataaag

SEQ ID NO: 117635 - DNA, 60 bp, Artificial
  Synthetic oligonucleotide
aatctaaatgcagatttttacgtcataccagattcgcaacaagagatatgtacagaatac

SEQ ID NO: 117636 - DNA, 60 bp, Artificial
  Synthetic oligonucleotide
cgaaccttcgtttagagttacaggtaaaaggatatcaaatttgtatggccttccagccgc

SEQ ID NO: 117637 - DNA, 60 bp, Artificial
  Synthetic oligonucleotide
gctagtgccaagtaatgatgactaccaaactccaattgcaaattcagtcactgtaagaca

SEQ ID NO: 117638 - DNA, 60 bp, Artificial
  Synthetic oligonucleotide
gacaggatttagagagacagctagatgaaatgagaagagaattcaatgaactatcagcta

SEQ ID NO: 117639 - DNA, 60 bp, Artificial
  Synthetic oligonucleotide
atactattagaagtcaaagaattgcgagaccgaatgaagacataatcatatcaaaggcgt

SEQ ID NO: 117640 - DNA, 60 bp, Artificial
  Synthetic oligonucleotide
cagacgaaataactaacataggtgcagaaaagaaagagaatgtgactgtgcagcttggtg

SEQ ID NO: 117641 - DNA, 57 bp, Artificial
  Synthetic oligonucleotide
tatggccttccagccgctaacccaatgggagaccagcaatattatgaggcatcaggt

SEQ ID NO: 117642 - DNA, 60 bp, Artificial
  Synthetic oligonucleotide
gcagcttggtgaattcgctcaaagtcagtacgcgcccgtttcatggggatcaggagagac

SEQ ID NO: 117643 - DNA, 60 bp, Artificial
  Synthetic oligonucleotide
gcgatttgagggttggaacatattctaatcccgtgccgaatgcagtgatcaatctaaatg

SEQ ID NO: 117644 - DNA, 60 bp, Artificial
  Synthetic oligonucleotide
ttttacgtcataccagattcgcaacaagagatatgtacagaatacataaggggaggatta

SEQ ID NO: 117645 - DNA, 60 bp, Artificial
  Synthetic oligonucleotide
aagagatggagatgggaatatatcaaattactggggtgcggatacacaaggcgatttgag

SEQ ID NO: 117646 - DNA, 60 bp, Artificial
  Synthetic oligonucleotide
cataaggggaggattaccagctatgcaaactacaacttacgtgacaccaattagttatac

SEQ ID NO: 117647 - DNA, 60 bp, Artificial
  Synthetic oligonucleotide
tatgggtcgaggaactatctgaatactgcacatagattgcaagcttacagaagagatgga

SEQ ID NO: 117648 - DNA, 60 bp, Artificial
  Synthetic oligonucleotide
tgacaccaattagttatactattagaagtcaaagaattgcgagaccgaatgaagacataa

SEQ ID NO: 117649 - DNA, 60 bp, Artificial
  Synthetic oligonucleotide
agaatgtgactgtgcagcttggtgaattcgctcaaagtcagtacgcgcccgtttcatggg

SEQ ID NO: 117650 - DNA, 60 bp, Artificial
  Synthetic oligonucleotide
ttttggatgtttacttatttagtcttaccaaatacagctcagactaatgtcacagtaaat

SEQ ID NO: 117651 - DNA, 60 bp, Artificial
  Synthetic oligonucleotide
cgaggaactatctgaatactgcacatagattgcaagcttacagaagagatggagatggga

SEQ ID NO: 117652 - DNA, 60 bp, Artificial
  Synthetic oligonucleotide
tacagaatacataaggggaggattaccagctatgcaaactacaacttacgtgacaccaat

SEQ ID NO: 117653 - DNA, 60 bp, Artificial
  Synthetic oligonucleotide
ttcagtagatttatcagacgaaataactaacataggtgcagaaaagaaagagaatgtgac

SEQ ID NO: 117654 - DNA, 60 bp, Artificial
  Synthetic oligonucleotide
tcaatatacatatatgagagacggcgtagaagttgttgctcatacaactgtctcagtgaa

SEQ ID NO: 117655 - DNA, 60 bp, Artificial
  Synthetic oligonucleotide
aggaggtcattattcgttcgcactgcctgttggctcatggccggtgatgccaggagggag

SEQ ID NO: 117656 - DNA, 60 bp, Artificial
  Synthetic oligonucleotide
gctgcgatcggtcaacagcgcggcttcagtgtggacggatataagtgacatagtagactc

SEQ ID NO: 117657 - DNA, 60 bp, Artificial
  Synthetic oligonucleotide
ggagatgggaatatatcaaattactggggtgcggatacacaaggcgatttgagggttgga

SEQ ID NO: 117658 - DNA, 60 bp, Artificial
  Synthetic oligonucleotide
ttgccacttgatatgttttcaatgttcagtggaatacaaagtaccgttgaagcggcaaaa

SEQ ID NO: 117659 - DNA, 60 bp, Artificial
  Synthetic oligonucleotide
gttgtggataaggagatactaccgcaaataataactgaggcgtcggagaagttcatacca

SEQ ID NO: 117660 - DNA, 60 bp, Artificial
  Synthetic oligonucleotide
ggagatactaccgcaaataataactgaggcgtcggagaagttcataccaaaccgtgcgta

SEQ ID NO: 117661 - DNA, 60 bp, Artificial
  Synthetic oligonucleotide
cagcaacagccgctgcgaagaaattcagagttaaagagttcacaacggagtttaatggtg

SEQ ID NO: 117662 - DNA, 60 bp, Artificial
  Synthetic oligonucleotide
gatgaatgagacggtgaatatatcaatagacaattcgggttcgacatacagatttgtgga

SEQ ID NO: 117663 - DNA, 60 bp, Artificial
  Synthetic oligonucleotide
cacagtaaatgtgatgaatgagacggtgaatatatcaatagacaattcgggttcgacata

SEQ ID NO: 117664 - DNA, 60 bp, Artificial
  Synthetic oligonucleotide
ttgctcatacaactgtctcagtgaacggcgttagcgtgtacaattataacactagaccac

SEQ ID NO: 117665 - DNA, 60 bp, Artificial
  Synthetic oligonucleotide
ccaaaccgtgcgtatagattaatagatggagagaaagtatacgaggttacaacggaaggg

SEQ ID NO: 117666 - DNA, 60 bp, Artificial
  Synthetic oligonucleotide
gttcgttcgtatacgttgattattgggacgattcacaggctttcagaaatatggtatatg

SEQ ID NO: 117667 - DNA, 60 bp, Artificial
  Synthetic oligonucleotide
cgttgattattgggacgattcacaggctttcagaaatatggtatatgtgcggtcgctgag

SEQ ID NO: 117668 - DNA, 60 bp, Artificial
  Synthetic oligonucleotide
atggtatatgtgcggtcgctgagtgcggaactaaatcaagtgcggtgcgtaggaggtcat

SEQ ID NO: 117669 - DNA, 60 bp, Artificial
  Synthetic oligonucleotide
gcggtcgctgagtgcggaactaaatcaagtgcggtgcgtaggaggtcattattcgttcgc

SEQ ID NO: 117670 - DNA, 60 bp, Artificial
  Synthetic oligonucleotide
gactatgtgtcgttgaactcactaaggttcagatttagatgtgcagtgagcgaaccttcg

SEQ ID NO: 117671 - DNA, 60 bp, Artificial
  Synthetic oligonucleotide
ggctttataatggcttcgctaatatacagacagctactctataactcatattcagtagat

SEQ ID NO: 117672 - DNA, 60 bp, Artificial
  Synthetic oligonucleotide
gaagacataatcatatcaaaggcgtcactatggaaagaggttcaatataatagagacatt

SEQ ID NO: 117673 - DNA, 60 bp, Artificial
  Synthetic oligonucleotide
gatttgtggattacattaaaactagttccacacaagcgtatgggtcgaggaactatctga

SEQ ID NO: 117674 - DNA, 60 bp, Artificial
  Synthetic oligonucleotide
tatttagtcttaccaaatacagctcagactaatgtcacagtaaatgtgatgaatgagacg

SEQ ID NO: 117675 - DNA, 60 bp, Artificial
  Synthetic oligonucleotide
ttaaaacgataaagaatctgaatgataattatggcattacgagggagcaagcgttgaaca

SEQ ID NO: 117676 - DNA, 60 bp, Artificial
  Synthetic oligonucleotide
atgtttcccaaccaaattattctggatataaaaccagacagctcgcatgcggtagatcca

SEQ ID NO: 117677 - DNA, 60 bp, Artificial
  Synthetic oligonucleotide
cagttttgtgaatgtacgagatattgtaaggtggagtcaacagagggacattcaggagtc

SEQ ID NO: 117678 - DNA, 60 bp, Artificial
  Synthetic oligonucleotide
gaaatgcctaaagactggagttcaacttgcgcgaccaacgatttagcagcctgaccacct

SEQ ID NO: 117679 - DNA, 60 bp, Artificial
  Synthetic oligonucleotide
cgggtggggggtggttgatgttcagagagtccagccgagtccatatgatcatgttcaacg

SEQ ID NO: 117680 - DNA, 60 bp, Artificial
  Synthetic oligonucleotide
aacaaacgtttagtcgcgtacaaaggtaagatgcgcttaatggatgtaacgaaatgccta

SEQ ID NO: 117681 - DNA, 60 bp, Artificial
  Synthetic oligonucleotide
cgcgtacaaaggtaagatgcgcttaatggatgtaacgaaatgcctaaagactggagttca

SEQ ID NO: 117682 - DNA, 60 bp, Artificial
  Synthetic oligonucleotide
aggagagggatggagtgaggatggtcgcttttaaatacgcgacaaccgcgactgcctatt

SEQ ID NO: 117683 - DNA, 60 bp, Artificial
  Synthetic oligonucleotide
gcggccgcccgacgagatactgacggcaatgccttatgtgtacacggaggaggagaggga

SEQ ID NO: 117684 - DNA, 57 bp, Artificial
  Synthetic oligonucleotide
tatttgatgcccaacccaagaattaattcgatcacaatcacacagcgtatcactcag

SEQ ID NO: 117685 - DNA, 60 bp, Artificial
  Synthetic oligonucleotide
gctagttgctgcgggaaaagatcaagaagcagcttatttgagacagatgctgccttttca

SEQ ID NO: 117686 - DNA, 60 bp, Artificial
  Synthetic oligonucleotide
tgaagatttgctcagtgctttctctctgccagatcagaatttcgatgtagttctacacaa

SEQ ID NO: 117687 - DNA, 60 bp, Artificial
  Synthetic oligonucleotide
gactgattttagacgcgcggacactatttggataatatcacaaaggttaccgattaatgc

SEQ ID NO: 117688 - DNA, 60 bp, Artificial
  Synthetic oligonucleotide
tattgaaggtatacaatatggggagttgcgtgaatcggtcaattggttgatgaggcttgg

SEQ ID NO: 117689 - DNA, 60 bp, Artificial
  Synthetic oligonucleotide
cggtcaattggttgatgaggcttggactaaggaagagaatcgagtttgccaacgatttct

SEQ ID NO: 117690 - DNA, 60 bp, Artificial
  Synthetic oligonucleotide
ggcaaaatcagagcgatatggctgcacatgctcccgatgttgatggggcgataccagagg

SEQ ID NO: 117691 - DNA, 60 bp, Artificial
  Synthetic oligonucleotide
ggcgataccagaggtaatgactataatcagtggaattaagggattgctggaagaaaagga

SEQ ID NO: 117692 - DNA, 60 bp, Artificial
  Synthetic oligonucleotide
aagaaaaggattacaaagtaataaacgcgccaccgaattcttttcgcacgatcccgatgc

SEQ ID NO: 117693 - DNA, 60 bp, Artificial
  Synthetic oligonucleotide
aagtaataaacgcgccaccgaattcttttcgcacgatcccgatgcagagtacggagtatg

SEQ ID NO: 117694 - DNA, 60 bp, Artificial
  Synthetic oligonucleotide
cgcccgacgagatactgacggcaatgccttatgtgtacacggaggaggagagggatggag

SEQ ID NO: 117695 - DNA, 60 bp, Artificial
  Synthetic oligonucleotide
tatgattgtaacgctttccgagcggacccacaaacgggtcgaggttacaacgggtggggg

SEQ ID NO: 117696 - DNA, 60 bp, Artificial
  Synthetic oligonucleotide
cgtgtaatccgttactgtgacattgattcaagggagatcatagatccaagaacttatggg

SEQ ID NO: 117697 - DNA, 60 bp, Artificial
  Synthetic oligonucleotide
ggagatgttactcactacacctatgcgattgcaaatctacaggcgaatatgggacagttc

SEQ ID NO: 117698 - DNA, 60 bp, Artificial
  Synthetic oligonucleotide
cttgatgctgcgctgagcgattatttattgtacatgtataacaatcggattcctataaat

SEQ ID NO: 117699 - DNA, 60 bp, Artificial
  Synthetic oligonucleotide
atcccgatgcagagtacggagtatgttttgcaagtgaacacgttttatgagaggatgtcg

SEQ ID NO: 117700 - DNA, 60 bp, Artificial
  Synthetic oligonucleotide
ggtggttgatgttcagagagtccagccgagtccatatgatcatgttcaacgtgtaatccg

SEQ ID NO: 117701 - DNA, 60 bp, Artificial
  Synthetic oligonucleotide
gatatgcagctgaattatccacgatgcagatggatgtacagcagctgaggatgatgcgag

SEQ ID NO: 117702 - DNA, 60 bp, Artificial
  Synthetic oligonucleotide
ggcggcaaggattcttccatacgaatatgatcgatggagcgccaccaattggagatgtta

SEQ ID NO: 117703 - DNA, 50 bp, Artificial
  Synthetic oligonucleotide
gcttgggcgattgctaatgactttgaagacttgatgttagtggatcacgt

SEQ ID NO: 117704 - DNA, 60 bp, Artificial
  Synthetic oligonucleotide
cgtgaggcgtttcgaacccatcgcccgttcagatttacttgaggcagctcctctgattga

SEQ ID NO: 117705 - DNA, 60 bp, Artificial
  Synthetic oligonucleotide
ttggaggtgagttgggcttcgatctggttcgccttcgtgaggcgtttcgaacccatcgcc

SEQ ID NO: 117706 - DNA, 60 bp, Artificial
  Synthetic oligonucleotide
acggatccggtagttttggaggtgagttgggcttcgatctggttcgccttcgtgaggcgt

SEQ ID NO: 117707 - DNA, 60 bp, Artificial
  Synthetic oligonucleotide
gtcaacagagggacattcaggagtcgttagcgtatgttttgaatagggaagcttgggcga

SEQ ID NO: 117708 - DNA, 60 bp, Artificial
  Synthetic oligonucleotide
gtacagcagctgaggatgatgcgagccagagtcccggacactgtgattaatgcgacgcca

SEQ ID NO: 117709 - DNA, 60 bp, Artificial
  Synthetic oligonucleotide
ctaatcacaaatgtcgcgttatgcttaccgactggagagtatttgatgcccaacccaaga

SEQ ID NO: 117710 - DNA, 60 bp, Artificial
  Synthetic oligonucleotide
ctctgattgaagctagatatgcagctgaattatccacgatgcagatggatgtacagcagc

SEQ ID NO: 117711 - DNA, 60 bp, Artificial
  Synthetic oligonucleotide
gggacagttcagagcggcgatcaggcgtacactggatgataacggttggattcagtttgg

SEQ ID NO: 117712 - DNA, 60 bp, Artificial
  Synthetic oligonucleotide
tacacctatgcgattgcaaatctacaggcgaatatgggacagttcagagcggcgatcagg

SEQ ID NO: 117713 - DNA, 60 bp, Artificial
  Synthetic oligonucleotide
ggtagatccagttttgcgaatggttgcgggagtattgggccatgtaatgtttacttacgg

SEQ ID NO: 117714 - DNA, 60 bp, Artificial
  Synthetic oligonucleotide
gcagctgaggatgatgcgagccagagtcccggacactgtgattaatgcgacgccaagtca

SEQ ID NO: 117715 - DNA, 60 bp, Artificial
  Synthetic oligonucleotide
gaccgatcatgacaaacataactccaacgatggctgaattgcttgatgctgcgctgagcg

SEQ ID NO: 117716 - DNA, 60 bp, Artificial
  Synthetic oligonucleotide
ggggtgcagagatcgcagatccagagataatcggggttagcttccaaaatgctttgagtc

SEQ ID NO: 117717 - DNA, 55 bp, Artificial
  Synthetic oligonucleotide
ggggctttcatcttgcaggggatagctactaaagattataggggtgcagagatcg

SEQ ID NO: 117718 - DNA, 60 bp, Artificial
  Synthetic oligonucleotide
tgaaatttttgaaatccgagggggctttcatcttgcaggggatagctactaaagattata

SEQ ID NO: 117719 - DNA, 56 bp, Artificial
  Synthetic oligonucleotide
gaggatgtcggaaattggagggccggtggatgaaacggatccaattggattttatg

SEQ ID NO: 117720 - DNA, 60 bp, Artificial
  Synthetic oligonucleotide
acggagtatgttttgcaagtgaacacgttttatgagaggatgtcggaaattggagggccg

SEQ ID NO: 117721 - DNA, 60 bp, Artificial
  Synthetic oligonucleotide
ccccgacagcggttcaaatgaatgatgttagaaaaatatatcttgcattaatgtttccca

SEQ ID NO: 117722 - DNA, 60 bp, Artificial
  Synthetic oligonucleotide
gctttgagtcatttggcggcaatagatcgtcaaatcatacaggatactctcaacgggatg

SEQ ID NO: 117723 - DNA, 52 bp, Artificial
  Synthetic oligonucleotide
tgcgacgccaagtcaatgctggaaagcggtcttgaagaatgcgccagagcca

SEQ ID NO: 117724 - DNA, 60 bp, Artificial
  Synthetic oligonucleotide
gtggatgtgtttagagcggcgatgtcggacccaatctatcggatacacaatgtattacaa

SEQ ID NO: 117725 - DNA, 60 bp, Artificial
  Synthetic oligonucleotide
gggatgaatatgacatatccaatatttcgggaaatgcttagaatgctagttgctgcggga

SEQ ID NO: 117726 - DNA, 58 bp, Artificial
  Synthetic oligonucleotide
agggcgatgcaggcttttattggcgacccgagcacaattatcacgcaggcggcgccag

SEQ ID NO: 117727 - DNA, 60 bp, Artificial
  Synthetic oligonucleotide
ccgcagccgagcctgaaataattgcctcactcgtgccagtacctgcacccgtgtttgcca

SEQ ID NO: 117728 - DNA, 59 bp, Artificial
  Synthetic oligonucleotide
tcatcaggcgctgtgccaagtgaatcagccctggtgccctacaatgatgagccgctggt

SEQ ID NO: 117729 - DNA, 60 bp, Artificial
  Synthetic oligonucleotide
ggctcagacgttgctgcctacgaatgtcccgattggagaggtttcttgcccgatgcagtc

SEQ ID NO: 117730 - DNA, 60 bp, Artificial
  Synthetic oligonucleotide
ggtgaccgcgtcctcaccccgggtaccttccggtgtcgattccgatcagcccaatccatg

SEQ ID NO: 117731 - DNA, 60 bp, Artificial
  Synthetic oligonucleotide
ttttgcgactcgacttgcccctgaactcgagatgtgcgccgttcgtgtgtacttggccgc

SEQ ID NO: 117732 - DNA, 60 bp, Artificial
  Synthetic oligonucleotide
ataatgcagcgctacaaactgaacgggaactattacgccccagccttggtcgtgaacacc

SEQ ID NO: 117733 - DNA, 60 bp, Artificial
  Synthetic oligonucleotide
ggcgtttgcatgcttcgcttcacgaggctcctttcaccccaagacgggcccccgcgtcga

SEQ ID NO: 117734 - DNA, 60 bp, Artificial
  Synthetic oligonucleotide
cccgggtaggccccgtttgccaagcgacagtttctagcgtggatggaggagtgaatcaga

SEQ ID NO: 117735 - DNA, 60 bp, Artificial
  Synthetic oligonucleotide
tcaagtggatcggtgtgacgcagctgtacgaaggcctgcggcccctgactccatctcgtg

SEQ ID NO: 117736 - DNA, 60 bp, Artificial
  Synthetic oligonucleotide
ccgagaacgcgcgtcgtggatcaactcagtcctgcgattgttatgcgctaccgtcgctat

SEQ ID NO: 117737 - DNA, 60 bp, Artificial
  Synthetic oligonucleotide
gacgctcagatagttcaactcgctcgcacggttaacttggcagtcccctcgtcctggatg

SEQ ID NO: 117738 - DNA, 60 bp, Artificial
  Synthetic oligonucleotide
ggtaccaacgcttggcgacgattaaccgacacccatccaggcaggttgccctctcgtgtt

SEQ ID NO: 117739 - DNA, 60 bp, Artificial
  Synthetic oligonucleotide
ctctcgtgttccctcccttttggacgttcccactcgctggattaaagccgggcgtgatgc

SEQ ID NO: 117740 - DNA, 60 bp, Artificial
  Synthetic oligonucleotide
aggtggatgacccattctccagcggcaacagcttcgtgttccccaccacgactttcccct

SEQ ID NO: 117741 - DNA, 60 bp, Artificial
  Synthetic oligonucleotide
cttgccgagctgatggaactgcttgagaagtatgggcggggctttgggtgggtgtacgac

SEQ ID NO: 117742 - DNA, 60 bp, Artificial
  Synthetic oligonucleotide
atctcgcggatgtgccttcgctgttgtcggacttgggtgtgtatcgtggctactgggctg

SEQ ID NO: 117743 - DNA, 60 bp, Artificial
  Synthetic oligonucleotide
gacggtatgctcatcatccctgatcttggtaccaaacgcatctcccctgaagaccttgcc

SEQ ID NO: 117744 - DNA, 60 bp, Artificial
  Synthetic oligonucleotide
atctcccgacgacgccgatccggccagtgtggaggcgatgagtgctgcattgtccacgta

SEQ ID NO: 117745 - DNA, 60 bp, Artificial
  Synthetic oligonucleotide
tcacaaacccctcagatcgaagagcccatcccccccgactggtggactggagccgtaggc

SEQ ID NO: 117746 - DNA, 60 bp, Artificial
  Synthetic oligonucleotide
gattcgtcaggggcgtgctcagtctgatcagtggtatgtatctcgtgaggccaccgacca

SEQ ID NO: 117747 - DNA, 60 bp, Artificial
  Synthetic oligonucleotide
ctttcttcgtgaatacgtcccccaacatgcgaagtcaagcaccctcaagttcattgttaa

SEQ ID NO: 117748 - DNA, 60 bp, Artificial
  Synthetic oligonucleotide
actacttgactgcgcgtgccacctccgattacccacctcttaagcgtcgccaccccgttt

SEQ ID NO: 117749 - DNA, 60 bp, Artificial
  Synthetic oligonucleotide
gtatgtccgacgccgaagcccatcgcatcgccagcgccatttccctcgccgacgctcaga

SEQ ID NO: 117750 - DNA, 60 bp, Artificial
  Synthetic oligonucleotide
ggaaggtgcgaaagatgcggactattgtcacaattcgaacatttcccctatcctgtcgcc

SEQ ID NO: 117751 - DNA, 60 bp, Artificial
  Synthetic oligonucleotide
ccggtctagacgttgaagcggttgatgccactctcctacgtatgtccattcttggcgccg

SEQ ID NO: 117752 - DNA, 60 bp, Artificial
  Synthetic oligonucleotide
tatgctctatttggtgcccggatacccaacatcagtcgacacccgcccgtcggtaaggaa

SEQ ID NO: 117753 - DNA, 60 bp, Artificial
  Synthetic oligonucleotide
gcatctcccgagactggtgagatttggccgtcactcgtcaacattgccatgggctcgttc

SEQ ID NO: 117754 - DNA, 60 bp, Artificial
  Synthetic oligonucleotide
gtgctgcctcctctagtcgtaaggacttctctcgtttgctcgaactgtatctccacgtgc

SEQ ID NO: 117755 - DNA, 60 bp, Artificial
  Synthetic oligonucleotide
attggctgttgaccctgaagttcctcatgtcgccggtgccgacatcctcaacgatgatca

SEQ ID NO: 117756 - DNA, 60 bp, Artificial
  Synthetic oligonucleotide
gataagatatttaccgccgctgccgatgcctggcacgtacgcccccgttcccaatgtata

SEQ ID NO: 117757 - DNA, 60 bp, Artificial
  Synthetic oligonucleotide
cccgcgtcgatgctcagtaccccgtgtggtcgttcatttacatgggccttcctccgatcc

SEQ ID NO: 117758 - DNA, 60 bp, Artificial
  Synthetic oligonucleotide
agtgcagttcaggacaaggtgatccccctgcttctctatgcatcgacgcccccccgtacc

SEQ ID NO: 117759 - DNA, 60 bp, Artificial
  Synthetic oligonucleotide
caacgtggacattaaggcttgtgacgcctccatcacatacgctgccttcctggcgccgat

SEQ ID NO: 117760 - DNA, 60 bp, Artificial
  Synthetic oligonucleotide
gtcactgccgttcatgaacgtcccctcatccacccaatacgatcgtcgcaatccagccgc

SEQ ID NO: 117761 - DNA, 60 bp, Artificial
  Synthetic oligonucleotide
atacgatcgtcgcaatccagccgctccatacaaccgacccgtctccggactgcagacgat

SEQ ID NO: 117762 - DNA, 60 bp, Artificial
  Synthetic oligonucleotide
tgcagacgatgacccaacacctggcgcgtctatatcaagccggtttctcctacaaggtgg

SEQ ID NO: 117763 - DNA, 60 bp, Artificial
  Synthetic oligonucleotide
ggccaagtgactctcgggattcgtaatcaggtccagcgacgtgcacgctccattatgccc

SEQ ID NO: 117764 - DNA, 60 bp, Artificial
  Synthetic oligonucleotide
ctcggtctggttggaagccgctcgtcaagtagttatggacccctccacgcatgacccctt

SEQ ID NO: 117765 - DNA, 60 bp, Artificial
  Synthetic oligonucleotide
gcgtggcggatcaagtgcggctttgaagcaggcccttgttgaaagtaaggtcgagttgcc

SEQ ID NO: 117766 - DNA, 55 bp, Artificial
  Synthetic oligonucleotide
ttttacaccctcacattatgacaactccgcatttccatcacatttcgtcagtatc

SEQ ID NO: 117767 - DNA, 60 bp, Artificial
  Synthetic oligonucleotide
cttcaattccttggagatatagtgacactacttggtacgagttcgaatcaacgcgtgtgt

SEQ ID NO: 117768 - DNA, 60 bp, Artificial
  Synthetic oligonucleotide
gcatgacacgatgacgcttttcattacagactctggccccgacttgcttcaattccttgg

SEQ ID NO: 117769 - DNA, 60 bp, Artificial
  Synthetic oligonucleotide
ataattgcacagttgccacgtcctgacaccgatgccttcacttccgaacagtacgcgcct

SEQ ID NO: 117770 - DNA, 60 bp, Artificial
  Synthetic oligonucleotide
tgaaatttattcctagggagtacgcgcgatacaatataattgcacagttgccacgtcctg

SEQ ID NO: 117771 - DNA, 60 bp, Artificial
  Synthetic oligonucleotide
atgaagctgcattcatgaaatttattcctagggagtacgcgcgatacaatataattgcac

SEQ ID NO: 117772 - DNA, 60 bp, Artificial
  Synthetic oligonucleotide
ccatcacatttcgtcagtatcgtacgtcagagatgaacagattattcgcggcatagttat

SEQ ID NO: 117773 - DNA, 60 bp, Artificial
  Synthetic oligonucleotide
cgaagcatgacacgatgacgcttttcattacagactctggccccgacttgcttcaattcc

SEQ ID NO: 117774 - DNA, 60 bp, Artificial
  Synthetic oligonucleotide
gcgcctatctatcatcaactttcatcacactacgattcgaaagatccgaagcatgacacg

SEQ ID NO: 117775 - DNA, 60 bp, Artificial
  Synthetic oligonucleotide
gtacgcgcctatctatcatcaactttcatcacactacgattcgaaagatccgaagcatga

SEQ ID NO: 117776 - DNA, 60 bp, Artificial
  Synthetic oligonucleotide
cacagttgccacgtcctgacaccgatgccttcacttccgaacagtacgcgcctatctatc

SEQ ID NO: 117777 - DNA, 60 bp, Artificial
  Synthetic oligonucleotide
gtcaactttatatcggtggtttgtttgtaccaattgtttcgttgaacattgcgttacatg

SEQ ID NO: 117778 - DNA, 60 bp, Artificial
  Synthetic oligonucleotide
cccggaccgccagcgtacaccataacgacgggcctctcctatgcgcttgttcatacgtta

SEQ ID NO: 117779 - DNA, 60 bp, Artificial
  Synthetic oligonucleotide
gttcatacgttaatccacggtgaaaaaggaaagaagcttgttactacgtcaacccaagat

SEQ ID NO: 117780 - DNA, 60 bp, Artificial
  Synthetic oligonucleotide
tagcaccttctccctcggatttttacaccctcacattatgacaactccgcatttccatca

SEQ ID NO: 117781 - DNA, 60 bp, Artificial
  Synthetic oligonucleotide
ccttggagatatagtgacactacttggtacgagttcgaatcaacgcgtgtgtagcgcgat

SEQ ID NO: 117782 - DNA, 60 bp, Artificial
  Synthetic oligonucleotide
acgcgtgtgtagcgcgattaagtttgttattcacggacattcatggatgagtcaacttta

SEQ ID NO: 117783 - DNA, 60 bp, Artificial
  Synthetic oligonucleotide
cgcgtgtgtagcgcgattaagtttgttattcacggacattcatggatgagtcaactttat

SEQ ID NO: 117784 - DNA, 60 bp, Artificial
  Synthetic oligonucleotide
atttccatcacatttcgtcagtatcgtacgtcagagatgaacagattattcgcggcatag

SEQ ID NO: 117785 - DNA, 60 bp, Artificial
  Synthetic oligonucleotide
cggtggtttgtttgtaccaattgtttcgttgaacattgcgttacatggttggctccctca

SEQ ID NO: 117786 - DNA, 60 bp, Artificial
  Synthetic oligonucleotide
ttgtacaaccctcgacgacatgtgcaaaacaatgatcacgaacatgggaccccccggacc

SEQ ID NO: 117787 - DNA, 53 bp, Artificial
  Synthetic oligonucleotide
ttgtacaaccctcgacgacatgtgcaaaacaatgatcacgaacatgggacccc

SEQ ID NO: 117788 - DNA, 60 bp, Artificial
  Synthetic oligonucleotide
cccccggaccgccagcgtacaccataacgacgggcctctcctatgcgcttgttcatacgt

SEQ ID NO: 117789 - DNA, 60 bp, Artificial
  Synthetic oligonucleotide
gtggggatagattcgagaggaggttgagtgcttggggcgtagaagccttacttctcttac

SEQ ID NO: 117790 - DNA, 52 bp, Artificial
  Synthetic oligonucleotide
aaaaggaaagaagcttgttactacgtcaacccaagatggacatccggcctct

SEQ ID NO: 117791 - DNA, 60 bp, Artificial
  Synthetic oligonucleotide
attcgagaggaggttgagtgcttggggcgtagaagccttacttctcttacacctgcagac

SEQ ID NO: 117792 - DNA, 60 bp, Artificial
  Synthetic oligonucleotide
cccttgaacttatgggaattcagtatgactataacgaagtttacactagagttaaaagta

SEQ ID NO: 117793 - DNA, 55 bp, Artificial
  Synthetic oligonucleotide
ttaagtgcactagactaatgagagacaaaattgaacgtggtgaagttgaagtgga

SEQ ID NO: 117794 - DNA, 60 bp, Artificial
  Synthetic oligonucleotide
gcagcgactattgatcaggcactgaatggaaaatttggctcagcagtaaggaacagaaac

SEQ ID NO: 117795 - DNA, 60 bp, Artificial
  Synthetic oligonucleotide
gttaaaagtaaatttgattacgtcatggatgattctggagttaagaataatttattgggt

SEQ ID NO: 117796 - DNA, 60 bp, Artificial
  Synthetic oligonucleotide
gattacgtcatggatgattctggagttaagaataatttattgggtaaagcagcgactatt

SEQ ID NO: 117797 - DNA, 60 bp, Artificial
  Synthetic oligonucleotide
tttgcaacactactgtaataaactagaagttgatttgcaaaacaaaattagttcacttgt

SEQ ID NO: 117798 - DNA, 60 bp, Artificial
  Synthetic oligonucleotide
ctctcttcagaatgttatatcgcaacaacaaagtcaaattgctgatttgcaacactactg

SEQ ID NO: 117799 - DNA, 60 bp, Artificial
  Synthetic oligonucleotide
gctcagcagtaaggaacagaaactggatgactgacaccaggactacagctagactagatg

SEQ ID NO: 117800 - DNA, 60 bp, Artificial
  Synthetic oligonucleotide
gagtcattgatcagaaatgttatacttgattatgatagaacatttttaatgtttaaggga

SEQ ID NO: 117801 - DNA, 60 bp, Artificial
  Synthetic oligonucleotide
ggaaatccagatacgaacaattagagaaacgattcgaatcattgaagcaaagagttaatg

SEQ ID NO: 117802 - DNA, 60 bp, Artificial
  Synthetic oligonucleotide
ttgatacgatagattggaaatccagatacgaacaattagagaaacgattcgaatcattga

SEQ ID NO: 117803 - DNA, 60 bp, Artificial
  Synthetic oligonucleotide
atgtactctcttcagaatgttatatcgcaacaacaaagtcaaattgctgatttgcaacac

SEQ ID NO: 117804 - DNA, 55 bp, Artificial
  Synthetic oligonucleotide
gaatcattgaagcaaagagttaatgagaaatacacgagttgggtgcagaaggcaa

SEQ ID NO: 117805 - DNA, 60 bp, Artificial
  Synthetic oligonucleotide
ggaggagatgtgaaaacggagttcctgcatttgatcgatcacctctaaagggtccagggt

SEQ ID NO: 117806 - DNA, 60 bp, Artificial
  Synthetic oligonucleotide
ggagatgtgaaaacggagttcctgcatttgatcgatcacctctaaagggtccagtgtacc

SEQ ID NO: 117807 - DNA, 60 bp, Artificial
  Synthetic oligonucleotide
acggagttcctgcatttgatcgatcacctctaaagggtccagggtaccttcttgacgtag

SEQ ID NO: 117808 - DNA, 60 bp, Artificial
  Synthetic oligonucleotide
ggagttcctgcatttgatcgatcacctctaaagggtccagtgtaccttcttgacgtaggg

SEQ ID NO: 117809 - DNA, 60 bp, Artificial
  Synthetic oligonucleotide
cgctagatggtttcgaactaccattaacctaagatcagtaggtagagtggcgccccgagg

SEQ ID NO: 117810 - DNA, 60 bp, Artificial
  Synthetic oligonucleotide
ccattaacctaagatcagtaggtagagtggcgccccgaggtctgcatcgtgtagagtggt

SEQ ID NO: 117811 - DNA, 60 bp, Artificial
  Synthetic oligonucleotide
acagtcgctcaaaatgggcactaagctggctgcgccgactgtgtagagatgcgacctatc

SEQ ID NO: 117812 - DNA, 60 bp, Artificial
  Synthetic oligonucleotide
acaatcgctcaaaatgggcaccaagctggctgcgccgactgtgtagagatgcgacctatc

SEQ ID NO: 117813 - DNA, 60 bp, Artificial
  Synthetic oligonucleotide
gcaatcgctcaaaatgggcactaagctggctgcgccgactgtgtagagatgcgacctatc

SEQ ID NO: 117814 - DNA, 60 bp, Artificial
  Synthetic oligonucleotide
gcaatcgctcaaaatgggcacgaagctggcagcgccgactgtgtagagatgcgacctatc

SEQ ID NO: 117815 - DNA, 60 bp, Artificial
  Synthetic oligonucleotide
aacgggaacaggatataatggttgggcgacgattgatgtcgagtatagagaacccgcacc

SEQ ID NO: 117816 - DNA, 60 bp, Artificial
  Synthetic oligonucleotide
tggttgggcgacgattgatgtcgagtatagagaacccgcaccctacgtacatgctcagcg

SEQ ID NO: 117817 - DNA, 60 bp, Artificial
  Synthetic oligonucleotide
ggttgggcgacgattgatgtcgagtatagagaacccgcaccctacgtacatgctcagcgt

SEQ ID NO: 117818 - DNA, 60 bp, Artificial
  Synthetic oligonucleotide
cgctcaaaatgggcactaagctggctgcgccgactgtgtagagatgcgacctatctatgc

SEQ ID NO: 117819 - DNA, 52 bp, Artificial
  Synthetic oligonucleotide
tggatctgtccactagtcgactgataggtaatcacaaggaataaacacttac

SEQ ID NO: 117820 - DNA, 56 bp, Artificial
  Synthetic oligonucleotide
ccgcagttaccgggaataacgtttactgatgtaagtgtccgtgattttagacaaaa

SEQ ID NO: 117821 - DNA, 53 bp, Artificial
  Synthetic oligonucleotide
agcacttcacaacaatatcagaaagaagaatcaatagctgttggaaagatttc

SEQ ID NO: 117822 - DNA, 60 bp, Artificial
  Synthetic oligonucleotide
ggttatcgcaccttatacgccaaatgaggtcgatcgaagaattacaccgcagttaccggg

SEQ ID NO: 117823 - DNA, 60 bp, Artificial
  Synthetic oligonucleotide
ccgcagttaccgggaataacgtttactgatgtaagtgtccgtgattttagacaaaaaatg

SEQ ID NO: 117824 - DNA, 60 bp, Artificial
  Synthetic oligonucleotide
aattccgaaagcagcgggaaaaactgatggtatgatcgccgctaaaaaatgtaaatggat

SEQ ID NO: 117825 - DNA, 60 bp, Artificial
  Synthetic oligonucleotide
gtaaatggataagcgttccactatttaatattgataaggatgggttaagttatgatttcg

SEQ ID NO: 117826 - DNA, 60 bp, Artificial
  Synthetic oligonucleotide
attgaaacggtgaaaatgaaagtaccgggcgtcgctggattgactcttaaaattccgaaa

SEQ ID NO: 117827 - DNA, 60 bp, Artificial
  Synthetic oligonucleotide
ggtgaaaatgaaagtaccgggcgtcgctggattgactcttaaaattccgaaagcagcggg

SEQ ID NO: 117828 - DNA, 52 bp, Artificial
  Synthetic oligonucleotide
acgccactttttgttcaagaggcgcaaatgcaggtgagaattattatcaggt

SEQ ID NO: 117829 - DNA, 60 bp, Artificial
  Synthetic oligonucleotide
gggtgacagaaagcgttatacgaaaactgtttgtgtctatgatccgcagaacgccacttt

SEQ ID NO: 117830 - DNA, 60 bp, Artificial
  Synthetic oligonucleotide
gcggggttatcgcaccttatacgccaaatgaggtcgatcgaagaattacaccgcagttac

SEQ ID NO: 117831 - DNA, 58 bp, Artificial
  Synthetic oligonucleotide
aggcatatgtggtcgagattcagagaccatgttcagtccgacttttagatggcaatga

SEQ ID NO: 117832 - DNA, 60 bp, Artificial
  Synthetic oligonucleotide
atgaagcacgtctcatgccagctgaagtgatggctattatgaggtcggctctcattgttg

SEQ ID NO: 117833 - DNA, 60 bp, Artificial
  Synthetic oligonucleotide
gaaccactagctgagatcactgacaatgttatcaacatactgcggaacaatcttggcgca

SEQ ID NO: 117834 - DNA, 60 bp, Artificial
  Synthetic oligonucleotide
gcgcatttggaattacgtacaatatcttgatttatccaagcaatgcggctattgttcgtg

SEQ ID NO: 117835 - DNA, 60 bp, Artificial
  Synthetic oligonucleotide
aaacgtatccgagtatcacttaccatgagttgatgttgtcaagagactttgcccgtcaaa

SEQ ID NO: 117836 - DNA, 60 bp, Artificial
  Synthetic oligonucleotide
gcccgtcaaattagtcgaggagttatcgttactggagtaccgttccaatatactttggaa

SEQ ID NO: 117837 - DNA, 60 bp, Artificial
  Synthetic oligonucleotide
tactttggaattcaagaccggaaacttcaactcatacctcaagaatgaagtggtatccgt

SEQ ID NO: 117838 - DNA, 60 bp, Artificial
  Synthetic oligonucleotide
gccgcttggcctttcgttgaacgtaacaccccagtgcaattcagagtgagatattcaccg

SEQ ID NO: 117839 - DNA, 60 bp, Artificial
  Synthetic oligonucleotide
gggacggaacatcatcaagctgactgactacatggagttgctcagggccgaaattccggc

SEQ ID NO: 117840 - DNA, 60 bp, Artificial
  Synthetic oligonucleotide
gttgacgatagccagcttcattaagaacagaccgatagatgcattgccttggaatgatcc

SEQ ID NO: 117841 - DNA, 60 bp, Artificial
  Synthetic oligonucleotide
ctacacttcatctctgttgacgatagccagcttcattaagaacagaccgatagatgcatt

SEQ ID NO: 117842 - DNA, 60 bp, Artificial
  Synthetic oligonucleotide
tgccagctgaagtgatggctattatgaggtcggctctcattgttgataatcgtgatgggc

SEQ ID NO: 117843 - DNA, 60 bp, Artificial
  Synthetic oligonucleotide
ttcaactgtaactccgatagacaacacaccatgagggatttatctaatatcatcagtaat

SEQ ID NO: 117844 - DNA, 60 bp, Artificial
  Synthetic oligonucleotide
caccgattatgtcggatggtgaaccagggctttacaacggcgccttcaactgtaactccg

SEQ ID NO: 117845 - DNA, 60 bp, Artificial
  Synthetic oligonucleotide
ctcattgttgataatcgtgatgggcgtagtgttacctcgtgcttcgacggacgtattaag

SEQ ID NO: 117846 - DNA, 60 bp, Artificial
  Synthetic oligonucleotide
gcttgatgatccggttgtccttgattcacaaggtaactacgtgacacagccatttgagcc

SEQ ID NO: 117847 - DNA, 60 bp, Artificial
  Synthetic oligonucleotide
gtctaacaataggtggcgtgttggcaacagtaatcagttggggacattgatgtctacgac

SEQ ID NO: 117848 - DNA, 60 bp, Artificial
  Synthetic oligonucleotide
gcttcgtgtgttgattgaactacttaggagggagtgttctgaatacttcctgccgctgat

SEQ ID NO: 117849 - DNA, 60 bp, Artificial
  Synthetic oligonucleotide
atatgccaactcgtgaagtacaggtcgacatctctcgaggtgttgatcaagctagcatcg

SEQ ID NO: 117850 - DNA, 60 bp, Artificial
  Synthetic oligonucleotide
ggatccgattttgggaagcatcgccacgtctagcttgcaatacaaggatgtcgctggtcc

SEQ ID NO: 117851 - DNA, 60 bp, Artificial
  Synthetic oligonucleotide
tacaaggatgtcgctggtccacaacctgctgatcgagacaacgcagtcaaggagggtaat

SEQ ID NO: 117852 - DNA, 60 bp, Artificial
  Synthetic oligonucleotide
cggcattgctattccaacaccaccgaaccttgacctcatcatggactacaaccgtagtct

SEQ ID NO: 117853 - DNA, 60 bp, Artificial
  Synthetic oligonucleotide
gggtaatcttccacctgctgaactgaaaattcctgctgacacgactgtcgtcgcgggtcg

SEQ ID NO: 117854 - DNA, 60 bp, Artificial
  Synthetic oligonucleotide
cgcgggtcgtttagcaactatggtcactgatcctatgacaacaaagaatcaatctgaggt

SEQ ID NO: 117855 - DNA, 60 bp, Artificial
  Synthetic oligonucleotide
agttgctcagggccgaaattccggctaattatcgattgaaggagtattctggtcttgaac

SEQ ID NO: 117856 - DNA, 60 bp, Artificial
  Synthetic oligonucleotide
ggtcttgaacttcaccgtgggtatgtctactatcagcccagacacggatcgcttcgtgtg

SEQ ID NO: 117857 - DNA, 60 bp, Artificial
  Synthetic oligonucleotide
gtacgatggaagcgttattggcagctgctcaactcagtggtaaggaaggatacaaacact

SEQ ID NO: 117858 - DNA, 60 bp, Artificial
  Synthetic oligonucleotide
cgctggtccacaacctgctgatcgagacaacgcagtcaaggagggtaatcttccacctgc

SEQ ID NO: 117859 - DNA, 60 bp, Artificial
  Synthetic oligonucleotide
agtcgatgccctgaatgctaagcgcaattacagtaatgaagcacgtctcatgccagctga

SEQ ID NO: 117860 - DNA, 60 bp, Artificial
  Synthetic oligonucleotide
tcgtgttcgaggtggtcttccgaacgctctggctactggactcgactattcgagaggtgg

SEQ ID NO: 117861 - DNA, 60 bp, Artificial
  Synthetic oligonucleotide
tggggacattgatgtctacgactatcagttcggcctatactctcattatgaagtcagtca

SEQ ID NO: 117862 - DNA, 57 bp, Artificial
  Synthetic oligonucleotide
tcgaaattggacagaccaacttggagatcatcacttccagcttgggtcgtgaatctg

SEQ ID NO: 117863 - DNA, 60 bp, Artificial
  Synthetic oligonucleotide
ccgtagtcttgtcacttacgacaacgctgatagaaacgcattgtacatcgaagatcacac

SEQ ID NO: 117864 - DNA, 60 bp, Artificial
  Synthetic oligonucleotide
tgatcaagctagcatcgatgcacaacatcaggtattgatggctatgacaaggcagacccc

SEQ ID NO: 117865 - DNA, 60 bp, Artificial
  Synthetic oligonucleotide
tcgggtttaacgacggaccacagattgaagctgaatatgctgacattcttgaccgtaatt

SEQ ID NO: 117866 - DNA, 60 bp, Artificial
  Synthetic oligonucleotide
cgtgacacagccatttgagccagggactaagttcacgagagatggactgagttactctca

SEQ ID NO: 117867 - DNA, 60 bp, Artificial
  Synthetic oligonucleotide
gtatgagatgatccgtaagcaacagcacgacgtcattaatgaaccactagctgagatcac

SEQ ID NO: 117868 - DNA, 60 bp, Artificial
  Synthetic oligonucleotide
tgccgctgattactcgggaacttgctatcgttaaatcagaaatcgtgactactggcagta

SEQ ID NO: 117869 - DNA, 60 bp, Artificial
  Synthetic oligonucleotide
ctggcagtattcagcaactaatcagttcagacaacaatgtgtcgatcagccgttcctctt

SEQ ID NO: 117870 - DNA, 60 bp, Artificial
  Synthetic oligonucleotide
ccgttcctcttatgctaatcaactattagcttcgttggacttaagtagcaatgagaaggt

SEQ ID NO: 117871 - DNA, 60 bp, Artificial
  Synthetic oligonucleotide
gggggttagtgtttggggacggaacatcatcaagctgactgactacatggagttgctcag

SEQ ID NO: 117872 - DNA, 60 bp, Artificial
  Synthetic oligonucleotide
agctcgacgttgagtatggtcaaattccaaacatcattgactgtatggctgctactttct

SEQ ID NO: 117873 - DNA, 60 bp, Artificial
  Synthetic oligonucleotide
ctgttgtttatcggtgaggataatatcactgattccagctacacttcatctctgttgacg

SEQ ID NO: 117874 - DNA, 60 bp, Artificial
  Synthetic oligonucleotide
gcgtttgattcattgatggcagcgttagctatcagagaagtcccacgtaatacggatccg

SEQ ID NO: 117875 - DNA, 60 bp, Artificial
  Synthetic oligonucleotide
gggtcgaacgtccagaagaagcgcctatcatgtcatacgttaatgggatgtctcgtgtca

SEQ ID NO: 117876 - DNA, 60 bp, Artificial
  Synthetic oligonucleotide
gttgaagattcaggcaccgtcagtcattcccggctcatgtcggttatggggaaggaagcg

SEQ ID NO: 117877 - DNA, 60 bp, Artificial
  Synthetic oligonucleotide
ggtcgtagaagaaaggtttggtgttatgttggagggtgagatgtcatttaagaaatatgc

SEQ ID NO: 117878 - DNA, 60 bp, Artificial
  Synthetic oligonucleotide
gatagatagataaataatttacgagtctcggaccgaaagatgtatgttccgcacgacaaa

SEQ ID NO: 117879 - DNA, 60 bp, Artificial
  Synthetic oligonucleotide
aatttacgagtctcggaccgaaagatgtatgttccgcacgacaaaagcgttcgaatgcag

SEQ ID NO: 117880 - DNA, 60 bp, Artificial
  Synthetic oligonucleotide
gggataaatatttgtgggaaatgatcttatcggcaaagtgtatacaaacttcagttatat

SEQ ID NO: 117881 - DNA, 60 bp, Artificial
  Synthetic oligonucleotide
ttattgaataagaaaagtttagaaggattcctacgtgtatatacaccatatttatcagag

SEQ ID NO: 117882 - DNA, 60 bp, Artificial
  Synthetic oligonucleotide
gacgggactaagaaagataggatgagaaaagtattttccaaagacttagataatgtatgc

SEQ ID NO: 117883 - DNA, 59 bp, Artificial
  Synthetic oligonucleotide
gatttttgagaaagatgaaatttcaaccgaaaagagaactgatgttcaaaaagaattga

SEQ ID NO: 117884 - DNA, 60 bp, Artificial
  Synthetic oligonucleotide
cctacgagatcgtagaattgtgttttaaacacaacatattaataattttcctcagcatat

SEQ ID NO: 117885 - DNA, 60 bp, Artificial
  Synthetic oligonucleotide
ctcagcatattgcatgaatttgaaactgagaatttaatacaaattggagtcccttttatt

SEQ ID NO: 117886 - DNA, 60 bp, Artificial
  Synthetic oligonucleotide
tttatcagagttatatagcaaatacagaaatgtaaattcacaaactccaacctacgagat

SEQ ID NO: 117887 - DNA, 60 bp, Artificial
  Synthetic oligonucleotide
cagagttatatagcaaatacagaaatgtaaattcacaaactccaacctacgagatcgtag

SEQ ID NO: 117888 - DNA, 60 bp, Artificial
  Synthetic oligonucleotide
atgactagaaaaaaggaagaatttagtgtagaaaaagtgaaatacggagccaaaggagaa

SEQ ID NO: 117889 - DNA, 60 bp, Artificial
  Synthetic oligonucleotide
caaaggagaagcgtggcatactggaagagttcgagaattagagcgtgagaaaacgaatgc

SEQ ID NO: 117890 - DNA, 60 bp, Artificial
  Synthetic oligonucleotide
atctaatgcaaacattatacgtacaaagagaatctttatgcgagcgtggtatgcatatag

SEQ ID NO: 117891 - DNA, 60 bp, Artificial
  Synthetic oligonucleotide
ggaagaacagaaatacatttgacgcattgtcgaattaactgtgagaagtatctaatgcaa

SEQ ID NO: 117892 - DNA, 60 bp, Artificial
  Synthetic oligonucleotide
aggaagaacagaaatacatttgacgcattgtcgaattaactgtgagaagtatctaatgca

SEQ ID NO: 117893 - DNA, 61 bp, Artificial
  Synthetic oligonucleotide
gtagcttatgatccaaaatgggaaactattaaatataagcatgacaagagaggaagaacag

SEQ ID NO: 117894 - DNA, 60 bp, Artificial
  Synthetic oligonucleotide
gtagcttatgatccaaaatgggaaactattaaatataagcatgacaagagaggaagaaca

SEQ ID NO: 117895 - DNA, 60 bp, Artificial
  Synthetic oligonucleotide
gatgcgaggcaagagttacaggcgcagaacgcaggatcgttaatgaaagcggagagagca

SEQ ID NO: 117896 - DNA, 60 bp, Artificial
  Synthetic oligonucleotide
atatagatgcgaggcaagagttacaggcgcagaacgcaggatcgttaatgaaagcggaga

SEQ ID NO: 117897 - DNA, 60 bp, Artificial
  Synthetic oligonucleotide
catcatggcggaattcagcatactaatttggaaagatactcgtacttcgaaggtaacacc

SEQ ID NO: 117898 - DNA, 60 bp, Artificial
  Synthetic oligonucleotide
gttaaaaacctatgcatcatggcggaattcagcatactaatttggaaagatactcgtact

SEQ ID NO: 117899 - DNA, 60 bp, Artificial
  Synthetic oligonucleotide
atgcatatagagaatcttgacaggctagtatcgcagttgaaaaacttaggattattcaaa

SEQ ID NO: 117900 - DNA, 60 bp, Artificial
  Synthetic oligonucleotide
tatacgtacaaagagaatctttatgcgagcgtggtatgcatatagagaatcttgacaggc

SEQ ID NO: 117901 - DNA, 66 bp, Artificial
  Synthetic oligonucleotide
caggaagtttaaaagatctcactaaagatggtgatcaaagtacaacgagtgtattgtttaacattc

SEQ ID NO: 117902 - DNA, 60 bp, Artificial
  Synthetic oligonucleotide
attcaggaagtttaaaagatctcactaaagatggtgatcaaagtacaacgagtgtattgt

SEQ ID NO: 117903 - DNA, 60 bp, Artificial
  Synthetic oligonucleotide
ggtgaatgacacaaggaaaatagcgagattagaatctgatgaaaatattacaaggaacgg

SEQ ID NO: 117904 - DNA, 60 bp, Artificial
  Synthetic oligonucleotide
aggtgaatgacacaaggaaaatagcgagattagaatctgatgaaaatattacaaggaacg

SEQ ID NO: 117905 - DNA, 60 bp, Artificial
  Synthetic oligonucleotide
cgaatatggatgaaggaatgattaagaggagaataaaatcaagatttgaaaggtgttcgc

SEQ ID NO: 117906 - DNA, 60 bp, Artificial
  Synthetic oligonucleotide
acgaatatggatgaaggaatgattaagaggagaataaaatcaagatttgaaaggtgttcg

SEQ ID NO: 117907 - DNA, 60 bp, Artificial
  Synthetic oligonucleotide
cagatcacctcataaagcgttactggttatagcgttagcgtcaacgaatatggatgaagg

SEQ ID NO: 117908 - DNA, 60 bp, Artificial
  Synthetic oligonucleotide
ttccaatcagatcacctcataaagcgttactggttatagcgttagcgtcaacgaatatgg

SEQ ID NO: 117909 - DNA, 60 bp, Artificial
  Synthetic oligonucleotide
gaactcagtgtcatgggtggagtgacgttgccactatttgtgttccaatcagatcacctc

SEQ ID NO: 117910 - DNA, 60 bp, Artificial
  Synthetic oligonucleotide
atttattggaactcagtgtcatgggtggagtgacgttgccactatttgtgttccaatcag

SEQ ID NO: 117911 - DNA, 60 bp, Artificial
  Synthetic oligonucleotide
aaacgaatgctgatagacgattaggatggaagacaaatttgcattatctatttaaacaag

SEQ ID NO: 117912 - DNA, 60 bp, Artificial
  Synthetic oligonucleotide
agttgctccaataaaaccttatgaagcattgtcagagtatttcgagaatattaggataat

SEQ ID NO: 117913 - DNA, 60 bp, Artificial
  Synthetic oligonucleotide
caggatgacgggactaagaaagataggatgagaaaagtattttccaaagacttagataat

SEQ ID NO: 117914 - DNA, 60 bp, Artificial
  Synthetic oligonucleotide
taaaaattccattaaatgcgcgtggtgtatattatttactatataagccattgattgaag

SEQ ID NO: 117915 - DNA, 60 bp, Artificial
  Synthetic oligonucleotide
gcgtggcatactggaagagttcgagaattagagcgtgagaaaacgaatgctgatagacga

SEQ ID NO: 117916 - DNA, 60 bp, Artificial
  Synthetic oligonucleotide
aagattagatcataaggtcgtagaagaaaggtttggtgttatgttggagggtgagatgtc

SEQ ID NO: 117917 - DNA, 52 bp, Artificial
  Synthetic oligonucleotide
aaggtgttcgcaaagtattttacaaacgataattataagaattaatcccggt

SEQ ID NO: 117918 - DNA, 60 bp, Artificial
  Synthetic oligonucleotide
cgaccccactaaaaagggaacattgcatgaagaatctcgtaagccattggtaaaaattcc

SEQ ID NO: 117919 - DNA, 60 bp, Artificial
  Synthetic oligonucleotide
cgaatcagaacattactgatcaaaacgaaattattgaaattaagacccagattcctggac

SEQ ID NO: 117920 - DNA, 60 bp, Artificial
  Synthetic oligonucleotide
aatgcgaatcagaacattactgatcaaaacgaaattattgaaattaagacccagattcct

SEQ ID NO: 117921 - DNA, 60 bp, Artificial
  Synthetic oligonucleotide
tgaagacaagtcattaatccctgcaatcgacgagatgatggaaaatgaagttaatgccga

SEQ ID NO: 117922 - DNA, 55 bp, Artificial
  Synthetic oligonucleotide
caatactaacaacgaacacagaatactgaaatatgaaaaagacgaatcaaataca

SEQ ID NO: 117923 - DNA, 59 bp, Artificial
  Synthetic oligonucleotide
ttggagagaatttatcagtgtatgatgaatctcactctggagtagatttgtttaaacgt

SEQ ID NO: 117924 - DNA, 60 bp, Artificial
  Synthetic oligonucleotide
aggtggaagaggaagccctaacgttgataaaactagatattttgaatatgatcttgtctt

SEQ ID NO: 117925 - DNA, 60 bp, Artificial
  Synthetic oligonucleotide
ttgatatgacaaatgtgttacctgtattagcagaaatatttgttattactttaagtcttg

SEQ ID NO: 117926 - DNA, 60 bp, Artificial
  Synthetic oligonucleotide
ccagattcctggacttgaaaagttacacgtcagaaaagttaaatttgatcaactgatgaa

SEQ ID NO: 117927 - DNA, 61 bp, Artificial
  Synthetic oligonucleotide
ggtgataagttgcaagaatggtaaagttagtaatgctactaaagtcggatttaatgtcatg

SEQ ID NO: 117928 - DNA, 60 bp, Artificial
  Synthetic oligonucleotide
aaaatgtatgtcgacatgttcacaaagcgtagacctactgaactacaacatttattggac

SEQ ID NO: 117929 - DNA, 60 bp, Artificial
  Synthetic oligonucleotide
attcaataaggtcaacgagaaatttgaaattagcaaatatcgtattgaagctgttactca

SEQ ID NO: 117930 - DNA, 60 bp, Artificial
  Synthetic oligonucleotide
ggatttaatgtcatgagtaaaagcatattgccaaatcctttgttgaaaaaaggtggaaga

SEQ ID NO: 117931 - DNA, 60 bp, Artificial
  Synthetic oligonucleotide
cttataatccagctttctttgacgctgaatttgacttagtgggagataaaaatgatcata

SEQ ID NO: 117932 - DNA, 60 bp, Artificial
  Synthetic oligonucleotide
tttattggacaaagaatcgaaatgcatgaatttggcttataatccagctttctttgacgc

SEQ ID NO: 117933 - DNA, 60 bp, Artificial
  Synthetic oligonucleotide
gtcgttaagttcccgagacgtaaaccttactatcgctttctcgatgagaatcatggtgat

SEQ ID NO: 117934 - DNA, 60 bp, Artificial
  Synthetic oligonucleotide
aatgatcatactttagtcgttaagttcccgagacgtaaaccttactatcgctttctcgat

SEQ ID NO: 117935 - DNA, 60 bp, Artificial
  Synthetic oligonucleotide
gattaccatttaaataaaatgtatgtcgacatgttcacaaagcgtagacctactgaacta

SEQ ID NO: 117936 - DNA, 51 bp, Artificial
  Synthetic oligonucleotide
ttttccatgtgtggattggggccacaattattcagagagtcaagtcagtaa

SEQ ID NO: 117937 - DNA, 56 bp, Artificial
  Synthetic oligonucleotide
tctacacgctatcattcaagctattaagcgtcatgttaagcctcaaaaagaattaa

SEQ ID NO: 117938 - DNA, 60 bp, Artificial
  Synthetic oligonucleotide
cttaattggtatacaaactatgaaagttatgcgttaatactacttcaaattctacacgct

SEQ ID NO: 117939 - DNA, 60 bp, Artificial
  Synthetic oligonucleotide
gaattgcactcaccacaaaaaatgtgtgataatacggactggtttgaatttggaagactt

SEQ ID NO: 117940 - DNA, 60 bp, Artificial
  Synthetic oligonucleotide
cattaaaatccatctcttaagtgtgatccgaagtgtttgtgttgattagaaaatggtgcg

SEQ ID NO: 117941 - DNA, 60 bp, Artificial
  Synthetic oligonucleotide
agtcattaaaatccatctcttaagtgtgatccgaagtgtttgtgttgattagaaaatggt

SEQ ID NO: 117942 - DNA, 60 bp, Artificial
  Synthetic oligonucleotide
atatcagctagtgaactacaacatatcaacggaatatctaaagcaaatttagtcattaaa

SEQ ID NO: 117943 - DNA, 60 bp, Artificial
  Synthetic oligonucleotide
tattttgaaccgaattcttgaaagtaagcaagatattatagatgtattattgacctcgaa

SEQ ID NO: 117944 - DNA, 52 bp, Artificial
  Synthetic oligonucleotide
attattcagagagtcaagtcagtaagcctagtggaggtactatcaaacctag

SEQ ID NO: 117945 - DNA, 60 bp, Artificial
  Synthetic oligonucleotide
gttacatgaaaggaatatcggtgatggtaaaaagatgtcattggatgaaattggtaagat

SEQ ID NO: 117946 - DNA, 60 bp, Artificial
  Synthetic oligonucleotide
acagttaccaaaacttatttcgatttttccatgtgtggattggggccacaattattcaga

SEQ ID NO: 117947 - DNA, 60 bp, Artificial
  Synthetic oligonucleotide
cacgagctgcttactagtcatccctgtggcgttaggttcagaagtttcggatatttcagg

SEQ ID NO: 117948 - DNA, 60 bp, Artificial
  Synthetic oligonucleotide
gatcaaaacacgagctgcttactagtcatccctgtggcgttaggttcagaagtttcggat

SEQ ID NO: 117949 - DNA, 60 bp, Artificial
  Synthetic oligonucleotide
ggacatttatcattcggtactaacttgtcagaagttatcagatcaaaacacgagctgctt

SEQ ID NO: 117950 - DNA, 60 bp, Artificial
  Synthetic oligonucleotide
aaatggtgataagttgcaagaatggtaaagttagtaatgctactaaagtcggatttaatg

SEQ ID NO: 117951 - DNA, 60 bp, Artificial
  Synthetic oligonucleotide
attagcgggttataatgaaatggacacttttactaaattggttacacagcaaattgaatc

SEQ ID NO: 117952 - DNA, 61 bp, Artificial
  Synthetic oligonucleotide
cgggttataatgaaatggacacttttactaaattggttacacagcaaattgaatcaacagc

SEQ ID NO: 117953 - DNA, 60 bp, Artificial
  Synthetic oligonucleotide
ctacaggcgaagttctggaacacattaaagaaactaaagttaagccaagtgattaccatt

SEQ ID NO: 117954 - DNA, 60 bp, Artificial
  Synthetic oligonucleotide
gttaagaattttgaagcaggtcaagtcgaaataattgatccttttttcgtattcaataag

SEQ ID NO: 117955 - DNA, 60 bp, Artificial
  Synthetic oligonucleotide
cgaatgatacagttatcggaatgaaaggcaaaaaactacctaatatcaaacgaaatgttg

SEQ ID NO: 117956 - DNA, 60 bp, Artificial
  Synthetic oligonucleotide
agttcaactttatgggttagtcatcctttattatgcgatgcttttgaattgttacatgaa

SEQ ID NO: 117957 - DNA, 60 bp, Artificial
  Synthetic oligonucleotide
gggttagtcatcctttattatgcgatgcttttgaattgttacatgaaaggaatatcggtg

SEQ ID NO: 117958 - DNA, 60 bp, Artificial
  Synthetic oligonucleotide
tggaagacttggacatttatcattcggtactaacttgtcagaagttatcagatcaaaaca

SEQ ID NO: 117959 - DNA, 60 bp, Artificial
  Synthetic oligonucleotide
attcttttcgaaactatatccgatccactagatccggtgatgttattaccagatttgaaa

SEQ ID NO: 117960 - DNA, 60 bp, Artificial
  Synthetic oligonucleotide
cttttcgaaactatatccgatccactagatccggtgatgttattaccagatttgaaagat

SEQ ID NO: 117961 - DNA, 60 bp, Artificial
  Synthetic oligonucleotide
gaaagataatgaggtattagtttcaggtacatcatcatcaaaccaggcgtattcttttcg

SEQ ID NO: 117962 - DNA, 60 bp, Artificial
  Synthetic oligonucleotide
ggtattagtttcaggtacatcatcatcaaaccaggcgtattcttttcgaaactatatccg

SEQ ID NO: 117963 - DNA, 64 bp, Artificial
  Synthetic oligonucleotide
ccgtcatttaaaagtaagatgttacaaggtatcgaagctttacaatgcaagaaagataatgagg

SEQ ID NO: 117964 - DNA, 60 bp, Artificial
  Synthetic oligonucleotide
tactgaactacaacatttattggacaaagaatcgaaatgcatgaatttggcttataatcc

SEQ ID NO: 117965 - DNA, 60 bp, Artificial
  Synthetic oligonucleotide
acttatttatggaaggcatagttggagcgatgtgcactgatatggaaatgccgtcattta

SEQ ID NO: 117966 - DNA, 60 bp, Artificial
  Synthetic oligonucleotide
gaaggcatagttggagcgatgtgcactgatatggaaatgccgtcatttaaaagtaagatg

SEQ ID NO: 117967 - DNA, 59 bp, Artificial
  Synthetic oligonucleotide
aagttttttaaccctcgacatttttgaaagacgacaaacacggtgaaaacctttcgaga

SEQ ID NO: 117968 - DNA, 55 bp, Artificial
  Synthetic oligonucleotide
tgggaggtcgcctcacattaccttgtatacgagcggagggttaacagcagatgtc

SEQ ID NO: 117969 - DNA, 56 bp, Artificial
  Synthetic oligonucleotide
gatcactggctccatggatacagcatatgcaaattcatcacagcaagaaacatttt

SEQ ID NO: 117970 - DNA, 60 bp, Artificial
  Synthetic oligonucleotide
gatcactggttccatggatgcagcatatgcaaattcatcacagcaagaaacatttttgac

SEQ ID NO: 117971 - DNA, 60 bp, Artificial
  Synthetic oligonucleotide
gatcactggttccatggatacagtatatgcaaattcatcacagcaagaaacatttttaac

SEQ ID NO: 117972 - DNA, 60 bp, Artificial
  Synthetic oligonucleotide
gatcactggctccatggatacagcatatgcaaattcatcacagcaagaaacatttttgac

SEQ ID NO: 117973 - DNA, 56 bp, Artificial
  Synthetic oligonucleotide
gatcactggttccatggatgcagcatatgcaaattcatcacagcaagaaacatttt

SEQ ID NO: 117974 - DNA, 60 bp, Artificial
  Synthetic oligonucleotide
tttagatggagtagatactttcttgatgaactacaattgcgaagattagctgtgggactg

SEQ ID NO: 117975 - DNA, 60 bp, Artificial
  Synthetic oligonucleotide
cgagccagattcgacacgctatcgagcggattgcccagattactaatgttgacagcacag

SEQ ID NO: 117976 - DNA, 60 bp, Artificial
  Synthetic oligonucleotide
tgacagcacagattatggtaaactcacattacgctttcttgggacgctgacacgcccgct

SEQ ID NO: 117977 - DNA, 60 bp, Artificial
  Synthetic oligonucleotide
cactttccgttgctcaaatcttatctaaactcacgttgcctgacgcatttattaacatga

SEQ ID NO: 117978 - DNA, 60 bp, Artificial
  Synthetic oligonucleotide
ggaagagattgtgtaccctgatcctggcacgacgctatctcagtcactttccgttgctca

SEQ ID NO: 117979 - DNA, 60 bp, Artificial
  Synthetic oligonucleotide
cgtacccactagtcaggcagagcggtaaaggtgttgatgcagtcagtataatggaagaga

SEQ ID NO: 117980 - DNA, 60 bp, Artificial
  Synthetic oligonucleotide
acggagttattaatgggccagcatctacgtatttacgcgagaatgaggtattggtggtca

SEQ ID NO: 117981 - DNA, 60 bp, Artificial
  Synthetic oligonucleotide
acgtccctgatccaatatacataacaggtgcatctacaccagaccagatagcagcgtcag

SEQ ID NO: 117982 - DNA, 60 bp, Artificial
  Synthetic oligonucleotide
attaacatgatattatctggtggagacagcgtagctatgcgcacttaccaaacagaagca

SEQ ID NO: 117983 - DNA, 60 bp, Artificial
  Synthetic oligonucleotide
tatcttcaatccatcttgcaatagcgagagaggtgtcaccaatgttcaacgttcatgagt

SEQ ID NO: 117984 - DNA, 60 bp, Artificial
  Synthetic oligonucleotide
ttggtggtcatgccagactattctaacgtcgcggctcgtttcgtttatgccaatgctcaa

SEQ ID NO: 117985 - DNA, 60 bp, Artificial
  Synthetic oligonucleotide
ccgtcctccatagtagtagtgcttgaattcatccttttctctttattctttccgactgag

SEQ ID NO: 117986 - DNA, 60 bp, Artificial
  Synthetic oligonucleotide
gcaagcacattcaatgatatctacacagttccacggaccaaatcaaggtgcgttacgtcc

SEQ ID NO: 117987 - DNA, 60 bp, Artificial
  Synthetic oligonucleotide
gcgtgcactcatggaggccaatgtaactgccgatgacaggataaaggcattgcaagcaca

SEQ ID NO: 117988 - DNA, 60 bp, Artificial
  Synthetic oligonucleotide
ggccgctaattatccaagacttgaggggatcatagtccagataaacacgggttacgtcgc

SEQ ID NO: 117989 - DNA, 58 bp, Artificial
  Synthetic oligonucleotide
tccaacgaggagcaacgtatacgattaacgctgcaggtgagtttgaatttagtgggcg

SEQ ID NO: 117990 - DNA, 60 bp, Artificial
  Synthetic oligonucleotide
gtggattgctaatggtgcttttcaaagttatgacggataataggctggttatcgtgggtg

SEQ ID NO: 117991 - DNA, 60 bp, Artificial
  Synthetic oligonucleotide
gtgcctatcggtgttactgctggagctgaacagtcgtctgaatatgtgagtggattgcta

SEQ ID NO: 117992 - DNA, 60 bp, Artificial
  Synthetic oligonucleotide
gtatggatcagctgtcgtaaacatagacttaaatcaggatttctttgacacgacaacggg

SEQ ID NO: 117993 - DNA, 60 bp, Artificial
  Synthetic oligonucleotide
ggctggttatcgtgggtgaaactacaacaccgatcagtaatacattgtcgacagttgtga

SEQ ID NO: 117994 - DNA, 60 bp, Artificial
  Synthetic oligonucleotide
agatattgagtacactgcagaagtgatgacgcctagcgaagggtatacccaacatgtcga

SEQ ID NO: 117995 - DNA, 60 bp, Artificial
  Synthetic oligonucleotide
gccaatatcagtcgcgcgttctatgcgtgcaatagtcaaccataacgaagttgatcgacc

SEQ ID NO: 117996 - DNA, 60 bp, Artificial
  Synthetic oligonucleotide
accaagtgcattcgacccaccagcttcaggagaagatatcagattaatataccccctaca

SEQ ID NO: 117997 - DNA, 60 bp, Artificial
  Synthetic oligonucleotide
tacgcgcaccgactgttctcttcctctcttgctaataaacgcaatagagtaacgtatact

SEQ ID NO: 117998 - DNA, 60 bp, Artificial
  Synthetic oligonucleotide
cccgatttcgtacctgctatccctgaaggctatgtcgcagttcagtacgcgcaccgactg

SEQ ID NO: 117999 - DNA, 60 bp, Artificial
  Synthetic oligonucleotide
atgctacaacaagcgggaacaaggtttggtttaggtttgactgcgacgcgcttagactat

SEQ ID NO: 118000 - DNA, 60 bp, Artificial
  Synthetic oligonucleotide
gaccacatgtacacctgacgattaacgaacgagccggcatgagtaagctagtggctgata

SEQ ID NO: 118001 - DNA, 60 bp, Artificial
  Synthetic oligonucleotide
caccctccaactggaatggcatacccatcgcctaccggtcgaccacatgtacacctgacg

SEQ ID NO: 118002 - DNA, 60 bp, Artificial
  Synthetic oligonucleotide
tactagtttaagaattcattggacgtacaggatgttcccgggaggttctatggtagatcc

SEQ ID NO: 118003 - DNA, 60 bp, Artificial
  Synthetic oligonucleotide
gggtttcctacgtacggatgacttagcaatagcagcgaacttccctagggcatcacgaaa

SEQ ID NO: 118004 - DNA, 60 bp, Artificial
  Synthetic oligonucleotide
gagcagtccaggatgatatgcagaaggcgactcgttcatgcactaaacaatggttaaggc

SEQ ID NO: 118005 - DNA, 60 bp, Artificial
  Synthetic oligonucleotide
ggcatctcgaaacccagttcgataacatcgccgtcgcccatacagatcacttatcagtag

SEQ ID NO: 118006 - DNA, 60 bp, Artificial
  Synthetic oligonucleotide
atccatgatgacatcgaacatacgtacaggcgacgatatggctgtggagcgcgtaaatcc

SEQ ID NO: 118007 - DNA, 60 bp, Artificial
  Synthetic oligonucleotide
ctatctaagcgaacacttcccagcattgttctcagatgtaccgttagccggcgcgaacac

SEQ ID NO: 118008 - DNA, 60 bp, Artificial
  Synthetic oligonucleotide
taaacgaaataatgaagagaaacataaacaaccagaagctaacggcagtgcagataatgg

SEQ ID NO: 118009 - DNA, 60 bp, Artificial
  Synthetic oligonucleotide
gcgggaactagaaatgaaacggaagcaggtgcaggcgctagaggacagactgatggcgcg

SEQ ID NO: 118010 - DNA, 60 bp, Artificial
  Synthetic oligonucleotide
cgaccaagaggtgctgtcgctcctagttcatacgagatggatacaggtacgttatctagg

SEQ ID NO: 118011 - DNA, 60 bp, Artificial
  Synthetic oligonucleotide
gtattaacccagcactattgcgcgactttacgcacgtgaactggctaaaccaagatatta

SEQ ID NO: 118012 - DNA, 60 bp, Artificial
  Synthetic oligonucleotide
cgggcaatcatgcgacattcaagccagagcaatatgtcataacatcacccgagggtagtt

SEQ ID NO: 118013 - DNA, 60 bp, Artificial
  Synthetic oligonucleotide
cccgagggtagttacaagcctataatggagagacaaggagagactgttgatggattaact

SEQ ID NO: 118014 - DNA, 60 bp, Artificial
  Synthetic oligonucleotide
agtgtgaagtatgaggaccagtttgcaaagaaggataagttgcgtgcgagtgaagcagac

SEQ ID NO: 118015 - DNA, 60 bp, Artificial
  Synthetic oligonucleotide
ccacttgcaatttatggacggcttactacgacccgaaccaagtgcattcgacccaccagc

SEQ ID NO: 118016 - DNA, 60 bp, Artificial
  Synthetic oligonucleotide
atttgcaattgaacaccccggtacatcccaaatcacgcgtgggttggctggcagcctcaa

SEQ ID NO: 118017 - DNA, 60 bp, Artificial
  Synthetic oligonucleotide
tatattcattatcaaatttgcaattgaacaccccggtacatcccaaatcacgcgtgggtt

SEQ ID NO: 118018 - DNA, 60 bp, Artificial
  Synthetic oligonucleotide
aggtgttcaattgcaaatttgataatgaatatagcgacgtgcttaccgacaggagaatat

SEQ ID NO: 118019 - DNA, 60 bp, Artificial
  Synthetic oligonucleotide
aggtgttcaattgcaaatttgataatgaatatagcgacgtgcttaccgacaggagatatg

SEQ ID NO: 118020 - DNA, 57 bp, Artificial
  Synthetic oligonucleotide
ttcaattgcaaatttgataatgaatatagcgacgtgcttaccgacaggagaatatgt

SEQ ID NO: 118021 - DNA, 56 bp, Artificial
  Synthetic oligonucleotide
tggaccatttgctatattaacgggatcaacgccaacggcacaacaattagatgacg

SEQ ID NO: 118022 - DNA, 60 bp, Artificial
  Synthetic oligonucleotide
cttacgtcatctaattgttgtgccgttggcgttgatcccgttaatatagcaaatggtcca

SEQ ID NO: 118023 - DNA, 60 bp, Artificial
  Synthetic oligonucleotide
tggaccatttgctatattaacgggatcaacgccaacggcacaacaattagatgacgtaag

SEQ ID NO: 118024 - DNA, 60 bp, Artificial
  Synthetic oligonucleotide
acgatctataaaattgtacagaaacccatcatttcgtataggcatgtggtgatgcaatca

SEQ ID NO: 118025 - DNA, 60 bp, Artificial
  Synthetic oligonucleotide
acatattctgattgcgcttgtcgcaccttttgcataatctcttgtaaagcgaagattgaa

SEQ ID NO: 118026 - DNA, 60 bp, Artificial
  Synthetic oligonucleotide
ttcaatcttcgctttacaagagattatgcaaaaggtgcgacaagcgcaatcagaatatgt

SEQ ID NO: 118027 - DNA, 60 bp, Artificial
  Synthetic oligonucleotide
actttcaatcttcgctttacaagagattatgcaaaaggtgcgacaagcgcaatcagaata

SEQ ID NO: 118028 - DNA, 60 bp, Artificial
  Synthetic oligonucleotide
gctttcaatcttcgctttacaagagattatgcaaaaggtgcgacaagcgcaatcagagta

SEQ ID NO: 118029 - DNA, 60 bp, Artificial
  Synthetic oligonucleotide
gcgcttgtcgcaccttttgcataatctcttgtaaagcgaagattgaaagtaaaggtccac

SEQ ID NO: 118030 - DNA, 60 bp, Artificial
  Synthetic oligonucleotide
gattgaaagtaaaggtccactgtcacttgataactcatctcctttgagatacggactcgt

SEQ ID NO: 118031 - DNA, 60 bp, Artificial
  Synthetic oligonucleotide
gtacagaaacccatcatttcatataggcatgtggtgatgcaatcaagggatagatttctc

SEQ ID NO: 118032 - DNA, 60 bp, Artificial
  Synthetic oligonucleotide
acaatctataaaattgtacagaaacccatcatttcatataggcatgtggtgatgcaatca

SEQ ID NO: 118033 - DNA, 58 bp, Artificial
  Synthetic oligonucleotide
atacccacaaaagatcatagaggcatggaaatagcggatcctgagatcctgggcgtcg

SEQ ID NO: 118034 - DNA, 60 bp, Artificial
  Synthetic oligonucleotide
cgacgcccaggatctcaggatccgctatttccatgcctctatgatcttttgtgggtatgt

SEQ ID NO: 118035 - DNA, 60 bp, Artificial
  Synthetic oligonucleotide
ctattatagcgccatctagaacatgctgtatcatcgctctatgctcagccgttagcaccg

SEQ ID NO: 118036 - DNA, 60 bp, Artificial
  Synthetic oligonucleotide
cggtgctaacggctgagcatagagcgatgatacagcatgttctagatggcgctataatag

SEQ ID NO: 118037 - DNA, 60 bp, Artificial
  Synthetic oligonucleotide
catttacgtaccgagggagcctttatcttgcataacatacccacaaaagatcatagaggc

SEQ ID NO: 118038 - DNA, 54 bp, Artificial
  Synthetic oligonucleotide
gtgggtatgttatgcaagataaaggctccctcggtacgtaaatgccttactttt

SEQ ID NO: 118039 - DNA, 60 bp, Artificial
  Synthetic oligonucleotide
acatacccacaaaagatcatagaggcatggaaatagcggatcctgagatcctgggcgtcg

SEQ ID NO: 118040 - DNA, 60 bp, Artificial
  Synthetic oligonucleotide
cttgcataacatacccacaaaagatcatagaggcatggaaatagcggatcctgagatcct

SEQ ID NO: 118041 - DNA, 60 bp, Artificial
  Synthetic oligonucleotide
gcacccaaatacacatcgacatcacgggtcgctatattaccgttctctattatagcgcca

SEQ ID NO: 118042 - DNA, 60 bp, Artificial
  Synthetic oligonucleotide
ctctattatagcgccatctagaacatgctgtatcatcgctctatgctcagccgttagcac

SEQ ID NO: 118043 - DNA, 60 bp, Artificial
  Synthetic oligonucleotide
tactggcgttgaggctgccagccaacccacgcgtgatttgggatgtaccgaggtgttcaa

SEQ ID NO: 118044 - DNA, 60 bp, Artificial
  Synthetic oligonucleotide
cgtctaaaatctgttagaaattcttgtgaaaaagtcatgcgttttcgtttccccaggcgc

SEQ ID NO: 118045 - DNA, 60 bp, Artificial
  Synthetic oligonucleotide
gagcgcctggggaaacgaaaacgcatgactttttcacaagaatttctaacagattttaga

SEQ ID NO: 118046 - DNA, 60 bp, Artificial
  Synthetic oligonucleotide
agcggtgacatggcttgagcgtctggggaaacgaaaacgcatgactttttcacaagaatt

SEQ ID NO: 118047 - DNA, 60 bp, Artificial
  Synthetic oligonucleotide
cggtaatatagcgacccgtgatgtcgatgtgtatttgggtgcttgttcggaatcagtgta

SEQ ID NO: 118048 - DNA, 60 bp, Artificial
  Synthetic oligonucleotide
gaacggtaatatagcgacccgtgatgtcgatgtgtatttgggtgcttgttcggaatcagt

SEQ ID NO: 118049 - DNA, 60 bp, Artificial
  Synthetic oligonucleotide
gaacaagcacccaaatacacatcgacatcacgggtcgctatattaccgttctctattata

SEQ ID NO: 118050 - DNA, 60 bp, Artificial
  Synthetic oligonucleotide
gctataatagagaacggtaatatagcgacccgtgatgtcgatgtgtatttgggtgcttgt

SEQ ID NO: 118051 - DNA, 60 bp, Artificial
  Synthetic oligonucleotide
gcgttgaggctgccagccaacccacgcgtgatttgggatgtaccgaggtgttcaattgca

SEQ ID NO: 118052 - DNA, 60 bp, Artificial
  Synthetic oligonucleotide
ggcgttgaggctgccagccaacccacgcgtgatttgggatgtaccgaggtgttcaattgc

SEQ ID NO: 118053 - DNA, 60 bp, Artificial
  Synthetic oligonucleotide
ttcgcgggttcattttcatctatcttatcgccaacttcagacatcctttcataataagtg

SEQ ID NO: 118054 - DNA, 60 bp, Artificial
  Synthetic oligonucleotide
tcaaaaaagtaaggcatttacgtaccgagggagcctttatcttgcataacatacccacaa

SEQ ID NO: 118055 - DNA, 60 bp, Artificial
  Synthetic oligonucleotide
gggatagatttctccgggtggacacttattatgaaaggatgtctgaagttggcgataaga

SEQ ID NO: 118056 - DNA, 60 bp, Artificial
  Synthetic oligonucleotide
tcatctatcttatcgccaacttcagacatcctttcataataagtgtccacccggagaaat

SEQ ID NO: 118057 - DNA, 60 bp, Artificial
  Synthetic oligonucleotide
ataataagtgtccacccggagaaatctatcccttgattgcatcaccacatgcctatatga

SEQ ID NO: 118058 - DNA, 60 bp, Artificial
  Synthetic oligonucleotide
gatgcaatcaagggatagatttctccgggtggacacttattatgaaaggatgtctgaagt

SEQ ID NO: 118059 - DNA, 60 bp, Artificial
  Synthetic oligonucleotide
gtacagaaacccatcatttcgtataggcatgtggtgatgcaatcaagggatagatttctc

SEQ ID NO: 118060 - DNA, 60 bp, Artificial
  Synthetic oligonucleotide
gtccacccggagaaatctatcccttgattgcatcaccacatgcctatatgaaatgatggg

SEQ ID NO: 118061 - DNA, 58 bp, Artificial
  Synthetic oligonucleotide
gtgggtatgttatgcaagataaaggctccctcggtacgtaaatgccttacttttttga

SEQ ID NO: 118062 - DNA, 60 bp, Artificial
  Synthetic oligonucleotide
gaaagtaaggcatttacgtaccgagggagcctttatcttgcataacatacccacaaaaga

SEQ ID NO: 118063 - DNA, 60 bp, Artificial
  Synthetic oligonucleotide
cgaacaccatgtcgacggtctccgagtcaacgacacagacgctcagtccagcttcttcga

SEQ ID NO: 118064 - DNA, 60 bp, Artificial
  Synthetic oligonucleotide
cccatgtatttgcagcaattagcaccagtggagttggctgtgatagcaccaatgcttccg

SEQ ID NO: 118065 - DNA, 60 bp, Artificial
  Synthetic oligonucleotide
tcatgggcgttccttgaatcccatcctcccaacgggtgctagagcaacgcgctcgatgct

SEQ ID NO: 118066 - DNA, 60 bp, Artificial
  Synthetic oligonucleotide
agtgggccgagattattcatagatactggccgaatccatcgcagattcgctttggtgcac

SEQ ID NO: 118067 - DNA, 60 bp, Artificial
  Synthetic oligonucleotide
gctatccgtgcgcggcgcgaatccgctgatgtttagggctaacgtattgcatatgctact

SEQ ID NO: 118068 - DNA, 60 bp, Artificial
  Synthetic oligonucleotide
tttggtgcaccgaatgtgttcgggtctgctaatctatttacgcccccagaggtgctatta

SEQ ID NO: 118069 - DNA, 60 bp, Artificial
  Synthetic oligonucleotide
ccaatcgatcatcagccagccaatgtgacgacgccaacactcgactttacgaacgagttg

SEQ ID NO: 118070 - DNA, 60 bp, Artificial
  Synthetic oligonucleotide
atcatcggacgcgtgcagtcgacacatttgtggtctccattggcgccaccaccggatcta

SEQ ID NO: 118071 - DNA, 60 bp, Artificial
  Synthetic oligonucleotide
tgaacacgaggtatttcaatcagcaattcgatgcttggatcaaaacgggtgagttacgta

SEQ ID NO: 118072 - DNA, 60 bp, Artificial
  Synthetic oligonucleotide
gctcaggtaacatataatgatactggaatcaataatgcaaatgagttgtcgcggtcgggt

SEQ ID NO: 118073 - DNA, 60 bp, Artificial
  Synthetic oligonucleotide
gacgtaccttcaacgtaattcccgaaatgcctgggtccgtggtgaccgattgtgtgcagc

SEQ ID NO: 118074 - DNA, 60 bp, Artificial
  Synthetic oligonucleotide
gcttgcctccgactgccagttctggacatggataccaatgtcacgtgtgctctgctgtgc

SEQ ID NO: 118075 - DNA, 60 bp, Artificial
  Synthetic oligonucleotide
gttacagtgacgagtccgtacgcccctagtgttaatcgcctcatgccataccgcgtgtct

SEQ ID NO: 118076 - DNA, 60 bp, Artificial
  Synthetic oligonucleotide
gctctgctgtgctgttcagccctcttgacttagacgcccatgtcgcgtcacatggcttgc

SEQ ID NO: 118077 - DNA, 60 bp, Artificial
  Synthetic oligonucleotide
gcggacgttgaaaataagaaaacagcgcagttgctccacgccgatactccgcgtttagtg

SEQ ID NO: 118078 - DNA, 60 bp, Artificial
  Synthetic oligonucleotide
tgcaggatatatcagtgttgctccagcgcatatcaccgctccaaatcgatcctacaatta

SEQ ID NO: 118079 - DNA, 60 bp, Artificial
  Synthetic oligonucleotide
tgacctgggatgcaggattatgcacgtcattcaagatcgtccccattgtaccagcgcagg

SEQ ID NO: 118080 - DNA, 60 bp, Artificial
  Synthetic oligonucleotide
gaagcgacatccgccataatatcaaagcatcctgcgcgtgttggcttgcctccgactgcc

SEQ ID NO: 118081 - DNA, 60 bp, Artificial
  Synthetic oligonucleotide
cggaattcataagttcatggcagaaccatccgatcgtgcaagtatcagcggacgttgaaa

SEQ ID NO: 118082 - DNA, 60 bp, Artificial
  Synthetic oligonucleotide
atgcaacttcgtggcgtcttgtgtgagaaatagagtgggtaggtttgaccgtgctcagat

SEQ ID NO: 118083 - DNA, 60 bp, Artificial
  Synthetic oligonucleotide
gcggtcgggtaacgttgacaacgagggtggtgataatcagaaaccaatgacaacaagaat

SEQ ID NO: 118084 - DNA, 60 bp, Artificial
  Synthetic oligonucleotide
tccggacgctccgcccactcagatacagctgccagaggtcgtggatctgtataatgtagt

SEQ ID NO: 118085 - DNA, 60 bp, Artificial
  Synthetic oligonucleotide
ttatgatccacgtcagtacgccaatgcatggaacctgacatcagcatggttggaggagat

SEQ ID NO: 118086 - DNA, 60 bp, Artificial
  Synthetic oligonucleotide
aaacataccgggttttcgcaggaccatactccattcactgagggggctaaccttagatcg

SEQ ID NO: 118087 - DNA, 60 bp, Artificial
  Synthetic oligonucleotide
caatgaccgatctctgttctgtacgaactcctcttcgccgcaaacgatagctggtccaga

SEQ ID NO: 118088 - DNA, 60 bp, Artificial
  Synthetic oligonucleotide
ccagcgatcacgacatctcttcagccccagccgtgcaatacatcatatcgactgaataca

SEQ ID NO: 118089 - DNA, 60 bp, Artificial
  Synthetic oligonucleotide
cccaccagcattccttctgtcccatttatggtgccaatctccagcgatcacgacatctct

SEQ ID NO: 118090 - DNA, 60 bp, Artificial
  Synthetic oligonucleotide
gacatgatcacatgtgaggcagtgcaaactctgatcacgttagtcgcacagatctcggag

SEQ ID NO: 118091 - DNA, 60 bp, Artificial
  Synthetic oligonucleotide
gaatggagcgatgtctgaatgggtggacgtgtttgaaacttcggatgcattgacggtgtc

SEQ ID NO: 118092 - DNA, 60 bp, Artificial
  Synthetic oligonucleotide
ccttcgtgcttcagccgcgactgccgccacctttgccgagtgggtcaatacatccatgaa

SEQ ID NO: 118093 - DNA, 60 bp, Artificial
  Synthetic oligonucleotide
cgtgttccaactatggtgggcgtcacaagacaatcacgcgataccatcacacaaccagct

SEQ ID NO: 118094 - DNA, 60 bp, Artificial
  Synthetic oligonucleotide
caattgatttcgccaatcgacgctccaatcctgagacagtgggccgagattattcataga

SEQ ID NO: 118095 - DNA, 60 bp, Artificial
  Synthetic oligonucleotide
catcacacaaccagctttgtcattgtcgaccactaacactacagttggagtgccactggc

SEQ ID NO: 118096 - DNA, 60 bp, Artificial
  Synthetic oligonucleotide
caatcacggagagctagcgcgttttccactccccacacttggccacgatgctttatgaac

SEQ ID NO: 118097 - DNA, 60 bp, Artificial
  Synthetic oligonucleotide
ctgccgctgacgacggatccttgtgccccagtaaaggctttcatgacattggccaacatg

SEQ ID NO: 118098 - DNA, 60 bp, Artificial
  Synthetic oligonucleotide
cagagtagcaaggtgacgcagaatgtcaaggaaccaggcacgacattgaaggaacagtat

SEQ ID NO: 118099 - DNA, 60 bp, Artificial
  Synthetic oligonucleotide
taaaaccagaccaagtctacagaccgtacagaaagcaactgagaatgctgaacttccgat

SEQ ID NO: 118100 - DNA, 60 bp, Artificial
  Synthetic oligonucleotide
catccatgaagacggcttttgatctttccgatatgttactggagcccttgcttagtggtg

SEQ ID NO: 118101 - DNA, 60 bp, Artificial
  Synthetic oligonucleotide
cacgaagggcgacaagactaatgaacacgttgaagccgaggttaatgcagccgatgccac

SEQ ID NO: 118102 - DNA, 60 bp, Artificial
  Synthetic oligonucleotide
gacgctcagtccagcttcttcgatcttgggcaaattgcgtcccagcaactccgatttttc

SEQ ID NO: 118103 - DNA, 60 bp, Artificial
  Synthetic oligonucleotide
aacttccgatgcaaacgaatgatgagggtgccgttgacaagaaaggaaacacgaagggcg

SEQ ID NO: 118104 - DNA, 60 bp, Artificial
  Synthetic oligonucleotide
gcttccgtttccgccttttcaagttccctatgtcaggctcgacagagatcgtgttccaac

SEQ ID NO: 118105 - DNA, 60 bp, Artificial
  Synthetic oligonucleotide
atatgcgatacagtccccgtttcctgaagctgcggtttcccgaatagtcgtgcacacccg

SEQ ID NO: 118106 - DNA, 60 bp, Artificial
  Synthetic oligonucleotide
ctaccgtcattgatgacagctcgtatcctaaagacggcggaagtgtcacctcgctggaga

SEQ ID NO: 118107 - DNA, 60 bp, Artificial
  Synthetic oligonucleotide
cggcatgaatggcgctgctccgatgatccgtgatgagaccgggatgatggtaccgtttga

SEQ ID NO: 118108 - DNA, 60 bp, Artificial
  Synthetic oligonucleotide
aaggcaatgattcaaccgagagagctgatgatggctccgcgcaattgcgtgataaacaga

SEQ ID NO: 118109 - DNA, 60 bp, Artificial
  Synthetic oligonucleotide
cgtcgataaccagcgttatcagccaggatggactcaaagcctggtctcgtctatgagggg

SEQ ID NO: 118110 - DNA, 60 bp, Artificial
  Synthetic oligonucleotide
gtcggtttacgcatgtggataggggctgtggccaaccacgcagttaatcacctttggtca

SEQ ID NO: 118111 - DNA, 60 bp, Artificial
  Synthetic oligonucleotide
tcactttatccggatttagaatcattgaagcttgaaagctagttgtcggtttacgcatgt

SEQ ID NO: 118112 - DNA, 60 bp, Artificial
  Synthetic oligonucleotide
aagctagttgtcggtttacgcatgtggataggggctgtggccaaccacgcagttaatcac

SEQ ID NO: 118113 - DNA, 60 bp, Artificial
  Synthetic oligonucleotide
atattagatacaagttctttcctttgcatgcaaagaaaagagagcataattccgggaaag

SEQ ID NO: 118114 - DNA, 60 bp, Artificial
  Synthetic oligonucleotide
tccgggaaaggtatatcactttatccggatttagaatcattgaagcttgaaagctagttg

SEQ ID NO: 118115 - DNA, 60 bp, Artificial
  Synthetic oligonucleotide
gacaatgtttaatcccgatcatgcttatacgcatatcatcttctggagaggatggagttc

SEQ ID NO: 118116 - DNA, 60 bp, Artificial
  Synthetic oligonucleotide
aggagtatggacattttcaattccatcgatgtttaatgatggtagagtatatattagata

SEQ ID NO: 118117 - DNA, 60 bp, Artificial
  Synthetic oligonucleotide
gatgatggctaaaggtggccacgagtataatgattcaaagaatttgttgtcaagaacgac

SEQ ID NO: 118118 - DNA, 60 bp, Artificial
  Synthetic oligonucleotide
ttgttgtcaagaacgacaatgtttaatcccgatcatgcttatacgcatatcatcttctgg

SEQ ID NO: 118119 - DNA, 60 bp, Artificial
  Synthetic oligonucleotide
tatctgatctcgctagccggactgttgaaactagcgatatcgtcaaggctgtgatattta

SEQ ID NO: 118120 - DNA, 60 bp, Artificial
  Synthetic oligonucleotide
gcaggaattggcttcatccggagaagcatatgtcgtatctgatctcgctagccggactgt

SEQ ID NO: 118121 - DNA, 60 bp, Artificial
  Synthetic oligonucleotide
agaaaattgcgtcttacagctgacggaaattcaaacaatgcatccagagctgcattgtct

SEQ ID NO: 118122 - DNA, 54 bp, Artificial
  Synthetic oligonucleotide
gtaatcaagcttcatgttgatttgatcaaaaaccaccaggtatatggtgtgttg

SEQ ID NO: 118123 - DNA, 60 bp, Artificial
  Synthetic oligonucleotide
tgcattgtctaaattgcaggaattggcttcatccggagaagcatatgtcgtatctgatct

SEQ ID NO: 118124 - DNA, 57 bp, Artificial
  Synthetic oligonucleotide
agaaaattgcgtcttacagctgacggaaattcaaacaatgcatccagagctgcattg

SEQ ID NO: 118125 - DNA, 60 bp, Artificial
  Synthetic oligonucleotide
gatcatagtgaatccctaccatggatgcggacactgagcgtgtaatcaagcttcatgttg

SEQ ID NO: 118126 - DNA, 60 bp, Artificial
  Synthetic oligonucleotide
ggtatttttgatcatagtgaatccctaccatggatgcggacactgagcgtgtaatcaagc

SEQ ID NO: 118127 - DNA, 60 bp, Artificial
  Synthetic oligonucleotide
cattcagtaatatcacgcggtaaattgatcaaggacatcataccatacggagtgatggct

SEQ ID NO: 118128 - DNA, 60 bp, Artificial
  Synthetic oligonucleotide
catcataccatacggagtgatggctgcagcgattgtttacgtaccagagacaattacgat

SEQ ID NO: 118129 - DNA, 60 bp, Artificial
  Synthetic oligonucleotide
cgctagccggactgttgaaactagcgatatcgtcaaggctgtgatatttactcctcattc

SEQ ID NO: 118130 - DNA, 60 bp, Artificial
  Synthetic oligonucleotide
gtgatatttactcctcattcagtaatatcacgcggtaaattgatcaaggacatcatacca

SEQ ID NO: 118131 - DNA, 60 bp, Artificial
  Synthetic oligonucleotide
aattacgatacttgatagtatccagttttacggtgagaaccatgtgtcacgtccatactc

SEQ ID NO: 118132 - DNA, 60 bp, Artificial
  Synthetic oligonucleotide
gggaacgatgagaccgaatcttcctgcgataataagattatcaatgggtgatctgtgtta

SEQ ID NO: 118133 - DNA, 60 bp, Artificial
  Synthetic oligonucleotide
ccatacggagtgatggctgcagcgattgtttacgtaccagagacaattacgatacttgat

SEQ ID NO: 118134 - DNA, 60 bp, Artificial
  Synthetic oligonucleotide
caattacgatacttgatagtatccagttttacggtgagaaccatgtgtcacgtccatact

SEQ ID NO: 118135 - DNA, 60 bp, Artificial
  Synthetic oligonucleotide
gaccgaatcttcctgcgataataagattatcaatgggtgatctgtgttatggtgcagcca

SEQ ID NO: 118136 - DNA, 60 bp, Artificial
  Synthetic oligonucleotide
ttcaagagatgatggctaaaggtggccacgagtataatgattcaaagaatttgttgtcaa

SEQ ID NO: 118137 - DNA, 60 bp, Artificial
  Synthetic oligonucleotide
tgttggtgtaatactcgaaaagtgtaatgaaattagagtaatgacggtcaacattatagt

SEQ ID NO: 118138 - DNA, 60 bp, Artificial
  Synthetic oligonucleotide
cgaaaagtgtaatgaaattagagtaatgacggtcaacattatagtcatgggactcaaatc

SEQ ID NO: 118139 - DNA, 60 bp, Artificial
  Synthetic oligonucleotide
tccgatcaacattcactctactaactatgtgttcggtaagtactcagttttcgctcgtgt

SEQ ID NO: 118140 - DNA, 60 bp, Artificial
  Synthetic oligonucleotide
caacattcactctactaactatgtgttcggtaagtactcagttttcgctcgtgtccatgg

SEQ ID NO: 118141 - DNA, 54 bp, Artificial
  Synthetic oligonucleotide
aaaaccatggtgataatgttacgttggctaaagtcggaagcgaatacggcgacc

SEQ ID NO: 118142 - DNA, 60 bp, Artificial
  Synthetic oligonucleotide
aaagtcggaagcgaatacggcgacctatttgtcaaaaagttaccaactcttccgatcaac

SEQ ID NO: 118143 - DNA, 60 bp, Artificial
  Synthetic oligonucleotide
gggtcttaatatcgtagataactcgcttagattgaattggcttaacttgtcagacatgaa

SEQ ID NO: 118144 - DNA, 60 bp, Artificial
  Synthetic oligonucleotide
ggcttaacttgtcagacatgaaaaaccatggtgataatgttacgttggctaaagtcggaa

SEQ ID NO: 118145 - DNA, 60 bp, Artificial
  Synthetic oligonucleotide
acattatagtcatgggactcaaatcattaatggattcacatcgtgaaagcggaggtacgt

SEQ ID NO: 118146 - DNA, 60 bp, Artificial
  Synthetic oligonucleotide
gggactcaaatcattaatggattcacatcgtgaaagcggaggtacgttacacggcgattg

SEQ ID NO: 118147 - DNA, 60 bp, Artificial
  Synthetic oligonucleotide
ttgtgagcttatgggtcttaatatcgtagataactcgcttagattgaattggcttaactt

SEQ ID NO: 118148 - DNA, 60 bp, Artificial
  Synthetic oligonucleotide
gaagcacgaggatggagaacatcctgattctgaccttgaataacttgtagacagaaagct

SEQ ID NO: 118149 - DNA, 60 bp, Artificial
  Synthetic oligonucleotide
tgtagacagaaagctaaaatcgtaagatatacacttataattggaggatgggtaccaact

SEQ ID NO: 118150 - DNA, 51 bp, Artificial
  Synthetic oligonucleotide
ctacctggtgttaatacccatcgggatattattggcactgtcaagtatttt

SEQ ID NO: 118151 - DNA, 60 bp, Artificial
  Synthetic oligonucleotide
ggttctgcgttgaaggaaagattcatgacgtgcccctacctggtgttaatacccatcggg

SEQ ID NO: 118152 - DNA, 60 bp, Artificial
  Synthetic oligonucleotide
atgtgtacagagtgcggttctgcgttgaaggaaagattcatgacgtgcccctacctggtg

SEQ ID NO: 118153 - DNA, 54 bp, Artificial
  Synthetic oligonucleotide
tgctaaaactcgttgatccaggtaatctaatgtcacagaccgtgatatggaaaa

SEQ ID NO: 118154 - DNA, 60 bp, Artificial
  Synthetic oligonucleotide
tgctaaaactcgttgatccaggtaatctaatgtcacagaccgtgatatggaaaaacgaca

SEQ ID NO: 118155 - DNA, 60 bp, Artificial
  Synthetic oligonucleotide
tcactgacttatatttacttgatactgtactttctgaccctaacgtaatacatggcacta

SEQ ID NO: 118156 - DNA, 60 bp, Artificial
  Synthetic oligonucleotide
cacagctaatttacgtaatattgaaacaagtgaattgacaataccatttatcactgactt

SEQ ID NO: 118157 - DNA, 60 bp, Artificial
  Synthetic oligonucleotide
catggcactagagagagtggctggctcgaagttggaagtgactttgtgagcatagtccag

SEQ ID NO: 118158 - DNA, 60 bp, Artificial
  Synthetic oligonucleotide
tacttgatactgtactttctgaccctaacgtaatacatggcactagagagagtggctggc

SEQ ID NO: 118159 - DNA, 60 bp, Artificial
  Synthetic oligonucleotide
ctgcccttaagactcaggttaccggggagaatgaaactttcagcaatgtcatagagaagc

SEQ ID NO: 118160 - DNA, 60 bp, Artificial
  Synthetic oligonucleotide
ggcactagagagagtggctggctcgaagttggaagtgactttgtgagcatagtccagatg

SEQ ID NO: 118161 - DNA, 60 bp, Artificial
  Synthetic oligonucleotide
atagagaagcacgaggatggagaacatcctgattctgaccttgaataacttgtagacaga

SEQ ID NO: 118162 - DNA, 60 bp, Artificial
  Synthetic oligonucleotide
ctcaggttaccggggagaatgaaactttcagcaatgtcatagagaagcacgaggatggag

SEQ ID NO: 118163 - DNA, 55 bp, Artificial
  Synthetic oligonucleotide
aaaattgtttccaagtctacaaatctcaaaatgtgtacagagtgcggttctgcgt

SEQ ID NO: 118164 - DNA, 60 bp, Artificial
  Synthetic oligonucleotide
caattgtggttcggttcagaaaaattgtttccaagtctacaaatctcaaaatgtgtacag

SEQ ID NO: 118165 - DNA, 60 bp, Artificial
  Synthetic oligonucleotide
cttaactgattaactgttgcaaatggatatcccgtcacccaattgtggttcggttcagaa

SEQ ID NO: 118166 - DNA, 60 bp, Artificial
  Synthetic oligonucleotide
gttataaaattcttaactgattaactgttgcaaatggatatcccgtcacccaattgtggt

SEQ ID NO: 118167 - DNA, 60 bp, Artificial
  Synthetic oligonucleotide
ccacgtaattctaatgcttaaccctgtcaacgtaatcttcgacaaccaccaattgttgac

SEQ ID NO: 118168 - DNA, 60 bp, Artificial
  Synthetic oligonucleotide
ataattctctttccacccaacgaagcgacgatgacaagaatgttgaaggtgaattgactg

SEQ ID NO: 118169 - DNA, 60 bp, Artificial
  Synthetic oligonucleotide
gtgatcgtcattgattctaagcttgatttcgatgaaatgagtaacttgaagatttgcttc

SEQ ID NO: 118170 - DNA, 61 bp, Artificial
  Synthetic oligonucleotide
gaattgactgtagatttgaagaagtctgtaattgacaacgacgttatgagaactgaaattc

SEQ ID NO: 118171 - DNA, 50 bp, Artificial
  Synthetic oligonucleotide
ggagaagtgtgatttagtcgaacaagcagagaatttgctcctaagatgtc

SEQ ID NO: 118172 - DNA, 60 bp, Artificial
  Synthetic oligonucleotide
atgaagttcttgaagaacgtcttgaaaatgaaactaagcgccaagagcaattgtcgattg

SEQ ID NO: 118173 - DNA, 54 bp, Artificial
  Synthetic oligonucleotide
attcattcagcactatcgagtgcttttaccaatctattggatgcacccttatta

SEQ ID NO: 118174 - DNA, 60 bp, Artificial
  Synthetic oligonucleotide
tcgaatgtgatcgtcattgattctaagcttgatttcgatgaaatgagtaacttgaagatt

SEQ ID NO: 118175 - DNA, 60 bp, Artificial
  Synthetic oligonucleotide
ccacccaacgaagcgacgatgacaagaatgttgaaggtgaattgactgtagatttgaaga

SEQ ID NO: 118176 - DNA, 60 bp, Artificial
  Synthetic oligonucleotide
tttgaagaagttgattgattcaaaagttataacatccttgacaactactgatttcaaacc

SEQ ID NO: 118177 - DNA, 60 bp, Artificial
  Synthetic oligonucleotide
atttcaaaccgaaaaacaaagaatttaaaattggactatataacgcgacttcgaatgtga

SEQ ID NO: 118178 - DNA, 60 bp, Artificial
  Synthetic oligonucleotide
caagttcgccgcaagctaacgtctctggagtattgtacacaggaaacaagttgttcattg

SEQ ID NO: 118179 - DNA, 60 bp, Artificial
  Synthetic oligonucleotide
aagttgttcattgtttacgaacgtgagaatatcttgaacgaaaatgatgatttgaagaag

SEQ ID NO: 118180 - DNA, 60 bp, Artificial
  Synthetic oligonucleotide
agatgagaacaaatggtttggaatggttctatgtcatccaagttcgccgcaagctaacgt

SEQ ID NO: 118181 - DNA, 60 bp, Artificial
  Synthetic oligonucleotide
atccaagttcgccgcaagctaacgtctctggagtattgtacacaggaaacaagttgttca

SEQ ID NO: 118182 - DNA, 60 bp, Artificial
  Synthetic oligonucleotide
ggcagttaattctactgttacattgaaaccagatccgagcatcctgtcagctattcaaac

SEQ ID NO: 118183 - DNA, 60 bp, Artificial
  Synthetic oligonucleotide
tcaattaagaattaaagatgagaacaaatggtttggaatggttctatgtcatccaagttc

SEQ ID NO: 118184 - DNA, 60 bp, Artificial
  Synthetic oligonucleotide
gttcacaatgtgttcatcaagtttttctggagtttaagccttgaataagcgtactaaaat

SEQ ID NO: 118185 - DNA, 60 bp, Artificial
  Synthetic oligonucleotide
gtactaaaatgagtacataagacgattcgtattaacatctacgtatttaccatctattag

SEQ ID NO: 118186 - DNA, 60 bp, Artificial
  Synthetic oligonucleotide
gaagtgcagatagcgtagaagaacgaatgttgactgtcaatgatgtcgctttgatgaatg

SEQ ID NO: 118187 - DNA, 60 bp, Artificial
  Synthetic oligonucleotide
gcgtagaagaacgaatgttgactgtcaatgatgtcgctttgatgaatgtttcagtctcag

SEQ ID NO: 118188 - DNA, 60 bp, Artificial
  Synthetic oligonucleotide
catctattagctgatttgagaaagagaaattaacagactaaatgagatctcgtgttgtac

SEQ ID NO: 118189 - DNA, 60 bp, Artificial
  Synthetic oligonucleotide
gatttgagaaagagaaattaacagactaaatgagatctcgtgttgtactggattatcagg

SEQ ID NO: 118190 - DNA, 60 bp, Artificial
  Synthetic oligonucleotide
gaagaacgtcttgaaaatgaaactaagcgccaagagcaattgtcgattgaagtgagtgaa

SEQ ID NO: 118191 - DNA, 57 bp, Artificial
  Synthetic oligonucleotide
ttgtcgattgaagtgagtgaattaaatgcagaatgtgaagcattaaccaaaagcctg

SEQ ID NO: 118192 - DNA, 60 bp, Artificial
  Synthetic oligonucleotide
tatcaaaatcagagtgaaaatgttctcgaatttgttgaagcgcagccaaattctcaactg

SEQ ID NO: 118193 - DNA, 60 bp, Artificial
  Synthetic oligonucleotide
gtatcaaatgataaatatcaaaatcagagtgaaaatgttctcgaatttgttgaagcgcag

SEQ ID NO: 118194 - DNA, 60 bp, Artificial
  Synthetic oligonucleotide
gcttcaaatcagatgaacttgcaagtttgacttcgctgcacaagaagatgatcaaattca

SEQ ID NO: 118195 - DNA, 60 bp, Artificial
  Synthetic oligonucleotide
cttgaagatttgcttcaaatcagatgaacttgcaagtttgacttcgctgcacaagaagat

SEQ ID NO: 118196 - DNA, 60 bp, Artificial
  Synthetic oligonucleotide
caaccacgtaattctaatgcttaaccctgtcaacgtaatcttcgacaaccaccaattgtt

SEQ ID NO: 118197 - DNA, 60 bp, Artificial
  Synthetic oligonucleotide
cctgcaacagccaattcagttgatgacaaattgaaaaatcatttcagtgccaaccacgta

SEQ ID NO: 118198 - DNA, 60 bp, Artificial
  Synthetic oligonucleotide
gcgcagccaaattctcaactgatcatttcaaagattaatgacatgagtgaaagattcggt

SEQ ID NO: 118199 - DNA, 60 bp, Artificial
  Synthetic oligonucleotide
tgaagcgcagccaaattctcaactgatcatttcaaagattaatgacatgagtgaaagatt

SEQ ID NO: 118200 - DNA, 60 bp, Artificial
  Synthetic oligonucleotide
ttcaacagaatctcccatcaaaaaagaccatgtccaccaatttgaccaacatcgcattaa

SEQ ID NO: 118201 - DNA, 60 bp, Artificial
  Synthetic oligonucleotide
gagtccgagatactgttacccgccttgaccttgagaacgagttcaacagaatctcccatc

SEQ ID NO: 118202 - DNA, 57 bp, Artificial
  Synthetic oligonucleotide
caagttcatcatggaaggagtagtcgttcaagtgtatactacagatttgatcaacgt

SEQ ID NO: 118203 - DNA, 52 bp, Artificial
  Synthetic oligonucleotide
ttcaacacccgagacttcgattcgaccaactccgatgaaacgttttgttcgc

SEQ ID NO: 118204 - DNA, 60 bp, Artificial
  Synthetic oligonucleotide
aagttttttgagtccgagatactgttacccgccttgaccttgagaacgagttcaacagaa

SEQ ID NO: 118205 - DNA, 60 bp, Artificial
  Synthetic oligonucleotide
gcgagcgtttgaacaaagataatctcgaattgaagcaagtcatggttgagagaacagcga

SEQ ID NO: 118206 - DNA, 60 bp, Artificial
  Synthetic oligonucleotide
ttgcgagcgtttgaacaaagataatctcgaattgaagcaagtcatggttgagagaacagc

SEQ ID NO: 118207 - DNA, 60 bp, Artificial
  Synthetic oligonucleotide
cgaagacgaacataatgaacagagcgaagggtatgccttatttagtcaatgcattgaagc

SEQ ID NO: 118208 - DNA, 60 bp, Artificial
  Synthetic oligonucleotide
taagcgaagacgaacataatgaacagagcgaagggtatgccttatttagtcaatgcattg

SEQ ID NO: 118209 - DNA, 60 bp, Artificial
  Synthetic oligonucleotide
gacgcgaactttggtaatgttcattcacttctgaaaatgctaaaggtcaaaattgcaagc

SEQ ID NO: 118210 - DNA, 60 bp, Artificial
  Synthetic oligonucleotide
attctggaacagacgcgaactttggtaatgttcattcacttctgaaaatgctaaaggtca

SEQ ID NO: 118211 - DNA, 60 bp, Artificial
  Synthetic oligonucleotide
gcaagcattaattctatttgtgatgcaggtatatcagtttcagaaaatcaatggagcgct

SEQ ID NO: 118212 - DNA, 60 bp, Artificial
  Synthetic oligonucleotide
ctaaaggtcaaaattgcaagcattaattctatttgtgatgcaggtatatcagtttcagaa

SEQ ID NO: 118213 - DNA, 60 bp, Artificial
  Synthetic oligonucleotide
atggagcgcttatggtttgtgttgcccaagaacaagaagtgcagatagcgtagaagaacg

SEQ ID NO: 118214 - DNA, 60 bp, Artificial
  Synthetic oligonucleotide
agtttcagaaaatcaatggagcgcttatggtttgtgttgcccaagaacaagaagtgcaga

SEQ ID NO: 118215 - DNA, 60 bp, Artificial
  Synthetic oligonucleotide
tcggcagttaattctactgttacattgaaaccagatccgagcatcctgtcagctattcaa

SEQ ID NO: 118216 - DNA, 60 bp, Artificial
  Synthetic oligonucleotide
gtgatgaaaagaacacctctgagactacacaattgcacgaattaataacttcggcagtta

SEQ ID NO: 118217 - DNA, 60 bp, Artificial
  Synthetic oligonucleotide
agtgtttggtagcctgattgataattgggatcttgttcagctagttggaactcgagcgga

SEQ ID NO: 118218 - DNA, 60 bp, Artificial
  Synthetic oligonucleotide
ggtgctgtgactatgttgcaacgaatggttaagctacgaggatctaccatccaagaatgc

SEQ ID NO: 118219 - DNA, 60 bp, Artificial
  Synthetic oligonucleotide
atgattttacaacaactgacaaagcacaacaaagtaccttttattcctcttctggtttaa

SEQ ID NO: 118220 - DNA, 60 bp, Artificial
  Synthetic oligonucleotide
tctggtttaatggatgttcgtaagaggttatcgatctctgaaagtttggaagtgtttggt

SEQ ID NO: 118221 - DNA, 60 bp, Artificial
  Synthetic oligonucleotide
ttgacttatccgcagtacgttttattgctgggagcgatacactggacgagtccaaccagg

SEQ ID NO: 118222 - DNA, 60 bp, Artificial
  Synthetic oligonucleotide
gtgaaagaggtaattgaagagcgaagaaagcagttggttgccgagtttggggatcaagga

SEQ ID NO: 118223 - DNA, 60 bp, Artificial
  Synthetic oligonucleotide
cgtaaagctggtgagaggcatcaagttggtcggcggcctagagtgatacagatggttggt

SEQ ID NO: 118224 - DNA, 57 bp, Artificial
  Synthetic oligonucleotide
tccttcgaacgcaatgacacactatctcctctgggcaacacgtagagatcgagcaga

SEQ ID NO: 118225 - DNA, 60 bp, Artificial
  Synthetic oligonucleotide
gggcagtccgagacgatttacttcgtggtgacaatgatccattggaaagctacattgaat

SEQ ID NO: 118226 - DNA, 60 bp, Artificial
  Synthetic oligonucleotide
cggcgaatgatggcatccgagtctggtactggcgcaatccatgaaatggatcatatttgc

SEQ ID NO: 118227 - DNA, 60 bp, Artificial
  Synthetic oligonucleotide
gtgtgtttcatcgtcttaggggagaggttctcggttatccagcgtttttcttgggatcga

SEQ ID NO: 118228 - DNA, 60 bp, Artificial
  Synthetic oligonucleotide
tgtcatcgctatttcgtcctatcgatgttcagattgtgttcggcgaatgatggcatccga

SEQ ID NO: 118229 - DNA, 60 bp, Artificial
  Synthetic oligonucleotide
ggtgaagaaggtcggctgttatatcggactggtagaaattggaagaaggtatttgcatct

SEQ ID NO: 118230 - DNA, 60 bp, Artificial
  Synthetic oligonucleotide
tttgccttatgcgtcattaatgttgttcacatcctgggtgtcggggactgcttctttttc

SEQ ID NO: 118231 - DNA, 60 bp, Artificial
  Synthetic oligonucleotide
gagtgggcttctgcaaataccaagacgatcttacttggatgcgggttattgtgggcttgc

SEQ ID NO: 118232 - DNA, 60 bp, Artificial
  Synthetic oligonucleotide
gatgagattctatgtccgggaacgtcggtatatacgattccttcgaacgcaatgacacac

SEQ ID NO: 118233 - DNA, 60 bp, Artificial
  Synthetic oligonucleotide
aaggatgggtgtgttgtgagtggtatgacagggcgagagttggtttgttttccgagatgt

SEQ ID NO: 118234 - DNA, 60 bp, Artificial
  Synthetic oligonucleotide
gtccgatggagtgtttgacgtccgatggaatggttttgggatgttctataaagagtgggc

SEQ ID NO: 118235 - DNA, 60 bp, Artificial
  Synthetic oligonucleotide
gtttgcaagtgcattgttatacgttatgggtgcaacatctctatctttggaacaatcagc

SEQ ID NO: 118236 - DNA, 60 bp, Artificial
  Synthetic oligonucleotide
cggtgtctaattttcctaagagaagcgtgagcgctgatggtttggatgatcgaataattg

SEQ ID NO: 118237 - DNA, 60 bp, Artificial
  Synthetic oligonucleotide
attgaccgtgagaaatacgatttacctcggctgtctatgtggaagaatgcggccaaccat

SEQ ID NO: 118238 - DNA, 56 bp, Artificial
  Synthetic oligonucleotide
tcagcgcttcatatttacggagttgggatgggattcgtcgctggagtaatgcctgt

SEQ ID NO: 118239 - DNA, 60 bp, Artificial
  Synthetic oligonucleotide
ggcgctgtttgaggtccgacgagtcgggatggaggatgttagagaacttgagaaagtgct

SEQ ID NO: 118240 - DNA, 60 bp, Artificial
  Synthetic oligonucleotide
tttgcatctaaaagagccgcatccgttgcatggaaggatcaattcacgtccgatggagtg

SEQ ID NO: 118241 - DNA, 60 bp, Artificial
  Synthetic oligonucleotide
gtagtcccgtcagctgttctagttgctgaacgtccaggatgtaagatcgatcaggcgctg

SEQ ID NO: 118242 - DNA, 60 bp, Artificial
  Synthetic oligonucleotide
aaagtgcttgatgagctaacacgcttgaaccacctggagcggaagtttactaagaggctg

SEQ ID NO: 118243 - DNA, 60 bp, Artificial
  Synthetic oligonucleotide
tttcgtcggaaagaggtgatatggctgggtcacttcctcttgatcgagttaaaatcatgt

SEQ ID NO: 118244 - DNA, 60 bp, Artificial
  Synthetic oligonucleotide
tcgcttgcgcgcaattcttgggaggaggtaggaatctgagctctccatcgctttgcagtc

SEQ ID NO: 118245 - DNA, 60 bp, Artificial
  Synthetic oligonucleotide
ggaaccatggaaattcagtagtggagattggcgaatgtctttctctcatcgcttgcgcgc

SEQ ID NO: 118246 - DNA, 60 bp, Artificial
  Synthetic oligonucleotide
catgttgagtatgacggatgagaagattggccgcgcgcgatgtcctttgccttatgcgtc

SEQ ID NO: 118247 - DNA, 60 bp, Artificial
  Synthetic oligonucleotide
cgaagaagcgaagtattagtaaaggagccacatttgaagagagagtctatcatggtgctg

SEQ ID NO: 118248 - DNA, 60 bp, Artificial
  Synthetic oligonucleotide
gacaaaagccgcggtatatatcgagaattatcgagcaggcgacgtttttgcgaagaagcg

SEQ ID NO: 118249 - DNA, 60 bp, Artificial
  Synthetic oligonucleotide
gcggagccttttgtgttgaataaccctgcttcttatttattggttaatcaattattggcc

SEQ ID NO: 118250 - DNA, 60 bp, Artificial
  Synthetic oligonucleotide
gcacttgatcatgtgaatctatggccttatgaagttgagcgtccaatccctcagatcact

SEQ ID NO: 118251 - DNA, 60 bp, Artificial
  Synthetic oligonucleotide
ttagaaggggaatggattgcagtggactggtactatcctgacccagatttagcggacatg

SEQ ID NO: 118252 - DNA, 60 bp, Artificial
  Synthetic oligonucleotide
gaactgtttttaggtcaggtttgttaaatactgcggatcagcatacgtttcttggcgtga

SEQ ID NO: 118253 - DNA, 60 bp, Artificial
  Synthetic oligonucleotide
tatgcccttttggagaaaagattgaggcaacgatggtatggcaagcatggtaaggagatg

SEQ ID NO: 118254 - DNA, 60 bp, Artificial
  Synthetic oligonucleotide
aaggattacgagggatttgtgcgatgagacaaagtttttgatggaaaggttaggttatga

SEQ ID NO: 118255 - DNA, 56 bp, Artificial
  Synthetic oligonucleotide
gtatgaggagcatgttaagttgctcggttctgtacttggtgatgatcaggttgctg

SEQ ID NO: 118256 - DNA, 60 bp, Artificial
  Synthetic oligonucleotide
tgcgtcagagtcgattgcttcgatatcagagtcgcggcttgcatttggcttcggtgtcta

SEQ ID NO: 118257 - DNA, 60 bp, Artificial
  Synthetic oligonucleotide
gtgagtggtatgacagggcgagagttggtttgttttccgagatgtttgatcggcggggag

SEQ ID NO: 118258 - DNA, 60 bp, Artificial
  Synthetic oligonucleotide
actagagatgatggtgttaactatggatgggacattaagctcaacatgggaaggatgggt

SEQ ID NO: 118259 - DNA, 60 bp, Artificial
  Synthetic oligonucleotide
gtcctgcctataaggctactaggtttactacgtcaggcaagaattctggggatataagag

SEQ ID NO: 118260 - DNA, 60 bp, Artificial
  Synthetic oligonucleotide
gggaggcaggcattatcctatagtgaagaggcgtataaccttgtatctgcttcaatgggg

SEQ ID NO: 118261 - DNA, 60 bp, Artificial
  Synthetic oligonucleotide
caagcagacaagctgcggacatgcgcgacatgatcttggagggaattaacgggctagagg

SEQ ID NO: 118262 - DNA, 60 bp, Artificial
  Synthetic oligonucleotide
gatcatatttgcattatgcgatctaacgcacttagatggctgcaagctgcgtttagtgac

SEQ ID NO: 118263 - DNA, 60 bp, Artificial
  Synthetic oligonucleotide
ctaagaggctggcgatgggcttatttatcgttgagaaattgactgagcgtagaactgggt

SEQ ID NO: 118264 - DNA, 60 bp, Artificial
  Synthetic oligonucleotide
aattgactgagcgtagaactgggtatggccctgcaatagcaagtaatggatgggggcata

SEQ ID NO: 118265 - DNA, 60 bp, Artificial
  Synthetic oligonucleotide
cctcaccggcggaagactaatcaggcatattgtgagatgatgggtatggcgctactgtta

SEQ ID NO: 118266 - DNA, 60 bp, Artificial
  Synthetic oligonucleotide
ctacgaagccttttcagactaatttgtcacttagttgtgtgtttcatcgtcttaggggag

SEQ ID NO: 118267 - DNA, 55 bp, Artificial
  Synthetic oligonucleotide
gtccttggagtgaggggatccccccacacccctcacgactgaccacacattcatc

SEQ ID NO: 118268 - DNA, 60 bp, Artificial
  Synthetic oligonucleotide
ccttatctaatagtcttggagtgaagggatccccccacacccctcacgactgaccacaca

SEQ ID NO: 118269 - DNA, 60 bp, Artificial
  Synthetic oligonucleotide
ccttatctaatcgtcttggagtgaggggatccccccacacccctcacgactgaccacaca

SEQ ID NO: 118270 - DNA, 60 bp, Artificial
  Synthetic oligonucleotide
ccgcaacacgagaggttgacttcacagtgccggatgtacaaaagattctagatgacatta

SEQ ID NO: 118271 - DNA, 60 bp, Artificial
  Synthetic oligonucleotide
acgcattattacccgacctaatcgctggcgcgcatcagaacgccgatccagtcgtactag

SEQ ID NO: 118272 - DNA, 60 bp, Artificial
  Synthetic oligonucleotide
ccaagaatttcatcgattacgttgactcaaagaatcacaacaacggggccgttcgctatt

SEQ ID NO: 118273 - DNA, 60 bp, Artificial
  Synthetic oligonucleotide
ggaactcaattggttggttagaaagattgggacagaggaaaaggatcacgtattcgcaag

SEQ ID NO: 118274 - DNA, 60 bp, Artificial
  Synthetic oligonucleotide
ggatgggccacaatagacgttgaatatagagatccagctccttatgtgcatgcacaacgc

SEQ ID NO: 118275 - DNA, 60 bp, Artificial
  Synthetic oligonucleotide
gcgttgggtgttgcttccgtcgctgcagccatcgttaaaactcgtgttggaggaggaggc

SEQ ID NO: 118276 - DNA, 60 bp, Artificial
  Synthetic oligonucleotide
tgcatgacattccgaccagagatcatcgcggcatggaggttgcagagccagaagtgctgg

SEQ ID NO: 118277 - DNA, 60 bp, Artificial
  Synthetic oligonucleotide
aatccgtttatgcgtctgagttatccgtgatgaaggtggatatgcgacacttatcattga

SEQ ID NO: 118278 - DNA, 60 bp, Artificial
  Synthetic oligonucleotide
cattgagaggtttaggcaggagggcttctattacacgaatatgttagaggcgccaccgga

SEQ ID NO: 118279 - DNA, 60 bp, Artificial
  Synthetic oligonucleotide
cggtgtgttacgcactgtacgcgttaaattcttcgatgcgcggcccccagacgacatttt

SEQ ID NO: 118280 - DNA, 60 bp, Artificial
  Synthetic oligonucleotide
cgcacgtctacaggcaaacatggggcaattccgagcggctttaagacgtattatggatga

SEQ ID NO: 118281 - DNA, 60 bp, Artificial
  Synthetic oligonucleotide
ggcatataaaggaaaaatgaggattatggacattacccaatcgctcaagatgggcaccaa

SEQ ID NO: 118282 - DNA, 60 bp, Artificial
  Synthetic oligonucleotide
tatttcggtctgagaacacacgactatgatataaaaggatcctcatcgactgtgtcaaaa

SEQ ID NO: 118283 - DNA, 53 bp, Artificial
  Synthetic oligonucleotide
atagttaataaaagcgtagatactataagaggttattttgcatcgtttaatgt

SEQ ID NO: 118284 - DNA, 60 bp, Artificial
  Synthetic oligonucleotide
actgcaagcttatatttacaatttattgtcagttaattatggaatgtaccaattggtgga

SEQ ID NO: 118285 - DNA, 60 bp, Artificial
  Synthetic oligonucleotide
aattggtggatctaaattcagcgagattctttgatcatgttattcatacaccaatggcta

SEQ ID NO: 118286 - DNA, 60 bp, Artificial
  Synthetic oligonucleotide
catatcagggtttatcaagattgattcttcaacagtactaccgaaagaagagaataacac

SEQ ID NO: 118287 - DNA, 60 bp, Artificial
  Synthetic oligonucleotide
caagattgattcttcaacagtactaccgaaagaagagaataacacaatgccactattacc

SEQ ID NO: 118288 - DNA, 60 bp, Artificial
  Synthetic oligonucleotide
ggctaaaaaaaatggcgcaatccatagtcgtagatggggactacgacgctcttgctagta

SEQ ID NO: 118289 - DNA, 60 bp, Artificial
  Synthetic oligonucleotide
ccactattacctgcaattataaaacgtacattgagctatttcggtctgagaacacacgac

SEQ ID NO: 118290 - DNA, 60 bp, Artificial
  Synthetic oligonucleotide
caatccatgatggagaaaagattacacagtctaagattgatgaaaaggaaaaaatactgt

SEQ ID NO: 118291 - DNA, 60 bp, Artificial
  Synthetic oligonucleotide
aaaatggcgcaatccatagtcgtagatggggactacgacgctcttgctagtagatatctt

SEQ ID NO: 118292 - DNA, 60 bp, Artificial
  Synthetic oligonucleotide
attcagcgagattctttgatcatgttattcatacaccaatggctaaaacaccaacagctg

SEQ ID NO: 118293 - DNA, 60 bp, Artificial
  Synthetic oligonucleotide
aaatcactgtatagaaaagggtgaaataataactgtgtcagtacacgctaataaaactga

SEQ ID NO: 118294 - DNA, 60 bp, Artificial
  Synthetic oligonucleotide
gattagaaaaactatttacgattattgctgctacaattaataaatatggaatgcctagac

SEQ ID NO: 118295 - DNA, 60 bp, Artificial
  Synthetic oligonucleotide
agaataacacaatgccactattacctgcaattataaaacgtacattgagctatttcggtc

SEQ ID NO: 118296 - DNA, 60 bp, Artificial
  Synthetic oligonucleotide
atatatacatggacccatcaattaatacatcctgtcaatcaaattgtcaagctatgatgt

SEQ ID NO: 118297 - DNA, 60 bp, Artificial
  Synthetic oligonucleotide
ctaactactgatgaaaatccaattgtttcagatggaattcgattgactgaaaaagcaaaa

SEQ ID NO: 118298 - DNA, 60 bp, Artificial
  Synthetic oligonucleotide
cgcaaagtcaccgcagtttaaatcatacgttgaattgctcaacaaatcactaactactga

SEQ ID NO: 118299 - DNA, 60 bp, Artificial
  Synthetic oligonucleotide
agaattcacatcaaaattaagatcatattactcagaaatgaatgtaaaagtaaaagcatt

SEQ ID NO: 118300 - DNA, 60 bp, Artificial
  Synthetic oligonucleotide
cgttaaaatgatacgggttgatggagatgacaattatgctatagtacgctttcctatcgc

SEQ ID NO: 118301 - DNA, 60 bp, Artificial
  Synthetic oligonucleotide
agctggtgtgaacatactccatcatgaaaagagaaaccaagattcagcatatgatatggc

SEQ ID NO: 118302 - DNA, 56 bp, Artificial
  Synthetic oligonucleotide
taaaagcattagcatcactcacaggatgtgaaatcgcaaaaagatatgtagctggt

SEQ ID NO: 118303 - DNA, 60 bp, Artificial
  Synthetic oligonucleotide
ttcaattaaaatcactggtacattgagattgtttccaatgaaatcaatattggcattgaa

SEQ ID NO: 118304 - DNA, 60 bp, Artificial
  Synthetic oligonucleotide
tggtgtgaacatactccatcatgaaaagagaaaccaagattcagcatatgatatggcggc

SEQ ID NO: 118305 - DNA, 60 bp, Artificial
  Synthetic oligonucleotide
tcgcaaagtcaccgcagtttaaatcatacgttgaattgctcaacaaatcactaactactg

SEQ ID NO: 118306 - DNA, 60 bp, Artificial
  Synthetic oligonucleotide
tggcattgaattcagcattcaaagtatttgatgaagtagattatgttattaactatccaa

SEQ ID NO: 118307 - DNA, 60 bp, Artificial
  Synthetic oligonucleotide
aggtacatttataactacagagaatttagaactggaatattctaataaatcaattaacta

SEQ ID NO: 118308 - DNA, 60 bp, Artificial
  Synthetic oligonucleotide
caattaactatttaatatcaaaagagatggctgaagattttatgcaagcaataaagcaat

SEQ ID NO: 118309 - DNA, 60 bp, Artificial
  Synthetic oligonucleotide
aaattagtatcatcaccaatgacagtactgacagccatgttaccgatacgaggtacattt

SEQ ID NO: 118310 - DNA, 60 bp, Artificial
  Synthetic oligonucleotide
caccaatgacagtactgacagccatgttaccgatacgaggtacatttataactacagaga

SEQ ID NO: 118311 - DNA, 60 bp, Artificial
  Synthetic oligonucleotide
catggacccatcaattaatacatcctgtcaatcaaattgtcaagctatgatgttcacaat

SEQ ID NO: 118312 - DNA, 60 bp, Artificial
  Synthetic oligonucleotide
gactatcttaagctgtggcgtatgctatggaatgttaaaacgatgaattcaccatattcg

SEQ ID NO: 118313 - DNA, 60 bp, Artificial
  Synthetic oligonucleotide
ataaaactgactatcttaagctgtggcgtatgctatggaatgttaaaacgatgaattcac

SEQ ID NO: 118314 - DNA, 60 bp, Artificial
  Synthetic oligonucleotide
aaagggtgaaataataactgtgtcagtacacgctaataaaactgactatcttaagctgtg

SEQ ID NO: 118315 - DNA, 60 bp, Artificial
  Synthetic oligonucleotide
ataaagcaattaagagatgaaggtttggaatatataccagattattatgagaagtggttt

SEQ ID NO: 118316 - DNA, 60 bp, Artificial
  Synthetic oligonucleotide
ccttaatatactcattcagttttcatgttggttatagaaagcaagcgttgtcagatgctg

SEQ ID NO: 118317 - DNA, 60 bp, Artificial
  Synthetic oligonucleotide
atggagtaaaagatgcgttatcgcatgcacctcaaaaagacgctaaaccttatgaaaaca

SEQ ID NO: 118318 - DNA, 61 bp, Artificial
  Synthetic oligonucleotide
gcgaataaagctttaatacagacagttctcggaaaacttatgacagattatacatttgacg

SEQ ID NO: 118319 - DNA, 60 bp, Artificial
  Synthetic oligonucleotide
atacatttgacgttaaaatgatacgggttgatggagatgacaattatgctatagtacgct

SEQ ID NO: 118320 - DNA, 58 bp, Artificial
  Synthetic oligonucleotide
ctaaagtattacgaagatcaataatacgagcaatgaaaagactaaaacagttgacgca

SEQ ID NO: 118321 - DNA, 60 bp, Artificial
  Synthetic oligonucleotide
agcgaataaagctttaatacagacagttctcggaaaacttatgacagattatacatttga

SEQ ID NO: 118322 - DNA, 60 bp, Artificial
  Synthetic oligonucleotide
tatattgtgctttactgatgtatcacagtgggatgcttctcaacataatactaaagtatt

SEQ ID NO: 118323 - DNA, 60 bp, Artificial
  Synthetic oligonucleotide
gtgctttactgatgtatcacagtgggatgcttctcaacataatactaaagtattacgaag

SEQ ID NO: 118324 - DNA, 60 bp, Artificial
  Synthetic oligonucleotide
atctgcatcaaatggaatactaagagagataaattttggaggacaaaaagttagatcaac

SEQ ID NO: 118325 - DNA, 60 bp, Artificial
  Synthetic oligonucleotide
ttagatcaacgaaaaagaacatgcatgtgattgatgatatctatcataaaaaatatacaa

SEQ ID NO: 118326 - DNA, 60 bp, Artificial
  Synthetic oligonucleotide
cattcagttttcatgttggttatagaaagcaagcgttgtcagatgctgtatatgatcaga

SEQ ID NO: 118327 - DNA, 60 bp, Artificial
  Synthetic oligonucleotide
gaagataaaagattagaagaatacgaattatcagcgttactatcaatgtcatctgcatca

SEQ ID NO: 118328 - DNA, 60 bp, Artificial
  Synthetic oligonucleotide
caccatctagagaggataacttgcagcgtgtatttacagtggcttccattagaagcatgc

SEQ ID NO: 118329 - DNA, 60 bp, Artificial
  Synthetic oligonucleotide
gcaacgcatatttacagtggcttccattagaagcatgctcattaaatgaggaccaagcta

SEQ ID NO: 118330 - DNA, 60 bp, Artificial
  Synthetic oligonucleotide
atttacagtggcttccattagaagcatgctcgtcaaatgaggaccaagctaaccacttgg

SEQ ID NO: 118331 - DNA, 60 bp, Artificial
  Synthetic oligonucleotide
ggcttttaaacgaagtcttcaacatggatgtcctgtattcattatcgaaaactcttaaag

SEQ ID NO: 118332 - DNA, 60 bp, Artificial
  Synthetic oligonucleotide
ggcttttaaacgaagtcttcaacatggatgtcctatactctttgtcaaagactcttaaag

SEQ ID NO: 118333 - DNA, 50 bp, Artificial
  Synthetic oligonucleotide
ggcttttaaacgaagtcttcaacatggatgtcctgtactccttgtcaaaa

SEQ ID NO: 118334 - DNA, 60 bp, Artificial
  Synthetic oligonucleotide
ggcttttaaacgaagtcttcaacatggatgtcctgtactccttgtcaaaaactcttaaag

SEQ ID NO: 118335 - DNA, 60 bp, Artificial
  Synthetic oligonucleotide
gcaaagctggctgctgcctatgattattgttcgtgaaggattggatcacccggatcggtg

SEQ ID NO: 118336 - DNA, 60 bp, Artificial
  Synthetic oligonucleotide
ggggctcagcgtactacgatgcttgaagcggcttcttacatgtgaaggttaagcgcgtcg

SEQ ID NO: 118337 - DNA, 60 bp, Artificial
  Synthetic oligonucleotide
taagcgcgtcgtttcctacgctggagcgtcatgatgaaaagttgaggccaggacatatat

SEQ ID NO: 118338 - DNA, 60 bp, Artificial
  Synthetic oligonucleotide
gcgcgtcgtttcctacgctggagcgtcatgatgaaaagttgaggccaggacatatattcg

SEQ ID NO: 118339 - DNA, 60 bp, Artificial
  Synthetic oligonucleotide
ccaggccgttagctctcttgttgtgtcggttaccgagcagtatgaatgcgctgacatccc

SEQ ID NO: 118340 - DNA, 60 bp, Artificial
  Synthetic oligonucleotide
ggtaccgcttcaagtgatttctctgcaggcagcgtcctatcccttgctattaccggcgaa

SEQ ID NO: 118341 - DNA, 58 bp, Artificial
  Synthetic oligonucleotide
agcggtcagcttactgctacgcttgtaggtcgtaacggtaaccttgagcctattcaat

SEQ ID NO: 118342 - DNA, 60 bp, Artificial
  Synthetic oligonucleotide
tccaatgcaacgactcgtgatttcgccaccacagttgccaaggcgctcattgcgcctggt

SEQ ID NO: 118343 - DNA, 60 bp, Artificial
  Synthetic oligonucleotide
tgccaaggcgctcattgcgcctggtgtctgtgatacgcacgggatgtcctacccatcgat

SEQ ID NO: 118344 - DNA, 60 bp, Artificial
  Synthetic oligonucleotide
tgcgcctggtgtctgtgatacgcacgggatgtcctacccatcgattggtgcgccaaagca

SEQ ID NO: 118345 - DNA, 60 bp, Artificial
  Synthetic oligonucleotide
acccatcgattggtgcgccaaagcaactgatcaccgttcacggtaatgcttctatgacca

SEQ ID NO: 118346 - DNA, 60 bp, Artificial
  Synthetic oligonucleotide
ccacttctacgggtgctcctcccatcaattacgtgatcgagtacgttgactccacgtccg

SEQ ID NO: 118347 - DNA, 60 bp, Artificial
  Synthetic oligonucleotide
tcgagtacgttgactccacgtccgagactggcgttatggttcccgccggcgcggcttccg

SEQ ID NO: 118348 - DNA, 60 bp, Artificial
  Synthetic oligonucleotide
gatcatgtggcacgctaagaacgtgaccgccgataaggctcgctttcttaacggagccgc

SEQ ID NO: 118349 - DNA, 60 bp, Artificial
  Synthetic oligonucleotide
attcttacaatgtcttccaatgcaacgactcgtgatttcgccaccacagttgccaaggcg

SEQ ID NO: 118350 - DNA, 60 bp, Artificial
  Synthetic oligonucleotide
ttggccgagggctaaggaattttgcccgcgctgcgaaggaaacgcgtcatcaggcgagcc

SEQ ID NO: 118351 - DNA, 60 bp, Artificial
  Synthetic oligonucleotide
ccgagggctaaggaattttgcccgcgctgcgaaggaaacgcgtcatcaggcgagccaaat

SEQ ID NO: 118352 - DNA, 60 bp, Artificial
  Synthetic oligonucleotide
tacgttgactccacgtccgagactggcgttatggttcccgccggcgcggcttccgcacat

SEQ ID NO: 118353 - DNA, 60 bp, Artificial
  Synthetic oligonucleotide
gcggcttccgcacatgctgctttcgcggctggaagggcctcgttttctattactaagccg

SEQ ID NO: 118354 - DNA, 60 bp, Artificial
  Synthetic oligonucleotide
gtgcgccaaagcaactgatcaccgttcacggtaatgcttctatgaccaccgacgctggcg

SEQ ID NO: 118355 - DNA, 60 bp, Artificial
  Synthetic oligonucleotide
tctatgaccaccgacgctggcgttacgtccgttgtcgcttacctcgatcctctttcgttc

SEQ ID NO: 118356 - DNA, 60 bp, Artificial
  Synthetic oligonucleotide
ggacatatattcgtaattgagattactgatagtaatccgggtctaggtcgtaaatatata

SEQ ID NO: 118357 - DNA, 60 bp, Artificial
  Synthetic oligonucleotide
cgtaattgagattactgatagtaatccgggtctaggtcgtaaatatataaagtatggaac

SEQ ID NO: 118358 - DNA, 60 bp, Artificial
  Synthetic oligonucleotide
ttctggcgacgactccgtttccggaaccgtggctgcaggcgtgacgcatgatcttatcga

SEQ ID NO: 118359 - DNA, 60 bp, Artificial
  Synthetic oligonucleotide
cgtaatggcatcacatgggcttggaaacaataagagttatactgggaaagttgaattagt

SEQ ID NO: 118360 - DNA, 60 bp, Artificial
  Synthetic oligonucleotide
ccgatttagatatactgggcagatcatgggaaatggcgtgcgtaatggcatcacatgggc

SEQ ID NO: 118361 - DNA, 60 bp, Artificial
  Synthetic oligonucleotide
cacatgggcttggaaacaataagagttatactgggaaagttgaattagttaccccatggg

SEQ ID NO: 118362 - DNA, 60 bp, Artificial
  Synthetic oligonucleotide
cccttaccgaaaagatcatgtggcacgctaagaacgtgaccgccgataaggctcgctttc

SEQ ID NO: 118363 - DNA, 60 bp, Artificial
  Synthetic oligonucleotide
tatgttggacgtggtgcttctaccaacaagtcgtctgttaaaagtgtttacacggcaggc

SEQ ID NO: 118364 - DNA, 60 bp, Artificial
  Synthetic oligonucleotide
atccactgctgcttccacttctacgggtgctcctcccatcaattacgtgatcgagtacgt

SEQ ID NO: 118365 - DNA, 60 bp, Artificial
  Synthetic oligonucleotide
tctttcgttccgtagcggtcagcttactgctacgcttgtaggtcgtaacggtaaccttga

SEQ ID NO: 118366 - DNA, 60 bp, Artificial
  Synthetic oligonucleotide
cgcccttggttttccagccggtcttgatggtaccgccacctctggtagcacccttaccga

SEQ ID NO: 118367 - DNA, 60 bp, Artificial
  Synthetic oligonucleotide
taaatatataaagtatggaactaatacttatattgattctaaactattgactgttaccga

SEQ ID NO: 118368 - DNA, 60 bp, Artificial
  Synthetic oligonucleotide
gcgagcgctccagctcgcattcgatttcgatcgtggtttcagaactgttggccgagggct

SEQ ID NO: 118369 - DNA, 60 bp, Artificial
  Synthetic oligonucleotide
catgcgagcgctccagctcgcattcgatttcgatcgtggtttcagaactgttggccgagg

SEQ ID NO: 118370 - DNA, 60 bp, Artificial
  Synthetic oligonucleotide
gtggatctgcctatgttggacgtggtgcttctaccaacaagtcgtctgttaaaagtgttt

SEQ ID NO: 118371 - DNA, 60 bp, Artificial
  Synthetic oligonucleotide
cgcatgatcttatcgatgatgcgcaggctatgtctcacgccaaacttgaacgccagaccg

SEQ ID NO: 118372 - DNA, 60 bp, Artificial
  Synthetic oligonucleotide
taccggcgaaaacacttctggcgacgactccgtttccggaaccgtggctgcaggcgtgac

SEQ ID NO: 118373 - DNA, 60 bp, Artificial
  Synthetic oligonucleotide
gatttctctgcaggcagcgtcctatcccttgctattaccggcgaaaacacttctggcgac

SEQ ID NO: 118374 - DNA, 60 bp, Artificial
  Synthetic oligonucleotide
caggcgtgacgcatgatcttatcgatgatgcgcaggctatgtctcacgccaaacttgaac

SEQ ID NO: 118375 - DNA, 60 bp, Artificial
  Synthetic oligonucleotide
ttcccaggctaacagccaggccgttagctctcttgttgtgtcggttaccgagcagtatga

SEQ ID NO: 118376 - DNA, 60 bp, Artificial
  Synthetic oligonucleotide
cgtactcagtttcttacgatgttcgactcccctacttccatgcgagcgctccagctcgca

SEQ ID NO: 118377 - DNA, 60 bp, Artificial
  Synthetic oligonucleotide
acccctgaatctcgtactcagtttcttacgatgttcgactcccctacttccatgcgagcg

SEQ ID NO: 118378 - DNA, 60 bp, Artificial
  Synthetic oligonucleotide
tgaccgcattcactcgtgatgcgcctatggccttcacccctgaatctcgtactcagtttc

SEQ ID NO: 118379 - DNA, 60 bp, Artificial
  Synthetic oligonucleotide
tgttctttgaattcatgaccgcattcactcgtgatgcgcctatggccttcacccctgaat

SEQ ID NO: 118380 - DNA, 60 bp, Artificial
  Synthetic oligonucleotide
tacgtctatcgtatcggtccgatgcgccgccacgctcgctgtcaccccatctcctgaaaa

SEQ ID NO: 118381 - DNA, 60 bp, Artificial
  Synthetic oligonucleotide
tctgtaaattccgatttagatatactgggcagatcatgggaaatggcgtgcgtaatggca

SEQ ID NO: 118382 - DNA, 60 bp, Artificial
  Synthetic oligonucleotide
aggtttgaagcccggtacgtctatcgtatcggtccgatgcgccgccacgctcgctgtcac

SEQ ID NO: 118383 - DNA, 60 bp, Artificial
  Synthetic oligonucleotide
cgctggcgttacgtccgttgtcgcttacctcgatcctctttcgttccgtagcggtcagct

SEQ ID NO: 118384 - DNA, 60 bp, Artificial
  Synthetic oligonucleotide
gcccttggttttccagccggtcttgatggtaccgccacctctggtagcacccttaccgaa

SEQ ID NO: 118385 - DNA, 60 bp, Artificial
  Synthetic oligonucleotide
aggggctcagcgtactacgatgcttgaagcggcttcttacatgtgaaggttaagcgcgtc

SEQ ID NO: 118386 - DNA, 60 bp, Artificial
  Synthetic oligonucleotide
cataatgttaaaccagatgtcatcttctgagttgtggttttcggcgtcatatggtttgaa

SEQ ID NO: 118387 - DNA, 57 bp, Artificial
  Synthetic oligonucleotide
ttgagttggataagatagtggttgagtttcctaatttgaattatcgatatcaaatta

SEQ ID NO: 118388 - DNA, 60 bp, Artificial
  Synthetic oligonucleotide
cgcagccgttgaaagaagtgggacatgcttttaaatacagaatgacgatcttgcccggtg

SEQ ID NO: 118389 - DNA, 60 bp, Artificial
  Synthetic oligonucleotide
aatacgcagccgttgaaagaagtgggacatgcttttaaatacagaatgacgatcttgccc

SEQ ID NO: 118390 - DNA, 50 bp, Artificial
  Synthetic oligonucleotide
tacaagaacattagatgacgtctgtgatcttgagagatatacattaggtc

SEQ ID NO: 118391 - DNA, 60 bp, Artificial
  Synthetic oligonucleotide
gtctactggtattgctttcggatacttttctgtgaccgattataatcctacaagaacatt

SEQ ID NO: 118392 - DNA, 51 bp, Artificial
  Synthetic oligonucleotide
tatctactgaatctcctgtgtacagtatgtctactggtattgctttcggat

SEQ ID NO: 118393 - DNA, 60 bp, Artificial
  Synthetic oligonucleotide
tagacatattttctcagctatttttatctactgaatctcctgtgtacagtatgtctactg

SEQ ID NO: 118394 - DNA, 60 bp, Artificial
  Synthetic oligonucleotide
ccgaacgggtgagttaatgattcatgttgacgaatggttcaataagaaattagacatatt

SEQ ID NO: 118395 - DNA, 60 bp, Artificial
  Synthetic oligonucleotide
cgactatcaacgtaataaggttagagaccagtttgcagataaattccgaacgggtgagtt

SEQ ID NO: 118396 - DNA, 60 bp, Artificial
  Synthetic oligonucleotide
gtcgcgttgttgtagcagatccacgccttttcatggtaacaccgtattttatcgactatc

SEQ ID NO: 118397 - DNA, 61 bp, Artificial
  Synthetic oligonucleotide
gtttgtatctgataattatagtaccgatactcctgaccataatgttaaaccagatgtcatc

SEQ ID NO: 118398 - DNA, 60 bp, Artificial
  Synthetic oligonucleotide
ggttcagctgataatttttcatttccaagtttgtttactgtaagtagtacttttaattct

SEQ ID NO: 118399 - DNA, 60 bp, Artificial
  Synthetic oligonucleotide
cttcagtcaatacgacgaattctttaagttcatattatgtatttattgatggttcagctg

SEQ ID NO: 118400 - DNA, 60 bp, Artificial
  Synthetic oligonucleotide
agaaatcagtgcaaaattataggtgatatatatgatttgattactcctcgaggggctagg

SEQ ID NO: 118401 - DNA, 60 bp, Artificial
  Synthetic oligonucleotide
ctcaagattcattatattttatcgcagacactgttaaggcagctcagattgagaatgaag

SEQ ID NO: 118402 - DNA, 60 bp, Artificial
  Synthetic oligonucleotide
ccgcgctatatcgtttgttacaacaatatgcaggacaggaattaaataaatggattggta

SEQ ID NO: 118403 - DNA, 60 bp, Artificial
  Synthetic oligonucleotide
gactccagataaagatgcgaaagatagtaacgaaaacactaaagccgttgaatcaaggaa

SEQ ID NO: 118404 - DNA, 60 bp, Artificial
  Synthetic oligonucleotide
ggattggtatgtatgggttgtttactcatctagatgaagctggtaattttgtaagacgtg

SEQ ID NO: 118405 - DNA, 60 bp, Artificial
  Synthetic oligonucleotide
gcagcagaattttatggcagtgcttttgttgatgttcgctttacatcagctatggctaac

SEQ ID NO: 118406 - DNA, 60 bp, Artificial
  Synthetic oligonucleotide
gagaatgaagagctcgctaaagccgcagcaaatcaagcactactagctctagttaaaaac

SEQ ID NO: 118407 - DNA, 60 bp, Artificial
  Synthetic oligonucleotide
attttatcgcagacactgttaaggcagctcagattgagaatgaagagctcgctaaagccg

SEQ ID NO: 118408 - DNA, 60 bp, Artificial
  Synthetic oligonucleotide
ctactattccaatatttgatggcaaaacaatatacgagtttatttattccgttatatgtg

SEQ ID NO: 118409 - DNA, 60 bp, Artificial
  Synthetic oligonucleotide
gtagtcgcgttgttgtagcagatccacgccttttcatggtaacaccgtattttatcgact

SEQ ID NO: 118410 - DNA, 60 bp, Artificial
  Synthetic oligonucleotide
ataatgagcggtattacagcaatcagttctcgtcctgatatgtcagcaacttttcttagt

SEQ ID NO: 118411 - DNA, 60 bp, Artificial
  Synthetic oligonucleotide
gatgcgaaagatagtaacgaaaacactaaagccgttgaatcaaggaacgatgttgatacc

SEQ ID NO: 118412 - DNA, 60 bp, Artificial
  Synthetic oligonucleotide
tacttattatgtaaacagagtacagttattacagatgacgtttatgtggttggtgccgga

SEQ ID NO: 118413 - DNA, 60 bp, Artificial
  Synthetic oligonucleotide
gacgtttatgtggttggtgccggacctgagtataatcaggctatatatcctactattcca

SEQ ID NO: 118414 - DNA, 60 bp, Artificial
  Synthetic oligonucleotide
tagatcttatgatttttatgtttcttggaggcctatgaaacagtatcaatgtaacgttga

SEQ ID NO: 118415 - DNA, 60 bp, Artificial
  Synthetic oligonucleotide
gtagatgaacgtatttattattcttttttagttccgtgtgctaatgcaactggaagaaat

SEQ ID NO: 118416 - DNA, 60 bp, Artificial
  Synthetic oligonucleotide
gccaataccggattgagtttgattgatacatttgatgaaaacagaccatatttacaaacg

SEQ ID NO: 118417 - DNA, 58 bp, Artificial
  Synthetic oligonucleotide
tatttacaaacgagatcaataggttttggttcttatagaccttatgaacctggagcaa

SEQ ID NO: 118418 - DNA, 60 bp, Artificial
  Synthetic oligonucleotide
ttttcttagtgatgttaccaacgcactaacatcatcaaattcggaaatatttttagattt

SEQ ID NO: 118419 - DNA, 60 bp, Artificial
  Synthetic oligonucleotide
cccaagtacctcacgatcgatagtaacttataacggatttccttcagtcaatacgacgaa

SEQ ID NO: 118420 - DNA, 60 bp, Artificial
  Synthetic oligonucleotide
ttttagattttctagcagcagaattttatggcagtgcttttgttgatgttcgctttacat

SEQ ID NO: 118421 - DNA, 60 bp, Artificial
  Synthetic oligonucleotide
atcaggactcgctagcgagaatcttatttttaagaatattaagtatggaatacttacccc

SEQ ID NO: 118422 - DNA, 60 bp, Artificial
  Synthetic oligonucleotide
tacttacccctattgagaccaacaacgcaatgagtcaatcattgactgaacataaaatag

SEQ ID NO: 118423 - DNA, 53 bp, Artificial
  Synthetic oligonucleotide
gtcaggattagtccagtattagccgctacaatggaagatgctccaatcattaa

SEQ ID NO: 118424 - DNA, 57 bp, Artificial
  Synthetic oligonucleotide
tctagtgtacgttggaatgtctaataatacttatcttcaaagtgtttggctttatcg

SEQ ID NO: 118425 - DNA, 60 bp, Artificial
  Synthetic oligonucleotide
atatgcctactcccaaagaaacctatgattcaattctttatatattaatgaataatgacg

SEQ ID NO: 118426 - DNA, 60 bp, Artificial
  Synthetic oligonucleotide
ccagatgtcatcttctgagttgtggttttcggcgtcatatggtttgaactttaagtgtat

SEQ ID NO: 118427 - DNA, 60 bp, Artificial
  Synthetic oligonucleotide
gatcgtttgaaaaatcgatgcttaacaagtgctacccatagaaatttagtagcgtcatgt

SEQ ID NO: 118428 - DNA, 60 bp, Artificial
  Synthetic oligonucleotide
cgatgcttaacaagtgctacccatagaaatttagtagcgtcatgttaccctgatacttat

SEQ ID NO: 118429 - DNA, 60 bp, Artificial
  Synthetic oligonucleotide
ataacgcaattaagtttgtatctgataattatagtaccgatactcctgaccataatgtta

SEQ ID NO: 118430 - DNA, 60 bp, Artificial
  Synthetic oligonucleotide
tggattcggattagatgaaggtacagtgtatcctgtaacgaacatacctaaaatcactgg

SEQ ID NO: 118431 - DNA, 60 bp, Artificial
  Synthetic oligonucleotide
acagcaatcagttctcgtcctgatatgtcagcaacttttcttagtgatgttaccaacgca

SEQ ID NO: 118432 - DNA, 60 bp, Artificial
  Synthetic oligonucleotide
ccttttcccaaaattgcttggagttcgcaagttacgttaggttccgcgctatatcgtttg

SEQ ID NO: 118433 - DNA, 60 bp, Artificial
  Synthetic oligonucleotide
gcgaaatacttcatgaacaaattcttattagagatatctatggacccaattctgcgacta

SEQ ID NO: 118434 - DNA, 60 bp, Artificial
  Synthetic oligonucleotide
gaaacagactactgattatcttctgctgcggtatattaattgcgaaatacttcatgaaca

SEQ ID NO: 118435 - DNA, 60 bp, Artificial
  Synthetic oligonucleotide
catgaacaaattcttattagagatatctatggacccaattctgcgactacacgtttagat

SEQ ID NO: 118436 - DNA, 60 bp, Artificial
  Synthetic oligonucleotide
caatcaatgagaacgttgatgccgttaacgacatcatcactaatcaacaggctcttaccg

SEQ ID NO: 118437 - DNA, 60 bp, Artificial
  Synthetic oligonucleotide
cacactgaattcgtacttaataatctaaattcaagcatatccaaggcagaacaaagtcgt

SEQ ID NO: 118438 - DNA, 64 bp, Artificial
  Synthetic oligonucleotide
ccgagtgaaaattagaacatccgtcaatactattggttattattgtatattctggtctagacag

SEQ ID NO: 118439 - DNA, 60 bp, Artificial
  Synthetic oligonucleotide
atatcaccatgtttgctacttcacttaagactattgttgacttcgacaatcacactgaat

SEQ ID NO: 118440 - DNA, 60 bp, Artificial
  Synthetic oligonucleotide
tcgtattgaccgtattgaacatgaactcgtaaaagataggatgcaggaagaagcggatcg

SEQ ID NO: 118441 - DNA, 60 bp, Artificial
  Synthetic oligonucleotide
cacgcgaatgtagttcgtattgaccgtattgaacatgaactcgtaaaagataggatgcag

SEQ ID NO: 118442 - DNA, 60 bp, Artificial
  Synthetic oligonucleotide
cactagcttcagctttgaaaccaagaccgttgatcagcaacgaacgtgaacacgcgaatg

SEQ ID NO: 118443 - DNA, 60 bp, Artificial
  Synthetic oligonucleotide
tgacgattgagggagttgagggtgatagagctgtactcaggatatatggtgttgatctac

SEQ ID NO: 118444 - DNA, 51 bp, Artificial
  Synthetic oligonucleotide
tctgagtcaccgatcagactggagttgaccttggacgtcagatctgatctg

SEQ ID NO: 118445 - DNA, 60 bp, Artificial
  Synthetic oligonucleotide
tgtatgtcaatagcaataccgacaaccgtcgtttcgtctattcacaatattccggacatg

SEQ ID NO: 118446 - DNA, 60 bp, Artificial
  Synthetic oligonucleotide
acattaaaccgagtgaaaattagaacatccgtcaatactattggttattattgtatattc

SEQ ID NO: 118447 - DNA, 60 bp, Artificial
  Synthetic oligonucleotide
ccgatgacaaccagtgaccacaaagagttgggcttcgactacggattcatgcgtcgacac

SEQ ID NO: 118448 - DNA, 60 bp, Artificial
  Synthetic oligonucleotide
tcaaccaccgatgacaaccagtgaccacaaagagttgggcttcgactacggattcatgcg

SEQ ID NO: 118449 - DNA, 57 bp, Artificial
  Synthetic oligonucleotide
atgccgttaacgacatcatcactaatcaacaggctcttaccgcagccgagaaagccg

SEQ ID NO: 118450 - DNA, 60 bp, Artificial
  Synthetic oligonucleotide
ccatgtttgctacttcacttaagactattgttgacttcgacaatcacactgaattcgtac

SEQ ID NO: 118451 - DNA, 60 bp, Artificial
  Synthetic oligonucleotide
cgttctcaagagtaactgtacctggatcaattgcacatagttacgcttacgtttcggttc

SEQ ID NO: 118452 - DNA, 60 bp, Artificial
  Synthetic oligonucleotide
ggtctatcacattaaaccatcaactggtgcttacggacttaaggcttcaattggatcacg

SEQ ID NO: 118453 - DNA, 60 bp, Artificial
  Synthetic oligonucleotide
gaccttgtccctaaattgaaacaaatcgttgatcgttctcgtagagctaatgagttgacg

SEQ ID NO: 118454 - DNA, 60 bp, Artificial
  Synthetic oligonucleotide
gagctaatgagttgacgttctcaagagtaactgtacctggatcaattgcacatagttacg

SEQ ID NO: 118455 - DNA, 60 bp, Artificial
  Synthetic oligonucleotide
tatctcaacagcttagtactgcatttagcgctcttagaaccgtacacgaacaccccaaca

SEQ ID NO: 118456 - DNA, 60 bp, Artificial
  Synthetic oligonucleotide
tggtgaagaccttgtccctaaattgaaacaaatcgttgatcgttctcgtagagctaatga

SEQ ID NO: 118457 - DNA, 60 bp, Artificial
  Synthetic oligonucleotide
gccagagctgtcgcccatactagtgctgcagttgcagatggagtgggagtcattcccatc

SEQ ID NO: 118458 - DNA, 60 bp, Artificial
  Synthetic oligonucleotide
tcaaagcgtctcaaatatctcaacagcttagtactgcatttagcgctcttagaaccgtac

SEQ ID NO: 118459 - DNA, 60 bp, Artificial
  Synthetic oligonucleotide
cagccgagaaagccgatttgatcatggaacaagtaatcaattcagccagagctgtcgccc

SEQ ID NO: 118460 - DNA, 60 bp, Artificial
  Synthetic oligonucleotide
ttcagccagagctgtcgcccatactagtgctgcagttgcagatggagtgggagtcattcc

SEQ ID NO: 118461 - DNA, 60 bp, Artificial
  Synthetic oligonucleotide
ggtccgtttacacattccggaaagtttgtgattggtgtagttatcgacagtatgtatgtc

SEQ ID NO: 118462 - DNA, 60 bp, Artificial
  Synthetic oligonucleotide
tagttatcgacagtatgtatgtcaatagcaataccgacaaccgtcgtttcgtctattcac

SEQ ID NO: 118463 - DNA, 60 bp, Artificial
  Synthetic oligonucleotide
ggtctagacagttgatataatcgcgttctgatagttacaggaccctgaccaaagttctgt

SEQ ID NO: 118464 - DNA, 60 bp, Artificial
  Synthetic oligonucleotide
cactctgatcatatagccatgcttggtcatttggacacacatcgacaaaagcataaggac

SEQ ID NO: 118465 - DNA, 60 bp, Artificial
  Synthetic oligonucleotide
cacacatcgacaaaagcataaggactcactggaagctgagttgcccgggtcttcgaatat

SEQ ID NO: 118466 - DNA, 60 bp, Artificial
  Synthetic oligonucleotide
gcataaggactcactggaagctgagttgcccgggtcttcgaatattcttgttccaattgg

SEQ ID NO: 118467 - DNA, 60 bp, Artificial
  Synthetic oligonucleotide
cttcgaatattcttgttccaattggacatgtcagccgagctaacagtacccacacccttg

SEQ ID NO: 118468 - DNA, 60 bp, Artificial
  Synthetic oligonucleotide
gttccaattggacatgtcagccgagctaacagtacccacacccttgctttgaagtcaacc

SEQ ID NO: 118469 - DNA, 55 bp, Artificial
  Synthetic oligonucleotide
tcgattattcacttcagaccaaagttctagattttggattgactgggatggacaa

SEQ ID NO: 118470 - DNA, 60 bp, Artificial
  Synthetic oligonucleotide
gctttgaagtcaaccttcaggattggtgagtttagagtttacgattatttcattggtccg

SEQ ID NO: 118471 - DNA, 60 bp, Artificial
  Synthetic oligonucleotide
cgattatttcattggtccgtttacacattccggaaagtttgtgattggtgtagttatcga

SEQ ID NO: 118472 - DNA, 60 bp, Artificial
  Synthetic oligonucleotide
gctcttaccgcagccgagaaagccgatttgatcatggaacaagtaatcaattcagccaga

SEQ ID NO: 118473 - DNA, 60 bp, Artificial
  Synthetic oligonucleotide
gggagttgagggtgatagagctgtactcaggatatatggtgttgatctacatagtgttcg

SEQ ID NO: 118474 - DNA, 60 bp, Artificial
  Synthetic oligonucleotide
cacacccttgctttgaagtcaaccttcaggattggtgagtttagagtttacgattatttc

SEQ ID NO: 118475 - DNA, 60 bp, Artificial
  Synthetic oligonucleotide
ttgtatattctggtctagacagttgatataatcgcgttctgatagttacaggaccctgac

SEQ ID NO: 118476 - DNA, 60 bp, Artificial
  Synthetic oligonucleotide
atgtctaacgatatgcactctgatcatatagccatgcttggtcatttggacacacatcga

SEQ ID NO: 118477 - DNA, 60 bp, Artificial
  Synthetic oligonucleotide
ctgttctgtcggctttgcactccgcttttgacagcattcattccgattcaatgtctaacg

SEQ ID NO: 118478 - DNA, 57 bp, Artificial
  Synthetic oligonucleotide
ttggatcacgtcgggttagttattcgttgcatggattgtttggagaactggattctt

SEQ ID NO: 118479 - DNA, 60 bp, Artificial
  Synthetic oligonucleotide
accatcaactggtgcttacggacttaaggcttcaattggatcacgtcgggttagttattc

SEQ ID NO: 118480 - DNA, 60 bp, Artificial
  Synthetic oligonucleotide
cgtctggtgttgtatctcttccgcccattggatcacgtcaagttgaatttaacacagttg

SEQ ID NO: 118481 - DNA, 60 bp, Artificial
  Synthetic oligonucleotide
tcatgtcgtctggtgttgtatctcttccgcccattggatcacgtcaagttgaatttaaca

SEQ ID NO: 118482 - DNA, 60 bp, Artificial
  Synthetic oligonucleotide
ggcacttcaaagtccgggattgagtctgtcagacgaggagtacgttggttatttcgaaca

SEQ ID NO: 118483 - DNA, 60 bp, Artificial
  Synthetic oligonucleotide
ttgatggcacttcaaagtccgggattgagtctgtcagacgaggagtacgttggttatttc

SEQ ID NO: 118484 - DNA, 60 bp, Artificial
  Synthetic oligonucleotide
atatctttgccgtgccattgaaccaactaataaaactgttctgtcggctttgcactccgc

SEQ ID NO: 118485 - DNA, 60 bp, Artificial
  Synthetic oligonucleotide
tggttatttcgaacaatatctttgccgtgccattgaaccaactaataaaactgttctgtc

SEQ ID NO: 118486 - DNA, 60 bp, Artificial
  Synthetic oligonucleotide
cctaattgttctattgttgaattgctggagccacatgagactctgacatcttatgggcgt

SEQ ID NO: 118487 - DNA, 60 bp, Artificial
  Synthetic oligonucleotide
agcggtgcggggtgcaactgctcgaagattaccgcaaaagtgggatgatggatgaggccg

SEQ ID NO: 118488 - DNA, 59 bp, Artificial
  Synthetic oligonucleotide
aattgttctattgttgagttgctggagccacatgagactctgacatcttatgggcgttt

SEQ ID NO: 118489 - DNA, 60 bp, Artificial
  Synthetic oligonucleotide
ggatccatcattagtgaaattgggagtgcagatatgccttcatgcggcagctagctcaag

SEQ ID NO: 118490 - DNA, 60 bp, Artificial
  Synthetic oligonucleotide
ggcagcaactaagatatttcaggcggcacaattagccaattttccgttctctcacacatc

SEQ ID NO: 118491 - DNA, 60 bp, Artificial
  Synthetic oligonucleotide
gaaggtgtcgctagtggctccattggaaaaccgtttatgggggttcctgcatccattgta

SEQ ID NO: 118492 - DNA, 60 bp, Artificial
  Synthetic oligonucleotide
cccgaacatactgacgaccccgacgtcttacgtctaatgaagtctttaactattcaaagg

SEQ ID NO: 118493 - DNA, 60 bp, Artificial
  Synthetic oligonucleotide
cagaggagccatggccagcaattctagaccagattatgggtattttctttaatggcgttc

SEQ ID NO: 118494 - DNA, 60 bp, Artificial
  Synthetic oligonucleotide
acgagaaatgatggatatatggtttacaccgcctctatggttgaggaggatgtgaacaaa

SEQ ID NO: 118495 - DNA, 60 bp, Artificial
  Synthetic oligonucleotide
gtgaacaaaatggaatatgatagaaggtatggactaccgctaatggaattccgtgccacg

SEQ ID NO: 118496 - DNA, 60 bp, Artificial
  Synthetic oligonucleotide
tgtgaacaaaatggaatatgatagaaggtatggactaccgctaatggaattccgtaccac

SEQ ID NO: 118497 - DNA, 60 bp, Artificial
  Synthetic oligonucleotide
atgtagataggtcgctgactccaaaacaaaaagagaatcgaaacaaatgtaaaaaactgt

SEQ ID NO: 118498 - DNA, 56 bp, Artificial
  Synthetic oligonucleotide
tccgtgccacgaattcactggtaacacttcgtgtggattacacaaccaagactaac

SEQ ID NO: 118499 - DNA, 60 bp, Artificial
  Synthetic oligonucleotide
gatgcttggtaaaaatattgtaattgatatgataaaaatgactggacatatgctacgcgg

SEQ ID NO: 118500 - DNA, 60 bp, Artificial
  Synthetic oligonucleotide
ggaatatgatagaaggtatggactaccgctaatggaattccgtaccacgaattcattggt

SEQ ID NO: 118501 - DNA, 60 bp, Artificial
  Synthetic oligonucleotide
agagacgagaaagcactatccgattgtttcgggcctcaaatgggtggggtagtgtacgac

SEQ ID NO: 118502 - DNA, 60 bp, Artificial
  Synthetic oligonucleotide
tgtgaacaaaatggaatatgatagaaggtatggactaccgctaatggaattccgtgccac

SEQ ID NO: 118503 - DNA, 60 bp, Artificial
  Synthetic oligonucleotide
atgtagataggtcgctgactccaaaacaaaaagagaaccgaaacaaatgtaaaaagttgt

SEQ ID NO: 118504 - DNA, 60 bp, Artificial
  Synthetic oligonucleotide
catgccgcttactgcgtactatcaaaagtatatttgccaaggtttaagtatgaacatttt

SEQ ID NO: 118505 - DNA, 60 bp, Artificial
  Synthetic oligonucleotide
gccgcttactgcgtactatcaaaagtatatttgccaaggtttaagtatgaacattttgaa

SEQ ID NO: 118506 - DNA, 60 bp, Artificial
  Synthetic oligonucleotide
accgtcattgttttggtcaaatagagatgatgagtctcatgattatatgaccattattca

SEQ ID NO: 118507 - DNA, 58 bp, Artificial
  Synthetic oligonucleotide
aaaaagttgtttgatcatttgttattagaaattcaacgcggtaaaattactcctggct

SEQ ID NO: 118508 - DNA, 60 bp, Artificial
  Synthetic oligonucleotide
gcgggatgacgtgcatattagattcgcaagccatatgattaccgatttggataatctaac

SEQ ID NO: 118509 - DNA, 60 bp, Artificial
  Synthetic oligonucleotide
cgggatgacgtgcatattagattcgcaagccatatgattaccgatttggataatctaacc

SEQ ID NO: 118510 - DNA, 60 bp, Artificial
  Synthetic oligonucleotide
cgggatgacgtgcatattagattcgcaagccatatgattaccgatttggacaatctaacc

SEQ ID NO: 118511 - DNA, 60 bp, Artificial
  Synthetic oligonucleotide
gcgggatgacgtgcatattagattcgcaagccatatgattaccgatttggacaatctaac

SEQ ID NO: 118512 - DNA, 60 bp, Artificial
  Synthetic oligonucleotide
ctggaacaaggtgtctattgacatccgcggaccaactggactatctaggcgccaaacgga

SEQ ID NO: 118513 - DNA, 60 bp, Artificial
  Synthetic oligonucleotide
tggactatctaggcgccaaacggaagagtactctctggatcgtatccgtcccccatgctc

SEQ ID NO: 118514 - DNA, 60 bp, Artificial
  Synthetic oligonucleotide
cgtcggtcaaccgtatcccgcgtaagctatccttctatatgaggggtaacattgactgga

SEQ ID NO: 118515 - DNA, 60 bp, Artificial
  Synthetic oligonucleotide
aggggtaacattgactggaacaaggtgtctattgacatccgcggaccaactggactatct

SEQ ID NO: 118516 - DNA, 60 bp, Artificial
  Synthetic oligonucleotide
cagcgccgcattaacggctacgcagcgagtcattcaaacatgaaacaacgttcgtcggtc

SEQ ID NO: 118517 - DNA, 60 bp, Artificial
  Synthetic oligonucleotide
aacaacgttcgtcggtcaaccgtatcccgcgtaagctatccttctatatgaggggtaaca

SEQ ID NO: 118518 - DNA, 60 bp, Artificial
  Synthetic oligonucleotide
tgggacatcgacgacggacgtcaactgtctgaatatgacttgcagcgccgcattaacggc

SEQ ID NO: 118519 - DNA, 60 bp, Artificial
  Synthetic oligonucleotide
tgacttgcagcgccgcattaacggctacgcagcgagtcattcaaacatgaaacaacgttc

SEQ ID NO: 118520 - DNA, 53 bp, Artificial
  Synthetic oligonucleotide
tggactatctaggcgccaaacggaagagtactctctggatcgtatccgtcccc

SEQ ID NO: 118521 - DNA, 60 bp, Artificial
  Synthetic oligonucleotide
ccccatgctcattcaagcgaaacaaactcatcgacttgccttcttgcggaggcaggtgtg

SEQ ID NO: 118522 - DNA, 55 bp, Artificial
  Synthetic oligonucleotide
tacatctcttagaagcaaaactccgagaaatctccggcctaagcaactgtgaaga

SEQ ID NO: 118523 - DNA, 60 bp, Artificial
  Synthetic oligonucleotide
agaacaaatgctaacattgaaattgaggtaagagaaactatctaagagaaacttaaccaa

SEQ ID NO: 118524 - DNA, 60 bp, Artificial
  Synthetic oligonucleotide
acttaaccaaaatggcagatctatcactagctcgtcaacgcctggccaatgagtcagtca

SEQ ID NO: 118525 - DNA, 66 bp, Artificial
  Synthetic oligonucleotide
gctaacattgaaattgaggtaagagaaactatctaagagaaacttaaccaaaatggcagatctatc

SEQ ID NO: 118526 - DNA, 60 bp, Artificial
  Synthetic oligonucleotide
gagtcagtcaacgaagcaccccgcgcatatgatgcgaacatggaacttgtcgttgtcgcc

SEQ ID NO: 118527 - DNA, 60 bp, Artificial
  Synthetic oligonucleotide
cagatctatcactagctcgtcaacgcctggccaatgagtcagtcaacgaagcaccccgcg

SEQ ID NO: 118528 - DNA, 60 bp, Artificial
  Synthetic oligonucleotide
tcttcggaattgatgtgggacatcgacgacggacgtcaactgtctgaatatgacttgcag

SEQ ID NO: 118529 - DNA, 60 bp, Artificial
  Synthetic oligonucleotide
gcaccccgcgcatatgatgcgaacatggaacttgtcgttgtcgccgaatacccggaggga

SEQ ID NO: 118530 - DNA, 60 bp, Artificial
  Synthetic oligonucleotide
ggtcctactgccccggaacatgcataacggaattaacctttatgctggcccgctgctcgg

SEQ ID NO: 118531 - DNA, 60 bp, Artificial
  Synthetic oligonucleotide
gatctcggtcctactgccccggaacatgcataacggaattaacctttatgctggcccgct

SEQ ID NO: 118532 - DNA, 60 bp, Artificial
  Synthetic oligonucleotide
tgtgaaaaggcttggttcgttgagctggacggctgcccggtgtcgatctcggtcctactg

SEQ ID NO: 118533 - DNA, 60 bp, Artificial
  Synthetic oligonucleotide
ggcaggtgtgaaaaggcttggttcgttgagctggacggctgcccggtgtcgatctcggtc

SEQ ID NO: 118534 - DNA, 60 bp, Artificial
  Synthetic oligonucleotide
ggtttgacaactctcctgaattgtatgcttacttggctgagaactacggcatgaccatgc

SEQ ID NO: 118535 - DNA, 60 bp, Artificial
  Synthetic oligonucleotide
tgcactcaatggtttgacaactctcctgaattgtatgcttacttggctgagaactacggc

SEQ ID NO: 118536 - DNA, 60 bp, Artificial
  Synthetic oligonucleotide
ggcccgctgctcggtaatgtgatcgaaggtcttgacgtcgttccagagtgcactcaatgg

SEQ ID NO: 118537 - DNA, 60 bp, Artificial
  Synthetic oligonucleotide
ctggcccgctgctcggtaatgtgatcgaaggtcttgacgtcgttccagagtgcactcaat

SEQ ID NO: 118538 - DNA, 60 bp, Artificial
  Synthetic oligonucleotide
cggcatgaccatgcttgatcagttttctgttgtccactaggtgatacatctcttagaagc

SEQ ID NO: 118539 - DNA, 60 bp, Artificial
  Synthetic oligonucleotide
gaactacggcatgaccatgcttgatcagttttctgttgtccactaggtgatacatctctt

SEQ ID NO: 118540 - DNA, 60 bp, Artificial
  Synthetic oligonucleotide
ggtcaccatcattcttggtccactgtgggcgtcaactccccatctcgggtgtccctttcc

SEQ ID NO: 118541 - DNA, 60 bp, Artificial
  Synthetic oligonucleotide
cgaatcgcagaccacgaattcagctggcaacacacgagaggcattggatgagttgcgtcg

SEQ ID NO: 118542 - DNA, 60 bp, Artificial
  Synthetic oligonucleotide
cgacggactggtctacgaaagatcctggggtttacacgtttggtggttgcacggttgtta

SEQ ID NO: 118543 - DNA, 60 bp, Artificial
  Synthetic oligonucleotide
gatccaaacggtccctcatcttaccttccgttccaattcctgttccgtgcatctcaagac

SEQ ID NO: 118544 - DNA, 60 bp, Artificial
  Synthetic oligonucleotide
cgtgcaatgcgtggtcgatcgggatacaagagcgcacgtgtaacgacggactggtctacg

SEQ ID NO: 118545 - DNA, 60 bp, Artificial
  Synthetic oligonucleotide
ccagtcgtttacatctccacccattccatctacggcaaagtatgtttgggaacgcgatac

SEQ ID NO: 118546 - DNA, 60 bp, Artificial
  Synthetic oligonucleotide
cagactttgatgggccagtagttaagatcttatacgaccactacatctcgacccctgcat

SEQ ID NO: 118547 - DNA, 60 bp, Artificial
  Synthetic oligonucleotide
cgtcgttagcttattcaaaatgtccgctagtattaaaagcgatgccactccgcaacagag

SEQ ID NO: 118548 - DNA, 60 bp, Artificial
  Synthetic oligonucleotide
tgctttacaacatcgccactatacgaatggatctacgacatatgccgatcatacccatgc

SEQ ID NO: 118549 - DNA, 60 bp, Artificial
  Synthetic oligonucleotide
acaatttttgaagagctcaagccttgtcatggagacctcctatgcgcatcacctttcgga

SEQ ID NO: 118550 - DNA, 60 bp, Artificial
  Synthetic oligonucleotide
tagaacagtcgggtatgggtttaatgggcacaacacacttacaggcagcgccgaaagaac

SEQ ID NO: 118551 - DNA, 58 bp, Artificial
  Synthetic oligonucleotide
gtccctttccaatgatcaaatccacatctggtgtctttcccccgtccgggccgtacac

SEQ ID NO: 118552 - DNA, 60 bp, Artificial
  Synthetic oligonucleotide
tcgtgtactcgtcactttattccactacctttaccagtgccaataccgatccagtcgttt

SEQ ID NO: 118553 - DNA, 60 bp, Artificial
  Synthetic oligonucleotide
cattgggcaaatccatttgttgctaaatacgttgagctaatgaaagaggagatgtcaacg

SEQ ID NO: 118554 - DNA, 60 bp, Artificial
  Synthetic oligonucleotide
gcgatacgaacagaatgtcggttgcaccaggtagtgacgtttatctcgacaatttcgacg

SEQ ID NO: 118555 - DNA, 60 bp, Artificial
  Synthetic oligonucleotide
catcaatacgattttcaggtttgagggcttagatctcaatattagtggcgtatcacgagc

SEQ ID NO: 118556 - DNA, 60 bp, Artificial
  Synthetic oligonucleotide
tacctgaccccttatcacaacgctccggaccgcccgcttcttcgcaagtacggaagacag

SEQ ID NO: 118557 - DNA, 60 bp, Artificial
  Synthetic oligonucleotide
ggctgcgatcatcggtgagtggaacagccgttcgcgcaacatcattcacactgctaacgc

SEQ ID NO: 118558 - DNA, 60 bp, Artificial
  Synthetic oligonucleotide
atgtgaacgattcatgtccgaggttatgtgcgaatttcttaaacaacgcgcgtatggcaa

SEQ ID NO: 118559 - DNA, 60 bp, Artificial
  Synthetic oligonucleotide
caacgcgatatgttttgagctatgcgaagagttcgagtacaggatgaacatgctcggctt

SEQ ID NO: 118560 - DNA, 60 bp, Artificial
  Synthetic oligonucleotide
cgtatggcaacacaccccacatgtttcctgacaggctaatcacattcacgtcggagcgcg

SEQ ID NO: 118561 - DNA, 60 bp, Artificial
  Synthetic oligonucleotide
tgatgtttccggaaaagtacttgactgggtccggttggtcagctattgggtctggtcgcc

SEQ ID NO: 118562 - DNA, 60 bp, Artificial
  Synthetic oligonucleotide
tggtcagctattgggtctggtcgccgtggtgtaagacatgtaagactttgagccggggtg

SEQ ID NO: 118563 - DNA, 60 bp, Artificial
  Synthetic oligonucleotide
agttagacatcttaaacacgcagacattctatcttggtatggcacggcattgatgtttcc

SEQ ID NO: 118564 - DNA, 60 bp, Artificial
  Synthetic oligonucleotide
gaagcttcctggggacgcgcgtacatacgttgcggtttatcgtcaggcttctcgtgttgg

SEQ ID NO: 118565 - DNA, 60 bp, Artificial
  Synthetic oligonucleotide
gcaggaactagagaagactgcaacttcagacttgagcggcgttgagtggttctcgtttgc

SEQ ID NO: 118566 - DNA, 60 bp, Artificial
  Synthetic oligonucleotide
ctggaagaggagcgctgatgcgatgcttgacaaacggcgtgtggatttggctcgagttgg

SEQ ID NO: 118567 - DNA, 60 bp, Artificial
  Synthetic oligonucleotide
gggaagaatgttggcgatatacgcgacatggtcaattctcttaatgctacggcgctacca

SEQ ID NO: 118568 - DNA, 60 bp, Artificial
  Synthetic oligonucleotide
acgtagctatactgttgaggtggggagttgttcacgggttgcgagtttctgctctcatgc

SEQ ID NO: 118569 - DNA, 60 bp, Artificial
  Synthetic oligonucleotide
gctctcatgccggacatggtgcaacagcgtgaaaaactaagaattcccactgttgatcac

SEQ ID NO: 118570 - DNA, 60 bp, Artificial
  Synthetic oligonucleotide
tccgacgagtctctgatacattcactgatgacgcccggtttttagaggggatgagacgca

SEQ ID NO: 118571 - DNA, 60 bp, Artificial
  Synthetic oligonucleotide
tgcgtgcgcttggattggttcagtcaactctgttaactttgttatcgtaccgttgtacca

SEQ ID NO: 118572 - DNA, 60 bp, Artificial
  Synthetic oligonucleotide
ggatgagttgcgtcgagagtacgttgaagagtatcctggtattgaagggcagctacttgc

SEQ ID NO: 118573 - DNA, 60 bp, Artificial
  Synthetic oligonucleotide
caagtgttggagttgatggatcaggttagtttggacaacatctcggatatcgtttcgtcg

SEQ ID NO: 118574 - DNA, 60 bp, Artificial
  Synthetic oligonucleotide
gcatgttcacgcttaaggttacggggggtgagtttggcgaggcttgtgtttcatcgctcg

SEQ ID NO: 118575 - DNA, 60 bp, Artificial
  Synthetic oligonucleotide
ggtccttacagaagaccaagttggcgcatggatcgttttgcagatggagaaggaaaccta

SEQ ID NO: 118576 - DNA, 60 bp, Artificial
  Synthetic oligonucleotide
gttccaatcagtcatcgacggccatattgcagttgacgttaacgatccaaacggtccctc

SEQ ID NO: 118577 - DNA, 60 bp, Artificial
  Synthetic oligonucleotide
atgagacgcaacgcgatggcaggatctcgaacacagcagcaacgtcggcgtcgtattata

SEQ ID NO: 118578 - DNA, 60 bp, Artificial
  Synthetic oligonucleotide
acacactggggcaccgttatatctcacctcacgttttcccacgaccatctcgagaaggca

SEQ ID NO: 118579 - DNA, 60 bp, Artificial
  Synthetic oligonucleotide
ccgttgtaccacatgtatcaagcaaggattccgcgaacacatctgctttacaacatcgcc

SEQ ID NO: 118580 - DNA, 60 bp, Artificial
  Synthetic oligonucleotide
gcagtacaatatgcctcaagttgttgtcatttacagtctatacgcctcgcatggagtcac

SEQ ID NO: 118581 - DNA, 60 bp, Artificial
  Synthetic oligonucleotide
aagaagcttagatgtgcgaggtattgaagagagaagatatgaacagcagtacaatatgcc

SEQ ID NO: 118582 - DNA, 60 bp, Artificial
  Synthetic oligonucleotide
tatccaaagtttttcctcggcagcagggacggcatttcggaatcgtgtcgacgaacgttt

SEQ ID NO: 118583 - DNA, 60 bp, Artificial
  Synthetic oligonucleotide
cgcctcgcatggagtcacaatccttagggatggatacttttccgacgccgttcgtactag

SEQ ID NO: 118584 - DNA, 60 bp, Artificial
  Synthetic oligonucleotide
ctcaacacaccaccattggaagcggcgttctagagtctcttaaacgcgatcttgagaatg

SEQ ID NO: 118585 - DNA, 60 bp, Artificial
  Synthetic oligonucleotide
caatgaatgatggatcgttattccgcggcagtgttcacgaagataagaagcttcctgggg

SEQ ID NO: 118586 - DNA, 60 bp, Artificial
  Synthetic oligonucleotide
cgctcgaagcgtgcgttgcagtctccaggacaccacttcgacattttacggatgtgcacg

SEQ ID NO: 118587 - DNA, 60 bp, Artificial
  Synthetic oligonucleotide
cggatgtgcacgagtttcttttggcaagtgaagtccgatacgtcccgacgcagaccgaat

SEQ ID NO: 118588 - DNA, 60 bp, Artificial
  Synthetic oligonucleotide
gactccccactagcttcatcgaaaccgggtttggccatatatgtcctccgcactcacttc

SEQ ID NO: 118589 - DNA, 60 bp, Artificial
  Synthetic oligonucleotide
cctccgcactcacttcagtcgcatgtcctcagtgtggttgggttgcctcaaatgtcaatg

SEQ ID NO: 118590 - DNA, 60 bp, Artificial
  Synthetic oligonucleotide
atcaatacggtgtaacaccatttatatcagcggacatcatctgcgaaggcgccgcttatc

SEQ ID NO: 118591 - DNA, 60 bp, Artificial
  Synthetic oligonucleotide
cgatctctctttcaaccgagagccagatacacatggtatgggtaaaatcaggtcttgtct

SEQ ID NO: 118592 - DNA, 60 bp, Artificial
  Synthetic oligonucleotide
ttcgcatcctcgagcagacttactgatgtgccagcactcaccaaaccgacgttcccgcaa

SEQ ID NO: 118593 - DNA, 60 bp, Artificial
  Synthetic oligonucleotide
ccaggcgtaaaccgaatatcgctacattcgcaactcgaaatcaccaggaaaatactacgg

SEQ ID NO: 118594 - DNA, 60 bp, Artificial
  Synthetic oligonucleotide
cgccaaagttacgatctctctttcaaccgagagccagatacacatggtatgggtaaaatc

SEQ ID NO: 118595 - DNA, 60 bp, Artificial
  Synthetic oligonucleotide
cccgcaatccgatgcgaagttaatcgagtctactcctctacctaatgacgaggcttctca

SEQ ID NO: 118596 - DNA, 60 bp, Artificial
  Synthetic oligonucleotide
acgaggcttctcatgtcgcatcatttcaactcgttacatggaaagatggagcgttaagca

SEQ ID NO: 118597 - DNA, 60 bp, Artificial
  Synthetic oligonucleotide
cgagcagacttactgatgtgccagcactcaccaaaccgacgttcccgcaatccgatgcga

SEQ ID NO: 118598 - DNA, 60 bp, Artificial
  Synthetic oligonucleotide
gttcccgcaatccgatgcgaagttaatcgagtctactcctctacctaatgacgaggcttc

SEQ ID NO: 118599 - DNA, 60 bp, Artificial
  Synthetic oligonucleotide
cctctcgtcccgaacgtgcgcaaaacgaagcttccgcaaatcaaatcatgccaacgttgg

SEQ ID NO: 118600 - DNA, 56 bp, Artificial
  Synthetic oligonucleotide
aaatcaaatcatgccaacgttggttaagcatattgcgaatgacgatctagatatgg

SEQ ID NO: 118601 - DNA, 60 bp, Artificial
  Synthetic oligonucleotide
cgaggcttctcatgtcgcatcatttcaactcgttacatggaaagatggagcgttaagcat

SEQ ID NO: 118602 - DNA, 60 bp, Artificial
  Synthetic oligonucleotide
gggttagatttaagggtggtgggtgccttacgtgcgtgtccctgtggaattagtatgggt

SEQ ID NO: 118603 - DNA, 60 bp, Artificial
  Synthetic oligonucleotide
gggtggtgggtgccttacgtgcgtgtccctgtggaattagtatgggtggtgggtagtata

SEQ ID NO: 118604 - DNA, 60 bp, Artificial
  Synthetic oligonucleotide
gaatagtgtcgctgatatgtgtaggataactgttatgagattgtggttatgggttagatt

SEQ ID NO: 118605 - DNA, 60 bp, Artificial
  Synthetic oligonucleotide
gtgcaattagcttcattaatcagtgtgaagatacattcaaaagtggcacgaacttgaaca

SEQ ID NO: 118606 - DNA, 60 bp, Artificial
  Synthetic oligonucleotide
agcgtgatggtgtcctctcgtcccgaacgtgcgcaaaacgaagcttccgcaaatcaaatc

SEQ ID NO: 118607 - DNA, 60 bp, Artificial
  Synthetic oligonucleotide
ataccaaacccggaagccgcattgatttattgatggttaaccatctcaagaaatttaacc

SEQ ID NO: 118608 - DNA, 60 bp, Artificial
  Synthetic oligonucleotide
gcgaaggcgccgcttatcgttcaattgatgtcgaaaactatgcaatgaacagtaatcatc

SEQ ID NO: 118609 - DNA, 60 bp, Artificial
  Synthetic oligonucleotide
atcatctgcgaaggcgccgcttatcgttcaattgatgtcgaaaactatgcaatgaacagt

SEQ ID NO: 118610 - DNA, 60 bp, Artificial
  Synthetic oligonucleotide
tctggtatcctacgctccattcttcgtgccaaatgataccaaacccggaagccgcattga

SEQ ID NO: 118611 - DNA, 60 bp, Artificial
  Synthetic oligonucleotide
aatgaacagtaatcatctggtatcctacgctccattcttcgtgccaaatgataccaaacc

SEQ ID NO: 118612 - DNA, 60 bp, Artificial
  Synthetic oligonucleotide
gaaattcgtactgatcggacgtttgtgttatgggcaaactacatcaccacctcctattca

SEQ ID NO: 118613 - DNA, 60 bp, Artificial
  Synthetic oligonucleotide
gcttcattaatcagtgtgaagatacattcaaaagtggcacgaacttgaacaaggagatgt

SEQ ID NO: 118614 - DNA, 60 bp, Artificial
  Synthetic oligonucleotide
agtaaatcccaggcgtaaaccgaatatcgctacattcgcaactcgaaatcaccaggaaaa

SEQ ID NO: 118615 - DNA, 60 bp, Artificial
  Synthetic oligonucleotide
ctcctattcaattatatcaatacggtgtaacaccatttatatcagcggacatcatctgcg

SEQ ID NO: 118616 - DNA, 60 bp, Artificial
  Synthetic oligonucleotide
cattgagtaacgtccgtgcccatgttgggctggcttggccggccatcttgcgaaattgtt

SEQ ID NO: 118617 - DNA, 60 bp, Artificial
  Synthetic oligonucleotide
cattgagtaacgtccgcgcccatgttgggctggcttggccggccatcttgcgaaattgct

SEQ ID NO: 118618 - DNA, 60 bp, Artificial
  Synthetic oligonucleotide
cgtccgcgcccatgttgggctggcttggccggccatcttgcgaaattgtttgatacacac

SEQ ID NO: 118619 - DNA, 60 bp, Artificial
  Synthetic oligonucleotide
cgtccgtgcccatgttgggctggcttggccggccatcttgcgaaattgtttaatacacac

SEQ ID NO: 118620 - DNA, 60 bp, Artificial
  Synthetic oligonucleotide
ccgcgcccatgttgggctggcttggccggccatcttgcgaaattgcttgatacacacttc

SEQ ID NO: 118621 - DNA, 60 bp, Artificial
  Synthetic oligonucleotide
cgaaattgtttgatacacacttcatcccatcttgggttcatgaagtttatgattgatatt

SEQ ID NO: 118622 - DNA, 60 bp, Artificial
  Synthetic oligonucleotide
cacacttcatcccatcttgggtttatgaagtttatgattgatattgctactacctggaaa

SEQ ID NO: 118623 - DNA, 60 bp, Artificial
  Synthetic oligonucleotide
cacacttcatcccatcttgggttcatgaagtttatgattgatattgctactacctggaaa

SEQ ID NO: 118624 - DNA, 51 bp, Artificial
  Synthetic oligonucleotide
gattgatattgctactacctggaaagttggtgctttcactcttctgggtag

SEQ ID NO: 118625 - DNA, 60 bp, Artificial
  Synthetic oligonucleotide
gattgatattgctactacctggaaagttggtgctttcactcttctgggtagcgttggtga

SEQ ID NO: 118626 - DNA, 60 bp, Artificial
  Synthetic oligonucleotide
gatccagaagtacattaatttgtacgaagattcgcagttaccgcattttcggcaagcggc

SEQ ID NO: 118627 - DNA, 60 bp, Artificial
  Synthetic oligonucleotide
atcatgtctgcatggattcttcagaatgttgattcgtgtattaggttgcttgtaaacaac

SEQ ID NO: 118628 - DNA, 60 bp, Artificial
  Synthetic oligonucleotide
gtgtcctccgtgatgggtaagctccaagatggaatcgccatcaagcggatcaacgacgcg

SEQ ID NO: 118629 - DNA, 60 bp, Artificial
  Synthetic oligonucleotide
gtgtcctccgtgatgggtaagctccaagatggaatcgccattaagcggatcaacgacgcg

SEQ ID NO: 118630 - DNA, 60 bp, Artificial
  Synthetic oligonucleotide
tgtgtcctccgtgatgggtaagctccaagatggaatcgccattaagcggatcaacgacgc

SEQ ID NO: 118631 - DNA, 60 bp, Artificial
  Synthetic oligonucleotide
ggcaggcggctttgtcctacactcaggattgggatgttgatggcggtgtgcccgctgcac

SEQ ID NO: 118632 - DNA, 60 bp, Artificial
  Synthetic oligonucleotide
ggcgagcggctttgtcctacactcaggattgggatgttgatggcggtgtgcccgctgcac

SEQ ID NO: 118633 - DNA, 60 bp, Artificial
  Synthetic oligonucleotide
cattgagtaacgtccgcgcccatgttgggctggcttggccggccatcttgcgaaattgtt

SEQ ID NO: 118634 - DNA, 60 bp, Artificial
  Synthetic oligonucleotide
ggcaagcggctttgtcctacattcaggactgggatgttgatggcggtgtgcccgctgcac

SEQ ID NO: 118635 - DNA, 60 bp, Artificial
  Synthetic oligonucleotide
ttgttactccataatgatgttatcatgtctgcatggattcttcagaatgttgattcgtgt

SEQ ID NO: 118636 - DNA, 60 bp, Artificial
  Synthetic oligonucleotide
atttgtcactccataatggtgttatcgtgtctgcatggattcttcagaatgttgattcgt

SEQ ID NO: 118637 - DNA, 60 bp, Artificial
  Synthetic oligonucleotide
gatgttatcatgtctgcatggattcttcagaatgttgattcgtgtataggttgcttgtaa

SEQ ID NO: 118638 - DNA, 60 bp, Artificial
  Synthetic oligonucleotide
atggtgttatcgtgtctgcatggattcttcagaatgttgattcgtgtactaggttgcttg

SEQ ID NO: 118639 - DNA, 60 bp, Artificial
  Synthetic oligonucleotide
cctacactcaggattgggatgttgatggcggtgtgcccgctgcactcccacagcctgata

SEQ ID NO: 118640 - DNA, 60 bp, Artificial
  Synthetic oligonucleotide
aagaaatgagacgtcagctggagatgattgataaattaactactcgtgaaattgaacaag

SEQ ID NO: 118641 - DNA, 60 bp, Artificial
  Synthetic oligonucleotide
gatgagacgtcagctggagatgattgataaattaactactcgtgaaattgaacaagttga

SEQ ID NO: 118642 - DNA, 60 bp, Artificial
  Synthetic oligonucleotide
aattgtaaaagagatgagacgtcagctggagatgattgataaattaactactcgtgaaat

SEQ ID NO: 118643 - DNA, 60 bp, Artificial
  Synthetic oligonucleotide
ataaattaactactcgtgaaattgaacaagttgaattgcttaaacgtatacatgataact

SEQ ID NO: 118644 - DNA, 55 bp, Artificial
  Synthetic oligonucleotide
ttgataaattaactactcgtgaaattgaacaagttgaattgcttaaacgtataca

SEQ ID NO: 118645 - DNA, 54 bp, Artificial
  Synthetic oligonucleotide
ttgataaattaactactcgtgaaattgaacaagttgaattgcttaaacgtatac

SEQ ID NO: 118646 - DNA, 60 bp, Artificial
  Synthetic oligonucleotide
ataaattaactactcgtgaaattgaacaagttgaattgcttaaacgtatacatgacaact

SEQ ID NO: 118647 - DNA, 51 bp, Artificial
  Synthetic oligonucleotide
taaattaactactcgtgaaattgaacaagttgaattgcttaaacgtataca

SEQ ID NO: 118648 - DNA, 60 bp, Artificial
  Synthetic oligonucleotide
caaacgagattgcgagaatgagtggggaaactggaacatgggggcctgaccgacaaccat

SEQ ID NO: 118649 - DNA, 60 bp, Artificial
  Synthetic oligonucleotide
gatgcattatcactctatgctatgcagaaaaggttcacttcgctgggttcgcggcacctg

SEQ ID NO: 118650 - DNA, 60 bp, Artificial
  Synthetic oligonucleotide
tttacttacatgactattcatattatactaataatgaaatacggactgaccaacattgga

SEQ ID NO: 118651 - DNA, 60 bp, Artificial
  Synthetic oligonucleotide
tccatcttctcagcgccgggcctgaccaacctggtgtgacgtgggacaggcatcattcat

SEQ ID NO: 118652 - DNA, 60 bp, Artificial
  Synthetic oligonucleotide
tgcgtcaaattaagaagcatgtaaacgagcaagtattacccaaaatgcgtgtagagttga

SEQ ID NO: 118653 - DNA, 60 bp, Artificial
  Synthetic oligonucleotide
taacctgaggacagtaggtagagtggcgccccaaggtttgcgtcgtgcagggtggttgac

SEQ ID NO: 118654 - DNA, 60 bp, Artificial
  Synthetic oligonucleotide
tcgaaatgccattaacctgaggacagtaggtagagtggcgccccaaggtttgcgtcgtgc

SEQ ID NO: 118655 - DNA, 60 bp, Artificial
  Synthetic oligonucleotide
aagcgacgaagtgagtttagtgccttatcaggagcaggtgagaccgcccagttatgtgcc

SEQ ID NO: 118656 - DNA, 57 bp, Artificial
  Synthetic oligonucleotide
aacccttttgtgcggctttcggtataataaatttagccgcaacgatggtgatgatgt

SEQ ID NO: 118657 - DNA, 60 bp, Artificial
  Synthetic oligonucleotide
tgcattcgcatcgtacgcagaagcgtttcgtgatgatgtgagattgagacagattaaacg

SEQ ID NO: 118658 - DNA, 60 bp, Artificial
  Synthetic oligonucleotide
gaaacaatcgtataatgacgcggtgaggatgagttttacagaattttcatcagtcccgct

SEQ ID NO: 118659 - DNA, 60 bp, Artificial
  Synthetic oligonucleotide
tccggatcggtgggaatggcttattgattacatggataggaagcatacatgtcagctgtg

SEQ ID NO: 118660 - DNA, 60 bp, Artificial
  Synthetic oligonucleotide
gattcagctgatcaatttcttaaggatggatgattttgcgaagcattttaacaggtatgc

SEQ ID NO: 118661 - DNA, 60 bp, Artificial
  Synthetic oligonucleotide
cgcctatgtgtgagggcagttatggcacggcataacgctcacacatgcacgtgtcattgt

SEQ ID NO: 118662 - DNA, 60 bp, Artificial
  Synthetic oligonucleotide
cgttcagacacatcgtaatgcagtcaagagatcgagtcttacgagtagatacctactatg

SEQ ID NO: 118663 - DNA, 60 bp, Artificial
  Synthetic oligonucleotide
gttcccagtatttcgttcagacacatcgtaatgcagtcaagagatcgagtcttacgagta

SEQ ID NO: 118664 - DNA, 60 bp, Artificial
  Synthetic oligonucleotide
gcaatgtaagaggttgagctgccgtcgactgtcctcggaagcggcggagttctttacagt

SEQ ID NO: 118665 - DNA, 60 bp, Artificial
  Synthetic oligonucleotide
gcgatgtcaaatacaacgggtgctacgcaaacacaaaaagcggagaaggctgcattcgca

SEQ ID NO: 118666 - DNA, 60 bp, Artificial
  Synthetic oligonucleotide
gattggcgatccgatgattcttggctaaacaccttcatcttcacagcgccgggcctgacc

SEQ ID NO: 118667 - DNA, 60 bp, Artificial
  Synthetic oligonucleotide
gggcgtcttgtgcctcgttcgttgatttagttagacaagtacggcctggtcgaccgtacg

SEQ ID NO: 118668 - DNA, 60 bp, Artificial
  Synthetic oligonucleotide
ataatacatgcaagattaacggtgagttcgacgccgttagtttctgtggactaaaattga

SEQ ID NO: 118669 - DNA, 60 bp, Artificial
  Synthetic oligonucleotide
gtcttgtgcctcgtccgtttgtttggttagacaagtacggcctggtcgaccgtacgatgc

SEQ ID NO: 118670 - DNA, 60 bp, Artificial
  Synthetic oligonucleotide
catgtcgaagctttcaactattcctagaacgcgatcgcaggtcgttggattgacttccaa

SEQ ID NO: 118671 - DNA, 60 bp, Artificial
  Synthetic oligonucleotide
gagagaagcttgaaccagcaaattgatatgattaagaaggaagtgatgaagaaacaatcg

SEQ ID NO: 118672 - DNA, 60 bp, Artificial
  Synthetic oligonucleotide
ctggtgcaacgcaaacacaaaaagcggagaaggctgcattcgcatcgtacgcggaagcgt

SEQ ID NO: 118673 - DNA, 60 bp, Artificial
  Synthetic oligonucleotide
agatatcatcctgaaaggaccggagctcagcgaagatgaggatgaaagagcttatgctac

SEQ ID NO: 118674 - DNA, 60 bp, Artificial
  Synthetic oligonucleotide
ccttccgcttgccgcgattgacacggcccgcagtttctgaatctaagccagacctcggga

SEQ ID NO: 118675 - DNA, 60 bp, Artificial
  Synthetic oligonucleotide
ccaacgttccgttgcaagtagcgccgtgctgtatcgacttggactccctcgtcaatgtgc

SEQ ID NO: 118676 - DNA, 60 bp, Artificial
  Synthetic oligonucleotide
gacgtcaactacccactgtcagccttccacggtcacctgacgcgcgctggccaaaattcc

SEQ ID NO: 118677 - DNA, 60 bp, Artificial
  Synthetic oligonucleotide
ccgaactcgcatacctaaagacactctcacgatcttcgctcccgcctggtttaaatctca

SEQ ID NO: 118678 - DNA, 60 bp, Artificial
  Synthetic oligonucleotide
gttttatgcacacacgtcaggatgattacagtcgtcttcatcccaggacacggcttcaac

SEQ ID NO: 118679 - DNA, 60 bp, Artificial
  Synthetic oligonucleotide
ctcgggaccgaggcgactctagttcatgtggacttgacgttgaacgtggacgtgcgcgat

SEQ ID NO: 118680 - DNA, 60 bp, Artificial
  Synthetic oligonucleotide
cggcttcaactggaacgactccactctacttaaatacattgacacccgactttaccgaac

SEQ ID NO: 118681 - DNA, 60 bp, Artificial
  Synthetic oligonucleotide
gattgacacggcccgcagtttctgaatctaagccagacctcgggaccgaggcgactctag

SEQ ID NO: 118682 - DNA, 60 bp, Artificial
  Synthetic oligonucleotide
gagacagtgaccgactcggacgatctaggtgactcattggaccccactttcgagacccaa

SEQ ID NO: 118683 - DNA, 60 bp, Artificial
  Synthetic oligonucleotide
agccgtcattccagatccagagaccgtgttccccaggagacagtgaccgactcggacgat

SEQ ID NO: 118684 - DNA, 60 bp, Artificial
  Synthetic oligonucleotide
cgagacccaaatcatggctctgtgggagaagctgggcacggacgtcctcgaacaaggtgt

SEQ ID NO: 118685 - DNA, 60 bp, Artificial
  Synthetic oligonucleotide
agctgatgaacttgacattagacgttaaatatcccctccgcaccgacgatggaaacaccg

SEQ ID NO: 118686 - DNA, 60 bp, Artificial
  Synthetic oligonucleotide
catgacgtcatgcttcccgcacaacgtgctcggtcgagcctcatctctcaaaggggtcgc

SEQ ID NO: 118687 - DNA, 60 bp, Artificial
  Synthetic oligonucleotide
cttgagcattatgttgggactcatggtatcgaggaagtgttcgcctggtgtcaacgtctg

SEQ ID NO: 118688 - DNA, 60 bp, Artificial
  Synthetic oligonucleotide
aaggggtcgctcactagtgtacgtccacactccctacgagatcgtctcggccaacgttcc

SEQ ID NO: 118689 - DNA, 60 bp, Artificial
  Synthetic oligonucleotide
tcccgcacaacgtgctcggtcgagcctcatctctcaaaggggtcgctcactagtgtacgt

SEQ ID NO: 118690 - DNA, 60 bp, Artificial
  Synthetic oligonucleotide
catgggtgttgcgctcgcccctcccgaaggggtcctacaaatctaccttcatcgacgtga

SEQ ID NO: 118691 - DNA, 60 bp, Artificial
  Synthetic oligonucleotide
cgtaccttcatgctggacttgcccgacttaacgattgacgtcaactacccactgtcagcc

SEQ ID NO: 118692 - DNA, 60 bp, Artificial
  Synthetic oligonucleotide
ccaagtcgttcgctaaatggctgctcagtagccccggcgccaaccagtgggacataccac

SEQ ID NO: 118693 - DNA, 60 bp, Artificial
  Synthetic oligonucleotide
atcgacgtgatttcagccgtcattccagatccagagaccgtgttccccaggagacagtga

SEQ ID NO: 118694 - DNA, 60 bp, Artificial
  Synthetic oligonucleotide
atttgaccaaccctcgtaccttcatgctggacttgcccgacttaacgattgacgtcaact

SEQ ID NO: 118695 - DNA, 60 bp, Artificial
  Synthetic oligonucleotide
ggaaacaccgtcccttggtttctcgtcctggtactactctcagatggtgtccacctcgcc

SEQ ID NO: 118696 - DNA, 60 bp, Artificial
  Synthetic oligonucleotide
cctactggatcattgctaccgcctgatgggcgctacgaccacgcctcagttcgctggcat

SEQ ID NO: 118697 - DNA, 60 bp, Artificial
  Synthetic oligonucleotide
tcgctggcatctactaccgttcgttattcgccccatggctcgagctggcctcaaaccccg

SEQ ID NO: 118698 - DNA, 60 bp, Artificial
  Synthetic oligonucleotide
ctccgcaccgacgatggaaacaccgtcccttggtttctcgtcctggtactactctcagat

SEQ ID NO: 118699 - DNA, 55 bp, Artificial
  Synthetic oligonucleotide
ctggcaactgatgtgtccgcctactccggttttatcaatcagtccacgctggaat

SEQ ID NO: 118700 - DNA, 59 bp, Artificial
  Synthetic oligonucleotide
ggggaaagccccccctgatctgtacgacgtcatcattcccctgcttgggccggatgcta

SEQ ID NO: 118701 - DNA, 60 bp, Artificial
  Synthetic oligonucleotide
cgctcgcccctcccgaaggggtcctacaaatctaccttcatcgacgtgatttcagccgtc

SEQ ID NO: 118702 - DNA, 60 bp, Artificial
  Synthetic oligonucleotide
ggcgccaaccagtgggacataccacgatggaaacttgacttggcagctgcggggaaagcc

SEQ ID NO: 118703 - DNA, 60 bp, Artificial
  Synthetic oligonucleotide
gcctggtgtcaacgtctgacgagtcctctcacccatcgtttcatcctacttccgcgaccc

SEQ ID NO: 118704 - DNA, 60 bp, Artificial
  Synthetic oligonucleotide
tcctacttccgcgacccaagtcgttcgctaaatggctgctcagtagccccggcgccaacc

SEQ ID NO: 118705 - DNA, 60 bp, Artificial
  Synthetic oligonucleotide
agctccagccctggtgggaagtgactctcaacgcgctattgaaccctcatgccgtcacag

SEQ ID NO: 118706 - DNA, 60 bp, Artificial
  Synthetic oligonucleotide
attgctaccgcctgatgggcgctacgaccacgcctcagttcgctggcatctactaccgtt

SEQ ID NO: 118707 - DNA, 60 bp, Artificial
  Synthetic oligonucleotide
accctcatgccgtcacagtcaggtccgggacgataaaagactccatgggtgttgcgctcg

SEQ ID NO: 118708 - DNA, 60 bp, Artificial
  Synthetic oligonucleotide
cgtcataagcgcgttggtggcgtgactggccaagtcctactggatcattgctaccgcctg

SEQ ID NO: 118709 - DNA, 60 bp, Artificial
  Synthetic oligonucleotide
tcaaaccccgcacccacccttcacatccacctcgagaccgaggtctcagcccataccctg

SEQ ID NO: 118710 - DNA, 60 bp, Artificial
  Synthetic oligonucleotide
acccttcacatccacctcgagaccgaggtctcagcccataccctgcgtgagattggttgg

SEQ ID NO: 118711 - DNA, 60 bp, Artificial
  Synthetic oligonucleotide
agatggtgtccacctcgccggcacgaagcgccccgtcctgcttcagacgtcaattgctga

SEQ ID NO: 118712 - DNA, 60 bp, Artificial
  Synthetic oligonucleotide
tactaccgttcgttattcgccccatggctcgagctggcctcaaaccccgcacccaccctt

SEQ ID NO: 118713 - DNA, 60 bp, Artificial
  Synthetic oligonucleotide
ggcaagcgatcggccgtacacataactatcgttcccaatttgaccaaccctcgtaccttc

SEQ ID NO: 118714 - DNA, 60 bp, Artificial
  Synthetic oligonucleotide
agacgtcaattgctgagctccagccctggtgggaagtgactctcaacgcgctattgaacc

SEQ ID NO: 118715 - DNA, 60 bp, Artificial
  Synthetic oligonucleotide
atttccgtgcgcggtccagtgacctggctgacgacttcatcgcccgtgggggagctgtga

SEQ ID NO: 118716 - DNA, 60 bp, Artificial
  Synthetic oligonucleotide
ctctggtccgtttcagtgttccgacacgcatcctcctctcaggggagtcgatttccgtgc

SEQ ID NO: 118717 - DNA, 60 bp, Artificial
  Synthetic oligonucleotide
gatggtgccctccagcgtcctccttcccgtcacctctctggtccgtttcagtgttccgac

SEQ ID NO: 118718 - DNA, 60 bp, Artificial
  Synthetic oligonucleotide
ccctctgccaacgcggatggtgccctccagcgtcctccttcccgtcacctctctggtccg

SEQ ID NO: 118719 - DNA, 60 bp, Artificial
  Synthetic oligonucleotide
gcgtctatcgtagtcaatagtgccactgacctccgtatctccctctccccccctctgcca

SEQ ID NO: 118720 - DNA, 60 bp, Artificial
  Synthetic oligonucleotide
agattgtcatcctcagcggtctcatcagtgccgactctctgttcctcgctaagttgccct

SEQ ID NO: 118721 - DNA, 59 bp, Artificial
  Synthetic oligonucleotide
ggagctgtgagtcagggccgtcaggctcatgagtctccacgagtgtgtgctgtttcatc

SEQ ID NO: 118722 - DNA, 60 bp, Artificial
  Synthetic oligonucleotide
gcgtgagattggttggtccgtcatcggagatgaaccccttgagattgtcatcctcagcgg

SEQ ID NO: 118723 - DNA, 60 bp, Artificial
  Synthetic oligonucleotide
ccgactcggacgatctaggtgactcattggaccccactttcgagacccaaatcatggctc

SEQ ID NO: 118724 - DNA, 60 bp, Artificial
  Synthetic oligonucleotide
gtcattggggttttcagattacgttcgacatcgacatcttgagcaacctgcaacgttggg

SEQ ID NO: 118725 - DNA, 60 bp, Artificial
  Synthetic oligonucleotide
cttcgtacgtgattggatggctattatggctaaggggatcgggtcattggggttttcaga

SEQ ID NO: 118726 - DNA, 60 bp, Artificial
  Synthetic oligonucleotide
cggaggccggagaaacagctagtaaacgcgttgcagttacgggcagtatctgatcgtcag

SEQ ID NO: 118727 - DNA, 60 bp, Artificial
  Synthetic oligonucleotide
tcgcagacagtcgtcatcaacgacgatttgttttcggaaacgcttttattatcgatgagc

SEQ ID NO: 118728 - DNA, 60 bp, Artificial
  Synthetic oligonucleotide
tatggattgcaggtaaggctgttgggatgcaatttagtgttattgaatccattgtatcag

SEQ ID NO: 118729 - DNA, 60 bp, Artificial
  Synthetic oligonucleotide
cgttacgaaaagcgggaagtacaaaaccaaccgtcaatgttctcaagagtggtggcacag

SEQ ID NO: 118730 - DNA, 60 bp, Artificial
  Synthetic oligonucleotide
tggcaactcatttccctgaagttaacgtaatcgactctgatgattttggaatatggattg

SEQ ID NO: 118731 - DNA, 60 bp, Artificial
  Synthetic oligonucleotide
gggtaatacatcagaagttaaccctgcgtcaggcattaactcagcgggttttgacgtggt

SEQ ID NO: 118732 - DNA, 60 bp, Artificial
  Synthetic oligonucleotide
cagattacgttcgacatcgacatcttgagcaacctgcaacgttggggattgcgttgtgtc

SEQ ID NO: 118733 - DNA, 60 bp, Artificial
  Synthetic oligonucleotide
caacgttggggattgcgttgtgtcacactcactcagaagcgcgactactaatcgctgact

SEQ ID NO: 118734 - DNA, 60 bp, Artificial
  Synthetic oligonucleotide
caagagtggtggcacagataatcaattttgggcatcgattagtagctatgatgcgaccgt

SEQ ID NO: 118735 - DNA, 60 bp, Artificial
  Synthetic oligonucleotide
agctatgatgcgaccgtaattagtgatttaacgggatcaaatggtttagagttgtttgtc

SEQ ID NO: 118736 - DNA, 60 bp, Artificial
  Synthetic oligonucleotide
cgttcacgatcacgttgatccaaactttccacacgaaaccaaccagaacagaagtctgtt

SEQ ID NO: 118737 - DNA, 60 bp, Artificial
  Synthetic oligonucleotide
ttcactaacttcgtacgtgattggatggctattatggctaaggggatcgggtcattgggg

SEQ ID NO: 118738 - DNA, 60 bp, Artificial
  Synthetic oligonucleotide
ctgaccgtataagtggaggttcgccagtcccttcagcaaggattggaccacgaaagcgcg

SEQ ID NO: 118739 - DNA, 60 bp, Artificial
  Synthetic oligonucleotide
cattacgaaccacggaggccggagaaacagctagtaaacgcgttgcagttacgggcagta

SEQ ID NO: 118740 - DNA, 60 bp, Artificial
  Synthetic oligonucleotide
ccctgaagttaacgtaatcgactctgatgattttggaatatggattgcaggtaaggctgt

SEQ ID NO: 118741 - DNA, 60 bp, Artificial
  Synthetic oligonucleotide
tagcctatgacattgagatgagatatgagccgacatacgcaccatgattgaaactgtaca

SEQ ID NO: 118742 - DNA, 60 bp, Artificial
  Synthetic oligonucleotide
gggcagtatctgatcgtcagtatcaattcagcttacgacttgatgaggttttacataagg

SEQ ID NO: 118743 - DNA, 60 bp, Artificial
  Synthetic oligonucleotide
gaagctccttcgatgaaattcttactattgttgataagttggattgggatttcactaact

SEQ ID NO: 118744 - DNA, 60 bp, Artificial
  Synthetic oligonucleotide
taaggtaactcaacgaatgtgtcgactaacaattgttgcgccaaaggcgtccggaaagtc

SEQ ID NO: 118745 - DNA, 60 bp, Artificial
  Synthetic oligonucleotide
ggtatcaagttctggatgcgtatgcaaccgttacattatttacgaaagaaggtgcactca

SEQ ID NO: 118746 - DNA, 60 bp, Artificial
  Synthetic oligonucleotide
tatttacgaaagaaggtgcactcaatcttcgtgttgtgaatgaccacgtgtcaactatca

SEQ ID NO: 118747 - DNA, 60 bp, Artificial
  Synthetic oligonucleotide
gtgcaataccatcctgtgttttagaatataatcgagacgcattttacgttcacgatcacg

SEQ ID NO: 118748 - DNA, 60 bp, Artificial
  Synthetic oligonucleotide
agtactgagttattgacaaagttgaccggcatctcccagcctacggaatcaaagtatata

SEQ ID NO: 118749 - DNA, 60 bp, Artificial
  Synthetic oligonucleotide
ttgatattcatggctcgaagtatccagatcaattcttactccaggtcagacggcacagaa

SEQ ID NO: 118750 - DNA, 60 bp, Artificial
  Synthetic oligonucleotide
cagacaactaactactacttactttgggaacatatgcagcgcagtactgagttattgaca

SEQ ID NO: 118751 - DNA, 60 bp, Artificial
  Synthetic oligonucleotide
caatgagcatgaatcacgcacaacagtacaagcaattagttgttatgctcccgaagattg

SEQ ID NO: 118752 - DNA, 60 bp, Artificial
  Synthetic oligonucleotide
aaccgttaaggaagcgttacgaaaagcgggaagtacaaaaccaaccgtcaatgttctcaa

SEQ ID NO: 118753 - DNA, 60 bp, Artificial
  Synthetic oligonucleotide
aaagtatataacagttcgtcgatcatttgggacgagactcgcacgattatttgatattca

SEQ ID NO: 118754 - DNA, 60 bp, Artificial
  Synthetic oligonucleotide
gacaaagttgaccggcatctcccagcctacggaatcaaagtatataacagttcgtcgatc

SEQ ID NO: 118755 - DNA, 60 bp, Artificial
  Synthetic oligonucleotide
cttttggaaaagggtaatacatcagaagttaaccctgcgtcaggcattaactcagcgggt

SEQ ID NO: 118756 - DNA, 60 bp, Artificial
  Synthetic oligonucleotide
atcgctgactataccgttcgaatcagacatactttacttggtcactacgccttttggaaa

SEQ ID NO: 118757 - DNA, 60 bp, Artificial
  Synthetic oligonucleotide
ggggattgcgttgtgtcacactcactcagaagcgcgactactaatcgctgactataccgt

SEQ ID NO: 118758 - DNA, 60 bp, Artificial
  Synthetic oligonucleotide
ccaaacgtgacatggtgtaacgtgatccactcattatcgaatagatctccttgtacgtag

SEQ ID NO: 118759 - DNA, 60 bp, Artificial
  Synthetic oligonucleotide
ctcagcgggttttgacgtggttgtacgagctggatgagaattcaactgaaccaaacgtga

SEQ ID NO: 118760 - DNA, 60 bp, Artificial
  Synthetic oligonucleotide
cgcattttacgttcacgatcacgttgatccaaactttccacacgaaaccaaccagaacag

SEQ ID NO: 118761 - DNA, 60 bp, Artificial
  Synthetic oligonucleotide
tcgtcgatcatttgggacgagactcgcacgattatttgatattcatggctcgaagtatcc

SEQ ID NO: 118762 - DNA, 60 bp, Artificial
  Synthetic oligonucleotide
cggcacagaagactcggaatttgcatctatatggcgtatccaaaggtgtcaaccgttaag

SEQ ID NO: 118763 - DNA, 60 bp, Artificial
  Synthetic oligonucleotide
catggctcgaagtatccagatcaattcttactccaggtcagacggcacagaagactcgga

SEQ ID NO: 118764 - DNA, 60 bp, Artificial
  Synthetic oligonucleotide
ttgtacgtaggacactgaccgtataagtggaggttcgccagtcccttcagcaaggattgg

SEQ ID NO: 118765 - DNA, 60 bp, Artificial
  Synthetic oligonucleotide
ggtgtaacgtgatccactcattatcgaatagatctccttgtacgtaggacactgaccgta

SEQ ID NO: 118766 - DNA, 60 bp, Artificial
  Synthetic oligonucleotide
ggaaattccgttatggtatcaagttctggatgcgtatgcaaccgttacattatttacgaa

SEQ ID NO: 118767 - DNA, 60 bp, Artificial
  Synthetic oligonucleotide
tcagtcgatgattaactttaatccgtggtaccaaggagttgatgcaccaatggtcgtggg

SEQ ID NO: 118768 - DNA, 60 bp, Artificial
  Synthetic oligonucleotide
ccgaagattgatgttcagtcgatgattaactttaatccgtggtaccaaggagttgatgca

SEQ ID NO: 118769 - DNA, 60 bp, Artificial
  Synthetic oligonucleotide
cacgcacaacagtacaagcaattagttgttatgctcccgaagattgatgttcagtcgatg

SEQ ID NO: 118770 - DNA, 60 bp, Artificial
  Synthetic oligonucleotide
tcaactatcagctgtgcaataccatcctgtgttttagaatataatcgagacgcattttac

SEQ ID NO: 118771 - DNA, 60 bp, Artificial
  Synthetic oligonucleotide
gttttgaatattgtatcgcagacagtcgtcatcaacgacgatttgttttcggaaacgctt

SEQ ID NO: 118772 - DNA, 60 bp, Artificial
  Synthetic oligonucleotide
ggtgcactcaatcttcgtgttgtgaatgaccacgtgtcaactatcagctgtgcaatacca

SEQ ID NO: 118773 - DNA, 60 bp, Artificial
  Synthetic oligonucleotide
cgttagatgagaagactaaagcgttaaagcagttagcaatgagcatgaatcacgcacaac

SEQ ID NO: 118774 - DNA, 60 bp, Artificial
  Synthetic oligonucleotide
cgaaagggtgctggattttttcgaacacctcatcgtcgtaaaactaaccaagcctattgt

SEQ ID NO: 118775 - DNA, 60 bp, Artificial
  Synthetic oligonucleotide
aggtgaagtgttagggtatccgccctttttcctggggtcaatgtcgtcgtctaaagaaaa

SEQ ID NO: 118776 - DNA, 60 bp, Artificial
  Synthetic oligonucleotide
ctggacgagtcccaccagatttactgacggctactttcaagagtttgttatgacttcgag

SEQ ID NO: 118777 - DNA, 60 bp, Artificial
  Synthetic oligonucleotide
cagcgagggtgcaacgtttgaagagcgggtgtatcatggtgccgttactatgttgcaaag

SEQ ID NO: 118778 - DNA, 60 bp, Artificial
  Synthetic oligonucleotide
ggaagcaagagttcgtgtctgacggtgttcttgaagtcaagtggaataaactagggttgt

SEQ ID NO: 118779 - DNA, 60 bp, Artificial
  Synthetic oligonucleotide
atttccggaacagcgtcattttcgattggtgaaggtgggaagttgttatataggactggc

SEQ ID NO: 118780 - DNA, 60 bp, Artificial
  Synthetic oligonucleotide
gccaatcatttattgccgagtgaggtccgccgatcgagtttgtatgccagggatacgttg

SEQ ID NO: 118781 - DNA, 60 bp, Artificial
  Synthetic oligonucleotide
tatttggagacctcattgacaattgggacttagttcagctgattggagttcgatcggagc

SEQ ID NO: 118782 - DNA, 53 bp, Artificial
  Synthetic oligonucleotide
agagacctgggtgcaaaatcgaccaagcattatttgaagttcggcgtgttgga

SEQ ID NO: 118783 - DNA, 60 bp, Artificial
  Synthetic oligonucleotide
tcccttccctcccttggtacgtactggtgagattttatgcccaggtacttctgtatacac

SEQ ID NO: 118784 - DNA, 60 bp, Artificial
  Synthetic oligonucleotide
gcgagttttcagtcacgtgtagtcgaatgtctatcttttccaatgtataatgggtttaat

SEQ ID NO: 118785 - DNA, 60 bp, Artificial
  Synthetic oligonucleotide
tttacagtggagaaacttgccgagcgaagaactggatacggacctgctgttgcagagaaa

SEQ ID NO: 118786 - DNA, 58 bp, Artificial
  Synthetic oligonucleotide
cagctgattggagttcgatcggagccctttgtgatagaaaatcctgcatcttatttgt

SEQ ID NO: 118787 - DNA, 60 bp, Artificial
  Synthetic oligonucleotide
tacgctggatacagtatcgttgtggccgtatgaaacgacgcctccttctccggttgttcc

SEQ ID NO: 118788 - DNA, 60 bp, Artificial
  Synthetic oligonucleotide
ctgccgaattcctaaaacagaagggtgttcttggcgcaccggagttatttcctgagaggc

SEQ ID NO: 118789 - DNA, 60 bp, Artificial
  Synthetic oligonucleotide
gggtataagtcatcattagatgtgaaaggtatggactcatcgacaaaaccattccagacg

SEQ ID NO: 118790 - DNA, 60 bp, Artificial
  Synthetic oligonucleotide
ttgagcgtgagaagtatgatttaccacggctatccatgtggaagaacgctgccaatcatt

SEQ ID NO: 118791 - DNA, 60 bp, Artificial
  Synthetic oligonucleotide
agcctattgtgagatgatgggtatggctttactgctaatggagccatggcgctttagtag

SEQ ID NO: 118792 - DNA, 60 bp, Artificial
  Synthetic oligonucleotide
gctttagtagtggagactggaggatgtccttctcccaccgtttgcgcgcagttcttggga

SEQ ID NO: 118793 - DNA, 60 bp, Artificial
  Synthetic oligonucleotide
aaaccattccagacgaatttatcattgagttgtgtcttccatcgtttgcgaggtgaagtg

SEQ ID NO: 118794 - DNA, 60 bp, Artificial
  Synthetic oligonucleotide
atctgcgagaggcgatttttcggcagagtgacttattacgatatcagagtcgagggttgc

SEQ ID NO: 118795 - DNA, 60 bp, Artificial
  Synthetic oligonucleotide
attatcgtgctggagatgtgtttgcaaagaagcgtagtatcagcgagggtgcaacgtttg

SEQ ID NO: 118796 - DNA, 60 bp, Artificial
  Synthetic oligonucleotide
gagccacagctgaacaaatgtggtgtgaggtacgggagcaattagtacgtggtgaggacg

SEQ ID NO: 118797 - DNA, 60 bp, Artificial
  Synthetic oligonucleotide
gttgcaaagaatggtaaaactgagaggatcaaccattcaagagtcgtttgtaattgccgt

SEQ ID NO: 118798 - DNA, 60 bp, Artificial
  Synthetic oligonucleotide
gatattaaccatatttgcattatgaggtcgaatgcgcttcgctggcttaagatgttgttt

SEQ ID NO: 118799 - DNA, 60 bp, Artificial
  Synthetic oligonucleotide
gatgttgttttttgagtttccagagtttccctttctgatgacacgcgatggcataaaatt

SEQ ID NO: 118800 - DNA, 60 bp, Artificial
  Synthetic oligonucleotide
gggaaggttgggcgtgttatgaatggtatgatcgtgccagggtaggattattttcagaga

SEQ ID NO: 118801 - DNA, 60 bp, Artificial
  Synthetic oligonucleotide
gtaggattattttcagagatgtttgagaggagaggagttgtcgctcatctgcgagaggcg

SEQ ID NO: 118802 - DNA, 60 bp, Artificial
  Synthetic oligonucleotide
gcgagatggcacgccgtccttcgaaagagtggagagagagattcaataccttatccctga

SEQ ID NO: 118803 - DNA, 60 bp, Artificial
  Synthetic oligonucleotide
aagatcacatctacgtttcaaaacccgcaggatttttgcgattcagctgataatgtaagg

SEQ ID NO: 118804 - DNA, 60 bp, Artificial
  Synthetic oligonucleotide
cattgaagagcgacgaaagcaattggtggctgagtttggggatcagggaaagttacttgc

SEQ ID NO: 118805 - DNA, 60 bp, Artificial
  Synthetic oligonucleotide
ccgttcttggagatgatcaggtagcaggggcgttctgtcgcgggatcgtagatgaagatg

SEQ ID NO: 118806 - DNA, 60 bp, Artificial
  Synthetic oligonucleotide
gatgagacgaagtttttaatggagcggttggggtatgagtgtgagcctgagatttctgaa

SEQ ID NO: 118807 - DNA, 60 bp, Artificial
  Synthetic oligonucleotide
tcaacgacatgtttgaggatgttggcgtctccgatctgccgtatgccgcgctgcacattt

SEQ ID NO: 118808 - DNA, 60 bp, Artificial
  Synthetic oligonucleotide
ggtggtatggacagcatggtcgcgagatccgtagtcagaatggtcatcgcagggaagctc

SEQ ID NO: 118809 - DNA, 60 bp, Artificial
  Synthetic oligonucleotide
gaattctggtgacattcgcgatatgaatatcgtgcttgaaatttccggagaactagggta

SEQ ID NO: 118810 - DNA, 60 bp, Artificial
  Synthetic oligonucleotide
gcagggaagctcttgaagtttatgaggagcatgttcgattattaggttccgttcttggag

SEQ ID NO: 118811 - DNA, 60 bp, Artificial
  Synthetic oligonucleotide
gcaattagtacgtggtgaggacgatcctctggggaagtacatcgactatgtcaacgacat

SEQ ID NO: 118812 - DNA, 60 bp, Artificial
  Synthetic oligonucleotide
caccggagttatttcctgagaggcttttgttattttcttccgaaaggggtgacatggctg

SEQ ID NO: 118813 - DNA, 60 bp, Artificial
  Synthetic oligonucleotide
gtgggaaccgaagggcaattatcagctttcgtacttcacaatgttttgaggcctgcttac

SEQ ID NO: 118814 - DNA, 60 bp, Artificial
  Synthetic oligonucleotide
tcgagaactgtgtttcgatctggtctgttgaataccgctgaccagcatacttttctcggc

SEQ ID NO: 118815 - DNA, 60 bp, Artificial
  Synthetic oligonucleotide
aggatgttggcgtctccgatctgccgtatgccgcgctgcacatttatggagttggaatgg

SEQ ID NO: 118816 - DNA, 60 bp, Artificial
  Synthetic oligonucleotide
cccaggggatccgaaactgtaccttaaagtaggacgtcaagctttatcttatagtgagga

SEQ ID NO: 118817 - DNA, 60 bp, Artificial
  Synthetic oligonucleotide
gtgttaaccagaacgaggtataggaatgagcatggcgttattgtggctgaagaagagtat

SEQ ID NO: 118818 - DNA, 60 bp, Artificial
  Synthetic oligonucleotide
gagattgggatggcgttagtttcagatgcagatccagagtatgcggattgggagtacggt

SEQ ID NO: 118819 - DNA, 60 bp, Artificial
  Synthetic oligonucleotide
gctgtggactggtattatgcagaccctgatttagcggacatgcgagagattgggatggcg

SEQ ID NO: 118820 - DNA, 60 bp, Artificial
  Synthetic oligonucleotide
gggacccaatttcgtttcctcggcaagagattcttttggatggtgagtggattgctgtgg

SEQ ID NO: 118821 - DNA, 60 bp, Artificial
  Synthetic oligonucleotide
gacgtttgcgagtgccttgttgtatgttatgggagcgacttctctttctcttgaacagtc

SEQ ID NO: 118822 - DNA, 60 bp, Artificial
  Synthetic oligonucleotide
tgtcagatgagaaagcgcgttggttagctgtagctatgaagacgtttgcgagtgccttgt

SEQ ID NO: 118823 - DNA, 54 bp, Artificial
  Synthetic oligonucleotide
cgagggttgcagctcgcatcaatatcgcaattccctaggcgcagcgtacaggtt

SEQ ID NO: 118824 - DNA, 60 bp, Artificial
  Synthetic oligonucleotide
gtggtgttagtataggtggtgggtaggatatgtaggcccttagggcactggggtagttag

SEQ ID NO: 118825 - DNA, 60 bp, Artificial
  Synthetic oligonucleotide
ggtgttagtataggtggtgggtaggatatgtaggcccttagggcactggggtagttagcc

SEQ ID NO: 118826 - DNA, 60 bp, Artificial
  Synthetic oligonucleotide
gagatatagtgatacttgtgtgttatccaataaaactatgataacagacgatgccgcgat

SEQ ID NO: 118827 - DNA, 60 bp, Artificial
  Synthetic oligonucleotide
aaagatagagctgacgctatgcttgagatcaatgctgacgaagtttcgtcagttaaatca

SEQ ID NO: 118828 - DNA, 60 bp, Artificial
  Synthetic oligonucleotide
ccgcgatacttcctcgggttcgtgtcataagcgccttcaacatgggcgtcttgtgcctcg

SEQ ID NO: 118829 - DNA, 60 bp, Artificial
  Synthetic oligonucleotide
gcactaaatctgtctggacttcttgaacacagacttttacactacggatctttaggtaca

SEQ ID NO: 118830 - DNA, 60 bp, Artificial
  Synthetic oligonucleotide
gctagtagggctagttttatcaatatcaagaatgccgcaaacagagatgagatggtatac

SEQ ID NO: 118831 - DNA, 60 bp, Artificial
  Synthetic oligonucleotide
aaaatactgaatgatgctagtagggctagttttatcaatatcaagaatgccgcaaacaga

SEQ ID NO: 118832 - DNA, 60 bp, Artificial
  Synthetic oligonucleotide
gccattggatgcttcacagacacaaagcgttacccaaatccgtaaaatactgaatgatgc

SEQ ID NO: 118833 - DNA, 60 bp, Artificial
  Synthetic oligonucleotide
tcgtcaagccattggatgcttcacagacacaaagcgttacccaaatccgtaaaatactga

SEQ ID NO: 118834 - DNA, 60 bp, Artificial
  Synthetic oligonucleotide
gccaaatgttagctgaagtcacagcattgcttaaactcaagaggaaggtagggtcagtcg

SEQ ID NO: 118835 - DNA, 60 bp, Artificial
  Synthetic oligonucleotide
cggactattaccgccaaatgttagctgaagtcacagcattgcttaaactcaagaggaagg

SEQ ID NO: 118836 - DNA, 60 bp, Artificial
  Synthetic oligonucleotide
gagctgtgttataacagtagctggacacgccatcgacgttggcccggactattaccgcca

SEQ ID NO: 118837 - DNA, 60 bp, Artificial
  Synthetic oligonucleotide
gagacagagctgtgttataacagtagctggacacgccatcgacgttggcccggactatta

SEQ ID NO: 118838 - DNA, 60 bp, Artificial
  Synthetic oligonucleotide
cggtgagttcgacgccgttagtttctgtggactgaagttgagacagagctgtgttataac

SEQ ID NO: 118839 - DNA, 60 bp, Artificial
  Synthetic oligonucleotide
gttgaaacggataatcagcctaatcccattcagcccaaggacattaagccggttcagaag

SEQ ID NO: 118840 - DNA, 60 bp, Artificial
  Synthetic oligonucleotide
agatctaaagttgaaacggataatcagcctaatcccattcagcccaaggacattaagccg

SEQ ID NO: 118841 - DNA, 60 bp, Artificial
  Synthetic oligonucleotide
ataactatgaattaccagatgatgactcaacgcttaaatcgatttgtttcgctatcttcc

SEQ ID NO: 118842 - DNA, 60 bp, Artificial
  Synthetic oligonucleotide
cagatgatgactcaacgcttaaatcgatttgtttcgctatcttccagattcactcgaatg

SEQ ID NO: 118843 - DNA, 60 bp, Artificial
  Synthetic oligonucleotide
ctcactattcacaaatgggaaaaccaagtggtagtgaaatcggcaagttcatcacagctg

SEQ ID NO: 118844 - DNA, 60 bp, Artificial
  Synthetic oligonucleotide
ggtgatcgatactctcactattcacaaatgggaaaaccaagtggtagtgaaatcggcaag

SEQ ID NO: 118845 - DNA, 60 bp, Artificial
  Synthetic oligonucleotide
tggcgatgctccaagcgtctcctgccacatctagcagatctaaagttgaaacggataatc

SEQ ID NO: 118846 - DNA, 60 bp, Artificial
  Synthetic oligonucleotide
aactgaatcttaaattggcgatgctccaagcgtctcctgccacatctagcagatctaaag

SEQ ID NO: 118847 - DNA, 60 bp, Artificial
  Synthetic oligonucleotide
gatcgcaggtcgttggattgacctccaagatcaaggatttcaccaagagtgtagagaaga

SEQ ID NO: 118848 - DNA, 60 bp, Artificial
  Synthetic oligonucleotide
gattgacctccaagatcaaggatttcaccaagagtgtagagaagacaaccctcctgactc

SEQ ID NO: 118849 - DNA, 60 bp, Artificial
  Synthetic oligonucleotide
gttattttaaccttacatcatgtcgaagcctcaaactattccgagaacgcgatcgcaggt

SEQ ID NO: 118850 - DNA, 60 bp, Artificial
  Synthetic oligonucleotide
catcatgtcgaagcctcaaactattccgagaacgcgatcgcaggtcgttggattgacctc

SEQ ID NO: 118851 - DNA, 60 bp, Artificial
  Synthetic oligonucleotide
tcatctgctttctcaacaacccgaactgtttagtggattggtcaaattgtatgttgataa

SEQ ID NO: 118852 - DNA, 60 bp, Artificial
  Synthetic oligonucleotide
atgccgcgatacttcctcgggttcgtgtcataagcgccttcaacatgggcgtcttgtgcc

SEQ ID NO: 118853 - DNA, 60 bp, Artificial
  Synthetic oligonucleotide
gtagagaagacaaccctcctgactcaagctgagttgaagaaacaacatcgtcatctgctt

SEQ ID NO: 118854 - DNA, 60 bp, Artificial
  Synthetic oligonucleotide
ccctcctgactcaagctgagttgaagaaacaacatcgtcatctgctttctcaacaacccg

SEQ ID NO: 118855 - DNA, 60 bp, Artificial
  Synthetic oligonucleotide
tagcactggaacacatcggctctttctataatacatgcaaaattaacggtgagttcgacg

SEQ ID NO: 118856 - DNA, 60 bp, Artificial
  Synthetic oligonucleotide
gctatcttccagattcactcgaatgatcttagaaatggtggagcgaatgctttgttcaca

SEQ ID NO: 118857 - DNA, 60 bp, Artificial
  Synthetic oligonucleotide
ccagattcactcgaatgatcttagaaatggtggagcgaatgctttgttcacaattgcagc

SEQ ID NO: 118858 - DNA, 60 bp, Artificial
  Synthetic oligonucleotide
caattgcagctgagtattttaataagccagaagtcaagactatcgttggcgagcacatca

SEQ ID NO: 118859 - DNA, 56 bp, Artificial
  Synthetic oligonucleotide
tcgttggcgagcacatcaaaattaaatcatgtaataaggtacccgttgcaattgtt

SEQ ID NO: 118860 - DNA, 60 bp, Artificial
  Synthetic oligonucleotide
tcaggttattccgtatcgtggagtgaaagcattaaggactaagctgcttgaaacacaaga

SEQ ID NO: 118861 - DNA, 60 bp, Artificial
  Synthetic oligonucleotide
tcgtggagtgaaagcattaaggactaagctgcttgaaacacaagatgatgtagcactgga

SEQ ID NO: 118862 - DNA, 60 bp, Artificial
  Synthetic oligonucleotide
aaacacaagatgatgtagcactggaacacatcggctctttctataatacatgcaaaatta

SEQ ID NO: 118863 - DNA, 60 bp, Artificial
  Synthetic oligonucleotide
agttaaatcatccaactcgaataaatcatcgaataagagtaaatacgtcaggaactctat

SEQ ID NO: 118864 - DNA, 60 bp, Artificial
  Synthetic oligonucleotide
ttgtgtgttatccaataaaactatgataacagacgatgccgcgatacttcctcgggttcg

SEQ ID NO: 118865 - DNA, 60 bp, Artificial
  Synthetic oligonucleotide
gacctgaactgtactctgagctgaaccgtatcgttgagaacaccacaattaaagatagag

SEQ ID NO: 118866 - DNA, 60 bp, Artificial
  Synthetic oligonucleotide
ctgagctgaaccgtatcgttgagaacaccacaattaaagatagagctgacgctatgcttg

SEQ ID NO: 118867 - DNA, 60 bp, Artificial
  Synthetic oligonucleotide
tttaggtacaaagtgtagagatccgagttgtggagtcatcggtatagatagacctgaact

SEQ ID NO: 118868 - DNA, 60 bp, Artificial
  Synthetic oligonucleotide
gtagagatccgagttgtggagtcatcggtatagatagacctgaactgtactctgagctga

SEQ ID NO: 118869 - DNA, 60 bp, Artificial
  Synthetic oligonucleotide
gtgcctcgtccgtttgtttggttagacaagtacggcctggtcgaccgtacgatgctgaag

SEQ ID NO: 118870 - DNA, 60 bp, Artificial
  Synthetic oligonucleotide
ggaactctattgataagggtcacaaccttactgatttgagtgatgccaatggtgatcgat

SEQ ID NO: 118871 - DNA, 60 bp, Artificial
  Synthetic oligonucleotide
agggtcacaaccttactgatttgagtgatgccaatggtgatcgatactctcactattcac

SEQ ID NO: 118872 - DNA, 60 bp, Artificial
  Synthetic oligonucleotide
ttttccgaaatacccgcccatgctgctaaacatctttcttctccgatgactttatacatt

SEQ ID NO: 118873 - DNA, 60 bp, Artificial
  Synthetic oligonucleotide
tactaaaattagttgagaagcattcaccaatcaaaatatcaccatctgatctagtattgt

SEQ ID NO: 118874 - DNA, 60 bp, Artificial
  Synthetic oligonucleotide
aacacaattaaatgcgctaccattagatttaacggcagcagaaaaagttttctctattaa

SEQ ID NO: 118875 - DNA, 60 bp, Artificial
  Synthetic oligonucleotide
ccagaagaaatatttcatctgatattacgtaactcaacctttaccattcccaagttaaat

SEQ ID NO: 118876 - DNA, 60 bp, Artificial
  Synthetic oligonucleotide
cggagtcagagtatcttcaggaatacaggtgcacaggccagttaataccttactaaaatt

SEQ ID NO: 118877 - DNA, 60 bp, Artificial
  Synthetic oligonucleotide
gtacgtcaattttgtcatgttcactggcgatactttcagagcggtgtgcattccagaatc

SEQ ID NO: 118878 - DNA, 60 bp, Artificial
  Synthetic oligonucleotide
cagagcggtgtgcattccagaatcacaaactataaacgcaaaattagtcaaaacggtcat

SEQ ID NO: 118879 - DNA, 60 bp, Artificial
  Synthetic oligonucleotide
tctctattaaactaaatttaccaaatacatactatgaactcttaatgttaatattgttat

SEQ ID NO: 118880 - DNA, 60 bp, Artificial
  Synthetic oligonucleotide
atattgttatatgagtacgtcaattttgtcatgttcactggcgatactttcagagcggtg

SEQ ID NO: 118881 - DNA, 60 bp, Artificial
  Synthetic oligonucleotide
ggtacttgaaggtacggatcctttaaaatggaaaagtgatactttacaaggattgagtcc

SEQ ID NO: 118882 - DNA, 60 bp, Artificial
  Synthetic oligonucleotide
aaagaagagcagaaaaccttaggtgttccgaatgttgcaacaacaaagaacagacaacaa

SEQ ID NO: 118883 - DNA, 60 bp, Artificial
  Synthetic oligonucleotide
aaatagcaatgaaatcagaagcaaaaattataacgtctatattgagagataaagaagagc

SEQ ID NO: 118884 - DNA, 60 bp, Artificial
  Synthetic oligonucleotide
gtgtaattagaactaattatgtgaatggttatcttgaaattctaccaaataggaaatggt

SEQ ID NO: 118885 - DNA, 60 bp, Artificial
  Synthetic oligonucleotide
atctactccacagtttaaagcaagagttgatagaatgatatcatcagtgcaaatagcaat

SEQ ID NO: 118886 - DNA, 60 bp, Artificial
  Synthetic oligonucleotide
gtggttttggtgctacttttgcggaagcctacgtagccaaagctgctacattgacttatg

SEQ ID NO: 118887 - DNA, 53 bp, Artificial
  Synthetic oligonucleotide
tatactaagctggcaagtcgctgcaatacaacacaccattgccgagtttttat

SEQ ID NO: 118888 - DNA, 60 bp, Artificial
  Synthetic oligonucleotide
actgaggtccctgttgtcaccagttacactatactccaccggaccattatcctttgaaat

SEQ ID NO: 118889 - DNA, 60 bp, Artificial
  Synthetic oligonucleotide
atgactgatgtactagtgccaccatcagcttcagtaaaaataacaggcagactgaggtcc

SEQ ID NO: 118890 - DNA, 60 bp, Artificial
  Synthetic oligonucleotide
ctctgacgttacagctgaatctttagcggcaatggcaaattcatcaaatggttattcaag

SEQ ID NO: 118891 - DNA, 60 bp, Artificial
  Synthetic oligonucleotide
atatttcggtatacgttgatgataaatctgacaaaagagatatagtattgcagcttttga

SEQ ID NO: 118892 - DNA, 60 bp, Artificial
  Synthetic oligonucleotide
atcctctatatcagtagaagataaaattgaagcattgttgaaaattcgatatatttcggt

SEQ ID NO: 118893 - DNA, 60 bp, Artificial
  Synthetic oligonucleotide
gatgttgcatttggatgacgatttatcaaagaatcttaatttcacaaatattggtgacca

SEQ ID NO: 118894 - DNA, 60 bp, Artificial
  Synthetic oligonucleotide
gtccaaactacaatcataggacacatactttgatttcatcaattatatatgcgacaagcg

SEQ ID NO: 118895 - DNA, 60 bp, Artificial
  Synthetic oligonucleotide
ttatcagttcaatctaccacgggttcattaatttattcagcagcagtaaacgcatatcga

SEQ ID NO: 118896 - DNA, 60 bp, Artificial
  Synthetic oligonucleotide
accaacttgccgaatatgctgaagaaatgtatttcaaatataactctgacgttacagctg

SEQ ID NO: 118897 - DNA, 60 bp, Artificial
  Synthetic oligonucleotide
aacgaatgttaactgaccaacttgccgaatatgctgaagaaatgtatttcaaatataact

SEQ ID NO: 118898 - DNA, 60 bp, Artificial
  Synthetic oligonucleotide
aaatataactctgacgttacagctgaatctttagcggcaatggcaaattcatcaaatggt

SEQ ID NO: 118899 - DNA, 60 bp, Artificial
  Synthetic oligonucleotide
ttgtagagttactggataataaagaagcgttctttgcttatgaaaaagagcaaaaaacac

SEQ ID NO: 118900 - DNA, 57 bp, Artificial
  Synthetic oligonucleotide
cctttgaaataacaccatatggattaggaggtaggatgagactgttttcgttatcta

SEQ ID NO: 118901 - DNA, 60 bp, Artificial
  Synthetic oligonucleotide
gtccctgttgtcaccagttacactatactccaccggaccattatcctttgaaataacacc

SEQ ID NO: 118902 - DNA, 60 bp, Artificial
  Synthetic oligonucleotide
cttttgcggaagcctacgtagccaaagctgctacattgacttatggaattctagctgagg

SEQ ID NO: 118903 - DNA, 60 bp, Artificial
  Synthetic oligonucleotide
ttgacttatggaattctagctgaggcaacgtcaaaagcagatcaattaattttatatact

SEQ ID NO: 118904 - DNA, 60 bp, Artificial
  Synthetic oligonucleotide
ctagctgaggcaacgtcaaaagcagatcaattaattttatatactgatgtatcccaatgg

SEQ ID NO: 118905 - DNA, 58 bp, Artificial
  Synthetic oligonucleotide
tagttgagtcacaaggatcaaaaagacagccattgcgcatcaaatatcatggtgtggc

SEQ ID NO: 118906 - DNA, 60 bp, Artificial
  Synthetic oligonucleotide
caaagataggaaattcatttgccaatgtagctttaataactacggtattcaataatctaa

SEQ ID NO: 118907 - DNA, 60 bp, Artificial
  Synthetic oligonucleotide
aaagaggtgctatatcaatattcactgcagaacgtccatatgggactgatttatcagttc

SEQ ID NO: 118908 - DNA, 60 bp, Artificial
  Synthetic oligonucleotide
tgcacagcttcgttctaatattgttgtatcaactaaaatcgcggctgaaagtgttgcaac

SEQ ID NO: 118909 - DNA, 60 bp, Artificial
  Synthetic oligonucleotide
aaagccaaatacgtgaatgggagcaagagatgagtgaatatccatttcaatcttctagga

SEQ ID NO: 118910 - DNA, 60 bp, Artificial
  Synthetic oligonucleotide
ccgcccatgctgctaaacatctttcttctccgatgactttatacattggaattgcacagc

SEQ ID NO: 118911 - DNA, 60 bp, Artificial
  Synthetic oligonucleotide
aatctaccacgggttcattaatttattcagcagcagtaaacgcatatcgaggatttggtg

SEQ ID NO: 118912 - DNA, 51 bp, Artificial
  Synthetic oligonucleotide
ttttccttgcacaaatcatcgcgtcattttccgaaatacccgcccatgctg

SEQ ID NO: 118913 - DNA, 60 bp, Artificial
  Synthetic oligonucleotide
caatattcactgcagaacgtccatatgggactgatttatcagttcaatctaccacgggtt

SEQ ID NO: 118914 - DNA, 60 bp, Artificial
  Synthetic oligonucleotide
gctaaaattatacatgcttcttgtgcgatgatttcaatattgcatgctgttccaatcgac

SEQ ID NO: 118915 - DNA, 60 bp, Artificial
  Synthetic oligonucleotide
tgcatgctgttccaatcgactactttttccttgcacaaatcatcgcgtcattttccgaaa

SEQ ID NO: 118916 - DNA, 60 bp, Artificial
  Synthetic oligonucleotide
aggaaatggtcacattcattagctgatctacgagaaaataaatcaataatgatgtattct

SEQ ID NO: 118917 - DNA, 60 bp, Artificial
  Synthetic oligonucleotide
aaaccatatcattataaccagttagtgtcagactttataaagtataacgagtttgaggta

SEQ ID NO: 118918 - DNA, 58 bp, Artificial
  Synthetic oligonucleotide
cagacaacaaattgaaaaagctagaaaaactctgtctttaccaaaagaaacattaccg

SEQ ID NO: 118919 - DNA, 60 bp, Artificial
  Synthetic oligonucleotide
tttatacattggaattgcacagcttcgttctaatattgttgtatcaactaaaatcgcggc

SEQ ID NO: 118920 - DNA, 60 bp, Artificial
  Synthetic oligonucleotide
ggcactatggaacctgagaactatctagcttggctagctagagatatagttcgaaattta

SEQ ID NO: 118921 - DNA, 60 bp, Artificial
  Synthetic oligonucleotide
tcgaaatttatcatatacttctctcgtttataataatccaaaagtcgcaattgtagagtt

SEQ ID NO: 118922 - DNA, 60 bp, Artificial
  Synthetic oligonucleotide
aaatgaaatgttctttatgtgcttagatatgacgctggctgcggcgaatttgaatatcgg

SEQ ID NO: 118923 - DNA, 66 bp, Artificial
  Synthetic oligonucleotide
ccaggtatgatagaaatagaagtaatctactatttgagtttagataaaacaatgacccagtatccc

SEQ ID NO: 118924 - DNA, 60 bp, Artificial
  Synthetic oligonucleotide
tatgacgctggctgcggcgaatttgaatatcggaaacatatctccagactacatacaaaa

SEQ ID NO: 118925 - DNA, 60 bp, Artificial
  Synthetic oligonucleotide
aaatgaaatgttctttatgtgcttagatatgacgctggctgccgcgaatttgaatatggg

SEQ ID NO: 118926 - DNA, 60 bp, Artificial
  Synthetic oligonucleotide
tttgaaagaagttagaatagtagtagaatccaatgtgttggaaattcttggaatagctat

SEQ ID NO: 118927 - DNA, 60 bp, Artificial
  Synthetic oligonucleotide
tttggagaagaatagggacattttcaagcgcggcgggaaatgcacaggagacaccacaag

SEQ ID NO: 118928 - DNA, 60 bp, Artificial
  Synthetic oligonucleotide
caaggagtaacattaaatgtgggaggtgtgaatatgagggcaggagtgatcgtggcttat

SEQ ID NO: 118929 - DNA, 60 bp, Artificial
  Synthetic oligonucleotide
caaggagtgacattaaatgtgggaggtgtgaatatgagggcaggagtgatcgtggcttat

SEQ ID NO: 118930 - DNA, 60 bp, Artificial
  Synthetic oligonucleotide
agtgatcgtggcttatgatggtcaagctcccgtgaatgtaaacaatccgggagcgggacc

SEQ ID NO: 118931 - DNA, 60 bp, Artificial
  Synthetic oligonucleotide
caaggagtaacattaaatgtgggaggtgtgaatatgagggcaggagtgattgtggcttat

SEQ ID NO: 118932 - DNA, 60 bp, Artificial
  Synthetic oligonucleotide
gaagaatagggacattttcaagcgcggcgggaaacgcacaggagacaccacaaggagtaa

SEQ ID NO: 118933 - DNA, 60 bp, Artificial
  Synthetic oligonucleotide
ggagaagaatagggacattttcaagcgcggcgggaaatgcacaggagacaccacaaggag

SEQ ID NO: 118934 - DNA, 60 bp, Artificial
  Synthetic oligonucleotide
taaaaatccgttatggcacggtctgcgggcggcaatactcaacagaacaacattaccgaa

SEQ ID NO: 118935 - DNA, 60 bp, Artificial
  Synthetic oligonucleotide
tagaggtaatttactacttgagtttagataaaacaatgacccagtatccctcactacagg

SEQ ID NO: 118936 - DNA, 60 bp, Artificial
  Synthetic oligonucleotide
taaaaatccgttatggcacggtctgcgggcggcaatactcaacagaacaacattaccaaa

SEQ ID NO: 118937 - DNA, 60 bp, Artificial
  Synthetic oligonucleotide
acaccacaaggagtgacattaaatgtgggaggtgtgaatatgagggcaggagtgatcgtg

SEQ ID NO: 118938 - DNA, 60 bp, Artificial
  Synthetic oligonucleotide
ccacaaggagtgacattaaatgtgggaggtgtgaatatgagggcaggagtgatcgtggct

SEQ ID NO: 118939 - DNA, 60 bp, Artificial
  Synthetic oligonucleotide
cgtggcttatgacggtcaagctcccgtgaatgtaaacaatccgggagcgggaccaggtat

SEQ ID NO: 118940 - DNA, 60 bp, Artificial
  Synthetic oligonucleotide
cctgacgcgccaatgtccaatcatcaggcagccaccatgagagagctgatctgcagctac

SEQ ID NO: 118941 - DNA, 60 bp, Artificial
  Synthetic oligonucleotide
agctgatctgcagctacttcaaggtcgaccacactgatgggttgaaatatatacccatgg

SEQ ID NO: 118942 - DNA, 60 bp, Artificial
  Synthetic oligonucleotide
gggacattcttcagacacgcgatttgcactcattgtgcatgccaactcctgacgcgccaa

SEQ ID NO: 118943 - DNA, 60 bp, Artificial
  Synthetic oligonucleotide
gccaactcctgacgcgccaatgtccaatcatcaggcagccaccatgagagagctgatctg

SEQ ID NO: 118944 - DNA, 60 bp, Artificial
  Synthetic oligonucleotide
cgtgagcgtctgcttggacaaaggaatctggaacgcatatcgactagggacattcttcag

SEQ ID NO: 118945 - DNA, 60 bp, Artificial
  Synthetic oligonucleotide
atatcgactagggacattcttcagacacgcgatttgcactcattgtgcatgccaactcct

SEQ ID NO: 118946 - DNA, 60 bp, Artificial
  Synthetic oligonucleotide
gtggattcttttcgtgcctagctatgttgagaccgctccagtatgctaaacgtgagcgtc

SEQ ID NO: 118947 - DNA, 60 bp, Artificial
  Synthetic oligonucleotide
tccagtatgctaaacgtgagcgtctgcttggacaaaggaatctggaacgcatatcgacta

SEQ ID NO: 118948 - DNA, 60 bp, Artificial
  Synthetic oligonucleotide
gagagatgatgttggtcagcaagtttgtccaaattatgtcatgcttagatcatcggtcac

SEQ ID NO: 118949 - DNA, 60 bp, Artificial
  Synthetic oligonucleotide
tcaaatccgtacaggtggattcttttcgtgcctagctatgttgagaccgctccagtatgc

SEQ ID NO: 118950 - DNA, 60 bp, Artificial
  Synthetic oligonucleotide
ggtcgatgggtagcagctgatgctactgatgctagattgctggtgtttccaattcgcgtg

SEQ ID NO: 118951 - DNA, 53 bp, Artificial
  Synthetic oligonucleotide
ccaattcgcgtgtaatgggtgagtgagccgatgtggtcgccaagacatgtgcc

SEQ ID NO: 118952 - DNA, 60 bp, Artificial
  Synthetic oligonucleotide
gacatgcgtgaaacgatgagactttggactcgatcggcgttggacgattcagtggttacg

SEQ ID NO: 118953 - DNA, 60 bp, Artificial
  Synthetic oligonucleotide
ggcgttggacgattcagtggttacgtcatctttgagtatttcgctggatcgaggtcgatg

SEQ ID NO: 118954 - DNA, 60 bp, Artificial
  Synthetic oligonucleotide
agtggttacgtcatctttgagtatttcgctggatcgaggtcgatgggtagcagctgatgc

SEQ ID NO: 118955 - DNA, 60 bp, Artificial
  Synthetic oligonucleotide
gaggtcgatgggtagcagctgatgctactgatgctagattgctggtgtttccaattcgcg

SEQ ID NO: 118956 - DNA, 60 bp, Artificial
  Synthetic oligonucleotide
gatctctaagatcaagagagatgatgttggtcagcaagtttgtccaaattatgtcatgct

SEQ ID NO: 118957 - DNA, 60 bp, Artificial
  Synthetic oligonucleotide
ttgctaccattgatgcccagtgtttcaggttttgtgtgatgatgaaggataagaatttga

SEQ ID NO: 118958 - DNA, 60 bp, Artificial
  Synthetic oligonucleotide
gcgaggaaacggcagaagctatctgtgtactcaaaacatgtcttgtgctgaactgtatgc

SEQ ID NO: 118959 - DNA, 60 bp, Artificial
  Synthetic oligonucleotide
gttatattgcgaggaaacggcagaagctatctgtgtactcaaaacatgtcttgtgctgaa

SEQ ID NO: 118960 - DNA, 56 bp, Artificial
  Synthetic oligonucleotide
cgttagctttaccctacatgattacacttgatggtgacacagtggtacctgtcgcc

SEQ ID NO: 118961 - DNA, 60 bp, Artificial
  Synthetic oligonucleotide
cgtgtgcccatcatgcacttggcagcagatttggactgcatgacgttagctttaccctac

SEQ ID NO: 118962 - DNA, 60 bp, Artificial
  Synthetic oligonucleotide
ctacaaacgtgtgcccatcatgcacttggcagcagatttggactgcatgacgttagcttt

SEQ ID NO: 118963 - DNA, 60 bp, Artificial
  Synthetic oligonucleotide
ggtatggctggactacacattaccactgagccttcctacaaacgtgtgcccatcatgcac

SEQ ID NO: 118964 - DNA, 60 bp, Artificial
  Synthetic oligonucleotide
agattgttcactatgggtatggctggactacacattaccactgagccttcctacaaacgt

SEQ ID NO: 118965 - DNA, 60 bp, Artificial
  Synthetic oligonucleotide
aagaatttgaagatagacatgcgtgaaacgatgagactttggactcgatcggcgttggac

SEQ ID NO: 118966 - DNA, 60 bp, Artificial
  Synthetic oligonucleotide
cccagtgtttcaggttttgtgtgatgatgaaggataagaatttgaagatagacatgcgtg

SEQ ID NO: 118967 - DNA, 60 bp, Artificial
  Synthetic oligonucleotide
tggttatgggttagatttaagggtggtgggtgtcttacgtgcgtgtccctgtggtgttag

SEQ ID NO: 118968 - DNA, 60 bp, Artificial
  Synthetic oligonucleotide
tatgtgtaggataactgttatgagattgtggttatgggttagatttaagggtggtgggtg

SEQ ID NO: 118969 - DNA, 60 bp, Artificial
  Synthetic oligonucleotide
gcattacaacctaagaaatcgtcagacacgttagcattatccgaggctgtatatcgtaca

SEQ ID NO: 118970 - DNA, 60 bp, Artificial
  Synthetic oligonucleotide
ttgtataagccaaccattactgcggatgtcagacaatttcttaatactactaaagcagaa

SEQ ID NO: 118971 - DNA, 60 bp, Artificial
  Synthetic oligonucleotide
ttaatggagttaaaatatttgcagaagacgttaaaaatatcaattttcaagttgacacca

SEQ ID NO: 118972 - DNA, 60 bp, Artificial
  Synthetic oligonucleotide
ctaagtttgatgtgtatgagactttaactattccgaatgatgttcaaactatagtactta

SEQ ID NO: 118973 - DNA, 64 bp, Artificial
  Synthetic oligonucleotide
ggatgatatcgttaagggattaatattacataaaagagcttgcgctaagtttgatgtgtatgag

SEQ ID NO: 118974 - DNA, 60 bp, Artificial
  Synthetic oligonucleotide
gaccagattgcagattgcacttaaaatgttgacaggagatatggatgatatcgttaaggg

SEQ ID NO: 118975 - DNA, 60 bp, Artificial
  Synthetic oligonucleotide
gtcgccaatctcgaccccgcagaatttgagaatacaccacaattaatagagagttcaaat

SEQ ID NO: 118976 - DNA, 60 bp, Artificial
  Synthetic oligonucleotide
gattcgtcgagtatttgataatgtagttcagccctatgtcgccaatctcgaccccgcaga

SEQ ID NO: 118977 - DNA, 60 bp, Artificial
  Synthetic oligonucleotide
tggctaatatgatgcaaaactttattccaaacacagatggtcagtttcattcatttcgag

SEQ ID NO: 118978 - DNA, 60 bp, Artificial
  Synthetic oligonucleotide
cactagtgatagatactgcaattgtgtggggcttactagggaatactgataatgcttatg

SEQ ID NO: 118979 - DNA, 60 bp, Artificial
  Synthetic oligonucleotide
tcatttcgagcatgtgcgtatgctgtagtagatagtggaaatatttatagagtcgtgcaa

SEQ ID NO: 118980 - DNA, 66 bp, Artificial
  Synthetic oligonucleotide
gcaattaacagaaccattgtgtttagaactagatgggcatgtttatcacttatataatgttatggc

SEQ ID NO: 118981 - DNA, 60 bp, Artificial
  Synthetic oligonucleotide
ctgcaattgtgtggggcttactagggaatactgataatgcttatggcaatgccattggcg

SEQ ID NO: 118982 - DNA, 60 bp, Artificial
  Synthetic oligonucleotide
tttggtacaatgatgcgattaaaacactaataaataatttgactatacaatatggaaaga

SEQ ID NO: 118983 - DNA, 51 bp, Artificial
  Synthetic oligonucleotide
cagtacttgatgctaatgctgtaaaacgttatagtgtcgtcggatatccaa

SEQ ID NO: 118984 - DNA, 60 bp, Artificial
  Synthetic oligonucleotide
agacgtataaccctattgatacagttgcgaaaatattgtacttaccaagtttagaaaaat

SEQ ID NO: 118985 - DNA, 60 bp, Artificial
  Synthetic oligonucleotide
ttagaaaaatttaaatatggtaccggaattgttcagatgaattactcttctaatgtgtcg

SEQ ID NO: 118986 - DNA, 57 bp, Artificial
  Synthetic oligonucleotide
tgcgcttactgtgcaaccaatgcgctctatccggagtacatttgctaacttagctaa

SEQ ID NO: 118987 - DNA, 60 bp, Artificial
  Synthetic oligonucleotide
atgtaggtggacggacacagcattctgtaacgtatacacgtatgtatgacgcaattgatg

SEQ ID NO: 118988 - DNA, 60 bp, Artificial
  Synthetic oligonucleotide
cagcaatttcaaataatgctattctacctaccataccaacaatcaccggagtttcaccct

SEQ ID NO: 118989 - DNA, 60 bp, Artificial
  Synthetic oligonucleotide
ggagtttcacccttattacgtattgatacgagaactgaaccaatttggtacaatgatgcg

SEQ ID NO: 118990 - DNA, 60 bp, Artificial
  Synthetic oligonucleotide
aacagatggattgacttatgcaaacagaaccgagttctttattcgcgttatggttttatt

SEQ ID NO: 118991 - DNA, 56 bp, Artificial
  Synthetic oligonucleotide
ttttattgcatactgagcaccgttctacacgactaagtaaaccattgattcgtcga

SEQ ID NO: 118992 - DNA, 60 bp, Artificial
  Synthetic oligonucleotide
actaagtaaaccattgattcgtcgagtatttgataatgtagttcagccctatgtcgccaa

SEQ ID NO: 118993 - DNA, 60 bp, Artificial
  Synthetic oligonucleotide
cttatggcaatgccattggcgctacaggaacagcaaacgtacctacaaaagtgcaaccag

SEQ ID NO: 118994 - DNA, 60 bp, Artificial
  Synthetic oligonucleotide
tacatttgaagacatctatagatgccgtatgtagtgttgaaggcatactattattaatat

SEQ ID NO: 118995 - DNA, 60 bp, Artificial
  Synthetic oligonucleotide
gaggcaaattaacattccaggttatgaagtagagttggacaaattgcgtattggtatctc

SEQ ID NO: 118996 - DNA, 60 bp, Artificial
  Synthetic oligonucleotide
gcgtattggtatctctcaacctaaagttagtgaaagacagtatcaaagagcacgtgaatc

SEQ ID NO: 118997 - DNA, 60 bp, Artificial
  Synthetic oligonucleotide
gcacgtgaatctattaagaatatgttagggtcaggtgactataatattgcgccattacac

SEQ ID NO: 118998 - DNA, 60 bp, Artificial
  Synthetic oligonucleotide
aatattgcgccattacactttttattgcatactgagcaccgttctacacgactaagtaaa

SEQ ID NO: 118999 - DNA, 60 bp, Artificial
  Synthetic oligonucleotide
ccaacattatcatctgttgcaccaacactcgctaaaatagcacgtttaatgaaacctact

SEQ ID NO: 119000 - DNA, 59 bp, Artificial
  Synthetic oligonucleotide
attgcttacgtgtacataatttagttctggagagggctcaaagggtttttgatactagt

SEQ ID NO: 119001 - DNA, 60 bp, Artificial
  Synthetic oligonucleotide
ccaaatgtcacacaacatatgttaggacagattcaagcgagaatattgtttatatgcatg

SEQ ID NO: 119002 - DNA, 60 bp, Artificial
  Synthetic oligonucleotide
gtcaagctaatgcttttacagtcaaatctgaaaattcgattattaagatgttaaattcca

SEQ ID NO: 119003 - DNA, 60 bp, Artificial
  Synthetic oligonucleotide
gtaattgatgactatttttcacttgaaatgacgcctattattatgagaccaaaactttat

SEQ ID NO: 119004 - DNA, 60 bp, Artificial
  Synthetic oligonucleotide
aagtaaaacgagaagatattatgtcacttattaaagctttatcttatgaattcgatttaa

SEQ ID NO: 119005 - DNA, 59 bp, Artificial
  Synthetic oligonucleotide
tatcaagatttgtttttgcagtatgtatgtttccagatattattcgtcagttccacgca

SEQ ID NO: 119006 - DNA, 60 bp, Artificial
  Synthetic oligonucleotide
ggattaatgaacttggaagacaataaaccaccagaggcaaagatttcacagcaaagtgag

SEQ ID NO: 119007 - DNA, 60 bp, Artificial
  Synthetic oligonucleotide
gcaaagatttcacagcaaagtgagttagatatgggaaagattgatgaaacttcaggcgaa

SEQ ID NO: 119008 - DNA, 60 bp, Artificial
  Synthetic oligonucleotide
atccgaggctgtatatcgtacaatatggaactcctccgttatcactcaacgtattttagc

SEQ ID NO: 119009 - DNA, 60 bp, Artificial
  Synthetic oligonucleotide
tacgacaggccgctataaaatacagtgcagtgagaactcaagaggttatactctttgagt

SEQ ID NO: 119010 - DNA, 60 bp, Artificial
  Synthetic oligonucleotide
agatgcatcgcacttaaatccatattcgtcattgaatgtaggtggacggacacagcattc

SEQ ID NO: 119011 - DNA, 60 bp, Artificial
  Synthetic oligonucleotide
gatatcgatgtttaatgtagtgttgtcagccggatccgatgtgatacgacaggccgctat

SEQ ID NO: 119012 - DNA, 50 bp, Artificial
  Synthetic oligonucleotide
cgctacggaggataaacccacttcatctattgaatatcactcagatgaaa

SEQ ID NO: 119013 - DNA, 53 bp, Artificial
  Synthetic oligonucleotide
aggaaccagaaatagaatcttttgcagatagggctgagttggctatgatgata

SEQ ID NO: 119014 - DNA, 60 bp, Artificial
  Synthetic oligonucleotide
cgtatgcaacaggaaccgtagaagatttaagcagtactagtcatggacaggaaccagaaa

SEQ ID NO: 119015 - DNA, 60 bp, Artificial
  Synthetic oligonucleotide
gccgtcatcagattgcagatggaaaaacaatgtcaagctataccacaaacgaagcgaatt

SEQ ID NO: 119016 - DNA, 60 bp, Artificial
  Synthetic oligonucleotide
agtttaaaacccagagtagaaacaggattttttatgagaccaataagaatgtataagaac

SEQ ID NO: 119017 - DNA, 60 bp, Artificial
  Synthetic oligonucleotide
taccagcaaagatagtgtacaacacggagggagttccatcacgtatacctctaacacaac

SEQ ID NO: 119018 - DNA, 60 bp, Artificial
  Synthetic oligonucleotide
gaagcgaattataccagcaaagatagtgtacaacacggagggagttccatcacgtatacc

SEQ ID NO: 119019 - DNA, 60 bp, Artificial
  Synthetic oligonucleotide
cggtgtgctacgcactgtacgcgttaaattctttgatgcgcgacccccagacgatatttt

SEQ ID NO: 119020 - DNA, 59 bp, Artificial
  Synthetic oligonucleotide
gtatattgaagcggtgcagttacaagagttaaggaattcaattgggtggttagaaaggt

SEQ ID NO: 119021 - DNA, 52 bp, Artificial
  Synthetic oligonucleotide
aaaatgagaatcatggacatcacccaatcgctcaagatgggcaccaagctgg

SEQ ID NO: 119022 - DNA, 60 bp, Artificial
  Synthetic oligonucleotide
agatttgtggcgtataaagggaaaatgaggatcatggacatcacccaatcgctcaagatg

SEQ ID NO: 119023 - DNA, 60 bp, Artificial
  Synthetic oligonucleotide
atactatgaagcagaaggatggtgtggtgatagcagacattcacattccaaaagtgttca

SEQ ID NO: 119024 - DNA, 60 bp, Artificial
  Synthetic oligonucleotide
caagtcaaaattcacctatcgattggaattatcatgacgaggaaatgcataagtggcttg

SEQ ID NO: 119025 - DNA, 60 bp, Artificial
  Synthetic oligonucleotide
acctgttgacaagtcaaaattcacctatcgattggaattatcatgacgaggaaatgcata

SEQ ID NO: 119026 - DNA, 60 bp, Artificial
  Synthetic oligonucleotide
tctaagtctgcaagataacatgcacaagtatcaccacctgttgacaagtcaaaattcacc

SEQ ID NO: 119027 - DNA, 60 bp, Artificial
  Synthetic oligonucleotide
gccaagcgtcgccaatggtattaaggttgggattgacatagcagacagtgttgctgaagc

SEQ ID NO: 119028 - DNA, 60 bp, Artificial
  Synthetic oligonucleotide
gggccaagcgtcgccaatggtattaaggttgggattgacatagcagacagtgttgctgaa

SEQ ID NO: 119029 - DNA, 60 bp, Artificial
  Synthetic oligonucleotide
aaagtgttcaatgaccttagaaatacaacacttcattgcaaactagaaggtaagcaaaat

SEQ ID NO: 119030 - DNA, 60 bp, Artificial
  Synthetic oligonucleotide
gcagaaggatggtgtggtgatagcagacattcacattccaaaagtgttcaatgaccttag

SEQ ID NO: 119031 - DNA, 53 bp, Artificial
  Synthetic oligonucleotide
ggatcgccagtctctggctgaggattacagtgcattgaatttagcagttggtc

SEQ ID NO: 119032 - DNA, 60 bp, Artificial
  Synthetic oligonucleotide
catgatttaagtcgtaacgctaaacaagagatgatggatcgccagtctctggctgaggat

SEQ ID NO: 119033 - DNA, 60 bp, Artificial
  Synthetic oligonucleotide
cagctaaatagattaggttcatcaatgtataaggctgatcatgaacgtgaggctgaactg

SEQ ID NO: 119034 - DNA, 60 bp, Artificial
  Synthetic oligonucleotide
atcgctactcaacatcagctaaatagattaggttcatcaatgtataaggctgatcatgaa

SEQ ID NO: 119035 - DNA, 60 bp, Artificial
  Synthetic oligonucleotide
tgccaagagctgtaattgctaatgagcgtgaacattttatgaaaacgagaatagataaga

SEQ ID NO: 119036 - DNA, 50 bp, Artificial
  Synthetic oligonucleotide
agttcgggattgtcacagaacagtatcattagtctaacagggaatgacag

SEQ ID NO: 119037 - DNA, 60 bp, Artificial
  Synthetic oligonucleotide
atagataagattgaacatgatttaagtcgtaacgctaaacaagagatgatggatcgccag

SEQ ID NO: 119038 - DNA, 60 bp, Artificial
  Synthetic oligonucleotide
gccaagagctgtaattgctaatgagcgtgaacattttatgaaaacgagaatagataagat

SEQ ID NO: 119039 - DNA, 60 bp, Artificial
  Synthetic oligonucleotide
taagcaaaatatcgctggatatacagtctatgagtatctgattggaccttgggctcatta

SEQ ID NO: 119040 - DNA, 60 bp, Artificial
  Synthetic oligonucleotide
caatgaccttagaaatacaacacttcattgcaaactagaaggtaagcaaaatatcgctgg

SEQ ID NO: 119041 - DNA, 60 bp, Artificial
  Synthetic oligonucleotide
ttatctcaaggtgaattaataggatattttgaacagtatataaacttagcgttagaacca

SEQ ID NO: 119042 - DNA, 60 bp, Artificial
  Synthetic oligonucleotide
gttagaaccagataatctaagtctgcaagataacatgcacaagtatcaccacctgttgac

SEQ ID NO: 119043 - DNA, 60 bp, Artificial
  Synthetic oligonucleotide
aggaactggataggtattaacggcacctagagtaaaaaccaagatgtttaatgatcatat

SEQ ID NO: 119044 - DNA, 60 bp, Artificial
  Synthetic oligonucleotide
gggctcattacggtgacatagactactcagttgtagttgatacgctcaatgaggagacga

SEQ ID NO: 119045 - DNA, 60 bp, Artificial
  Synthetic oligonucleotide
gactaaaacttaaggtgtatgtgaaagattcgttggctgtgaaggtttttaggaactgga

SEQ ID NO: 119046 - DNA, 58 bp, Artificial
  Synthetic oligonucleotide
ttttgcatcatggcgtgggttacgcaagcgtatagttcgggattgtcacagaacagta

SEQ ID NO: 119047 - DNA, 60 bp, Artificial
  Synthetic oligonucleotide
ccatcgcacctgactctaactgatctaggctggcacacttggaatcagtataatgcaggt

SEQ ID NO: 119048 - DNA, 60 bp, Artificial
  Synthetic oligonucleotide
ctctaactgatctaggctggcacacttggaatcagtataatgcaggtaattggactaaca

SEQ ID NO: 119049 - DNA, 60 bp, Artificial
  Synthetic oligonucleotide
gaggagacgaaatggtattgtgagattattggtattgatggtcacctaatcattgagaag

SEQ ID NO: 119050 - DNA, 60 bp, Artificial
  Synthetic oligonucleotide
ggagacgaaatggtattgtgagattattggtattgatggtcacctaatcattgagaagag

SEQ ID NO: 119051 - DNA, 60 bp, Artificial
  Synthetic oligonucleotide
aaccgttaatgacgacggcttgacttcgttcaaaggtaagaatcatgacagactaaaact

SEQ ID NO: 119052 - DNA, 60 bp, Artificial
  Synthetic oligonucleotide
gacggcttgacttcgttcaaaggtaagaatcatgacagactaaaacttaaggtgtatgtg

SEQ ID NO: 119053 - DNA, 60 bp, Artificial
  Synthetic oligonucleotide
ctcagcaagcattggcattgacaatggctttgaaggatgcagcttcgatgttatctcaag

SEQ ID NO: 119054 - DNA, 60 bp, Artificial
  Synthetic oligonucleotide
ggcattgacaatggctttgaaggatgcagcttcgatgttatctcaaggtgaattaatagg

SEQ ID NO: 119055 - DNA, 60 bp, Artificial
  Synthetic oligonucleotide
gaacacagctctggagggaacaaaagttaaatttcaaaccaaagttactgctcagcaagc

SEQ ID NO: 119056 - DNA, 60 bp, Artificial
  Synthetic oligonucleotide
gctctggagggaacaaaagttaaatttcaaaccaaagttactgctcagcaagcattggca

SEQ ID NO: 119057 - DNA, 58 bp, Artificial
  Synthetic oligonucleotide
ggagctacaaatccgcttgtcaggggaaactggatgtactaatgggatttgacccgac

SEQ ID NO: 119058 - DNA, 50 bp, Artificial
  Synthetic oligonucleotide
tgggagatgctctgacttataatgtctttgcacaatatggaacaacttca

SEQ ID NO: 119059 - DNA, 60 bp, Artificial
  Synthetic oligonucleotide
tgttgctgaagctgcaatagctgtaaaagagtcaggaatcattacacaactgaatgacgt

SEQ ID NO: 119060 - DNA, 60 bp, Artificial
  Synthetic oligonucleotide
gctgcaatagctgtaaaagagtcaggaatcattacacaactgaatgacgtttatcacgct

SEQ ID NO: 119061 - DNA, 60 bp, Artificial
  Synthetic oligonucleotide
gccgctgtagtggctggcacgagcactgaattgattggtaatctgcaggcaatatacagt

SEQ ID NO: 119062 - DNA, 60 bp, Artificial
  Synthetic oligonucleotide
gctggatatacagtctatgagtatctgattggaccttgggctcattacggtgacatagac

SEQ ID NO: 119063 - DNA, 60 bp, Artificial
  Synthetic oligonucleotide
tcgcgatgaacgtcgattttgactacactaacctgttcggtgttgctcctgccgatggag

SEQ ID NO: 119064 - DNA, 59 bp, Artificial
  Synthetic oligonucleotide
tcagactctgaactctgttgttttcgactcacttacagccgcacgtttcatcgcgatga

SEQ ID NO: 119065 - DNA, 60 bp, Artificial
  Synthetic oligonucleotide
ccggcaatggattgaagtttcattatagcaagggtgttccgaccatctcacaacgtggtg

SEQ ID NO: 119066 - DNA, 60 bp, Artificial
  Synthetic oligonucleotide
cgccttggttccggcaatggattgaagtttcattatagcaagggtgttccgaccatctca

SEQ ID NO: 119067 - DNA, 60 bp, Artificial
  Synthetic oligonucleotide
cgtggtgaagctccggttaacggaaagatgatcgtcgtttggacgcctgtgttgtcgggt

SEQ ID NO: 119068 - DNA, 60 bp, Artificial
  Synthetic oligonucleotide
gaccatctcacaacgtggtgaagctccggttaacggaaagatgatcgtcgtttggacgcc

SEQ ID NO: 119069 - DNA, 60 bp, Artificial
  Synthetic oligonucleotide
ggacgcctgtgttgtcgggttcctcactccatgtcctcaaccgtgttatcctctccatgt

SEQ ID NO: 119070 - DNA, 60 bp, Artificial
  Synthetic oligonucleotide
tttggacgcctgtgttgtcgggttcctcactccatgtcctcaaccgtgttatcctctcca

SEQ ID NO: 119071 - DNA, 60 bp, Artificial
  Synthetic oligonucleotide
tcagactctgaactctgttgttttcgactcacttacagccgcacgtttcatcgcgatgaa

SEQ ID NO: 119072 - DNA, 60 bp, Artificial
  Synthetic oligonucleotide
atcctctccatgtactccgaatatgtgatcaatggtatcccagaatttctggcttatgcc

SEQ ID NO: 119073 - DNA, 60 bp, Artificial
  Synthetic oligonucleotide
tgtcgatatccatgcgagcgaacaatttcagatgtggcatgacgctagttcgaatggact

SEQ ID NO: 119074 - DNA, 60 bp, Artificial
  Synthetic oligonucleotide
ccgatggagagccagacccaacggacaacctaacgatcgaggaagctgaacgcaactacc

SEQ ID NO: 119075 - DNA, 60 bp, Artificial
  Synthetic oligonucleotide
gccgatggagagccagacccaacggacaacctaacgatcgaggaagctgaacgcaactac

SEQ ID NO: 119076 - DNA, 60 bp, Artificial
  Synthetic oligonucleotide
cgtcgattttgactacactaacctgttcggtgttgctcctgccgatggagagccagaccc

SEQ ID NO: 119077 - DNA, 60 bp, Artificial
  Synthetic oligonucleotide
gtgtcaccaaggccgtcgtttgatcgataggtggagagagagtgaagcgaggtagcaaac

SEQ ID NO: 119078 - DNA, 60 bp, Artificial
  Synthetic oligonucleotide
aagttgatgtgtagagtgtcaccaaggccgtcgtttgatcgataggtggagagagagtga

SEQ ID NO: 119079 - DNA, 52 bp, Artificial
  Synthetic oligonucleotide
cgaatggactccaaggttaggcgcgttgttgcgagtggattcggtgagcgag

SEQ ID NO: 119080 - DNA, 60 bp, Artificial
  Synthetic oligonucleotide
gagcgaacaatttcagatgtggcatgacgctagttcgaatggactccaaggttaggcgcg

SEQ ID NO: 119081 - DNA, 60 bp, Artificial
  Synthetic oligonucleotide
acgcattctattctactaaggacatgatggataccaacgaagttcgtacccgccttggtt

SEQ ID NO: 119082 - DNA, 60 bp, Artificial
  Synthetic oligonucleotide
ctaaggacatgatggataccaacgaagttcgtacccgccttggttccggcaatggattga

SEQ ID NO: 119083 - DNA, 60 bp, Artificial
  Synthetic oligonucleotide
cagatccttccgccacaatgcctctcacatctaacaactttgctacagccactattgttg

SEQ ID NO: 119084 - DNA, 60 bp, Artificial
  Synthetic oligonucleotide
actttgctacagccactattgttgtcgaacgaacgaatcgcaatcagaacaatcgtcgtg

SEQ ID NO: 119085 - DNA, 60 bp, Artificial
  Synthetic oligonucleotide
cgtgcccctgcggtgtatccctcaccaagcctctctgtgtatcatctatcagatccttcc

SEQ ID NO: 119086 - DNA, 60 bp, Artificial
  Synthetic oligonucleotide
tgtgtatcatctatcagatccttccgccacaatgcctctcacatctaacaactttgctac

SEQ ID NO: 119087 - DNA, 60 bp, Artificial
  Synthetic oligonucleotide
acacaaagctgatgctctcaagaatcctgaatttcgcggactcaaccttgacgcattcta

SEQ ID NO: 119088 - DNA, 60 bp, Artificial
  Synthetic oligonucleotide
gctctcaagaatcctgaatttcgcggactcaaccttgacgcattctattctactaaggac

SEQ ID NO: 119089 - DNA, 60 bp, Artificial
  Synthetic oligonucleotide
gctacagccactattgttgtcgaacgaacgaatcgcaatcagaacaatcgtcgtgaaatc

SEQ ID NO: 119090 - DNA, 60 bp, Artificial
  Synthetic oligonucleotide
aatcgtcgtgaaatcattgctaaaccagcctttttgacgctcctcttttcacacaaagct

SEQ ID NO: 119091 - DNA, 60 bp, Artificial
  Synthetic oligonucleotide
acaattttaagcgaacgtgcccctgcggtgtatccctcaccaagcctctctgtgtatcat

SEQ ID NO: 119092 - DNA, 60 bp, Artificial
  Synthetic oligonucleotide
taatggaattagccatatctaaagcaattaagccacaagtagctggatcaatagtaccaa

SEQ ID NO: 119093 - DNA, 60 bp, Artificial
  Synthetic oligonucleotide
gtcataaacaagaaaatgatagcattgcataatatatcaatttcaaagaacatggcacca

SEQ ID NO: 119094 - DNA, 60 bp, Artificial
  Synthetic oligonucleotide
gcttcaagtgagttatcaactgcattagcgcattcacaaggacattttaagagtttccaa

SEQ ID NO: 119095 - DNA, 60 bp, Artificial
  Synthetic oligonucleotide
gccatatctaaagcaattaagccacaagtagctggatcaatagtaccaaagcctatacca

SEQ ID NO: 119096 - DNA, 54 bp, Artificial
  Synthetic oligonucleotide
tagacgttattaccccgctttacagagagagatagacgttcatgcattatctgc

SEQ ID NO: 119097 - DNA, 60 bp, Artificial
  Synthetic oligonucleotide
attcagcaaagtgattatgaagtcaagatggtaggagatgcactttttacagcaattatg

SEQ ID NO: 119098 - DNA, 60 bp, Artificial
  Synthetic oligonucleotide
ctttacgttagacttcagtgataagtccgatagactagtcataaacaagaaaatgatagc

SEQ ID NO: 119099 - DNA, 60 bp, Artificial
  Synthetic oligonucleotide
ctgcttctgctggtgtaggaattgaactgccagaagagatcataaatatggtgaaagata

SEQ ID NO: 119100 - DNA, 60 bp, Artificial
  Synthetic oligonucleotide
tgtcttgcaagaagctttacttgtcgagagatataatgatttggatccaataataaatga

SEQ ID NO: 119101 - DNA, 60 bp, Artificial
  Synthetic oligonucleotide
ttgttatacctattaaagaaaggatctggtaagcgtgtcttgcaagaagctttacttgtc

SEQ ID NO: 119102 - DNA, 60 bp, Artificial
  Synthetic oligonucleotide
aagcgagtaatatacgtgatagtgctcagttaaaatggatcgaagcgattaaatattata

SEQ ID NO: 119103 - DNA, 60 bp, Artificial
  Synthetic oligonucleotide
cattttaagagtttccaatatgatagagatatgtttgcagaatcagtcaaaatagcgtct

SEQ ID NO: 119104 - DNA, 60 bp, Artificial
  Synthetic oligonucleotide
atagtaccaaagcctataccaacgtcatggttacagaaagaccccaaaatagtcctcagt

SEQ ID NO: 119105 - DNA, 60 bp, Artificial
  Synthetic oligonucleotide
ggcaccatattcagatgcatggatgttgtatacttgtctcaatcacacttataatgcttc

SEQ ID NO: 119106 - DNA, 60 bp, Artificial
  Synthetic oligonucleotide
attaacaatttgttattcagccagagacgatcgtacttattatggaacattaatggaatt

SEQ ID NO: 119107 - DNA, 60 bp, Artificial
  Synthetic oligonucleotide
agcaattatggaaaaatttgatagtcacaaagtacgtatggaaaaaggagatagactaca

SEQ ID NO: 119108 - DNA, 60 bp, Artificial
  Synthetic oligonucleotide
gcctataccaacgtcatggttacagaaagaccccaaaatagtcctcagtgctaagtaccc

SEQ ID NO: 119109 - DNA, 60 bp, Artificial
  Synthetic oligonucleotide
aaatattatatacagtttaaagattacttatatccatattcaatcaatccacgcagacta

SEQ ID NO: 119110 - DNA, 60 bp, Artificial
  Synthetic oligonucleotide
atagactacataactttacgttagacttcagtgataagtccgatagactagtcataaaca

SEQ ID NO: 119111 - DNA, 60 bp, Artificial
  Synthetic oligonucleotide
gtacaattgatgagcccaaatttcgtattgacgacgaaataatgagaatgtacaatttgg

SEQ ID NO: 119112 - DNA, 60 bp, Artificial
  Synthetic oligonucleotide
tgctaaatattcaagaggaaattagagcaacaattattgatagagaactaatttcaaagc

SEQ ID NO: 119113 - DNA, 50 bp, Artificial
  Synthetic oligonucleotide
cgtacgtaaattgttgcaatttcaacgaatacatcaatttgttgtactat

SEQ ID NO: 119114 - DNA, 56 bp, Artificial
  Synthetic oligonucleotide
gttcagaactacaagtatgagaaattgaaggctaaattagctacaagacttaatgt

SEQ ID NO: 119115 - DNA, 61 bp, Artificial
  Synthetic oligonucleotide
ccgcataacgatagtcgtgaaaatgtgcaaaatcagaatatgcttagatttattggtattc

SEQ ID NO: 119116 - DNA, 60 bp, Artificial
  Synthetic oligonucleotide
atgacatttcatgtacaattgatgagcccaaatttcgtattgacgacgaaataatgagaa

SEQ ID NO: 119117 - DNA, 60 bp, Artificial
  Synthetic oligonucleotide
catggaaatgataaagacgtgaatttctttatgaaatatttagttgaaaagttttcacag

SEQ ID NO: 119118 - DNA, 60 bp, Artificial
  Synthetic oligonucleotide
cacagctaggtttgatactggagagagacgaatcacgtaattttggagtattcttacaac

SEQ ID NO: 119119 - DNA, 63 bp, Artificial
  Synthetic oligonucleotide
ggattgcaatatttactagcgaagattacaaaacaaggaaatcagttcaagaatcatgtaccg

SEQ ID NO: 119120 - DNA, 60 bp, Artificial
  Synthetic oligonucleotide
ttcgtattagtggagccaaggcgatatttgtagatgaccgtatctcttaggtaccggagg

SEQ ID NO: 119121 - DNA, 60 bp, Artificial
  Synthetic oligonucleotide
atacattatggttaaaatacgaatgtcataatttacgagtcgcattaacaccgagatatg

SEQ ID NO: 119122 - DNA, 60 bp, Artificial
  Synthetic oligonucleotide
atcatccgtgtcaagtttattgaatcaagataatatacctgcagacgcgaataagaaagc

SEQ ID NO: 119123 - DNA, 60 bp, Artificial
  Synthetic oligonucleotide
gatacctgggatggattcaaagatgtattgcctaaaacttcaactgcttggccactatta

SEQ ID NO: 119124 - DNA, 60 bp, Artificial
  Synthetic oligonucleotide
gtgaaggagatgcaattgtatgttttcagaaccatcttgagaacgcgcaaataagttatc

SEQ ID NO: 119125 - DNA, 60 bp, Artificial
  Synthetic oligonucleotide
gaccgtttaattatttatgtaattttgattggtttgaatttttgtcacgatcaaaagatg

SEQ ID NO: 119126 - DNA, 60 bp, Artificial
  Synthetic oligonucleotide
tcaaaagatgaacttggtatgcattataatatgattcgagacttaatatcaatgtcttct

SEQ ID NO: 119127 - DNA, 60 bp, Artificial
  Synthetic oligonucleotide
taatgatatgtacccattaaaccataacagtactaattttcttgaagatagaccgtttaa

SEQ ID NO: 119128 - DNA, 57 bp, Artificial
  Synthetic oligonucleotide
caacctacgaatgacccaaacacgtatgaaacaaatagaagatacgacatttaagat

SEQ ID NO: 119129 - DNA, 65 bp, Artificial
  Synthetic oligonucleotide
caagtcaaatgtcaaattccgaaattaattatgcaaccgccactttacaataatgatatgtaccc

SEQ ID NO: 119130 - DNA, 60 bp, Artificial
  Synthetic oligonucleotide
cgcccaacgcaccgtaccgatggcaacagagccgaacgagatcaacctacgaatgaccca

SEQ ID NO: 119131 - DNA, 60 bp, Artificial
  Synthetic oligonucleotide
ctgcagcaactacattcactaatgaattcgggaaaagtatagcaatagcgcatcttatga

SEQ ID NO: 119132 - DNA, 60 bp, Artificial
  Synthetic oligonucleotide
ctcaaatcatcacacgcaaatgttgactttactaatagaaactgcagcaactacattcac

SEQ ID NO: 119133 - DNA, 60 bp, Artificial
  Synthetic oligonucleotide
ttcagccagagacgatcgtacttattatggaacattaatggaattagccatatctaaagc

SEQ ID NO: 119134 - DNA, 60 bp, Artificial
  Synthetic oligonucleotide
tatcatctgcagacgttaaaggcatggatacacatatacagataaatgcagcaatgaatc

SEQ ID NO: 119135 - DNA, 55 bp, Artificial
  Synthetic oligonucleotide
aaacaaagtggaaatgcaagtgatattcatgatcttttattttatacaactcaag

SEQ ID NO: 119136 - DNA, 51 bp, Artificial
  Synthetic oligonucleotide
aaatagcgagagcaccttctcatggtaaacaaagtggaaatgcaagtgata

SEQ ID NO: 119137 - DNA, 60 bp, Artificial
  Synthetic oligonucleotide
atgaagcgaataaaccattctcaaaaatagcgagagcaccttctcatggtaaacaaagtg

SEQ ID NO: 119138 - DNA, 60 bp, Artificial
  Synthetic oligonucleotide
gcctagcgaatttctcacagacgactggtataaacagtaaatattttggtcaaattccga

SEQ ID NO: 119139 - DNA, 60 bp, Artificial
  Synthetic oligonucleotide
gaatttgaatggtggacagcaagcaattgctttcggcctagcgaatttctcacagacgac

SEQ ID NO: 119140 - DNA, 60 bp, Artificial
  Synthetic oligonucleotide
aaatgtttatgagaggaatttgaatggtggacagcaagcaattgctttcggcctagcgaa

SEQ ID NO: 119141 - DNA, 60 bp, Artificial
  Synthetic oligonucleotide
cgttaaaggcatggatacacatatacagataaatgcagcaatgaatcagcatcttggagc

SEQ ID NO: 119142 - DNA, 60 bp, Artificial
  Synthetic oligonucleotide
tgagatcagtaaccatgcggccgacatcacaggaacaacgaaatgaaatgttctttatgt

SEQ ID NO: 119143 - DNA, 60 bp, Artificial
  Synthetic oligonucleotide
cggccaacatcacaggaacaacgaaatgaaatgttctttatgtgcttagatatgacgctg

SEQ ID NO: 119144 - DNA, 60 bp, Artificial
  Synthetic oligonucleotide
cagtaaccatgcggccgacatcacaggaacaacgaaatgaaatgttctttatgtgcttag

SEQ ID NO: 119145 - DNA, 60 bp, Artificial
  Synthetic oligonucleotide
cacaggaacaacgaaatgaaatgttctttatgtgcttagatatgacgctggctgcggcga

SEQ ID NO: 119146 - DNA, 60 bp, Artificial
  Synthetic oligonucleotide
ggagcactaagttaccgacttgactgtctaacagcaagtaaaaggtcaatggcagactgc

SEQ ID NO: 119147 - DNA, 60 bp, Artificial
  Synthetic oligonucleotide
ggcttttaaaagcacttgctggaaatggcgactcaggcttccgttgaatggatctttaac

SEQ ID NO: 119148 - DNA, 60 bp, Artificial
  Synthetic oligonucleotide
atgcatgtataggtagagctaaaactatagataaagcattaaatgatccaaaagtagcag

SEQ ID NO: 119149 - DNA, 60 bp, Artificial
  Synthetic oligonucleotide
cttgctggaaatggcgactcaggcttccgttgaatggatctttaacgtagctggatcagc

SEQ ID NO: 119150 - DNA, 60 bp, Artificial
  Synthetic oligonucleotide
aaagtagcagagagaaatgaagaatggtatacaaatgtagcaacaatcagtagacttgat

SEQ ID NO: 119151 - DNA, 60 bp, Artificial
  Synthetic oligonucleotide
catgaaattggaatcagcagaagcaattggtagtgggagatctaagaaggaagctaaaag

SEQ ID NO: 119152 - DNA, 60 bp, Artificial
  Synthetic oligonucleotide
tacatatacatgttacatgaaattggaatcagcagaagcaattggtagtgggagatctaa

SEQ ID NO: 119153 - DNA, 60 bp, Artificial
  Synthetic oligonucleotide
caacttggtatttaaattaatgtgataataggaattacgacgttcagtccagaatatacg

SEQ ID NO: 119154 - DNA, 60 bp, Artificial
  Synthetic oligonucleotide
ggagatctaagaaggaagctaaaagaattgcagcatatgacattcttgatcaacttggta

SEQ ID NO: 119155 - DNA, 61 bp, Artificial
  Synthetic oligonucleotide
gtagcagagagaaatgaagaatggtatacaaatgtagcaacaatcagtagacttgatttag

SEQ ID NO: 119156 - DNA, 60 bp, Artificial
  Synthetic oligonucleotide
tagacttgatttagaattagcagaattaaaattgatgttatctaatctaggaattaaaag

SEQ ID NO: 119157 - DNA, 60 bp, Artificial
  Synthetic oligonucleotide
tacactaaatgactacataactaaatatcaattaaaacttgaatgcactttcgacatttt

SEQ ID NO: 119158 - DNA, 60 bp, Artificial
  Synthetic oligonucleotide
cggagatatcgaattaaatcctggacctgatatactagttacactaaatgactacataac

SEQ ID NO: 119159 - DNA, 60 bp, Artificial
  Synthetic oligonucleotide
attttaatttccggagatatcgaattaaatcctggacctgatatactagttacactaaat

SEQ ID NO: 119160 - DNA, 60 bp, Artificial
  Synthetic oligonucleotide
tcatgttcatataattcaactgctgctcttgtttcgactattttgggtacacctattaaa

SEQ ID NO: 119161 - DNA, 50 bp, Artificial
  Synthetic oligonucleotide
acctattaaaatgtataatgaatctggacaacctttgtttgatgtgggaa

SEQ ID NO: 119162 - DNA, 60 bp, Artificial
  Synthetic oligonucleotide
agaatatacggagcactaagttaccgacttgactgtctaacagcaagtaaaaggtcaatg

SEQ ID NO: 119163 - DNA, 60 bp, Artificial
  Synthetic oligonucleotide
attaatgtgataataggaattacgacgttcagtccagaatatacggagcactaagttacc

SEQ ID NO: 119164 - DNA, 60 bp, Artificial
  Synthetic oligonucleotide
ggaataatgaatctccagattttgatagttggaatgaaaggagcaatttaaaaattgtaa

SEQ ID NO: 119165 - DNA, 60 bp, Artificial
  Synthetic oligonucleotide
gaatataacggcagcgtacgtatcatcaactttagcgcaagtatcgatgaacgcaggtgc

SEQ ID NO: 119166 - DNA, 53 bp, Artificial
  Synthetic oligonucleotide
acatgtgagggcagttatggcacggcataacgctcacatgcgcccgtgtcgct

SEQ ID NO: 119167 - DNA, 60 bp, Artificial
  Synthetic oligonucleotide
ttatacaatggaatcggcaaatgaaattgcgagaatgagtggagaaactggaacatgggg

SEQ ID NO: 119168 - DNA, 60 bp, Artificial
  Synthetic oligonucleotide
ctggaacatgggggcctgaccgacaaccatttggttacttcttgacggcagcggaagtta

SEQ ID NO: 119169 - DNA, 60 bp, Artificial
  Synthetic oligonucleotide
ggggcctgaccgacaaccatttggttacttcttgacggcagcggaagttacacaacacgg

SEQ ID NO: 119170 - DNA, 60 bp, Artificial
  Synthetic oligonucleotide
cgtacgtatcatcaactttagcgcaagtatcgatgaacgcaggtgcgcgcggggatattc

SEQ ID NO: 119171 - DNA, 60 bp, Artificial
  Synthetic oligonucleotide
gagaaactggaacatgggggcctgaccgacaaccatttggttacttcttgacggcagcgg

SEQ ID NO: 119172 - DNA, 60 bp, Artificial
  Synthetic oligonucleotide
accctatacaatggaatcggcaaatgaaattgcgagaatgagtggagaaactggaacatg

SEQ ID NO: 119173 - DNA, 60 bp, Artificial
  Synthetic oligonucleotide
ctatacaatggaatcggcaaatgaaattgcgagaatgagtggagaaactggaacatgggg

SEQ ID NO: 119174 - DNA, 60 bp, Artificial
  Synthetic oligonucleotide
gaatgttggaaacatatctcctgattatatacaaaatctggccacgattggggttttagc

SEQ ID NO: 119175 - DNA, 60 bp, Artificial
  Synthetic oligonucleotide
acagggtccgataaatagagctgttgcacaaaacgcctacatgtgagggcagttatggca

SEQ ID NO: 119176 - DNA, 60 bp, Artificial
  Synthetic oligonucleotide
ttgcgcaaaacgcctacatgtgagggcagttatggcacggcataacgctcacatgcgccc

SEQ ID NO: 119177 - DNA, 60 bp, Artificial
  Synthetic oligonucleotide
tgcacaaaacgcctacatgtgagggcagttatggcacggcataacgctcacatgcgcccg

SEQ ID NO: 119178 - DNA, 60 bp, Artificial
  Synthetic oligonucleotide
cagggtccgataaatagagctgttgcacaaaacgcctacatgtgagggcagttatggcac

SEQ ID NO: 119179 - DNA, 60 bp, Artificial
  Synthetic oligonucleotide
acaaggtccgataaatagagctgttgcacaaaacgcctacatgtgagggcagttatggca

SEQ ID NO: 119180 - DNA, 60 bp, Artificial
  Synthetic oligonucleotide
gggtccgataaatagagctgttgcacaaaacgcctacatgtgagggcagttatggcacgg

SEQ ID NO: 119181 - DNA, 60 bp, Artificial
  Synthetic oligonucleotide
ggtccgataaatagagctgttgcacaaaacgcctacatgtgagggcagttatggcacggc

SEQ ID NO: 119182 - DNA, 60 bp, Artificial
  Synthetic oligonucleotide
gctgcggcgaatctgaatgttggaaacatatctcctgattatatacaaaatctggccacg

SEQ ID NO: 119183 - DNA, 60 bp, Artificial
  Synthetic oligonucleotide
gctgcggcgaatctgaatgttggaaacatatctcctgattatatacaaaatttggccacg

SEQ ID NO: 119184 - DNA, 60 bp, Artificial
  Synthetic oligonucleotide
accttatacaatggaatcggcaaatgaaattgcgagaatgagtggagaaactggaacatg

SEQ ID NO: 119185 - DNA, 60 bp, Artificial
  Synthetic oligonucleotide
gagattttgggaatcgcaattaatagatacaatgggttaacacttagatcagtcacaatg

SEQ ID NO: 119186 - DNA, 60 bp, Artificial
  Synthetic oligonucleotide
cagcgtacgtatcatcaactttagcgcaagtatcgatgaacgcaggtgcgcgcggggata

SEQ ID NO: 119187 - DNA, 60 bp, Artificial
  Synthetic oligonucleotide
ggcggcgtacgtatcatcaactttagcgcaagtatcgatgaacgcaggtgcgcgcgggga

SEQ ID NO: 119188 - DNA, 60 bp, Artificial
  Synthetic oligonucleotide
tgtgtttagatatggttctagctgcggcgaatctgaatgttggaaacatatctcctgatt

SEQ ID NO: 119189 - DNA, 60 bp, Artificial
  Synthetic oligonucleotide
tagatatggttctagctgcggcgaatctgaatgttggaaacatatctcctgactatatac

SEQ ID NO: 119190 - DNA, 60 bp, Artificial
  Synthetic oligonucleotide
tagatctggttctagctgcggcgaatctgaatgttggaaacatatctcctgactatatac

SEQ ID NO: 119191 - DNA, 60 bp, Artificial
  Synthetic oligonucleotide
gtgtttagatatggttctagctgcggcgaatctgaatgttggaaacatatctcctgatta

SEQ ID NO: 119192 - DNA, 60 bp, Artificial
  Synthetic oligonucleotide
gctgcggcgaatctgaatgttggaaacatatctcctgactatatacaaaatctggccacg

SEQ ID NO: 119193 - DNA, 60 bp, Artificial
  Synthetic oligonucleotide
gcggaagttacacaacacggacgtttcagattacgggcgggtcagaatataacggcagcg

SEQ ID NO: 119194 - DNA, 60 bp, Artificial
  Synthetic oligonucleotide
cttcttgacggcagcggaagttacacaacacggacgtttcagattacgggcgggtcagaa

SEQ ID NO: 119195 - DNA, 60 bp, Artificial
  Synthetic oligonucleotide
atttggttacttcttgacggcagcggaagttacacaacacggacgtttcagattacgggc

SEQ ID NO: 119196 - DNA, 60 bp, Artificial
  Synthetic oligonucleotide
aacggcggcgtacgtatcatcaactttagcgcaagtatcgatgaacgcaggtgcgcgcgg

SEQ ID NO: 119197 - DNA, 60 bp, Artificial
  Synthetic oligonucleotide
aacggcatcgtacgtatcatcaactttagcgcaagtatcgatgaacgcaggtgcgcgcgg

SEQ ID NO: 119198 - DNA, 60 bp, Artificial
  Synthetic oligonucleotide
aacggcagcgtacgtatcatcaactttagcgcaagtatcgatgaacgcaggtgcgcgcgg

SEQ ID NO: 119199 - DNA, 60 bp, Artificial
  Synthetic oligonucleotide
gaatataacggcagcgtacgtatcatcaactttagcgcaagtatcgatgaatgcaggtgc

SEQ ID NO: 119200 - DNA, 60 bp, Artificial
  Synthetic oligonucleotide
cgcaattaatagatacaatgggttaacacttagatcagtcacaatgcggccaacttcgca

SEQ ID NO: 119201 - DNA, 60 bp, Artificial
  Synthetic oligonucleotide
ttttgggaatcgcaattaatagatacaatgggttaacacttagatcagtcacaatgcggc

SEQ ID NO: 119202 - DNA, 60 bp, Artificial
  Synthetic oligonucleotide
ggggatgcactaaacgcattcaaggcaagaaatcgtgatgtatttagaatgatgctattc

SEQ ID NO: 119203 - DNA, 60 bp, Artificial
  Synthetic oligonucleotide
ttcactagaaggggatgcactaaacgcattcaaggcaagaaatcgtgatgtatttagaat

SEQ ID NO: 119204 - DNA, 60 bp, Artificial
  Synthetic oligonucleotide
gcgatgtagtcaactggaaaattctagcttttctaatagatctatgttcactagaagggg

SEQ ID NO: 119205 - DNA, 60 bp, Artificial
  Synthetic oligonucleotide
tcgcgcgatgtagtcaactggaaaattctagcttttctaatagatctatgttcactagaa

SEQ ID NO: 119206 - DNA, 60 bp, Artificial
  Synthetic oligonucleotide
cccacgttgggttagaattggcgggtacagacgcagagcgtgcagcaggtgttatgccag

SEQ ID NO: 119207 - DNA, 60 bp, Artificial
  Synthetic oligonucleotide
ttacgcccacgttgggttagaattggcgggtacagacgcagagcgtgcagcaggtgttat

SEQ ID NO: 119208 - DNA, 57 bp, Artificial
  Synthetic oligonucleotide
ggcaaagtttgcagctacttatgctaaactgggcaacgcttcaactcccagatatag

SEQ ID NO: 119209 - DNA, 60 bp, Artificial
  Synthetic oligonucleotide
gctcagcctaacacgtcagcgcgtctgggtttggacggtgtcatttataataacgaaacg

SEQ ID NO: 119210 - DNA, 60 bp, Artificial
  Synthetic oligonucleotide
agctcagcctaacacgtcagcgcgtctgggtttggacggtgtcatttataataacgaaac

SEQ ID NO: 119211 - DNA, 53 bp, Artificial
  Synthetic oligonucleotide
cgcaagcgctattcggtattagcgcgcagaatgtaaacgctcacggctacttc

SEQ ID NO: 119212 - DNA, 60 bp, Artificial
  Synthetic oligonucleotide
tcacctattgcgctggctcaaaagaagcacgaaatgatgttacatacgcacgaaatacac

SEQ ID NO: 119213 - DNA, 60 bp, Artificial
  Synthetic oligonucleotide
acatggttgaacgagagacggtaagcaagatgaatgagatagattctatgaatatgacgt

SEQ ID NO: 119214 - DNA, 60 bp, Artificial
  Synthetic oligonucleotide
agacggtaagcaagatgaatgagatagattctatgaatatgacgtcctggacggaagagc

SEQ ID NO: 119215 - DNA, 60 bp, Artificial
  Synthetic oligonucleotide
aatatgacgtcctggacggaagagctcgctgaagtggagcaaacgaccgtatatggaagg

SEQ ID NO: 119216 - DNA, 60 bp, Artificial
  Synthetic oligonucleotide
cgtcctggacggaagagctcgctgaagtggagcaaacgaccgtatatggaaggcaccaga

SEQ ID NO: 119217 - DNA, 60 bp, Artificial
  Synthetic oligonucleotide
aagatacggccgtacttgtacagcgagcgagctcagacgccgacgagaatgagtatggca

SEQ ID NO: 119218 - DNA, 60 bp, Artificial
  Synthetic oligonucleotide
cggccgtacttgtacagcgagcgagctcagacgccgacgagaatgagtatggcaacagtg

SEQ ID NO: 119219 - DNA, 60 bp, Artificial
  Synthetic oligonucleotide
gagtatggcaacagtgtgagcgagatgactatgggtacgcagtcagacgacatcttgtga

SEQ ID NO: 119220 - DNA, 60 bp, Artificial
  Synthetic oligonucleotide
gtgagcgagatgactatgggtacgcagtcagacgacatcttgtgactagcaggcgttacc

SEQ ID NO: 119221 - DNA, 60 bp, Artificial
  Synthetic oligonucleotide
catcttgtgactagcaggcgttaccgtgacggagagtgaatgttgatttgatgacagtat

SEQ ID NO: 119222 - DNA, 60 bp, Artificial
  Synthetic oligonucleotide
acagcaaagatgttacaacaaccaactggaggatataccacactagaacaattcactttc

SEQ ID NO: 119223 - DNA, 60 bp, Artificial
  Synthetic oligonucleotide
ttaagaaagttattccaacgcctgaaactcatttacctagtgctcgaaacgtgcctggaa

SEQ ID NO: 119224 - DNA, 60 bp, Artificial
  Synthetic oligonucleotide
atgacagtatatggggcgttctgaacgttgggggagtgacaagatctgcgctgcccgggt

SEQ ID NO: 119225 - DNA, 60 bp, Artificial
  Synthetic oligonucleotide
gcaggcgttaccgtgacggagagtgaatgttgatttgatgacagtatatggggcgttctg

SEQ ID NO: 119226 - DNA, 60 bp, Artificial
  Synthetic oligonucleotide
actaagcgtgtggatcgagtgatagagtatattggagtgaactcaatgcgcacagcaggt

SEQ ID NO: 119227 - DNA, 60 bp, Artificial
  Synthetic oligonucleotide
gtcaacagaaaggttactaagcgtgtggatcgagtgatagagtatattggagtgaactca

SEQ ID NO: 119228 - DNA, 60 bp, Artificial
  Synthetic oligonucleotide
gctattcatcatgtccaccgcagttgcggcgaatgtggtcaacagaaaggttactaagcg

SEQ ID NO: 119229 - DNA, 60 bp, Artificial
  Synthetic oligonucleotide
tatttagaatgatgctattcatcatgtccaccgcagttgcggcgaatgtggtcaacagaa

SEQ ID NO: 119230 - DNA, 60 bp, Artificial
  Synthetic oligonucleotide
cctcagagggtgagaacgcgttagtacgacacaatcgctacatgacagaaagtttcaaag

SEQ ID NO: 119231 - DNA, 60 bp, Artificial
  Synthetic oligonucleotide
ggtcaatgccagatatgcacacaccacggacaagcatcacctcagagggtgagaacgcgt

SEQ ID NO: 119232 - DNA, 60 bp, Artificial
  Synthetic oligonucleotide
agctgcgactaggtcaatgccagatatgcacacaccacggacaagcatcacctcagaggg

SEQ ID NO: 119233 - DNA, 60 bp, Artificial
  Synthetic oligonucleotide
gcgcacagcaggtagaaccgcaactatcacctatgatctatctagacatgaatttgccgc

SEQ ID NO: 119234 - DNA, 60 bp, Artificial
  Synthetic oligonucleotide
agtttcaaaggtttatcacctattgcgctggctcaaaagaagcacgaaatgatgttacat

SEQ ID NO: 119235 - DNA, 60 bp, Artificial
  Synthetic oligonucleotide
ctcagagggtgagaacgcgttagtacgacacaatcgctacatgacagaaagtttcaaagg

SEQ ID NO: 119236 - DNA, 60 bp, Artificial
  Synthetic oligonucleotide
tgaattatggcttgctaaaagcagatgatccaaagcttgatatacttaagcggatatcag

SEQ ID NO: 119237 - DNA, 60 bp, Artificial
  Synthetic oligonucleotide
cgcattcttaacgcagatagataccaagttaatgtcggttcagagcgtcttaaacgacgt

SEQ ID NO: 119238 - DNA, 60 bp, Artificial
  Synthetic oligonucleotide
cgctggcaaccgcatcttttataacggagtgtcggtgtattttaaaatgcagaaaaattc

SEQ ID NO: 119239 - DNA, 59 bp, Artificial
  Synthetic oligonucleotide
gcgccgaaccgcgaaaggctcatcctggatatgaattctcaattggcgagaattgacaa

SEQ ID NO: 119240 - DNA, 60 bp, Artificial
  Synthetic oligonucleotide
acgcagatagataccaagttaatgtcggttcagagcgtcttaaacgacgtacaacggagg

SEQ ID NO: 119241 - DNA, 60 bp, Artificial
  Synthetic oligonucleotide
accctggaaacgttcactcattgagggacctgtataatgtgttcaaagatgcgccgaacc

SEQ ID NO: 119242 - DNA, 60 bp, Artificial
  Synthetic oligonucleotide
actcattgagggacctgtataatgtgttcaaagatgcgccgaaccgcgagaggctcatcc

SEQ ID NO: 119243 - DNA, 60 bp, Artificial
  Synthetic oligonucleotide
gacctaaacgatgggtagacgagaatgattttaaacaatatatacagtccatttatgacg

SEQ ID NO: 119244 - DNA, 60 bp, Artificial
  Synthetic oligonucleotide
gtgatgacactatcaggatagtcgatgattgcacgtttcaattggcatctgcacttacgc

SEQ ID NO: 119245 - DNA, 60 bp, Artificial
  Synthetic oligonucleotide
tggcatctgcacttacgctaactaatgaatttgcatctgattccgcaaatctgctgggaa

SEQ ID NO: 119246 - DNA, 60 bp, Artificial
  Synthetic oligonucleotide
aattgacaatatagcacagattttaactatgactgaagagcaggaaaaggaagtgatcgc

SEQ ID NO: 119247 - DNA, 60 bp, Artificial
  Synthetic oligonucleotide
cgatcctcgttaatacctttaaactataagaatatgaaaaacatctttgatgataagcat

SEQ ID NO: 119248 - DNA, 60 bp, Artificial
  Synthetic oligonucleotide
gggaaaggctgtatatctctctccgactttggcgacaatgaacgttcatagtggatccgt

SEQ ID NO: 119249 - DNA, 60 bp, Artificial
  Synthetic oligonucleotide
gcgtgggcggcacttataagaagggtaggaatatacttgtaatcgctggcaaccgcatct

SEQ ID NO: 119250 - DNA, 60 bp, Artificial
  Synthetic oligonucleotide
gctatcatacaatttacagaccaaccagattactcatccacgacttctatagctaatgct

SEQ ID NO: 119251 - DNA, 60 bp, Artificial
  Synthetic oligonucleotide
cggtcatgttaccaggtcaaatcgaagcatttgaacatctgattcgagtaagtgcaaata

SEQ ID NO: 119252 - DNA, 60 bp, Artificial
  Synthetic oligonucleotide
tgaacatctgattcgagtaagtgcaaataaatttcagtatgcattcatcggttccaactg

SEQ ID NO: 119253 - DNA, 60 bp, Artificial
  Synthetic oligonucleotide
tccggtctatcaaccgtggatacatgtgatgttagaataacgcgtaatgccgcattctta

SEQ ID NO: 119254 - DNA, 60 bp, Artificial
  Synthetic oligonucleotide
gagtaagtgcaaataaatttcagtatgcattcatcggttccaactgtcagaacttcgcgg

SEQ ID NO: 119255 - DNA, 60 bp, Artificial
  Synthetic oligonucleotide
tctcagtttaagagacctaaacgatgggtagacgagaatgattttaaacaatatatacag

SEQ ID NO: 119256 - DNA, 60 bp, Artificial
  Synthetic oligonucleotide
gcgtttccggactcacaattgctgtcaatgttattggataatattcagcagtctttgggt

SEQ ID NO: 119257 - DNA, 60 bp, Artificial
  Synthetic oligonucleotide
ccaccgtggatacatgtgatgttagaataacgcgtaatgccgcattcttaacgcagatag

SEQ ID NO: 119258 - DNA, 60 bp, Artificial
  Synthetic oligonucleotide
ttttaaacaatatatacagtccatttatgacgaactctagggtgacgaaggagcaaagca

SEQ ID NO: 119259 - DNA, 60 bp, Artificial
  Synthetic oligonucleotide
caattcacaaaggctgatgtacttacatctagtattataactatgcggagttcattaaat

SEQ ID NO: 119260 - DNA, 60 bp, Artificial
  Synthetic oligonucleotide
ttcagcagtctttgggtacgttaacggcatgcgaatctaagagtttcgatgatgcatatc

SEQ ID NO: 119261 - DNA, 60 bp, Artificial
  Synthetic oligonucleotide
tcatggattgttgattcgcatgagataatcaaaataacgtattacccatcctcattgatt

SEQ ID NO: 119262 - DNA, 60 bp, Artificial
  Synthetic oligonucleotide
atgtaaacactaccatatatcctacgatccagtctcctgcaactgaggaccgatcctcgt

SEQ ID NO: 119263 - DNA, 60 bp, Artificial
  Synthetic oligonucleotide
cgatatctgatagtatgaaatctatcatgtatgacctgtcgggatatgtaaacactacca

SEQ ID NO: 119264 - DNA, 60 bp, Artificial
  Synthetic oligonucleotide
ggaaactagcattgtcggaaacagatacctgcagtatcagcttagtttgtcaaatcaaac

SEQ ID NO: 119265 - DNA, 60 bp, Artificial
  Synthetic oligonucleotide
cgcatgagttgagtgggtcgccatatatagacgtacgtgttacatactcaattacagctg

SEQ ID NO: 119266 - DNA, 59 bp, Artificial
  Synthetic oligonucleotide
tggaaacggtacacatggatagagtgtctgtcctgaccgtctatcaatcggcggtgtta

SEQ ID NO: 119267 - DNA, 60 bp, Artificial
  Synthetic oligonucleotide
ggtcgccatatatagacgtacgtgttacatactcaattacagctgcgtttccggactcac

SEQ ID NO: 119268 - DNA, 60 bp, Artificial
  Synthetic oligonucleotide
aagtgatcgctaaaatgtcagcatcgctagccaacctaggattaaacatggataatgcta

SEQ ID NO: 119269 - DNA, 60 bp, Artificial
  Synthetic oligonucleotide
tacagtccatttatgacgaactctagggtgacgaaggagcaaagcaccgctcacatacgt

SEQ ID NO: 119270 - DNA, 60 bp, Artificial
  Synthetic oligonucleotide
atatatacagtccatttatgacgaactctagggtgacgaaggagcaaagcaccgctcaca

SEQ ID NO: 119271 - DNA, 60 bp, Artificial
  Synthetic oligonucleotide
atctgtcatacgagatatggctgaaattgatgacacttgggtgttgcaacaccataaaac

SEQ ID NO: 119272 - DNA, 60 bp, Artificial
  Synthetic oligonucleotide
caatttacagaccaaccagattactcatccacgacttctatagctaatgcgaagtcagtc

SEQ ID NO: 119273 - DNA, 60 bp, Artificial
  Synthetic oligonucleotide
gacactggatttgattcttccaattatacttatggttgggagatgtacgactcagcagct

SEQ ID NO: 119274 - DNA, 60 bp, Artificial
  Synthetic oligonucleotide
ggcggagtagtttcgttggctatgccgttacttggtgctatagtcgtaaccattggagcc

SEQ ID NO: 119275 - DNA, 60 bp, Artificial
  Synthetic oligonucleotide
aatcactgatttcactgattcatctggtaagcaatccttaaaattaacttcaagtgttaa

SEQ ID NO: 119276 - DNA, 60 bp, Artificial
  Synthetic oligonucleotide
ctaatccgaatgaattaattcttaacatgtccttacaactaaattcggcggctccctcgc

SEQ ID NO: 119277 - DNA, 60 bp, Artificial
  Synthetic oligonucleotide
ggtgattgcgtgggcggcacttataagaagggtaggaatatacttgtaatcgctggcaac

SEQ ID NO: 119278 - DNA, 60 bp, Artificial
  Synthetic oligonucleotide
ccggaatacaaacgctagctactatcatacaaggaatcggcggagtagtttcgttggcta

SEQ ID NO: 119279 - DNA, 60 bp, Artificial
  Synthetic oligonucleotide
agaggaaaatcgtaccaatgcatgcacgcgtagagataattcaaactgaaaagattggag

SEQ ID NO: 119280 - DNA, 60 bp, Artificial
  Synthetic oligonucleotide
gttaatgcaaccttccggaatacaaacgctagctactatcatacaaggaatcggcggagt

SEQ ID NO: 119281 - DNA, 60 bp, Artificial
  Synthetic oligonucleotide
cacgttgccaggtatcgatgatgaggtaatcagaggaacttcaaccgactacattgatac

SEQ ID NO: 119282 - DNA, 60 bp, Artificial
  Synthetic oligonucleotide
gtgttgcaacaccataaaacggtcatgttaccaggtcaaatcgaagcatttgaacatctg

SEQ ID NO: 119283 - DNA, 60 bp, Artificial
  Synthetic oligonucleotide
agcttagtttgtcaaatcaaactatcgatgaatatgataacaatggcccttattcatgcc

SEQ ID NO: 119284 - DNA, 60 bp, Artificial
  Synthetic oligonucleotide
accataaaacggtcatgttaccaggtcaaatcgaagcatttgaacatctgattcgagtaa

SEQ ID NO: 119285 - DNA, 60 bp, Artificial
  Synthetic oligonucleotide
gcacagattttaactatgactgaagagcaggaaaaggaagtgatcgctaaaatgtcagca

SEQ ID NO: 119286 - DNA, 53 bp, Artificial
  Synthetic oligonucleotide
aaacttttcaagcagaccattattccaaccaatatggacgtggatgagaaata

SEQ ID NO: 119287 - DNA, 60 bp, Artificial
  Synthetic oligonucleotide
cgctatagcttcggcaagagcggttgaaggcggctataaactgaagaaagtgataaacgc

SEQ ID NO: 119288 - DNA, 60 bp, Artificial
  Synthetic oligonucleotide
ggcaattgaaggcggctataaactgaagaaagtgataaacgcactgagtggaatcgattt

SEQ ID NO: 119289 - DNA, 60 bp, Artificial
  Synthetic oligonucleotide
accacaaatcaaacaagctatgaaagaggatcacgaagctatagggagcgaggagaccaa

SEQ ID NO: 119290 - DNA, 60 bp, Artificial
  Synthetic oligonucleotide
ccacaaatcaaacaagctatgaaagaggatcacgaagccataggaagtgaggagaccaag

SEQ ID NO: 119291 - DNA, 60 bp, Artificial
  Synthetic oligonucleotide
gaccgctatagcttcggcgagggcagttgagggcggctataaactgaagaaagtgataaa

SEQ ID NO: 119292 - DNA, 60 bp, Artificial
  Synthetic oligonucleotide
ccgctatagcttcggcaagagcggttgaaggcggctataaactgaagaaagtgataaacg

SEQ ID NO: 119293 - DNA, 60 bp, Artificial
  Synthetic oligonucleotide
agtagctgtgaaagtccgggaacccaccccggatggaagcggtgtcatctggattagccg

SEQ ID NO: 119294 - DNA, 60 bp, Artificial
  Synthetic oligonucleotide
tgaaagtagctgtgaaagtccgggaacccaccccggatggaagcagtgccatctggatta

SEQ ID NO: 119295 - DNA, 60 bp, Artificial
  Synthetic oligonucleotide
gttattttttctaagtgacaatgagtaacgtgacagagattcgtgctttgaagagattcg

SEQ ID NO: 119296 - DNA, 55 bp, Artificial
  Synthetic oligonucleotide
ttttctgagtgacaatgagtaacgtgacagagattcgtgctttgaagagattcgc

SEQ ID NO: 119297 - DNA, 60 bp, Artificial
  Synthetic oligonucleotide
tagctgtgaaagtccgggaacccaccccggatggaagcagtgccatctggattagccgac

SEQ ID NO: 119298 - DNA, 60 bp, Artificial
  Synthetic oligonucleotide
taaccatcatgcgaaagtagctgtgaaagtccgggaacccaccccggatggaagcggtgt

SEQ ID NO: 119299 - DNA, 60 bp, Artificial
  Synthetic oligonucleotide
gttattttttctgagtgacaatgagtaacgtgacagagattcgtgctttgaagagattcg

SEQ ID NO: 119300 - DNA, 60 bp, Artificial
  Synthetic oligonucleotide
tgtcgaatcaaacgggcgcaactatggcacaaaaagtagagaaggttgcttatgcttcgt

SEQ ID NO: 119301 - DNA, 59 bp, Artificial
  Synthetic oligonucleotide
gcgttagatatattggacaaagcgatgtcgaatcaaacgggcgcaactatggcacaaaa

SEQ ID NO: 119302 - DNA, 60 bp, Artificial
  Synthetic oligonucleotide
gcgttggatatattggacaaagcgatgtcgaatcaaacgggcgcaactatggcacaaaaa

SEQ ID NO: 119303 - DNA, 60 bp, Artificial
  Synthetic oligonucleotide
gcgttagatatattggacaaagcgatgtcgaatcaaacgggcgcaactatggcacaaaaa

SEQ ID NO: 119304 - DNA, 59 bp, Artificial
  Synthetic oligonucleotide
gcgttggatatattggacaaagcgatgtcgaatcaaacgggcgcaactatggcacaaaa

SEQ ID NO: 119305 - DNA, 60 bp, Artificial
  Synthetic oligonucleotide
ccgcacagacgttccactatgccggctcttgctataatcggtgatactctcttgaatgcc

SEQ ID NO: 119306 - DNA, 60 bp, Artificial
  Synthetic oligonucleotide
gctggtctccttcgctcccaacttatgtggtgcctccgggtgattatactctgacacctc

SEQ ID NO: 119307 - DNA, 60 bp, Artificial
  Synthetic oligonucleotide
cgggctgcatggccaaattgttccatcacgtgggtgcccttgtcctatgacctgcgttgg

SEQ ID NO: 119308 - DNA, 57 bp, Artificial
  Synthetic oligonucleotide
cctgcgttggactaagcttgctctacttgaatcgactacactgagcagtgcatcagt

SEQ ID NO: 119309 - DNA, 60 bp, Artificial
  Synthetic oligonucleotide
cgctgcctacaaatgaggacttattcttgagcgctcctgacatgcgcgagtgggcagtaa

SEQ ID NO: 119310 - DNA, 60 bp, Artificial
  Synthetic oligonucleotide
gactataccgggcttcaacgcacaggacgtattcaattgttacttcaactccgcgctcgc

SEQ ID NO: 119311 - DNA, 60 bp, Artificial
  Synthetic oligonucleotide
ggtgttctcagacgctggtatctacacaatgcaggcattggtcggttccaacgcaaatcc

SEQ ID NO: 119312 - DNA, 60 bp, Artificial
  Synthetic oligonucleotide
ggctcagtttgatgctaacaaaggagagtggtcattggacatggtgttctcagacgctgg

SEQ ID NO: 119313 - DNA, 60 bp, Artificial
  Synthetic oligonucleotide
cgtcagttgccatcgttcggatacgttgatgatgggtcgtctgtgacaggcattgagatg

SEQ ID NO: 119314 - DNA, 60 bp, Artificial
  Synthetic oligonucleotide
ttcggccaggcggaaagctcgcttacgctatttgccactcgtagacccacgatctttgga

SEQ ID NO: 119315 - DNA, 60 bp, Artificial
  Synthetic oligonucleotide
cacgcgtgctcaccatcacatcaagaagatctccagcttcggccaggcggaaagctcgct

SEQ ID NO: 119316 - DNA, 60 bp, Artificial
  Synthetic oligonucleotide
tgacccaagctgcacgtgttgggatatcagggttgtgtgcgaatgtcggtaatgcgcgta

SEQ ID NO: 119317 - DNA, 60 bp, Artificial
  Synthetic oligonucleotide
aataccttcgcgcaggacagtccgttgcatactttggggcatcagctggtcattcagggg

SEQ ID NO: 119318 - DNA, 60 bp, Artificial
  Synthetic oligonucleotide
ggcatcagctggtcattcaggggcggatcagcctctagtaattgagccatggacgcaggg

SEQ ID NO: 119319 - DNA, 60 bp, Artificial
  Synthetic oligonucleotide
gcagcatatgggttggtgatgccctatcgtattatgttgattacaatcgcagccatagag

SEQ ID NO: 119320 - DNA, 60 bp, Artificial
  Synthetic oligonucleotide
caatacggtcgtagcttgttctctctagcacgaaaaattggtgatcgatctctcatcaaa

SEQ ID NO: 119321 - DNA, 60 bp, Artificial
  Synthetic oligonucleotide
ccaggccagcgcagcctgttgcgagattggatcaatgttatcatttacggtggggtgctc

SEQ ID NO: 119322 - DNA, 60 bp, Artificial
  Synthetic oligonucleotide
gacgcagatggttagtgcgcctccgcatatcattaacgctactgacgcattgttgctcga

SEQ ID NO: 119323 - DNA, 60 bp, Artificial
  Synthetic oligonucleotide
ggcgtcctagtgcactatgataagcccactaacgggaatcattacatcttgggtactctg

SEQ ID NO: 119324 - DNA, 60 bp, Artificial
  Synthetic oligonucleotide
atggacgcagggtaagattagtggtgtgcctccgccctcctcagttagacagtttgggta

SEQ ID NO: 119325 - DNA, 60 bp, Artificial
  Synthetic oligonucleotide
gacacgtttgagactctagaccgatttttctggacacatgactcatctgcgggcgtccta

SEQ ID NO: 119326 - DNA, 60 bp, Artificial
  Synthetic oligonucleotide
tacctcgtacatgttgattaaaccattcgtgactaataatgtagagttattctttgtggc

SEQ ID NO: 119327 - DNA, 60 bp, Artificial
  Synthetic oligonucleotide
tgagacaagaactcgtcattacacactacgcgatttctgttccgacctggatgctgtggc

SEQ ID NO: 119328 - DNA, 60 bp, Artificial
  Synthetic oligonucleotide
ccgacacgcactgtctggcactatatagagcagaagattctcccaaatattacctcgtac

SEQ ID NO: 119329 - DNA, 60 bp, Artificial
  Synthetic oligonucleotide
cgcaaatcctgtgtctctgggttcgtttgtagtggactctccggatgtggacataacaga

SEQ ID NO: 119330 - DNA, 56 bp, Artificial
  Synthetic oligonucleotide
atttacggtggggtgctcaatatgttggcgaggactcattgacgtaccgtttgggg

SEQ ID NO: 119331 - DNA, 60 bp, Artificial
  Synthetic oligonucleotide
ttggccgcgatgaaccgtactctgacatggattcattagagcgcatatgtcgggctgcat

SEQ ID NO: 119332 - DNA, 60 bp, Artificial
  Synthetic oligonucleotide
gctggcactgacgtcgacattacagttaatccttattaccgcttgatggcctttgtgagg

SEQ ID NO: 119333 - DNA, 60 bp, Artificial
  Synthetic oligonucleotide
ttctagagcttgattacttaagtgacggttggataacgggtatacgtggcgacatcgtca

SEQ ID NO: 119334 - DNA, 60 bp, Artificial
  Synthetic oligonucleotide
cgttcgacgcggcattccaacagctagtgaaagttcttactaaaagtacagctaacgtgt

SEQ ID NO: 119335 - DNA, 60 bp, Artificial
  Synthetic oligonucleotide
aggcacgtacgatactgccatctaacccagtgttgtttgataacgtaaacggagcatcgc

SEQ ID NO: 119336 - DNA, 60 bp, Artificial
  Synthetic oligonucleotide
ggagcatcgcctcacgtatgtttgacgatgatgtataactttgaagtgtctagtgcggtg

SEQ ID NO: 119337 - DNA, 60 bp, Artificial
  Synthetic oligonucleotide
agctagaccgatccctaagcaattgacgaatcgatggctctctagttttgtcagtcaggt

SEQ ID NO: 119338 - DNA, 60 bp, Artificial
  Synthetic oligonucleotide
gtgtgcatcaacaatcagcattgacatggacgtctggggtgtatttcttcctggtcgatc

SEQ ID NO: 119339 - DNA, 60 bp, Artificial
  Synthetic oligonucleotide
cgtgtcaatgtcttcgtagcaaatgctcttgtcggtgcgttcctatccaaccaagccttc

SEQ ID NO: 119340 - DNA, 60 bp, Artificial
  Synthetic oligonucleotide
cacctttgttcgctaaagatctgtcggactatgcgaaggcgttttacagtgacacgtttg

SEQ ID NO: 119341 - DNA, 60 bp, Artificial
  Synthetic oligonucleotide
caagagagatatgtccaaatagcctacgattcaccatctgtagtcgatggagccacgcac

SEQ ID NO: 119342 - DNA, 60 bp, Artificial
  Synthetic oligonucleotide
ccacatccccaggtgggtcattcgtgatgaagatcaacttcccgacacgcactgtctggc

SEQ ID NO: 119343 - DNA, 60 bp, Artificial
  Synthetic oligonucleotide
ccacgcactatggctatgttaggcgaaatcagttgcggttgggcatgagggtgtccgctc

SEQ ID NO: 119344 - DNA, 60 bp, Artificial
  Synthetic oligonucleotide
gggtgtccgctcttcagtcattgagtgatactccggctccgatacagtggttaccgcagt

SEQ ID NO: 119345 - DNA, 60 bp, Artificial
  Synthetic oligonucleotide
gatatagctgataggtacttgttatactacattcgtgacgttcaatctagggatgtggga

SEQ ID NO: 119346 - DNA, 60 bp, Artificial
  Synthetic oligonucleotide
cgaatgacattgtcgccgttcaattgtttaggccactgcagggattggtgcttgacacgc

SEQ ID NO: 119347 - DNA, 60 bp, Artificial
  Synthetic oligonucleotide
gtgccacctcaggattgggatgttcttaccgatactattagctggtctccttcgctccca

SEQ ID NO: 119348 - DNA, 60 bp, Artificial
  Synthetic oligonucleotide
ccgacctggatgctgtggctggcaaggaaccctggagacctttgcgcaatcagagaacga

SEQ ID NO: 119349 - DNA, 60 bp, Artificial
  Synthetic oligonucleotide
tatgaggttttgcggatctacccaatcagtaattataatcatgaacgtgtcaatgtcttc

SEQ ID NO: 119350 - DNA, 60 bp, Artificial
  Synthetic oligonucleotide
agggattggtgcttgacacgcagttctatggattccctggcattttctcagaatgggagc

SEQ ID NO: 119351 - DNA, 59 bp, Artificial
  Synthetic oligonucleotide
tgctaaaggtgcgatcgtagacttagcaagaccgttcccgtcgggcgactaccaatttg

SEQ ID NO: 119352 - DNA, 60 bp, Artificial
  Synthetic oligonucleotide
ctcgtgaaattgaacaagttgaattacttaaacgtatacatgacagcctgataactagac

SEQ ID NO: 119353 - DNA, 60 bp, Artificial
  Synthetic oligonucleotide
gaacaagttgaattacttaaacgtatacatgacagcctgataactagaccagttgacgtt

SEQ ID NO: 119354 - DNA, 60 bp, Artificial
  Synthetic oligonucleotide
aaatatcaaaacgctagatgaatgggagagtgggaaaaatccatatgaaccgatagaagt

SEQ ID NO: 119355 - DNA, 60 bp, Artificial
  Synthetic oligonucleotide
tcgactttaattcaccagatctagaaaagttgatcagaataccattcaaagggaagatac

SEQ ID NO: 119356 - DNA, 60 bp, Artificial
  Synthetic oligonucleotide
atgatatacttagggatataaagccgttcttcaccgtaagtgaagcgtacttaccgatac

SEQ ID NO: 119357 - DNA, 60 bp, Artificial
  Synthetic oligonucleotide
ttaccgatacaatatcaaaaattcatgccaactttgccagacaacgtacaatacataatt

SEQ ID NO: 119358 - DNA, 60 bp, Artificial
  Synthetic oligonucleotide
gtataggatccagaacctatcaaattgaggatgacggttcaaaatcagccatatctcggc

SEQ ID NO: 119359 - DNA, 60 bp, Artificial
  Synthetic oligonucleotide
gttcaaaatcagccatatctcggctaatatcaaagtactcagtttacaaaccgtcaattg

SEQ ID NO: 119360 - DNA, 60 bp, Artificial
  Synthetic oligonucleotide
ctgaataatgaaaagagaggacaaagcacacagtgggatcaagcggccgtcctatattca

SEQ ID NO: 119361 - DNA, 60 bp, Artificial
  Synthetic oligonucleotide
gcagtttaatacagaagtaaccaagcagatggttcaagacgtgtcaaacgacgtgagaga

SEQ ID NO: 119362 - DNA, 60 bp, Artificial
  Synthetic oligonucleotide
aatagcgaatttagcgctgatcaagaccgtcttatcacgtatttctaacaaacactcatt

SEQ ID NO: 119363 - DNA, 60 bp, Artificial
  Synthetic oligonucleotide
aacactcattcgtgacaaaaataataagagttgacggagatgacaactacgcagtactgc

SEQ ID NO: 119364 - DNA, 60 bp, Artificial
  Synthetic oligonucleotide
cagtatggagctgtagcgtcaggagagaagcagaccaaggcagcgaattcaatagcgaat

SEQ ID NO: 119365 - DNA, 60 bp, Artificial
  Synthetic oligonucleotide
acgcagccatttaggaaagggataataatgggattggacatgttagctaatatgactaac

SEQ ID NO: 119366 - DNA, 60 bp, Artificial
  Synthetic oligonucleotide
atgctaatgtcagttttttctcatgaggattacctaattgcgagagaattaatagtacta

SEQ ID NO: 119367 - DNA, 60 bp, Artificial
  Synthetic oligonucleotide
cgaataaatatgtacgggcaatagttcccgaccaaacattcgatgagttgaagcagatga

SEQ ID NO: 119368 - DNA, 60 bp, Artificial
  Synthetic oligonucleotide
tggactatcactgaaaaaactttttactgaatacagcgatgttatagagaatgctacact

SEQ ID NO: 119369 - DNA, 60 bp, Artificial
  Synthetic oligonucleotide
gttgaaagaaagttggtaaaatatgcaaaaggtaagccgctagaagcagacttgacagtg

SEQ ID NO: 119370 - DNA, 60 bp, Artificial
  Synthetic oligonucleotide
aacttcattgtcatcaaatttaaatgcagttatgttctggttggaaaagcatgaaaatga

SEQ ID NO: 119371 - DNA, 60 bp, Artificial
  Synthetic oligonucleotide
acaatgctaataagagatgaggttgtgaaaatgcttgaggaaccagtaaaacatgacgat

SEQ ID NO: 119372 - DNA, 60 bp, Artificial
  Synthetic oligonucleotide
acaactttatttaatctcactaggtataccgaaaatagacgctgatacgtatgtcggatc

SEQ ID NO: 119373 - DNA, 60 bp, Artificial
  Synthetic oligonucleotide
gaacattacgtcattgcgttcaccgtataccaacgcgaacttctttcaagattagagcgc

SEQ ID NO: 119374 - DNA, 60 bp, Artificial
  Synthetic oligonucleotide
tagaatatgggacaactgacgacgaagtatacatccaaagagcattcatgtctctgtcga

SEQ ID NO: 119375 - DNA, 60 bp, Artificial
  Synthetic oligonucleotide
caaagagcattcatgtctctgtcgagtcagaagtcggggatagctgatgagatagctgca

SEQ ID NO: 119376 - DNA, 60 bp, Artificial
  Synthetic oligonucleotide
agttgttgtcttcaaagaataacatagtgtccagaggaatagcattgactgagaaggcga

SEQ ID NO: 119377 - DNA, 60 bp, Artificial
  Synthetic oligonucleotide
gctgcatcatcaacgtttaagaattatgtgtctaaattatctgagcagttgttgtcttca

SEQ ID NO: 119378 - DNA, 60 bp, Artificial
  Synthetic oligonucleotide
gagaaggcgaagttaaactcatacgcaccaatatcacttgagaaaagacgtgcgcaaata

SEQ ID NO: 119379 - DNA, 60 bp, Artificial
  Synthetic oligonucleotide
atgctgtagtcgaaaagatgttaatctatgcaaaacatactagagaatacgctgaattct

SEQ ID NO: 119380 - DNA, 60 bp, Artificial
  Synthetic oligonucleotide
ggctaatggaagatatacaccaggtataataccaccagtgaatgtcgataaaccgatacc

SEQ ID NO: 119381 - DNA, 60 bp, Artificial
  Synthetic oligonucleotide
gctgtcaatgtcatcagcgtcgaatggcgaatcaaggcaactaaaatttggtaggaagac

SEQ ID NO: 119382 - DNA, 60 bp, Artificial
  Synthetic oligonucleotide
ccatggtgctatatacggacgtctcccaatgggattcatctcaacacaatacgcagccat

SEQ ID NO: 119383 - DNA, 60 bp, Artificial
  Synthetic oligonucleotide
gcagtcgaaaataagaactccagagatgcaggtaaggttgttgattcagaaacggctagc

SEQ ID NO: 119384 - DNA, 60 bp, Artificial
  Synthetic oligonucleotide
ctatccagcatttggaatgcaacgcatgcattatagaaacggggatccacaaacaccgtt

SEQ ID NO: 119385 - DNA, 60 bp, Artificial
  Synthetic oligonucleotide
gcgcaaataactaacatgcttttaaataatcaaccggtagcattggttggagcacttcca

SEQ ID NO: 119386 - DNA, 51 bp, Artificial
  Synthetic oligonucleotide
ccacaaatacagcaacatttgaagaggtggctacaagtgaaaaattagtaa

SEQ ID NO: 119387 - DNA, 60 bp, Artificial
  Synthetic oligonucleotide
cagatggatagaattgtgaaagagatgagacgtcagctggaaatgattgataaattaact

SEQ ID NO: 119388 - DNA, 60 bp, Artificial
  Synthetic oligonucleotide
ggatagaattgtgaaagagatgagacgtcagctggaaatgattgataaattaactactcg

SEQ ID NO: 119389 - DNA, 60 bp, Artificial
  Synthetic oligonucleotide
gaggtcatgaagaaacaatcgtataatgatgcggtgaggatgagtttcactgagttctcg

SEQ ID NO: 119390 - DNA, 60 bp, Artificial
  Synthetic oligonucleotide
gcaatgtcaaatacaacgggtgctacgcaaacacagaaagcggagaaggctgcattcgca

SEQ ID NO: 119391 - DNA, 60 bp, Artificial
  Synthetic oligonucleotide
ccatagtaacagccgtcctcctggtgataccatcgccgcgtaccaagtccaacatatccg

SEQ ID NO: 119392 - DNA, 60 bp, Artificial
  Synthetic oligonucleotide
ccgtcctcctggtgataccatcgccgcgtaccaagtccaacatatccgagttcaaacgtc

SEQ ID NO: 119393 - DNA, 60 bp, Artificial
  Synthetic oligonucleotide
actcggccgcggtgcagatgcttcaatttctgacagtgttaaccattttcatatgaacgg

SEQ ID NO: 119394 - DNA, 60 bp, Artificial
  Synthetic oligonucleotide
gctcaccctctcctattctgatggtagtgttaaacggctactcggccgcggtgcagatgc

SEQ ID NO: 119395 - DNA, 60 bp, Artificial
  Synthetic oligonucleotide
gaacggggattacttcaggtcaatgtacattaatgcattcatatctcatcctggactaca

SEQ ID NO: 119396 - DNA, 50 bp, Artificial
  Synthetic oligonucleotide
catcctggactacataatagaccgtttatgtgccgaccaaacttgggtta

SEQ ID NO: 119397 - DNA, 60 bp, Artificial
  Synthetic oligonucleotide
cggccgcggtgcagatgcttcaatttctgacagtgttaaccattttcatatgaacgggga

SEQ ID NO: 119398 - DNA, 60 bp, Artificial
  Synthetic oligonucleotide
atatgaacggggattacttcaggtcaatgtacattaatgcattcatatctcatcctggac

SEQ ID NO: 119399 - DNA, 60 bp, Artificial
  Synthetic oligonucleotide
aaagatgaagtgctcaccctctcctattctgatggtagtgttaaacggctactcggccgc

SEQ ID NO: 119400 - DNA, 60 bp, Artificial
  Synthetic oligonucleotide
gcagtcaacgacttgccaggtaattcgacagttagtaaagatgaagtgctcaccctctcc

SEQ ID NO: 119401 - DNA, 60 bp, Artificial
  Synthetic oligonucleotide
cagcaagcaaagaagcagtcaacgacttgccaggtaattcgacagttagtaaagatgaag

SEQ ID NO: 119402 - DNA, 60 bp, Artificial
  Synthetic oligonucleotide
gctgtatcacccgaatctggatacactatcgaagtagaaccctctcaatctggacccttc

SEQ ID NO: 119403 - DNA, 60 bp, Artificial
  Synthetic oligonucleotide
gtggtctgctctttcatcaaactatctgacgtaagttcataaccatggactgtctataca

SEQ ID NO: 119404 - DNA, 60 bp, Artificial
  Synthetic oligonucleotide
ccctctcaatctggacccttctattataccgattcacttaaagtaaactgctacgtagcc

SEQ ID NO: 119405 - DNA, 60 bp, Artificial
  Synthetic oligonucleotide
catggcagcatcattcgtagtactagtcgatcaattgctaaatggagttgccgatgttgg

SEQ ID NO: 119406 - DNA, 60 bp, Artificial
  Synthetic oligonucleotide
ggacccttctattataccgattcacttaaagtaaactgctacgtagccgtgaaagaccgt

SEQ ID NO: 119407 - DNA, 60 bp, Artificial
  Synthetic oligonucleotide
gtctgagtttggctgtatcacccgaatctggatacactatcgaagtagaaccctctcaat

SEQ ID NO: 119408 - DNA, 60 bp, Artificial
  Synthetic oligonucleotide
tcccaacatggcagcatcattcgtagtactagtcgatcaattgctaaatggagttgccga

SEQ ID NO: 119409 - DNA, 60 bp, Artificial
  Synthetic oligonucleotide
ccgtgtttacaatcttagcacgcctaaccatcacgtgaaagtagctgtgaaagtccggga

SEQ ID NO: 119410 - DNA, 60 bp, Artificial
  Synthetic oligonucleotide
gtgtggtctgctctttcatcaaactatctgacgtaagttcataaccatggactgtctata

SEQ ID NO: 119411 - DNA, 60 bp, Artificial
  Synthetic oligonucleotide
actgtctatacaaaaccgtgtttacaatcttagcacgcctaaccatcacgtgaaagtagc

SEQ ID NO: 119412 - DNA, 60 bp, Artificial
  Synthetic oligonucleotide
gttaaaaagtgtcgctgccatgctatccgggctgatccaaaggttcgaagaagaaaagat

SEQ ID NO: 119413 - DNA, 60 bp, Artificial
  Synthetic oligonucleotide
gattgatattgctactacctggaaagttggtgctttcacccttctgggcagcgtcggtga

SEQ ID NO: 119414 - DNA, 60 bp, Artificial
  Synthetic oligonucleotide
gaagagtttgcctatgaggcgaattcttttctagaagcgcagtcgatgaatgctagggtg

SEQ ID NO: 119415 - DNA, 60 bp, Artificial
  Synthetic oligonucleotide
gctctaaggagtcaatcttgagtgccgaactcttgaaagcgcaggtcacatccgaggtgc

SEQ ID NO: 119416 - DNA, 60 bp, Artificial
  Synthetic oligonucleotide
taaagcctgacgactccaaggactcaatcttgagtgccgaactcttgaaagcgcaggtta

SEQ ID NO: 119417 - DNA, 60 bp, Artificial
  Synthetic oligonucleotide
ggtaaaaatcgtgtgtcctccgtgatgggtaagctccaagatggaatcgccatcaagcgg

SEQ ID NO: 119418 - DNA, 60 bp, Artificial
  Synthetic oligonucleotide
cgaaattgtttaatacacacttcatcccatcttgggttcatgaagtttatgattgatatt

SEQ ID NO: 119419 - DNA, 60 bp, Artificial
  Synthetic oligonucleotide
ggtagagacttcgaaagatgctccacctaaggcagttccttctggaaatgtaagcgccag

SEQ ID NO: 119420 - DNA, 60 bp, Artificial
  Synthetic oligonucleotide
ggtggatgcttcgaaagatgctccacctaaggcagtttcttctggaaatgtaagcgccag

SEQ ID NO: 119421 - DNA, 60 bp, Artificial
  Synthetic oligonucleotide
ccaaggactcaatcttgagtgccgaactcttgaaagcgcaggttacatccgaggtgctac

SEQ ID NO: 119422 - DNA, 60 bp, Artificial
  Synthetic oligonucleotide
gtcctacactcaggattgggatgttgatggcggtgtgcccgctgcacttccacagcctga

SEQ ID NO: 119423 - DNA, 60 bp, Artificial
  Synthetic oligonucleotide
gataatacataaaaaggtggatgcttcgaaagatgctccacctaaggcagtttcttctgg

SEQ ID NO: 119424 - DNA, 60 bp, Artificial
  Synthetic oligonucleotide
gatgatacgtaaaaaggtagagacttcgaaagatgctccacctaaggcagttccttctgg

SEQ ID NO: 119425 - DNA, 60 bp, Artificial
  Synthetic oligonucleotide
gaggcgaattcttttctagaagcgcagtcgatgaatgctagggtggacatgctcactggt

SEQ ID NO: 119426 - DNA, 60 bp, Artificial
  Synthetic oligonucleotide
taaagcctgacggctctaaggagtcaatcttgagtgccgaactcttgaaagcgcaggtca

SEQ ID NO: 119427 - DNA, 60 bp, Artificial
  Synthetic oligonucleotide
ggcttccatgattacttgacgagggagcatgagaacaacttcgacttggcgcagttgggg

SEQ ID NO: 119428 - DNA, 60 bp, Artificial
  Synthetic oligonucleotide
tggcttccatgattacttaacgagggaacatgagaacaacttcgacttggcgcagttggg

SEQ ID NO: 119429 - DNA, 60 bp, Artificial
  Synthetic oligonucleotide
actgtaaaatgtatccattcattaaaggaacggctaagctgaagacagtgcgcaagctag

SEQ ID NO: 119430 - DNA, 60 bp, Artificial
  Synthetic oligonucleotide
ccttggaaagatgccggccgtattctcaggaatgttgactgggaactgtaaaatgtatcc

SEQ ID NO: 119431 - DNA, 60 bp, Artificial
  Synthetic oligonucleotide
aaacccaattctccaggacttttgattcgagatcgagtttggaatggggtgtgatggttt

SEQ ID NO: 119432 - DNA, 60 bp, Artificial
  Synthetic oligonucleotide
cacgcgttcaatggtgtgaaactggagggagatgctcgtcaaacccaattctccaggact

SEQ ID NO: 119433 - DNA, 60 bp, Artificial
  Synthetic oligonucleotide
agacccatcacacgcgttcaatggtgtgaaactggagggagatgctcgtcaaacccaatt

SEQ ID NO: 119434 - DNA, 60 bp, Artificial
  Synthetic oligonucleotide
agacccatcacacgcgttcaatggtgtgaaactggggggagatgctcgtcaaacccaatt

SEQ ID NO: 119435 - DNA, 60 bp, Artificial
  Synthetic oligonucleotide
cccaatccttggaaagatgccggccgtattctcaggaatgttgactgggaactgtaaaat

SEQ ID NO: 119436 - DNA, 60 bp, Artificial
  Synthetic oligonucleotide
gctcgagatttcggtcactttggattatcccattattctagggcgactaccccaatcctt

SEQ ID NO: 119437 - DNA, 60 bp, Artificial
  Synthetic oligonucleotide
ccatcgaagggccgtgcttacagaaaggaattggtgacgccagctcgagatttcggtcac

SEQ ID NO: 119438 - DNA, 60 bp, Artificial
  Synthetic oligonucleotide
aacccaattctccaggacttttgattcgagatcgagtttggaatggggtgtgatggttta

SEQ ID NO: 119439 - DNA, 60 bp, Artificial
  Synthetic oligonucleotide
gaggcagtcaatcatgcttggggtgtcgagaagattagatatgctcttgggccaggtggc

SEQ ID NO: 119440 - DNA, 60 bp, Artificial
  Synthetic oligonucleotide
cgtgtgcgtactgagggaggttcactagtggagctgaaccggcttcaggttgacccaaat

SEQ ID NO: 119441 - DNA, 60 bp, Artificial
  Synthetic oligonucleotide
cgtgtgcgtactgagggaggttcactagtggagctgaactggcttcaggttgacccaaat

SEQ ID NO: 119442 - DNA, 60 bp, Artificial
  Synthetic oligonucleotide
cgactcatccgacttgatacccaactttatgatgagagacccatcacacgcgttcaatgg

SEQ ID NO: 119443 - DNA, 60 bp, Artificial
  Synthetic oligonucleotide
tgcaggtggtggacgaccttgacactaagctggatcagtactggacagccttaaacctga

SEQ ID NO: 119444 - DNA, 60 bp, Artificial
  Synthetic oligonucleotide
caggtggtggacgaccttgacactaagctggatcagtactggacagccttaaacctgatg

SEQ ID NO: 119445 - DNA, 60 bp, Artificial
  Synthetic oligonucleotide
tgacccaaattcaatgtttagatcaatacactcaagttggacagatcctttgcaggtggt

SEQ ID NO: 119446 - DNA, 60 bp, Artificial
  Synthetic oligonucleotide
gtttagatcaatacactcaagttggacagatcctttgcaggtggtggacgaccttgacac

SEQ ID NO: 119447 - DNA, 60 bp, Artificial
  Synthetic oligonucleotide
cattcattaaaggaacggctaagctgaagacagtgcgcaagctagtggaggcagtcaatc

SEQ ID NO: 119448 - DNA, 60 bp, Artificial
  Synthetic oligonucleotide
cgcaagctagtggaggcagtcaatcatgcttggggtgtcgagaagattagatatgctctt

SEQ ID NO: 119449 - DNA, 60 bp, Artificial
  Synthetic oligonucleotide
ttaaacctgatgatcgactcatccgacttgatacccaactttatgatgagagacccatca

SEQ ID NO: 119450 - DNA, 60 bp, Artificial
  Synthetic oligonucleotide
atatgctcttgggccaggtggcatgacgggatggtacaataggactatgcaacaggcccc

SEQ ID NO: 119451 - DNA, 60 bp, Artificial
  Synthetic oligonucleotide
ctcacaatgttcccagataccatcaagtttggggatttgaattatccagtgatgattggc

SEQ ID NO: 119452 - DNA, 60 bp, Artificial
  Synthetic oligonucleotide
gcaggaagaagcaatacaggagattgcaagtatgagtgctgatatactggaggcagcgtc

SEQ ID NO: 119453 - DNA, 60 bp, Artificial
  Synthetic oligonucleotide
gcaggaagaggcaatacaggagattgcaagtatgagtgccgacatattagaggcagcgtc

SEQ ID NO: 119454 - DNA, 60 bp, Artificial
  Synthetic oligonucleotide
gatgaggttccagcacaaatcatcgaagtagaacgcagtctccagaaagagctgggaatt

SEQ ID NO: 119455 - DNA, 60 bp, Artificial
  Synthetic oligonucleotide
gatgaggtcccagcacaaatcatcgaagtagaacgcagtctccagaaagagctagggatt

SEQ ID NO: 119456 - DNA, 58 bp, Artificial
  Synthetic oligonucleotide
agatgggtggttctaacagaagagattgctcgcgcgatcgaatctaaatacggtacga

SEQ ID NO: 119457 - DNA, 60 bp, Artificial
  Synthetic oligonucleotide
ggtcccagcacaaatcatcgaagtagaacgcagtctccagaaagagctagggatttcgcg

SEQ ID NO: 119458 - DNA, 60 bp, Artificial
  Synthetic oligonucleotide
caaatcatcgaagtagaacgcagtctccagaaagagctgggaatttcgcgtgagggagtg

SEQ ID NO: 119459 - DNA, 60 bp, Artificial
  Synthetic oligonucleotide
cagatcatcgaagtagaacgcagtctccagaaagagctggggatttcgcgtgagggagtg

SEQ ID NO: 119460 - DNA, 60 bp, Artificial
  Synthetic oligonucleotide
cctgtctagtcctggtgcattagcctcgacccatattggctcagtggatgctgatttaag

SEQ ID NO: 119461 - DNA, 60 bp, Artificial
  Synthetic oligonucleotide
caacctgaaggcccttggagacaacttgtgagaagcgcgggttttttactcctgtctagt

SEQ ID NO: 119462 - DNA, 60 bp, Artificial
  Synthetic oligonucleotide
cgtccctgcgtgtgatgttgaatcataccgagctagtgttattgtgcagccaactcctcg

SEQ ID NO: 119463 - DNA, 60 bp, Artificial
  Synthetic oligonucleotide
ggtcaatggggtctatacctaatttttgtgaatcagttggtttggatagacaacctgaag

SEQ ID NO: 119464 - DNA, 60 bp, Artificial
  Synthetic oligonucleotide
ccgacactttatcctccatctgacattcccgcatcaactcctctaccccagcgcaagccg

SEQ ID NO: 119465 - DNA, 60 bp, Artificial
  Synthetic oligonucleotide
tctgttccagagccgacactttatcctccatctgacattcccgcatcaactcctctaccc

SEQ ID NO: 119466 - DNA, 60 bp, Artificial
  Synthetic oligonucleotide
ccccagcgcaagccgagggttaaactcacggaagctcagattcaggcacagcgtcgatca

SEQ ID NO: 119467 - DNA, 60 bp, Artificial
  Synthetic oligonucleotide
aggcacagcgtcgatcaaggaaactgaaaccttactatcgggcgctaggggattgtttcg

SEQ ID NO: 119468 - DNA, 55 bp, Artificial
  Synthetic oligonucleotide
ccccttccgatgacacttctgaggagatggtggcgcttgacggatcttgggtccg

SEQ ID NO: 119469 - DNA, 60 bp, Artificial
  Synthetic oligonucleotide
gctattccctttaaccggacccccttccgatgacacttctgaggagatggtggcgcttga

SEQ ID NO: 119470 - DNA, 60 bp, Artificial
  Synthetic oligonucleotide
gcagccaactcctcgaaatgtgctcccctttcctggaacgcagctgactcgtgagaccgt

SEQ ID NO: 119471 - DNA, 60 bp, Artificial
  Synthetic oligonucleotide
tgagatgtgtcgtaaaagggcgcgaattatgtatgagtcagttccttctcatcttcgtga

SEQ ID NO: 119472 - DNA, 60 bp, Artificial
  Synthetic oligonucleotide
caccacaaacatggcagcccgacttccaatcgacgcctttggcatttcagtgattcagca

SEQ ID NO: 119473 - DNA, 60 bp, Artificial
  Synthetic oligonucleotide
gattgtttcgtccctgcgtgtgatgttgaatcataccgagctagtgttattgtgcagcca

SEQ ID NO: 119474 - DNA, 60 bp, Artificial
  Synthetic oligonucleotide
gacaatttgtccacaccacaaacatggcagcccgacttccaatcgacgcctttggcattt

SEQ ID NO: 119475 - DNA, 60 bp, Artificial
  Synthetic oligonucleotide
ttttgtcgagaggtggtgatcaccccaaacgttatcagctattccctttaaccggacccc

SEQ ID NO: 119476 - DNA, 60 bp, Artificial
  Synthetic oligonucleotide
caaaaagcatatgaaaagaaccgagagaagccctcagttgttgcaagtcctgcaaacccg

SEQ ID NO: 119477 - DNA, 60 bp, Artificial
  Synthetic oligonucleotide
ctgatttaagttattttgaggtgcgagaccagagatggatgaagctgttggattacaaag

SEQ ID NO: 119478 - DNA, 60 bp, Artificial
  Synthetic oligonucleotide
ttgaggtgcgagaccagagatggatgaagctgttggattacaaagagattttgtcgagag

SEQ ID NO: 119479 - DNA, 60 bp, Artificial
  Synthetic oligonucleotide
cttatgtgcggaaaagaaccattatggagagagagtctggtgattatgccgtattacgtc

SEQ ID NO: 119480 - DNA, 60 bp, Artificial
  Synthetic oligonucleotide
tcctctaccccagcgcaagccgagggttaaactcacggaagctcagattcaggcacagcg

SEQ ID NO: 119481 - DNA, 60 bp, Artificial
  Synthetic oligonucleotide
gcatttcagtgattcagcaaaacggtctcaaagtatacacaattctacctacaagcatgc

SEQ ID NO: 119482 - DNA, 60 bp, Artificial
  Synthetic oligonucleotide
ctgtggattatacgaactggttcacctcagagactgatgtggaaattcaggagtatttgg

SEQ ID NO: 119483 - DNA, 60 bp, Artificial
  Synthetic oligonucleotide
tgtgcagccaactcctcgaaatgtgctcccctttcctggaacgcagctgactcgtgagac

SEQ ID NO: 119484 - DNA, 60 bp, Artificial
  Synthetic oligonucleotide
agtgtcagcgcattgtcgaagaagtgactcagcaggcagaatcacttagtcttgagtcta

SEQ ID NO: 119485 - DNA, 60 bp, Artificial
  Synthetic oligonucleotide
tccacgccctcagatttcaatgcctgataactattctcttgggaatgaggaggaacgaat

SEQ ID NO: 119486 - DNA, 60 bp, Artificial
  Synthetic oligonucleotide
tgcaaacccggctccaatgacggctagacagaaagatgtgttaggaacgtggtcaatggg

SEQ ID NO: 119487 - DNA, 59 bp, Artificial
  Synthetic oligonucleotide
tgtatgctatacctgagaaacatctagactcattaaatgagcgtgatcgaggaaagata

SEQ ID NO: 119488 - DNA, 60 bp, Artificial
  Synthetic oligonucleotide
taagtcagccattggaatgtctgctaccatgacagatatcgacgaggaggattgtgagtc

SEQ ID NO: 119489 - DNA, 60 bp, Artificial
  Synthetic oligonucleotide
cccgagccggaaaagttacttgatgaggagacatttgagatgtgtcgtaaaagggcgcga

SEQ ID NO: 119490 - DNA, 60 bp, Artificial
  Synthetic oligonucleotide
ctcgtgagaccgttcttcgaacggctttagttcgggaatgtgagcttgtggcccctcata

SEQ ID NO: 119491 - DNA, 60 bp, Artificial
  Synthetic oligonucleotide
ttcgaacggctttagttcgggaatgtgagcttgtggcccctcataaacctcccgagccgg

SEQ ID NO: 119492 - DNA, 60 bp, Artificial
  Synthetic oligonucleotide
atcaaggcccgatagtgacatggaagacgaggaggttacagagccatggaagtgtcagcg

SEQ ID NO: 119493 - DNA, 60 bp, Artificial
  Synthetic oligonucleotide
ggcccgatagtgacatggaagacgaggaggttacagagccatggaagtgtcagcgcattg

SEQ ID NO: 119494 - DNA, 60 bp, Artificial
  Synthetic oligonucleotide
gcatgctaatcacactgactgaacaaacggcatctagcaagttgtatgctatacctgaga

SEQ ID NO: 119495 - DNA, 60 bp, Artificial
  Synthetic oligonucleotide
gctagttgggttacagcatctacattctcgcctcataaggcttcccaacataagtcagcc

SEQ ID NO: 119496 - DNA, 60 bp, Artificial
  Synthetic oligonucleotide
tggcgcttgacggatcttgggtccgaagtgaggagcacgataaagggttattcgctcttc

SEQ ID NO: 119497 - DNA, 60 bp, Artificial
  Synthetic oligonucleotide
aagaaccgagagaagccctcagttgttgcaagtcctgcaaacccggctccaatgacggct

SEQ ID NO: 119498 - DNA, 60 bp, Artificial
  Synthetic oligonucleotide
aggaacgaattaagacttatgtgcggaaaagaaccattatggagagagagtctggtgatt

SEQ ID NO: 119499 - DNA, 60 bp, Artificial
  Synthetic oligonucleotide
cgctcttcctagtcgtgtgactatcattaatgtgcgacaggtaatggaatcaaggcccga

SEQ ID NO: 119500 - DNA, 60 bp, Artificial
  Synthetic oligonucleotide
atgtggaaattcaggagtatttggaagacaccggattataccttgcgttgcaaaaagcat

SEQ ID NO: 119501 - DNA, 60 bp, Artificial
  Synthetic oligonucleotide
gcccctcataaacctcccgagccggaaaagttacttgatgaggagacatttgagatgtgt

SEQ ID NO: 119502 - DNA, 60 bp, Artificial
  Synthetic oligonucleotide
taacaggctaggcggagatgaggaggactgcgcagtcggtggcgagtggggagaccagtt

SEQ ID NO: 119503 - DNA, 60 bp, Artificial
  Synthetic oligonucleotide
ccggagcttgtgagtttgtacaaagcgacggttatagatattttaacaggctaggcggag

SEQ ID NO: 119504 - DNA, 60 bp, Artificial
  Synthetic oligonucleotide
ttgaggttgcttgagctaatgatgcctgtagtaacgaagccggatgagcaaatggatccg

SEQ ID NO: 119505 - DNA, 60 bp, Artificial
  Synthetic oligonucleotide
ggcaggttcttcggtccagagcgtctcgggagatgatgagtaagatagatttgaggttgc

SEQ ID NO: 119506 - DNA, 60 bp, Artificial
  Synthetic oligonucleotide
atgtgtcagccgctggtgtccccgttccaggattagatgggcaggttcttcggtccagag

SEQ ID NO: 119507 - DNA, 60 bp, Artificial
  Synthetic oligonucleotide
gcatgcacgatatgtgtcagccgctggtgtccccgttccaggattagatgggcaggttct

SEQ ID NO: 119508 - DNA, 60 bp, Artificial
  Synthetic oligonucleotide
cgtattacgtcctggatatggagctgaggcgttggagcatgcacgatatgtgtcagccgc

SEQ ID NO: 119509 - DNA, 60 bp, Artificial
  Synthetic oligonucleotide
tctggtgattatgccgtattacgtcctggatatggagctgaggcgttggagcatgcacga

SEQ ID NO: 119510 - DNA, 60 bp, Artificial
  Synthetic oligonucleotide
ggaacaggcgtcagcaatttaataaattcggtgacgctagtcaagtcgaaaggtcaatcg

SEQ ID NO: 119511 - DNA, 51 bp, Artificial
  Synthetic oligonucleotide
cagcaatttaataaattcggtgacgctagtcaagtcgaaaggtcaatcggg

SEQ ID NO: 119512 - DNA, 60 bp, Artificial
  Synthetic oligonucleotide
gaattgaatcaacctgaacctgttggtttaacgcgttttgacgttaacttacaggctgag

SEQ ID NO: 119513 - DNA, 60 bp, Artificial
  Synthetic oligonucleotide
gagcgtgttatgaatcgcttacctgctaaggatcctagcattctagctcgagttgaagca

SEQ ID NO: 119514 - DNA, 60 bp, Artificial
  Synthetic oligonucleotide
gcattctagctcgagttgaagcattattacggatgaaggatgaattagtattcataggcc

SEQ ID NO: 119515 - DNA, 52 bp, Artificial
  Synthetic oligonucleotide
acaggctgagaattttgatttacgtgatgagaatgatgcattacgtgccgaa

SEQ ID NO: 119516 - DNA, 60 bp, Artificial
  Synthetic oligonucleotide
cattaacgtaactgagcgtgttatgaatcgcttacctgctaaggatcctagcattctagc

SEQ ID NO: 119517 - DNA, 60 bp, Artificial
  Synthetic oligonucleotide
gccatttcaccaaagaatgtaaacgccttattggtggttacaagaacgttgatgggcatc

SEQ ID NO: 119518 - DNA, 60 bp, Artificial
  Synthetic oligonucleotide
gaacgttgatgggcatcatgatgatacactaatgacttacttgcaaacagctgatcataa

SEQ ID NO: 119519 - DNA, 60 bp, Artificial
  Synthetic oligonucleotide
gctcgagttgaagcattattacggatgaaggatgaattagtattcataggccatttcacc

SEQ ID NO: 119520 - DNA, 60 bp, Artificial
  Synthetic oligonucleotide
ttcataggccatttcaccaaagaatgtaaacgccttattggtggttacaagaacgttgat

SEQ ID NO: 119521 - DNA, 60 bp, Artificial
  Synthetic oligonucleotide
gttgatgggcatcatgatgatacactaatgacttacttgcaaacagctgatcataatcag

SEQ ID NO: 119522 - DNA, 60 bp, Artificial
  Synthetic oligonucleotide
ctgatcataatcagtttttatctgcattatttgaaatgtattatgataatcattcaaagg

SEQ ID NO: 119523 - DNA, 60 bp, Artificial
  Synthetic oligonucleotide
ggagttaaaagttagtggtgccgctaactctacagctgaattgaatcaacctgaacctgt

SEQ ID NO: 119524 - DNA, 60 bp, Artificial
  Synthetic oligonucleotide
cgttggagtaacgtacatcaccttggttcgatgttacgacaagctcgaccggctaagagc

SEQ ID NO: 119525 - DNA, 60 bp, Artificial
  Synthetic oligonucleotide
agctgttttgcatcacgttggagtaacgtacatcaccttggttcgatgttacgacaagct

SEQ ID NO: 119526 - DNA, 60 bp, Artificial
  Synthetic oligonucleotide
agagatacaagccgttcaaatgctgggattcttacgtcatcttacccactctagaaggtg

SEQ ID NO: 119527 - DNA, 60 bp, Artificial
  Synthetic oligonucleotide
gtaatggtgtctcaaagagatacaagccgttcaaatgctgggattcttacgtcatcttac

SEQ ID NO: 119528 - DNA, 60 bp, Artificial
  Synthetic oligonucleotide
ggatcaataagcagacggtgtcaacgttggctaataagtataagcttaagacttttgaca

SEQ ID NO: 119529 - DNA, 60 bp, Artificial
  Synthetic oligonucleotide
cttataaatggatcaataagcagacggtgtcaacgttggctaataagtataagcttaaga

SEQ ID NO: 119530 - DNA, 60 bp, Artificial
  Synthetic oligonucleotide
cgacaagctcgaccggctaagagcgcagcggttgcatcataatgattatcttataaatgg

SEQ ID NO: 119531 - DNA, 60 bp, Artificial
  Synthetic oligonucleotide
acgacaagctcgaccggctaagagcgcagcggttgcatcataatgattatcttataaatg

SEQ ID NO: 119532 - DNA, 60 bp, Artificial
  Synthetic oligonucleotide
cacgacagcaatactcagaagcagcagcgctatcacgataagcggaacaggcgtcagcaa

SEQ ID NO: 119533 - DNA, 60 bp, Artificial
  Synthetic oligonucleotide
atcaaaacacgacagcaatactcagaagcagcagcgctatcacgataagcggaacaggcg

SEQ ID NO: 119534 - DNA, 60 bp, Artificial
  Synthetic oligonucleotide
aattcaatgaaaaggagttaaaagttagtggtgccgctaactctacagctgaattgaatc

SEQ ID NO: 119535 - DNA, 60 bp, Artificial
  Synthetic oligonucleotide
tggatcagttagtggttttgaccattcaagtgtgaatgagcaaccaatattatcatgggc

SEQ ID NO: 119536 - DNA, 60 bp, Artificial
  Synthetic oligonucleotide
ctttaacgttaatcttgacaagcaggctgttattgatgtgactcgtgttaagtataataa

SEQ ID NO: 119537 - DNA, 60 bp, Artificial
  Synthetic oligonucleotide
cattcaaaggctgaagttgtaagtttattgtcatatttacataagtttaactttaacgtt

SEQ ID NO: 119538 - DNA, 60 bp, Artificial
  Synthetic oligonucleotide
tgattttgacgatttggtgtcaggctctgattatgtatatggtacccatggattagaagg

SEQ ID NO: 119539 - DNA, 60 bp, Artificial
  Synthetic oligonucleotide
cgtttcaattaaggttgattttgacgatttggtgtcaggctctgattatgtatatggtac

SEQ ID NO: 119540 - DNA, 60 bp, Artificial
  Synthetic oligonucleotide
ggtacccatggattagaaggattcccattagctatgatgcatgccttatctcacgttgac

SEQ ID NO: 119541 - DNA, 60 bp, Artificial
  Synthetic oligonucleotide
tatatggtacccatggattagaaggattcccattagctatgatgcatgccttatctcacg

SEQ ID NO: 119542 - DNA, 60 bp, Artificial
  Synthetic oligonucleotide
gacagtactattaacggtaagggtttagccaaatatcatgttggagcagcgtgccgcatg

SEQ ID NO: 119543 - DNA, 60 bp, Artificial
  Synthetic oligonucleotide
ttatctcacgttgacagtactattaacggtaagggtttagccaaatatcatgttggagca

SEQ ID NO: 119544 - DNA, 60 bp, Artificial
  Synthetic oligonucleotide
ggagcagcgtgccgcatgaatgagtgtagtattgttgaagtgtttagtaatggtgtctca

SEQ ID NO: 119545 - DNA, 60 bp, Artificial
  Synthetic oligonucleotide
tgttggagcagcgtgccgcatgaatgagtgtagtattgttgaagtgtttagtaatggtgt

SEQ ID NO: 119546 - DNA, 60 bp, Artificial
  Synthetic oligonucleotide
gattctggaaatggatcagttagtggttttgaccattcaagtgtgaatgagcaaccaata

SEQ ID NO: 119547 - DNA, 60 bp, Artificial
  Synthetic oligonucleotide
cctcacctgttgtacccggtgggcacgatcaatgtagttttgattctggaaatggatcag

SEQ ID NO: 119548 - DNA, 60 bp, Artificial
  Synthetic oligonucleotide
aacaggtttcctcacctgttgtacccggtgggcacgatcaatgtagttttgattctggaa

SEQ ID NO: 119549 - DNA, 60 bp, Artificial
  Synthetic oligonucleotide
catttcaataagatgaactacacaccagttagttatggtttggtatctcaccaaccagtc

SEQ ID NO: 119550 - DNA, 60 bp, Artificial
  Synthetic oligonucleotide
ctacggaaataatcatttcaataagatgaactacacaccagttagttatggtttggtatc

SEQ ID NO: 119551 - DNA, 54 bp, Artificial
  Synthetic oligonucleotide
gtagaaaatttaagattctgtatgaactagacctgtctcaaggacgtcctcgat

SEQ ID NO: 119552 - DNA, 60 bp, Artificial
  Synthetic oligonucleotide
gacaactattacgagatccgcaaattagacgtgttaacttagaagatcaaatagtgccgt

SEQ ID NO: 119553 - DNA, 60 bp, Artificial
  Synthetic oligonucleotide
caacagctgatgtcagattgattcgtaaaggcgatgttccaacaaccacaaatctgatgt

SEQ ID NO: 119554 - DNA, 60 bp, Artificial
  Synthetic oligonucleotide
gatcctataagaattaagcatgtgacaattgatgatactgtattcgatttacaggacgca

SEQ ID NO: 119555 - DNA, 60 bp, Artificial
  Synthetic oligonucleotide
tatattatagagggatcgatgcagtttgtgtacatactacctactttaacttggcgcaac

SEQ ID NO: 119556 - DNA, 60 bp, Artificial
  Synthetic oligonucleotide
ttcggctgcggatactgaatttggtaagcatgtgattggttataatgaatcagtcaaaga

SEQ ID NO: 119557 - DNA, 60 bp, Artificial
  Synthetic oligonucleotide
caaccttgatgtatattttaaattacttcgcctctaagttagattcggctgcggatactg

SEQ ID NO: 119558 - DNA, 60 bp, Artificial
  Synthetic oligonucleotide
gaagattgtattgctttgatcagacgtctattacctaacatacaacagtcaaccttgatg

SEQ ID NO: 119559 - DNA, 60 bp, Artificial
  Synthetic oligonucleotide
tgagctcttagatgtcaatgtcacgcaagagcgccatgcttatattgaatacacttctaa

SEQ ID NO: 119560 - DNA, 60 bp, Artificial
  Synthetic oligonucleotide
gaagtaagagtgtatgcagacgatgaaaataaagactcattatttgagattgagctctta

SEQ ID NO: 119561 - DNA, 60 bp, Artificial
  Synthetic oligonucleotide
ctgataagtttacttctacatcattcccatcaactgaagtaagagtgtatgcagacgatg

SEQ ID NO: 119562 - DNA, 60 bp, Artificial
  Synthetic oligonucleotide
ctgcgataacacaagagcagttaactcgtgtattaaagctactttctgaggttaagactg

SEQ ID NO: 119563 - DNA, 57 bp, Artificial
  Synthetic oligonucleotide
aaaatggaacgagatcaactgatgccccaatggcctcaagttctggatttagcaata

SEQ ID NO: 119564 - DNA, 60 bp, Artificial
  Synthetic oligonucleotide
atgcgaaatcgtctaagaaaaatggaacgagatcaactgatgccccaatggcctcaagtt

SEQ ID NO: 119565 - DNA, 56 bp, Artificial
  Synthetic oligonucleotide
gcgcgaaaagaaaagaagtaacatcaaaccagaatcagaaaccgattcctctgagg

SEQ ID NO: 119566 - DNA, 60 bp, Artificial
  Synthetic oligonucleotide
aaacagcacattacgttatcagcgagtatgtccaaggcaagcaaactaaagaaaactaag

SEQ ID NO: 119567 - DNA, 60 bp, Artificial
  Synthetic oligonucleotide
gcgatgtaggcgctatcgctactgtagccgagctgatgtttccacaaggattattaaaag

SEQ ID NO: 119568 - DNA, 50 bp, Artificial
  Synthetic oligonucleotide
gtcacgatccgatgaaagatgggaacaaggaagagatatgctttctggga

SEQ ID NO: 119569 - DNA, 60 bp, Artificial
  Synthetic oligonucleotide
aagatgatcgacgtgccattaatgccgagtttccgagatattcacccaaccctcaacatt

SEQ ID NO: 119570 - DNA, 60 bp, Artificial
  Synthetic oligonucleotide
cacaaggattattaaaagatgatcgacgtgccattaatgccgagtttccgagatattcac

SEQ ID NO: 119571 - DNA, 60 bp, Artificial
  Synthetic oligonucleotide
ccgaaactttgcagatttaattcatactatgaatgtgactttcttaatgaagactggcgt

SEQ ID NO: 119572 - DNA, 60 bp, Artificial
  Synthetic oligonucleotide
ttacgtagttaaacaaccagctttgaatgagtatgctcttttagatagaaaggatacgca

SEQ ID NO: 119573 - DNA, 60 bp, Artificial
  Synthetic oligonucleotide
cgggaggaaataccagatagatgccagagggaataagttatggtcacgatccgatgaaag

SEQ ID NO: 119574 - DNA, 60 bp, Artificial
  Synthetic oligonucleotide
aagcaatacgggaggaaataccagatagatgccagagggaataagttatggtcacgatcc

SEQ ID NO: 119575 - DNA, 60 bp, Artificial
  Synthetic oligonucleotide
ctgccatggagattgttgataatgatggagtcagacctgaaagagctcgtgggcctaacg

SEQ ID NO: 119576 - DNA, 60 bp, Artificial
  Synthetic oligonucleotide
tagcttctgggtatatgaagaggtggaggcatattaaaagcgcaggacgttcactgtttg

SEQ ID NO: 119577 - DNA, 60 bp, Artificial
  Synthetic oligonucleotide
cacccaaccctcaacattatcatccgtatattataagcgactataggaatgcaaacactc

SEQ ID NO: 119578 - DNA, 50 bp, Artificial
  Synthetic oligonucleotide
catggtggcggaacgggtgagctggcagtcgcattatcaaggattaagta

SEQ ID NO: 119579 - DNA, 54 bp, Artificial
  Synthetic oligonucleotide
aggtacctattattttggagaaatgcaagcaacacgtggtacattgataggtgg

SEQ ID NO: 119580 - DNA, 60 bp, Artificial
  Synthetic oligonucleotide
cccgacgagccttatgaaaaccttggagatgccaagattctcattaagtcagcatatctt

SEQ ID NO: 119581 - DNA, 60 bp, Artificial
  Synthetic oligonucleotide
catatcttaatgaaccgactcgtgcgagtgcagctctaatgtctcttgtatccatgcccc

SEQ ID NO: 119582 - DNA, 60 bp, Artificial
  Synthetic oligonucleotide
gcagacagagaggagaggtggctgagattgagtttgatagcaaagatgatcctacacgta

SEQ ID NO: 119583 - DNA, 60 bp, Artificial
  Synthetic oligonucleotide
taacattgatatgtataaagcgagtatattaaatcataacttctgcaagttacttgagaa

SEQ ID NO: 119584 - DNA, 60 bp, Artificial
  Synthetic oligonucleotide
cctacacgtaaaacaactataggagaagattgggaacgaattcacctagttttgaatcaa

SEQ ID NO: 119585 - DNA, 60 bp, Artificial
  Synthetic oligonucleotide
taccgatctatttccacttgatatagcgggtatatgtaaaggtatagaagaagctggatg

SEQ ID NO: 119586 - DNA, 60 bp, Artificial
  Synthetic oligonucleotide
gaagatcaaatagtgccgtttgacgttgacgtagatcacccagcttttgaagatagtcaa

SEQ ID NO: 119587 - DNA, 60 bp, Artificial
  Synthetic oligonucleotide
gacgtttgatgattggtgcaagaatgcttgacaatgataaatttaagccacatagaggta

SEQ ID NO: 119588 - DNA, 60 bp, Artificial
  Synthetic oligonucleotide
gtactgtcttagtaggaatgcaattcactcaagagttattagataaagcaaaggtatctc

SEQ ID NO: 119589 - DNA, 60 bp, Artificial
  Synthetic oligonucleotide
aggtatctcagatggatggtgttcctcacattggtgaaaatctatttaaacgaagcgact

SEQ ID NO: 119590 - DNA, 55 bp, Artificial
  Synthetic oligonucleotide
cattacgcgggtggcgtacttgcaattctacgtactattatgggcgatactgatg

SEQ ID NO: 119591 - DNA, 60 bp, Artificial
  Synthetic oligonucleotide
tacatattattacctttgaagatatgactccgagacatggtggcggaacgggtgagctgg

SEQ ID NO: 119592 - DNA, 54 bp, Artificial
  Synthetic oligonucleotide
gtgggcctaacgtactagaatatactactggaataacagatgcaggaggcgttg

SEQ ID NO: 119593 - DNA, 56 bp, Artificial
  Synthetic oligonucleotide
gctatcctctactatgagaacgaaattatctgttccattactttataagggtcctc

SEQ ID NO: 119594 - DNA, 60 bp, Artificial
  Synthetic oligonucleotide
agaaatcgagtactttgtttgatcgcaagactacggagttgatactccccgtaagctgtt

SEQ ID NO: 119595 - DNA, 60 bp, Artificial
  Synthetic oligonucleotide
gaagctcttggtatgcattttattcatagtgttgagcaaagtactaaatcttatggcatg

SEQ ID NO: 119596 - DNA, 60 bp, Artificial
  Synthetic oligonucleotide
tactaaatcttatggcatgttattattactggcaggtggaggtacaacgtttgctgacga

SEQ ID NO: 119597 - DNA, 60 bp, Artificial
  Synthetic oligonucleotide
ctggagtatgctatatggggtcgacggtccaatattgagaaatcttggtttaggagttga

SEQ ID NO: 119598 - DNA, 60 bp, Artificial
  Synthetic oligonucleotide
tgcctatgaaggcgccgttaataacaatagatccaaaacccgaagaagctcttggtatgc

SEQ ID NO: 119599 - DNA, 60 bp, Artificial
  Synthetic oligonucleotide
ctggagagttatcaacttttaaacctatacaagtttgtctcgtttctactgatgaacctc

SEQ ID NO: 119600 - DNA, 60 bp, Artificial
  Synthetic oligonucleotide
tcactgtttgatagttatttagctcacgttgaaacacgattcacgagtttatctaaatta

SEQ ID NO: 119601 - DNA, 60 bp, Artificial
  Synthetic oligonucleotide
ttgctgacgaaaaatatattatagagggatcgatgcagtttgtgtacatactacctactt

SEQ ID NO: 119602 - DNA, 60 bp, Artificial
  Synthetic oligonucleotide
tatggtactatatacggacgtatctcagtgggactcgtctcaacacaatacgcagccatt

SEQ ID NO: 119603 - DNA, 60 bp, Artificial
  Synthetic oligonucleotide
ctgacgatgaagtatacatacaaagagcgttcatgtctttatcgagtcagaagtcgggaa

SEQ ID NO: 119604 - DNA, 60 bp, Artificial
  Synthetic oligonucleotide
gctatcactggatcgctaagactctttccttctgaacgcgtgttaaccacgaactctaca

SEQ ID NO: 119605 - DNA, 60 bp, Artificial
  Synthetic oligonucleotide
gtaccgagaatacacaatgctaataagagatgaagttgtgaaaatgcttgaggaaccagt

SEQ ID NO: 119606 - DNA, 60 bp, Artificial
  Synthetic oligonucleotide
ctacatttaaagtatttgactcggaggactttattatagagtatgggacaactgacgatg

SEQ ID NO: 119607 - DNA, 60 bp, Artificial
  Synthetic oligonucleotide
gatggctaaaatatattcgtggtcatttcatgtcgggttcagaaagcagaaaatgttgga

SEQ ID NO: 119608 - DNA, 60 bp, Artificial
  Synthetic oligonucleotide
tccgaattggctggtttactatcaatgtcatcagcgtcgaatggtgaatcaagacaacta

SEQ ID NO: 119609 - DNA, 60 bp, Artificial
  Synthetic oligonucleotide
gtaactaagcagatggttcaagatgtatcaaacgacgtgagagaaacgtatgcgcgaatg

SEQ ID NO: 119610 - DNA, 60 bp, Artificial
  Synthetic oligonucleotide
caggtgggaaaatattctttagggctggaataaatttactgaataatgaaaagagagggc

SEQ ID NO: 119611 - DNA, 60 bp, Artificial
  Synthetic oligonucleotide
tgaaaatgcttgaggaaccagtaaagcatgatgatcatttgttacaggattccgaattgg

SEQ ID NO: 119612 - DNA, 60 bp, Artificial
  Synthetic oligonucleotide
tgcagttatgttctggttggagaaacatgaaaacgacgttgctgaaaagcttaaaattta

SEQ ID NO: 119613 - DNA, 60 bp, Artificial
  Synthetic oligonucleotide
cttggtgacatgggcaaattcttcaattgaaatgctaatgtcagttttttctcatgagga

SEQ ID NO: 119614 - DNA, 60 bp, Artificial
  Synthetic oligonucleotide
gatagtactgtcatattctaatagatcgactctggcaaagctggtgtcatcaccaatgtc

SEQ ID NO: 119615 - DNA, 65 bp, Artificial
  Synthetic oligonucleotide
gccgctagaagcagatttgacagtgaatgagttagattatgaaaataataagataacatctgaac

SEQ ID NO: 119616 - DNA, 60 bp, Artificial
  Synthetic oligonucleotide
gataacatctgaacttttcccaacagcagaagaatatactgattcattaatggatccagc

SEQ ID NO: 119617 - DNA, 60 bp, Artificial
  Synthetic oligonucleotide
cgaatgaagaattagaactagagttttcaaacaaatatgtacgagcaatagttcctgacc

SEQ ID NO: 119618 - DNA, 60 bp, Artificial
  Synthetic oligonucleotide
aagatgatacaggactggttggttgattgctctattgaaaagtttccactgatggctaaa

SEQ ID NO: 119619 - DNA, 60 bp, Artificial
  Synthetic oligonucleotide
cactacacgagaatgaaatacaactatatctgatctcactaggcataccgaaaatagacg

SEQ ID NO: 119620 - DNA, 60 bp, Artificial
  Synthetic oligonucleotide
tcgcgacgaagataataagagttgacggagatgacaattacgcagtattgcagttcaata

SEQ ID NO: 119621 - DNA, 60 bp, Artificial
  Synthetic oligonucleotide
atctcgactaatatcaaagtattcagtttacaggccgtcaatcgaagagttatacaaagt

SEQ ID NO: 119622 - DNA, 60 bp, Artificial
  Synthetic oligonucleotide
ttgtcgatacagtatcaaaaatttatgccaactttaccagacaatgtgcaatatataatt

SEQ ID NO: 119623 - DNA, 60 bp, Artificial
  Synthetic oligonucleotide
gaaaagctgatcagaataccgtttaaaggaaagataccagctgtcacttttatattgcac

SEQ ID NO: 119624 - DNA, 60 bp, Artificial
  Synthetic oligonucleotide
ccaccagtgaatgtcaataaaccgataccattaggaagaagagatgtaccgggaagacgg

SEQ ID NO: 119625 - DNA, 60 bp, Artificial
  Synthetic oligonucleotide
gacatggctaatggaagatacacgccaggcataataccaccagtgaatgtcaataaaccg

SEQ ID NO: 119626 - DNA, 60 bp, Artificial
  Synthetic oligonucleotide
actgcgttcaccgtataccaacgcaaacttctttcaagattagagtgcttagatgtgacc

SEQ ID NO: 119627 - DNA, 60 bp, Artificial
  Synthetic oligonucleotide
gctgtagcgtcaggagagaagcagacgaaagcagcgaattcaatagcgaatttagcactg

SEQ ID NO: 119628 - DNA, 60 bp, Artificial
  Synthetic oligonucleotide
tttagcactgatcaaaacggtcctatcacgtatttccaacaaatattcattcgcgacgaa

SEQ ID NO: 119629 - DNA, 61 bp, Artificial
  Synthetic oligonucleotide
gaatgccacactgttgtcaatattatcgtactcttatgataaatataacgctgttgaaagg

SEQ ID NO: 119630 - DNA, 60 bp, Artificial
  Synthetic oligonucleotide
attcttccaatagtgaattagagaatagatgtattgaatttcattctaaatgcttagaaa

SEQ ID NO: 119631 - DNA, 60 bp, Artificial
  Synthetic oligonucleotide
gcaggggttggtgttggatacgcagctatatggatttcctggcactttctcagagtggga

SEQ ID NO: 119632 - DNA, 60 bp, Artificial
  Synthetic oligonucleotide
ctggctagaccgattcccaggcaattaaccaatcgatggctctccagttttgtcagtcag

SEQ ID NO: 119633 - DNA, 60 bp, Artificial
  Synthetic oligonucleotide
ggtatgtccagattgcttatgattcaccatctgtggttgatggagctgctcaatacggct

SEQ ID NO: 119634 - DNA, 60 bp, Artificial
  Synthetic oligonucleotide
ggatgctgcagttgggaaggaaccttggaagcctttgcgaaatcagcgaacgaatgacgt

SEQ ID NO: 119635 - DNA, 60 bp, Artificial
  Synthetic oligonucleotide
ctaccacttgcgatggggtgctcaatacgttggcgaggattcattgacataccgtctggg

SEQ ID NO: 119636 - DNA, 60 bp, Artificial
  Synthetic oligonucleotide
accgtctgggcgtgctctcactgctagctacgaatggatatcagctggctagaccgattc

SEQ ID NO: 119637 - DNA, 60 bp, Artificial
  Synthetic oligonucleotide
ctcgggacaggtgttgcgctttctcaattcttccagtctcatggggaagttctagaggtt

SEQ ID NO: 119638 - DNA, 60 bp, Artificial
  Synthetic oligonucleotide
tgtggcgaatgctctcgtcggcgcgttcctgtccaatcaagctttctacgacctgttacc

SEQ ID NO: 119639 - DNA, 60 bp, Artificial
  Synthetic oligonucleotide
gccggttaactcagttgccattacgtcctgattacggtaacatatgggtcggtgacgcct

SEQ ID NO: 119640 - DNA, 60 bp, Artificial
  Synthetic oligonucleotide
gggcatgagggtgtctgcccttcaatcattgagtgatactccatctccggtccagtggtt

SEQ ID NO: 119641 - DNA, 60 bp, Artificial
  Synthetic oligonucleotide
aacagaagattctcccaaatattacctcatacatgctgattaaaccattcgtgactaaca

SEQ ID NO: 119642 - DNA, 60 bp, Artificial
  Synthetic oligonucleotide
ccatctgtatactgaatagccagggtttcgtgccacctcaggattgggacgttcttaccg

SEQ ID NO: 119643 - DNA, 60 bp, Artificial
  Synthetic oligonucleotide
gagtgctcctgacatgcgtgagtgggcggtgaaggagagtggtaacaccatctgtatact

SEQ ID NO: 119644 - DNA, 60 bp, Artificial
  Synthetic oligonucleotide
ctgggaaggaatacctgcgtgcgggacagtccgttgcatatttcggggcatcagctggtc

SEQ ID NO: 119645 - DNA, 60 bp, Artificial
  Synthetic oligonucleotide
cccaacggatgtgattcgaacggttagaggatatctggagatagaccaaactaataagcg

SEQ ID NO: 119646 - DNA, 60 bp, Artificial
  Synthetic oligonucleotide
ggtgccattatcttatgacttacgctggactaagcttgttttgcttgaatcgactacatt

SEQ ID NO: 119647 - DNA, 60 bp, Artificial
  Synthetic oligonucleotide
tgaaaatcctggcttttcgaacatgacgcaagccgcacgtgtcggtatatcggggatgtg

SEQ ID NO: 119648 - DNA, 60 bp, Artificial
  Synthetic oligonucleotide
gccactcatagacccgcggtctttagaggtacaggcgcgtacgatactaccatccaaccc

SEQ ID NO: 119649 - DNA, 60 bp, Artificial
  Synthetic oligonucleotide
tcctgcctcagctaggcgtaaagctcggttacgatatttgccactcatagacccgcggtc

SEQ ID NO: 119650 - DNA, 60 bp, Artificial
  Synthetic oligonucleotide
gcacaggacgtattcaattgttatttcaactccgcacttgccttctctactgaggacgtt

SEQ ID NO: 119651 - DNA, 60 bp, Artificial
  Synthetic oligonucleotide
gtgggccaaaattgctctttgattataccgggctttaatgcacaggacgtattcaattgt

SEQ ID NO: 119652 - DNA, 60 bp, Artificial
  Synthetic oligonucleotide
ctggagcgtcacctcacgtatgtctgacgatgatgtataactttgaagtatctagcgcgg

SEQ ID NO: 119653 - DNA, 60 bp, Artificial
  Synthetic oligonucleotide
atctagcgcggtacatgatggcgatgtggtccttgatcttggtaccggtccggaagcgaa

SEQ ID NO: 119654 - DNA, 60 bp, Artificial
  Synthetic oligonucleotide
caaagacacggcggtgcttaaacatgcatatcaagccattgacccaaatactgggaagga

SEQ ID NO: 119655 - DNA, 60 bp, Artificial
  Synthetic oligonucleotide
gcatatcattaatgctaccgatgcattgttgctcgaatcatgtctggaacagtttgcggc

SEQ ID NO: 119656 - DNA, 60 bp, Artificial
  Synthetic oligonucleotide
ttctggacacatgattcatctgcgggtgttctagtgcattacgataagcccactaacgga

SEQ ID NO: 119657 - DNA, 60 bp, Artificial
  Synthetic oligonucleotide
atcgtcacccactattgagacaaggactcgtcattatacattgcatgacttctgttctga

SEQ ID NO: 119658 - DNA, 60 bp, Artificial
  Synthetic oligonucleotide
attatgcaaaggcgttttacagcgacacgtatgaaactctagaccgatttttctggacac

SEQ ID NO: 119659 - DNA, 60 bp, Artificial
  Synthetic oligonucleotide
gacgcatggcctgctcagctagattttaccatagctggtactgacgttgacatcacggtc

SEQ ID NO: 119660 - DNA, 60 bp, Artificial
  Synthetic oligonucleotide
cgaacgatgatgatgatccacctctgtttgccaaagatctatcggattatgcaaaggcgt

SEQ ID NO: 119661 - DNA, 60 bp, Artificial
  Synthetic oligonucleotide
cattatctacgatctcacgtcagttgccgtcgtttggatatgtggatggtggatcgtccg

SEQ ID NO: 119662 - DNA, 60 bp, Artificial
  Synthetic oligonucleotide
gcggctaatgttagggctagaccagcgcaacctgttgctcgattagatcaatgctaccac

SEQ ID NO: 119663 - DNA, 60 bp, Artificial
  Synthetic oligonucleotide
gcgaagattctagagttgattccaccaacatccccggtaacatgtgtggatataaggccg

SEQ ID NO: 119664 - DNA, 60 bp, Artificial
  Synthetic oligonucleotide
ataccgatttcctaagttcggccgcgatgaaccatattctgacatggactctttagagcg

SEQ ID NO: 119665 - DNA, 60 bp, Artificial
  Synthetic oligonucleotide
ctgagctaccgcagctaccagacacgtacttcgatggagacgagcaatatggtcgcagct

SEQ ID NO: 119666 - DNA, 60 bp, Artificial
  Synthetic oligonucleotide
atggtcgttagacatggtgttctcagatgctggtatttacacaatgcaggccttggttgg

SEQ ID NO: 119667 - DNA, 60 bp, Artificial
  Synthetic oligonucleotide
tagtgaaagttcttacccgaagtacagctaatgtgttactaattcaagtcaactgcccaa

SEQ ID NO: 119668 - DNA, 60 bp, Artificial
  Synthetic oligonucleotide
tctgcgatgataccacaagtaacggctcgatttgacgcaaacaaaggagaatggtcgtta

SEQ ID NO: 119669 - DNA, 60 bp, Artificial
  Synthetic oligonucleotide
tggattacgggtgtgcgcggtgatatcgtgacttgcatgctgtcactaggggccgctgct

SEQ ID NO: 119670 - DNA, 60 bp, Artificial
  Synthetic oligonucleotide
gcgtacgacttttctagagcttgattatttgagtgatggatggattacgggtgtgcgcgg

SEQ ID NO: 119671 - DNA, 60 bp, Artificial
  Synthetic oligonucleotide
ggccgctgctgctgggaaatctatgacgtttgatgcggcgttccaacaactagtgaaagt

SEQ ID NO: 119672 - DNA, 60 bp, Artificial
  Synthetic oligonucleotide
cggtcaacccttactatcgtttgatggctttcgtgagaattgatggacaatggcagattg

SEQ ID NO: 119673 - DNA, 60 bp, Artificial
  Synthetic oligonucleotide
gaactattctttgtggcatttggtgtgcatcagcagtcagcattgacgtggacgtccggg

SEQ ID NO: 119674 - DNA, 59 bp, Artificial
  Synthetic oligonucleotide
catccgtgatgtgcaatctagggatgtgggattctatatacagcaccccttacagttac

SEQ ID NO: 119675 - DNA, 60 bp, Artificial
  Synthetic oligonucleotide
gattcatgtatgcatgctacatctccaggtgggtcgttcgtgatcaagattaatttcccg

SEQ ID NO: 119676 - DNA, 60 bp, Artificial
  Synthetic oligonucleotide
tccgtcgggtgactatcagtttgtatattcggatgttgatcaagtcgtcgatggccatga

SEQ ID NO: 119677 - DNA, 60 bp, Artificial
  Synthetic oligonucleotide
gacctagttataatgtgggaaatgaggccccttaccttaacaaacgcttccgcttactgc

SEQ ID NO: 119678 - DNA, 60 bp, Artificial
  Synthetic oligonucleotide
ttgtagcaaagctcagacctagttataatgtgggaaatgaggccccttaccttaacaaac

SEQ ID NO: 119679 - DNA, 51 bp, Artificial
  Synthetic oligonucleotide
cttaacaaacgcttccgcttactgccgctccctttcttaacacacactacc

SEQ ID NO: 119680 - DNA, 60 bp, Artificial
  Synthetic oligonucleotide
gacttaaagtctatgaccagtaaagtttgtgctttgaagagaacgtgtggtgctttgtac

SEQ ID NO: 119681 - DNA, 60 bp, Artificial
  Synthetic oligonucleotide
ctgaccaagatgagccttactaattcatacaagtatgatgacttaaagtctatgaccagt

SEQ ID NO: 119682 - DNA, 60 bp, Artificial
  Synthetic oligonucleotide
gaccagtaaagtttgtgctttgaagagaacgtgtggtgctttgtacaatatgtttctgtg

SEQ ID NO: 119683 - DNA, 60 bp, Artificial
  Synthetic oligonucleotide
gtttctgtgtgatttgtacctgaatttaggagttaccattaaacaagccactgtatcgaa

SEQ ID NO: 119684 - DNA, 60 bp, Artificial
  Synthetic oligonucleotide
ctcaagccataacgtaagcagtgatttcacaaatattgtagtcactgacaactttgacgt

SEQ ID NO: 119685 - DNA, 60 bp, Artificial
  Synthetic oligonucleotide
gggtcttataatgactcatcataaatacatatttattggtgattcacccggaccacacta

SEQ ID NO: 119686 - DNA, 60 bp, Artificial
  Synthetic oligonucleotide
tctaatgtaaataatcctatgcctgagttaaattctgttaaaaactatttattaaccttt

SEQ ID NO: 119687 - DNA, 60 bp, Artificial
  Synthetic oligonucleotide
gagacttaagttatagcagcttgaccacccactacaaacagatgttcacttacgctgaca

SEQ ID NO: 119688 - DNA, 60 bp, Artificial
  Synthetic oligonucleotide
acggtcttgagatatgtcacactcgatcacgacggcactggttttcgaaaatcgtaccct

SEQ ID NO: 119689 - DNA, 60 bp, Artificial
  Synthetic oligonucleotide
atcgtaccctaacattaacgaacgtttgtactatgcacttggtgacgcttacgaagctgg

SEQ ID NO: 119690 - DNA, 60 bp, Artificial
  Synthetic oligonucleotide
taacgaacgtttgtactatgcacttggtgacgcttacgaagctggagttgagcagagacc

SEQ ID NO: 119691 - DNA, 60 bp, Artificial
  Synthetic oligonucleotide
acgaagctggagttgagcagagaccgcttttaattacgaatgaagaagttaagtacttta

SEQ ID NO: 119692 - DNA, 60 bp, Artificial
  Synthetic oligonucleotide
ctcatgggcgtatgtacgtagacaacgcctttaatatgtttcatgaataccactaccgtg

SEQ ID NO: 119693 - DNA, 66 bp, Artificial
  Synthetic oligonucleotide
ccacactataacgaatatagtaaaatattgaacccgaataattgtataagctacgatcctagagac

SEQ ID NO: 119694 - DNA, 60 bp, Artificial
  Synthetic oligonucleotide
gcacctacgaaaagacatcatatcacatgaatggcaataacattaagactgaaggcttgt

SEQ ID NO: 119695 - DNA, 60 bp, Artificial
  Synthetic oligonucleotide
actttgacgtaataaggatgactcaaccaatggaacaggtttcgactcatatggttaaat

SEQ ID NO: 119696 - DNA, 61 bp, Artificial
  Synthetic oligonucleotide
ccactgtatcgaacaattcgattgcgttatttagtctttctaatgtaaataatcctatgcc

SEQ ID NO: 119697 - DNA, 60 bp, Artificial
  Synthetic oligonucleotide
ccgctcacgctcagggtttaaacgtattagtcagaatagacattaggtctgataaaccga

SEQ ID NO: 119698 - DNA, 60 bp, Artificial
  Synthetic oligonucleotide
agctacgatcctagagacttaagttatagcagcttgaccacccactacaaacagatgttc

SEQ ID NO: 119699 - DNA, 60 bp, Artificial
  Synthetic oligonucleotide
cctttccttacacatcaatagttaatacacaagccacccgagtgactcatgggcgtatgt

SEQ ID NO: 119700 - DNA, 60 bp, Artificial
  Synthetic oligonucleotide
tgataaaccgaaaatgtctaaaggcgagttgaattctgagtgggaatcgggggtacaagc

SEQ ID NO: 119701 - DNA, 60 bp, Artificial
  Synthetic oligonucleotide
atggttaaattagtgaactttactcttaagagggtttgtcgctcagtcggagtgaatttc

SEQ ID NO: 119702 - DNA, 60 bp, Artificial
  Synthetic oligonucleotide
cttggtagtaaccttggatacctgtcaagcgctattttcagaacttacattggtaccgac

SEQ ID NO: 119703 - DNA, 60 bp, Artificial
  Synthetic oligonucleotide
tctgggatgtaatccgcaacgggacttaagaggataatagtccgcgcgaggttcttgaaa

SEQ ID NO: 119704 - DNA, 60 bp, Artificial
  Synthetic oligonucleotide
aatagtccgcgcgaggttcttgaaagaccatttagtagctagagggaccccttggtagta

SEQ ID NO: 119705 - DNA, 60 bp, Artificial
  Synthetic oligonucleotide
gacgagaccgatcacattctaactctgaattgaatcatcgacaatcaatagaaatctggg

SEQ ID NO: 119706 - DNA, 60 bp, Artificial
  Synthetic oligonucleotide
gacaatcaatagaaatctgggatgtaatccgcaacgggacttaagaggataatagtccgc

SEQ ID NO: 119707 - DNA, 60 bp, Artificial
  Synthetic oligonucleotide
ttggtataagtcaagattggatgggctagcagtgaagtacggtcgacggtatactgacgt

SEQ ID NO: 119708 - DNA, 60 bp, Artificial
  Synthetic oligonucleotide
ggactgaacatctatgacatgtatgactacgttacaaccttcgatccaattggtgatttt

SEQ ID NO: 119709 - DNA, 60 bp, Artificial
  Synthetic oligonucleotide
ttggctatagtagatcgtgttcacatagctcaactgtttgaatttgccaattggtataag

SEQ ID NO: 119710 - DNA, 60 bp, Artificial
  Synthetic oligonucleotide
taattggagtagaaccgaatggtttaaaagcactaagtaagtctagaaatggactgaaca

SEQ ID NO: 119711 - DNA, 60 bp, Artificial
  Synthetic oligonucleotide
ctgcgtatctgaggcgcgcgtttgtacgtggttataatgatgtaattggagtagaaccga

SEQ ID NO: 119712 - DNA, 60 bp, Artificial
  Synthetic oligonucleotide
attggctttctcgaagtaggcgaagagtctaccgacagtaagactgcgtatctgaggcgc

SEQ ID NO: 119713 - DNA, 60 bp, Artificial
  Synthetic oligonucleotide
aagtactttagaaacattggctttctcgaagtaggcgaagagtctaccgacagtaagact

SEQ ID NO: 119714 - DNA, 60 bp, Artificial
  Synthetic oligonucleotide
agttcgtgacccgtaatcctaactatgtcatgttcgataatgaaacggcgtactcgagta

SEQ ID NO: 119715 - DNA, 60 bp, Artificial
  Synthetic oligonucleotide
cactgaactaaataagaggctaagacgtgaggcacttgaagagttcgtgacccgtaatcc

SEQ ID NO: 119716 - DNA, 53 bp, Artificial
  Synthetic oligonucleotide
taaattacaaacgcatgtttaatgacaacatcacattagaagaaacaaaggta

SEQ ID NO: 119717 - DNA, 60 bp, Artificial
  Synthetic oligonucleotide
accacagccaccgtatggccgttgatgtagctgtcaagatgataactgcattggctatag

SEQ ID NO: 119718 - DNA, 60 bp, Artificial
  Synthetic oligonucleotide
cgtatgaacgtggattcgggagcagggtatggcatggataccacagccaccgtatggccg

SEQ ID NO: 119719 - DNA, 60 bp, Artificial
  Synthetic oligonucleotide
accatctgtatcgtatgaacgtggattcgggagcagggtatggcatggataccacagcca

SEQ ID NO: 119720 - DNA, 60 bp, Artificial
  Synthetic oligonucleotide
cccgtaatcctaactatgtcatgttcgataatgaaacggcgtactcgagtaccggacgga

SEQ ID NO: 119721 - DNA, 60 bp, Artificial
  Synthetic oligonucleotide
acgctcgtcagactcagttttccaggacctttgactcgagatcaaacttggagtggggtg

SEQ ID NO: 119722 - DNA, 60 bp, Artificial
  Synthetic oligonucleotide
cgctcgtcagactcagttttccaggacctttgactcgagatcaaacttggagtggggtgt

SEQ ID NO: 119723 - DNA, 60 bp, Artificial
  Synthetic oligonucleotide
cccagattcgatgtttaggtccatacactcaagttggacgggtcctcttcaggtggtgga

SEQ ID NO: 119724 - DNA, 60 bp, Artificial
  Synthetic oligonucleotide
cgggtcctcttcaggtggtggatgaccttgacactaagctagatcagtactggacggcgt

SEQ ID NO: 119725 - DNA, 60 bp, Artificial
  Synthetic oligonucleotide
catgatgagagatccatccaatgcgttcaatggtgtgaagttggaaggtgacgctcgtca

SEQ ID NO: 119726 - DNA, 60 bp, Artificial
  Synthetic oligonucleotide
ccatccaatgcgttcaatggtgtgaagttggaaggtgacgctcgtcagactcagttttcc

SEQ ID NO: 119727 - DNA, 60 bp, Artificial
  Synthetic oligonucleotide
cagctcactggaaacgaggtatgctgtcattcatcgctcaaatgcatgcaatgatgaacg

SEQ ID NO: 119728 - DNA, 60 bp, Artificial
  Synthetic oligonucleotide
atgcaatgatgaacgatgtgtcaccggaagatttggatcgtgttcgcactgaaggtggat

SEQ ID NO: 119729 - DNA, 60 bp, Artificial
  Synthetic oligonucleotide
gcaatgatgaacgatgtgtcaccggaagatttggatcgtgttcgcactgaaggtggatct

SEQ ID NO: 119730 - DNA, 60 bp, Artificial
  Synthetic oligonucleotide
gcttcaagttgacccagattcgatgtttaggtccatacactcaagttggacgggtcctct

SEQ ID NO: 119731 - DNA, 60 bp, Artificial
  Synthetic oligonucleotide
gagtggggtgtaatggtctacgattattcagaactggaacgtgatccatcgaagggtcgt

SEQ ID NO: 119732 - DNA, 60 bp, Artificial
  Synthetic oligonucleotide
gggatgggataaaacaatctcagcacagccggatatgatggcatgtggtggcgccgtcgt

SEQ ID NO: 119733 - DNA, 60 bp, Artificial
  Synthetic oligonucleotide
tgtcacagctcactggaaacgaggtatgctgtcattcatcgctcaaatgcatgcaatgat

SEQ ID NO: 119734 - DNA, 60 bp, Artificial
  Synthetic oligonucleotide
tggatttgattaacaacgcttttgaaggtcgtctctcaatttttagcgcacaggagggat

SEQ ID NO: 119735 - DNA, 60 bp, Artificial
  Synthetic oligonucleotide
caggagggatgggataaaacaatctcagcacagccggatatgatggcatgtggtggcgcc

SEQ ID NO: 119736 - DNA, 60 bp, Artificial
  Synthetic oligonucleotide
aattcagtaatgatcggtgatccgatgattcttggctaaacacccccattttcaccgcgc

SEQ ID NO: 119737 - DNA, 60 bp, Artificial
  Synthetic oligonucleotide
tgcaacaggcacccattgtactgactccagctgctcttacaatgtttccagatactacca

SEQ ID NO: 119738 - DNA, 60 bp, Artificial
  Synthetic oligonucleotide
gtgcctatagaaaagagttggtgacgccggctcgagatttcggtcactttggcctgtccc

SEQ ID NO: 119739 - DNA, 60 bp, Artificial
  Synthetic oligonucleotide
gaagggtcgtgcctatagaaaagagttggtgacgccggctcgagatttcggtcactttgg

SEQ ID NO: 119740 - DNA, 60 bp, Artificial
  Synthetic oligonucleotide
ggggtgtaatggtctacgattattcagaactggaacgtgatccatcgaagggtcgtgcct

SEQ ID NO: 119741 - DNA, 60 bp, Artificial
  Synthetic oligonucleotide
cttacaatgtttccagatactaccaaatttggggatttgaattattcagtaattcagtaa

SEQ ID NO: 119742 - DNA, 60 bp, Artificial
  Synthetic oligonucleotide
gggcgtcgaaaagatcaggtgtgcgctcgggccgggtggcatgacaggatggtataacag

SEQ ID NO: 119743 - DNA, 60 bp, Artificial
  Synthetic oligonucleotide
gtacgtaagctagtggatgctgtgaatcatgcatggggcgtcgaaaagatcaggtgtgcg

SEQ ID NO: 119744 - DNA, 60 bp, Artificial
  Synthetic oligonucleotide
gctaagttgaagacagtacgtaagctagtggatgctgtgaatcatgcatggggcgtcgaa

SEQ ID NO: 119745 - DNA, 60 bp, Artificial
  Synthetic oligonucleotide
gtcactttggcctgtcccattactctagggcgaccactccgattcttggaaagatgccag

SEQ ID NO: 119746 - DNA, 60 bp, Artificial
  Synthetic oligonucleotide
ggtataacagaactatgcaacaggcacccattgtactgactccagctgctcttacaatgt

SEQ ID NO: 119747 - DNA, 60 bp, Artificial
  Synthetic oligonucleotide
caggtgtgcgctcgggccgggtggcatgacaggatggtataacagaactatgcaacaggc

SEQ ID NO: 119748 - DNA, 60 bp, Artificial
  Synthetic oligonucleotide
atccagaagcctgacagacgaggtttctaaattgtataaattgaaccggggcaacgtcaa

SEQ ID NO: 119749 - DNA, 52 bp, Artificial
  Synthetic oligonucleotide
ggcaaaaagctcattggcgccctcatgtctgcgattgtaggcctctgcctcc

SEQ ID NO: 119750 - DNA, 60 bp, Artificial
  Synthetic oligonucleotide
gggcttttcggcaccggatcatatcaagtatgggacccgaaatttcatacttagttatgg

SEQ ID NO: 119751 - DNA, 53 bp, Artificial
  Synthetic oligonucleotide
ggcaaaaagctcattggcgcccgacatgtctgcgattgtaggcctctgcctcc

SEQ ID NO: 119752 - DNA, 60 bp, Artificial
  Synthetic oligonucleotide
gctatcggttaaggactattttggccagattggaaggggtggtgaagagatcattgcgcg

SEQ ID NO: 119753 - DNA, 60 bp, Artificial
  Synthetic oligonucleotide
tattttggccagattggaaggggtggtgaagagatcattgcgcgtcatttgtgtaataag

SEQ ID NO: 119754 - DNA, 60 bp, Artificial
  Synthetic oligonucleotide
tggcaattcgcaggcaaccagcacgcccatcaactcgagcaggggtacgccgacgggcat

SEQ ID NO: 119755 - DNA, 60 bp, Artificial
  Synthetic oligonucleotide
ggctatcggttaaggactattttggccagattggaaggggtggtgaagagatcattgcgc

SEQ ID NO: 119756 - DNA, 60 bp, Artificial
  Synthetic oligonucleotide
tattttggccagattggaaggggtggtgaagagatcattgcgagtcatttgtgtaataag

SEQ ID NO: 119757 - DNA, 60 bp, Artificial
  Synthetic oligonucleotide
ggccagattggaaggggtggtgaagagatcattgcgagtcatttgtgtaataagctatca

SEQ ID NO: 119758 - DNA, 60 bp, Artificial
  Synthetic oligonucleotide
agcgatgcggagcgcaattgcttgaggattaccgcaaaagtgggatgatggatgaagccg

SEQ ID NO: 119759 - DNA, 60 bp, Artificial
  Synthetic oligonucleotide
ttatagaggatgtggctcctgggcatcatgccgcccaaaggtctagtcagcgatctatac

SEQ ID NO: 119760 - DNA, 60 bp, Artificial
  Synthetic oligonucleotide
caacaggatatcgaaaaattataccggatcccgatgttgacgggatgcggtactgactga

SEQ ID NO: 119761 - DNA, 60 bp, Artificial
  Synthetic oligonucleotide
gaattacgcgcccggtcttcggatagggtgacgctctacctgcgccaacaggatatcgaa

SEQ ID NO: 119762 - DNA, 60 bp, Artificial
  Synthetic oligonucleotide
acctgcgccaacaggatatcgaaaaattataccggatcccgatgctgacgggatgcggta

SEQ ID NO: 119763 - DNA, 60 bp, Artificial
  Synthetic oligonucleotide
gacacttgtgcaaatgcggcatacaatcgccggcaacaaggaatggcaaacatggttatt

SEQ ID NO: 119764 - DNA, 60 bp, Artificial
  Synthetic oligonucleotide
acttgtgcaaatgcgacattcaatagccggcaacaaggaatggcaaacatggttattgcc

SEQ ID NO: 119765 - DNA, 60 bp, Artificial
  Synthetic oligonucleotide
catggaaaatgaaggatttgccaaaataataaatcgatatgcccaaatggctgtgcaaca

SEQ ID NO: 119766 - DNA, 60 bp, Artificial
  Synthetic oligonucleotide
catggaaaatgaaggatttgccaaaataataaatcgatacgcccaaatggctgtgcagca

SEQ ID NO: 119767 - DNA, 60 bp, Artificial
  Synthetic oligonucleotide
gtgcaaatgcggcatacaatcgccggcaacaaggaatggcaaacatggttattgccgatg

SEQ ID NO: 119768 - DNA, 60 bp, Artificial
  Synthetic oligonucleotide
gtgcaaatgcgacattcaatagccggcaacaaggaatggcaaacatggttattgccgatg

SEQ ID NO: 119769 - DNA, 57 bp, Artificial
  Synthetic oligonucleotide
cattcaaatgcgattgctacgctggtctcgactgccacctctcattccgataagatg

SEQ ID NO: 119770 - DNA, 60 bp, Artificial
  Synthetic oligonucleotide
gttcaacagtcggtgatctgtcttcccagtttgcgtcaacgtcttcaggccttgcacagc

SEQ ID NO: 119771 - DNA, 60 bp, Artificial
  Synthetic oligonucleotide
tctgcttgggctgttttactgctgctatctcaagtggaagacgtctcatatcaggcgtac

SEQ ID NO: 119772 - DNA, 60 bp, Artificial
  Synthetic oligonucleotide
tatcctggttatctttctgcttgggctgttttactgctgctatctcaagtggaagacgtc

SEQ ID NO: 119773 - DNA, 60 bp, Artificial
  Synthetic oligonucleotide
taagactttagagactgacgtcctcaatgctaaatcgagtctgtcatcgctggctgctca

SEQ ID NO: 119774 - DNA, 60 bp, Artificial
  Synthetic oligonucleotide
actgtctctcaactataagactttagagactgacgtcctcaatgctaaatcgagtctgtc

SEQ ID NO: 119775 - DNA, 60 bp, Artificial
  Synthetic oligonucleotide
ctgatgcatcctcaaaattgagcgtagtatccgattcggtcgaccaactgtctctcaact

SEQ ID NO: 119776 - DNA, 60 bp, Artificial
  Synthetic oligonucleotide
cttactgatgcatcctcaaaattgagcgtagtatccgattcggtcgaccaactgtctctc

SEQ ID NO: 119777 - DNA, 60 bp, Artificial
  Synthetic oligonucleotide
cgcgtcagctccaatcctaaattgatcactctacaactcggcacgaacccaatggatcgc

SEQ ID NO: 119778 - DNA, 60 bp, Artificial
  Synthetic oligonucleotide
caccttagttggtcgcgtcagctccaatcctaaattgatcactctacaactcggcacgaa

SEQ ID NO: 119779 - DNA, 60 bp, Artificial
  Synthetic oligonucleotide
acgaacccaatggatcgcattacaggtctggtgctcaccttctctatcgacacgtagggg

SEQ ID NO: 119780 - DNA, 60 bp, Artificial
  Synthetic oligonucleotide
tcggcacgaacccaatggatcgcattacaggtctggtgctcaccttctctatcgacacgt

SEQ ID NO: 119781 - DNA, 60 bp, Artificial
  Synthetic oligonucleotide
tcaggcgtacttaccataaagaattggttgcgttaacccgcggatatgtcaggccgatct

SEQ ID NO: 119782 - DNA, 60 bp, Artificial
  Synthetic oligonucleotide
gacacgacgcagactgttcccaagcaagtgctgtcccctttgacgatcaatgagggcgcg

SEQ ID NO: 119783 - DNA, 60 bp, Artificial
  Synthetic oligonucleotide
tgacacgacgcagactgttcccaagcaagtgctgtcccctttgacgatcaatgagggcgc

SEQ ID NO: 119784 - DNA, 60 bp, Artificial
  Synthetic oligonucleotide
ggaagacgtctcatatcaggcgtacttaccataaagaattggttgcgttaacccgcggat

SEQ ID NO: 119785 - DNA, 60 bp, Artificial
  Synthetic oligonucleotide
cgagtcataacagatctcatgtcatcattcactactcaccattcgctcaatccccagcag

SEQ ID NO: 119786 - DNA, 60 bp, Artificial
  Synthetic oligonucleotide
ccagagcataaacgcttcgcgatcagatctgtctgctattcgcagtgaattgatgtcctt

SEQ ID NO: 119787 - DNA, 60 bp, Artificial
  Synthetic oligonucleotide
cttatctgctttcgagagatcacgtattatatcaacgtcgacattccgcttgaccatcct

SEQ ID NO: 119788 - DNA, 60 bp, Artificial
  Synthetic oligonucleotide
tctgctttcgagagatcacgtattatatcaacgtcgacattccgcttgaccatcctcagc

SEQ ID NO: 119789 - DNA, 60 bp, Artificial
  Synthetic oligonucleotide
gctctttttatggaccttggattatttctgggacttatccggtcgtgagtcttatctgct

SEQ ID NO: 119790 - DNA, 60 bp, Artificial
  Synthetic oligonucleotide
ccttggattatttctgggacttatccggtcgtgagtcttatctgctttcgagagatcacg

SEQ ID NO: 119791 - DNA, 60 bp, Artificial
  Synthetic oligonucleotide
accttatttctgtgagctcgattgcgttctcattcgagtgactcctttgacgagtcataa

SEQ ID NO: 119792 - DNA, 60 bp, Artificial
  Synthetic oligonucleotide
gagtgactcctttgacgagtcataacagatctcatgtcatcattcactactcaccattcg

SEQ ID NO: 119793 - DNA, 60 bp, Artificial
  Synthetic oligonucleotide
cttgtagctgacccagtagtgtggcacgtgcagctgatcaatcgtcgcgcaactgatagc

SEQ ID NO: 119794 - DNA, 60 bp, Artificial
  Synthetic oligonucleotide
aactgatagctttaaaccttatttctgtgagctcgattgcgttctcattcgagtgactcc

SEQ ID NO: 119795 - DNA, 60 bp, Artificial
  Synthetic oligonucleotide
cttactcatctcagacccttcaaacattcactgcgaatctcgcttccagtatacctgaca

SEQ ID NO: 119796 - DNA, 60 bp, Artificial
  Synthetic oligonucleotide
cccttcaaacattcactgcgaatctcgcttccagtatacctgacactaacttagctgcca

SEQ ID NO: 119797 - DNA, 60 bp, Artificial
  Synthetic oligonucleotide
atacctgacactaacttagctgccacgatcattgttcactcgcatgggagtgtgtctacg

SEQ ID NO: 119798 - DNA, 60 bp, Artificial
  Synthetic oligonucleotide
cctgacactaacttagctgccacgatcattgttcactcgcatgggagtgtgtctacgttt

SEQ ID NO: 119799 - DNA, 60 bp, Artificial
  Synthetic oligonucleotide
cagtactgagaaaacccaattgactcttgacatcaggcagttccagccatcaccaactga

SEQ ID NO: 119800 - DNA, 60 bp, Artificial
  Synthetic oligonucleotide
cccaattgactcttgacatcaggcagttccagccatcaccaactgattggtccgtgttgc

SEQ ID NO: 119801 - DNA, 60 bp, Artificial
  Synthetic oligonucleotide
caccaactgattggtccgtgttgctggctcaaccggcgttccaggctagtgattttctcg

SEQ ID NO: 119802 - DNA, 60 bp, Artificial
  Synthetic oligonucleotide
gtccgtgttgctggctcaaccggcgttccaggctagtgattttctcggttacgcttgggc

SEQ ID NO: 119803 - DNA, 60 bp, Artificial
  Synthetic oligonucleotide
gattttctcggttacgcttgggctagtattgctggcatttggtctcccatcaccttagtt

SEQ ID NO: 119804 - DNA, 60 bp, Artificial
  Synthetic oligonucleotide
gcttgggctagtattgctggcatttggtctcccatcaccttagttggtcgcgtcagctcc

SEQ ID NO: 119805 - DNA, 60 bp, Artificial
  Synthetic oligonucleotide
ggtagtgtccattgtcaatcttctaagaataaggccggaggagatctacaggctacatcc

SEQ ID NO: 119806 - DNA, 60 bp, Artificial
  Synthetic oligonucleotide
tccgtgtttggtagtgtccattgtcaatcttctaagaataaggccggaggagatctacag

SEQ ID NO: 119807 - DNA, 60 bp, Artificial
  Synthetic oligonucleotide
tgatgtccttacgttcaacagtcggtgatctgtcttcccagtttgcgtcaacgtcttcag

SEQ ID NO: 119808 - DNA, 60 bp, Artificial
  Synthetic oligonucleotide
ttcgcgatcagatctgtctgctattcgcagtgaattgatgtccttacgttcaacagtcgg

SEQ ID NO: 119809 - DNA, 60 bp, Artificial
  Synthetic oligonucleotide
tacatcagctgagatacctcaatggtttaagagtttgaatccaatgttaggcgtggtgaa

SEQ ID NO: 119810 - DNA, 60 bp, Artificial
  Synthetic oligonucleotide
ccggaaatggaaccaatgatgtcaaggaagccgacgcatcaatgtccaaactgttggaga

SEQ ID NO: 119811 - DNA, 60 bp, Artificial
  Synthetic oligonucleotide
taggaagtgcattgataaagaaaatgggtttaacgaatgagacaaaaaatgaacaatcgg

SEQ ID NO: 119812 - DNA, 60 bp, Artificial
  Synthetic oligonucleotide
taaatcgaaaattcagtacgataaaaattgacagcgagaaagggttgacggatataattg

SEQ ID NO: 119813 - DNA, 57 bp, Artificial
  Synthetic oligonucleotide
gatataattggaaaacggaaaaagattagtggaaaaatggttgatgagggaaaacag

SEQ ID NO: 119814 - DNA, 60 bp, Artificial
  Synthetic oligonucleotide
gtgaagttaataacaaatgacataaagtatgtggatcaggcacatgttattttcacagcg

SEQ ID NO: 119815 - DNA, 60 bp, Artificial
  Synthetic oligonucleotide
aataacaaatgacataaagtatgtggatcaggcacatgttattttcacagcgcctacggg

SEQ ID NO: 119816 - DNA, 60 bp, Artificial
  Synthetic oligonucleotide
aagttgcgagaaaagctactagtcgagcgaatatcagagcttatgcatacacacctagca

SEQ ID NO: 119817 - DNA, 60 bp, Artificial
  Synthetic oligonucleotide
gctactagtcgagcgaatatcagagcttatgcatacacacctagcagtgatattagcctc

SEQ ID NO: 119818 - DNA, 60 bp, Artificial
  Synthetic oligonucleotide
acacctagcagtgatattagcctcatcgaggcactcactacattagttgatgtagtctag

SEQ ID NO: 119819 - DNA, 60 bp, Artificial
  Synthetic oligonucleotide
attagcctcatcgaggcactcactacattagttgatgtagtctagtctattcccggagtt

SEQ ID NO: 119820 - DNA, 60 bp, Artificial
  Synthetic oligonucleotide
caatgcaaacaagaattagaagaacgtggaattaaaacgcatatagttgagtgggacgag

SEQ ID NO: 119821 - DNA, 60 bp, Artificial
  Synthetic oligonucleotide
acccgtgggatcagtatcagcaatggatggccttcgctcaagcggtgataagaggatact

SEQ ID NO: 119822 - DNA, 60 bp, Artificial
  Synthetic oligonucleotide
gagtgcagatgtcaagaattgttttactagctcccggagatgtaatatcacaatgcaaac

SEQ ID NO: 119823 - DNA, 60 bp, Artificial
  Synthetic oligonucleotide
tgtagtctagtctattcccggagttagtcgttttctatgatgtacgctctttaaagatac

SEQ ID NO: 119824 - DNA, 60 bp, Artificial
  Synthetic oligonucleotide
gttaaaaagagtgcagatgtcaagaattgttttactagctcccggagatgtaatatcaca

SEQ ID NO: 119825 - DNA, 60 bp, Artificial
  Synthetic oligonucleotide
aataccggaaatggaaccaatgatgtcaaggaagccgacgcatcaatgtccaaactgttg

SEQ ID NO: 119826 - DNA, 60 bp, Artificial
  Synthetic oligonucleotide
ccgtgggatcagtatcagcaatggatggccttcgctcaagcggtgataagaggatacttg

SEQ ID NO: 119827 - DNA, 60 bp, Artificial
  Synthetic oligonucleotide
taatatcacaatgcaaacaagaattagaagaacgtggaattaaaacgcatatagttgagt

SEQ ID NO: 119828 - DNA, 60 bp, Artificial
  Synthetic oligonucleotide
gttaaaaaagttcttcgtcgactgccatcgagatggagcgctttttaagaaaatacaaca

SEQ ID NO: 119829 - DNA, 60 bp, Artificial
  Synthetic oligonucleotide
gttaaaaaagttcttcgtcgactgccatcgagatggaacgctttttgagaaaattcaaca

SEQ ID NO: 119830 - DNA, 60 bp, Artificial
  Synthetic oligonucleotide
gttaaaaaagttcttcgtcgactgccatcgagatggagcgctttttgagaaaatacaaca

SEQ ID NO: 119831 - DNA, 60 bp, Artificial
  Synthetic oligonucleotide
gttaaaaaagttcttcgtcgactgccatcgagatggagcgcttcttgagaaaatataaca

SEQ ID NO: 119832 - DNA, 60 bp, Artificial
  Synthetic oligonucleotide
gcggtattatgacctcttttttcacacaaccaaagtttcgcaccaactacccgattttgc

SEQ ID NO: 119833 - DNA, 60 bp, Artificial
  Synthetic oligonucleotide
gacaaaattagttcgcgatgagcaaattggcaggatcggagatcattattatacaacaaa

SEQ ID NO: 119834 - DNA, 60 bp, Artificial
  Synthetic oligonucleotide
tgctacgcaaacacaaaaagcggagaaggctgcattcgcatcgtacgcggaagcgtttcg

SEQ ID NO: 119835 - DNA, 60 bp, Artificial
  Synthetic oligonucleotide
ctgagatggtaagggtggcagaatgagaccaggggatacgcggggggaagctgatctcga

SEQ ID NO: 119836 - DNA, 60 bp, Artificial
  Synthetic oligonucleotide
atgatgcgcgatgctatccaactgtatggaacatgcgcctgtccctttctgcttagccta

SEQ ID NO: 119837 - DNA, 60 bp, Artificial
  Synthetic oligonucleotide
gcgcgatgctatccaactgtatggaacatgcgcctgtccctttctgcttagcctagcccg

SEQ ID NO: 119838 - DNA, 60 bp, Artificial
  Synthetic oligonucleotide
gttcagcaaagagtgacgtaagtggtggaaaacagattcaatcagtcggtgtagcacaag

SEQ ID NO: 119839 - DNA, 60 bp, Artificial
  Synthetic oligonucleotide
cagcaaagagtgacgtaagtggtggaaaacagattcaatcagtcggtgtagcacaaggac

SEQ ID NO: 119840 - DNA, 60 bp, Artificial
  Synthetic oligonucleotide
ccagcccgagccgccatcatagtatactgtcctgagcaagatgatatgctgtctggagtt

SEQ ID NO: 119841 - DNA, 60 bp, Artificial
  Synthetic oligonucleotide
atatgctgtctggagtttttgaggttgacgccacaggtaagcgtacattcgttagaacgt

SEQ ID NO: 119842 - DNA, 60 bp, Artificial
  Synthetic oligonucleotide
gcgttcacagccgttcagtttgatgaaccatgtttcgttctaccagcccgagccgccatc

SEQ ID NO: 119843 - DNA, 60 bp, Artificial
  Synthetic oligonucleotide
cgttctaccagcccgagccgccatcatagtatactgtcctgagcaagatgatatgctgtc

SEQ ID NO: 119844 - DNA, 60 bp, Artificial
  Synthetic oligonucleotide
ctggattgttgtctgattttgctgagcatcatgaacttaatcaattgcaagcgttcacag

SEQ ID NO: 119845 - DNA, 60 bp, Artificial
  Synthetic oligonucleotide
cttaatcaattgcaagcgttcacagccgttcagtttgatgaaccatgtttcgttctacca

SEQ ID NO: 119846 - DNA, 60 bp, Artificial
  Synthetic oligonucleotide
tttgagcgctcgcgaagcctacttttcaaagaaatatgatcctgcgcaatccttggttgc

SEQ ID NO: 119847 - DNA, 60 bp, Artificial
  Synthetic oligonucleotide
ccaactactcttggaggcatcatcactcgtggtgttaatttgagcgctcgcgaagcctac

SEQ ID NO: 119848 - DNA, 60 bp, Artificial
  Synthetic oligonucleotide
cgcagagtagttcttcacactaggaaggttgagcggagctgagatggtaagggtggcaga

SEQ ID NO: 119849 - DNA, 60 bp, Artificial
  Synthetic oligonucleotide
ctttggtgatgacgcagagtagttcttcacactaggaaggttgagcggagctgagatggt

SEQ ID NO: 119850 - DNA, 60 bp, Artificial
  Synthetic oligonucleotide
tgtttctgaattgaaatgtgaagtttggactgatttgctatcatatcttcgtactggatt

SEQ ID NO: 119851 - DNA, 52 bp, Artificial
  Synthetic oligonucleotide
ccgcatagctgtctgaggagttctagtttccaccccaatcgattcaacgtga

SEQ ID NO: 119852 - DNA, 60 bp, Artificial
  Synthetic oligonucleotide
gataaatcttccgagctaaatgccaataagcaggttgacacccgaaacccccgcatagct

SEQ ID NO: 119853 - DNA, 51 bp, Artificial
  Synthetic oligonucleotide
gataaatcttccgagctaaatgccaataagcaggttgacacccgaaacccc

SEQ ID NO: 119854 - DNA, 60 bp, Artificial
  Synthetic oligonucleotide
tacagtggtgaaccaactactcttggaggcatcatcactcgtggtgttaatttgagcgct

SEQ ID NO: 119855 - DNA, 55 bp, Artificial
  Synthetic oligonucleotide
gcttagcctagcccgtttctccactgcgctgtcttatctgaatgcgaagttgcca

SEQ ID NO: 119856 - DNA, 60 bp, Artificial
  Synthetic oligonucleotide
gtactggattgccaactggattgttgtctgattttgctgagcatcatgaacttaatcaat

SEQ ID NO: 119857 - DNA, 60 bp, Artificial
  Synthetic oligonucleotide
atgtgaagtttggactgatttgctatcatatcttcgtactggattgccaactggattgtt

SEQ ID NO: 119858 - DNA, 51 bp, Artificial
  Synthetic oligonucleotide
ccttggttgcgagtgctttctttacagttaagacgtctgcgagcggagcta

SEQ ID NO: 119859 - DNA, 60 bp, Artificial
  Synthetic oligonucleotide
cgctcgcgaagcctacttttcaaagaaatatgatcctgcgcaatccttggttgcgagtgc

SEQ ID NO: 119860 - DNA, 60 bp, Artificial
  Synthetic oligonucleotide
cgacattggtctggtttatcatatgaaccgcgctgctgcagttaaggtcgtcagctctag

SEQ ID NO: 119861 - DNA, 60 bp, Artificial
  Synthetic oligonucleotide
tcaagcgacattggtctggtttatcatatgaaccgcgctgctgcagttaaggtcgtcagc

SEQ ID NO: 119862 - DNA, 60 bp, Artificial
  Synthetic oligonucleotide
ttgatcatctgtcagatgagaagaatatccaggataaggaacctatgtcttctcgcgtgg

SEQ ID NO: 119863 - DNA, 60 bp, Artificial
  Synthetic oligonucleotide
atgagaagaatatccaggataaggaacctatgtcttctcgcgtggccagtgaggtgctgc

SEQ ID NO: 119864 - DNA, 60 bp, Artificial
  Synthetic oligonucleotide
ctgcatcgacgtgaaaccagcccgctcttgaaggtcgttcgtgtaggacgcaccacggat

SEQ ID NO: 119865 - DNA, 60 bp, Artificial
  Synthetic oligonucleotide
gtgaaaccagcccgctcttgaaggtcgttcgtgtaggacgcaccacggatatggttcgcg

SEQ ID NO: 119866 - DNA, 60 bp, Artificial
  Synthetic oligonucleotide
tactgctgcgctcagtgctgtggagtcttatactatggctatagacccattaacctgtat

SEQ ID NO: 119867 - DNA, 60 bp, Artificial
  Synthetic oligonucleotide
gctgcgctcagtgctgtggagtcttatactatggctatagacccattaacctgtatccgt

SEQ ID NO: 119868 - DNA, 60 bp, Artificial
  Synthetic oligonucleotide
ggcgtgcgccgtcagatggaggtgagaacacccaacttccactcgttcgttgaatcagct

SEQ ID NO: 119869 - DNA, 60 bp, Artificial
  Synthetic oligonucleotide
gggagacaggtcagttcgtcacaccggacgtcatccgcctcggcaatgcgtactgctgcg

SEQ ID NO: 119870 - DNA, 60 bp, Artificial
  Synthetic oligonucleotide
gcctgactgtttgttaaacgttgctactcatgaccactcggctttgaagatgaccgcacc

SEQ ID NO: 119871 - DNA, 60 bp, Artificial
  Synthetic oligonucleotide
tctgctaacgaagctaagagtcgtatgatcggtcatcatcgcattatgctatgcaccctc

SEQ ID NO: 119872 - DNA, 60 bp, Artificial
  Synthetic oligonucleotide
ccgcaccagtccttaacatctatgatcaggtggataacgcccgtcggttaatcttttccg

SEQ ID NO: 119873 - DNA, 60 bp, Artificial
  Synthetic oligonucleotide
tctcgcgtggccagtgaggtgctgcgcaatgatgtggccatttccggtgacttttggcgc

SEQ ID NO: 119874 - DNA, 60 bp, Artificial
  Synthetic oligonucleotide
gtggccagtgaggtgctgcgcaatgatgtggccatttccggtgacttttggcgcggaact

SEQ ID NO: 119875 - DNA, 60 bp, Artificial
  Synthetic oligonucleotide
tttgaagatgaccgcaccagtccttaacatctatgatcaggtggataacgcccgtcggtt

SEQ ID NO: 119876 - DNA, 60 bp, Artificial
  Synthetic oligonucleotide
aagagtcgtatgatcggtcatcatcgcattatgctatgcaccctcccagccattgagacg

SEQ ID NO: 119877 - DNA, 59 bp, Artificial
  Synthetic oligonucleotide
ctccctgtatcgctcaatgccccatcagttagttaatggttaccactttgacactttcc

SEQ ID NO: 119878 - DNA, 60 bp, Artificial
  Synthetic oligonucleotide
gctttattttgtcttggcgtgcgccgtcagatggaggtgagaacacccaacttccactcg

SEQ ID NO: 119879 - DNA, 60 bp, Artificial
  Synthetic oligonucleotide
ggtcttctgcctgactgtttgttaaacgttgctactcatgaccactcggctttgaagatg

SEQ ID NO: 119880 - DNA, 60 bp, Artificial
  Synthetic oligonucleotide
cccgtcggttaatcttttccgatacagttactcagatgcttaaggagacagccgatgcgc

SEQ ID NO: 119881 - DNA, 60 bp, Artificial
  Synthetic oligonucleotide
ttgtcatcatccgggtgacttgcctgctactctgactcctgttggcctcgaagctgccaa

SEQ ID NO: 119882 - DNA, 60 bp, Artificial
  Synthetic oligonucleotide
cgctgttcaatcccactttccaggtttagggcgcatgactaaatgtctgtctccgttgac

SEQ ID NO: 119883 - DNA, 60 bp, Artificial
  Synthetic oligonucleotide
ctgaatgagctgcctagcagtgagaaccgtggtagaatgccctggaaactcatgcttgca

SEQ ID NO: 119884 - DNA, 60 bp, Artificial
  Synthetic oligonucleotide
cgctgcgggtactgggtctcagaccatactacgcgggtttgctctcttacggtgtgtact

SEQ ID NO: 119885 - DNA, 60 bp, Artificial
  Synthetic oligonucleotide
tcgacagtgagttgctctcattagccctagcaatcaaggactccggattggtaatgaatc

SEQ ID NO: 119886 - DNA, 60 bp, Artificial
  Synthetic oligonucleotide
ccactttccaggtttagggcgcatgactaaatgtctgtctccgttgactgccttatccgc

SEQ ID NO: 119887 - DNA, 60 bp, Artificial
  Synthetic oligonucleotide
ttggacgcactggctgatcaacgttcggaactacaatcccaggcacacgtaacttccttt

SEQ ID NO: 119888 - DNA, 60 bp, Artificial
  Synthetic oligonucleotide
gcttcaggatatctctaaactgaaccagttggatgccgcttttggtgtggagtccagatc

SEQ ID NO: 119889 - DNA, 60 bp, Artificial
  Synthetic oligonucleotide
ctccgttgactgccttatccgcagatcggactgtccgccacgttaacgtatctaccgtgc

SEQ ID NO: 119890 - DNA, 60 bp, Artificial
  Synthetic oligonucleotide
cctcgttaacgatgatgcttcggctattgctgtaccgaccgctcgcgtcgaggatatgct

SEQ ID NO: 119891 - DNA, 60 bp, Artificial
  Synthetic oligonucleotide
cgtgatgtcaaggtgctggctgattatgctctgacttgtcatcatccgggtgacttgcct

SEQ ID NO: 119892 - DNA, 60 bp, Artificial
  Synthetic oligonucleotide
tgtctgggttcgtgccaatgcgaggtaacgatttcgggctagagggtcaaattgatctcc

SEQ ID NO: 119893 - DNA, 60 bp, Artificial
  Synthetic oligonucleotide
ggtgacttgcctgctactctgactcctgttggcctcgaagctgccaaactggtcatcgcg

SEQ ID NO: 119894 - DNA, 60 bp, Artificial
  Synthetic oligonucleotide
ctcgtctagatcactgaatgagctgcctagcagtgagaaccgtggtagaatgccctggaa

SEQ ID NO: 119895 - DNA, 52 bp, Artificial
  Synthetic oligonucleotide
cggaagcggcgaatgaaatagctcgagtgactggggagacttcgacatgggg

SEQ ID NO: 119896 - DNA, 60 bp, Artificial
  Synthetic oligonucleotide
ccatgtcgaagtctccccagtcactcgagctatttcattcgccgcttccgttgtaaaagg

SEQ ID NO: 119897 - DNA, 60 bp, Artificial
  Synthetic oligonucleotide
gttggaaggtctcctcagtttcaaggaaaaaaccataaggctgacgcgctggcccccatg

SEQ ID NO: 119898 - DNA, 60 bp, Artificial
  Synthetic oligonucleotide
aaggtttcctcagtttcaaggaagaaaccataaggctgacgcgctggcccccatgtcgaa

SEQ ID NO: 119899 - DNA, 60 bp, Artificial
  Synthetic oligonucleotide
cggaagcggcgaatgaaatagctcgagtgactggggagacttcgacatgggggccagcgc

SEQ ID NO: 119900 - DNA, 60 bp, Artificial
  Synthetic oligonucleotide
ggcccccatgttgaagtctccccagtcactcgagctatttcattcgccgcttccgttgta

SEQ ID NO: 119901 - DNA, 60 bp, Artificial
  Synthetic oligonucleotide
gggtgtgactgtcagtgttggtggagttgacatgagggcgggacgcattatagcgtggga

SEQ ID NO: 119902 - DNA, 60 bp, Artificial
  Synthetic oligonucleotide
ctccacactaaatatatcatcatgggatcattacgaccctgaaatatctgttgtacatct

SEQ ID NO: 119903 - DNA, 59 bp, Artificial
  Synthetic oligonucleotide
ctccacactaaatatatcatcatgggatcattacgaccctgaaatatctgttgtatatc

SEQ ID NO: 119904 - DNA, 60 bp, Artificial
  Synthetic oligonucleotide
aagtgacacctggatcatatccggaccgcatactactgcagttactgcttgagcggcgcg

SEQ ID NO: 119905 - DNA, 55 bp, Artificial
  Synthetic oligonucleotide
ttccgttgtaaaaggtatttccggtgttgctagcacaccaatcgtagccatatgc

SEQ ID NO: 119906 - DNA, 60 bp, Artificial
  Synthetic oligonucleotide
acatatggctacgattggtgtactagcaacaccggaaataccttttacaacggaagcggc

SEQ ID NO: 119907 - DNA, 60 bp, Artificial
  Synthetic oligonucleotide
ggctacgattggtgtactagcaacaccggaaataccttttacaacggaagcggcgaatga

SEQ ID NO: 119908 - DNA, 60 bp, Artificial
  Synthetic oligonucleotide
gtctccccagtcactcgagctatttcattcgccgcttccgttgtaaaaggtatttccggt

SEQ ID NO: 119909 - DNA, 60 bp, Artificial
  Synthetic oligonucleotide
ggcctgtccatcccacgctataatgcgtcccgccctcatgtcaactccaccaacactgac

SEQ ID NO: 119910 - DNA, 60 bp, Artificial
  Synthetic oligonucleotide
tcagtgttggtggagttgacatgagggcgggacgcattatagcgtgggatggacaggccg

SEQ ID NO: 119911 - DNA, 60 bp, Artificial
  Synthetic oligonucleotide
acatgcagcgcggcctgtccatcccacgctataatgcgtcccgccctcatgtcaactcca

SEQ ID NO: 119912 - DNA, 60 bp, Artificial
  Synthetic oligonucleotide
gtacatgcagcgcggcctgtccatcccacgctataatgcgtcccgccctcatgtcaactc

SEQ ID NO: 119913 - DNA, 60 bp, Artificial
  Synthetic oligonucleotide
gcagggtactggtttaaagttttatccatagatatatagaatacaacctgtatttgcacc

SEQ ID NO: 119914 - DNA, 60 bp, Artificial
  Synthetic oligonucleotide
ggtgcaaatacaggttgtgttctatatatctatggataaaactttaaaccagtaccccgc

SEQ ID NO: 119915 - DNA, 60 bp, Artificial
  Synthetic oligonucleotide
tcagcagtcaaagcagggtactggtttaaagttttatccatagatatatagaatacaacc

SEQ ID NO: 119916 - DNA, 60 bp, Artificial
  Synthetic oligonucleotide
gttgtgttctatatatctatggataaaactttaaaccagtaccccgctttgactgctgag

SEQ ID NO: 119917 - DNA, 50 bp, Artificial
  Synthetic oligonucleotide
gcatgtttggcagtgtggttctgtttaatatcgccgttcttagcccatgc

SEQ ID NO: 119918 - DNA, 50 bp, Artificial
  Synthetic oligonucleotide
gcatgggctaagaacggcgatattaaacagaaccacactgccaaacatgc

SEQ ID NO: 119919 - DNA, 60 bp, Artificial
  Synthetic oligonucleotide
ttactcgctgaacaacagatcggagaactattacgtaacggctcactgagttttacttcg

SEQ ID NO: 119920 - DNA, 60 bp, Artificial
  Synthetic oligonucleotide
ctcgctgaacaacagatcggagaactattacgtaacggctcactgagttttacttcgtta

SEQ ID NO: 119921 - DNA, 60 bp, Artificial
  Synthetic oligonucleotide
tagcacttcatcgatcgttagccactttagcaaatcgtaatggaggcaaattactcgctg

SEQ ID NO: 119922 - DNA, 60 bp, Artificial
  Synthetic oligonucleotide
cgttagccactttagcaaatcgtaatggaggcaaattactcgctgaacaacagatcggag

SEQ ID NO: 119923 - DNA, 60 bp, Artificial
  Synthetic oligonucleotide
gtacacttccagactctatcaagaagataaacgcatttatactctaagtttagcacttca

SEQ ID NO: 119924 - DNA, 60 bp, Artificial
  Synthetic oligonucleotide
ctatcaagaagataaacgcatttatactctaagtttagcacttcatcgatcgttagccac

SEQ ID NO: 119925 - DNA, 60 bp, Artificial
  Synthetic oligonucleotide
ccaacgctgactctgcgcgacatgccgtacctatggttgcttgatccaaacgataaacga

SEQ ID NO: 119926 - DNA, 60 bp, Artificial
  Synthetic oligonucleotide
ctcaatctattcccaagaatatggacgtcgaaatataaaaatgacaaatcgtacacttcc

SEQ ID NO: 119927 - DNA, 60 bp, Artificial
  Synthetic oligonucleotide
ttaaaaatcaccaacgctgactctgcgcgacatgccgtacctatggttgcttgatccaaa

SEQ ID NO: 119928 - DNA, 60 bp, Artificial
  Synthetic oligonucleotide
gacaatctcaactaaagacgagttgaaacagcttacttttgatgacatcttaaagttcaa

SEQ ID NO: 119929 - DNA, 65 bp, Artificial
  Synthetic oligonucleotide
gacaatctcaactaaagacgagttgaaacagcttacttttgatgacatcttaaagttcaatgatg

SEQ ID NO: 119930 - DNA, 60 bp, Artificial
  Synthetic oligonucleotide
acggaagtggatttttacacttatattaatgcgatttgtccggtgccgtcttgtttattg

SEQ ID NO: 119931 - DNA, 60 bp, Artificial
  Synthetic oligonucleotide
tacacttatattaatgcgatttgtccggtgccgtcttgtttattgcttggaactcatacg

SEQ ID NO: 119932 - DNA, 60 bp, Artificial
  Synthetic oligonucleotide
tatggagctgaatcaatattgcagcgattacatcgtgaattgaatgatgctgatcgacgt

SEQ ID NO: 119933 - DNA, 50 bp, Artificial
  Synthetic oligonucleotide
tgaattgaatgatgctgatcgacgtgtcgttactgctgtattttgtggtt

SEQ ID NO: 119934 - DNA, 60 bp, Artificial
  Synthetic oligonucleotide
tctaggttcctgtccaagatgactgagatactaccaaaagtgagtattcctgaacgacaa

SEQ ID NO: 119935 - DNA, 60 bp, Artificial
  Synthetic oligonucleotide
ggttcctgtccaagatgactgagatactaccaaaagtgagtattcctgaacgacaatgtt

SEQ ID NO: 119936 - DNA, 60 bp, Artificial
  Synthetic oligonucleotide
ttgtttattgcttggaactcatacgactagtagagatgctgctatgggaccaactgacat

SEQ ID NO: 119937 - DNA, 60 bp, Artificial
  Synthetic oligonucleotide
gcttggaactcatacgactagtagagatgctgctatgggaccaactgacatcacaatgaa

SEQ ID NO: 119938 - DNA, 60 bp, Artificial
  Synthetic oligonucleotide
caatctgtgttaagatatggagctgaatcaatattgcagcgattacatcgtgaattgaat

SEQ ID NO: 119939 - DNA, 60 bp, Artificial
  Synthetic oligonucleotide
cattatacaaagtggttcgttatcaatcgtgtcctcaatctgtgttaagatatggagctg

SEQ ID NO: 119940 - DNA, 60 bp, Artificial
  Synthetic oligonucleotide
ggtcgcaacaaactaacgttcattgagaaaacaggcacatctgttgatgaggatactagc

SEQ ID NO: 119941 - DNA, 60 bp, Artificial
  Synthetic oligonucleotide
cattcatcgtggtcgcaacaaactaacgttcattgagaaaacaggcacatctgttgatga

SEQ ID NO: 119942 - DNA, 60 bp, Artificial
  Synthetic oligonucleotide
atcttaacattgaaagctattcattagagcagatacaatctccggagtatgcgccactta

SEQ ID NO: 119943 - DNA, 60 bp, Artificial
  Synthetic oligonucleotide
aacaattatacaaatatcttaacattgaaagctattcattagagcagatacaatctccgg

SEQ ID NO: 119944 - DNA, 60 bp, Artificial
  Synthetic oligonucleotide
ccggagtatgcgccacttagtatatttaagaaaccctttattatcggctctctatctacg

SEQ ID NO: 119945 - DNA, 60 bp, Artificial
  Synthetic oligonucleotide
caatctccggagtatgcgccacttagtatatttaagaaaccctttattatcggctctcta

SEQ ID NO: 119946 - DNA, 60 bp, Artificial
  Synthetic oligonucleotide
aaatgattaaaacctcattatacaaagtggttcgttatcaatcgtgtcctcaatctgtgt

SEQ ID NO: 119947 - DNA, 53 bp, Artificial
  Synthetic oligonucleotide
aacgcgtctagccatctacttaatcttacaacaggtacgtgcctcaaggacgt

SEQ ID NO: 119948 - DNA, 53 bp, Artificial
  Synthetic oligonucleotide
agctcgcgggtagtcgccgcgccctgacaactctctgtttggtgagaaattgc

SEQ ID NO: 119949 - DNA, 57 bp, Artificial
  Synthetic oligonucleotide
acattctgaagttagtagttatgaatttcgtttgtttatggacaatgctgaccaaca

SEQ ID NO: 119950 - DNA, 60 bp, Artificial
  Synthetic oligonucleotide
tgaattttacgactggtgcggatccttacgtatctctttcacttagacctgatcctgtca

SEQ ID NO: 119951 - DNA, 60 bp, Artificial
  Synthetic oligonucleotide
caactgacatcacaatgaattttacgactggtgcggatccttacgtatctctttcactta

SEQ ID NO: 119952 - DNA, 60 bp, Artificial
  Synthetic oligonucleotide
atatacggagatgtacccattaaagtatggtgttgtttcatcaacgaactaagtatagaa

SEQ ID NO: 119953 - DNA, 60 bp, Artificial
  Synthetic oligonucleotide
gcaaatatacggagatatacccattaaagtatggtgttgtttcatcaacgaactgagtgt

SEQ ID NO: 119954 - DNA, 60 bp, Artificial
  Synthetic oligonucleotide
acgagatgcaaatatacggagatatacccattaaagtatggtgttgtttcatcaacgaac

SEQ ID NO: 119955 - DNA, 60 bp, Artificial
  Synthetic oligonucleotide
tcgttagattcgtgggctttctattatagagtatagcccgcacctaaaatagaattgtat

SEQ ID NO: 119956 - DNA, 53 bp, Artificial
  Synthetic oligonucleotide
tcgttagattcgtgggctttctattatagagtatagcccgcacctaaaataga

SEQ ID NO: 119957 - DNA, 60 bp, Artificial
  Synthetic oligonucleotide
aattattttggtcatttattgcgactaaaaataccatatattacagaggttaatctgatg

SEQ ID NO: 119958 - DNA, 60 bp, Artificial
  Synthetic oligonucleotide
aattactttggtcatttattgcgactaaaaataccatatattacagaggttaatctgatg

SEQ ID NO: 119959 - DNA, 60 bp, Artificial
  Synthetic oligonucleotide
ccctcgtgaacagctgatgcaagatggatggtgtggatgtgaagacggattcattcccta

SEQ ID NO: 119960 - DNA, 60 bp, Artificial
  Synthetic oligonucleotide
atccctcgtgaacagctgatgcaagatggatggtgtggatgtgaagacggattcattccc

SEQ ID NO: 119961 - DNA, 60 bp, Artificial
  Synthetic oligonucleotide
gaggtgggcgagcaaatggagcctacgtttgagcatgcggttatggagatatacaaaggg

SEQ ID NO: 119962 - DNA, 60 bp, Artificial
  Synthetic oligonucleotide
cggatgaggtgggcgagcaaatggagcctacgtttgagcatgcggttatggagatataca

SEQ ID NO: 119963 - DNA, 60 bp, Artificial
  Synthetic oligonucleotide
gagcctacgtttgagcatgcggttatggagatatacaaagggattgctggcgttgattcg

SEQ ID NO: 119964 - DNA, 60 bp, Artificial
  Synthetic oligonucleotide
cagatggagcctacgtttgagcatgcggttatggagatatacaaagggattgctggcgtt

SEQ ID NO: 119965 - DNA, 60 bp, Artificial
  Synthetic oligonucleotide
gactagctttccgatctgacttggcgtgatccgtgacatgcgtagtgtgacacctgcccc

SEQ ID NO: 119966 - DNA, 60 bp, Artificial
  Synthetic oligonucleotide
tcgtgaacagctgatgcaagatggatggtgtggatgtgaagatggattcattccctatgt

SEQ ID NO: 119967 - DNA, 60 bp, Artificial
  Synthetic oligonucleotide
cgcggtcatggcttacatcgcagttcctgcggtggtggattcacgttcaagtgaggctat

SEQ ID NO: 119968 - DNA, 60 bp, Artificial
  Synthetic oligonucleotide
gatatatatgacttcattaaacccattggcgctgtgctgcctaagggatcatttaagtcg

SEQ ID NO: 119969 - DNA, 60 bp, Artificial
  Synthetic oligonucleotide
cattaaacccattggcgctgtgctgcctaagggatcatttaagtcgacgatcatgagagt

SEQ ID NO: 119970 - DNA, 60 bp, Artificial
  Synthetic oligonucleotide
ctgatagaaggacgcattgtcaatacttgatgaatccgtcaagtgtgcctcctgatgtga

SEQ ID NO: 119971 - DNA, 60 bp, Artificial
  Synthetic oligonucleotide
cgatgtcatgcctgatatatatgacttcgttaaacccattggcgctgtgctgcctaaggg

SEQ ID NO: 119972 - DNA, 60 bp, Artificial
  Synthetic oligonucleotide
cgatgtcatgcctgacatatatgacttcgttaaacccattggcgctgtgctgcctaaggg

SEQ ID NO: 119973 - DNA, 60 bp, Artificial
  Synthetic oligonucleotide
cgatgtcatgcctgacatatatgactttgttaaacccattggcgctgtgctgcctaaggg

SEQ ID NO: 119974 - DNA, 60 bp, Artificial
  Synthetic oligonucleotide
ctgatggcttgactgatagaaggacgcattgtcaatacttgatgaatccgtcaagtgtgc

SEQ ID NO: 119975 - DNA, 60 bp, Artificial
  Synthetic oligonucleotide
ctgatggcttgactgatagaaggacgcattgtcaatacttgattaatccgtcaagtgtgc

SEQ ID NO: 119976 - DNA, 60 bp, Artificial
  Synthetic oligonucleotide
ctgatggcttaactgatagaaggacgcattgtcaatacttgattaatccgtcaagtgtgc

SEQ ID NO: 119977 - DNA, 60 bp, Artificial
  Synthetic oligonucleotide
ctgatagaaggacgcattgtcaatacttgattaatccgtcaagtgtgcctcctgatgtga

SEQ ID NO: 119978 - DNA, 59 bp, Artificial
  Synthetic oligonucleotide
cacctgctcctaggtcaatgggggtagggggcgggctaagactacgtacgcgcttcatc

SEQ ID NO: 119979 - DNA, 53 bp, Artificial
  Synthetic oligonucleotide
cccccaggtcaatgggggtagggggcgggctaagactacgtacgcgcttcatc

SEQ ID NO: 119980 - DNA, 60 bp, Artificial
  Synthetic oligonucleotide
cgcggtcatggcttacatcgcagttcctgcggtggtggattcacgctcaagtgaagctat

SEQ ID NO: 119981 - DNA, 59 bp, Artificial
  Synthetic oligonucleotide
cacctgcccctaggtcaatgggggtagggggcgggctaagactacgtacgcgcttcatc

SEQ ID NO: 119982 - DNA, 60 bp, Artificial
  Synthetic oligonucleotide
ccttccgatctgacttggcgtgatccgtgacatgcgtagtgtgacacctgcccccaggtc

SEQ ID NO: 119983 - DNA, 60 bp, Artificial
  Synthetic oligonucleotide
atctgacttggcgtgatccgtgacatgcgtagtgtgacacctgctcctaggtcaatgggg

SEQ ID NO: 119984 - DNA, 60 bp, Artificial
  Synthetic oligonucleotide
gactagctttccgatctgacttggcgtgatccgtgacatgcgtagtgtgacacctgctcc

SEQ ID NO: 119985 - DNA, 54 bp, Artificial
  Synthetic oligonucleotide
ccttccgatctgacttggcgtgatccgtgacatgcgtagtgtgacacctgcccc

SEQ ID NO: 119986 - DNA, 60 bp, Artificial
  Synthetic oligonucleotide
gctattcgcggtcatggcttacatcgcagttcctgcggtggtggattcacgttcgagtga

SEQ ID NO: 119987 - DNA, 60 bp, Artificial
  Synthetic oligonucleotide
gctattcgcggtcatggcttacatcgcagttcctgcggtggtggattcacgctcaagtga

SEQ ID NO: 119988 - DNA, 60 bp, Artificial
  Synthetic oligonucleotide
gctattcgcggtcatggcttacatcgcagttcctgcggtggtggattcacgttcaagtga

SEQ ID NO: 119989 - DNA, 60 bp, Artificial
  Synthetic oligonucleotide
atctgacttggcgtgatccgtgacatgcgtagtgtgacacctgcccctaggtcaatgggg

SEQ ID NO: 119990 - DNA, 60 bp, Artificial
  Synthetic oligonucleotide
taaatgacatatctcctcagatcgtctctgacatgataaacagaaagcgtctgcgcgttc

SEQ ID NO: 119991 - DNA, 60 bp, Artificial
  Synthetic oligonucleotide
gctcctagaaagtactatgcgtcaactctatcatttactatgactaagtgcatcattccg

SEQ ID NO: 119992 - DNA, 60 bp, Artificial
  Synthetic oligonucleotide
gctcaagtgaagctattggactgctagaatcgtttggagtagatgctgggaccgacgcaa

SEQ ID NO: 119993 - DNA, 60 bp, Artificial
  Synthetic oligonucleotide
gttcaagtgaggctattggactgctagaatcgtttggagtagacgctggggctgatgcga

SEQ ID NO: 119994 - DNA, 60 bp, Artificial
  Synthetic oligonucleotide
gttcgagtgaggctattggactgctagaatcgtttggagtagacgctggggctgacgcga

SEQ ID NO: 119995 - DNA, 60 bp, Artificial
  Synthetic oligonucleotide
cgcggtcatggcttacatcgcagttcctgcggtggtggattcacgttcgagtgaggctat

SEQ ID NO: 119996 - DNA, 60 bp, Artificial
  Synthetic oligonucleotide
gttatatgctcctagaaagtactatgcgtcaactctatcatttactatgactaagtgcat

SEQ ID NO: 119997 - DNA, 60 bp, Artificial
  Synthetic oligonucleotide
gctattggactgctagaatcgtttggagtagatgctgggaccgacgcaaatgacgtttcg

SEQ ID NO: 119998 - DNA, 60 bp, Artificial
  Synthetic oligonucleotide
gtgaggctattggactgctagaatcgtttggagtagacgctggggctgacgcgaatgacg

SEQ ID NO: 119999 - DNA, 60 bp, Artificial
  Synthetic oligonucleotide
gtgaggctattggactgctagaatcgtttggagtagacgctggggctgatgcgaatgacg

SEQ ID NO: 120000 - DNA, 60 bp, Artificial
  Synthetic oligonucleotide
taagctagagggctaaacatcttctatgcggcctacataccatgtagcatgaatcacgac

SEQ ID NO: 120001 - DNA, 60 bp, Artificial
  Synthetic oligonucleotide
ctagagggctaaacatcttctatgcggcctacataccatgtagcatgaatcacgactggg

SEQ ID NO: 120002 - DNA, 60 bp, Artificial
  Synthetic oligonucleotide
tgattctcattcagtggaatattcaatagtagcaaacgttagaagagattcagcgatgcc

SEQ ID NO: 120003 - DNA, 60 bp, Artificial
  Synthetic oligonucleotide
acgttagaagagattcagcgatgccagctggaactgtttttcaaccgggatttccatggg

SEQ ID NO: 120004 - DNA, 60 bp, Artificial
  Synthetic oligonucleotide
cattttcaggctacatatatgttaacattaagtatattagatgctaccacagagtccgtt

SEQ ID NO: 120005 - DNA, 60 bp, Artificial
  Synthetic oligonucleotide
agagtccgttctatgtgattctcattcagtggaatattcaatagtagcaaacgttagaag

SEQ ID NO: 120006 - DNA, 60 bp, Artificial
  Synthetic oligonucleotide
tttagaaagattattgttaattgcatctgtgaagagaatggtaatgtagataagctagag

SEQ ID NO: 120007 - DNA, 60 bp, Artificial
  Synthetic oligonucleotide
gttaattgcatctgtgaagagaatggtaatgtagataagctagagggctaaacatcttct

SEQ ID NO: 120008 - DNA, 60 bp, Artificial
  Synthetic oligonucleotide
tttccatgggaacacacactatccaattacactgttgctcaagaagataatttagaaaga

SEQ ID NO: 120009 - DNA, 60 bp, Artificial
  Synthetic oligonucleotide
ccatgggaacacacactatccaattacactgttgctcaagaagataatttagaaagatta

SEQ ID NO: 120010 - DNA, 60 bp, Artificial
  Synthetic oligonucleotide
ctgctatgactcaatacgttcaacgaatttttccacaaggtggaccttatcattttcagg

SEQ ID NO: 120011 - DNA, 60 bp, Artificial
  Synthetic oligonucleotide
ttcttatagaataacaattgacatgattagaccagctgctatgactcaatacgttcaacg

SEQ ID NO: 120012 - DNA, 60 bp, Artificial
  Synthetic oligonucleotide
aaattgcagcatttgattccaccctagctgaaaatgcaccaaacaatacacaacgcttcg

SEQ ID NO: 120013 - DNA, 60 bp, Artificial
  Synthetic oligonucleotide
caagtaatacttgtcaaattgcagcatttgattccaccctagctgaaaatgcaccaaaca

SEQ ID NO: 120014 - DNA, 60 bp, Artificial
  Synthetic oligonucleotide
ctcaatctattaaaaattggaatgctcaatcaagacgtgagaatcctgtatatgagtata

SEQ ID NO: 120015 - DNA, 60 bp, Artificial
  Synthetic oligonucleotide
ttattaaatttagatgataattatgttcaatcaactagaggcataatcgattttttatca

SEQ ID NO: 120016 - DNA, 60 bp, Artificial
  Synthetic oligonucleotide
tgtaagaacttttgattcttatagaataacaattgacatgattagaccagctgctatgac

SEQ ID NO: 120017 - DNA, 60 bp, Artificial
  Synthetic oligonucleotide
tataataatggtcaactaattgatatggttcgaaatatgggaatagttactgtaagaact

SEQ ID NO: 120018 - DNA, 60 bp, Artificial
  Synthetic oligonucleotide
ggctttttaatccggtacaattaatgaatggaacatttaccattgaattctataataatg

SEQ ID NO: 120019 - DNA, 55 bp, Artificial
  Synthetic oligonucleotide
gcaccaaacaatacacaacgcttcgtttataatggcagactaaaaagacccatat

SEQ ID NO: 120020 - DNA, 60 bp, Artificial
  Synthetic oligonucleotide
gtttagtccatgcttgcataggggcaaatatgcatgatatggatgatccccagaaggatg

SEQ ID NO: 120021 - DNA, 60 bp, Artificial
  Synthetic oligonucleotide
gaatcacgactgggtttagtccatgcttgcataggggcaaatatgcatgatatggatgat

SEQ ID NO: 120022 - DNA, 57 bp, Artificial
  Synthetic oligonucleotide
tactaatgtagaagatgttgtacaacagacgaatgaattgattagaactttaaatgg

SEQ ID NO: 120023 - DNA, 60 bp, Artificial
  Synthetic oligonucleotide
cacagcctcagaaagagtggaattttcagctgccacaattgggtacaactttattaaatt

SEQ ID NO: 120024 - DNA, 60 bp, Artificial
  Synthetic oligonucleotide
ggcatttaaaatctcattcacaatggatgtacttttttctatagcgaaaactgtgtcaga

SEQ ID NO: 120025 - DNA, 60 bp, Artificial
  Synthetic oligonucleotide
cttaccgacctcaactacacattgagtgtaatcactttaatgaatagtacattacacaca

SEQ ID NO: 120026 - DNA, 60 bp, Artificial
  Synthetic oligonucleotide
gatgttattcctaattcttatatgattaaaccagtcaattcaactgaatatgcttcatgg

SEQ ID NO: 120027 - DNA, 60 bp, Artificial
  Synthetic oligonucleotide
tgtgattcctcattcgtacatggttaagccagtcaattcaactgaatatgcttcatggca

SEQ ID NO: 120028 - DNA, 60 bp, Artificial
  Synthetic oligonucleotide
tgcatcatggcgtgggttacgcaagcatatagttcgggattgtcacagaacagtattatt

SEQ ID NO: 120029 - DNA, 60 bp, Artificial
  Synthetic oligonucleotide
taaaattcatgtttttgcatcatggcgtgggttacgcaagcatatagttcgggattgtca

SEQ ID NO: 120030 - DNA, 60 bp, Artificial
  Synthetic oligonucleotide
gtatttaaaattcatgtttttgcatcatggcgtgggttacgcaagcgtatagttcgggat

SEQ ID NO: 120031 - DNA, 60 bp, Artificial
  Synthetic oligonucleotide
gtgattcctcattcgtacatggttaagccagtcaattcaactgaatatgcttcatggcaa

SEQ ID NO: 120032 - DNA, 60 bp, Artificial
  Synthetic oligonucleotide
ctcatcatccgggagactgaaaagcttattgagacaggacagtcttttattgctcatatt

SEQ ID NO: 120033 - DNA, 60 bp, Artificial
  Synthetic oligonucleotide
accgagacaagagttaatagagaggcttgaacaaattcgagaggctgaacgtttattcat

SEQ ID NO: 120034 - DNA, 60 bp, Artificial
  Synthetic oligonucleotide
tcacccatgtctatgctatgctgtcgagatggagggataatattgccagattgcgtgcta

SEQ ID NO: 120035 - DNA, 60 bp, Artificial
  Synthetic oligonucleotide
atatgctgagtggagacctggacaacattatgatattcccggcagagtattgaacctatt

SEQ ID NO: 120036 - DNA, 60 bp, Artificial
  Synthetic oligonucleotide
cgagtgttaaaccaaataatacacaatccgtctggattagataggttggaggcgagctta

SEQ ID NO: 120037 - DNA, 60 bp, Artificial
  Synthetic oligonucleotide
gggcggggggagaacactttttaacaattgatgatttgttagcagcagaacctagagatt

SEQ ID NO: 120038 - DNA, 60 bp, Artificial
  Synthetic oligonucleotide
acgagtgagagtgaacgatccacacgatttaacatctatgaatggtatgatcacccatgt

SEQ ID NO: 120039 - DNA, 60 bp, Artificial
  Synthetic oligonucleotide
gttggaggcgagcttaaatgttctgatgactgatgtacgagagcgtgtgtcgactctcca

SEQ ID NO: 120040 - DNA, 58 bp, Artificial
  Synthetic oligonucleotide
tcgctcctgctgctcctattcaagttccccctgcgccaaacgtgattgcacagcgtca

SEQ ID NO: 120041 - DNA, 60 bp, Artificial
  Synthetic oligonucleotide
tgttggtgtacaggtgcaaggtgtagatcctgagagtcatttgcctgctcttattgtaag

SEQ ID NO: 120042 - DNA, 60 bp, Artificial
  Synthetic oligonucleotide
ggacaaattgtcgtggttttgtattacgcgctccaattcctattattcgagtgttaaacc

SEQ ID NO: 120043 - DNA, 60 bp, Artificial
  Synthetic oligonucleotide
catttatcagggtgtagatcaaatggctgatgaggcgggtatccgtttagatgacgttga

SEQ ID NO: 120044 - DNA, 60 bp, Artificial
  Synthetic oligonucleotide
ttgcgtgctagcgcccagcatcaattaatcgctcaagagttagctcgacgatatgctgag

SEQ ID NO: 120045 - DNA, 60 bp, Artificial
  Synthetic oligonucleotide
gcaggatgctatggcaggtgtggttgctcaagctgtaagagatttgccagtagcacatga

SEQ ID NO: 120046 - DNA, 60 bp, Artificial
  Synthetic oligonucleotide
attattcgagtgttaaaccaaataatacacaatccgtctggattagataggttggaggcg

SEQ ID NO: 120047 - DNA, 60 bp, Artificial
  Synthetic oligonucleotide
ggtgtacaggtgcaaggtgtagatcctgagagtcatttgcctgctcttattgtaaggaca

SEQ ID NO: 120048 - DNA, 60 bp, Artificial
  Synthetic oligonucleotide
cctagagatttagacatttatcagggtgtagatcaaatggctgatgaggcgggtatccgt

SEQ ID NO: 120049 - DNA, 60 bp, Artificial
  Synthetic oligonucleotide
agtatactgtgctaccatttgaaactcttgaagatgtcgcgcagttatacgagtcagcgg

SEQ ID NO: 120050 - DNA, 60 bp, Artificial
  Synthetic oligonucleotide
gtgctaccatttgaaactcttgaagatgtcgcgcagttatacgagtcagcggatggtgac

SEQ ID NO: 120051 - DNA, 60 bp, Artificial
  Synthetic oligonucleotide
tcccgtaccccgcaatttccccgcttttaattatgatgtggatattggtcagtatactgt

SEQ ID NO: 120052 - DNA, 60 bp, Artificial
  Synthetic oligonucleotide
gagggaattgactgtccaacacctgctgacttaagccgttattgtgttccaaatggttgg

SEQ ID NO: 120053 - DNA, 60 bp, Artificial
  Synthetic oligonucleotide
tattgtgttccaaatggttggttttttaaggttaaaaatcagaatgtcattcccgtaccc

SEQ ID NO: 120054 - DNA, 64 bp, Artificial
  Synthetic oligonucleotide
gtccatcccttcaagctgttatacgtacaaataatataaatgcattcaacttacatattgaggg

SEQ ID NO: 120055 - DNA, 60 bp, Artificial
  Synthetic oligonucleotide
acttacatattgagggaattgactgtccaacacctgctgacttaagccgttattgtgttc

SEQ ID NO: 120056 - DNA, 60 bp, Artificial
  Synthetic oligonucleotide
gcactaggatgagggccgaaagacagagcactgtgaaactacgtccatcccttcaagctg

SEQ ID NO: 120057 - DNA, 60 bp, Artificial
  Synthetic oligonucleotide
cgcccagcatcaattaatcgctcaagagttagctcgacgatatgctgagtggagacctgg

SEQ ID NO: 120058 - DNA, 60 bp, Artificial
  Synthetic oligonucleotide
ccgggagactgaaaagcttattgagacaggacagtcttttattgctcatattcaaagggt

SEQ ID NO: 120059 - DNA, 60 bp, Artificial
  Synthetic oligonucleotide
gctatgctgtcgagatggagggataatattgccagattgcgtgctagcgcccagcatcaa

SEQ ID NO: 120060 - DNA, 60 bp, Artificial
  Synthetic oligonucleotide
gatgtagcggcagcagggatgcgtttagatctatgtagagcggtgcatcgagtagatggc

SEQ ID NO: 120061 - DNA, 60 bp, Artificial
  Synthetic oligonucleotide
gcggacagggaattagagggtgtttggatacttggtggagtgactcctacttacaggaac

SEQ ID NO: 120062 - DNA, 60 bp, Artificial
  Synthetic oligonucleotide
gctgagtggagacctggacaacattatgatattcccggcagagtattgaacctattagtg

SEQ ID NO: 120063 - DNA, 60 bp, Artificial
  Synthetic oligonucleotide
cctcatatgtgggtagcggacagggaattagagggtgtttggatacttggtggagtgact

SEQ ID NO: 120064 - DNA, 60 bp, Artificial
  Synthetic oligonucleotide
gtttattcattaacgagattgttcaagaggttggggcaattgatcagcagcgagatgtag

SEQ ID NO: 120065 - DNA, 60 bp, Artificial
  Synthetic oligonucleotide
agattgttcaagaggttggggcaattgatcagcagcgagatgtagcggcagcagggatgc

SEQ ID NO: 120066 - DNA, 60 bp, Artificial
  Synthetic oligonucleotide
ggagtgactcctacttacaggaacttacacgagtggcaggaaaatattgcgtatattggg

SEQ ID NO: 120067 - DNA, 60 bp, Artificial
  Synthetic oligonucleotide
cgtatattgggttagttcagtttattgagttttgggaggaatttgtaacttggtttcccc

SEQ ID NO: 120068 - DNA, 60 bp, Artificial
  Synthetic oligonucleotide
tcgagtagatggcattttgcgagcatatcaagagagagttgatccctttagacttggatt

SEQ ID NO: 120069 - DNA, 60 bp, Artificial
  Synthetic oligonucleotide
tttgcgagcatatcaagagagagttgatccctttagacttggattgaattatcgccctcc

SEQ ID NO: 120070 - DNA, 60 bp, Artificial
  Synthetic oligonucleotide
ttttagcgaggcctgaacgtgctctgctgcatgaggagtacttgggagatctcatcatcc

SEQ ID NO: 120071 - DNA, 60 bp, Artificial
  Synthetic oligonucleotide
gcgaggcctgaacgtgctctgctgcatgaggagtacttgggagatctcatcatccgggag

SEQ ID NO: 120072 - DNA, 60 bp, Artificial
  Synthetic oligonucleotide
cgagatgtagcggcagcagggatgcgtttagatctatgtagagcggtgcatcgagtagat

SEQ ID NO: 120073 - DNA, 60 bp, Artificial
  Synthetic oligonucleotide
tggagttcaacaacagcaggatgctatggcaggtgtggttgctcaagctgtaagagattt

SEQ ID NO: 120074 - DNA, 60 bp, Artificial
  Synthetic oligonucleotide
ttattgtaaggacaaattgtcgtggttttgtattacgcgctccaattcctattattcgag

SEQ ID NO: 120075 - DNA, 60 bp, Artificial
  Synthetic oligonucleotide
cgttgcagcaatttctgatcgacagaataatgtgttaacactcagattccgggcgggggg

SEQ ID NO: 120076 - DNA, 60 bp, Artificial
  Synthetic oligonucleotide
aacggtcttttctcctcggatgctctcggtcgcggtgcggcttctgtaggccttcgtgca

SEQ ID NO: 120077 - DNA, 60 bp, Artificial
  Synthetic oligonucleotide
tccaacggtcttttctcctcggatgctctcggtcgcggtgcggcttctgtaggccttcgt

SEQ ID NO: 120078 - DNA, 60 bp, Artificial
  Synthetic oligonucleotide
ggtgttggacctattaatcatggtgtgccggtctttccaacggtcttttctcctcggatg

SEQ ID NO: 120079 - DNA, 60 bp, Artificial
  Synthetic oligonucleotide
tggtttccccactatggtgttggacctattaatcatggtgtgccggtctttccaacggtc

SEQ ID NO: 120080 - DNA, 60 bp, Artificial
  Synthetic oligonucleotide
ttcagtttattgagttttgggaggaatttgtaacttggtttccccactatggtgttggac

SEQ ID NO: 120081 - DNA, 60 bp, Artificial
  Synthetic oligonucleotide
gacatttgttgcactaggatgagggccgaaagacagagcactgtgaaactacgtccatcc

SEQ ID NO: 120082 - DNA, 60 bp, Artificial
  Synthetic oligonucleotide
cgtctcgtatcatctgagaggactgaaggtatgaggagcgtgaactccatcgctatttcg

SEQ ID NO: 120083 - DNA, 60 bp, Artificial
  Synthetic oligonucleotide
agcgcctcgtatcatctgagaggactgaaggtatgaggagcgtgaactccatcgctatct

SEQ ID NO: 120084 - DNA, 60 bp, Artificial
  Synthetic oligonucleotide
ggcgtctcgtatcatctgagaggactgaaggtatgaggagcgtgaactccatcgctattt

SEQ ID NO: 120085 - DNA, 60 bp, Artificial
  Synthetic oligonucleotide
ttcaaagcaaagagcccagaaatcatctatcgatcaatcagacagatggtgaaggccgga

SEQ ID NO: 120086 - DNA, 60 bp, Artificial
  Synthetic oligonucleotide
ttcaaagcaaagagcccagaaatcatctatcgatcaattagacagatggtgaaggccggg

SEQ ID NO: 120087 - DNA, 60 bp, Artificial
  Synthetic oligonucleotide
gcgtaaacatcaagaagaatggagaggatgaaagatataatttcaaagcaaagagcccag

SEQ ID NO: 120088 - DNA, 60 bp, Artificial
  Synthetic oligonucleotide
gggatgactgcgtaaacatcaagaagaatggagaggatgaaagatataatttcaaagcaa

SEQ ID NO: 120089 - DNA, 60 bp, Artificial
  Synthetic oligonucleotide
gtgaactgctcgttagtagctggagtaccggttactaagaaatggaatactgcatcaaca

SEQ ID NO: 120090 - DNA, 60 bp, Artificial
  Synthetic oligonucleotide
gtgtgcatgtgcgtgtgcttgcaatgtgtgtgaaaatataaatgtcctatcgtgtgtgcg

SEQ ID NO: 120091 - DNA, 60 bp, Artificial
  Synthetic oligonucleotide
cacagattacgagtggagaggagaagaagttgccacccctcttcttaatcactccacagt

SEQ ID NO: 120092 - DNA, 60 bp, Artificial
  Synthetic oligonucleotide
cgcctcgtatcatctgagaggactgaaggtatgaggagcgtgaactccatcgctatctcg

SEQ ID NO: 120093 - DNA, 60 bp, Artificial
  Synthetic oligonucleotide
agtcgacaacatgagatttgaattggatgagaatgatttgaagaagttatccgctccagt

SEQ ID NO: 120094 - DNA, 58 bp, Artificial
  Synthetic oligonucleotide
cagtgatatatccaaacaccatgtttctacctgggggtgtcggatttctggcgtcatt

SEQ ID NO: 120095 - DNA, 60 bp, Artificial
  Synthetic oligonucleotide
atttgaagaagttatccgctccagtccgcgaaaaactaactaacattggaattatcgatc

SEQ ID NO: 120096 - DNA, 60 bp, Artificial
  Synthetic oligonucleotide
tccgaagggctgctggaacatcgtcaccttcaattcttcggacgctgagactaacagact

SEQ ID NO: 120097 - DNA, 60 bp, Artificial
  Synthetic oligonucleotide
ccatccggccgtatagttcgatcgtttctggaaactctgcatcggggtcggctcccgtca

SEQ ID NO: 120098 - DNA, 60 bp, Artificial
  Synthetic oligonucleotide
cgcattgacggcaaaagtcgacaacatgagatttgaattggatgagaatgatttgaagaa

SEQ ID NO: 120099 - DNA, 60 bp, Artificial
  Synthetic oligonucleotide
cgaagggctgctggaacatcgtcaccttcaattcttcggacgctgagactaacagacttg

SEQ ID NO: 120100 - DNA, 60 bp, Artificial
  Synthetic oligonucleotide
atctgggggttgatctgatatcacagaacgggagagtacaaattagaacgggactagatg

SEQ ID NO: 120101 - DNA, 60 bp, Artificial
  Synthetic oligonucleotide
acggtagagtacaaattaggacgggactagatgtagtgaactgctcgttagtagctggag

SEQ ID NO: 120102 - DNA, 60 bp, Artificial
  Synthetic oligonucleotide
atatggtttcaaaatcgacagaactgacagcgctgggagttacagtagccaatgtcaacg

SEQ ID NO: 120103 - DNA, 60 bp, Artificial
  Synthetic oligonucleotide
tggtgagttgaatgaatggggatatctgggggttgatctgatatcacagaacggtagagt

SEQ ID NO: 120104 - DNA, 60 bp, Artificial
  Synthetic oligonucleotide
aacatgggaagagaaataaaactttgacttctgttctgcgtgacataacgactttggcag

SEQ ID NO: 120105 - DNA, 60 bp, Artificial
  Synthetic oligonucleotide
agatatggtttcaaaatcgacagaactgacagcgctgggagttacagtagccaatgtcaa

SEQ ID NO: 120106 - DNA, 60 bp, Artificial
  Synthetic oligonucleotide
gagagcaatattcgatctaccgatcatgctactgttgtaaatatgattgtagatatggtt

SEQ ID NO: 120107 - DNA, 60 bp, Artificial
  Synthetic oligonucleotide
gatctaccgatcatgctactgttgtaaatatgattgtagatatggtttcaaaatcgacag

SEQ ID NO: 120108 - DNA, 60 bp, Artificial
  Synthetic oligonucleotide
ggtggagcgatcatctaaagacttcgtccccattaagatggagaaaacagctgaggagac

SEQ ID NO: 120109 - DNA, 52 bp, Artificial
  Synthetic oligonucleotide
ctgatatacatattataatcgctttcttaatagtagtagcgctttggttata

SEQ ID NO: 120110 - DNA, 60 bp, Artificial
  Synthetic oligonucleotide
ttcttaatcactccacagtatgaaattaacctggctgagataaggaaagcggtggagcga

SEQ ID NO: 120111 - DNA, 60 bp, Artificial
  Synthetic oligonucleotide
gagtacaaattaggacgggactagatgtagtgaactgctcgttagtagctggagtaccgg

SEQ ID NO: 120112 - DNA, 60 bp, Artificial
  Synthetic oligonucleotide
ccacagtatgaaattaacctggctgagataaggaaagcggtggagcgatcatctaaagac

SEQ ID NO: 120113 - DNA, 60 bp, Artificial
  Synthetic oligonucleotide
ggactagatgtagtgaactgctcgttagtagctggagtaccggttactaagaaatggaat

SEQ ID NO: 120114 - DNA, 60 bp, Artificial
  Synthetic oligonucleotide
ccaaaaacagtgtgcatgtgcgtgtgcttgcaatgtgtgtgaaaatataactgtcctatc

SEQ ID NO: 120115 - DNA, 60 bp, Artificial
  Synthetic oligonucleotide
cagtgtgcatgtgcgtgtgcttgcaatgtgtgtgaaaatataactgtcctatcatggaca

SEQ ID NO: 120116 - DNA, 60 bp, Artificial
  Synthetic oligonucleotide
ctggtacatctggcaccatccggccgtatagttcgatcgtttctggaaactctgcatcgg

SEQ ID NO: 120117 - DNA, 60 bp, Artificial
  Synthetic oligonucleotide
tctggcaccatccggccgtatagttcgatcgtttctggaagctctgcatcggggtcggct

SEQ ID NO: 120118 - DNA, 60 bp, Artificial
  Synthetic oligonucleotide
ctactgttgtaaatatgattgtagatatggtttcaaaatcgacagaactgacagcgctgg

SEQ ID NO: 120119 - DNA, 60 bp, Artificial
  Synthetic oligonucleotide
gggaatggagactgtgacaagtttggtttcaggaccgcctaacaacttgaagaagggtgg

SEQ ID NO: 120120 - DNA, 60 bp, Artificial
  Synthetic oligonucleotide
ctggtatatctggcaccatccggccgtatagttcgatcgtttctggaagctctgcatcgg

SEQ ID NO: 120121 - DNA, 60 bp, Artificial
  Synthetic oligonucleotide
catcatgagcaagggaatggagactgtgacaagtttggtttcaggaccgcctaacaactt

SEQ ID NO: 120122 - DNA, 60 bp, Artificial
  Synthetic oligonucleotide
ctcactatggtaagaacagactcgctgagagcaacatccgatctaccgatcatgctactg

SEQ ID NO: 120123 - DNA, 60 bp, Artificial
  Synthetic oligonucleotide
ggttgctatagctcactatggtaagaacagactcgctgagagcaacatccgatctaccga

SEQ ID NO: 120124 - DNA, 60 bp, Artificial
  Synthetic oligonucleotide
cgctgtctcctagtgacccggtctattacgctaaaggtgatcagggatgtttcaagtcgc

SEQ ID NO: 120125 - DNA, 60 bp, Artificial
  Synthetic oligonucleotide
agcatgggaagagaaataaaactttgacttctgttctgcgtgatatcacaactttggcag

SEQ ID NO: 120126 - DNA, 60 bp, Artificial
  Synthetic oligonucleotide
aatatacatcctgccagattgatgagcactgcatataggtatgttgccacggttgctata

SEQ ID NO: 120127 - DNA, 58 bp, Artificial
  Synthetic oligonucleotide
tctcctagtgacccggtctattacgctaaaggtgatcagggatgtttcaagtcgcata

SEQ ID NO: 120128 - DNA, 60 bp, Artificial
  Synthetic oligonucleotide
catcctgccagattgatgagcactgcatataggtatgttgccacggttgctatagctcac

SEQ ID NO: 120129 - DNA, 60 bp, Artificial
  Synthetic oligonucleotide
catacatcctgccagattgatgagcactgcatataggtatgttgctacggttgccatagc

SEQ ID NO: 120130 - DNA, 60 bp, Artificial
  Synthetic oligonucleotide
cggttgccatagctcactatggtaagaacagactcgctgagagcaatattcgatctaccg

SEQ ID NO: 120131 - DNA, 60 bp, Artificial
  Synthetic oligonucleotide
ggtatgttgctacggttgccatagctcactatggtaagaacagactcgctgagagcaata

SEQ ID NO: 120132 - DNA, 60 bp, Artificial
  Synthetic oligonucleotide
tgaatttcgctgtctcgttaaaggagccgatacccgatccccctgtgcccgatatctccc

SEQ ID NO: 120133 - DNA, 56 bp, Artificial
  Synthetic oligonucleotide
cagaattctagatggtaatggcgcaatcctatttctaatgtggaagtacccagaca

SEQ ID NO: 120134 - DNA, 60 bp, Artificial
  Synthetic oligonucleotide
gcatttatgaagtaatgaagaagtcggtgatcgctacagcctgggtaggccgtgctcctc

SEQ ID NO: 120135 - DNA, 60 bp, Artificial
  Synthetic oligonucleotide
tacgcgttaccccgatctactgtcatgctcaatggatcttaccgtgatatcagaattcta

SEQ ID NO: 120136 - DNA, 60 bp, Artificial
  Synthetic oligonucleotide
cttcatatcgtacgtaagaatggattgctgcatgaaagtgatgaaccacgagcagatctg

SEQ ID NO: 120137 - DNA, 60 bp, Artificial
  Synthetic oligonucleotide
ctggaaccaagcatttatgaagtaatgaagaagtcggtgatcgctacagcctgggtaggc

SEQ ID NO: 120138 - DNA, 60 bp, Artificial
  Synthetic oligonucleotide
catccgtaatgaaagttgtttcgcgtgatgtacgcaaaatggtcgaattgtatcatggtc

SEQ ID NO: 120139 - DNA, 60 bp, Artificial
  Synthetic oligonucleotide
gttgtttcgcgtgatgtacgcaaaatggtcgaattgtatcatggtcgcgatcgtggcaga

SEQ ID NO: 120140 - DNA, 60 bp, Artificial
  Synthetic oligonucleotide
gcgactgatgtatatgcatacggagatgtatcaaagtggacgatacggcaactacggggt

SEQ ID NO: 120141 - DNA, 60 bp, Artificial
  Synthetic oligonucleotide
gaatatacaactggctgatatcattaaaacggtcgatgtccgtattcctcgggaagtcgc

SEQ ID NO: 120142 - DNA, 57 bp, Artificial
  Synthetic oligonucleotide
gattggaactagatttgacgatgagccaactgatgaaaagttagtatcgatgcttga

SEQ ID NO: 120143 - DNA, 60 bp, Artificial
  Synthetic oligonucleotide
cgttgagggagtacaaacggaaaatggggataagagagggagcctcgatcgattcgtggc

SEQ ID NO: 120144 - DNA, 60 bp, Artificial
  Synthetic oligonucleotide
gatctaattgcagcgttgagggagtacaaacggaaaatggggataagagagggagcctcg

SEQ ID NO: 120145 - DNA, 60 bp, Artificial
  Synthetic oligonucleotide
tgggattggatttatctggtcatctatacgtcacattgatgtccggcgcttatgtcacag

SEQ ID NO: 120146 - DNA, 60 bp, Artificial
  Synthetic oligonucleotide
ctccctatgcagatttatcggactgcgcgttgagtcatctgtgttgagggtccgaaaccc

SEQ ID NO: 120147 - DNA, 60 bp, Artificial
  Synthetic oligonucleotide
ctggtcatctatacgtcacattgatgtccggcgcttatgtcacagatctgttctggtggt

SEQ ID NO: 120148 - DNA, 60 bp, Artificial
  Synthetic oligonucleotide
gcaaagcaaggagcaaaaattacgtgatttaaagaggtctgcagcggaggtaatcgaatg

SEQ ID NO: 120149 - DNA, 60 bp, Artificial
  Synthetic oligonucleotide
cacagatctgttctggtggttcaagatgattctcgattggtctgcgcaaagcaaggagca

SEQ ID NO: 120150 - DNA, 60 bp, Artificial
  Synthetic oligonucleotide
gagcagatggccgagcgtccatggcacgtaagaaatgatctaattgcagcgttgagggag

SEQ ID NO: 120151 - DNA, 60 bp, Artificial
  Synthetic oligonucleotide
aaaattacgtgatttaaagaggtctgcagcggaggtaatcgaatggaaggagcagatggc

SEQ ID NO: 120152 - DNA, 60 bp, Artificial
  Synthetic oligonucleotide
ggttgggtgaggagatagcttatgaaatgggcggtgcgttctccagtgcattgataaaac

SEQ ID NO: 120153 - DNA, 60 bp, Artificial
  Synthetic oligonucleotide
cgcagatggatgatgatgaatgggaatcgaccagattcgcagaggataggttgggtgagg

SEQ ID NO: 120154 - DNA, 60 bp, Artificial
  Synthetic oligonucleotide
gtgttgaaaggctcttcatatgggatgtgtcatcagatcgatcgcagatggatgatgatg

SEQ ID NO: 120155 - DNA, 60 bp, Artificial
  Synthetic oligonucleotide
gaactttttaaaacgtgttgaaaggctcttcatatgggatgtgtcatcagatcgatcgca

SEQ ID NO: 120156 - DNA, 60 bp, Artificial
  Synthetic oligonucleotide
cgttcaccaggacggtttagaagggtattatggcacgtatatgatccaatagcaccggaa

SEQ ID NO: 120157 - DNA, 60 bp, Artificial
  Synthetic oligonucleotide
cagaggaggtacactacgtaggatgcggtgacctacgtaccttgatgcagttcaaaaaac

SEQ ID NO: 120158 - DNA, 60 bp, Artificial
  Synthetic oligonucleotide
ttactcacatgtagatcgccatatgcacccagatgcatccgtaatgaaagttgtttcgcg

SEQ ID NO: 120159 - DNA, 60 bp, Artificial
  Synthetic oligonucleotide
catgagattgaaaggttactcacatgtagatcgccatatgcacccagatgcatccgtaat

SEQ ID NO: 120160 - DNA, 60 bp, Artificial
  Synthetic oligonucleotide
aagattcgtaagtctgacctgagaggtcactagggagctccccactcccgttttgtgacc

SEQ ID NO: 120161 - DNA, 60 bp, Artificial
  Synthetic oligonucleotide
gaccgtctgattctgcttcaaacgatccactcaccagcttttcgattagatcgcatgcag

SEQ ID NO: 120162 - DNA, 58 bp, Artificial
  Synthetic oligonucleotide
gatttgtaatgtcaacctgagagcacactagggagctccccactcccgttttgtgacc

SEQ ID NO: 120163 - DNA, 60 bp, Artificial
  Synthetic oligonucleotide
tattggaccgtctgattctgcttcaaacgatccactcaccagcttttcgattagatcgca

SEQ ID NO: 120164 - DNA, 52 bp, Artificial
  Synthetic oligonucleotide
ggcttttaaagcgctacagtgatgtctctcagtattgacgtgacgagtcttc

SEQ ID NO: 120165 - DNA, 60 bp, Artificial
  Synthetic oligonucleotide
gaccatctgattctgcttcaaacgatccactcaccagcttttcgattagatcgaatgcag

SEQ ID NO: 120166 - DNA, 60 bp, Artificial
  Synthetic oligonucleotide
tggaccatctgattctgcttcaaacgatccactcaccagcttttcgattagatcgaatgc

SEQ ID NO: 120167 - DNA, 53 bp, Artificial
  Synthetic oligonucleotide
ggtaatttcttgctacaagtgactgtgaaggatggatctgattgagacgatta

SEQ ID NO: 120168 - DNA, 60 bp, Artificial
  Synthetic oligonucleotide
ctagatgtaatggaaaagtgtacaatctaagagaccaaattgctcagttgtctccatttc

SEQ ID NO: 120169 - DNA, 60 bp, Artificial
  Synthetic oligonucleotide
actatcactaactttacttccagctccaggtgtgattcaattatcgctaggaaatcagcc

SEQ ID NO: 120170 - DNA, 60 bp, Artificial
  Synthetic oligonucleotide
gaatgtgttgacgtatcaacggtttttactgaaggagatatcgttataaggtttgaattg

SEQ ID NO: 120171 - DNA, 60 bp, Artificial
  Synthetic oligonucleotide
gtttgaattggcaggaagagttgttggaaacgccaacaaacttggaacactcaactttcc

SEQ ID NO: 120172 - DNA, 60 bp, Artificial
  Synthetic oligonucleotide
ggcaggaagagttgttggaaacgccaacaaacttggaacactcaactttcctctatgtga

SEQ ID NO: 120173 - DNA, 60 bp, Artificial
  Synthetic oligonucleotide
agcagctggaggtgctacaaataatactggtggaggatatcacgcattagttggaagagc

SEQ ID NO: 120174 - DNA, 60 bp, Artificial
  Synthetic oligonucleotide
gatatcacgcattagttggaagagcaacaggaaaaacaggtataattacgattatccagg

SEQ ID NO: 120175 - DNA, 60 bp, Artificial
  Synthetic oligonucleotide
attatccagggtagaccaggagccgtaacattcaatttaaatatgaaagtgccatgttct

SEQ ID NO: 120176 - DNA, 60 bp, Artificial
  Synthetic oligonucleotide
gccatgttctggagtactatcactaactttacttccagctccaggtgtgattcaattatc

SEQ ID NO: 120177 - DNA, 52 bp, Artificial
  Synthetic oligonucleotide
tcaactttcctctatgtgatcgtattagcattacaattgaaccttggaatgc

SEQ ID NO: 120178 - DNA, 60 bp, Artificial
  Synthetic oligonucleotide
atgcatcatctttaattgattatgaaactcattccaaatatttagctggtgcaacatatc

SEQ ID NO: 120179 - DNA, 60 bp, Artificial
  Synthetic oligonucleotide
gagaattaatatgttagcagctggaggtgctacaaataatactggtggaggatatcacgc

SEQ ID NO: 120180 - DNA, 60 bp, Artificial
  Synthetic oligonucleotide
aaatggagcagcaactagaacccattgatgatccacttgcaagtcagagaattaatatgt

SEQ ID NO: 120181 - DNA, 60 bp, Artificial
  Synthetic oligonucleotide
tcaacagatgatcatgaaacaatgtcggcgggaattgaatcgctgtttgacgttctagcc

SEQ ID NO: 120182 - DNA, 60 bp, Artificial
  Synthetic oligonucleotide
aagtgtacaatctaagagaccaaattgctcagttgtctccatttcaagttcatatgccag

SEQ ID NO: 120183 - DNA, 60 bp, Artificial
  Synthetic oligonucleotide
cgttctagccgcagctattagaactgagggatctagacagaatagagctgttgtcactaa

SEQ ID NO: 120184 - DNA, 60 bp, Artificial
  Synthetic oligonucleotide
gatgatcatgaaacaatgtcggcgggaattgaatcgctgtttgacgttctagccgcagct

SEQ ID NO: 120185 - DNA, 60 bp, Artificial
  Synthetic oligonucleotide
gatcccagttttcagagaatccttatgcgaatatgttacaagttgacacggcaaaaatgg

SEQ ID NO: 120186 - DNA, 60 bp, Artificial
  Synthetic oligonucleotide
ctagccgcagctattagaactgagggatctagacagaatagagctgttgtcactaagtct

SEQ ID NO: 120187 - DNA, 60 bp, Artificial
  Synthetic oligonucleotide
gcaaaaatggagcagcaactagaacccattgatgatccacttgcaagtcagagaattaat

SEQ ID NO: 120188 - DNA, 56 bp, Artificial
  Synthetic oligonucleotide
gatcccagttttcagagaatccttatgcgaatatgttacaagttgacacggcaaaa

SEQ ID NO: 120189 - DNA, 51 bp, Artificial
  Synthetic oligonucleotide
ttgcatgtatgattgcagctttctcctgcaaaatctgattggtcaggttta

SEQ ID NO: 120190 - DNA, 55 bp, Artificial
  Synthetic oligonucleotide
aaaattgcatgtatgattgcagctttctcctgcaaaatctgattggtcaggtttg

SEQ ID NO: 120191 - DNA, 60 bp, Artificial
  Synthetic oligonucleotide
caagaaaaattgcatgtatgattgcagctttctcctgcaaaatctgattggtcaggtttg

SEQ ID NO: 120192 - DNA, 60 bp, Artificial
  Synthetic oligonucleotide
caagaaaaattgcatgtatgattgcagctttctcctgcaaaatctgattggtcaggttta

SEQ ID NO: 120193 - DNA, 51 bp, Artificial
  Synthetic oligonucleotide
tccacctaatgttgtatggacaatgagctcattgctttcaggtgcgccacc

SEQ ID NO: 120194 - DNA, 60 bp, Artificial
  Synthetic oligonucleotide
gcaacatatctgatgggtacaactttttcagaagattcatttattgcgtctccacctaat

SEQ ID NO: 120195 - DNA, 65 bp, Artificial
  Synthetic oligonucleotide
gcatcatctttaattgattatgaaactcattccaaatatttagctggtgcaacatatctgatggg

SEQ ID NO: 120196 - DNA, 51 bp, Artificial
  Synthetic oligonucleotide
aatgcccgtatccgaacatgcagattatttcgctcgatgcgcttacaacga

SEQ ID NO: 120197 - DNA, 60 bp, Artificial
  Synthetic oligonucleotide
tgcaattgaccctgaaaagaaagttggatacgaagaactggaaaattttgcaacacttgt

SEQ ID NO: 120198 - DNA, 60 bp, Artificial
  Synthetic oligonucleotide
ccatgagctgtttgtccactcacttaatatctaattacaagctcatcaagtgtttcgaga

SEQ ID NO: 120199 - DNA, 60 bp, Artificial
  Synthetic oligonucleotide
ggacattttcccgacatttcaacaggtgacgaaacaacggatgagtatatttcaactata

SEQ ID NO: 120200 - DNA, 60 bp, Artificial
  Synthetic oligonucleotide
ccacttgtatcacaaagaaacaaaatgggatgttctcatcagaagaaatgtgtatgcctt

SEQ ID NO: 120201 - DNA, 60 bp, Artificial
  Synthetic oligonucleotide
atccctgtgcgttgcgactcagaaatctcggacattctgtcttcggcaaacattttagat

SEQ ID NO: 120202 - DNA, 60 bp, Artificial
  Synthetic oligonucleotide
attaatagtgtttatggtggtgcaatttttagtgttctcattctcatgtcagatcattca

SEQ ID NO: 120203 - DNA, 60 bp, Artificial
  Synthetic oligonucleotide
tcaacgtgatgaccgtttgtgcttcaactcttgctacgattatcctaactctcatatcat

SEQ ID NO: 120204 - DNA, 60 bp, Artificial
  Synthetic oligonucleotide
aaactttgtgcagttacgtcactccttttgctatcaacgccgatcttagacatgcttccc

SEQ ID NO: 120205 - DNA, 60 bp, Artificial
  Synthetic oligonucleotide
cacttgtagaaaagcacgatgattactcttacaatagaacagatgcctactccattttga

SEQ ID NO: 120206 - DNA, 60 bp, Artificial
  Synthetic oligonucleotide
tccctcaaattgctgaaatggcaaaaagcgaaattaaccaaacaattgactcgattgttg

SEQ ID NO: 120207 - DNA, 60 bp, Artificial
  Synthetic oligonucleotide
cacgtatttgaaaagactaacattattaaaactctacttttcggcagcacgctaggagtc

SEQ ID NO: 120208 - DNA, 60 bp, Artificial
  Synthetic oligonucleotide
ctgtaatcacggtgaattgtcatcagcaagtcgtgtcggttggaatttagtagaactgga

SEQ ID NO: 120209 - DNA, 59 bp, Artificial
  Synthetic oligonucleotide
cctcacagatggtgactgtcactcccttgtggtaagatttactaaacgcaaaccttatt

SEQ ID NO: 120210 - DNA, 60 bp, Artificial
  Synthetic oligonucleotide
agaactggattctatgggatcagacgaaaatattggacgtattactagaaaaccaagcag

SEQ ID NO: 120211 - DNA, 60 bp, Artificial
  Synthetic oligonucleotide
catgtttattttcgctaatactacaaaggaagacatctctcagtttttcgacatttcgtt

SEQ ID NO: 120212 - DNA, 60 bp, Artificial
  Synthetic oligonucleotide
agaatactttgctggttttgtctctgattacctaacctcaattgaagtgttaaaccacat

SEQ ID NO: 120213 - DNA, 60 bp, Artificial
  Synthetic oligonucleotide
gtcttatctgtaaacacatgtatccctggtttagaaactttgtacgttgaacgtgaaaaa

SEQ ID NO: 120214 - DNA, 60 bp, Artificial
  Synthetic oligonucleotide
acatttcgtttaaagtacacacccataaatcttcagaacaacatccctttcgcactggat

SEQ ID NO: 120215 - DNA, 60 bp, Artificial
  Synthetic oligonucleotide
ccacattaaggattccaaactgtcaaaacttgattaccatttgaagcaagaatacgagtc

SEQ ID NO: 120216 - DNA, 60 bp, Artificial
  Synthetic oligonucleotide
gtaaaattcgttggatatttagacggcataagtaaagacgaattagttggtgcttcaggc

SEQ ID NO: 120217 - DNA, 60 bp, Artificial
  Synthetic oligonucleotide
gatgcggcaggagggacggtcagcgtgagtctaccatgggccgtggtgcgtcaactcatc

SEQ ID NO: 120218 - DNA, 60 bp, Artificial
  Synthetic oligonucleotide
agagattcatgacttggatgcggcaggagggacggtcagcgtgagtctaccatgggccgt

SEQ ID NO: 120219 - DNA, 60 bp, Artificial
  Synthetic oligonucleotide
cccactggggatctgggaatgtatagttggattagtttaatacgccccctaatgacaagg

SEQ ID NO: 120220 - DNA, 52 bp, Artificial
  Synthetic oligonucleotide
ggggtacaaatatgccttcatgcggcagctagttcaagttatgcgtggttta

SEQ ID NO: 120221 - DNA, 60 bp, Artificial
  Synthetic oligonucleotide
aagaggctaaagatgcagatgtggatagacgcatacatactgcagtgggatctggatcaa

SEQ ID NO: 120222 - DNA, 60 bp, Artificial
  Synthetic oligonucleotide
agatgtggatagacgcatacatactgcagtgggatctggatcaggcacaaaaggatctgg

SEQ ID NO: 120223 - DNA, 60 bp, Artificial
  Synthetic oligonucleotide
agaagtgactgcatccatgtgagaggttgagttaccgttgtctgtcttcggaagcggcgg

SEQ ID NO: 120224 - DNA, 60 bp, Artificial
  Synthetic oligonucleotide
ttcgaattaccattaacctaagatcagtaggtagagtggcgccccgaggtctgtgtcgtg

SEQ ID NO: 120225 - DNA, 60 bp, Artificial
  Synthetic oligonucleotide
gtttcgaattaccattaacctaagatcagtaggtagagtggcgccccgaggtctgtgtcg

SEQ ID NO: 120226 - DNA, 56 bp, Artificial
  Synthetic oligonucleotide
ggtagctccttttatgtatggtattgaatataccacaattctaatctttctgatat

SEQ ID NO: 120227 - DNA, 56 bp, Artificial
  Synthetic oligonucleotide
aaatatgtcaaaattagctgatttgatattgaatgaatggttatgtaatccaatgg

SEQ ID NO: 120228 - DNA, 60 bp, Artificial
  Synthetic oligonucleotide
aaagcaatgtcaaatcaaacgggcgcaactatggcacaaaaagtagaaaaggtcgcgtat

SEQ ID NO: 120229 - DNA, 60 bp, Artificial
  Synthetic oligonucleotide
tgtcgaatcaaacgggcgcaactatggcacaaaaagtagaaaaggttgcttatgcttcgt

SEQ ID NO: 120230 - DNA, 60 bp, Artificial
  Synthetic oligonucleotide
gtattaaaaattacaagaacctaacattgcaatggagatcttgagaacgaaatcgcagtc

SEQ ID NO: 120231 - DNA, 58 bp, Artificial
  Synthetic oligonucleotide
taaattacaagaacctaacattgcaatggagatcttgagaacgaaatcacggtcagct

SEQ ID NO: 120232 - DNA, 60 bp, Artificial
  Synthetic oligonucleotide
tacaagaacctaacattgcaatggagatcttgagaacgaaatcgcagtcagctgcagtgg

SEQ ID NO: 120233 - DNA, 60 bp, Artificial
  Synthetic oligonucleotide
acgtattggacctgagcagactttctacagcattattgcaattatcagatacgtattatc

SEQ ID NO: 120234 - DNA, 60 bp, Artificial
  Synthetic oligonucleotide
atgtattggacctgagcagactttcaacagcattattgcaattatcagatacgtattacc

SEQ ID NO: 120235 - DNA, 60 bp, Artificial
  Synthetic oligonucleotide
atgtattggacctgagcagactttcaacagcattattgcaattatcagatacgtactatc

SEQ ID NO: 120236 - DNA, 60 bp, Artificial
  Synthetic oligonucleotide
aaccacaaaagtatataagcaagttccacagcaatttgatttcagaaattcgatgcatat

SEQ ID NO: 120237 - DNA, 60 bp, Artificial
  Synthetic oligonucleotide
aagttccacagcaatttgatttcagaaattcaatgcacatgttgacatcaaatcttacct

SEQ ID NO: 120238 - DNA, 60 bp, Artificial
  Synthetic oligonucleotide
ctgggtgcctacttcaaccacaaaagtgtataagcaagttccacagcaatttgatttcag

SEQ ID NO: 120239 - DNA, 60 bp, Artificial
  Synthetic oligonucleotide
gctattaaaggctcaatggcgtacaggaaacgtggagcgcgccgtgaggcgaacgtaaac

SEQ ID NO: 120240 - DNA, 52 bp, Artificial
  Synthetic oligonucleotide
gctccaagatcactatgtcgtgggattggcaggtcccggagtagtgattccc

SEQ ID NO: 120241 - DNA, 52 bp, Artificial
  Synthetic oligonucleotide
gctccaagatcactatgtcgtgggattggcaggtcccggagtagtgattcct

SEQ ID NO: 120242 - DNA, 60 bp, Artificial
  Synthetic oligonucleotide
gaaaatacaacatcagtggagactatgctaatgccacgagaacttttttggctatatcac

SEQ ID NO: 120243 - DNA, 60 bp, Artificial
  Synthetic oligonucleotide
atgaggcgaattcctttctagaagcgcagtcgatgaatgctaaggtggacatgcttactg

SEQ ID NO: 120244 - DNA, 58 bp, Artificial
  Synthetic oligonucleotide
tcaacgacgcgattaccactttcaagaattacaagctcggtgaattgaaacagggcgg

SEQ ID NO: 120245 - DNA, 60 bp, Artificial
  Synthetic oligonucleotide
cccacagcctgatacaactgacgatgaaaggcccgtcactaagcctggccctagcacacc

SEQ ID NO: 120246 - DNA, 60 bp, Artificial
  Synthetic oligonucleotide
tttggaggatgatatgagtgagatggatatgcctgatggcttccatgattacttaacgag

SEQ ID NO: 120247 - DNA, 60 bp, Artificial
  Synthetic oligonucleotide
ctaaggcagatccacctggaaacgtaagccccagaggtgttcctgcccttttggaggatg

SEQ ID NO: 120248 - DNA, 60 bp, Artificial
  Synthetic oligonucleotide
tgcttcagaagacgttgcttatttgaccggatttataaagcctgacgactccaaggattc

SEQ ID NO: 120249 - DNA, 60 bp, Artificial
  Synthetic oligonucleotide
aagacgaggagatgatacgtaaaaaggtggagacctcgaaagatgccccatctaaggcag

SEQ ID NO: 120250 - DNA, 60 bp, Artificial
  Synthetic oligonucleotide
acttaacgagggagcatgagaataacttcgacttgtcgcagttaggactcgcaccctcag

SEQ ID NO: 120251 - DNA, 60 bp, Artificial
  Synthetic oligonucleotide
taagcctggccctagcacaccaacagtgagtaagggtgttgatgagccagaagacgagga

SEQ ID NO: 120252 - DNA, 60 bp, Artificial
  Synthetic oligonucleotide
tgattcgtgtataggttgcttgtaaacaacggagtggtgatcgttagatccgtctggcgt

SEQ ID NO: 120253 - DNA, 60 bp, Artificial
  Synthetic oligonucleotide
ccaaggattcaatcttgaatgccgaactcttggaagcgcaggttacatccgaggtgctac

SEQ ID NO: 120254 - DNA, 60 bp, Artificial
  Synthetic oligonucleotide
tgattactatatctatggtcgagccaatgagtatagctgcagaggacatgtatggatatg

SEQ ID NO: 120255 - DNA, 60 bp, Artificial
  Synthetic oligonucleotide
cactatatctatggtcgagccaatgagtatagctgtggaggatatgtatggatatgtact

SEQ ID NO: 120256 - DNA, 60 bp, Artificial
  Synthetic oligonucleotide
gcggtaattatgaatgagccaaacggagcagctactcctgctcaaacccagattgacaaa

SEQ ID NO: 120257 - DNA, 60 bp, Artificial
  Synthetic oligonucleotide
gcagtgatcatgaatgagccaaacggagcagctactcctgctagaatgcaaatggacaaa

SEQ ID NO: 120258 - DNA, 60 bp, Artificial
  Synthetic oligonucleotide
agtaggtcaagctgttatgttggatgaggagttggagaaatatgaaatccgacttgatgt

SEQ ID NO: 120259 - DNA, 60 bp, Artificial
  Synthetic oligonucleotide
ggtcaagttactatgttggatgaggagttggagaaatatgaaatccgactcgacgtcgca

SEQ ID NO: 120260 - DNA, 60 bp, Artificial
  Synthetic oligonucleotide
ttgggtgctaaagtaggtcaagttactatgttggatgaggagttggagaaatatgaaatc

SEQ ID NO: 120261 - DNA, 60 bp, Artificial
  Synthetic oligonucleotide
ttgcggcgacctctgactttgtacctgaaaagacaaagtccgaagggaatttgaaaaata

SEQ ID NO: 120262 - DNA, 60 bp, Artificial
  Synthetic oligonucleotide
ctgttatgttggatgaggagttggagaaatatgaaatccgacttgatgtcgcacaagacg

SEQ ID NO: 120263 - DNA, 60 bp, Artificial
  Synthetic oligonucleotide
ctattcaatagcgaacaatacaactataacaacagcttgaacggagaagtgagcgtgtgg

SEQ ID NO: 120264 - DNA, 60 bp, Artificial
  Synthetic oligonucleotide
ggcacttaaggaatatcgcgagggacaacacaacgactcttacgatgagtatgaagtgaa

SEQ ID NO: 120265 - DNA, 60 bp, Artificial
  Synthetic oligonucleotide
tcgcgagggacaacacaacgactcttacgatgagtatgaagtgaatcagagcatctacta

SEQ ID NO: 120266 - DNA, 60 bp, Artificial
  Synthetic oligonucleotide
aaattccattcaaatgctaaaccacgcgcgatccagatcatcttcagtcctagtgtgaat

SEQ ID NO: 120267 - DNA, 60 bp, Artificial
  Synthetic oligonucleotide
gctaaaccacgcgcgatccagatcatcttcagtcctagtgtgaatgtgcgtactatcaag

SEQ ID NO: 120268 - DNA, 60 bp, Artificial
  Synthetic oligonucleotide
tagtgtgaatgtgcgtactatcaagatggctaaaggcaacgcggtatccgtgcccgatga

SEQ ID NO: 120269 - DNA, 60 bp, Artificial
  Synthetic oligonucleotide
agtgtgaatgtgcgtactatcaagatggctaaaggcaacgcggtatccgtgcccgatgag

SEQ ID NO: 120270 - DNA, 60 bp, Artificial
  Synthetic oligonucleotide
cccatgggaagcgaccggaatcaagtaccgcaagattaagagagacggggaaatcgttgg

SEQ ID NO: 120271 - DNA, 60 bp, Artificial
  Synthetic oligonucleotide
gccattactttgaactaccccatgaatacaactccatctccctagcggtaagtggtgtac

SEQ ID NO: 120272 - DNA, 60 bp, Artificial
  Synthetic oligonucleotide
aaatcgttggttacagccattactttgaactaccccatgaatacaactccatctccctag

SEQ ID NO: 120273 - DNA, 60 bp, Artificial
  Synthetic oligonucleotide
ctccctagcggtaagtggtgtacataagaacccatcatcatacaatgtcggatcagcaca

SEQ ID NO: 120274 - DNA, 60 bp, Artificial
  Synthetic oligonucleotide
atctccctagcggtaagtggtgtacataagaacccatcatcatacaatgtcggatcagca

SEQ ID NO: 120275 - DNA, 60 bp, Artificial
  Synthetic oligonucleotide
cgtaatggacgtcttccaatcatgcgacttggctctcagattctgcaaccgctactgggc

SEQ ID NO: 120276 - DNA, 60 bp, Artificial
  Synthetic oligonucleotide
cggatcagcacataacgtaatggacgtcttccaatcatgcgacttggctctcagattctg

SEQ ID NO: 120277 - DNA, 60 bp, Artificial
  Synthetic oligonucleotide
caaccgctactgggccgaactcgaattggtgaaccactacatttcgccgaacgcctaccc

SEQ ID NO: 120278 - DNA, 60 bp, Artificial
  Synthetic oligonucleotide
tcagattctgcaaccgctactgggccgaactcgaattggtgaaccactacatttcgccga

SEQ ID NO: 120279 - DNA, 60 bp, Artificial
  Synthetic oligonucleotide
cagtgattgctcgtgtaacttggataccggaacacatgacgctgtgatgaattacgcgcc

SEQ ID NO: 120280 - DNA, 60 bp, Artificial
  Synthetic oligonucleotide
gctctgagtaaccgtcagtgattgctcgtgtaacttggataccggaacacatgacgctgt

SEQ ID NO: 120281 - DNA, 60 bp, Artificial
  Synthetic oligonucleotide
aagcttggtcaaacgataagtcgattgactggcgtttctgttcagcacgcggagctgcca

SEQ ID NO: 120282 - DNA, 60 bp, Artificial
  Synthetic oligonucleotide
gataagtcgattgactggcgtttctgttcagcacgcggagctgccagcgatatcaccagc

SEQ ID NO: 120283 - DNA, 60 bp, Artificial
  Synthetic oligonucleotide
tcaagaagtaacacacggtgggacacgtctgcataaaggtcccaaaactagtggacagcc

SEQ ID NO: 120284 - DNA, 60 bp, Artificial
  Synthetic oligonucleotide
aaggtcccaaaactagtggacagcctaactttcgtagtgcgtgtaaggatttctttaagg

SEQ ID NO: 120285 - DNA, 60 bp, Artificial
  Synthetic oligonucleotide
cgcttgacgcgtagcgcaggaaatgaacccatctatgtaacgtcgatgtactatccctat

SEQ ID NO: 120286 - DNA, 60 bp, Artificial
  Synthetic oligonucleotide
actatccctatagttatgtgcaaacgaaacgtcaggctgaacaattttgtaagaatgctg

SEQ ID NO: 120287 - DNA, 60 bp, Artificial
  Synthetic oligonucleotide
ctcagcgtcacatgctggtagtactaaaatgcactcagaacgcttgacgcgtagcgcagg

SEQ ID NO: 120288 - DNA, 60 bp, Artificial
  Synthetic oligonucleotide
ttctttaaggactcagcgtcacatgctggtagtactaaaatgcactcagaacgcttgacg

SEQ ID NO: 120289 - DNA, 60 bp, Artificial
  Synthetic oligonucleotide
gttaaaactctcacacttatggtggaactggatctgcaaaaatgggaaaatttactagtg

SEQ ID NO: 120290 - DNA, 60 bp, Artificial
  Synthetic oligonucleotide
cacatctgatacaacacgcaggctggcgtcatcaatcggttcggcagctatgagagcatt

SEQ ID NO: 120291 - DNA, 60 bp, Artificial
  Synthetic oligonucleotide
acgcaggctggcgtcatcaatcggttcggcagctatgagagcattagaaagtgagaccgg

SEQ ID NO: 120292 - DNA, 60 bp, Artificial
  Synthetic oligonucleotide
tgagagcattagaaagtgagaccggccaaaaagtcgtttctggcgtagtacaaggcttag

SEQ ID NO: 120293 - DNA, 60 bp, Artificial
  Synthetic oligonucleotide
taaaaatcagaatgtcgtgacacaggcggaagaaaatcaagttgagtcattggatacatc

SEQ ID NO: 120294 - DNA, 60 bp, Artificial
  Synthetic oligonucleotide
gtcgtgacacaggcggaagaaaatcaagttgagtcattggatacatctatgaaagcaatg

SEQ ID NO: 120295 - DNA, 60 bp, Artificial
  Synthetic oligonucleotide
ttaagtgatgcattaacgaaagaggcgcggttgcgtagtagagatgaagctaaaatgata

SEQ ID NO: 120296 - DNA, 60 bp, Artificial
  Synthetic oligonucleotide
acgaaagaggcgcggttgcgtagtagagatgaagctaaaatgatagaagcaatgaaagca

SEQ ID NO: 120297 - DNA, 60 bp, Artificial
  Synthetic oligonucleotide
acgcttgacgcgtagcgcaggaaatgaacccatctatgtaacgtcgatgtactatcccta

SEQ ID NO: 120298 - DNA, 52 bp, Artificial
  Synthetic oligonucleotide
cagaatccactcatgtaaaagcgtacacatcatagatgggagttagagatac

SEQ ID NO: 120299 - DNA, 60 bp, Artificial
  Synthetic oligonucleotide
cgatctcgcagcgcgcagggtactaggataccaatctcacggccgcagaatccactcatg

SEQ ID NO: 120300 - DNA, 60 bp, Artificial
  Synthetic oligonucleotide
caactcgatctcgcagcgcgcagggtactaggataccaatctcacggccgcagaatccac

SEQ ID NO: 120301 - DNA, 60 bp, Artificial
  Synthetic oligonucleotide
gaacgctatactgcatggagtaactctaattacaacaactcgatctcgcagcgcgcaggg

SEQ ID NO: 120302 - DNA, 60 bp, Artificial
  Synthetic oligonucleotide
gcgcaccaatgttctgaacgctatactgcatggagtaactctaattacaacaactcgatc

SEQ ID NO: 120303 - DNA, 60 bp, Artificial
  Synthetic oligonucleotide
gatacaacggcacattttacgtggacctttatctatgcagcgcaccaatgttctgaacgc

SEQ ID NO: 120304 - DNA, 60 bp, Artificial
  Synthetic oligonucleotide
atgtgcaaacgaaacgtcaggctgaacaattttgtaagaatgctgagatacaacggcaca

SEQ ID NO: 120305 - DNA, 60 bp, Artificial
  Synthetic oligonucleotide
aagaatgctgagatacaacggcacattttacgtggacctttatctatgcagcgcaccaat

SEQ ID NO: 120306 - DNA, 60 bp, Artificial
  Synthetic oligonucleotide
agattttgtgtattttcaagaagtaacacacggtgggacacgtctgcataaaggtcccaa

SEQ ID NO: 120307 - DNA, 60 bp, Artificial
  Synthetic oligonucleotide
gtccatactcaacgcatcgcgcttttgttgtatgcgtagatttcgctatagattttgtgt

SEQ ID NO: 120308 - DNA, 57 bp, Artificial
  Synthetic oligonucleotide
tgttagatcaaattttcatattccaaagacccgcaggccgggtgtacatatctacac

SEQ ID NO: 120309 - DNA, 60 bp, Artificial
  Synthetic oligonucleotide
tgttagatcaaattttcatattccaaagacccgcaggccgggtgtacatatctacaccgc

SEQ ID NO: 120310 - DNA, 60 bp, Artificial
  Synthetic oligonucleotide
agtccatactcaacgcatcgcgcttttgttgtatgcgtagatttcgctatagattttgtg

SEQ ID NO: 120311 - DNA, 60 bp, Artificial
  Synthetic oligonucleotide
tctacaccgccccatatgatagtgacctggttgttatatttttagttgtaagtccatact

SEQ ID NO: 120312 - DNA, 60 bp, Artificial
  Synthetic oligonucleotide
aaatggagcatttgaatgacgtgatggcagctgaaattaagaaacgagcagttgaagacg

SEQ ID NO: 120313 - DNA, 53 bp, Artificial
  Synthetic oligonucleotide
ggagctgccagcgatatcaccagctacagtagagactttattaactcaggata

SEQ ID NO: 120314 - DNA, 60 bp, Artificial
  Synthetic oligonucleotide
gttgaagacggaatgcgaactggcgcacctgaaaccacgatacaccatgttgttagatca

SEQ ID NO: 120315 - DNA, 60 bp, Artificial
  Synthetic oligonucleotide
atgacgtgatggcagctgaaattaagaaacgagcagttgaagacggaatgcgaactggcg

SEQ ID NO: 120316 - DNA, 60 bp, Artificial
  Synthetic oligonucleotide
gtggacagcctaactttcgtagtgcgtgtaaggatttctttaaggactcagcgtcacatg

SEQ ID NO: 120317 - DNA, 60 bp, Artificial
  Synthetic oligonucleotide
ccgttgagagaggaggacgcaagcagaggaagaaagcccatggtgacgcgcagagagaag

SEQ ID NO: 120318 - DNA, 60 bp, Artificial
  Synthetic oligonucleotide
agccgttgagagaggaggacgcaagcagaggaagaaagcccatggtgacgcgcagagaga

SEQ ID NO: 120319 - DNA, 60 bp, Artificial
  Synthetic oligonucleotide
gagagattgagagatcttcggcgaaaagagaagaatgggacgcatgctaaagccattgag

SEQ ID NO: 120320 - DNA, 60 bp, Artificial
  Synthetic oligonucleotide
gagagattgagagatctgcggcggaaagagaagaatgggacgcatgctaaagccgttgag

SEQ ID NO: 120321 - DNA, 60 bp, Artificial
  Synthetic oligonucleotide
gggagattgagagatctgcggcggaaagagaagaatgggacgcatgctaaagccgttgag

SEQ ID NO: 120322 - DNA, 60 bp, Artificial
  Synthetic oligonucleotide
gctcgcgcgattgaatctaaatacggtacgaagattgatgtttacagggatgaggttcca

SEQ ID NO: 120323 - DNA, 60 bp, Artificial
  Synthetic oligonucleotide
agccattgagagagggggacgcaagcagaggaagaaagcccatggtgacgcgcagagaga

SEQ ID NO: 120324 - DNA, 60 bp, Artificial
  Synthetic oligonucleotide
gcggcggaaagagaagaatgggacgcatgctaaagccgttgagagaggaggacgcaagca

SEQ ID NO: 120325 - DNA, 60 bp, Artificial
  Synthetic oligonucleotide
ctgcggcggaaagagaagaatgggacgcatgctaaagccgttgagagaggaggacgcaag

SEQ ID NO: 120326 - DNA, 60 bp, Artificial
  Synthetic oligonucleotide
gagattgagagatctgcggcggaaagagaagaatgggacgcatgctaaagccgttgagag

SEQ ID NO: 120327 - DNA, 60 bp, Artificial
  Synthetic oligonucleotide
ggaactactggaaggaatggaggaagatgggtagttctaacggaagagattgctcgcgcg

SEQ ID NO: 120328 - DNA, 60 bp, Artificial
  Synthetic oligonucleotide
ctgatgcgggagttggagctactggaacgaatggaggaagatgggtagttctaacggaag

SEQ ID NO: 120329 - DNA, 50 bp, Artificial
  Synthetic oligonucleotide
ctaacggaagagattgctcgcgcgattgaatctaagtacggtacgaagat

SEQ ID NO: 120330 - DNA, 60 bp, Artificial
  Synthetic oligonucleotide
ggagctactggaacgaatggaggaagatgggtagttctaacggaagagattgctcgcgcg

SEQ ID NO: 120331 - DNA, 60 bp, Artificial
  Synthetic oligonucleotide
gagagcggccagaaggaagagggcggcaaagagactaaagatgcagatgtggatagacgc

SEQ ID NO: 120332 - DNA, 60 bp, Artificial
  Synthetic oligonucleotide
caatcggagagcggccagaaggaagagggcggcaaagagactaaagatgcagatgtggat

SEQ ID NO: 120333 - DNA, 60 bp, Artificial
  Synthetic oligonucleotide
ctgatgcgggagttggaactactggaaggaatggaggaagatgggtagttctaacggaag

SEQ ID NO: 120334 - DNA, 60 bp, Artificial
  Synthetic oligonucleotide
gcggccagaaggaagagggcggcaaagagactaaagatgcaaatgtggatagacgcgtac

SEQ ID NO: 120335 - DNA, 60 bp, Artificial
  Synthetic oligonucleotide
ctaacggaagagattgctcgcgcgattgaatctaagtacggtacgaagattgatgtttac

SEQ ID NO: 120336 - DNA, 60 bp, Artificial
  Synthetic oligonucleotide
ctaacggaagagattgctcgcgcgattgaatctaaatacggtacgaagattgatgtttac

SEQ ID NO: 120337 - DNA, 60 bp, Artificial
  Synthetic oligonucleotide
gattggtggtgtggagaggaagatggctccgataggagcgcgggagagcgcggttatgtt

SEQ ID NO: 120338 - DNA, 60 bp, Artificial
  Synthetic oligonucleotide
ttggtggtgtggagaggaagatggctccgataggagcgcgggagagcgcggttatgttag

SEQ ID NO: 120339 - DNA, 60 bp, Artificial
  Synthetic oligonucleotide
gaggacgcaagcagaggaagaaagcccatggtgacgcgcagagagaaggtgtcgaggaag

SEQ ID NO: 120340 - DNA, 60 bp, Artificial
  Synthetic oligonucleotide
gggacgcaagcagaggaagaaagcccatggtgacgcgcagagagaaggtgtcgaggaaga

SEQ ID NO: 120341 - DNA, 60 bp, Artificial
  Synthetic oligonucleotide
attggaattactatagaaggggtcatgagtcaaaagaaactgctaagcatgattggtggt

SEQ ID NO: 120342 - DNA, 60 bp, Artificial
  Synthetic oligonucleotide
atcggaattactatagagggggtcatgagtcaaaagaaactgctaagcatgattggtggt

SEQ ID NO: 120343 - DNA, 60 bp, Artificial
  Synthetic oligonucleotide
tggaattactatagaaggggtcatgagtcaaaagaaactgctaagcatgattggtggtgt

SEQ ID NO: 120344 - DNA, 60 bp, Artificial
  Synthetic oligonucleotide
gaaggggtcatgagtcaaaagaaactgctaagcatgattggtggtgtggagaggaagatg

SEQ ID NO: 120345 - DNA, 60 bp, Artificial
  Synthetic oligonucleotide
aggggtcatgagtcaaaagaaactgctaagcatgattggtggtgtggagaggaagatggc

SEQ ID NO: 120346 - DNA, 57 bp, Artificial
  Synthetic oligonucleotide
ggggtcatgagtcaaaagaaactgctaagcatgattggtggtgtagagaggaagatg

SEQ ID NO: 120347 - DNA, 60 bp, Artificial
  Synthetic oligonucleotide
ggtggtgtagagaggaagatggctccgataggagcgcgggagagcgcggttatgttagtt

SEQ ID NO: 120348 - DNA, 60 bp, Artificial
  Synthetic oligonucleotide
gaggagagcaaagcagaaggatcaaaggatggtgaggggacgcaatcggagagcggccag

SEQ ID NO: 120349 - DNA, 60 bp, Artificial
  Synthetic oligonucleotide
caatcggagagcggccagaaggaagagggcggcaaagagactaaagatgcaaatgtggat

SEQ ID NO: 120350 - DNA, 60 bp, Artificial
  Synthetic oligonucleotide
aacctaaagaggagagcaaagcagaaggatcaaaggatggtgaggggacgcaatcggaga

SEQ ID NO: 120351 - DNA, 60 bp, Artificial
  Synthetic oligonucleotide
aaccaaaagaggagagcaaagcagaaggatcaaaggatggtgaggggacgcaatcggaga

SEQ ID NO: 120352 - DNA, 60 bp, Artificial
  Synthetic oligonucleotide
ggtggtgtggagaggaagatggctccgataggagcgcgggagagcgcggttatgttagtt

SEQ ID NO: 120353 - DNA, 60 bp, Artificial
  Synthetic oligonucleotide
cggcaagggcggttgaaggcggctataaactgaagaaagtgataaacgcactgagtggaa

SEQ ID NO: 120354 - DNA, 60 bp, Artificial
  Synthetic oligonucleotide
ggagcaggcatggcgaccgctatagcttcggcaagggcaattgaaggcggctataaactg

SEQ ID NO: 120355 - DNA, 60 bp, Artificial
  Synthetic oligonucleotide
gtgataaacgcactgagtggaatcgatttgagtcacctgaggactcctagaattgaacct

SEQ ID NO: 120356 - DNA, 60 bp, Artificial
  Synthetic oligonucleotide
ggcggctataaactgaagaaagtgataaacgcactgagtggaatcgatttgagtcaccta

SEQ ID NO: 120357 - DNA, 60 bp, Artificial
  Synthetic oligonucleotide
gaagttccctttttcggagcaggcatggcgaccgctatagcttcggcaagggcaattgaa

SEQ ID NO: 120358 - DNA, 60 bp, Artificial
  Synthetic oligonucleotide
caagctatgaaagaggatcacgaagctatagggagcgaggagaccaagaggattcttcct

SEQ ID NO: 120359 - DNA, 60 bp, Artificial
  Synthetic oligonucleotide
aaggtaggcctaagcttaattcgagagattgacttgcccgagtttatgcgttacgcgtga

SEQ ID NO: 120360 - DNA, 60 bp, Artificial
  Synthetic oligonucleotide
agtaaagttgagagagagatggttgttgaatatcgtaataagattgaagcgttgcgagga

SEQ ID NO: 120361 - DNA, 60 bp, Artificial
  Synthetic oligonucleotide
actggaggcagcgtcagaagaagttcccttcttcggagcaggcatggcgaccgctatagc

SEQ ID NO: 120362 - DNA, 60 bp, Artificial
  Synthetic oligonucleotide
atgggcaagattatcaagaaattgagcaaggtaggcaaaaagattggagatgcgttaaca

SEQ ID NO: 120363 - DNA, 60 bp, Artificial
  Synthetic oligonucleotide
gtacagtctgtaatcacgggggagtcttatggtgaaactgtcaaacaagcggtattatta

SEQ ID NO: 120364 - DNA, 60 bp, Artificial
  Synthetic oligonucleotide
ccgatttatttaggagcaacgcattatgaagtatcatattctcagttgaaacgaaacgca

SEQ ID NO: 120365 - DNA, 60 bp, Artificial
  Synthetic oligonucleotide
ggcacagtacaatctgtgatcacgggggagtcttatggtgaaactgtcaaacaagcggta

SEQ ID NO: 120366 - DNA, 59 bp, Artificial
  Synthetic oligonucleotide
ctcctttgactaagaaagacatgcttaagatgatgtctatgtttcagtcaggagcaaaa

SEQ ID NO: 120367 - DNA, 60 bp, Artificial
  Synthetic oligonucleotide
cggctcctttgactgagaaagacatgcttaagatgatgtctatgtttcagtcaggagcaa

SEQ ID NO: 120368 - DNA, 60 bp, Artificial
  Synthetic oligonucleotide
ttgaaatgagaaaaattccttcatctaatgtgatgagagttgaatacactaaacagtcca

SEQ ID NO: 120369 - DNA, 60 bp, Artificial
  Synthetic oligonucleotide
cccagttggtgttcaaactttgaaaccaaataatgacgcaaaacgtgtttttgaaatgag

SEQ ID NO: 120370 - DNA, 60 bp, Artificial
  Synthetic oligonucleotide
ttccttcatctaatgtgatgagagttgaatacactaaacagtccaaatacagaacgtgtg

SEQ ID NO: 120371 - DNA, 60 bp, Artificial
  Synthetic oligonucleotide
ttgaaatgagaaaaattccttcatctaatgtgatgagagttgaatacaccaaacagtcca

SEQ ID NO: 120372 - DNA, 60 bp, Artificial
  Synthetic oligonucleotide
gggacaggcgtgaaactgactctcaagatgaatattctgaagataattcatataaatctg

SEQ ID NO: 120373 - DNA, 60 bp, Artificial
  Synthetic oligonucleotide
ttccttcatctaatgtgatgagagttgaatacaccaaacagtccaagtacagaacgtgcg

SEQ ID NO: 120374 - DNA, 51 bp, Artificial
  Synthetic oligonucleotide
cggctcctttgactgagaaagacatgcttaagatgatgtctatgtttcagt

SEQ ID NO: 120375 - DNA, 60 bp, Artificial
  Synthetic oligonucleotide
cggctcctttgactaagaaagacatgcttaagatgatgtctatgtttcagtcaggagcaa

SEQ ID NO: 120376 - DNA, 60 bp, Artificial
  Synthetic oligonucleotide
gaaccacgaggcatacagctctagttgttggaacggcgtagtgaagcgatccccgattgg

SEQ ID NO: 120377 - DNA, 58 bp, Artificial
  Synthetic oligonucleotide
cccctccaattagtagggaaccacgaggcatacagctctagttgttggaacggcgtag

SEQ ID NO: 120378 - DNA, 60 bp, Artificial
  Synthetic oligonucleotide
cctatgaaaggagatgccccctccaattagtagggaaccacgaggcatacagctctagtt

SEQ ID NO: 120379 - DNA, 60 bp, Artificial
  Synthetic oligonucleotide
gatcgtggaatcatcagcatgacgagcaacgaggaaaacccagttggtgttcaaactttg

SEQ ID NO: 120380 - DNA, 60 bp, Artificial
  Synthetic oligonucleotide
cccagttggtgttcaaactttgaaaccaaacaatgacgcaaaacgtgtttttgaaatgag

SEQ ID NO: 120381 - DNA, 60 bp, Artificial
  Synthetic oligonucleotide
ggtatttttcttgatcgcggaatcatcagcatgacgagcaacgaggaaaacccagttggt

SEQ ID NO: 120382 - DNA, 60 bp, Artificial
  Synthetic oligonucleotide
gatcgcggaatcatcagcatgacgagcaacgaggaaaacccagttggtgttcaaactttg

SEQ ID NO: 120383 - DNA, 60 bp, Artificial
  Synthetic oligonucleotide
ggtatttttcttgatcgtggaatcatcagcatgacgagcaacgaggaaaacccagttggt

SEQ ID NO: 120384 - DNA, 60 bp, Artificial
  Synthetic oligonucleotide
cgaagaccgaggtaaatcctcagcgccgaaccgcggaatggccggttccaaggtgaatca

SEQ ID NO: 120385 - DNA, 60 bp, Artificial
  Synthetic oligonucleotide
gcggaatggccggttccaaggtgaatcatgttgataacgtcgtggcctgatgctatctgg

SEQ ID NO: 120386 - DNA, 60 bp, Artificial
  Synthetic oligonucleotide
gccggttccaaggtgaatcatgttgataacgtcgtggcctgatgctatctggccctcgcc

SEQ ID NO: 120387 - DNA, 60 bp, Artificial
  Synthetic oligonucleotide
caaggtgaatcatgttgataacgtcgtggcctgatgctacctggccctcgcctatgaaag

SEQ ID NO: 120388 - DNA, 60 bp, Artificial
  Synthetic oligonucleotide
gaaagacatgcttaagatgatgtctatgtttcagtcaggggcaaaaagtaaacgaagacc

SEQ ID NO: 120389 - DNA, 60 bp, Artificial
  Synthetic oligonucleotide
tcaggagcaaaaagtaaacgaagaccgaggtaaattctcagagccgaaccgcggaatggc

SEQ ID NO: 120390 - DNA, 60 bp, Artificial
  Synthetic oligonucleotide
gtaaacgaagaccgaggtaaattctcagagccgaaccgcggaatggccggttccaaggtg

SEQ ID NO: 120391 - DNA, 60 bp, Artificial
  Synthetic oligonucleotide
aacgaagaccgaggtaaatcctcagcgccgaaccgcggaatggccggttccaaggtgaat

SEQ ID NO: 120392 - DNA, 60 bp, Artificial
  Synthetic oligonucleotide
catgttgataacgtcgtggcctgatgctacctggccctcgcctatgaaaggagatgcccc

SEQ ID NO: 120393 - DNA, 60 bp, Artificial
  Synthetic oligonucleotide
tgctatctggccctcgcctatgaaaggagatgccccctccaattagtagggaaccacgag

SEQ ID NO: 120394 - DNA, 60 bp, Artificial
  Synthetic oligonucleotide
ggctccggttaatgtgaataatcctggcgcgggacctggaatgatagaaattgaggtcat

SEQ ID NO: 120395 - DNA, 60 bp, Artificial
  Synthetic oligonucleotide
ccaagcaacactcacaactttaagttctaaggcgatactgggagggtggacggatagtac

SEQ ID NO: 120396 - DNA, 60 bp, Artificial
  Synthetic oligonucleotide
aaccaagcaacactcacaactttaagttctaaggcgatactgggagggtggacggatagt

SEQ ID NO: 120397 - DNA, 60 bp, Artificial
  Synthetic oligonucleotide
gcgctgaagccaaattcggagtaaatcaaacgtacccacaagtagtcagcggagagtaca

SEQ ID NO: 120398 - DNA, 60 bp, Artificial
  Synthetic oligonucleotide
ttagcgctgaagccaaattcggagtaaatcaaacgtacccacaagtagtcagcggagagt

SEQ ID NO: 120399 - DNA, 60 bp, Artificial
  Synthetic oligonucleotide
cacatttaatcaagcaacactcacaactttaagttctaaggcgatactgggagggtggac

SEQ ID NO: 120400 - DNA, 60 bp, Artificial
  Synthetic oligonucleotide
cggtgaagccaaattcggagtaaatcaaacgtacccacaagtagttagcggagagtacat

SEQ ID NO: 120401 - DNA, 60 bp, Artificial
  Synthetic oligonucleotide
aacactcacaactttaagttctaaggcgatactgggagggtggacggatagtacccgtcg

SEQ ID NO: 120402 - DNA, 60 bp, Artificial
  Synthetic oligonucleotide
aatcaacttaacggtgaagccaaattcggagtaaatcaaacgtacccacaagtagttagc

SEQ ID NO: 120403 - DNA, 60 bp, Artificial
  Synthetic oligonucleotide
gatgagtttcacagagttctcgtcagtcccgctagatggtttcgaactgccattaacctg

SEQ ID NO: 120404 - DNA, 60 bp, Artificial
  Synthetic oligonucleotide
gtcatataatgatgcggtgaggatgagcttcacagagttctcgtcagtcccgctagatgg

SEQ ID NO: 120405 - DNA, 60 bp, Artificial
  Synthetic oligonucleotide
gctagctcagtcctgctctaatatgccgttcgctccagagtctagttacgatcaacagat

SEQ ID NO: 120406 - DNA, 60 bp, Artificial
  Synthetic oligonucleotide
ggatttcagggaaatcgcaatggtgctggctcagtcctgctctaatatgccgttcgcccc

SEQ ID NO: 120407 - DNA, 60 bp, Artificial
  Synthetic oligonucleotide
gcgtatcactctgctgaacatgatgcagaacggtcctctaatctatgtggagacgtggcc

SEQ ID NO: 120408 - DNA, 60 bp, Artificial
  Synthetic oligonucleotide
tgtcaggtttggttgctgctccggatccacctcgtgcgcctccctacgtcccagtttccg

SEQ ID NO: 120409 - DNA, 60 bp, Artificial
  Synthetic oligonucleotide
gttgtcaatcaagctcaaaatcgcccaggttattccagtcccaatggagtcccagtacgt

SEQ ID NO: 120410 - DNA, 60 bp, Artificial
  Synthetic oligonucleotide
gagtcgttaatcaagctcaaaatcgcccaggttattccagtcccaatggagtcccagtgc

SEQ ID NO: 120411 - DNA, 60 bp, Artificial
  Synthetic oligonucleotide
ctcgcaaatcaaggagttgtcaatcaagctcaaaatcgcccaggttattccagtcccaat

SEQ ID NO: 120412 - DNA, 60 bp, Artificial
  Synthetic oligonucleotide
gctttaagaaccacgatggcgcgtgccgtgttcgacttctttactactctgtttggcaat

SEQ ID NO: 120413 - DNA, 60 bp, Artificial
  Synthetic oligonucleotide
atggcgcgtgccgtgttcgacttctttactactctgtttggcaatcgcgggctacccacg

SEQ ID NO: 120414 - DNA, 60 bp, Artificial
  Synthetic oligonucleotide
atggcgcgtgccgtgttcgacttctttactactctgtttggcaatcgcgggttacccacg

SEQ ID NO: 120415 - DNA, 60 bp, Artificial
  Synthetic oligonucleotide
gcgtctcaaaccttttcaggcccgctcctggactgttggacaatctatgcaatccttggc

SEQ ID NO: 120416 - DNA, 60 bp, Artificial
  Synthetic oligonucleotide
tgctggcaaatcaaggagtcgttaatcaagctcaaaatcgcccaggttattccagtccca

SEQ ID NO: 120417 - DNA, 60 bp, Artificial
  Synthetic oligonucleotide
gcgtctcaaaccttttcaggcccgttcatggactgttggacaatctatgcaatccttggc

SEQ ID NO: 120418 - DNA, 60 bp, Artificial
  Synthetic oligonucleotide
aatccttggccgctctaaccgcgttcgcaacatagagtagggtcgaatgctgttgtgggt

SEQ ID NO: 120419 - DNA, 60 bp, Artificial
  Synthetic oligonucleotide
aatccttggccgctttagccgcgttcgcaacatagagtagggtcgaatgctgttgtgggt

SEQ ID NO: 120420 - DNA, 60 bp, Artificial
  Synthetic oligonucleotide
tcaggcccgttcatggactgttggacaatctatgcaatccttggccgctttagccgcgtt

SEQ ID NO: 120421 - DNA, 60 bp, Artificial
  Synthetic oligonucleotide
tcaggcccgctcctggactgttggacaatctatgcaatccttggccgctctaaccgcgtt

SEQ ID NO: 120422 - DNA, 60 bp, Artificial
  Synthetic oligonucleotide
tggccgctttagccgcgttcgcaacatagagtagggtcgaatgctgttgtgggtccagcc

SEQ ID NO: 120423 - DNA, 60 bp, Artificial
  Synthetic oligonucleotide
gccgctctaaccgcgttcgcaacatagagtagggtcgaatgctgttgtgggtccagcccc

SEQ ID NO: 120424 - DNA, 60 bp, Artificial
  Synthetic oligonucleotide
gcatcgtacgcagaagcgtttcgtgatgatgtgagattgagacagattaaacgacatgtg

SEQ ID NO: 120425 - DNA, 60 bp, Artificial
  Synthetic oligonucleotide
gaaacaatcgtataatgatgcggtgaggatgagttttacagaattttcatcagtcccgct

SEQ ID NO: 120426 - DNA, 60 bp, Artificial
  Synthetic oligonucleotide
gtaagatgccctgcaaccgcgctgtgtttggtgctttcatactagcagttctcattggtc

SEQ ID NO: 120427 - DNA, 60 bp, Artificial
  Synthetic oligonucleotide
gctgagtgtcccagtgatgcagttgatagagatacaggaaccctcgtacctccagcttac

SEQ ID NO: 120428 - DNA, 60 bp, Artificial
  Synthetic oligonucleotide
gacaatttgtcctagtaagatgccctgcaaccgcgctgtgtttggtgctttcatactagc

SEQ ID NO: 120429 - DNA, 60 bp, Artificial
  Synthetic oligonucleotide
aaccctcgtacctccagcttactcttcctcagagttctttcctccgccgcccgctcctca

SEQ ID NO: 120430 - DNA, 60 bp, Artificial
  Synthetic oligonucleotide
gctcctagctttaatttatttactgctggtggcttggctagttagattcacgacacgagc

SEQ ID NO: 120431 - DNA, 60 bp, Artificial
  Synthetic oligonucleotide
cgctcctcacctgtatgagacgcccaaggcgcctcgtcttgttccatctgctcctagctt

SEQ ID NO: 120432 - DNA, 60 bp, Artificial
  Synthetic oligonucleotide
ccgctcctcacctgtatgagacgcccaaggcgcctcgtcttgttccatctgctcctagct

SEQ ID NO: 120433 - DNA, 60 bp, Artificial
  Synthetic oligonucleotide
agcttactcttcctcagagttctttcctccgccgcccgctcctcacctgtatgagacgcc

SEQ ID NO: 120434 - DNA, 60 bp, Artificial
  Synthetic oligonucleotide
cgagcgtaagggttgcggtggatcctagggacctcgccggcattctgaatgatgtcatcc

SEQ ID NO: 120435 - DNA, 60 bp, Artificial
  Synthetic oligonucleotide
cgacacgagcgtaagggttgcggtggatcctagggacctcgccggcattctgaatgatgt

SEQ ID NO: 120436 - DNA, 60 bp, Artificial
  Synthetic oligonucleotide
ttatttactgctggtggcttggctagttagattcacgacacgagcgtaagggttgcggtg

SEQ ID NO: 120437 - DNA, 60 bp, Artificial
  Synthetic oligonucleotide
aacggaatgaccccgcagatggtgagggaatacgcaatgtttcgaagacatcgcttctta

SEQ ID NO: 120438 - DNA, 60 bp, Artificial
  Synthetic oligonucleotide
tcgcttcttaacgctgagtgtcccagtgatgcagttgatagagatacaggaaccctcgta

SEQ ID NO: 120439 - DNA, 50 bp, Artificial
  Synthetic oligonucleotide
tagtgcagtgaaagcagacttggtagaacttcaagatgcgtcgtcgaaaa

SEQ ID NO: 120440 - DNA, 58 bp, Artificial
  Synthetic oligonucleotide
aacggaatgaccccgcagatggtgagggaatacgcaatgtttcgaagacatcgcttct

SEQ ID NO: 120441 - DNA, 50 bp, Artificial
  Synthetic oligonucleotide
tttgaaacaacacgaagtcgctgttaacgttgtagttgaatttctttttg

SEQ ID NO: 120442 - DNA, 60 bp, Artificial
  Synthetic oligonucleotide
tagtgcagtgaaagcagacttggtagaacttcaagatgcgtcgtcgaaaaaacggaatga

SEQ ID NO: 120443 - DNA, 60 bp, Artificial
  Synthetic oligonucleotide
tcatactagcagttctcattggtcttcaatcagcatatttcaaactttatgaattctaca

SEQ ID NO: 120444 - DNA, 60 bp, Artificial
  Synthetic oligonucleotide
gaattctacagaaataatgataatgctcagaacactactgcctctgcttttttgaaacaa

SEQ ID NO: 120445 - DNA, 59 bp, Artificial
  Synthetic oligonucleotide
ttttccccaaaacacgttgcacagtatgtatgaatctctagaaggaggatattgtccta

SEQ ID NO: 120446 - DNA, 60 bp, Artificial
  Synthetic oligonucleotide
cgctagatggtttcgaattaccattaacctaagatcagtaggtggagtggcgccccgagg

SEQ ID NO: 120447 - DNA, 60 bp, Artificial
  Synthetic oligonucleotide
cagtcccgctagatggtttcgaattaccattaacctaagatcagtaggtggagtggcgcc

SEQ ID NO: 120448 - DNA, 60 bp, Artificial
  Synthetic oligonucleotide
cagtcccgctagatggtttcgaattaccattaacttaagatcagtaggtggagtggcgcc

SEQ ID NO: 120449 - DNA, 60 bp, Artificial
  Synthetic oligonucleotide
tacgatcttcaacgcattgttctttaactcgcggtacgcgatatcatagtgcatcgctcc

SEQ ID NO: 120450 - DNA, 60 bp, Artificial
  Synthetic oligonucleotide
ggagcgatgcactatgatatcgcgtaccgcgagttaaagaataatgcgttgaagatcgta

SEQ ID NO: 120451 - DNA, 60 bp, Artificial
  Synthetic oligonucleotide
ctgaatcatttacgatcttcaacgcattgttctttaactcgcggtacgcgatatcatagt

SEQ ID NO: 120452 - DNA, 60 bp, Artificial
  Synthetic oligonucleotide
tcttacgttaaggcgcgcactcttgagccccctcaacctaatgataaattgagtcaaatg

SEQ ID NO: 120453 - DNA, 51 bp, Artificial
  Synthetic oligonucleotide
atcacactcttccgatcccaacggtacatctttatagcactctctttaaaa

SEQ ID NO: 120454 - DNA, 60 bp, Artificial
  Synthetic oligonucleotide
tttaaaaacctccgcccgaaacatggacagcttcgtcttaaccagtactaaccctaaatc

SEQ ID NO: 120455 - DNA, 60 bp, Artificial
  Synthetic oligonucleotide
ttaaaaatcacactcttccgatcccaacggtacatctttatagcactctctttaaaaacc

SEQ ID NO: 120456 - DNA, 60 bp, Artificial
  Synthetic oligonucleotide
gcatgaaataatcttaccaagtatcgaaaagctgattcgccaagcaaaggaacgttcagg

SEQ ID NO: 120457 - DNA, 60 bp, Artificial
  Synthetic oligonucleotide
cgccaagcaaaggaacgttcaggttatttttcaagcgatgaatttgcacgtcttaaaggt

SEQ ID NO: 120458 - DNA, 60 bp, Artificial
  Synthetic oligonucleotide
cctccgcccgaaacatggacagcttcgtcttaaccagtactaaccctaaatccaagcatg

SEQ ID NO: 120459 - DNA, 60 bp, Artificial
  Synthetic oligonucleotide
accctaaatccaagcatgaaataatcttaccaagtatcgaaaagctgattcgccaagcaa

SEQ ID NO: 120460 - DNA, 60 bp, Artificial
  Synthetic oligonucleotide
tgtctgagatttcacgtcaatctaagtggtctgctaaccatattgctcctgatgccttat

SEQ ID NO: 120461 - DNA, 60 bp, Artificial
  Synthetic oligonucleotide
ccttcttttgacacttgctaataatgtaatcttctgtatgatacatcgtcccaaataatt

SEQ ID NO: 120462 - DNA, 56 bp, Artificial
  Synthetic oligonucleotide
tcttaaaggtcaacgtcatttgatgtggatgcaaggttctttaacaatggctacgc

SEQ ID NO: 120463 - DNA, 60 bp, Artificial
  Synthetic oligonucleotide
aaatattcttaatgtgtttgagtggtttggtggtggcacacgggctgtgaattttgcgcg

SEQ ID NO: 120464 - DNA, 60 bp, Artificial
  Synthetic oligonucleotide
tcttaatgtgtttgagtggtttggtggtggcacacgggctgtgaattttgcgcgtgtttt

SEQ ID NO: 120465 - DNA, 60 bp, Artificial
  Synthetic oligonucleotide
actttattattgtctgagatttcacgtcaatctaagtggtctgctaaccatattgctcct

SEQ ID NO: 120466 - DNA, 60 bp, Artificial
  Synthetic oligonucleotide
gtcttgacactgacaccctcgctattcgttccggaactttattattgtctgagatttcac

SEQ ID NO: 120467 - DNA, 60 bp, Artificial
  Synthetic oligonucleotide
tggaaagaaacctcatgttaatttgtttcaatactttgatctggccggcctcactgctta

SEQ ID NO: 120468 - DNA, 60 bp, Artificial
  Synthetic oligonucleotide
cgtgatgcatacactgacttttctgaactattgacttgttttaagcgtattcgatcggat

SEQ ID NO: 120469 - DNA, 60 bp, Artificial
  Synthetic oligonucleotide
gtgtacgtatgtttggtcttgacactgacaccctcgctattcgttccggaactttattat

SEQ ID NO: 120470 - DNA, 60 bp, Artificial
  Synthetic oligonucleotide
agaaacctcatgttaatttgtttcaatactttgatctggccggcctcactgcttactcct

SEQ ID NO: 120471 - DNA, 60 bp, Artificial
  Synthetic oligonucleotide
gctaccaggtaatggtgaaaatagcagcatgagtcgccaaactgtatctgattttgtctc

SEQ ID NO: 120472 - DNA, 60 bp, Artificial
  Synthetic oligonucleotide
gagtcaaatgctaccaggtaatggtgaaaatagcagcatgagtcgccaaactgtatctga

SEQ ID NO: 120473 - DNA, 60 bp, Artificial
  Synthetic oligonucleotide
tctctctttcacgtgaggtatctgagaaaattgttcgtgatgcatacactgacttttctg

SEQ ID NO: 120474 - DNA, 60 bp, Artificial
  Synthetic oligonucleotide
ctgtatctgattttgtctctctttcacgtgaggtatctgagaaaattgttcgtgatgcat

SEQ ID NO: 120475 - DNA, 66 bp, Artificial
  Synthetic oligonucleotide
gacacttgctaataatgtaatcttctgtatgatacatcgtcccaaataatttatgacttagcatgc

SEQ ID NO: 120476 - DNA, 60 bp, Artificial
  Synthetic oligonucleotide
gcaacagatggacagaattgttaaagagatgagacgtcagctggagatgattgataaact

SEQ ID NO: 120477 - DNA, 60 bp, Artificial
  Synthetic oligonucleotide
cgctacactgctagatgtagtttagtctattcctgtgttaggcgtttctacgatgtacgc

SEQ ID NO: 120478 - DNA, 56 bp, Artificial
  Synthetic oligonucleotide
ggagggaatgagtaaggacaaaaaatctgaacaaggtgagaccaaggaagagagta

SEQ ID NO: 120479 - DNA, 60 bp, Artificial
  Synthetic oligonucleotide
agtcagtcaagaaacggttaaatctatgaaaggcacatattatgtgctgactcaggatat

SEQ ID NO: 120480 - DNA, 60 bp, Artificial
  Synthetic oligonucleotide
atctatgtccacattgttgggagagtcaaaaacagaagcacaaatacgagaaaagatgga

SEQ ID NO: 120481 - DNA, 60 bp, Artificial
  Synthetic oligonucleotide
catgataagctgcttgaaaactataatctaacggttgaagttacggcggggaagaatacg

SEQ ID NO: 120482 - DNA, 60 bp, Artificial
  Synthetic oligonucleotide
ctcaggatattcatgataagctgcttgaaaactataatctaacggttgaagttacggcgg

SEQ ID NO: 120483 - DNA, 60 bp, Artificial
  Synthetic oligonucleotide
gacaccacgttgcttgaacagcgaaaggatggaggctcatctacgagtgatcaggaacga

SEQ ID NO: 120484 - DNA, 60 bp, Artificial
  Synthetic oligonucleotide
aggcactcgctacactgctagatgtagtttagtctattcctgtgttaggcgtttctacga

SEQ ID NO: 120485 - DNA, 60 bp, Artificial
  Synthetic oligonucleotide
gagcatatgtgtataaacctggcggcgatgttagcctccaagaggcactcgctacactgc

SEQ ID NO: 120486 - DNA, 60 bp, Artificial
  Synthetic oligonucleotide
gagtgcagatgtcgagaatagtcttactaacaccaggagatgtaatattgcaatgccagg

SEQ ID NO: 120487 - DNA, 60 bp, Artificial
  Synthetic oligonucleotide
gttaaaaaagagtgcagatgtcgagaatagtcttactaacaccaggagatgtaatattgc

SEQ ID NO: 120488 - DNA, 60 bp, Artificial
  Synthetic oligonucleotide
gtcattgaattgggagctgctttaatgaagaaactcggattgcaaaacgacgcaagagat

SEQ ID NO: 120489 - DNA, 60 bp, Artificial
  Synthetic oligonucleotide
gggagctgctttaatgaagaaactcggattgcaaaacgacgcaagagatgagcaatcaga

SEQ ID NO: 120490 - DNA, 60 bp, Artificial
  Synthetic oligonucleotide
gcaagagatgagcaatcagatgaggctaaacggttgaaaagactgctaactggacccaag

SEQ ID NO: 120491 - DNA, 60 bp, Artificial
  Synthetic oligonucleotide
cgcaagagatgagcaatcagatgaggctaaacggttgaaaagactgctaactggacccaa

SEQ ID NO: 120492 - DNA, 60 bp, Artificial
  Synthetic oligonucleotide
ttaatggacttaacgaacgcaacaaggaaggaaaaaggacgtgtgacgtcaacacaaaca

SEQ ID NO: 120493 - DNA, 60 bp, Artificial
  Synthetic oligonucleotide
ctggacccaagaagaataagccgaatgtcagagtagacagcgagaaagggttaatggact

SEQ ID NO: 120494 - DNA, 60 bp, Artificial
  Synthetic oligonucleotide
ccatttagtaaccaacgatcctgcttttgttgatagagcgcacgccatattcactgcgcc

SEQ ID NO: 120495 - DNA, 60 bp, Artificial
  Synthetic oligonucleotide
aacacaaacacgagtccatttagtaaccaacgatcctgcttttgttgatagagcgcacgc

SEQ ID NO: 120496 - DNA, 60 bp, Artificial
  Synthetic oligonucleotide
gaacataagagcatatgtgtataaacctggcggcgatgttagcctccaagaggcactcgc

SEQ ID NO: 120497 - DNA, 59 bp, Artificial
  Synthetic oligonucleotide
gagcgcacgccatattcactgcgccgactggggatccaggatggaaagatctagcaaga

SEQ ID NO: 120498 - DNA, 60 bp, Artificial
  Synthetic oligonucleotide
gttcagtttattttaatgaatattcgaacgttttagaattttccatcgaaccaaagttat

SEQ ID NO: 120499 - DNA, 60 bp, Artificial
  Synthetic oligonucleotide
ctggagaggcgaataagtccatgtcaatgggttcaacgcgtcccgttaatgtgtgtccat

SEQ ID NO: 120500 - DNA, 60 bp, Artificial
  Synthetic oligonucleotide
cagcaaactggagaggcgaataagtccatgtcaatgggttcaacgcgtcccgttaatgtg

SEQ ID NO: 120501 - DNA, 60 bp, Artificial
  Synthetic oligonucleotide
ttcaatttcaagcgtcggtttcagtcatttgattgaatactgtaacaattacgatctacc

SEQ ID NO: 120502 - DNA, 60 bp, Artificial
  Synthetic oligonucleotide
gatcatccgtctttatggtggacaaggtagtaaacattcaatttcaagcgtcggtttcag

SEQ ID NO: 120503 - DNA, 60 bp, Artificial
  Synthetic oligonucleotide
caaacgaattgagaaatggtggagctaacgccctattcacaatcgcatctgagtacttca

SEQ ID NO: 120504 - DNA, 60 bp, Artificial
  Synthetic oligonucleotide
caagcgtcggtttcagtcatttgattgaatactgtaacaattacgatctacctgacgatg

SEQ ID NO: 120505 - DNA, 60 bp, Artificial
  Synthetic oligonucleotide
gcgttaactcaaatcattccatatcgtggggttaaagcacttagaaccaaacttctcgag

SEQ ID NO: 120506 - DNA, 60 bp, Artificial
  Synthetic oligonucleotide
atggtggagctaacgccctattcacaatcgcatctgagtacttcaacgctccggctgtca

SEQ ID NO: 120507 - DNA, 60 bp, Artificial
  Synthetic oligonucleotide
acttctcgagactcaagatggtgtagcactggaacatatcggctcattctataatacatg

SEQ ID NO: 120508 - DNA, 60 bp, Artificial
  Synthetic oligonucleotide
cattccatatcgtggggttaaagcacttagaaccaaacttctcgagactcaagatggtgt

SEQ ID NO: 120509 - DNA, 60 bp, Artificial
  Synthetic oligonucleotide
cagttgctggacatgctatcgatgttggcccggactattatcgtcagatgttggcagagg

SEQ ID NO: 120510 - DNA, 60 bp, Artificial
  Synthetic oligonucleotide
ctcgagactcaagatggtgtagcactggaacatatcggctcattctataatacatgcaag

SEQ ID NO: 120511 - DNA, 60 bp, Artificial
  Synthetic oligonucleotide
cggctgaagctgttaagggcatttctgattcgagtttagatgctactgaattaagcctga

SEQ ID NO: 120512 - DNA, 60 bp, Artificial
  Synthetic oligonucleotide
agttcataacggctgaagctgttaagggcatttctgattcgagtttagatgctactgaat

SEQ ID NO: 120513 - DNA, 60 bp, Artificial
  Synthetic oligonucleotide
ccggttcaggaaaatcattgactaaaggtaagtacgtcaggaattcaattgataagggtc

SEQ ID NO: 120514 - DNA, 60 bp, Artificial
  Synthetic oligonucleotide
cgtccggttcaggaaaatcattgactaaaggtaagtacgtcaggaattcaattgataagg

SEQ ID NO: 120515 - DNA, 60 bp, Artificial
  Synthetic oligonucleotide
gacgctatgttggagatcaatgctgatgaaatgtcgtcagttaaatcgtccggttcagga

SEQ ID NO: 120516 - DNA, 60 bp, Artificial
  Synthetic oligonucleotide
agctgacgctatgttggagatcaatgctgatgaaatgtcgtcagttaaatcgtccggttc

SEQ ID NO: 120517 - DNA, 60 bp, Artificial
  Synthetic oligonucleotide
cacagatgtcaaagccaagtgggagtgaaatcagtaagttcataacggctgaagctgtta

SEQ ID NO: 120518 - DNA, 60 bp, Artificial
  Synthetic oligonucleotide
atattcgcattattcacagatgtcaaagccaagtgggagtgaaatcagtaagttcataac

SEQ ID NO: 120519 - DNA, 60 bp, Artificial
  Synthetic oligonucleotide
ggtcataatctgaccgatctgggtaaagccaacggtgatcaatattcgcattattcacag

SEQ ID NO: 120520 - DNA, 60 bp, Artificial
  Synthetic oligonucleotide
attgataagggtcataatctgaccgatctgggtaaagccaacggtgatcaatattcgcat

SEQ ID NO: 120521 - DNA, 60 bp, Artificial
  Synthetic oligonucleotide
ccaaactgaaggatttcaccaagagtgtagaaaagacaactcttcttactcaatctgagc

SEQ ID NO: 120522 - DNA, 60 bp, Artificial
  Synthetic oligonucleotide
cttactcaatctgagctaaagaaacagcaccgtcaccttctctctcaacaaccagaatta

SEQ ID NO: 120523 - DNA, 60 bp, Artificial
  Synthetic oligonucleotide
gctttcaactattcctagaacgcgatcgcaggtcgttggattgacttccaaactgaagga

SEQ ID NO: 120524 - DNA, 60 bp, Artificial
  Synthetic oligonucleotide
tgacttccaaactgaaggatttcaccaagagtgtagaaaagacaactcttcttactcaat

SEQ ID NO: 120525 - DNA, 60 bp, Artificial
  Synthetic oligonucleotide
ctgagctaaagaaacagcaccgtcaccttctctctcaacaaccagaattattcagtggac

SEQ ID NO: 120526 - DNA, 60 bp, Artificial
  Synthetic oligonucleotide
tccaagtttgaaaggatcatccgtctttatggtggacaaggtagtaaacattcaatttca

SEQ ID NO: 120527 - DNA, 60 bp, Artificial
  Synthetic oligonucleotide
aattggcgcttctaagaatgaaactaaaccagtagagactaaagtcgtcaaagctccctc

SEQ ID NO: 120528 - DNA, 60 bp, Artificial
  Synthetic oligonucleotide
gctactgaattaagcctgaaactagccatgttacaatcttcagctgtaacaattggcgct

SEQ ID NO: 120529 - DNA, 60 bp, Artificial
  Synthetic oligonucleotide
aagctccctctgttaataagacagctgatgaattagaagagatttagtacccaattaaat

SEQ ID NO: 120530 - DNA, 60 bp, Artificial
  Synthetic oligonucleotide
ggcgcttctaagaatgaaactaaaccagtagagactaaagtcgtcaaagctccctctgtt

SEQ ID NO: 120531 - DNA, 60 bp, Artificial
  Synthetic oligonucleotide
ccaattaaatcatgttacttgtgtgttatccaataatacttatgcctacatacgatgccg

SEQ ID NO: 120532 - DNA, 60 bp, Artificial
  Synthetic oligonucleotide
gctccctctgttaataagacagctgatgaattagaagagatttagtacccaattaaatca

SEQ ID NO: 120533 - DNA, 60 bp, Artificial
  Synthetic oligonucleotide
tacttgtgtgttatccaataatacttatgcctacatacgatgccgcgatactttctaggg

SEQ ID NO: 120534 - DNA, 60 bp, Artificial
  Synthetic oligonucleotide
ctgtattcagaattgaaccgtattgtagacaacacgacgattaaagacagagctgacgct

SEQ ID NO: 120535 - DNA, 60 bp, Artificial
  Synthetic oligonucleotide
gaaccgtattgtagacaacacgacgattaaagacagagctgacgctatgttggagatcaa

SEQ ID NO: 120536 - DNA, 60 bp, Artificial
  Synthetic oligonucleotide
ttggcagaggttacagctttgctcaagctcaagaaaaaagtaggatctgttgtcatgcat

SEQ ID NO: 120537 - DNA, 51 bp, Artificial
  Synthetic oligonucleotide
tgtcatgcatggtaataatcaattcggatttgtcaaaccgttggacgcatc

SEQ ID NO: 120538 - DNA, 60 bp, Artificial
  Synthetic oligonucleotide
tgtcatgcatggtaataatcaattcggatttgtcaaaccgttggacgcatcccagactca

SEQ ID NO: 120539 - DNA, 60 bp, Artificial
  Synthetic oligonucleotide
atcacaattcctaataacggtaacaagtcacattgcatacaggctttgaacttgtccggt

SEQ ID NO: 120540 - DNA, 60 bp, Artificial
  Synthetic oligonucleotide
aacggtaacaagtcacattgcatacaggctttgaacttgtccggtcttctggagcatagg

SEQ ID NO: 120541 - DNA, 60 bp, Artificial
  Synthetic oligonucleotide
cttgtccggtcttctggagcataggctgctacatttcggatctcttggtactagctgtcg

SEQ ID NO: 120542 - DNA, 60 bp, Artificial
  Synthetic oligonucleotide
cggtcttctggagcataggctgctacatttcggatctcttggtactagctgtcgtgatcc

SEQ ID NO: 120543 - DNA, 60 bp, Artificial
  Synthetic oligonucleotide
ctagctgtcgtgatccaagctgtagagtcattggtattgatagacctgaactgtattcag

SEQ ID NO: 120544 - DNA, 60 bp, Artificial
  Synthetic oligonucleotide
tactatcaaaggtatatttgccaaggtttaagtataaacattttgaaatctccagtcggc

SEQ ID NO: 120545 - DNA, 60 bp, Artificial
  Synthetic oligonucleotide
acttggacaatctaaccaaaagagagcatccaaaaacaatcttcgtggaatcactgaaga

SEQ ID NO: 120546 - DNA, 60 bp, Artificial
  Synthetic oligonucleotide
gatactgaaatacccactttggatgttacacctctaaatgtagatagatcgctgactcca

SEQ ID NO: 120547 - DNA, 60 bp, Artificial
  Synthetic oligonucleotide
gatactgaaatacccactttggatgttacacctctaaatgtagataggtcgctgactcca

SEQ ID NO: 120548 - DNA, 60 bp, Artificial
  Synthetic oligonucleotide
tgaaaattatcctgatactgaaatacccactttggatgttacacctctaaatgtagatag

SEQ ID NO: 120549 - DNA, 60 bp, Artificial
  Synthetic oligonucleotide
atggtgaagctacgagacatatcaacaatagccgtatctgaaagtacccacaattttgaa

SEQ ID NO: 120550 - DNA, 60 bp, Artificial
  Synthetic oligonucleotide
cacgacaatgtcatccatgatactgactcagtttggaccgtttatcgaaagtatctcggg

SEQ ID NO: 120551 - DNA, 60 bp, Artificial
  Synthetic oligonucleotide
ccccaacagcaggtttcggcgcctcatacattgacagcagattacattaactaccacatg

SEQ ID NO: 120552 - DNA, 60 bp, Artificial
  Synthetic oligonucleotide
cacgttccacgacaatgtcatccatgatactgactcagtttggaccgttcattgaaagca

SEQ ID NO: 120553 - DNA, 60 bp, Artificial
  Synthetic oligonucleotide
cacgttccacgacaatgtcatccatgatactgactcagtttagaccgttcattgaaagca

SEQ ID NO: 120554 - DNA, 60 bp, Artificial
  Synthetic oligonucleotide
ttaatggcgtgcatgacggattacaatggcagcggtggatacgttattcatgggctttat

SEQ ID NO: 120555 - DNA, 60 bp, Artificial
  Synthetic oligonucleotide
gcgtacgatgggactgccgaatacctaaagctgtatttcatatttggctgtcgaattcca

SEQ ID NO: 120556 - DNA, 60 bp, Artificial
  Synthetic oligonucleotide
cacccactggcaccttcacgtttgtgtactctgacgtcgatcaagtggaagacgcgggcc

SEQ ID NO: 120557 - DNA, 60 bp, Artificial
  Synthetic oligonucleotide
aagacgcgggcctatccattgtagctacgaatcgcgccgctgtggccgtgaccaacattg

SEQ ID NO: 120558 - DNA, 60 bp, Artificial
  Synthetic oligonucleotide
cacccgagggctatgacacgcatctcaacatttgccgactgttgttagcagagggtctcc

SEQ ID NO: 120559 - DNA, 60 bp, Artificial
  Synthetic oligonucleotide
cccgacgaagccctcttcaatctgcactttcggtaagcacataccactctacgctacggc

SEQ ID NO: 120560 - DNA, 60 bp, Artificial
  Synthetic oligonucleotide
cctatctgggcgctgcctccactcacgggacgacggacgagcccctgatcattgaagcgc

SEQ ID NO: 120561 - DNA, 60 bp, Artificial
  Synthetic oligonucleotide
gccattgatcgagcatttcgaccaacccacctatggtccccacgtcctgattcccgcgtt

SEQ ID NO: 120562 - DNA, 60 bp, Artificial
  Synthetic oligonucleotide
catcacgttctctgatgatacctacgtctctcggcacgtgttatacacacccgctggcct

SEQ ID NO: 120563 - DNA, 60 bp, Artificial
  Synthetic oligonucleotide
gctacgatgttgcgaacggaagcatcatggatgcaactctcgccccacccactggcacct

SEQ ID NO: 120564 - DNA, 60 bp, Artificial
  Synthetic oligonucleotide
cgtccgcttaggctacgtcgatatgattcctgcattactacttttacaaccccgaatggc

SEQ ID NO: 120565 - DNA, 60 bp, Artificial
  Synthetic oligonucleotide
acttcattcattgcgcgggaagattatgacggcgctacggctgtgacgttctacgggaaa

SEQ ID NO: 120566 - DNA, 60 bp, Artificial
  Synthetic oligonucleotide
atcggcctcggctcctccatgtcactggatgacgtatccaccatgatctcgtactcaggc

SEQ ID NO: 120567 - DNA, 60 bp, Artificial
  Synthetic oligonucleotide
tacgggaaacggacgtttctgtcgcgcaaccggcttgatcgtctggtggacgtgcctgtc

SEQ ID NO: 120568 - DNA, 60 bp, Artificial
  Synthetic oligonucleotide
tcacctgtctaccagttgttccccacgaaccctgccccggtgactcagctcctttggcta

SEQ ID NO: 120569 - DNA, 60 bp, Artificial
  Synthetic oligonucleotide
tctcgtactcaggcttaacgcccattctgcacattgacctgacccagcggcccatggatg

SEQ ID NO: 120570 - DNA, 60 bp, Artificial
  Synthetic oligonucleotide
agttcaggctgttatccacgtggccgcgcccgtccagcagacgaccgttattggttccat

SEQ ID NO: 120571 - DNA, 60 bp, Artificial
  Synthetic oligonucleotide
gcccagattgctcctcagtcgctggttgatttgtggtaccggcccggagtgtcgcattct

SEQ ID NO: 120572 - DNA, 60 bp, Artificial
  Synthetic oligonucleotide
agcgcgcagcgatcgtcaccgcagcaaacgcgcgtgtgttacactacgtttacgacctct

SEQ ID NO: 120573 - DNA, 60 bp, Artificial
  Synthetic oligonucleotide
ttcagatccaagccttatccaccgccatcgaacccgcgcgtcagactgctgaagtgcctg

SEQ ID NO: 120574 - DNA, 60 bp, Artificial
  Synthetic oligonucleotide
tcatgctgaatggccaactgttcgtggacctggacccacttcctcccgtactcccacctg

SEQ ID NO: 120575 - DNA, 60 bp, Artificial
  Synthetic oligonucleotide
cgccccagacgctatccttgcggccatccggctcgtctatcctgccgctacgacctcctg

SEQ ID NO: 120576 - DNA, 60 bp, Artificial
  Synthetic oligonucleotide
tacgacctcctggctgacggcttcctccacgatggactggactgagtacgtcatcggcct

SEQ ID NO: 120577 - DNA, 60 bp, Artificial
  Synthetic oligonucleotide
atacgcggactggacaatatattttcaacggcggacaacggaccgagccctacgccgccc

SEQ ID NO: 120578 - DNA, 58 bp, Artificial
  Synthetic oligonucleotide
tcactaacgccggtaatgacgctgctgtcgtgtgtgatgccttctaccgtctcggtgt

SEQ ID NO: 120579 - DNA, 60 bp, Artificial
  Synthetic oligonucleotide
tatctcccgttcctatttctagctcggaacgcccgtgatccgattgcccctcttgtcacg

SEQ ID NO: 120580 - DNA, 60 bp, Artificial
  Synthetic oligonucleotide
cggcttgatcacgtcttcgttcctcaaccagcggccgatcgatggctatctcccgttcct

SEQ ID NO: 120581 - DNA, 60 bp, Artificial
  Synthetic oligonucleotide
gcgcttaaaagtggaaccgtccccggtgtgcccataccgtctaagatatcacagtttggc

SEQ ID NO: 120582 - DNA, 60 bp, Artificial
  Synthetic oligonucleotide
ccacagttcgttcctgatgacctgagtctctcccagtggaaggaatggatcaccgagcgc

SEQ ID NO: 120583 - DNA, 60 bp, Artificial
  Synthetic oligonucleotide
ggcctccatccttcaaacgtttcctcccctcaacgcctggagcccttcaccacagttcgt

SEQ ID NO: 120584 - DNA, 60 bp, Artificial
  Synthetic oligonucleotide
aaggaatggatcaccgagcgcatgcgggcacttgcaaccgttctgcaacgagctcatccc

SEQ ID NO: 120585 - DNA, 60 bp, Artificial
  Synthetic oligonucleotide
ggcgacccagccaacgtttggccagttaacacgctgcccggtcttcctcgcgattatttc

SEQ ID NO: 120586 - DNA, 60 bp, Artificial
  Synthetic oligonucleotide
tattcaccgttcgccctcacaggtggcgctttcttccaagcacgagacatcaccggcgac

SEQ ID NO: 120587 - DNA, 60 bp, Artificial
  Synthetic oligonucleotide
ttcgtacgagcttaacgtcctgccctctctcccaatctattcaccgttcgccctcacagg

SEQ ID NO: 120588 - DNA, 60 bp, Artificial
  Synthetic oligonucleotide
ccccattgccgttcctcccgcagtataggcaagccaccgtgaataagaacaatgctcagg

SEQ ID NO: 120589 - DNA, 60 bp, Artificial
  Synthetic oligonucleotide
ttcaccatcggcaccactacttacgttcccgacacgaagaccccattgccgttcctcccg

SEQ ID NO: 120590 - DNA, 60 bp, Artificial
  Synthetic oligonucleotide
tattagcggttcagggctgccagatgaccgttcaagttgcggatcatccgacgatgagtg

SEQ ID NO: 120591 - DNA, 60 bp, Artificial
  Synthetic oligonucleotide
cgaccgccgtcgctcgtatcgaccagacctatcacgtcgtcatgaatggttcacccgatg

SEQ ID NO: 120592 - DNA, 60 bp, Artificial
  Synthetic oligonucleotide
atctcgtatcctcaccagccctcaggcaattcctcgtgcagctattcgatcgctccacct

SEQ ID NO: 120593 - DNA, 60 bp, Artificial
  Synthetic oligonucleotide
tgttcctcctgttcgtcagtcgcgctacagcgggcaatctcgtatcctcaccagccctca

SEQ ID NO: 120594 - DNA, 60 bp, Artificial
  Synthetic oligonucleotide
ttaatgccaccagccacctccgtgacgatgattgactcccggcctcctgcagaatctctc

SEQ ID NO: 120595 - DNA, 60 bp, Artificial
  Synthetic oligonucleotide
ttcccactcctgccttctggacccaattgttccggaaccatgccactgacgctcgtgctt

SEQ ID NO: 120596 - DNA, 60 bp, Artificial
  Synthetic oligonucleotide
tctcactgcattcctgcgtttgattcaaccgagcaacgtccagcatctctggctgcagct

SEQ ID NO: 120597 - DNA, 60 bp, Artificial
  Synthetic oligonucleotide
ttctcattgggcgctgccttcgctggtgcgggtcaagacttggtcgtcggtctcactgca

SEQ ID NO: 120598 - DNA, 60 bp, Artificial
  Synthetic oligonucleotide
tccttccaccatcggacctctagctgtcgtgtgggacccggtcttgtcacgatgggattt

SEQ ID NO: 120599 - DNA, 60 bp, Artificial
  Synthetic oligonucleotide
attggttccatggccggcgtccaggtttttacagccgacggcgtaaacgctccttccacc

SEQ ID NO: 120600 - DNA, 60 bp, Artificial
  Synthetic oligonucleotide
caacactaacttcaacggcatccctgcccggtcttatcgagatagatacgcggactggac

SEQ ID NO: 120601 - DNA, 60 bp, Artificial
  Synthetic oligonucleotide
gtccggacctgcctactgttaacatcacccccgagattcagaccctggcctaccagctag

SEQ ID NO: 120602 - DNA, 60 bp, Artificial
  Synthetic oligonucleotide
ccatcaccccgaatcagccaggtgtcctcgacgtggtagtggatcataatggagttcttc

SEQ ID NO: 120603 - DNA, 60 bp, Artificial
  Synthetic oligonucleotide
accccctgccaccattgtcatcacctttcctcaggcggctaaccgcgacttcactaacgc

SEQ ID NO: 120604 - DNA, 60 bp, Artificial
  Synthetic oligonucleotide
aatgggtggcgaatcctcacgactccctcacagccatcttctcattgggcgctgccttcg

SEQ ID NO: 120605 - DNA, 60 bp, Artificial
  Synthetic oligonucleotide
ggccgtgaccaacattgccctgtccatgacgactgccggaggtttaactgtcgttaaggt

SEQ ID NO: 120606 - DNA, 50 bp, Artificial
  Synthetic oligonucleotide
agctttgacgtccctgtttgagaatgactctgtgtgattggtttatttgc

SEQ ID NO: 120607 - DNA, 60 bp, Artificial
  Synthetic oligonucleotide
tctaacgcgcctcgtcgtctctcgagatggcgtgcttacataccgataagaagttccgct

SEQ ID NO: 120608 - DNA, 60 bp, Artificial
  Synthetic oligonucleotide
cgcgcctcgtcgtctctcgagatggcgtgcttacataccgataagaagttccgctctagc

SEQ ID NO: 120609 - DNA, 60 bp, Artificial
  Synthetic oligonucleotide
aagttccgctctagctaatgcataagagacttgcatcctagtagtatcgaagctttgacg

SEQ ID NO: 120610 - DNA, 60 bp, Artificial
  Synthetic oligonucleotide
cgctctagctaatgcataagagacttgcatcctagtagtatcgaagctttgacgtccctg

SEQ ID NO: 120611 - DNA, 60 bp, Artificial
  Synthetic oligonucleotide
ttaaaaatctttcactatacagcgtctgccggtttttgggggtgaccccttctaacgcgc

SEQ ID NO: 120612 - DNA, 60 bp, Artificial
  Synthetic oligonucleotide
gagttaggaccaagagaaaatgtagcgattgtacaagtcggtggctcagatgtgttagat

SEQ ID NO: 120613 - DNA, 60 bp, Artificial
  Synthetic oligonucleotide
gccacgagcggatctgttttatttgaccaatcggtgcaatatgggattggagcctagtat

SEQ ID NO: 120614 - DNA, 60 bp, Artificial
  Synthetic oligonucleotide
agccacgagcggatctgttttatttgaccaatcggtgcaatatgggattggagcctagta

SEQ ID NO: 120615 - DNA, 60 bp, Artificial
  Synthetic oligonucleotide
acattaatgtccggcgcttatgtcacagatctgttttggtggtttaagatgattctagat

SEQ ID NO: 120616 - DNA, 60 bp, Artificial
  Synthetic oligonucleotide
agaggtctgcggcggaagtaattgagtggaaggagcagatggccgagcgtccatggcatg

SEQ ID NO: 120617 - DNA, 60 bp, Artificial
  Synthetic oligonucleotide
acatgccatggacgctcggccatctgctccttccactcaattacttccgccgcagacctc

SEQ ID NO: 120618 - DNA, 60 bp, Artificial
  Synthetic oligonucleotide
taatcgaatggaaggagcagatggccgagcgtccatggcacgtaagaaatgatctaattg

SEQ ID NO: 120619 - DNA, 60 bp, Artificial
  Synthetic oligonucleotide
cgctcgtggctcatcactttcgtgtaacaatccattcttacgtacgatatgaaggtgttc

SEQ ID NO: 120620 - DNA, 60 bp, Artificial
  Synthetic oligonucleotide
atgctcccggaaccaaggttagatgatatagaaagattcaggcaagaaggattctactac

SEQ ID NO: 120621 - DNA, 60 bp, Artificial
  Synthetic oligonucleotide
gtaccgtgatatgctcccggaaccaaggttagatgatatagaaagattcaggcaagaagg

SEQ ID NO: 120622 - DNA, 60 bp, Artificial
  Synthetic oligonucleotide
cttgcctgaatctttctatatcatctaaccttggttccgggagcatatcacggtacatat

SEQ ID NO: 120623 - DNA, 60 bp, Artificial
  Synthetic oligonucleotide
tatatgtaccgtgatatgctcccggaaccaaggttagatgatatagaaagattcaggcaa

SEQ ID NO: 120624 - DNA, 60 bp, Artificial
  Synthetic oligonucleotide
gttcaatatacgtatgaggtggcaagattgcaggcaaatatgggacaactacgagcggcg

SEQ ID NO: 120625 - DNA, 60 bp, Artificial
  Synthetic oligonucleotide
gttcaatatacgtatgaggtggcaagattcgaggcaaatatgggacaactacgagcggcg

SEQ ID NO: 120626 - DNA, 60 bp, Artificial
  Synthetic oligonucleotide
tgtcccatatttgcctgcaatcttgccacctcatacgtatattgaaccactcgatcgatc

SEQ ID NO: 120627 - DNA, 60 bp, Artificial
  Synthetic oligonucleotide
gctcccggaaccaaggttagatgatatagaaagattcaggcaagaaggattctactacac

SEQ ID NO: 120628 - DNA, 60 bp, Artificial
  Synthetic oligonucleotide
catccttcatcatccataattctccgtaacgccgctcgtagttgtcccatatttgcctgc

SEQ ID NO: 120629 - DNA, 60 bp, Artificial
  Synthetic oligonucleotide
cgtatgaggtggcacgattgcaggcaaatatgggacaactacgagcggcgttacggagga

SEQ ID NO: 120630 - DNA, 60 bp, Artificial
  Synthetic oligonucleotide
gaaagcagttatggaagtatcaccagagcctgtacgagcgatcatggatttagcgcattc

SEQ ID NO: 120631 - DNA, 60 bp, Artificial
  Synthetic oligonucleotide
gaaagctgttatggaagtatcaccagagcctgtacgagcgatcatggatttagcgcattc

SEQ ID NO: 120632 - DNA, 60 bp, Artificial
  Synthetic oligonucleotide
gcgccgctaatcgagtcggtctatgcctcagaattgacagttatgaagacagatatgcag

SEQ ID NO: 120633 - DNA, 60 bp, Artificial
  Synthetic oligonucleotide
tgcgccgctaatcgaatcggtctatgcctcagaattgacagttatgaagacagatatgca

SEQ ID NO: 120634 - DNA, 60 bp, Artificial
  Synthetic oligonucleotide
cgagtcggtctatgcctcagaattgacagttatgaagacagatatgcagcagatggccct

SEQ ID NO: 120635 - DNA, 60 bp, Artificial
  Synthetic oligonucleotide
cgaatcggtctatgcctcagaattgacagttatgaagacagatatgcagcagatggccct

SEQ ID NO: 120636 - DNA, 60 bp, Artificial
  Synthetic oligonucleotide
ctgggaaacggcgctgtaacagggccatctgctgcatatctgtcttcataactgtcaatt

SEQ ID NO: 120637 - DNA, 60 bp, Artificial
  Synthetic oligonucleotide
cggcgctgtaacagggccatctgctgcatatctgtcttcataactgtcaattctgaggca

SEQ ID NO: 120638 - DNA, 60 bp, Artificial
  Synthetic oligonucleotide
gtttattcataaatactttggtcatcacataagtaggattgattaaaaccaaggaatcag

SEQ ID NO: 120639 - DNA, 60 bp, Artificial
  Synthetic oligonucleotide
gcggcgttacggaggattatggatgatgaaggatgggttagattcggaggtgtactacga

SEQ ID NO: 120640 - DNA, 60 bp, Artificial
  Synthetic oligonucleotide
atgggttagattcggaggtgtactacgaactgtacggattaaattcttcgattcacgccc

SEQ ID NO: 120641 - DNA, 60 bp, Artificial
  Synthetic oligonucleotide
cgggcgtgaatcgaagaatttaatccgtacagttcgtagtacacctccgaatctaaccca

SEQ ID NO: 120642 - DNA, 60 bp, Artificial
  Synthetic oligonucleotide
aatatgggacaactacgagcggcgttacggagaattatggatgatgaaagatgggttaga

SEQ ID NO: 120643 - DNA, 60 bp, Artificial
  Synthetic oligonucleotide
aatatgggacaactacgagcggcgttacggagaattatggatgatgaaggatgggttaga

SEQ ID NO: 120644 - DNA, 60 bp, Artificial
  Synthetic oligonucleotide
atctaacccatccttcatcatccataattctccgtaacgccgctcgtagttgtcccatat

SEQ ID NO: 120645 - DNA, 60 bp, Artificial
  Synthetic oligonucleotide
gggacaactacgagcggcgttacggagaattatggatgatgaaggatgggttagattcgg

SEQ ID NO: 120646 - DNA, 60 bp, Artificial
  Synthetic oligonucleotide
gattcggaggtgtactacgaactgtacggattaaattcttcgattcacgcccgcccgaag

SEQ ID NO: 120647 - DNA, 60 bp, Artificial
  Synthetic oligonucleotide
gattcggaggtgtactacgaactgtacggattaaattcttcgattcactcccgcccgaag

SEQ ID NO: 120648 - DNA, 60 bp, Artificial
  Synthetic oligonucleotide
tgatgctgactgatcaggtgtatatgtaccgtgatatgctcccggaaccaaggttagatg

SEQ ID NO: 120649 - DNA, 60 bp, Artificial
  Synthetic oligonucleotide
ctatatcatctaaccttggttccgggagcatatcacggtacatatacacctgatcagtca

SEQ ID NO: 120650 - DNA, 60 bp, Artificial
  Synthetic oligonucleotide
tcggatattgataaagctatgtgaatgcgctaaatccatgatcgctcgtacaggctctgg

SEQ ID NO: 120651 - DNA, 60 bp, Artificial
  Synthetic oligonucleotide
gcagaattccatgaagttggtgctagaagaagaagcttgggcggtggctaatgatttcga

SEQ ID NO: 120652 - DNA, 60 bp, Artificial
  Synthetic oligonucleotide
gttatggaagtatcaccagagcctgtacgagcgatcatggatttagcgcattcacatagc

SEQ ID NO: 120653 - DNA, 60 bp, Artificial
  Synthetic oligonucleotide
gctatgtgaatgcgctaaatccatgatcgctcgtacaggctctggtgatacttccataac

SEQ ID NO: 120654 - DNA, 60 bp, Artificial
  Synthetic oligonucleotide
gggcggtggctaatgatttcgaagaattaatgctgactgatcaggtgtatatgtaccgtg

SEQ ID NO: 120655 - DNA, 60 bp, Artificial
  Synthetic oligonucleotide
atgatttcgaagaattgatgctgactgatcaggtgtatatgtaccgtgatatgctcccgg

SEQ ID NO: 120656 - DNA, 60 bp, Artificial
  Synthetic oligonucleotide
cacctgatcagtcagcattaattcttcgaaatcattagccaccgcccaagcttcttcttc

SEQ ID NO: 120657 - DNA, 60 bp, Artificial
  Synthetic oligonucleotide
cttgggcggtggctaatgatttcgaagaattaatgctgactgatcaggtgtatatgtacc

SEQ ID NO: 120658 - DNA, 51 bp, Artificial
  Synthetic oligonucleotide
agggcggattgacttatgccacaatcaaatatgcgaatgataccacaatat

SEQ ID NO: 120659 - DNA, 60 bp, Artificial
  Synthetic oligonucleotide
gagtattcaaatttacctgattccttggttttaatcaatcctacttatgtgatgaccaaa

SEQ ID NO: 120660 - DNA, 60 bp, Artificial
  Synthetic oligonucleotide
acaaatgagaagggcggattgacttatgccacaatcaaatatgcgaatgataccacaata

SEQ ID NO: 120661 - DNA, 60 bp, Artificial
  Synthetic oligonucleotide
atattgtggtatcattcgcatatttgattgtggcataagtcaatccgcccttctcatttg

SEQ ID NO: 120662 - DNA, 52 bp, Artificial
  Synthetic oligonucleotide
aagggcggattgacttatgccacaatcaaatatgcgaatgataccacaatat

SEQ ID NO: 120663 - DNA, 60 bp, Artificial
  Synthetic oligonucleotide
attcggaggtgtactacgaactgtacggattaaattcttcgattcacgcccgcccgaaga

SEQ ID NO: 120664 - DNA, 60 bp, Artificial
  Synthetic oligonucleotide
gaggtgtactacgaactgtacggattaaattcttcgattcacgcccgcccgaagaaatcc

SEQ ID NO: 120665 - DNA, 60 bp, Artificial
  Synthetic oligonucleotide
gtctggtagtcaaaaggtaatgcttggaggatttcttcgggcgggcgtgaatcgaagaat

SEQ ID NO: 120666 - DNA, 60 bp, Artificial
  Synthetic oligonucleotide
gtggtatcattcgcatatttgattgtggcataagtcaatccgcccttctcatttgtctgg

SEQ ID NO: 120667 - DNA, 60 bp, Artificial
  Synthetic oligonucleotide
cggggtagttccgatacagggtccaataaatagagctgttgcacaaaacgcctacatgtg

SEQ ID NO: 120668 - DNA, 60 bp, Artificial
  Synthetic oligonucleotide
acacagcatgctcgcgaaacacgcagcaagacataatggcaccttaattaatccacgcat

SEQ ID NO: 120669 - DNA, 60 bp, Artificial
  Synthetic oligonucleotide
atccacgcatgtacgctgatatgattacgttaggtaatacaaaagtaacagttactaaag

SEQ ID NO: 120670 - DNA, 60 bp, Artificial
  Synthetic oligonucleotide
gctcgcgaaacacgcagcaagacataatggcaccttaattaatccacgcatgtacgctga

SEQ ID NO: 120671 - DNA, 60 bp, Artificial
  Synthetic oligonucleotide
gctgatatgattacgttaggtaatacaaaagtaacagttactaaaggtacacccaaggcg

SEQ ID NO: 120672 - DNA, 60 bp, Artificial
  Synthetic oligonucleotide
acaggtatctatggtgaagtaacgatgatggtcaatttatccaaacgtgatctagggtta

SEQ ID NO: 120673 - DNA, 60 bp, Artificial
  Synthetic oligonucleotide
gtgaagtaacgatgatggtcaatttatccaaacgtgatctagggttagatgttggagacg

SEQ ID NO: 120674 - DNA, 60 bp, Artificial
  Synthetic oligonucleotide
tctagggttagatgttggagacgattatctgaaagagtacaaaaagctgttgttttacgg

SEQ ID NO: 120675 - DNA, 60 bp, Artificial
  Synthetic oligonucleotide
tgttttacggggtaatcactgacgccatcccttcgggcatatcagcaagatctacaatca

SEQ ID NO: 120676 - DNA, 60 bp, Artificial
  Synthetic oligonucleotide
ggggtaatcactgacgccatcccttcgggcatatcagcaagatctacaatcatgaaaatc

SEQ ID NO: 120677 - DNA, 60 bp, Artificial
  Synthetic oligonucleotide
caagcggtggcgcattagcagtgctttctaagttcttagaggcagtggtttccactaatg

SEQ ID NO: 120678 - DNA, 60 bp, Artificial
  Synthetic oligonucleotide
tccactaatgtaatcaacgctacgctagttgtatacgcagagaaaggcgcaggtaaaaca

SEQ ID NO: 120679 - DNA, 60 bp, Artificial
  Synthetic oligonucleotide
caacgctacgctagttgtatacgcagagaaaggcgcaggtaaaacatcctttctatcgac

SEQ ID NO: 120680 - DNA, 60 bp, Artificial
  Synthetic oligonucleotide
aggtaaaacatcctttctatcgacatatgctgaacagctgagtctagcaagtggtcaagt

SEQ ID NO: 120681 - DNA, 60 bp, Artificial
  Synthetic oligonucleotide
gacactacgcaagcgatgagagatagacaacgaggtggtgtggtacagctatttttgcga

SEQ ID NO: 120682 - DNA, 60 bp, Artificial
  Synthetic oligonucleotide
atgccacgattgcacgtacggacactacagtactattgagaacgattaacgacactacgc

SEQ ID NO: 120683 - DNA, 60 bp, Artificial
  Synthetic oligonucleotide
cacgtacggacactacagtactattgagaacgattaacgacactacgcaagcgatgagag

SEQ ID NO: 120684 - DNA, 60 bp, Artificial
  Synthetic oligonucleotide
atttttgcgagatacatactataggcttcttccagctttgcatacgacggtgtatccttt

SEQ ID NO: 120685 - DNA, 60 bp, Artificial
  Synthetic oligonucleotide
atactataggcttcttccagctttgcatacgacggtgtatcctttcgaaatgttggagtc

SEQ ID NO: 120686 - DNA, 60 bp, Artificial
  Synthetic oligonucleotide
cctttctatcgacatatgctgaacagctgagtctagcaagtggtcaagttgttggacacc

SEQ ID NO: 120687 - DNA, 60 bp, Artificial
  Synthetic oligonucleotide
ttcccacttggcaaggcatagctgacttcagtgatacttacttacgttcatatttcaaac

SEQ ID NO: 120688 - DNA, 60 bp, Artificial
  Synthetic oligonucleotide
atactgatgacattgtcacatataaagcgttgactgagatgtccacactcatcgaaagct

SEQ ID NO: 120689 - DNA, 60 bp, Artificial
  Synthetic oligonucleotide
ctcatcgaaagcttccgcttaccgtctggtcttgcactaatcatattcgatgatgagaag

SEQ ID NO: 120690 - DNA, 60 bp, Artificial
  Synthetic oligonucleotide
catattcaataatacaggaagagaagatgcagtaattaggaaattgtatggttatgggga

SEQ ID NO: 120691 - DNA, 60 bp, Artificial
  Synthetic oligonucleotide
aggaagagaagatgcagtaattaggaaattgtatggttatggggagtacgtctttattag

SEQ ID NO: 120692 - DNA, 60 bp, Artificial
  Synthetic oligonucleotide
tcaaacttagcggcacctcaaaagtacaatctgtcaccgatgactagaagcatattcaat

SEQ ID NO: 120693 - DNA, 60 bp, Artificial
  Synthetic oligonucleotide
gcggcacctcaaaagtacaatctgtcaccgatgactagaagcatattcaataatacagga

SEQ ID NO: 120694 - DNA, 60 bp, Artificial
  Synthetic oligonucleotide
gttatggggagtacgtctttattaggtacgagggttgtttgatcacatggacaggtatct

SEQ ID NO: 120695 - DNA, 60 bp, Artificial
  Synthetic oligonucleotide
gggagtacgtctttattaggtacgagggttgtttgatcacatggacaggtatctatggtg

SEQ ID NO: 120696 - DNA, 60 bp, Artificial
  Synthetic oligonucleotide
cgaacactgatagttgagggccactttaacgcacaagatgccacgattgcacgtacggac

SEQ ID NO: 120697 - DNA, 60 bp, Artificial
  Synthetic oligonucleotide
taagactacgccacgaacactgatagttgagggccactttaacgcacaagatgccacgat

SEQ ID NO: 120698 - DNA, 60 bp, Artificial
  Synthetic oligonucleotide
taagatgatggacgaaatgaacgaagttctcatcgctcagttggaaaatgctgacacaca

SEQ ID NO: 120699 - DNA, 60 bp, Artificial
  Synthetic oligonucleotide
tgtgagaaagaagattaagatgatggacgaaatgaacgaagttctcatcgctcagttgga

SEQ ID NO: 120700 - DNA, 60 bp, Artificial
  Synthetic oligonucleotide
ggtataagtgaggtagcgcaatatgaactgctaagtgtgagaaagaagattaagatgatg

SEQ ID NO: 120701 - DNA, 60 bp, Artificial
  Synthetic oligonucleotide
ttactaatatcacatggtataagtgaggtagcgcaatatgaactgctaagtgtgagaaag

SEQ ID NO: 120702 - DNA, 60 bp, Artificial
  Synthetic oligonucleotide
ctcttgatacagacgataacgagagttattatgagcagaaagcgagtgagttactaatat

SEQ ID NO: 120703 - DNA, 60 bp, Artificial
  Synthetic oligonucleotide
gtggtcaagttgttggacacctatcctcagacgcttatggaagatggctagcgaaaaaca

SEQ ID NO: 120704 - DNA, 60 bp, Artificial
  Synthetic oligonucleotide
aagatagggaggaacttcgctttgaaggcggttgcgactccagaaccgaagggatatgtg

SEQ ID NO: 120705 - DNA, 60 bp, Artificial
  Synthetic oligonucleotide
gtttgatgatttcggcggatggggtagagggtacgcaagaacgatgggaagagtggaaat

SEQ ID NO: 120706 - DNA, 60 bp, Artificial
  Synthetic oligonucleotide
gaacgatgggaagagtggaaatttgaaacgatctcatgcgtaccaatggccacggttcta

SEQ ID NO: 120707 - DNA, 60 bp, Artificial
  Synthetic oligonucleotide
gcggacaaatagcagcaagacaatcattgccatattgtcaaatcaagatagggaggaact

SEQ ID NO: 120708 - DNA, 60 bp, Artificial
  Synthetic oligonucleotide
aaatgatgtcattagtttgatgatttcggcggatggggtagagggtacgcaagaacgatg

SEQ ID NO: 120709 - DNA, 60 bp, Artificial
  Synthetic oligonucleotide
cactatgcggacaaatagcagcaagacaatcattgccatattgtcaaatcaagataggga

SEQ ID NO: 120710 - DNA, 60 bp, Artificial
  Synthetic oligonucleotide
gggaggaacttcgctttgaaggcggttgcgactccagaaccgaagggatatgtgttggaa

SEQ ID NO: 120711 - DNA, 60 bp, Artificial
  Synthetic oligonucleotide
cagatgaagaccagaacctagctggcggcgtagtaaatgattggacgtgcgagactcaag

SEQ ID NO: 120712 - DNA, 60 bp, Artificial
  Synthetic oligonucleotide
gaacagccagattcagatgaagaccagaacctagctggcggcgtagtaaatgattggacg

SEQ ID NO: 120713 - DNA, 60 bp, Artificial
  Synthetic oligonucleotide
gtgcggttgaacaacctcataaaccagcgttcaaaactgagcgttggcatgaacagccag

SEQ ID NO: 120714 - DNA, 60 bp, Artificial
  Synthetic oligonucleotide
gccacggttctaaatataaacggagcgttggtggacgcggaaatcaaagtgtcgaagggt

SEQ ID NO: 120715 - DNA, 60 bp, Artificial
  Synthetic oligonucleotide
ttcagaacgcaagaggtggaatggaagaaacccgatatgggtgagattataattgaagaa

SEQ ID NO: 120716 - DNA, 60 bp, Artificial
  Synthetic oligonucleotide
aagaacgatgggaagagtggaaatttgaaacgatctcatgcgtaccaatggccacggttc

SEQ ID NO: 120717 - DNA, 60 bp, Artificial
  Synthetic oligonucleotide
aggcgctggagattagattggcggagcaacgacagagaatcgaagcattcaaattggata

SEQ ID NO: 120718 - DNA, 60 bp, Artificial
  Synthetic oligonucleotide
gattggcggagcaacgacagagaatcgaagcattcaaattggatagtgagaggaagaggg

SEQ ID NO: 120719 - DNA, 60 bp, Artificial
  Synthetic oligonucleotide
tgattggacgtgcgagactcaagaacgcgatcaggaggctgaacggcgtgaggcgctgga

SEQ ID NO: 120720 - DNA, 60 bp, Artificial
  Synthetic oligonucleotide
gactcaagaacgcgatcaggaggctgaacggcgtgaggcgctggagattagattggcgga

SEQ ID NO: 120721 - DNA, 60 bp, Artificial
  Synthetic oligonucleotide
aattatggacattacacagtcgctcaaaatgggcactaagctggctgcgccgactgtgta

SEQ ID NO: 120722 - DNA, 60 bp, Artificial
  Synthetic oligonucleotide
agagatcatcgcgggatggaagttgcggaaccagaagtgttaggcgtggaattcaagaac

SEQ ID NO: 120723 - DNA, 60 bp, Artificial
  Synthetic oligonucleotide
gatttaagggtggtgggtgtcttacgtgcgtgtccctgtggtgttagtataggtggcggg

SEQ ID NO: 120724 - DNA, 60 bp, Artificial
  Synthetic oligonucleotide
caattacgcaatgaatagtaatcatctagtgtcatatgctccgttcttcgtaccaaacga

SEQ ID NO: 120725 - DNA, 60 bp, Artificial
  Synthetic oligonucleotide
gcagaaatcatctgtgaaggtgcagcctatcgtccaatcgatgttgacaattacgcaatg

SEQ ID NO: 120726 - DNA, 60 bp, Artificial
  Synthetic oligonucleotide
cccctatccaattatatcaatacggtgtgacgccattcatatcagcagaaatcatctgtg

SEQ ID NO: 120727 - DNA, 60 bp, Artificial
  Synthetic oligonucleotide
caccaccccctatccaattatatcaatacggtgtgacgccattcatatcagcagaaatca

SEQ ID NO: 120728 - DNA, 60 bp, Artificial
  Synthetic oligonucleotide
tcagcagaaatcatctgtgaaggtgcagcctatcgtccaatcgatgttgacaattacgca

SEQ ID NO: 120729 - DNA, 60 bp, Artificial
  Synthetic oligonucleotide
ccaattatatcaatacggtgtgacgccattcatatcagcagaaatcatctgtgaaggtgc

SEQ ID NO: 120730 - DNA, 60 bp, Artificial
  Synthetic oligonucleotide
catcaccaccccctatccaattatatcaatacggtgtgacgccattcatatcagcagaaa

SEQ ID NO: 120731 - DNA, 60 bp, Artificial
  Synthetic oligonucleotide
ccagatgaaattcgtgctgattggacgtctatgttacggacaaactacatcaccaccccc

SEQ ID NO: 120732 - DNA, 60 bp, Artificial
  Synthetic oligonucleotide
tgccagcatacacgaagttgattcatgaactgaggaccaagacgcacgctaaaattacga

SEQ ID NO: 120733 - DNA, 60 bp, Artificial
  Synthetic oligonucleotide
cgcatcgtttaaatttgccagcatacacgaagttgattcatgaactgaggaccaagacgc

SEQ ID NO: 120734 - DNA, 60 bp, Artificial
  Synthetic oligonucleotide
gacgcacgctaaaattacgatttccctctcaaccgaaagtcagatacatatggtatgggt

SEQ ID NO: 120735 - DNA, 60 bp, Artificial
  Synthetic oligonucleotide
accaagacgcacgctaaaattacgatttccctctcaaccgaaagtcagatacatatggta

SEQ ID NO: 120736 - DNA, 60 bp, Artificial
  Synthetic oligonucleotide
acatatggtatgggtaaaatcaggtcttgttttctttacgcccagcgcatctcacccagc

SEQ ID NO: 120737 - DNA, 60 bp, Artificial
  Synthetic oligonucleotide
ggtatgggtaaaatcaggtcttgttttctttacgcccagcgcatctcacccagcatatgt

SEQ ID NO: 120738 - DNA, 60 bp, Artificial
  Synthetic oligonucleotide
agatgtatcacggcagagtctcgcgacttctgcaaccagatgaaattcgtgctgattgga

SEQ ID NO: 120739 - DNA, 60 bp, Artificial
  Synthetic oligonucleotide
caaccagatgaaattcgtgctgattggacgtctatgttacggacaaactacatcaccacc

SEQ ID NO: 120740 - DNA, 60 bp, Artificial
  Synthetic oligonucleotide
caaacgatactaagcctggaagccgtattgatttattgatggtcaaccaccttaagaagt

SEQ ID NO: 120741 - DNA, 60 bp, Artificial
  Synthetic oligonucleotide
cttctcgccctgagcgtgcacaaaacgagacttcagctagtcaaattatgccgatgtctg

SEQ ID NO: 120742 - DNA, 60 bp, Artificial
  Synthetic oligonucleotide
cgtatcagagtaatgtcgttggtgggtgtagtgtaactgttatgatagtgtggttatggg

SEQ ID NO: 120743 - DNA, 60 bp, Artificial
  Synthetic oligonucleotide
ctaagcctggaagccgtattgatttattgatggtcaaccaccttaagaagttcaacttga

SEQ ID NO: 120744 - DNA, 60 bp, Artificial
  Synthetic oligonucleotide
taatcatctagtgtcatatgctccgttcttcgtaccaaacgatactaagcctggaagccg

SEQ ID NO: 120745 - DNA, 58 bp, Artificial
  Synthetic oligonucleotide
ctcacccagcatatgtaaatttcgcatcctcgaacagacttaccgatgtgccagcact

SEQ ID NO: 120746 - DNA, 60 bp, Artificial
  Synthetic oligonucleotide
gaaagatggagcgttaagcgttctgaatgatctgagcaaatgtgcgatcactttcatcaa

SEQ ID NO: 120747 - DNA, 60 bp, Artificial
  Synthetic oligonucleotide
cgttaagcgttctgaatgatctgagcaaatgtgcgatcactttcatcaatcaatgcgagg

SEQ ID NO: 120748 - DNA, 60 bp, Artificial
  Synthetic oligonucleotide
taccaaacgatactaagcctggaagccgtattgatttattgatggtcaaccaccttaaga

SEQ ID NO: 120749 - DNA, 60 bp, Artificial
  Synthetic oligonucleotide
aaggagatgtacaatagatgtatcacggcaggggttctcgcgacttcttgcaaccagatg

SEQ ID NO: 120750 - DNA, 60 bp, Artificial
  Synthetic oligonucleotide
gcgaggatacgttcaaaagtggcaccaatttaaacaaggagatgtacaatagatgtatca

SEQ ID NO: 120751 - DNA, 60 bp, Artificial
  Synthetic oligonucleotide
tagtaatcatctagtgtcatatgctccgttcttcgtaccaaacgatactaagcctggaag

SEQ ID NO: 120752 - DNA, 60 bp, Artificial
  Synthetic oligonucleotide
tagtgtaatggtatcttctcgccctgagcgtgcacaaaacgagacttcagctagtcaaat

SEQ ID NO: 120753 - DNA, 60 bp, Artificial
  Synthetic oligonucleotide
acttgcttggagacacaggcccagggatatctagcgagcatggttacctcttaccaggtt

SEQ ID NO: 120754 - DNA, 60 bp, Artificial
  Synthetic oligonucleotide
gcgaggaactctcgtcgaggcccggacatcgtatggtcaagatggacgaggaccgactta

SEQ ID NO: 120755 - DNA, 60 bp, Artificial
  Synthetic oligonucleotide
ctcggaaacccgggcgtgtttagtggattcattaactcaattttggttgcaggtaccgga

SEQ ID NO: 120756 - DNA, 60 bp, Artificial
  Synthetic oligonucleotide
aattttggttgcaggtaccggaaacccgaatttccattctgacatcacagacttgcttgg

SEQ ID NO: 120757 - DNA, 60 bp, Artificial
  Synthetic oligonucleotide
taccggaaacccgaatttccattctgacatcacagacttgcttggagacacaggcccagg

SEQ ID NO: 120758 - DNA, 60 bp, Artificial
  Synthetic oligonucleotide
aaggtctacaagttgcagaaaacgcagtagcgcttacagccgataccttttcaccagacg

SEQ ID NO: 120759 - DNA, 60 bp, Artificial
  Synthetic oligonucleotide
gttgcagaaaacgcagtagcgcttacagccgataccttttcaccagacgtgtttggagca

SEQ ID NO: 120760 - DNA, 60 bp, Artificial
  Synthetic oligonucleotide
ctgatgagtcaaatacgccacaagggtactacccgatatgggacgggtatgagacaaata

SEQ ID NO: 120761 - DNA, 60 bp, Artificial
  Synthetic oligonucleotide
agtactcaaggtaggatcgaattgcatgccatagtgcgcgcaccccttgtggaagtaaca

SEQ ID NO: 120762 - DNA, 60 bp, Artificial
  Synthetic oligonucleotide
cattgtgaccttgacgatcgtaagttgattgtggagaaggttaagctaaacgttccgcgc

SEQ ID NO: 120763 - DNA, 56 bp, Artificial
  Synthetic oligonucleotide
ggactacaacacaatcgtggccgactcattgagaacagctttagtagcggctttca

SEQ ID NO: 120764 - DNA, 60 bp, Artificial
  Synthetic oligonucleotide
aataggcgatattaagttagttatcaacggtcagtctggcccggatctgaaatctgaaaa

SEQ ID NO: 120765 - DNA, 60 bp, Artificial
  Synthetic oligonucleotide
gccaggttcaagacagttgctgaaacagtacatttctaaggatggcaatttcaagcaaga

SEQ ID NO: 120766 - DNA, 60 bp, Artificial
  Synthetic oligonucleotide
gaaattggggacacagacaccttcaaacgtagagtgagtaacgccccatcaataggcgat

SEQ ID NO: 120767 - DNA, 60 bp, Artificial
  Synthetic oligonucleotide
gccattgcatgaatatccccataaatcaatgactctgagtggggaaacaaccatcaccgc

SEQ ID NO: 120768 - DNA, 60 bp, Artificial
  Synthetic oligonucleotide
tgtcaccaccgggtgaagatgataatctattaaggtactcaggtatcgaatatgatgata

SEQ ID NO: 120769 - DNA, 55 bp, Artificial
  Synthetic oligonucleotide
gatcgatcggtgaagtatgcgtaaaaagcaacgatgccccactagtttaaaagtc

SEQ ID NO: 120770 - DNA, 60 bp, Artificial
  Synthetic oligonucleotide
taaggatggcaatttcaagcaagatccgcaaaataagttggattggctttcggcaattaa

SEQ ID NO: 120771 - DNA, 60 bp, Artificial
  Synthetic oligonucleotide
gaccagagtcactaaaagccgaaatttccatgccttacgataggcgtaattcgggtgcgg

SEQ ID NO: 120772 - DNA, 60 bp, Artificial
  Synthetic oligonucleotide
tgaaatcgtgccagacccacttgaacaacagatacctgaacagctatttgaaggtctaca

SEQ ID NO: 120773 - DNA, 60 bp, Artificial
  Synthetic oligonucleotide
gaatggtcctctggccgtcgggtcggacaacttctgagagatcgatcggtgaagtatgcg

SEQ ID NO: 120774 - DNA, 57 bp, Artificial
  Synthetic oligonucleotide
taccaagatgaagtttgtattcgctggcatcatgaagtatgatcctaaaagcgccac

SEQ ID NO: 120775 - DNA, 60 bp, Artificial
  Synthetic oligonucleotide
tcaccgctaaagcacgtgatgaattcgttaacgtgaaatttgacacgaaaagcacaagtg

SEQ ID NO: 120776 - DNA, 60 bp, Artificial
  Synthetic oligonucleotide
ctcttctttaagacgtgcggatgcgaaatacgattatgaggtgctcatgcaatcagccgt

SEQ ID NO: 120777 - DNA, 60 bp, Artificial
  Synthetic oligonucleotide
caaagacaatcgaatggtcctctggccgtcgggtcggacaacttctgagagatcgatcgg

SEQ ID NO: 120778 - DNA, 60 bp, Artificial
  Synthetic oligonucleotide
agatcatcacccttgattatttgatccagtctacggtatatcagctgtgcactaaatctg

SEQ ID NO: 120779 - DNA, 60 bp, Artificial
  Synthetic oligonucleotide
cagctgtgcactaaatctgaatccatggatggagttcaatcggtcttatcgaaagttcac

SEQ ID NO: 120780 - DNA, 60 bp, Artificial
  Synthetic oligonucleotide
cgtatttgttcagacatctacacgtgctgcacgaattgttccacacacaaagaatacaaa

SEQ ID NO: 120781 - DNA, 60 bp, Artificial
  Synthetic oligonucleotide
gtcaagatggacgaggaccgacttatcagagcggaaaccaatcttatgtctcggctttgc

SEQ ID NO: 120782 - DNA, 60 bp, Artificial
  Synthetic oligonucleotide
actactgcctcctcgtattaacaaagcgaaatatatacccgtcagcctcagtgaagaggg

SEQ ID NO: 120783 - DNA, 60 bp, Artificial
  Synthetic oligonucleotide
tggaacacgtattacccgtcgtcaaccaattccactcgacatgctcgaacatgcgcgagg

SEQ ID NO: 120784 - DNA, 60 bp, Artificial
  Synthetic oligonucleotide
acacatcatattgtatatccaatcagcgaagatacttacagatcaacactactactgcct

SEQ ID NO: 120785 - DNA, 60 bp, Artificial
  Synthetic oligonucleotide
caacgtgaaatttatgataagagcgcgataacgagcatgcatgacaaactgtggttcaca

SEQ ID NO: 120786 - DNA, 60 bp, Artificial
  Synthetic oligonucleotide
catgctcgaacatgcgcgaggaactctcgtcgaggcccggacatcgtatggtcaagatgg

SEQ ID NO: 120787 - DNA, 60 bp, Artificial
  Synthetic oligonucleotide
ataggcgtaattcgggtgcggtaattcatggactacataatgtactcgagagatatgatc

SEQ ID NO: 120788 - DNA, 60 bp, Artificial
  Synthetic oligonucleotide
ggactctttaatgtcgcaccagtcgtctacaaaacgtcggaaattggggacacagacacc

SEQ ID NO: 120789 - DNA, 60 bp, Artificial
  Synthetic oligonucleotide
cactcgctaacggactctttaatgtcgcaccagtcgtctacaaaacgtcggaaattgggg

SEQ ID NO: 120790 - DNA, 60 bp, Artificial
  Synthetic oligonucleotide
cagggtcgttacgcctacgttatccgtcgtgtattcttacttcatgaaagagccaggttc

SEQ ID NO: 120791 - DNA, 60 bp, Artificial
  Synthetic oligonucleotide
tgcctgcagttacgttcgtctgaagatcatggtccaggggttgtaatcgaaaacatgcca

SEQ ID NO: 120792 - DNA, 60 bp, Artificial
  Synthetic oligonucleotide
gtgaagagggttacagggtcgttacgcctacgttatccgtcgtgtattcttacttcatga

SEQ ID NO: 120793 - DNA, 60 bp, Artificial
  Synthetic oligonucleotide
ggaagtaacatatgaatctgtcttggatgggacttacactcactgcattatctgtgataa

SEQ ID NO: 120794 - DNA, 54 bp, Artificial
  Synthetic oligonucleotide
ggtagggatataatcgcttccactaaactatcggacccaaagctctcacaggca

SEQ ID NO: 120795 - DNA, 60 bp, Artificial
  Synthetic oligonucleotide
ctaacatcttcgatggtgatgtaggcgtagccaggcttcgtaggagtccaatcagagtta

SEQ ID NO: 120796 - DNA, 60 bp, Artificial
  Synthetic oligonucleotide
tcggctttgcgaagcatgtttactggagacgttgcttcatcgctcattgcagatgagaga

SEQ ID NO: 120797 - DNA, 60 bp, Artificial
  Synthetic oligonucleotide
cggcaattaatcggtacgaacctcgaaatttcaaggaactcgtgaataatagtactcaag

SEQ ID NO: 120798 - DNA, 53 bp, Artificial
  Synthetic oligonucleotide
agatatgatcttgaacgtaaattggaaacgcatgatccttggacgggactgcc

SEQ ID NO: 120799 - DNA, 60 bp, Artificial
  Synthetic oligonucleotide
caaatgtgaacgagtcagtggcacctgacgacagaattgttgtggatatcatgcttgcgc

SEQ ID NO: 120800 - DNA, 60 bp, Artificial
  Synthetic oligonucleotide
gcaatttatacgtcaccgagcacatttaacggaactattcttggccttacttccccatct

SEQ ID NO: 120801 - DNA, 60 bp, Artificial
  Synthetic oligonucleotide
ggccttacttccccatctgggaaagaaattgttgagagagtggcagatatgtgcctgcac

SEQ ID NO: 120802 - DNA, 60 bp, Artificial
  Synthetic oligonucleotide
gtgcctgcacatgctattgtctcagcatgaagttgatttatatggtagggatataatcgc

SEQ ID NO: 120803 - DNA, 60 bp, Artificial
  Synthetic oligonucleotide
aatatgatgatgaaataatgcagcttgatgaaatagctgtaaaatggattcggaatcaga

SEQ ID NO: 120804 - DNA, 60 bp, Artificial
  Synthetic oligonucleotide
aaatatgatgatgaaataatgcagcttgatgagatagccgtaaaatggattcggaatcag

SEQ ID NO: 120805 - DNA, 60 bp, Artificial
  Synthetic oligonucleotide
ggatggtgaaatacgaaacataaggaactatcatcagcatggtgaaccgaaacggttggc

SEQ ID NO: 120806 - DNA, 60 bp, Artificial
  Synthetic oligonucleotide
gaaaacggatggtgaaatacgaaacataaggaactatcatcagcatggtgaaccgaaacg

SEQ ID NO: 120807 - DNA, 60 bp, Artificial
  Synthetic oligonucleotide
catccaaagggagaaaagatgataacaaggagattcggaggtggcgagataaagacgctg

SEQ ID NO: 120808 - DNA, 60 bp, Artificial
  Synthetic oligonucleotide
agatcgctatcacggtagagaaacgcgacttaattaaatatgatgatgaaataatgcagc

SEQ ID NO: 120809 - DNA, 53 bp, Artificial
  Synthetic oligonucleotide
acgcaatgcgaacagatatgatgtggcaactgcgatcaagttatctagatacg

SEQ ID NO: 120810 - DNA, 60 bp, Artificial
  Synthetic oligonucleotide
gaatggggtcggtttatcacgcaatgcgaacagatatgatgtggcaactgcgatcaaatt

SEQ ID NO: 120811 - DNA, 57 bp, Artificial
  Synthetic oligonucleotide
cgcaatgcgaacagatatgatgtggcaactgcgatcaagttatctagatacgtgtcc

SEQ ID NO: 120812 - DNA, 52 bp, Artificial
  Synthetic oligonucleotide
cgcaatgcgaacagatatgatgtggcaactgcgatcaagttatctagatacg

SEQ ID NO: 120813 - DNA, 60 bp, Artificial
  Synthetic oligonucleotide
gatcgctatcacggtagagaaacgcgacttgattaaatatgatgatgaaataatgcagct

SEQ ID NO: 120814 - DNA, 60 bp, Artificial
  Synthetic oligonucleotide
aaatatgatgatgaaataatgcagcttgatgaaatagctgtaaaatggattcggaatcag

SEQ ID NO: 120815 - DNA, 59 bp, Artificial
  Synthetic oligonucleotide
aaaagaggtcgtagttctgagcgaagaggagatccgtgtggtgaaacatagaatgataa

SEQ ID NO: 120816 - DNA, 59 bp, Artificial
  Synthetic oligonucleotide
aaaagaggtcgtagttctgagcgaagaggagatcccaggtgtgaaacatagaatgataa

SEQ ID NO: 120817 - DNA, 60 bp, Artificial
  Synthetic oligonucleotide
aattttaagagtgttggagaatggtcacgtgagtgtctacggcgatggagatgtcaagtg

SEQ ID NO: 120818 - DNA, 60 bp, Artificial
  Synthetic oligonucleotide
aagagagaagtacgagaaagatattcacgtaatgatagttacacttgcccaatgttaaac

SEQ ID NO: 120819 - DNA, 60 bp, Artificial
  Synthetic oligonucleotide
aagagggaagtacgagaaagatattcgcgtaatgatagttacacttgcccaatgttgaac

SEQ ID NO: 120820 - DNA, 60 bp, Artificial
  Synthetic oligonucleotide
ttcaaataggcttcgaaaaagaggtcgtagttctgagcgaagaggagatcccaggtgtga

SEQ ID NO: 120821 - DNA, 60 bp, Artificial
  Synthetic oligonucleotide
ttcaaataggcttcgaaaaagaggtcgtagttctgagcgaagaggagatccgtgtggtga

SEQ ID NO: 120822 - DNA, 60 bp, Artificial
  Synthetic oligonucleotide
gaaatatagaatggggtcggtttatcacgcaatgcgaacagatatgatgtggcaactgcg

SEQ ID NO: 120823 - DNA, 57 bp, Artificial
  Synthetic oligonucleotide
tgaaatacgaaacataaggaattatcatcagcatggtgaaccgaaacggttggccgc

SEQ ID NO: 120824 - DNA, 60 bp, Artificial
  Synthetic oligonucleotide
ctagacgtgttaacggtatacatcatgatgaggcatggctaaatttcctgaccacgtcat

SEQ ID NO: 120825 - DNA, 60 bp, Artificial
  Synthetic oligonucleotide
agtcatcgcttcgttggatgtatggtatcaaactacgaactatcctctacgcacatatgt

SEQ ID NO: 120826 - DNA, 60 bp, Artificial
  Synthetic oligonucleotide
cggcggtgctaatgagtaatgcgcgacatgaatcactgagacagaaatatacagacggtg

SEQ ID NO: 120827 - DNA, 60 bp, Artificial
  Synthetic oligonucleotide
tcacgttttgcagatttgtggcgtgaactatgtgcagtcatcgcttcgttggatgtatgg

SEQ ID NO: 120828 - DNA, 60 bp, Artificial
  Synthetic oligonucleotide
gctcttctcgatgatttattattcagagtgcggcgtccggaagggttaaagatgttaggt

SEQ ID NO: 120829 - DNA, 60 bp, Artificial
  Synthetic oligonucleotide
gtacgatccctccgattatccgttagctgaagatgaatctttcttcaaacaaggtcacaa

SEQ ID NO: 120830 - DNA, 60 bp, Artificial
  Synthetic oligonucleotide
acatgagtatggcttcacgggagcgtcgctacttatagatctgaacatacttgacttgat

SEQ ID NO: 120831 - DNA, 60 bp, Artificial
  Synthetic oligonucleotide
caacaaaattctttggcgctagatgatgaattgttacatgagtatggcttcacgggagcg

SEQ ID NO: 120832 - DNA, 60 bp, Artificial
  Synthetic oligonucleotide
gtggtcacgctttaagtaacgatattgtgtatgggtatggattgcaagagaaaattcaga

SEQ ID NO: 120833 - DNA, 60 bp, Artificial
  Synthetic oligonucleotide
ggtgagcgtgagaaatctcgacgcgctgctagtgatctcaaagttcgtggtcacgcttta

SEQ ID NO: 120834 - DNA, 60 bp, Artificial
  Synthetic oligonucleotide
gattgatgaagtcaagaaagaagacattagtccggttaaggtgagtgagctagcgacatc

SEQ ID NO: 120835 - DNA, 60 bp, Artificial
  Synthetic oligonucleotide
gccactcatatctgattacagcggcgaagactcaaatggacaccaacttcaagcaacaat

SEQ ID NO: 120836 - DNA, 60 bp, Artificial
  Synthetic oligonucleotide
cacaagtcatgagggtaagcgtttaaagatggttttacatgcagggctaatagcgtacgt

SEQ ID NO: 120837 - DNA, 60 bp, Artificial
  Synthetic oligonucleotide
ctgcctgaggcagatacggtgtagattagtatttgatagcagctaggcgcgccgcgacga

SEQ ID NO: 120838 - DNA, 60 bp, Artificial
  Synthetic oligonucleotide
caattaagataccagatgagattacgaaccctaaagagtacgatccctccgattatccgt

SEQ ID NO: 120839 - DNA, 60 bp, Artificial
  Synthetic oligonucleotide
atgcagagccttatacaacatcttctcttatctacacatcctacggagtatcacaagtca

SEQ ID NO: 120840 - DNA, 60 bp, Artificial
  Synthetic oligonucleotide
ctgcagaaagattagtacgtatacctcctagctattatgtgtctacacaatgcagagcct

SEQ ID NO: 120841 - DNA, 60 bp, Artificial
  Synthetic oligonucleotide
ttggacttcgcaacgcaacgttttactgtcatcgatagatgtggctggcatggacgcatc

SEQ ID NO: 120842 - DNA, 54 bp, Artificial
  Synthetic oligonucleotide
atcggaaagcaaatatatgatttgaatgataacgctgcacaaggtaaacaggca

SEQ ID NO: 120843 - DNA, 60 bp, Artificial
  Synthetic oligonucleotide
gcttcaaggtttagtgcgagggaatgaactgaagagggcatcagatggtaagaattcatg

SEQ ID NO: 120844 - DNA, 60 bp, Artificial
  Synthetic oligonucleotide
gcgcccattaagctcgttgaacgccagcagtcagatcgaaggcagagagcaatctcagga

SEQ ID NO: 120845 - DNA, 60 bp, Artificial
  Synthetic oligonucleotide
cactcatcatcatgctgtttcgaacgcaaatgtcttaaacgaaagcggttttgcaacaac

SEQ ID NO: 120846 - DNA, 60 bp, Artificial
  Synthetic oligonucleotide
gtatgaaagcgagatatttggacaggttaagaacgcagagggcacatatccatcaggacg

SEQ ID NO: 120847 - DNA, 60 bp, Artificial
  Synthetic oligonucleotide
cgggacgttctggggctttgcagataggatatctttatggactagggaagacacaaagga

SEQ ID NO: 120848 - DNA, 60 bp, Artificial
  Synthetic oligonucleotide
gctgcggtattccctaggatagaacagcgcttagtaacaagaccggcggtgctaatgagt

SEQ ID NO: 120849 - DNA, 60 bp, Artificial
  Synthetic oligonucleotide
gggaagacacaaaggatatcggacgactcaatctcgctatgatggaactaaatgctcttc

SEQ ID NO: 120850 - DNA, 60 bp, Artificial
  Synthetic oligonucleotide
caactgaattctctaaaactcgcaaatttacacgtcaatcatttaagcaaatcgagcagt

SEQ ID NO: 120851 - DNA, 60 bp, Artificial
  Synthetic oligonucleotide
agagggcacatatccatcaggacgagcagatacttcgacgcatcacacggtattgcttca

SEQ ID NO: 120852 - DNA, 60 bp, Artificial
  Synthetic oligonucleotide
ctgtagggcaatgaccaatgatggaactttccttgcgacattaaccgaattatccttaga

SEQ ID NO: 120853 - DNA, 60 bp, Artificial
  Synthetic oligonucleotide
caagactcagaatgatgttgctaactactatgcggcctgtagggcaatgaccaatgatgg

SEQ ID NO: 120854 - DNA, 60 bp, Artificial
  Synthetic oligonucleotide
ttttcgcacgtgaatatcgtacccctgaaaggatattcaaatcacttaaagcgcccatta

SEQ ID NO: 120855 - DNA, 58 bp, Artificial
  Synthetic oligonucleotide
tacttagtgaccttcagagcaggctcattaactaatacatacgaaccgaaaaccaaga

SEQ ID NO: 120856 - DNA, 60 bp, Artificial
  Synthetic oligonucleotide
gggaggtctagataggtctgctattctattgcgtctagatgtggcttcaatacgcgggaa

SEQ ID NO: 120857 - DNA, 60 bp, Artificial
  Synthetic oligonucleotide
gggaggtgacgtagcagcatggtctaattcaagaattgttatgcaggcggttttcgcacg

SEQ ID NO: 120858 - DNA, 60 bp, Artificial
  Synthetic oligonucleotide
ctatttctgcgggaccgaaggagcagggtattctgttacgagcgttcgcatattacagtt

SEQ ID NO: 120859 - DNA, 60 bp, Artificial
  Synthetic oligonucleotide
cagaaatcagcgatggcgactaaagagacgacagtgcaatcgaaacgaatatcattacgt

SEQ ID NO: 120860 - DNA, 60 bp, Artificial
  Synthetic oligonucleotide
cgccagcggatgcactacatttatatgagtttgagggtgaggaagtagtcatggatctat

SEQ ID NO: 120861 - DNA, 60 bp, Artificial
  Synthetic oligonucleotide
ccaggtaggaagctaacggaaattgaaaagctagaagtgggaggtgacgtagcagcatgg

SEQ ID NO: 120862 - DNA, 60 bp, Artificial
  Synthetic oligonucleotide
gtgctagatgtcgctagtaaatgtacggtaccgcgctttggaccatattacgctaagaat

SEQ ID NO: 120863 - DNA, 57 bp, Artificial
  Synthetic oligonucleotide
ttttgaggttggtaagcgtcagtcacaggtaaaatacgttaatgcggcatggcaggc

SEQ ID NO: 120864 - DNA, 60 bp, Artificial
  Synthetic oligonucleotide
gacggcacatttactgaggatgagtcgatgttcaccgctagaggggcgtataagagacga

SEQ ID NO: 120865 - DNA, 60 bp, Artificial
  Synthetic oligonucleotide
gcggcatggcaggcatgtgcattagaagcagcgaattcacaaacttcaacctcgtatgaa

SEQ ID NO: 120866 - DNA, 60 bp, Artificial
  Synthetic oligonucleotide
ctgaaccacactttgtgtcagctacgttcacagcgttacgcgcaaaacgagcggagttgc

SEQ ID NO: 120867 - DNA, 60 bp, Artificial
  Synthetic oligonucleotide
agtaggaacggcacttgtacgaaggccataggaaaacccgattaataaaatgcactttta

SEQ ID NO: 120868 - DNA, 60 bp, Artificial
  Synthetic oligonucleotide
cccgattttgactctacactgatgagtttaattctacctcttacgtggttatttatgcca

SEQ ID NO: 120869 - DNA, 60 bp, Artificial
  Synthetic oligonucleotide
ccatactacccacattcgtatacacctgctgtcaagtaggtacagcaataatgtcaggca

SEQ ID NO: 120870 - DNA, 60 bp, Artificial
  Synthetic oligonucleotide
ggtttcttttgtggtgcgatctgcttgcggcgtttcactttgagcgtagataacaacttg

SEQ ID NO: 120871 - DNA, 60 bp, Artificial
  Synthetic oligonucleotide
gtgaagttactgttccataagggcgacgaattcccattctatgaatcaccttcgcaagac

SEQ ID NO: 120872 - DNA, 60 bp, Artificial
  Synthetic oligonucleotide
cactagatacaccatattctaatttacatcataaggaattattttacataaatgacgtgc

SEQ ID NO: 120873 - DNA, 60 bp, Artificial
  Synthetic oligonucleotide
cgtcaaacagtattctgacttgaaatttgaaacgtgggatccactagatacaccatattc

SEQ ID NO: 120874 - DNA, 60 bp, Artificial
  Synthetic oligonucleotide
gatatatgacgtcaaacagtattctgacttgaaatttgaaacgtgggatccactagatac

SEQ ID NO: 120875 - DNA, 60 bp, Artificial
  Synthetic oligonucleotide
ccaattgtatatatgataggatcagctccctcgtattggatatatgacgtcaaacagtat

SEQ ID NO: 120876 - DNA, 60 bp, Artificial
  Synthetic oligonucleotide
atacaattactgaaaacgtattcatacaacaaccttttaagttgaaaacattgaaaaacg

SEQ ID NO: 120877 - DNA, 60 bp, Artificial
  Synthetic oligonucleotide
cgttaaaatgaccgctatggatttagaattaccaatatctgcaaaattacttcaccatcc

SEQ ID NO: 120878 - DNA, 60 bp, Artificial
  Synthetic oligonucleotide
agctaagatatgttgcgttaaaatgaccgctatggatttagaattaccaatatctgcaaa

SEQ ID NO: 120879 - DNA, 60 bp, Artificial
  Synthetic oligonucleotide
caaactactgacaatttgcatattgcatacaaatatctatctacaggaaaagctaagata

SEQ ID NO: 120880 - DNA, 60 bp, Artificial
  Synthetic oligonucleotide
gtggcacggacaagtattttaaactggatcaattcgcaaatcatatgagcatatcacgac

SEQ ID NO: 120881 - DNA, 60 bp, Artificial
  Synthetic oligonucleotide
atttattcattttaagtggcacggacaagtattttaaactggatcaattcgcaaatcata

SEQ ID NO: 120882 - DNA, 60 bp, Artificial
  Synthetic oligonucleotide
tgtactatcaacatatttcaaaatttacaacgcgttttataaagaacagatcacatttgg

SEQ ID NO: 120883 - DNA, 60 bp, Artificial
  Synthetic oligonucleotide
agttatacatatatgttatctgatgaggtgtatgtagcaaatataagtggtgtactatca

SEQ ID NO: 120884 - DNA, 60 bp, Artificial
  Synthetic oligonucleotide
gggcagtcaagaatgtttattcctcatgtaacgttgagttttagtaatgagaaaacggtg

SEQ ID NO: 120885 - DNA, 60 bp, Artificial
  Synthetic oligonucleotide
tcacatttgggcagtcaagaatgtttattcctcatgtaacgttgagttttagtaatgaga

SEQ ID NO: 120886 - DNA, 60 bp, Artificial
  Synthetic oligonucleotide
gatcttaaacgatggatatacttacattcaacaggtaaagctagtattgaaggtggtaag

SEQ ID NO: 120887 - DNA, 60 bp, Artificial
  Synthetic oligonucleotide
ttgaaggtggtaagtattatgaacatgctccaatagaattgatttatgcatgcagatcag

SEQ ID NO: 120888 - DNA, 60 bp, Artificial
  Synthetic oligonucleotide
gtattatgaacatgctccaatagaattgatttatgcatgcagatcagcgagagaattcgc

SEQ ID NO: 120889 - DNA, 60 bp, Artificial
  Synthetic oligonucleotide
atagaaaactatatcaacaaagtttatagtataacatacgctgacgatcctaattacttt

SEQ ID NO: 120890 - DNA, 60 bp, Artificial
  Synthetic oligonucleotide
gcaaatcatatgagcatatcacgacgatcacatcagatacgattttcggagtcagctact

SEQ ID NO: 120891 - DNA, 60 bp, Artificial
  Synthetic oligonucleotide
gagcatatcacgacgatcacatcagatacgattttcggagtcagctacttcatactcggg

SEQ ID NO: 120892 - DNA, 53 bp, Artificial
  Synthetic oligonucleotide
gcacgaatgtagagaattcagtatccggacacgtatataacgcgttgatttat

SEQ ID NO: 120893 - DNA, 60 bp, Artificial
  Synthetic oligonucleotide
taattactttattggagttaagtttaaaaacattccttacaagtataacgttaaagtacc

SEQ ID NO: 120894 - DNA, 52 bp, Artificial
  Synthetic oligonucleotide
ttaaagtaccacatctcacatttggcgtgttaaatatttctgaacagatgtt

SEQ ID NO: 120895 - DNA, 60 bp, Artificial
  Synthetic oligonucleotide
caggtgtacacacacgatgattctaaagatgagtatgaaaatgcattcttaatttctaat

SEQ ID NO: 120896 - DNA, 60 bp, Artificial
  Synthetic oligonucleotide
ggtatagctgcaatagagatacagaagatggatgagttattcacgctaattagatgtaat

SEQ ID NO: 120897 - DNA, 60 bp, Artificial
  Synthetic oligonucleotide
tgaaagtattagctttaagacatagtgtggctcaggtgtatgcagacactcaggtgtaca

SEQ ID NO: 120898 - DNA, 60 bp, Artificial
  Synthetic oligonucleotide
gctttaagacatagtgtggctcaggtgtatgcagacactcaggtgtacacacacgatgat

SEQ ID NO: 120899 - DNA, 53 bp, Artificial
  Synthetic oligonucleotide
aggatgacaacatcattaccaatagcaagactttcaaatcgcgtatttagaga

SEQ ID NO: 120900 - DNA, 58 bp, Artificial
  Synthetic oligonucleotide
tatcagtaaatcatgataaggtagtcaatattggacctagaaatgaatctatgtttac

SEQ ID NO: 120901 - DNA, 60 bp, Artificial
  Synthetic oligonucleotide
accaggatggaagctgacatacgttggatacaatggaagtgatacacgaggacattataa

SEQ ID NO: 120902 - DNA, 60 bp, Artificial
  Synthetic oligonucleotide
ccaggatggaagctgacatacgttggatacaatggaagtgatacacgaggacattataat

SEQ ID NO: 120903 - DNA, 60 bp, Artificial
  Synthetic oligonucleotide
agatggcttggtaaaagattatcacagtttgacattggtcaatacaagaatatgttaaat

SEQ ID NO: 120904 - DNA, 60 bp, Artificial
  Synthetic oligonucleotide
tatcatgaaaaaccaattgtatatatgataggatcagctccctcgtattggatatatgac

SEQ ID NO: 120905 - DNA, 60 bp, Artificial
  Synthetic oligonucleotide
aagtttttttcctcacccataatggctgacataagactcgacatagcgcccgatcttatc

SEQ ID NO: 120906 - DNA, 60 bp, Artificial
  Synthetic oligonucleotide
gattgtagctttctagacgttgaggtctctacaactagtacttcccgtgttgtggttcac

SEQ ID NO: 120907 - DNA, 60 bp, Artificial
  Synthetic oligonucleotide
agtacttcccgtgttgtggttcactatgacccaatcactcagtcagcgtcagcgaaacga

SEQ ID NO: 120908 - DNA, 60 bp, Artificial
  Synthetic oligonucleotide
cccgtgttgtggttcactatgacccaatcactcagtcagcgtcagcgaaacgaggtcgtg

SEQ ID NO: 120909 - DNA, 60 bp, Artificial
  Synthetic oligonucleotide
agcgaaacgaggtcgtgacattgatcctatctctgaattcgaacttgagtaccgtgcctg

SEQ ID NO: 120910 - DNA, 60 bp, Artificial
  Synthetic oligonucleotide
caacgattcgattgctgagatcttaattaaccgctcacatccaaagttctttgtgttatc

SEQ ID NO: 120911 - DNA, 60 bp, Artificial
  Synthetic oligonucleotide
ctttgtgttatctaactatttggctgatcgttggtccatcgtggtccacgtcaaactacg

SEQ ID NO: 120912 - DNA, 60 bp, Artificial
  Synthetic oligonucleotide
gttatctaactatttggctgatcgttggtccatcgtggtccacgtcaaactacgtcggcg

SEQ ID NO: 120913 - DNA, 60 bp, Artificial
  Synthetic oligonucleotide
ctatttgtacctttgattgtagctttctagacgttgaggtctctacaactagtacttccc

SEQ ID NO: 120914 - DNA, 60 bp, Artificial
  Synthetic oligonucleotide
gaaacgaggtcgtgacattgatcctatctctgaattcgaacttgagtaccgtgcctggcg

SEQ ID NO: 120915 - DNA, 60 bp, Artificial
  Synthetic oligonucleotide
accgtgcctggcgatttagcgacgatacgtagtaggttagatcacctggagaatcagcaa

SEQ ID NO: 120916 - DNA, 60 bp, Artificial
  Synthetic oligonucleotide
actgttgaacttgtatcgctcaagtgatggaccaaagccggtcattcgcggtgagatggt

SEQ ID NO: 120917 - DNA, 60 bp, Artificial
  Synthetic oligonucleotide
ttcaacgattcgattgctgagatcttaattaaccgctcacatccaaagttctttgtgtta

SEQ ID NO: 120918 - DNA, 60 bp, Artificial
  Synthetic oligonucleotide
ccgacggttcttgcaacggtctaacttctgtctttggcaacgtgcattgtcaagcatctc

SEQ ID NO: 120919 - DNA, 57 bp, Artificial
  Synthetic oligonucleotide
tcaagcatctcagaactctgcaggtggtgatctgtcagcgactacttcattgactgc

SEQ ID NO: 120920 - DNA, 60 bp, Artificial
  Synthetic oligonucleotide
ctgatggtgtcagcttgtgcgtcagtgtatctatggcctccgacggttcttgcaacggtc

SEQ ID NO: 120921 - DNA, 60 bp, Artificial
  Synthetic oligonucleotide
tccgacggttcttgcaacggtctaacttctgtctttggcaacgtgcattgtcaagcatct

SEQ ID NO: 120922 - DNA, 60 bp, Artificial
  Synthetic oligonucleotide
cggcagcgtattaagtgtgaggcgacacgaaacgtgtttcattccgaactgttgaacttg

SEQ ID NO: 120923 - DNA, 60 bp, Artificial
  Synthetic oligonucleotide
cgaactgttgaacttgtatcgctcaagtgatggaccaaagccggtcattcgcggtgagat

SEQ ID NO: 120924 - DNA, 60 bp, Artificial
  Synthetic oligonucleotide
tgggtggcggtgctatcgtgttgtttctgatcatcatttttgctgtcttgtattgtcggc

SEQ ID NO: 120925 - DNA, 60 bp, Artificial
  Synthetic oligonucleotide
tattgtcggcagcgtattaagtgtgaggcgacacgaaacgtgtttcattccgaactgttg

SEQ ID NO: 120926 - DNA, 60 bp, Artificial
  Synthetic oligonucleotide
agctcatttccgttcacggtcacatataaagtcggtaacgcgaccgctagctttgtcggc

SEQ ID NO: 120927 - DNA, 60 bp, Artificial
  Synthetic oligonucleotide
caatatagattgctcccgagtgctgcgttcagagccagctcatttccgttcacggtcaca

SEQ ID NO: 120928 - DNA, 60 bp, Artificial
  Synthetic oligonucleotide
ctttgtcggctccgggaaatacaccgctcaggacacatgtgaatttcggttccagacggg

SEQ ID NO: 120929 - DNA, 60 bp, Artificial
  Synthetic oligonucleotide
ccgttcacggtcacatataaagtcggtaacgcgaccgctagctttgtcggctccgggaaa

SEQ ID NO: 120930 - DNA, 56 bp, Artificial
  Synthetic oligonucleotide
ctgacgtactctgttgacacctgagtgcgtggcggctgcaggagaaggctattcat

SEQ ID NO: 120931 - DNA, 60 bp, Artificial
  Synthetic oligonucleotide
cggctccgggaaatacaccgctcaggacacatgtgaatttcggttccagacgggtctgac

SEQ ID NO: 120932 - DNA, 52 bp, Artificial
  Synthetic oligonucleotide
cgtactctgttgacacctgagtgcgtggcggctgcaggagaaggctattcat

SEQ ID NO: 120933 - DNA, 60 bp, Artificial
  Synthetic oligonucleotide
ctgtcctccatctcatctgatctatcaaacttgggctcctccgtcagtactctagcatta

SEQ ID NO: 120934 - DNA, 60 bp, Artificial
  Synthetic oligonucleotide
ggtcgagttacccaagcagagacgagtatcagtcgaatgaatcaatctctgtcctccatc

SEQ ID NO: 120935 - DNA, 60 bp, Artificial
  Synthetic oligonucleotide
atggtcgagttacccaagcagagacgagtatcagtcgaatgaatcaatctctgtcctcca

SEQ ID NO: 120936 - DNA, 60 bp, Artificial
  Synthetic oligonucleotide
cgtttcctccttgcttgatagtgtctcaggtctggatggtcgagttacccaagcagagac

SEQ ID NO: 120937 - DNA, 60 bp, Artificial
  Synthetic oligonucleotide
tggcttatcctcatccgtttcctccttgcttgatagtgtctcaggtctggatggtcgagt

SEQ ID NO: 120938 - DNA, 60 bp, Artificial
  Synthetic oligonucleotide
tcagcaatctacattagcttcatctgttggcgctttgcacagctctgtgtctagtttgtc

SEQ ID NO: 120939 - DNA, 60 bp, Artificial
  Synthetic oligonucleotide
gaatcagcaatctacattagcttcatctgttggcgctttgcacagctctgtgtctagttt

SEQ ID NO: 120940 - DNA, 60 bp, Artificial
  Synthetic oligonucleotide
cgtgcctggcgatttagcgacgatacgtagtaggttagatcacctggagaatcagcaatc

SEQ ID NO: 120941 - DNA, 60 bp, Artificial
  Synthetic oligonucleotide
tcagagtgtggttgatcgtgtgaccgctcttgagcgagcagctgccaatcctattactgt

SEQ ID NO: 120942 - DNA, 60 bp, Artificial
  Synthetic oligonucleotide
tctagcattaaatcttcagagtgtggttgatcgtgtgaccgctcttgagcgagcagctgc

SEQ ID NO: 120943 - DNA, 60 bp, Artificial
  Synthetic oligonucleotide
gctttttcttctctgatggtgtcagcttgtgcgtcagtgtatctatggcctccgacggtt

SEQ ID NO: 120944 - DNA, 60 bp, Artificial
  Synthetic oligonucleotide
ctctgaagcgtatttgagactcgctatctcccggataactgaatggcctattcaatcaca

SEQ ID NO: 120945 - DNA, 60 bp, Artificial
  Synthetic oligonucleotide
ggcctattcaatcacaatatagattgctcccgagtgctgcgttcagagccagctcatttc

SEQ ID NO: 120946 - DNA, 60 bp, Artificial
  Synthetic oligonucleotide
cccgtactgacttacgtttatcatccacaacctcttttacttcaagtaactctgaagcgt

SEQ ID NO: 120947 - DNA, 60 bp, Artificial
  Synthetic oligonucleotide
aagtaactctgaagcgtatttgagactcgctatctcccggataactgaatggcctattca

SEQ ID NO: 120948 - DNA, 60 bp, Artificial
  Synthetic oligonucleotide
ggcaacacttctgcctacttgatgaatgtcgtggctcatgctcatggttcccgtactgac

SEQ ID NO: 120949 - DNA, 60 bp, Artificial
  Synthetic oligonucleotide
catggttcccgtactgacttacgtttatcatccacaacctcttttacttcaagtaactct

SEQ ID NO: 120950 - DNA, 60 bp, Artificial
  Synthetic oligonucleotide
aatgtgctttcacttaatatgaacagagatttttgttctgcttccactagtctatcctct

SEQ ID NO: 120951 - DNA, 60 bp, Artificial
  Synthetic oligonucleotide
gcaactatggcaacacttctgcctacttgatgaatgtcgtggctcatgctcatggttccc

SEQ ID NO: 120952 - DNA, 60 bp, Artificial
  Synthetic oligonucleotide
gagcagctgccaatcctattactgtgagccctcctttgagattagacggtaatgtgcttt

SEQ ID NO: 120953 - DNA, 60 bp, Artificial
  Synthetic oligonucleotide
cagctgccaatcctattactgtgagccctcctttgagattagacggtaatgtgctttcac

SEQ ID NO: 120954 - DNA, 60 bp, Artificial
  Synthetic oligonucleotide
agaggaaagggttgctcttggaagatacacccatgccggacctctggcaaagcggagtca

SEQ ID NO: 120955 - DNA, 60 bp, Artificial
  Synthetic oligonucleotide
aggggaaagggttgctcttggaagatacacccatgccggacctctggcaaagcggagtca

SEQ ID NO: 120956 - DNA, 60 bp, Artificial
  Synthetic oligonucleotide
ggttgctcttggaagatacacccatgccggacctctggcaaagcggagtcaacgttagcc

SEQ ID NO: 120957 - DNA, 60 bp, Artificial
  Synthetic oligonucleotide
cgctagatggtttcgaattaccattaacctaaggtcagtaggtagagtggcgccccgagg

SEQ ID NO: 120958 - DNA, 60 bp, Artificial
  Synthetic oligonucleotide
ttacggaattttcatcagtcccgctagatggttttgaattaccattaacctaaggtcggt

SEQ ID NO: 120959 - DNA, 60 bp, Artificial
  Synthetic oligonucleotide
atgttaggaagatctacttggcgctaatgtttcctggacagattatacttgatctaaaaa

SEQ ID NO: 120960 - DNA, 59 bp, Artificial
  Synthetic oligonucleotide
atgttaggaagatctacttggcgctaatgtttcctggacagattatacttgatctaaaa

SEQ ID NO: 120961 - DNA, 60 bp, Artificial
  Synthetic oligonucleotide
ttaggaagatctacttagctctgatgtttcctggacagattatacttgatctaaaaattg

SEQ ID NO: 120962 - DNA, 57 bp, Artificial
  Synthetic oligonucleotide
tccttacaggcacaaattttcaacgtatattcatataagaaccctctgtggcacgga

SEQ ID NO: 120963 - DNA, 60 bp, Artificial
  Synthetic oligonucleotide
acaaatagatcacacgaggaaggaaataatgaagaaggatgcatacaatgaggcagtacg

SEQ ID NO: 120964 - DNA, 60 bp, Artificial
  Synthetic oligonucleotide
aagattatcaatcaacaaatagatcatacgaggaaggaaataatgaagaaggatgcatac

SEQ ID NO: 120965 - DNA, 60 bp, Artificial
  Synthetic oligonucleotide
cgcccagctatgtgccatcggccccaataccaacagcaatgccgagagtcgcgttggata

SEQ ID NO: 120966 - DNA, 60 bp, Artificial
  Synthetic oligonucleotide
agaccgcccagctatgtgccatcggccccaataccaacagcaatgccgagagtcgcgttg

SEQ ID NO: 120967 - DNA, 60 bp, Artificial
  Synthetic oligonucleotide
ccagctccaaaacctgactgtccgactagcggagatagtggtgaatcgtctaatcgtcga

SEQ ID NO: 120968 - DNA, 60 bp, Artificial
  Synthetic oligonucleotide
ggagtgaaaactagtctgcgtactaaaagtctatcagcgggagtgaagactgcagtgagt

SEQ ID NO: 120969 - DNA, 60 bp, Artificial
  Synthetic oligonucleotide
ctctgtaccaattcaaggtcagcttgctatctcgcaactcgaaactggatatggtgtgcg

SEQ ID NO: 120970 - DNA, 60 bp, Artificial
  Synthetic oligonucleotide
caaactctgtaccaattcaaggtcagcttgctatctcgcaactcgaaactggatatggtg

SEQ ID NO: 120971 - DNA, 60 bp, Artificial
  Synthetic oligonucleotide
aatattcaaccccaaagggatactctccaaaattgcatctagggcaatgcaggctttcat

SEQ ID NO: 120972 - DNA, 60 bp, Artificial
  Synthetic oligonucleotide
attcaaggtcagcttgctatctcgcaactcgagacgggatatggtgtgcgaatattcaac

SEQ ID NO: 120973 - DNA, 60 bp, Artificial
  Synthetic oligonucleotide
acagagcatgctattaccaacttcaccaaagctgagatggcacttgaattcaatcgtgag

SEQ ID NO: 120974 - DNA, 60 bp, Artificial
  Synthetic oligonucleotide
gtcgaagctaaccgaacaagcgatggatctcgtgaccgcggctgaacctgagataatcgc

SEQ ID NO: 120975 - DNA, 60 bp, Artificial
  Synthetic oligonucleotide
agaaaagtcgaagctaaccgaacaagcgatggatctcgtgaccgcggctgaacctgagat

SEQ ID NO: 120976 - DNA, 60 bp, Artificial
  Synthetic oligonucleotide
ccagcaccaaagcccgattgtccgactagcggagatagtggtgaatcgtctaatcgccga

SEQ ID NO: 120977 - DNA, 60 bp, Artificial
  Synthetic oligonucleotide
tagtggtgaatcgtctaatcgccgagtgaagcgcgactcatacgcaggagtggtcaaacg

SEQ ID NO: 120978 - DNA, 60 bp, Artificial
  Synthetic oligonucleotide
ggaaacgacgaactgatgacgaaattactcaacgtttaggtcccttgacacggacctgtg

SEQ ID NO: 120979 - DNA, 60 bp, Artificial
  Synthetic oligonucleotide
cgacgaactgatgacgaaattactcaacgtttaggtcccttgacacggacctgtggcctc

SEQ ID NO: 120980 - DNA, 60 bp, Artificial
  Synthetic oligonucleotide
gttaaaaaagttctctagttggcaaccaccaaacatggagcgctttttgagaaaatacaa

SEQ ID NO: 120981 - DNA, 60 bp, Artificial
  Synthetic oligonucleotide
cccctcattggcagcatcagatcgtagaagtggccggcgccttaatgtcccagtcagtca

SEQ ID NO: 120982 - DNA, 60 bp, Artificial
  Synthetic oligonucleotide
cacttggcgagacccagttctatcttcattagctcctgtccccgccattcaaccacctcc

SEQ ID NO: 120983 - DNA, 60 bp, Artificial
  Synthetic oligonucleotide
agccatcaaggtatcacttggcgagacccagttctatcttcattagctcctgtccccgcc

SEQ ID NO: 120984 - DNA, 60 bp, Artificial
  Synthetic oligonucleotide
gtccccgccattcaaccacctccagtatgggcggtcgccgaaaacgttcctttagattcg

SEQ ID NO: 120985 - DNA, 60 bp, Artificial
  Synthetic oligonucleotide
tacttcgaatttgcgaagccggcactcaatcccgatcaagccgtgcttaagtggaacgat

SEQ ID NO: 120986 - DNA, 60 bp, Artificial
  Synthetic oligonucleotide
cagctcgataccccagcgttgcatcacgtaacattattgttaatactttgcttggcgccc

SEQ ID NO: 120987 - DNA, 60 bp, Artificial
  Synthetic oligonucleotide
agtctggtcagctcgataccccagcgttgcatcacgtaacattattgttaatactttgct

SEQ ID NO: 120988 - DNA, 60 bp, Artificial
  Synthetic oligonucleotide
cgcccatctcaatccatttgccggtggccaagtcaccagccatcaaggtatcacttggcg

SEQ ID NO: 120989 - DNA, 60 bp, Artificial
  Synthetic oligonucleotide
atactttgcttggcgcccatctcaatccatttgccggtggccaagtcaccagccatcaag

SEQ ID NO: 120990 - DNA, 60 bp, Artificial
  Synthetic oligonucleotide
accctccccgcctggagccaaggcgtcgctaacttgaccggtaatggccaaggtgtggta

SEQ ID NO: 120991 - DNA, 60 bp, Artificial
  Synthetic oligonucleotide
catagatgaggccaccctccccgcctggagccaaggcgtcgctaacttgaccggtaatgg

SEQ ID NO: 120992 - DNA, 60 bp, Artificial
  Synthetic oligonucleotide
caattaccccacatacgttctcaatctttcgagtatgtggcccataaaccaggatgtgca

SEQ ID NO: 120993 - DNA, 60 bp, Artificial
  Synthetic oligonucleotide
ctttagattcgaacaattaccccacatacgttctcaatctttcgagtatgtggcccataa

SEQ ID NO: 120994 - DNA, 60 bp, Artificial
  Synthetic oligonucleotide
acagcgtcagtttttcggactcacctacaacttttacggccaacccgcccccttatttga

SEQ ID NO: 120995 - DNA, 60 bp, Artificial
  Synthetic oligonucleotide
tgtccccgccattcaaccacctccagtatgggcggtcgccgaaaacgttcctttagattc

SEQ ID NO: 120996 - DNA, 60 bp, Artificial
  Synthetic oligonucleotide
gctagagctgcccctcccgctgctgcccaatcatcttacatgcgatgcatctcccctcat

SEQ ID NO: 120997 - DNA, 60 bp, Artificial
  Synthetic oligonucleotide
gtggaacgatggtgctagagctgcccctcccgctgctgcccaatcatcttacatgcgatg

SEQ ID NO: 120998 - DNA, 60 bp, Artificial
  Synthetic oligonucleotide
aagccggcactcaatcccgatcaagccgtgcttaagtggaacgatggtgctagagctgcc

SEQ ID NO: 120999 - DNA, 60 bp, Artificial
  Synthetic oligonucleotide
ggtcggatgccaatccagcccttcaacgcagcggactttggtcaagctggacagacggcg

SEQ ID NO: 121000 - DNA, 60 bp, Artificial
  Synthetic oligonucleotide
ctttggtcaagctggacagacggcggccgctgtcgcactagcgcaggcgatgttcgtcta

SEQ ID NO: 121001 - DNA, 60 bp, Artificial
  Synthetic oligonucleotide
ccttggactagccggttcagccatttagctatctccactggttccctcccagtctggtca

SEQ ID NO: 121002 - DNA, 60 bp, Artificial
  Synthetic oligonucleotide
cggttcagccatttagctatctccactggttccctcccagtctggtcagctcgatacccc

SEQ ID NO: 121003 - DNA, 60 bp, Artificial
  Synthetic oligonucleotide
atggcagcggctcggcatttacaatggcgtcaagatggcctcatcaccgctgcccaggag

SEQ ID NO: 121004 - DNA, 60 bp, Artificial
  Synthetic oligonucleotide
ggcgccttaatgtcccagtcagtcaccgccgtgacgggtctccccgccctcatagatgag

SEQ ID NO: 121005 - DNA, 60 bp, Artificial
  Synthetic oligonucleotide
ccggtaatggccaaggtgtggtaccctgcctcgattacaaccccgtcccaatggcagcgg

SEQ ID NO: 121006 - DNA, 60 bp, Artificial
  Synthetic oligonucleotide
ggtgtggtaccctgcctcgattacaaccccgtcccaatggcagcggctcggcatttacaa

SEQ ID NO: 121007 - DNA, 60 bp, Artificial
  Synthetic oligonucleotide
ttaatgtcccagtcagtcaccgccgtgacgggtctccccgccctcatagatgaggccacc

SEQ ID NO: 121008 - DNA, 60 bp, Artificial
  Synthetic oligonucleotide
ccttatttgacttaaacgacttacaagaactcgccggttgctacgctcgcccttggacta

SEQ ID NO: 121009 - DNA, 60 bp, Artificial
  Synthetic oligonucleotide
acgacttacaagaactcgccggttgctacgctcgcccttggactagccggttcagccatt

SEQ ID NO: 121010 - DNA, 60 bp, Artificial
  Synthetic oligonucleotide
acagacggcggccgctgtcgcactagcgcaggcgatgttcgtctaactgagacgggctgc

SEQ ID NO: 121011 - DNA, 57 bp, Artificial
  Synthetic oligonucleotide
tgttcgtctaactgagacgggctgctcccccgtctccgctgcctcacggctttcatc

SEQ ID NO: 121012 - DNA, 60 bp, Artificial
  Synthetic oligonucleotide
tggcccataaaccaggatgtgcatattatgactatgtgggcgctttcggatcagggaccg

SEQ ID NO: 121013 - DNA, 60 bp, Artificial
  Synthetic oligonucleotide
ggcccataaaccaggatgtgcatattatgactatgtgggcgctttcggatcagggaccga

SEQ ID NO: 121014 - DNA, 60 bp, Artificial
  Synthetic oligonucleotide
tgcccgctgcgacaacggctgctttgatggcatacattggcgtaccgatcgctcacctag

SEQ ID NO: 121015 - DNA, 60 bp, Artificial
  Synthetic oligonucleotide
cggctgctttgatggcatacattggcgtaccgatcgctcacctagcccagacagcctacc

SEQ ID NO: 121016 - DNA, 60 bp, Artificial
  Synthetic oligonucleotide
gctcacctagcccagacagcctaccgcttcgccggccaactgccacaatcacccgattca

SEQ ID NO: 121017 - DNA, 60 bp, Artificial
  Synthetic oligonucleotide
ccagacagcctaccgcttcgccggccaactgccacaatcacccgattcaactatggtctc

SEQ ID NO: 121018 - DNA, 60 bp, Artificial
  Synthetic oligonucleotide
acccgattcaactatggtctctaccatccgttggttgtccgcgatatggttcggatccct

SEQ ID NO: 121019 - DNA, 60 bp, Artificial
  Synthetic oligonucleotide
ctatggtctctaccatccgttggttgtccgcgatatggttcggatccctgactggacgcc

SEQ ID NO: 121020 - DNA, 60 bp, Artificial
  Synthetic oligonucleotide
tcggatccctgactggacgcctaaaccgctctcgcacttgcaacggattctacttcgaat

SEQ ID NO: 121021 - DNA, 60 bp, Artificial
  Synthetic oligonucleotide
gacgcctaaaccgctctcgcacttgcaacggattctacttcgaatttgcgaagccggcac

SEQ ID NO: 121022 - DNA, 60 bp, Artificial
  Synthetic oligonucleotide
acatgcgatgcatctcccctcattggcagcatcagatcgtagaagtggccggcgccttaa

SEQ ID NO: 121023 - DNA, 60 bp, Artificial
  Synthetic oligonucleotide
tacgatcgaacgtcatctgactgccatgctcgtcgccaaccccatcgccgccggtcggat

SEQ ID NO: 121024 - DNA, 60 bp, Artificial
  Synthetic oligonucleotide
aaccccatcgccgccggtcggatgccaatccagcccttcaacgcagcggactttggtcaa

SEQ ID NO: 121025 - DNA, 60 bp, Artificial
  Synthetic oligonucleotide
ccgcctacgcgcttacgatcgaacgtcatctgactgccatgctcgtcgccaaccccatcg

SEQ ID NO: 121026 - DNA, 60 bp, Artificial
  Synthetic oligonucleotide
cagaccgtgccatggcagctgctctcatagaacgtcggcttgactcacgtgccctggtta

SEQ ID NO: 121027 - DNA, 60 bp, Artificial
  Synthetic oligonucleotide
cccgttggaggtatcctgcttatgtgcgtacgtcacagaccgtgccatggcagctgctct

SEQ ID NO: 121028 - DNA, 60 bp, Artificial
  Synthetic oligonucleotide
gccctggttaacgttgggggagatcagctcatgttcgtagaatacgcgccacccctcccc

SEQ ID NO: 121029 - DNA, 60 bp, Artificial
  Synthetic oligonucleotide
ccatggcagctgctctcatagaacgtcggcttgactcacgtgccctggttaacgttgggg

SEQ ID NO: 121030 - DNA, 60 bp, Artificial
  Synthetic oligonucleotide
ttctatccctcgcacgttcctcctgcctgtcacttacgttgtccactgggtctcgccgca

SEQ ID NO: 121031 - DNA, 60 bp, Artificial
  Synthetic oligonucleotide
acccctccccctggtttctatccctcgcacgttcctcctgcctgtcacttacgttgtcca

SEQ ID NO: 121032 - DNA, 60 bp, Artificial
  Synthetic oligonucleotide
gggtctcgccgcagcgcgtgctactgaatggtggtaacgtgtcctttactagtgggcttg

SEQ ID NO: 121033 - DNA, 60 bp, Artificial
  Synthetic oligonucleotide
acgttgtccactgggtctcgccgcagcgcgtgctactgaatggtggtaacgtgtccttta

SEQ ID NO: 121034 - DNA, 60 bp, Artificial
  Synthetic oligonucleotide
gggcttgagtggacctttgatgatgatcctcaggttgtcacctcgaccggggtttgagca

SEQ ID NO: 121035 - DNA, 60 bp, Artificial
  Synthetic oligonucleotide
aaaaccttgatccgaagcttctcgaccgtgctgttgcatcgatactcagcccggcgagtg

SEQ ID NO: 121036 - DNA, 60 bp, Artificial
  Synthetic oligonucleotide
ttagacgtcagttagacgagttctccgcttccctcaccgcgtccgaactcctccaagccc

SEQ ID NO: 121037 - DNA, 60 bp, Artificial
  Synthetic oligonucleotide
acgagttctccgcttccctcaccgcgtccgaactcctccaagccctccaaacaattccga

SEQ ID NO: 121038 - DNA, 60 bp, Artificial
  Synthetic oligonucleotide
atctgtccattctcgagcaggccgcggtcatcgactccgacgctctaggagactcccttc

SEQ ID NO: 121039 - DNA, 60 bp, Artificial
  Synthetic oligonucleotide
ttctcatggaccgataccaactttttaaactctgtcgactaccgactcacttcacaacct

SEQ ID NO: 121040 - DNA, 60 bp, Artificial
  Synthetic oligonucleotide
ctaaaggctcatataagtctacgatcatcgatacgttgccggccatgttcagtgatctgt

SEQ ID NO: 121041 - DNA, 60 bp, Artificial
  Synthetic oligonucleotide
ctccaagccctccaaacaattccgatccctgttaaggctcgatgtctccttctgcctaaa

SEQ ID NO: 121042 - DNA, 60 bp, Artificial
  Synthetic oligonucleotide
ttcacaacctaaaatcagagatcgcttcgctgtttatgcccctggttggcttagacgtca

SEQ ID NO: 121043 - DNA, 60 bp, Artificial
  Synthetic oligonucleotide
aaggacgttcttgctcgatgtcgacgcagaccgcgatgcctcgtacccactgtctgtgct

SEQ ID NO: 121044 - DNA, 60 bp, Artificial
  Synthetic oligonucleotide
cttccataaacgtgaattctgtctcaccattctgccctctctccttggaccaaggacgtt

SEQ ID NO: 121045 - DNA, 60 bp, Artificial
  Synthetic oligonucleotide
actactacctccagtggcgctgctacgccgtgttgttgaccccggactcaaacccacttg

SEQ ID NO: 121046 - DNA, 60 bp, Artificial
  Synthetic oligonucleotide
ggcgctgctacgccgtgttgttgaccccggactcaaacccacttggtctgctgatagtga

SEQ ID NO: 121047 - DNA, 60 bp, Artificial
  Synthetic oligonucleotide
ctgtctgtgctctggccacaactgcgtgtcctcgccctcaaatctagattactactacct

SEQ ID NO: 121048 - DNA, 60 bp, Artificial
  Synthetic oligonucleotide
ggccacaactgcgtgtcctcgccctcaaatctagattactactacctccagtggcgctgc

SEQ ID NO: 121049 - DNA, 60 bp, Artificial
  Synthetic oligonucleotide
acaattccgatccctgttaaggctcgatgtctccttctgcctaaacccaagcgcttcgca

SEQ ID NO: 121050 - DNA, 60 bp, Artificial
  Synthetic oligonucleotide
aacccacttggtctgctgatagtgacgcggcttttcgagctctacgattatctcgcccat

SEQ ID NO: 121051 - DNA, 60 bp, Artificial
  Synthetic oligonucleotide
ctgatagtgacgcggcttttcgagctctacgattatctcgcccatcctctgcctccaagc

SEQ ID NO: 121052 - DNA, 60 bp, Artificial
  Synthetic oligonucleotide
ccggcgagtgacacctccgacgacgccgttaccactgtgctcgatgtttttaacgccctc

SEQ ID NO: 121053 - DNA, 60 bp, Artificial
  Synthetic oligonucleotide
cgtgcgcggttctcccgctatgtacgccaatgcggtatgccttaccttgcctaaaggctc

SEQ ID NO: 121054 - DNA, 60 bp, Artificial
  Synthetic oligonucleotide
atagaccatgtcgttaatttgctcgcacgtcgcaaccgggtgggtggcacggccctgcag

SEQ ID NO: 121055 - DNA, 52 bp, Artificial
  Synthetic oligonucleotide
cggccctgcaggttctgctggactactgttaccgcacgcaggcgtctccact

SEQ ID NO: 121056 - DNA, 60 bp, Artificial
  Synthetic oligonucleotide
cccttcgtccctcatttgagactcaattccttgaacgtctggaaaaccttgatccgaagc

SEQ ID NO: 121057 - DNA, 60 bp, Artificial
  Synthetic oligonucleotide
cttacccaacaaggccgcgttctggcttttgctcactccgattacgagctcctgtccgca

SEQ ID NO: 121058 - DNA, 60 bp, Artificial
  Synthetic oligonucleotide
gagctcctgtccgcaaatatccctattcaagtggtccgaggatccatcccgatagaccat

SEQ ID NO: 121059 - DNA, 60 bp, Artificial
  Synthetic oligonucleotide
agaggtcatgacccctgctcaacgctctcggttaccgctacttacccaacaaggccgcgt

SEQ ID NO: 121060 - DNA, 60 bp, Artificial
  Synthetic oligonucleotide
ccggcactcgtcggtcagtgaagctggagactgctcatgcgtcggcccgtcccttcgtcc

SEQ ID NO: 121061 - DNA, 60 bp, Artificial
  Synthetic oligonucleotide
tcagtgaagctggagactgctcatgcgtcggcccgtcccttcgtccacatcaccgtcgag

SEQ ID NO: 121062 - DNA, 60 bp, Artificial
  Synthetic oligonucleotide
cccttcgtccacatcaccgtcgagcgctgcgcttcagctcgtgtcgttgacgtgcgcggt

SEQ ID NO: 121063 - DNA, 60 bp, Artificial
  Synthetic oligonucleotide
ccagtcgttgacatcatctgcctttttgaatcggagcccgacgaccacggtcgagttgcc

SEQ ID NO: 121064 - DNA, 60 bp, Artificial
  Synthetic oligonucleotide
actctccattcaagagggtgtccggtatcccttacgacaggaaagcggtatgttcgtgcc

SEQ ID NO: 121065 - DNA, 60 bp, Artificial
  Synthetic oligonucleotide
ccaaggatgatcaccattgtggttattccaacagcccacttctcatggaccgataccaac

SEQ ID NO: 121066 - DNA, 57 bp, Artificial
  Synthetic oligonucleotide
tgtcacctcgaccggggtttgagcaggtcgaggagtcctgacgctacaccgatcatc

SEQ ID NO: 121067 - DNA, 60 bp, Artificial
  Synthetic oligonucleotide
gtcgcttatacaaacagctttttggcccatggctgatggtgccgcggttatccgatcctc

SEQ ID NO: 121068 - DNA, 60 bp, Artificial
  Synthetic oligonucleotide
gattgatggtgatcccccgttggaggtatcctgcttatgtgcgtacgtcacagaccgtgc

SEQ ID NO: 121069 - DNA, 60 bp, Artificial
  Synthetic oligonucleotide
cccatcaactggatggtgtttatcccgataactgggcgcctgataacttccataaacgtg

SEQ ID NO: 121070 - DNA, 60 bp, Artificial
  Synthetic oligonucleotide
cgccgaattcgataccgtcacacgtcgtgtcgccgctggccgtgatatctatgtccgatc

SEQ ID NO: 121071 - DNA, 60 bp, Artificial
  Synthetic oligonucleotide
acgtacccccgagcgccgaattcgataccgtcacacgtcgtgtcgccgctggccgtgata

SEQ ID NO: 121072 - DNA, 60 bp, Artificial
  Synthetic oligonucleotide
gatatctatgtccgatcaactaaggtccttggcgctcctctttgtctagcagctcccgcc

SEQ ID NO: 121073 - DNA, 60 bp, Artificial
  Synthetic oligonucleotide
tctgcctaaacccaagcgcttcgcacagtggctactcgacgtgccctcagctaacatttg

SEQ ID NO: 121074 - DNA, 60 bp, Artificial
  Synthetic oligonucleotide
tgtggcgtccaagcatccctcctctgacgtctacaattacatccccgatcacgtaccccc

SEQ ID NO: 121075 - DNA, 52 bp, Artificial
  Synthetic oligonucleotide
gacaggaaagcggtatgttcgtgccctgggtgctactggctctattgatgtc

SEQ ID NO: 121076 - DNA, 60 bp, Artificial
  Synthetic oligonucleotide
aacgtatatcaaccagggacattctccagactcgtgatctacattcactatgtatgccga

SEQ ID NO: 121077 - DNA, 60 bp, Artificial
  Synthetic oligonucleotide
ccaagcgtgaacgcttgcttggacagcggaatttggaacgtatatcaaccagggacattc

SEQ ID NO: 121078 - DNA, 60 bp, Artificial
  Synthetic oligonucleotide
gatctcaaagatcaagagggatgatgctggtcaacaagtttgccccaattatgtcatgct

SEQ ID NO: 121079 - DNA, 60 bp, Artificial
  Synthetic oligonucleotide
atgtcatgcttcggtcctctgtcacaacaaaagtggtacggaatgtggttgagtaccaga

SEQ ID NO: 121080 - DNA, 60 bp, Artificial
  Synthetic oligonucleotide
gagggatgatgctggtcaacaagtttgccccaattatgtcatgcttcggtcctctgtcac

SEQ ID NO: 121081 - DNA, 60 bp, Artificial
  Synthetic oligonucleotide
gagtaccagatccgtacgggtggattcttctcgtgcttagccatgctgagaccacttcag

SEQ ID NO: 121082 - DNA, 60 bp, Artificial
  Synthetic oligonucleotide
catgcttcggtcctctgtcacaacaaaagtggtacggaatgtggttgagtaccagatccg

SEQ ID NO: 121083 - DNA, 60 bp, Artificial
  Synthetic oligonucleotide
accacttcagtatgccaagcgtgaacgcttgcttggacagcggaatttggaacgtatatc

SEQ ID NO: 121084 - DNA, 60 bp, Artificial
  Synthetic oligonucleotide
ccgtacgggtggattcttctcgtgcttagccatgctgagaccacttcagtatgccaagcg

SEQ ID NO: 121085 - DNA, 60 bp, Artificial
  Synthetic oligonucleotide
tggcctcgtcctttgcgactattgacgctcagtgtttcaggttctgcgtgatgatgaaag

SEQ ID NO: 121086 - DNA, 60 bp, Artificial
  Synthetic oligonucleotide
ttgcatgcagtttaaactcgagatggatgacctggcgcataacgcagctgagctggataa

SEQ ID NO: 121087 - DNA, 60 bp, Artificial
  Synthetic oligonucleotide
atgccttatactaaattgcatgcagtttaaactcgagatggatgacctggcgcataacgc

SEQ ID NO: 121088 - DNA, 60 bp, Artificial
  Synthetic oligonucleotide
aggtggacgcgaataatcgatcagccggtgatcagagtatggactcttcgcgctgcatca

SEQ ID NO: 121089 - DNA, 60 bp, Artificial
  Synthetic oligonucleotide
gacgatggacttaagggattggcgtgcatggacatctcatatggatgtgaggtggacgcg

SEQ ID NO: 121090 - DNA, 60 bp, Artificial
  Synthetic oligonucleotide
ggacgatggacttaagggattggcgtgcatggacatctcatatggatgtgaggtggacgc

SEQ ID NO: 121091 - DNA, 60 bp, Artificial
  Synthetic oligonucleotide
cctgtcgctccgacaatgtcagcggaacagctcctggacgatggacttaagggattggcg

SEQ ID NO: 121092 - DNA, 60 bp, Artificial
  Synthetic oligonucleotide
ggtgatacggtggttcctgtcgctccgacaatgtcagcggaacagctcctggacgatgga

SEQ ID NO: 121093 - DNA, 60 bp, Artificial
  Synthetic oligonucleotide
atgatgaaagacaaaaacctaaagatagacatgcgtgagacaatgagactctggactcgt

SEQ ID NO: 121094 - DNA, 60 bp, Artificial
  Synthetic oligonucleotide
gcctcgtcctttgcgactattgacgctcagtgtttcaggttctgcgtgatgatgaaagac

SEQ ID NO: 121095 - DNA, 60 bp, Artificial
  Synthetic oligonucleotide
cggacttggactgcatgacactagctctgccttatatgattacacttgatggtgatacgg

SEQ ID NO: 121096 - DNA, 60 bp, Artificial
  Synthetic oligonucleotide
tgacactagctctgccttatatgattacacttgatggtgatacggtggttcctgtcgctc

SEQ ID NO: 121097 - DNA, 60 bp, Artificial
  Synthetic oligonucleotide
catcaccactgagccatcttataagcgggtgccgatcatgcacttggccgcggacttgga

SEQ ID NO: 121098 - DNA, 60 bp, Artificial
  Synthetic oligonucleotide
ccactgagccatcttataagcgggtgccgatcatgcacttggccgcggacttggactgca

SEQ ID NO: 121099 - DNA, 60 bp, Artificial
  Synthetic oligonucleotide
ctgcagttacttcaaggtcgatcatgctgatgggctgaagtatatacccatggatgagag

SEQ ID NO: 121100 - DNA, 59 bp, Artificial
  Synthetic oligonucleotide
agtatatacccatggatgagagatactctccatcatcacttgccagactgtttaccatg

SEQ ID NO: 121101 - DNA, 60 bp, Artificial
  Synthetic oligonucleotide
gactcccgacgcgccaatgtctacccatcaggcatccaccatgagagagctgatctgcag

SEQ ID NO: 121102 - DNA, 60 bp, Artificial
  Synthetic oligonucleotide
gagagagctgatctgcagttacttcaaggtcgatcatgctgatgggctgaagtatatacc

SEQ ID NO: 121103 - DNA, 60 bp, Artificial
  Synthetic oligonucleotide
cagggacattctccagactcgtgatctacattcactatgtatgccgactcccgacgcgcc

SEQ ID NO: 121104 - DNA, 60 bp, Artificial
  Synthetic oligonucleotide
tgtatgccgactcccgacgcgccaatgtctacccatcaggcatccaccatgagagagctg

SEQ ID NO: 121105 - DNA, 60 bp, Artificial
  Synthetic oligonucleotide
ggaatatgtagaggatctccgggtactgacgctagattgttggtgtttccaattcgcgtg

SEQ ID NO: 121106 - DNA, 60 bp, Artificial
  Synthetic oligonucleotide
attcgcgtgtaatgggtgagtgagctgatgtggtcgccaggacatgtgccgatgtcttgg

SEQ ID NO: 121107 - DNA, 60 bp, Artificial
  Synthetic oligonucleotide
aacctaaagatagacatgcgtgagacaatgagactctggactcgttcggcggcagataac

SEQ ID NO: 121108 - DNA, 60 bp, Artificial
  Synthetic oligonucleotide
ctggactcgttcggcggcagataactccgtggttacgtcatctctgagcatttcactgga

SEQ ID NO: 121109 - DNA, 60 bp, Artificial
  Synthetic oligonucleotide
cgttcggcggcagataactccgtggttacgtcatctctgagcatttcactggatcgagga

SEQ ID NO: 121110 - DNA, 60 bp, Artificial
  Synthetic oligonucleotide
tttcactggatcgaggaatatgtagaggatctccgggtactgacgctagattgttggtgt

SEQ ID NO: 121111 - DNA, 60 bp, Artificial
  Synthetic oligonucleotide
tttaatggtacatcagcggaaataccgccgtggtttaagagtctaaatcccatgcttgga

SEQ ID NO: 121112 - DNA, 60 bp, Artificial
  Synthetic oligonucleotide
aacggaaataccgcagtggtttaagagtctaaatcccatgcttggagtagtaaatctggg

SEQ ID NO: 121113 - DNA, 60 bp, Artificial
  Synthetic oligonucleotide
gcttaatggtacatcagcggaaataccacagtggtttaagagtctaaatcccatgcttgg

SEQ ID NO: 121114 - DNA, 60 bp, Artificial
  Synthetic oligonucleotide
ccgcagtggtttaagagtctaaatcccatgcttggagtagtaaatctaggtgcgactttc

SEQ ID NO: 121115 - DNA, 60 bp, Artificial
  Synthetic oligonucleotide
aacggaaataccgcagtggtttaagagtctaaatcccatgcttggagtagtaaatctagg

SEQ ID NO: 121116 - DNA, 60 bp, Artificial
  Synthetic oligonucleotide
ccgcagtggtttaagagtctaaatcccatgcttggagtagtaaatctgggtgcgactttc

SEQ ID NO: 121117 - DNA, 60 bp, Artificial
  Synthetic oligonucleotide
gtatatgcaggaatgattcattttaatataagatggtttacaagagctcaacctagcgag

SEQ ID NO: 121118 - DNA, 60 bp, Artificial
  Synthetic oligonucleotide
tcaaatacaagtgctgtatatgcaggaatgattcattttaatataagatggtttacaaga

SEQ ID NO: 121119 - DNA, 60 bp, Artificial
  Synthetic oligonucleotide
cacaagaagatttaacttaccatggcctgacgttaatttcatttacccaccagcaacgcc

SEQ ID NO: 121120 - DNA, 60 bp, Artificial
  Synthetic oligonucleotide
gacaaagcacaagaagatttaacttaccatggcctgacgttaatttcatttacccaccag

SEQ ID NO: 121121 - DNA, 60 bp, Artificial
  Synthetic oligonucleotide
cccaccagcaacgccttacagaacggttgatgatcagcctcagccaatggttattggacc

SEQ ID NO: 121122 - DNA, 60 bp, Artificial
  Synthetic oligonucleotide
tacccaccagcaacgccttacagaacggttgatgatcagcctcagccaatggttattgga

SEQ ID NO: 121123 - DNA, 60 bp, Artificial
  Synthetic oligonucleotide
gccgaactaccctgatgtaatcaatacttgtttcgtctggtacacattatctcattatcg

SEQ ID NO: 121124 - DNA, 60 bp, Artificial
  Synthetic oligonucleotide
aacagatatagtaatgccgaactaccctgatgtaatcaatacttgtttcgtctggtacac

SEQ ID NO: 121125 - DNA, 60 bp, Artificial
  Synthetic oligonucleotide
ctcattatcgtggagccgccggagcattggtggaaggatctcaacaatgttctgtaactg

SEQ ID NO: 121126 - DNA, 60 bp, Artificial
  Synthetic oligonucleotide
tctggtacacattatctcattatcgtggagccgccggagcattggtggaaggatctcaac

SEQ ID NO: 121127 - DNA, 60 bp, Artificial
  Synthetic oligonucleotide
atctggaatgtctagcaagtaaccgtgacccaagagcaagaagaacctttttaccaagtg

SEQ ID NO: 121128 - DNA, 60 bp, Artificial
  Synthetic oligonucleotide
caacatgggagggatttatgcgcgaacgttttgttatctggaatgtctagcaagtaaccg

SEQ ID NO: 121129 - DNA, 60 bp, Artificial
  Synthetic oligonucleotide
gttaaaatctggaaccaacatgggagggatttatgcgcgaacgttttgttatctggaatg

SEQ ID NO: 121130 - DNA, 60 bp, Artificial
  Synthetic oligonucleotide
ctgccagagtattcgccaaacgtacaagtattatcaatactagcaagagatgatctaccg

SEQ ID NO: 121131 - DNA, 55 bp, Artificial
  Synthetic oligonucleotide
agcaagagatgatctaccgtatacctcagaagcatttatccgagccacacgtatt

SEQ ID NO: 121132 - DNA, 60 bp, Artificial
  Synthetic oligonucleotide
gcagcgttagatctattaattggagcaactgggataaattttaattaccgactgccagag

SEQ ID NO: 121133 - DNA, 60 bp, Artificial
  Synthetic oligonucleotide
aattaccgactgccagagtattcgccaaacgtacaagtattatcaatactagcaagagat

SEQ ID NO: 121134 - DNA, 60 bp, Artificial
  Synthetic oligonucleotide
gaatcgaccaattacacaaactccaagtacacctgaagagcatagagcatgtttttatgc

SEQ ID NO: 121135 - DNA, 60 bp, Artificial
  Synthetic oligonucleotide
gtttttatgcagcgttagatctattaattggagcaactgggataaattttaattaccgac

SEQ ID NO: 121136 - DNA, 60 bp, Artificial
  Synthetic oligonucleotide
gtgatggatttccgttatttgtaacaagatttaacgccacaacgaatcgaccaattacac

SEQ ID NO: 121137 - DNA, 55 bp, Artificial
  Synthetic oligonucleotide
gaatcgaccaattacacaaactccaagtacacctgaagagcatagagcatgtttt

SEQ ID NO: 121138 - DNA, 51 bp, Artificial
  Synthetic oligonucleotide
atctggaatgtctagcaagtaaccgtgacccaagagcaagaagaacctttt

SEQ ID NO: 121139 - DNA, 60 bp, Artificial
  Synthetic oligonucleotide
ttaccaagtgatggatttccgttatttgtaacaagatttaacgccacaacgaatcgacca

SEQ ID NO: 121140 - DNA, 60 bp, Artificial
  Synthetic oligonucleotide
tcttatctattacgacttattggattaccaccacatatacctccaaatgatccaattcga

SEQ ID NO: 121141 - DNA, 60 bp, Artificial
  Synthetic oligonucleotide
cttattggattaccaccacatatacctccaaatgatccaattcgagtgccaaatcgtgtc

SEQ ID NO: 121142 - DNA, 60 bp, Artificial
  Synthetic oligonucleotide
tccaattcgagtgccaaatcgtgtcttaatgctggcgttgatatcaagattacaagatgt

SEQ ID NO: 121143 - DNA, 60 bp, Artificial
  Synthetic oligonucleotide
gccaaatcgtgtcttaatgctggcgttgatatcaagattacaagatgtatatgtagcgca

SEQ ID NO: 121144 - DNA, 60 bp, Artificial
  Synthetic oligonucleotide
gtttacaagagctcaacctagcgaggatctgtatgatacaatgagagtggatttcgccgc

SEQ ID NO: 121145 - DNA, 60 bp, Artificial
  Synthetic oligonucleotide
caagagctcaacctagcgaggatctgtatgatacaatgagagtggatttcgccgcttcgt

SEQ ID NO: 121146 - DNA, 60 bp, Artificial
  Synthetic oligonucleotide
atttcgccgcttcgtattcattccattcagaacagtggtataatttgaggtcttatctat

SEQ ID NO: 121147 - DNA, 60 bp, Artificial
  Synthetic oligonucleotide
cgccgcttcgtattcattccattcagaacagtggtataatttgaggtcttatctattacg

SEQ ID NO: 121148 - DNA, 60 bp, Artificial
  Synthetic oligonucleotide
caagccggattaccagacgccgcgttagaggccctgcgtagagtttaagttgcgattagt

SEQ ID NO: 121149 - DNA, 60 bp, Artificial
  Synthetic oligonucleotide
accagacgccgcgttagaggccctgcgtagagtttaagttgcgattagtgccacggcgca

SEQ ID NO: 121150 - DNA, 60 bp, Artificial
  Synthetic oligonucleotide
gttgggtcgtgtgttgttgaggtgggagttaacgaaggcgcaacgcagcgcgctgcttag

SEQ ID NO: 121151 - DNA, 57 bp, Artificial
  Synthetic oligonucleotide
gatatgcttcgatggctatccaacagtatctgagagtcggctatgctgaagaagtca

SEQ ID NO: 121152 - DNA, 60 bp, Artificial
  Synthetic oligonucleotide
aaagctggttcgtgatgagcagattggccggattggggatcattactatacaacaaattg

SEQ ID NO: 121153 - DNA, 60 bp, Artificial
  Synthetic oligonucleotide
tgatgagacgcgacttccccacgcgcgaccgcagcattgtggaatcacgcgtgaggagat

SEQ ID NO: 121154 - DNA, 60 bp, Artificial
  Synthetic oligonucleotide
gatgctgcagatgattggatcgatccaaatttgttcggaatccgagggcaacacaatcag

SEQ ID NO: 121155 - DNA, 60 bp, Artificial
  Synthetic oligonucleotide
gtgcgggaaggattggaccaaccggagagatgggagtggcttctagattatatggacaga

SEQ ID NO: 121156 - DNA, 60 bp, Artificial
  Synthetic oligonucleotide
acgggaagtagagaggcaaattaatacatgtccttattcaggctacaaaggtagggtctt

SEQ ID NO: 121157 - DNA, 60 bp, Artificial
  Synthetic oligonucleotide
cattatactgaagggaccagaacttggtgaggatgaagatgaaagagcttatgccactat

SEQ ID NO: 121158 - DNA, 60 bp, Artificial
  Synthetic oligonucleotide
cggctatgctgaagaagtcagatatgtgcaacaactgtttgggaaagttccaactggtga

SEQ ID NO: 121159 - DNA, 58 bp, Artificial
  Synthetic oligonucleotide
cccacgcgcgaccgcagcattgtggaatcacgcgtgaggagatcgggtgatgaaaact

SEQ ID NO: 121160 - DNA, 60 bp, Artificial
  Synthetic oligonucleotide
agagggtgtggcatctggaatgatgaaggatggcaggaaggtatcttcatgttgggtcgt

SEQ ID NO: 121161 - DNA, 60 bp, Artificial
  Synthetic oligonucleotide
caggcgctgaagcattgatcacgacagccattcacatacatcgatggataagagggtgtg

SEQ ID NO: 121162 - DNA, 60 bp, Artificial
  Synthetic oligonucleotide
gaagaggacatcgaaggaaagatgaggaggtgtggcgtacagctgctcgaagattaccgc

SEQ ID NO: 121163 - DNA, 60 bp, Artificial
  Synthetic oligonucleotide
tcaactggttgaattagctaaagaggcgatgtatgatcgagagacggtttggctccaatg

SEQ ID NO: 121164 - DNA, 60 bp, Artificial
  Synthetic oligonucleotide
gtgaggagatcgggtgatgaaaactggcaaagctggttattaccaatgattatagtgcgg

SEQ ID NO: 121165 - DNA, 60 bp, Artificial
  Synthetic oligonucleotide
agcatacgtgtcaactatgctatctaaaacattcaaagcagatacagacatgtggtgtga

SEQ ID NO: 121166 - DNA, 60 bp, Artificial
  Synthetic oligonucleotide
tgagcagattggccggattggggatcattactatacaacaaattgttacacaggcgctga

SEQ ID NO: 121167 - DNA, 60 bp, Artificial
  Synthetic oligonucleotide
caacaaattgttacacaggcgctgaagcattgatcacgacagccattcacatacatcgat

SEQ ID NO: 121168 - DNA, 60 bp, Artificial
  Synthetic oligonucleotide
ggaaggtatcttcatgttgggtcgtgtgttgttgaggtgggagttaacgaaggcgcaacg

SEQ ID NO: 121169 - DNA, 60 bp, Artificial
  Synthetic oligonucleotide
atgccactatgtttgagatggtgcgatgcatcattactctgtgttatgccgagaaggttc

SEQ ID NO: 121170 - DNA, 60 bp, Artificial
  Synthetic oligonucleotide
catctaaggtggatgaatcgatgattaaggtgtcaaaggaggtggttaattactatatga

SEQ ID NO: 121171 - DNA, 60 bp, Artificial
  Synthetic oligonucleotide
atgttcttttttccatcgttagctgatcgaacatctaaggtggatgaatcgatgattaag

SEQ ID NO: 121172 - DNA, 60 bp, Artificial
  Synthetic oligonucleotide
tcgttagctgatcgaacatctaaggtggatgaatcgatgattaaggtgtcaaaggaggtg

SEQ ID NO: 121173 - DNA, 60 bp, Artificial
  Synthetic oligonucleotide
gtatagtagtgattcaaataaatgaggagggcggatttgatgtgtatacagaggggatag

SEQ ID NO: 121174 - DNA, 60 bp, Artificial
  Synthetic oligonucleotide
caaataaatgaggagggcggatttgatgtgtatacagaggggatagtaacgcatagggtt

SEQ ID NO: 121175 - DNA, 60 bp, Artificial
  Synthetic oligonucleotide
tatgacatctatctctcatcagtgtgcggtggtgtgtcggatggtgtagtctggtatcta

SEQ ID NO: 121176 - DNA, 60 bp, Artificial
  Synthetic oligonucleotide
cgtcgacttcagataacttcgaattagggaggcaagatgtaatcactttaagaaggggac

SEQ ID NO: 121177 - DNA, 60 bp, Artificial
  Synthetic oligonucleotide
agtatggatcaacagccgcttaagatatcgattgatgaggaacatagccgggttgtacat

SEQ ID NO: 121178 - DNA, 60 bp, Artificial
  Synthetic oligonucleotide
ggcagaattatgttggatcaagaagcggaaccggttgatgaagatagcttatctttgcga

SEQ ID NO: 121179 - DNA, 60 bp, Artificial
  Synthetic oligonucleotide
ttgtcacgtataggcagaattatgttggatcaagaagcggaaccggttgatgaagatagc

SEQ ID NO: 121180 - DNA, 60 bp, Artificial
  Synthetic oligonucleotide
cgtgagatatccaagtcaaggcggacgtcatgatgtttccaagattcctgagatgtttgc

SEQ ID NO: 121181 - DNA, 60 bp, Artificial
  Synthetic oligonucleotide
ccatactgacacaaactgggttcagtggatgattaaagatagtatggatcaacagccgct

SEQ ID NO: 121182 - DNA, 60 bp, Artificial
  Synthetic oligonucleotide
aactacccagagcatttattaaaaggatatgagtttttgattaataccggcgtgagatat

SEQ ID NO: 121183 - DNA, 60 bp, Artificial
  Synthetic oligonucleotide
agatagtatggatcaacagccgcttaagatatcgattgacgaggaacatagccgggttgt

SEQ ID NO: 121184 - DNA, 60 bp, Artificial
  Synthetic oligonucleotide
ggattgatccacagtttaaattcaacggtaatacattatctgatctgaatcaaacggtcg

SEQ ID NO: 121185 - DNA, 61 bp, Artificial
  Synthetic oligonucleotide
cagtttaaattcaacggtaatacattatctgatctgaatcaaacggtcgttttcatagtgg

SEQ ID NO: 121186 - DNA, 60 bp, Artificial
  Synthetic oligonucleotide
gcggaaccggttgatgaagatagcttatctttgcggtttcagcgagctctcgatgagaag

SEQ ID NO: 121187 - DNA, 60 bp, Artificial
  Synthetic oligonucleotide
ttggaccaagaagcggaaccggttgatgaagatagcttatctttgcggtttcagcgagct

SEQ ID NO: 121188 - DNA, 60 bp, Artificial
  Synthetic oligonucleotide
cggagaagtatatatttagtaagataaacctatttgattacgaagctggtccatcgagca

SEQ ID NO: 121189 - DNA, 60 bp, Artificial
  Synthetic oligonucleotide
cggcggagacaaaattaggcgatgtttactttactctacgatcttggtatgactggagtg

SEQ ID NO: 121190 - DNA, 60 bp, Artificial
  Synthetic oligonucleotide
attgcggcggagacaaaattaggcgatgtttactttactctacgatcttggtatgactgg

SEQ ID NO: 121191 - DNA, 60 bp, Artificial
  Synthetic oligonucleotide
gttacttcaggaaaaaggcaatgttctcacaattgacttcgaaaaggatacgaagctgaa

SEQ ID NO: 121192 - DNA, 60 bp, Artificial
  Synthetic oligonucleotide
gaggcgagatacattatatctaggataaggtcgtctaccggtgcggcgcgtatgagtatc

SEQ ID NO: 121193 - DNA, 60 bp, Artificial
  Synthetic oligonucleotide
attcgagaatttggtggtcaaatccgtatccatgcttgcgcggcacgttgattgcggcgg

SEQ ID NO: 121194 - DNA, 60 bp, Artificial
  Synthetic oligonucleotide
ggtcaaatccgtatccatgcttgcgcggcacgttgattgcggcggagacaaaattaggcg

SEQ ID NO: 121195 - DNA, 60 bp, Artificial
  Synthetic oligonucleotide
tgaagatagcttatctttgcgatttcagcgagctctcgatgagaagttccgtcttaacga

SEQ ID NO: 121196 - DNA, 60 bp, Artificial
  Synthetic oligonucleotide
cttatctttgcgatttcagcgagctctcgatgagaagttccgtcttaacgattctgagag

SEQ ID NO: 121197 - DNA, 60 bp, Artificial
  Synthetic oligonucleotide
ctgagagaaataagatatttgagcacaaatcgcataggaaggatgaggataggttctacg

SEQ ID NO: 121198 - DNA, 60 bp, Artificial
  Synthetic oligonucleotide
agatatttgagcccaaatcgcataggaaggatgaggataggttctacgttttgttagcta

SEQ ID NO: 121199 - DNA, 60 bp, Artificial
  Synthetic oligonucleotide
cgagctctcgatgagaagttccgtcttaacgattctgagagaaataagatatttgagccc

SEQ ID NO: 121200 - DNA, 60 bp, Artificial
  Synthetic oligonucleotide
ccaagtcaaggtggacgtcatgatgtttccaagattcctgagatgtttgcttacgatatc

SEQ ID NO: 121201 - DNA, 60 bp, Artificial
  Synthetic oligonucleotide
atgtttccaagattcctgagatgtttgcttacgatatcaaagatgaggggatacgggacg

SEQ ID NO: 121202 - DNA, 60 bp, Artificial
  Synthetic oligonucleotide
tacgatcggtatacgaggcgagatacattatatctaggataaggtcgtctaccggtgcgg

SEQ ID NO: 121203 - DNA, 60 bp, Artificial
  Synthetic oligonucleotide
tagcttgaagggatatgacatacggaaatcagttattgaagcgaataagagtaacagctt

SEQ ID NO: 121204 - DNA, 60 bp, Artificial
  Synthetic oligonucleotide
gaggggatagtaacgcatagggtttgtaagaaaagtttacttaaacatgtatgcgacatt

SEQ ID NO: 121205 - DNA, 60 bp, Artificial
  Synthetic oligonucleotide
gtcgataccattattgctgtatacagaccgagtgaaggtgattccattggaggtgggctc

SEQ ID NO: 121206 - DNA, 60 bp, Artificial
  Synthetic oligonucleotide
ggcagtggtcgataccattattactgtatacagaccgagtgaaggtgattccattggaag

SEQ ID NO: 121207 - DNA, 60 bp, Artificial
  Synthetic oligonucleotide
aagagtaacagcttccatactgacacaaactgggttcagtggatgattaaagatagtatg

SEQ ID NO: 121208 - DNA, 60 bp, Artificial
  Synthetic oligonucleotide
cgtatcctatctagagtatatgttcttttttccatcgttagctgatcgaacatctaaggt

SEQ ID NO: 121209 - DNA, 60 bp, Artificial
  Synthetic oligonucleotide
gctgtatacagaccgagtgaaggtgattccattggaggtgggctcatcgaacaatagaca

SEQ ID NO: 121210 - DNA, 60 bp, Artificial
  Synthetic oligonucleotide
ggactaatgggtcgttcgctaaataggacacagactcaatcaacatttgacgcgaaggtg

SEQ ID NO: 121211 - DNA, 60 bp, Artificial
  Synthetic oligonucleotide
gttcgctaaataggacacagactcaatcaacatttgacgcgaaggtgtcagagttgcccg

SEQ ID NO: 121212 - DNA, 60 bp, Artificial
  Synthetic oligonucleotide
tcacggtttggtgtaatcaagaaaccgacaagaccttgcgtaactttgactggacgatac

SEQ ID NO: 121213 - DNA, 60 bp, Artificial
  Synthetic oligonucleotide
aggtaatgttctcacaattgacttcgaaaaggatacgaagctgaataatacttcagaggt

SEQ ID NO: 121214 - DNA, 60 bp, Artificial
  Synthetic oligonucleotide
cagactattatggtaagtggatagttgcgccgatgttcaactctaaaatgagaattattg

SEQ ID NO: 121215 - DNA, 60 bp, Artificial
  Synthetic oligonucleotide
aagtggatagttgcgccgatgttcaactctaaaatgagaattattgaaacggagattgca

SEQ ID NO: 121216 - DNA, 60 bp, Artificial
  Synthetic oligonucleotide
cggtatacgaggcgagatacattatatctaggataaggtcgtctaccggtgcggcgcgta

SEQ ID NO: 121217 - DNA, 60 bp, Artificial
  Synthetic oligonucleotide
ggtgtaatcaagaaaccgacaagaccttgcgtaactttgactggacgatacatcctggag

SEQ ID NO: 121218 - DNA, 64 bp, Artificial
  Synthetic oligonucleotide
ggacgatacatcctggagaaatattctttacttcttatagatatattgaggtatcatactgagg

SEQ ID NO: 121219 - DNA, 60 bp, Artificial
  Synthetic oligonucleotide
cagtggatgattaaagatagtatggatcaacagccgcttaagatatcgattgatgaggaa

SEQ ID NO: 121220 - DNA, 60 bp, Artificial
  Synthetic oligonucleotide
gcacacgtctggttttcgaggtttcaggaacatcgtccgtcagtatcgattcgggctctg

SEQ ID NO: 121221 - DNA, 60 bp, Artificial
  Synthetic oligonucleotide
attaaacggcggcatggacacgagcgcagctcgtcgattcgctcgcactactcggactgc

SEQ ID NO: 121222 - DNA, 60 bp, Artificial
  Synthetic oligonucleotide
taccaatcccgtcgcattaaacggcggcatggacacgagcgcagctcgtcgattcgctcg

SEQ ID NO: 121223 - DNA, 60 bp, Artificial
  Synthetic oligonucleotide
cgctaatgttgccctcagcctgcgtatgaatagataagctgcttcaatcccctcgtcgct

SEQ ID NO: 121224 - DNA, 60 bp, Artificial
  Synthetic oligonucleotide
gagtcgtacgaggacgctaatgttgccctcagcctgcgtatgaatagataagctgcttca

SEQ ID NO: 121225 - DNA, 60 bp, Artificial
  Synthetic oligonucleotide
ggaggcacttcgatccggcaatgagtcggaattcaacaacgcttacctgatatactcagg

SEQ ID NO: 121226 - DNA, 60 bp, Artificial
  Synthetic oligonucleotide
gaggaggcacttcgatccggcaatgagtcggaattcaacaacgcttacctgatatactca

SEQ ID NO: 121227 - DNA, 60 bp, Artificial
  Synthetic oligonucleotide
actcggactgcagcccaaggactgaggcgtggggtagaggaggcacttcgatccggcaat

SEQ ID NO: 121228 - DNA, 60 bp, Artificial
  Synthetic oligonucleotide
gattcgctcgcactactcggactgcagcccaaggactgaggcgtggggtagaggaggcac

SEQ ID NO: 121229 - DNA, 60 bp, Artificial
  Synthetic oligonucleotide
cagctgtcttctaacgttaacccgaatgatggaggtgagcgctcggatgtacttcgccgg

SEQ ID NO: 121230 - DNA, 60 bp, Artificial
  Synthetic oligonucleotide
gatatactcaggtcagctgtcttctaacgttaacccgaatgatggaggtgagcgctcgga

SEQ ID NO: 121231 - DNA, 60 bp, Artificial
  Synthetic oligonucleotide
gctgcttcaatcccctcgtcgctagtccatagttacattcccgctttattagttattatt

SEQ ID NO: 121232 - DNA, 60 bp, Artificial
  Synthetic oligonucleotide
agctgcttcaatcccctcgtcgctagtccatagttacattcccgctttattagttattat

SEQ ID NO: 121233 - DNA, 51 bp, Artificial
  Synthetic oligonucleotide
ggatggcgactatgcgatatgttttcccgaacactgactcaaccattgcct

SEQ ID NO: 121234 - DNA, 60 bp, Artificial
  Synthetic oligonucleotide
ggctgacggattgattgctaacaccatcttgtatccaagtctggatatgtggatggcgac

SEQ ID NO: 121235 - DNA, 55 bp, Artificial
  Synthetic oligonucleotide
tgagtgggggcgggccttcgatccattgggcccgtttcacttccgaggcttccga

SEQ ID NO: 121236 - DNA, 60 bp, Artificial
  Synthetic oligonucleotide
ggtggagcaaatcaaaacgcggttaatgcagttatgttgacttccgagaatgccggtgct

SEQ ID NO: 121237 - DNA, 60 bp, Artificial
  Synthetic oligonucleotide
atcgtaaaattaccgtgaagaagttagtcatctaagcgttgccggagttgtgagtggggg

SEQ ID NO: 121238 - DNA, 59 bp, Artificial
  Synthetic oligonucleotide
atcgtaaaattaccgtgaagaagttagtcatctaagcgttgccggagttgtgagtgggg

SEQ ID NO: 121239 - DNA, 60 bp, Artificial
  Synthetic oligonucleotide
ttcatagtcgtgcaggtggagcaaatcaaaacgcggttaatgcagttatgttgacttccg

SEQ ID NO: 121240 - DNA, 60 bp, Artificial
  Synthetic oligonucleotide
agcgctcggatgtacttcgccggttgataaccgcaaccagcgcagtagttaatccggcca

SEQ ID NO: 121241 - DNA, 60 bp, Artificial
  Synthetic oligonucleotide
ttcgccggttgataaccgcaaccagcgcagtagttaatccggccactgtagcacagaatg

SEQ ID NO: 121242 - DNA, 60 bp, Artificial
  Synthetic oligonucleotide
aatccggccactgtagcacagaatgagctgatccgattgggtcagagactaaattcaagt

SEQ ID NO: 121243 - DNA, 60 bp, Artificial
  Synthetic oligonucleotide
gcacagaatgagctgatccgattgggtcagagactaaattcaagtgattcagcggctcgg

SEQ ID NO: 121244 - DNA, 60 bp, Artificial
  Synthetic oligonucleotide
aaattcaagtgattcagcggctcggtcagattacgtcgtttacactccaatcatgcgggt

SEQ ID NO: 121245 - DNA, 60 bp, Artificial
  Synthetic oligonucleotide
agcggctcggtcagattacgtcgtttacactccaatcatgcgggttgatgctccagctgg

SEQ ID NO: 121246 - DNA, 60 bp, Artificial
  Synthetic oligonucleotide
tcatgcgggttgatgctccagctggactgactgtctttctttcgggacacaagactgttt

SEQ ID NO: 121247 - DNA, 60 bp, Artificial
  Synthetic oligonucleotide
gcgggttgatgctccagctggactgactgtctttctttcgggacacaagactgtttgcgt

SEQ ID NO: 121248 - DNA, 60 bp, Artificial
  Synthetic oligonucleotide
ttcgtattggcgtggaagcagtctgtttatcagctgtcagaccccgtttgttcatagtcg

SEQ ID NO: 121249 - DNA, 60 bp, Artificial
  Synthetic oligonucleotide
gcgtggaagcagtctgtttatcagctgtcagaccccgtttgttcatagtcgtgcaggtgg

SEQ ID NO: 121250 - DNA, 60 bp, Artificial
  Synthetic oligonucleotide
caggcacacgtctggttttcgaggtttcaggaacatcgtccgtcagtatcgattcgggct

SEQ ID NO: 121251 - DNA, 60 bp, Artificial
  Synthetic oligonucleotide
ccccacaccaagtaacttcagcacttgaaggctacactttcagatcacttgaggagaaac

SEQ ID NO: 121252 - DNA, 60 bp, Artificial
  Synthetic oligonucleotide
agatcacttgaggagaaacatgtatcgagagaagaattgatggctatgctttctatcact

SEQ ID NO: 121253 - DNA, 60 bp, Artificial
  Synthetic oligonucleotide
gcctcggcaaaactcttcaaaccatggccgttttcgggcacggaattgctgatcaatttg

SEQ ID NO: 121254 - DNA, 60 bp, Artificial
  Synthetic oligonucleotide
gatcaatttgtccaaggcgtattcggaaggccacagatttatcatcaactttgccgccaa

SEQ ID NO: 121255 - DNA, 60 bp, Artificial
  Synthetic oligonucleotide
acatctactttctcgaacgcgcaacgtacaaaactttgacctctgatgcagcctcggcaa

SEQ ID NO: 121256 - DNA, 60 bp, Artificial
  Synthetic oligonucleotide
cgaacgcgcaacgtacaaaactttgacctctgatgcagcctcggcaaaactcttcaaacc

SEQ ID NO: 121257 - DNA, 60 bp, Artificial
  Synthetic oligonucleotide
gccgccaagagcagactcgacccaacgatgacttcgttcgtacttgatcaccctatgatc

SEQ ID NO: 121258 - DNA, 60 bp, Artificial
  Synthetic oligonucleotide
acaataataccccacaccaagtaacttcagcacttgaaggctacactttcagatcacttg

SEQ ID NO: 121259 - DNA, 60 bp, Artificial
  Synthetic oligonucleotide
ggcgtattcggaaggccacagatttatcatcaactttgccgccaagagcagactcgaccc

SEQ ID NO: 121260 - DNA, 60 bp, Artificial
  Synthetic oligonucleotide
ttgccgccaagagcagactcgacccaacgatgacttcgttcgtacttgatcaccctatga

SEQ ID NO: 121261 - DNA, 60 bp, Artificial
  Synthetic oligonucleotide
gacagctgataaggtagaacagaaagtagcgccagcgttttcgagctttgcgtctcctca

SEQ ID NO: 121262 - DNA, 60 bp, Artificial
  Synthetic oligonucleotide
gctttgcgtctcctcatattcgtacgggtagacctgctccgaaacaagcacgtccagttg

SEQ ID NO: 121263 - DNA, 60 bp, Artificial
  Synthetic oligonucleotide
gcgtctcctcatattcgtacgggtagacctgctccgaaacaagcacgtccagttgaagac

SEQ ID NO: 121264 - DNA, 60 bp, Artificial
  Synthetic oligonucleotide
cgtccagttgaagacttttatcgtgctattttcatgtcactgttcgcttcatggtatcgt

SEQ ID NO: 121265 - DNA, 60 bp, Artificial
  Synthetic oligonucleotide
cacccgttgtccgctctgtggatgctccagatgcaaaggaaatagaacgcaagccaattc

SEQ ID NO: 121266 - DNA, 60 bp, Artificial
  Synthetic oligonucleotide
gaacgcaagccaattcaagcgactgaggcccaaccattgccacaacgtacgagcaagaca

SEQ ID NO: 121267 - DNA, 60 bp, Artificial
  Synthetic oligonucleotide
gcaagccaattcaagcgactgaggcccaaccattgccacaacgtacgagcaagacagctg

SEQ ID NO: 121268 - DNA, 60 bp, Artificial
  Synthetic oligonucleotide
gagcaagacagctgataaggtagaacagaaagtagcgccagcgttttcgagctttgcgtc

SEQ ID NO: 121269 - DNA, 60 bp, Artificial
  Synthetic oligonucleotide
atggtatcgtttaatgcaagatgtcatcgcattaggaaaaccattatatatcctaccagg

SEQ ID NO: 121270 - DNA, 60 bp, Artificial
  Synthetic oligonucleotide
gcaagatgtcatcgcattaggaaaaccattatatatcctaccaggtagttttgagtggaa

SEQ ID NO: 121271 - DNA, 54 bp, Artificial
  Synthetic oligonucleotide
acatctgtttgatgagttaacagttatacaggtatgttcgggcgcactatgggg

SEQ ID NO: 121272 - DNA, 60 bp, Artificial
  Synthetic oligonucleotide
acatctgtttgatgagttaacagttatacaggtatgttcgggcgcactatgggggataga

SEQ ID NO: 121273 - DNA, 60 bp, Artificial
  Synthetic oligonucleotide
ggtagttttgagtggaatgacgccgttgaactatcacaaagcaagattcgctatcgtacc

SEQ ID NO: 121274 - DNA, 60 bp, Artificial
  Synthetic oligonucleotide
tcctaccaggtagttttgagtggaatgacgccgttgaactatcacaaagcaagattcgct

SEQ ID NO: 121275 - DNA, 60 bp, Artificial
  Synthetic oligonucleotide
ggaagcgctcgcagctgcaatcggagatgatcctgtgcatgtgattgtcggtttggatac

SEQ ID NO: 121276 - DNA, 60 bp, Artificial
  Synthetic oligonucleotide
tgattcaggaagcgctcgcagctgcaatcggagatgatcctgtgcatgtgattgtcggtt

SEQ ID NO: 121277 - DNA, 60 bp, Artificial
  Synthetic oligonucleotide
cggtttggatacaattggcgtattacgtatcggataatgtgaatgttaacataccactgc

SEQ ID NO: 121278 - DNA, 60 bp, Artificial
  Synthetic oligonucleotide
attgtcggtttggatacaattggcgtattacgtatcggataatgtgaatgttaacatacc

SEQ ID NO: 121279 - DNA, 60 bp, Artificial
  Synthetic oligonucleotide
ccactgctgatgtatgtaattaggcgtgtttagttggtaaatacatctgtttgatgagtt

SEQ ID NO: 121280 - DNA, 60 bp, Artificial
  Synthetic oligonucleotide
ttaacataccactgctgatgtatgtaattaggcgtgtttagttggtaaatacatctgttt

SEQ ID NO: 121281 - DNA, 60 bp, Artificial
  Synthetic oligonucleotide
tgacgatgatctaacatccatggctagtaaggagagtactgcaagcgtaaatttagcacc

SEQ ID NO: 121282 - DNA, 60 bp, Artificial
  Synthetic oligonucleotide
gatatcccgaagctcgaagattctctgggtgagcctgacgatgatctaacatccatggct

SEQ ID NO: 121283 - DNA, 60 bp, Artificial
  Synthetic oligonucleotide
accgttaaaagcgttgatatcccgaagctcgaagattctctgggtgagcctgacgatgat

SEQ ID NO: 121284 - DNA, 60 bp, Artificial
  Synthetic oligonucleotide
agtaaatccaggtataggtaaaataactcaatattcaggatgactactaaactctatgtg

SEQ ID NO: 121285 - DNA, 60 bp, Artificial
  Synthetic oligonucleotide
catgggctgatcaagtcactgctgaaaattctgacaatatggaaccagttaccgttaaaa

SEQ ID NO: 121286 - DNA, 60 bp, Artificial
  Synthetic oligonucleotide
gctcgcttcaccaatcgcgccactatcaagtgatctatcatgggctgatcaagtcactgc

SEQ ID NO: 121287 - DNA, 60 bp, Artificial
  Synthetic oligonucleotide
gagtgtgccaatgctcgcttcaccaatcgcgccactatcaagtgatctatcatgggctga

SEQ ID NO: 121288 - DNA, 60 bp, Artificial
  Synthetic oligonucleotide
cacttgaggagaaacatgtatcgagagaagaattgatggctatgctttctatcactgagc

SEQ ID NO: 121289 - DNA, 60 bp, Artificial
  Synthetic oligonucleotide
tgtgcaacccaacactgacaactcaacaaacaaacacatctactttctcgaacgcgcaac

SEQ ID NO: 121290 - DNA, 60 bp, Artificial
  Synthetic oligonucleotide
actctatgtgcaaactgtgcaacccaacactgacaactcaacaaacaaacacatctactt

SEQ ID NO: 121291 - DNA, 60 bp, Artificial
  Synthetic oligonucleotide
atttagcacccgttgtccgctctgtggatgctccagatgcaaaggaaatagaacgcaagc

SEQ ID NO: 121292 - DNA, 60 bp, Artificial
  Synthetic oligonucleotide
catccatggctagtaaggagagtactgcaagcgtaaatttagcacccgttgtccgctctg

SEQ ID NO: 121293 - DNA, 60 bp, Artificial
  Synthetic oligonucleotide
aggtaaaataactcaatattcaggatgactactaaactctatgtgcaaactgtgcaaccc

SEQ ID NO: 121294 - DNA, 60 bp, Artificial
  Synthetic oligonucleotide
gggctgatcaagtcactgctgaaaattctgacaatatggaaccagttaccgttaaaagcg

SEQ ID NO: 121295 - DNA, 60 bp, Artificial
  Synthetic oligonucleotide
ttgattcgcgtccttacattaaactttataatagagcgttcattcaaatcccagtgctaa

SEQ ID NO: 121296 - DNA, 60 bp, Artificial
  Synthetic oligonucleotide
ctcgcaattaatttttgatgtactagatggttacaaggggaaggatgatttaagtttgag

SEQ ID NO: 121297 - DNA, 51 bp, Artificial
  Synthetic oligonucleotide
agtgctgctcgctataatggaaaaacatggccaggtttgcgaagtagggat

SEQ ID NO: 121298 - DNA, 60 bp, Artificial
  Synthetic oligonucleotide
tgaatcttatttatattggaaagttaattctcaaacgataccaatggaatttgattcgcg

SEQ ID NO: 121299 - DNA, 60 bp, Artificial
  Synthetic oligonucleotide
agataaatttaataaagcaagttccattgttcagtttttaggcgatgtttttatttttat

SEQ ID NO: 121300 - DNA, 60 bp, Artificial
  Synthetic oligonucleotide
ttatttttataggagagatgtctttggtacaatttcctgtattaggaattggtttaatct

SEQ ID NO: 121301 - DNA, 60 bp, Artificial
  Synthetic oligonucleotide
ccagtgctaatgaaaggtggatcaaatcgtattataggtcctaaacataaatgtttgttg

SEQ ID NO: 121302 - DNA, 60 bp, Artificial
  Synthetic oligonucleotide
taagtttgagagattattatttatgtagaatagcttacgttaatttacttaagttggaac

SEQ ID NO: 121303 - DNA, 60 bp, Artificial
  Synthetic oligonucleotide
cgccacggcaggcaccctgcgaacgaagcgagaaatacaacattgcaaagatgtcctttc

SEQ ID NO: 121304 - DNA, 60 bp, Artificial
  Synthetic oligonucleotide
aaagatgtcctttctgatatatcaatgaaaagatggaacacttcacttactcaaggcaga

SEQ ID NO: 121305 - DNA, 60 bp, Artificial
  Synthetic oligonucleotide
gatatatcaatgaaaagatggaacacttcacttactcaaggcagatattcttcagatcag

SEQ ID NO: 121306 - DNA, 60 bp, Artificial
  Synthetic oligonucleotide
tcaaggcagatattcttcagatcagctattctttggattgaacgaatgttcaggaacaaa

SEQ ID NO: 121307 - DNA, 60 bp, Artificial
  Synthetic oligonucleotide
cttcagatcagctattctttggattgaacgaatgttcaggaacaaataaagcgttagtcg

SEQ ID NO: 121308 - DNA, 61 bp, Artificial
  Synthetic oligonucleotide
ctaagtactggatacttaatggagattttgataaaatgtgttgctacgatagcgatagaac

SEQ ID NO: 121309 - DNA, 60 bp, Artificial
  Synthetic oligonucleotide
caagctttaaattcaagttatacacgaattaaacgagcgatagggtccgtaggaactaat

SEQ ID NO: 121310 - DNA, 60 bp, Artificial
  Synthetic oligonucleotide
tcgatatccttatcagaattgtgcaaaaagacgaatatgttgtatgtcagttcataaact

SEQ ID NO: 121311 - DNA, 52 bp, Artificial
  Synthetic oligonucleotide
atatcggaatcgcatcacaaaagattctaattaatcagtttacgcacgatct

SEQ ID NO: 121312 - DNA, 60 bp, Artificial
  Synthetic oligonucleotide
ttaaagtaataagcgaaagaatcgaatatttaggtaacgcattaccaacttttaatgcta

SEQ ID NO: 121313 - DNA, 60 bp, Artificial
  Synthetic oligonucleotide
atgtttgttgaacgaagattattatgttaatgattatcaatatgaaattactagtgattc

SEQ ID NO: 121314 - DNA, 60 bp, Artificial
  Synthetic oligonucleotide
agaggattatttcgatgggattagtgaaatactaatcagttcattattattgtttttagg

SEQ ID NO: 121315 - DNA, 60 bp, Artificial
  Synthetic oligonucleotide
ttaccgccacggcaggcaccctgcgaacgaagcgagaaatacaacattgcaaagatgtcc

SEQ ID NO: 121316 - DNA, 60 bp, Artificial
  Synthetic oligonucleotide
gcttatgcaacaatcaggttatacatcagattaccttaccgccacggcaggcaccctgcg

SEQ ID NO: 121317 - DNA, 60 bp, Artificial
  Synthetic oligonucleotide
ccacgctccaaatacgatacctagaatggagaccgacaatctactaaaatatcttatatc

SEQ ID NO: 121318 - DNA, 60 bp, Artificial
  Synthetic oligonucleotide
aaccttacgtgatagattactgaggcagattagatctcaaaatccagttgtatttgactt

SEQ ID NO: 121319 - DNA, 60 bp, Artificial
  Synthetic oligonucleotide
aagtttttttccacgctccaaatacgatacctagaatggagaccgacaatctactaaaat

SEQ ID NO: 121320 - DNA, 60 bp, Artificial
  Synthetic oligonucleotide
ctactaaaatatcttatatctcagaacacagaacaacgaatagaacaaatagaaaattgg

SEQ ID NO: 121321 - DNA, 60 bp, Artificial
  Synthetic oligonucleotide
ggagagatgtctttggtacaatttcctgtattaggaattggtttaatctttgtaggaacg

SEQ ID NO: 121322 - DNA, 60 bp, Artificial
  Synthetic oligonucleotide
agaaaattggcaaacgcttatgcaacaatcaggttatacatcagattaccttaccgccac

SEQ ID NO: 121323 - DNA, 61 bp, Artificial
  Synthetic oligonucleotide
cttatatctcagaacacagaacaacgaatagaacaaatagaaaattggcaaacgcttatgc

SEQ ID NO: 121324 - DNA, 61 bp, Artificial
  Synthetic oligonucleotide
gattctagtatcaattaatttcaatatttgtgagggtaaacaaactaacagtgctgctcgc

SEQ ID NO: 121325 - DNA, 60 bp, Artificial
  Synthetic oligonucleotide
ggtttaatctttgtaggaacgttgcttgacggtatgagtagaattctaaaagaggattat

SEQ ID NO: 121326 - DNA, 53 bp, Artificial
  Synthetic oligonucleotide
cctctgaaaatcattatttaaagagtttattaattactacatttgattacttt

SEQ ID NO: 121327 - DNA, 60 bp, Artificial
  Synthetic oligonucleotide
ccttcttatcaagctttaaattcaagttatacacgaattaaacgagcgatagggtccgta

SEQ ID NO: 121328 - DNA, 60 bp, Artificial
  Synthetic oligonucleotide
ctttaagcatggaactcggttataagaagaatattgatatcggaatcgcatcacaaaaga

SEQ ID NO: 121329 - DNA, 60 bp, Artificial
  Synthetic oligonucleotide
agggtccgtaggaactaataatggtttagaaagaaagcttaacgacataacctctgaaaa

SEQ ID NO: 121330 - DNA, 60 bp, Artificial
  Synthetic oligonucleotide
aagttggaacatgctttagagcaaaaacagaaattagatttaggcgatgagaacgaaaat

SEQ ID NO: 121331 - DNA, 60 bp, Artificial
  Synthetic oligonucleotide
tttaatgctacattgacttttaataaagacttaatcaagatgtcaggtaacttgagacta

SEQ ID NO: 121332 - DNA, 60 bp, Artificial
  Synthetic oligonucleotide
ggaacgttgcttgacggtatgagtagaattctaaaagaggattatttcgatgggattagt

SEQ ID NO: 121333 - DNA, 60 bp, Artificial
  Synthetic oligonucleotide
gaaaagcaaactttaaatgtcaattctatagtttcagataagcaaggtaatttggtatac

SEQ ID NO: 121334 - DNA, 60 bp, Artificial
  Synthetic oligonucleotide
atttagataatgaatcgtcattattgaattcgggaccattatcttatactttattagatg

SEQ ID NO: 121335 - DNA, 60 bp, Artificial
  Synthetic oligonucleotide
atttgattctagtttaaccttacgtgatagattactgaggcagattagatctcaaaatcc

SEQ ID NO: 121336 - DNA, 51 bp, Artificial
  Synthetic oligonucleotide
gacagaatcaaatttggtattaaatgaaaaggtttcaagtgtaggaaaaag

SEQ ID NO: 121337 - DNA, 60 bp, Artificial
  Synthetic oligonucleotide
ttggagattgcttggttaaagttcgtgaacggtaggtcgatcttggggtcattaacgtgg

SEQ ID NO: 121338 - DNA, 60 bp, Artificial
  Synthetic oligonucleotide
ggttaaagttcgtgaacggtaggtcgatcttggggtcattaacgtggaaatcagcagatg

SEQ ID NO: 121339 - DNA, 60 bp, Artificial
  Synthetic oligonucleotide
ctcaatcgttattgtatttaaagtggtgttcgaagtcaagattgatggtgatgaccgcag

SEQ ID NO: 121340 - DNA, 60 bp, Artificial
  Synthetic oligonucleotide
cgttattgtatttaaagtggtgttcgaagtcaagattgatggtgatgaccgcagtgtaga

SEQ ID NO: 121341 - DNA, 60 bp, Artificial
  Synthetic oligonucleotide
ctaaagataatctgctactagaaagctatgataagttttatgactcactttatttatatt

SEQ ID NO: 121342 - DNA, 60 bp, Artificial
  Synthetic oligonucleotide
atatgtcagcgtttagaactttagaacaagatcaagatttcttaacaatattaatccgtg

SEQ ID NO: 121343 - DNA, 60 bp, Artificial
  Synthetic oligonucleotide
gcgtccttacattaaactttataatagagcgttcattcaaatcccagtgctaatgaaagg

SEQ ID NO: 121344 - DNA, 60 bp, Artificial
  Synthetic oligonucleotide
gattcgaacaaaaactttaagcatggaactcggttataagaagaatattgatatcggaat

SEQ ID NO: 121345 - DNA, 60 bp, Artificial
  Synthetic oligonucleotide
gtgaaagcgtgaccgggcctgttgtcattcggacagattgtgttacgggctgcaacaact

SEQ ID NO: 121346 - DNA, 60 bp, Artificial
  Synthetic oligonucleotide
ttcttgtggattagtgaaagcgtgaccgggcctgttgtcattcggacagattgtgttacg

SEQ ID NO: 121347 - DNA, 60 bp, Artificial
  Synthetic oligonucleotide
gggattgttgcacaccaagcttatgaccctgtccgccgagaccatatgcttttgagatca

SEQ ID NO: 121348 - DNA, 60 bp, Artificial
  Synthetic oligonucleotide
cttttctgggattgttgcacaccaagcttatgaccctgtccgccgagaccatatgctttt

SEQ ID NO: 121349 - DNA, 60 bp, Artificial
  Synthetic oligonucleotide
atatgatatttggagcaagctcggtcggatttaagggcgttaatgtgtctactttgcccc

SEQ ID NO: 121350 - DNA, 60 bp, Artificial
  Synthetic oligonucleotide
cctgtcacatgcaaatatgatatttggagcaagctcggtcggatttaagggcgttaatgt

SEQ ID NO: 121351 - DNA, 60 bp, Artificial
  Synthetic oligonucleotide
gaaggaggattacatcatgtatttccatgacatggtgaagtttgtcagccagacaggagg

SEQ ID NO: 121352 - DNA, 60 bp, Artificial
  Synthetic oligonucleotide
cagcgacttagctcagaaggaggattacatcatgtatttccatgacatggtgaagtttgt

SEQ ID NO: 121353 - DNA, 60 bp, Artificial
  Synthetic oligonucleotide
gccagacaggaggtgctcctgtatcattgagagatgtgttcttgtggattagtgaaagcg

SEQ ID NO: 121354 - DNA, 60 bp, Artificial
  Synthetic oligonucleotide
tgaagtttgtcagccagacaggaggtgctcctgtatcattgagagatgtgttcttgtgga

SEQ ID NO: 121355 - DNA, 60 bp, Artificial
  Synthetic oligonucleotide
gggtgtctgaatacatctgtgtgttccttttcgtctttggatgatgggttgaggtggctg

SEQ ID NO: 121356 - DNA, 60 bp, Artificial
  Synthetic oligonucleotide
ttgcgtgctttttatgggtgtctgaatacatctgtgtgttccttttcgtctttggatgat

SEQ ID NO: 121357 - DNA, 60 bp, Artificial
  Synthetic oligonucleotide
gtggctgattctttgcagatggctgaagatctggcgtggcgagagatgcttggtactctg

SEQ ID NO: 121358 - DNA, 60 bp, Artificial
  Synthetic oligonucleotide
gtagtggctgattctttgcagatggctgaagatctggcgtggcgagagatgcttggtact

SEQ ID NO: 121359 - DNA, 60 bp, Artificial
  Synthetic oligonucleotide
gaggcttacgtggtatgtggtcctttccgaactggacaggtagtggctgattctttgcag

SEQ ID NO: 121360 - DNA, 60 bp, Artificial
  Synthetic oligonucleotide
agacaaagtatgaggcttacgtggtatgtggtcctttccgaactggacaggtagtggctg

SEQ ID NO: 121361 - DNA, 51 bp, Artificial
  Synthetic oligonucleotide
caggctttcgtgaaggagcttcagcggctgcggcttaccaggcgggctttt

SEQ ID NO: 121362 - DNA, 60 bp, Artificial
  Synthetic oligonucleotide
caggctttcgtgaaggagcttcagcggctgcggcttaccaggcgggctttttgcgtgctt

SEQ ID NO: 121363 - DNA, 60 bp, Artificial
  Synthetic oligonucleotide
aacattgattcacgatgaagcgcgtcaaaccaagggctgctgttgacggtgttggcctgg

SEQ ID NO: 121364 - DNA, 60 bp, Artificial
  Synthetic oligonucleotide
gcttggtactctgaaaacattgattcacgatgaagcgcgtcaaaccaagggctgctgttg

SEQ ID NO: 121365 - DNA, 60 bp, Artificial
  Synthetic oligonucleotide
taactttgtcacacgagcgaactcgctgcttggtgggggttttgacgaggtttgctatcg

SEQ ID NO: 121366 - DNA, 57 bp, Artificial
  Synthetic oligonucleotide
ggtcactatggggctgaccagacgtatgaggctcttcgcgtcagttccatgttcatc

SEQ ID NO: 121367 - DNA, 60 bp, Artificial
  Synthetic oligonucleotide
ggaatgcgaacgacgcgagtgaggagggcagatggcacgcttgattaccagggtctgagt

SEQ ID NO: 121368 - DNA, 60 bp, Artificial
  Synthetic oligonucleotide
ggaccttttcctgcatagtatccacatgatgtgacacaccctcatatagggaatccttgc

SEQ ID NO: 121369 - DNA, 60 bp, Artificial
  Synthetic oligonucleotide
ctggcgcaagagggggaccttttcctgcatagtatccacatgatgtgacacaccctcata

SEQ ID NO: 121370 - DNA, 60 bp, Artificial
  Synthetic oligonucleotide
catgtctagaccgcaattgacttcacgccgagtgcctggaatcacagaccagacaaagta

SEQ ID NO: 121371 - DNA, 60 bp, Artificial
  Synthetic oligonucleotide
cgcaattgacttcacgccgagtgcctggaatcacagaccagacaaagtatgaggcttacg

SEQ ID NO: 121372 - DNA, 60 bp, Artificial
  Synthetic oligonucleotide
tttggatgatgggttgaggtggctgtgcacacgattgagcacaaaatccattggcgcaaa

SEQ ID NO: 121373 - DNA, 60 bp, Artificial
  Synthetic oligonucleotide
ggttgaggtggctgtgcacacgattgagcacaaaatccattggcgcaaaaggacgaaccg

SEQ ID NO: 121374 - DNA, 60 bp, Artificial
  Synthetic oligonucleotide
attggctatggtgtcttatgtgccagaggaggttgttgcaggctttaagcgagtgcggga

SEQ ID NO: 121375 - DNA, 60 bp, Artificial
  Synthetic oligonucleotide
ttgcaggctttaagcgagtgcgggagcttgagacctacccccaatggtgtctatggttat

SEQ ID NO: 121376 - DNA, 60 bp, Artificial
  Synthetic oligonucleotide
gttgtgtggcaacgttgtcgtgagtccaaactccaaaggttgctgcctgaattggctatg

SEQ ID NO: 121377 - DNA, 60 bp, Artificial
  Synthetic oligonucleotide
aaggttgctgcctgaattggctatggtgtcttatgtgccagaggaggttgttgcaggctt

SEQ ID NO: 121378 - DNA, 60 bp, Artificial
  Synthetic oligonucleotide
ggaagaccaaattcaggtatggcacgtttgttgagtgtggcaaaaatttgacttggtccg

SEQ ID NO: 121379 - DNA, 60 bp, Artificial
  Synthetic oligonucleotide
acttggtccgaagggcctcagtgggatgtgaagagttatgttgtgggctttaactttgtc

SEQ ID NO: 121380 - DNA, 60 bp, Artificial
  Synthetic oligonucleotide
ctatggttatatagaagtatgattgagtctatggggggtattgatgttggcgtgcgcgac

SEQ ID NO: 121381 - DNA, 60 bp, Artificial
  Synthetic oligonucleotide
aggctgctcagtacggaatgcgaacgacgcgagtgaggagggcagatggcacgcttgatt

SEQ ID NO: 121382 - DNA, 60 bp, Artificial
  Synthetic oligonucleotide
tttgctatcgattgatgatgcaggcggaagtgcctcggcaggttgcagagcaaggattga

SEQ ID NO: 121383 - DNA, 60 bp, Artificial
  Synthetic oligonucleotide
tgatgcaggcggaagtgcctcggcaggttgcagagcaaggattgacacttgaacaagcag

SEQ ID NO: 121384 - DNA, 60 bp, Artificial
  Synthetic oligonucleotide
caaggattgacacttgaacaagcagttcggaagttggcgtcagaacatcacatgtctaga

SEQ ID NO: 121385 - DNA, 60 bp, Artificial
  Synthetic oligonucleotide
gattgacacttgaacaagcagttcggaagttggcgtcagaacatcacatgtctagaccgc

SEQ ID NO: 121386 - DNA, 60 bp, Artificial
  Synthetic oligonucleotide
cagcagcagaggcgcgtgagcaggtagccctgtcgggaaaaatcggtgggagtgctcaag

SEQ ID NO: 121387 - DNA, 60 bp, Artificial
  Synthetic oligonucleotide
agtgctcaagtgattgttgtgtggcaacgttgtcgtgagtccaaactccaaaggttgctg

SEQ ID NO: 121388 - DNA, 60 bp, Artificial
  Synthetic oligonucleotide
gggcctcagtgggatgtgaagagttatgttgtgggctttaactttgtcacacgagcgaac

SEQ ID NO: 121389 - DNA, 60 bp, Artificial
  Synthetic oligonucleotide
gtgctacttccatgtctcaggacggatctaacgcgttctgtcctaagcatcccaaagtga

SEQ ID NO: 121390 - DNA, 60 bp, Artificial
  Synthetic oligonucleotide
cccaaagtgaagattgtgcacgaatcgaacgccacatcctacgtcctgttcaatcgtccg

SEQ ID NO: 121391 - DNA, 60 bp, Artificial
  Synthetic oligonucleotide
actaaggaagatgccctcccttccatttgggtgtactacttatgccccaggttttttgtc

SEQ ID NO: 121392 - DNA, 60 bp, Artificial
  Synthetic oligonucleotide
gtctgacggtgtgtgcaaggaacatcctaacttgttcacttctgaggagctgggcgccaa

SEQ ID NO: 121393 - DNA, 60 bp, Artificial
  Synthetic oligonucleotide
gggatggtggctacgaatctaattctctcagatttgcccgatgatgattgtccaacgtgc

SEQ ID NO: 121394 - DNA, 60 bp, Artificial
  Synthetic oligonucleotide
agggcagctagcaagctgtcgaagtaattatctgttcttatatttagtagttgttaatgt

SEQ ID NO: 121395 - DNA, 60 bp, Artificial
  Synthetic oligonucleotide
tcgagaaatattgaaaagtatcgggggtagttccatgaccctcgaagacacagctgagcc

SEQ ID NO: 121396 - DNA, 60 bp, Artificial
  Synthetic oligonucleotide
gtcagcaaatgatctgaggcaatacatcgtcacccaactaaggaagatgccctcccttcc

SEQ ID NO: 121397 - DNA, 60 bp, Artificial
  Synthetic oligonucleotide
acggtcatcaacatggcccgaactactgaagaggtgtcgaaggacgcccttcgagaaata

SEQ ID NO: 121398 - DNA, 53 bp, Artificial
  Synthetic oligonucleotide
cagctgagccagtatcggacgctgagtcaatccctgatccaccccctagatcc

SEQ ID NO: 121399 - DNA, 60 bp, Artificial
  Synthetic oligonucleotide
cctacccgtgtttctagcttcgacgccctttaccatgcagctaggcactcttcgagatgc

SEQ ID NO: 121400 - DNA, 60 bp, Artificial
  Synthetic oligonucleotide
ggctcagatgaattccctacccgtgtttctagcttcgacgccctttaccatgcagctagg

SEQ ID NO: 121401 - DNA, 60 bp, Artificial
  Synthetic oligonucleotide
gcgattctggctaatgttgcctcatatgcaaaagaccttgacggaaagaactccttcgcc

SEQ ID NO: 121402 - DNA, 60 bp, Artificial
  Synthetic oligonucleotide
ccgatacgctcaagatagccttggttctgtcgcctacggagaagagactgttccggaatg

SEQ ID NO: 121403 - DNA, 60 bp, Artificial
  Synthetic oligonucleotide
ggaagggaagaatttgtctgactcggagactgtttacgtctacgtgaccccacccaattt

SEQ ID NO: 121404 - DNA, 60 bp, Artificial
  Synthetic oligonucleotide
cggagaagagactgttccggaatgatactttaagccacctcgctgatgttcacatgtacg

SEQ ID NO: 121405 - DNA, 60 bp, Artificial
  Synthetic oligonucleotide
cacccaatttgactgatgtgaagccgacgaccgttgtgctgactgagtgtgccgctaacg

SEQ ID NO: 121406 - DNA, 60 bp, Artificial
  Synthetic oligonucleotide
gcggcattatccaaaacacacctgcgatgcgacagctcggcatatcgacgggtagtgaga

SEQ ID NO: 121407 - DNA, 60 bp, Artificial
  Synthetic oligonucleotide
tcgtcaatatgatgtgcggcattatccaaaacacacctgcgatgcgacagctcggcatat

SEQ ID NO: 121408 - DNA, 60 bp, Artificial
  Synthetic oligonucleotide
ggattccgtgctcgctccctctgacgcgtcgtcaactgatcacgccgccctcgtcaatat

SEQ ID NO: 121409 - DNA, 60 bp, Artificial
  Synthetic oligonucleotide
gctaggttctatgctcttgacggtcatcaccgctgtcgctctggaataataacatccagt

SEQ ID NO: 121410 - DNA, 60 bp, Artificial
  Synthetic oligonucleotide
caacgtgctggatacttaagttagcgattagcgaagctaggttctatgctcttgacggtc

SEQ ID NO: 121411 - DNA, 60 bp, Artificial
  Synthetic oligonucleotide
gtcatcatcatgcaagagaatgccgacagggctacgcaaatgacagctctgtatcatctg

SEQ ID NO: 121412 - DNA, 60 bp, Artificial
  Synthetic oligonucleotide
ctcaacccggttaacaagagcgactcgaagtcgtcagaattggcgcacacggctcagatg

SEQ ID NO: 121413 - DNA, 60 bp, Artificial
  Synthetic oligonucleotide
cactattcccgtccacaacggggacatagtgtgcatggttgagcgtactttggctgagtc

SEQ ID NO: 121414 - DNA, 60 bp, Artificial
  Synthetic oligonucleotide
gcagggctatgcttaaggctatcactagccatgctctacgagctgatagggaggtacagg

SEQ ID NO: 121415 - DNA, 60 bp, Artificial
  Synthetic oligonucleotide
cttcaccatttccaatcctcgtgacgccttcttactgctgcaaaaggcggtagctgatgg

SEQ ID NO: 121416 - DNA, 60 bp, Artificial
  Synthetic oligonucleotide
ctttccacgccagcactggaacatcatgacttttccaaatcagtctgaggcgattctggc

SEQ ID NO: 121417 - DNA, 60 bp, Artificial
  Synthetic oligonucleotide
ccccctggcgacgcacccaaggtgatggcagacgcgcgaagattgcaaatgccattccgt

SEQ ID NO: 121418 - DNA, 54 bp, Artificial
  Synthetic oligonucleotide
acgaacgcttgggttaactcggcgtacgtcagcaactttcctgcgctgggccaa

SEQ ID NO: 121419 - DNA, 60 bp, Artificial
  Synthetic oligonucleotide
cgaacctataccgagttagaggtaagagtacctgatccgtagtggatcgtcagggcagca

SEQ ID NO: 121420 - DNA, 60 bp, Artificial
  Synthetic oligonucleotide
atcacaagttatatttccaccatattttaacaaatggacgcacgctccaatgtttaatgc

SEQ ID NO: 121421 - DNA, 60 bp, Artificial
  Synthetic oligonucleotide
tccaccatattttaacaaatggacgcacgctccaatgtttaatgcaaaagtgaaaccatg

SEQ ID NO: 121422 - DNA, 60 bp, Artificial
  Synthetic oligonucleotide
ccatccagtattcatcaagaattggcgaaggatccattatatccaggttttctgcagagg

SEQ ID NO: 121423 - DNA, 60 bp, Artificial
  Synthetic oligonucleotide
tatgtccgatcgtcacaaactatttcttgttagagaagttctatactttagttttaacta

SEQ ID NO: 121424 - DNA, 60 bp, Artificial
  Synthetic oligonucleotide
ccaggttttctgcagaggagagatgaaaatttagatcataagtcggtatgtccgatcgtc

SEQ ID NO: 121425 - DNA, 60 bp, Artificial
  Synthetic oligonucleotide
ggatgattcagcttacaagattgagggaacgttgtatgatgtctcgcaggtggtggttca

SEQ ID NO: 121426 - DNA, 60 bp, Artificial
  Synthetic oligonucleotide
ggagagcctgcaacgaaggtatttcactgggagtacgaattgattaataaagtgtatcag

SEQ ID NO: 121427 - DNA, 60 bp, Artificial
  Synthetic oligonucleotide
gggcgtggtatgagtggagcgtaagacctgaatataaaccgcgagatttggagcgagaac

SEQ ID NO: 121428 - DNA, 60 bp, Artificial
  Synthetic oligonucleotide
acgctcagtcgatgagtgcaggtggatattgcatttaataaggtccacccgaagtcggga

SEQ ID NO: 121429 - DNA, 60 bp, Artificial
  Synthetic oligonucleotide
ggcgcgttaatcgcgtctgaatgcaagcttggtgacgtgtaccataaattacgggcgtgg

SEQ ID NO: 121430 - DNA, 60 bp, Artificial
  Synthetic oligonucleotide
atggcagagtatggtggtcaaacccttatccatgtttacgtggcgcgttaatcgcgtctg

SEQ ID NO: 121431 - DNA, 60 bp, Artificial
  Synthetic oligonucleotide
cgtcggacacaaataatggcagagtatggtggtcaaacccttatccatgtttacgtggcg

SEQ ID NO: 121432 - DNA, 60 bp, Artificial
  Synthetic oligonucleotide
aacacaccgtacgaatcaagatcgtttttatgtgttgctaatgattgcggcgtcggacac

SEQ ID NO: 121433 - DNA, 58 bp, Artificial
  Synthetic oligonucleotide
gatctctgtacggccagatcgcaccttcggcgtgacgacgtgtggtattgtaaagcat

SEQ ID NO: 121434 - DNA, 60 bp, Artificial
  Synthetic oligonucleotide
cccttatcccatagacatttacgaggcattgtccagatctctgtacggccagatcgcacc

SEQ ID NO: 121435 - DNA, 60 bp, Artificial
  Synthetic oligonucleotide
atcaaacgaagatttcccttatcccatagacatttacgaggcattgtccagatctctgta

SEQ ID NO: 121436 - DNA, 60 bp, Artificial
  Synthetic oligonucleotide
gaattactcacgaagcttctaaatatttaatcccgtgacagggattgggcacgtttacac

SEQ ID NO: 121437 - DNA, 60 bp, Artificial
  Synthetic oligonucleotide
gatttaatagtgattggtgaaaagcaaaatcgtgaggatgaatttaggattggcgaacat

SEQ ID NO: 121438 - DNA, 60 bp, Artificial
  Synthetic oligonucleotide
cgccgttcaagaggcgtgctacgtgtttaaaccgacgtatgatttaatagtgattggtga

SEQ ID NO: 121439 - DNA, 60 bp, Artificial
  Synthetic oligonucleotide
agcgtgggtgttgtcacgttcacacggcaatttggaatcacatggtacgtaaccacttgt

SEQ ID NO: 121440 - DNA, 60 bp, Artificial
  Synthetic oligonucleotide
gaaagcggataccacgtcatatcatacgattgctgtagaatcaaaaggggagcgtgggtg

SEQ ID NO: 121441 - DNA, 60 bp, Artificial
  Synthetic oligonucleotide
ccacgtcatatcatacgattgctgtagaatcaaaaggggagcgtgggtgttgtcacgttc

SEQ ID NO: 121442 - DNA, 60 bp, Artificial
  Synthetic oligonucleotide
agtacaatacaatacgggatgttctcaaacacgttacacatcgattcgaggaaagcggat

SEQ ID NO: 121443 - DNA, 60 bp, Artificial
  Synthetic oligonucleotide
cgggatgttctcaaacacgttacacatcgattcgaggaaagcggataccacgtcatatca

SEQ ID NO: 121444 - DNA, 53 bp, Artificial
  Synthetic oligonucleotide
gttaaaaacgttagcctagagatggaggagctagttataccagtcataactcg

SEQ ID NO: 121445 - DNA, 60 bp, Artificial
  Synthetic oligonucleotide
taataaggtccacccgaagtcgggacaggctgagcgtttttaaacgctttttcccaacct

SEQ ID NO: 121446 - DNA, 60 bp, Artificial
  Synthetic oligonucleotide
agatattatgctattaaatttcctgccttttttctttttaatcggcgacaatatggcgta

SEQ ID NO: 121447 - DNA, 53 bp, Artificial
  Synthetic oligonucleotide
gatggttagaatggatgataggggattcgatggacgtgcaacctctgagagtt

SEQ ID NO: 121448 - DNA, 60 bp, Artificial
  Synthetic oligonucleotide
atacaggctagcatagtttcaactaaggcgttactttatgagacgtatctatcctcggtg

SEQ ID NO: 121449 - DNA, 60 bp, Artificial
  Synthetic oligonucleotide
ggcgattctgtggtacctcccgattacccatccagttaagtgtttagttgcgcttgaggt

SEQ ID NO: 121450 - DNA, 60 bp, Artificial
  Synthetic oligonucleotide
gcacgcgtgtgcgagcgcgatcctggatttctatctaacgacaactatttcaaatggagg

SEQ ID NO: 121451 - DNA, 60 bp, Artificial
  Synthetic oligonucleotide
ttaggcgataacgcgtataatcaattcatgaagggtttggttcagttgcgcgtggcggga

SEQ ID NO: 121452 - DNA, 60 bp, Artificial
  Synthetic oligonucleotide
catggatgtgagagtgtcaatgaaggggcttagtttagcagttaaacagacgccatccag

SEQ ID NO: 121453 - DNA, 60 bp, Artificial
  Synthetic oligonucleotide
cccaacctttggtgagggactgtgtgtgaacaactttcgtaaagtgaaagatattatgct

SEQ ID NO: 121454 - DNA, 60 bp, Artificial
  Synthetic oligonucleotide
tgtttaatgcaaaagtgaaaccatgcgaagtcgagttagcgcaacgaaagaatgaagacc

SEQ ID NO: 121455 - DNA, 60 bp, Artificial
  Synthetic oligonucleotide
gtgaaaccatgcgaagtcgagttagcgcaacgaaagaatgaagacccttacgtaaagcga

SEQ ID NO: 121456 - DNA, 56 bp, Artificial
  Synthetic oligonucleotide
aatgaagacccttacgtaaagcgaacggttaagcctatacgtgcggattgtatcga

SEQ ID NO: 121457 - DNA, 60 bp, Artificial
  Synthetic oligonucleotide
ggtaaccccttactatatgatctagagaaggacattaggttagatagtagatcacaagtt

SEQ ID NO: 121458 - DNA, 60 bp, Artificial
  Synthetic oligonucleotide
ggtacctcccgattacccatccagttaagtgtttagttgcgcttgaggtgtcggactcgc

SEQ ID NO: 121459 - DNA, 60 bp, Artificial
  Synthetic oligonucleotide
cgcttgaggtgtcggactcgctagtagactcaaatgtacgtatcgacaaaatcaaacgaa

SEQ ID NO: 121460 - DNA, 60 bp, Artificial
  Synthetic oligonucleotide
gacaaattttcaacaaccgatccagaaagaaacgttatttttacacacaaaacacaccgt

SEQ ID NO: 121461 - DNA, 60 bp, Artificial
  Synthetic oligonucleotide
aaccaaaggatgaaagagacttatcagttaagtttcaatttaaactcgacgacaaatttt

SEQ ID NO: 121462 - DNA, 60 bp, Artificial
  Synthetic oligonucleotide
gaaaaagagcatgatgaagaaggatggagtcgattttgtatccaacacgagatggttaga

SEQ ID NO: 121463 - DNA, 60 bp, Artificial
  Synthetic oligonucleotide
tggttgggcgttacgattacgtcattgaactgacggaaccagaggacggcgagtggagtg

SEQ ID NO: 121464 - DNA, 60 bp, Artificial
  Synthetic oligonucleotide
taaattacgggcgtggtatgagtggagcgtaagacctgaatataaaccgcgagatttgga

SEQ ID NO: 121465 - DNA, 60 bp, Artificial
  Synthetic oligonucleotide
ggattggcgaacataatttttacaccataacacggaatcaccacatgcgtttaggcgata

SEQ ID NO: 121466 - DNA, 60 bp, Artificial
  Synthetic oligonucleotide
tataatcaattcatgaagggtttggttcagttgcgcgtggcgggagtgacaccgaacgcg

SEQ ID NO: 121467 - DNA, 60 bp, Artificial
  Synthetic oligonucleotide
gaagaaggatggagtcgattttgtatccaacacgagatggttagaatggatgatagggga

SEQ ID NO: 121468 - DNA, 60 bp, Artificial
  Synthetic oligonucleotide
acttggataggagggaacttcgagcgaacacacatcaagtcccttgaaatatgtaagtta

SEQ ID NO: 121469 - DNA, 60 bp, Artificial
  Synthetic oligonucleotide
tagcattggaagaaagatggttaacatggaggaagaaccaaaggatgaaagagacttatc

SEQ ID NO: 121470 - DNA, 60 bp, Artificial
  Synthetic oligonucleotide
ctgtgatgaattacgcgcccggtcttcggatagggtgacgctctacctgcgccaacagga

SEQ ID NO: 121471 - DNA, 60 bp, Artificial
  Synthetic oligonucleotide
atgacgctgtgatgaattacgcgcccggtcttcggatagggtgacgctctacctgcgcca

SEQ ID NO: 121472 - DNA, 60 bp, Artificial
  Synthetic oligonucleotide
gcaggaacaagtaaccgagactttcgcggacgcgaacaaagactattcaatagcgaacaa

SEQ ID NO: 121473 - DNA, 60 bp, Artificial
  Synthetic oligonucleotide
gtagcaggaacaagtaaccgagactttcgcggacgcgaacaaagactattcaatagcgaa

SEQ ID NO: 121474 - DNA, 60 bp, Artificial
  Synthetic oligonucleotide
ggatcatggcagacgtagcaggaacaagtaaccgagactttcgcggacgcgaacaaagac

SEQ ID NO: 121475 - DNA, 60 bp, Artificial
  Synthetic oligonucleotide
cgtaaaggatcatggcagacgtagcaggaacaagtaaccgagactttcgcggacgcgaac

SEQ ID NO: 121476 - DNA, 54 bp, Artificial
  Synthetic oligonucleotide
gtgatgaattacgcgcccggtcttcggatagggtgacgctctacctgcgccaac

SEQ ID NO: 121477 - DNA, 60 bp, Artificial
  Synthetic oligonucleotide
gtgatgaattacgcgcccggtcttcggatagggtgacgctctacctgcgccaacaggata

SEQ ID NO: 121478 - DNA, 60 bp, Artificial
  Synthetic oligonucleotide
acgttctcgtcgccacacatactcttcgttttctaagttgctagaggcatatcttcgagt

SEQ ID NO: 121479 - DNA, 60 bp, Artificial
  Synthetic oligonucleotide
gtctaatgatatatttgaggaggcagcaaaggcgttttcggcatttactagaagcgacgt

SEQ ID NO: 121480 - DNA, 60 bp, Artificial
  Synthetic oligonucleotide
ggcagcgttttatgacctggatgcgacaggaaggacggtcagcatgagtctaccgtgggc

SEQ ID NO: 121481 - DNA, 60 bp, Artificial
  Synthetic oligonucleotide
gatacttcgttttcttggtgctggtgtggcgatgacggcgactggggtggcggtcaacgt

SEQ ID NO: 121482 - DNA, 60 bp, Artificial
  Synthetic oligonucleotide
ggcggtcaacgtctacttggaggacatcgatggcggagggagatcattggggcagcgttt

SEQ ID NO: 121483 - DNA, 60 bp, Artificial
  Synthetic oligonucleotide
tatatggctcggttgccgcgtaatccaaagaagtcaggacgtgccgccccccgtgagacc

SEQ ID NO: 121484 - DNA, 60 bp, Artificial
  Synthetic oligonucleotide
ccgtgagacccgagagcagtttacgcaagcgctgtcggactatctgatgcagaatccgga

SEQ ID NO: 121485 - DNA, 59 bp, Artificial
  Synthetic oligonucleotide
ttttgaacgtatggggaccagagcacactaatgaccctgatgtattgcgattaatgcgc

SEQ ID NO: 121486 - DNA, 60 bp, Artificial
  Synthetic oligonucleotide
gccgtattcctaacctgagcagacaccctatagtgggtaaggagagagccaactcgtccg

SEQ ID NO: 121487 - DNA, 60 bp, Artificial
  Synthetic oligonucleotide
gccaaggtgatgatggattaatgatcatagatgggacaacggcgggtaaggtcagtagcg

SEQ ID NO: 121488 - DNA, 59 bp, Artificial
  Synthetic oligonucleotide
aaggtcagtagcgaaacgatacagaagatgttagagttgatctccgcctatggggaaga

SEQ ID NO: 121489 - DNA, 60 bp, Artificial
  Synthetic oligonucleotide
atcttcgagtgagatggaggatgtgcgaggcgcgcgagccgtcggtggatctacgtctgc

SEQ ID NO: 121490 - DNA, 60 bp, Artificial
  Synthetic oligonucleotide
ggcaaaggtggatccgatattgttcctctctctgttgcgccttttcgcgtcagcgtacta

SEQ ID NO: 121491 - DNA, 60 bp, Artificial
  Synthetic oligonucleotide
ggcgatgcttcaacgacatacgtctataccaaggatactatatggctcggttgccgcgta

SEQ ID NO: 121492 - DNA, 60 bp, Artificial
  Synthetic oligonucleotide
cggcttgtccacaatcattggggatctacgacagcgtacgcgtcagttcactaagcatga

SEQ ID NO: 121493 - DNA, 60 bp, Artificial
  Synthetic oligonucleotide
ctagaagcgacgtatataaagcattagacgagattccgttccatgatcatgccacagtcc

SEQ ID NO: 121494 - DNA, 60 bp, Artificial
  Synthetic oligonucleotide
gctccattgccagatacttgtatcgtacatggtacttagctgccgcgaggatggcctcac

SEQ ID NO: 121495 - DNA, 60 bp, Artificial
  Synthetic oligonucleotide
ctaagcatgattttgcatcggtgagatatattagggatgctatggcttgcactagtggca

SEQ ID NO: 121496 - DNA, 60 bp, Artificial
  Synthetic oligonucleotide
cagagtccggagatcaaagtgccaattccgcagaaggattggacaggtcctataggtgag

SEQ ID NO: 121497 - DNA, 53 bp, Artificial
  Synthetic oligonucleotide
cacgcacatgaccacgactttcccttccgggtccacggctacttccactgagc

SEQ ID NO: 121498 - DNA, 60 bp, Artificial
  Synthetic oligonucleotide
ccgtgtcaacgactcgttttcaccaggaaatgatttcacgcacatgaccacgactttccc

SEQ ID NO: 121499 - DNA, 60 bp, Artificial
  Synthetic oligonucleotide
ctggtgtattttggttgatgtcaccacgcatgacctcagcgattcctccactgttgtccg

SEQ ID NO: 121500 - DNA, 60 bp, Artificial
  Synthetic oligonucleotide
ggacaggtcctataggtgagatcagagtgttgaaagatactacaagctccattgccagat

SEQ ID NO: 121501 - DNA, 60 bp, Artificial
  Synthetic oligonucleotide
tgcgtccatcgtaaacgacgagtcagtggtcggtgtgagagcagctcggcctatatctgg

SEQ ID NO: 121502 - DNA, 60 bp, Artificial
  Synthetic oligonucleotide
gtgggacttcttcttatcagttatcatggccgccatccatgaaggtgtcgctagtagttc

SEQ ID NO: 121503 - DNA, 60 bp, Artificial
  Synthetic oligonucleotide
cgagggctaaagagggtgatccacaggcacgaattgcgacgacgtacgcgaggatatccg

SEQ ID NO: 121504 - DNA, 59 bp, Artificial
  Synthetic oligonucleotide
gtatatgtgcccaattgctcgatagtcgaactgctggagccgcacgaaacgttaacatc

SEQ ID NO: 121505 - DNA, 53 bp, Artificial
  Synthetic oligonucleotide
ccacgattcctattactatgtcgacgcgcttaacagggtccggaggcgtactt

SEQ ID NO: 121506 - DNA, 60 bp, Artificial
  Synthetic oligonucleotide
agcggatttgacacataactgcccactatggtgtttcagagagatttgccgtcatgtctc

SEQ ID NO: 121507 - DNA, 60 bp, Artificial
  Synthetic oligonucleotide
cgggagatgctttgtatgatccgatccttcagaaatatgacgatgtagcggatttgacac

SEQ ID NO: 121508 - DNA, 60 bp, Artificial
  Synthetic oligonucleotide
gtcatgtctctggaccgttgcctgacagggctccatatctatatttatccgctggtgtat

SEQ ID NO: 121509 - DNA, 60 bp, Artificial
  Synthetic oligonucleotide
ccattgatagtgcgttactgcgactacgtaccctcggagctgacaaaaaggcactgacgg

SEQ ID NO: 121510 - DNA, 60 bp, Artificial
  Synthetic oligonucleotide
cctaaagatggtgagcgtcgggccaatgctgcaaagcacgaggaagtattttgcacagac

SEQ ID NO: 121511 - DNA, 60 bp, Artificial
  Synthetic oligonucleotide
tgtgctggaattgacccattgaactccgatcccttcctaaagatggtgagcgtcgggcca

SEQ ID NO: 121512 - DNA, 59 bp, Artificial
  Synthetic oligonucleotide
ccagagttgtgaacttagccgtgcctgacacctggatgtctctagattttgatagcatg

SEQ ID NO: 121513 - DNA, 60 bp, Artificial
  Synthetic oligonucleotide
gcgctagccgggaagattatgttacaggacgtcaatactgtgcagctagccagagttgtg

SEQ ID NO: 121514 - DNA, 60 bp, Artificial
  Synthetic oligonucleotide
gcactgacggcacaattgctcatggttgggctgcaggaatcggaagcggacgcgctagcc

SEQ ID NO: 121515 - DNA, 60 bp, Artificial
  Synthetic oligonucleotide
gatggtggcgaatgggtacgttagcgagcgatgctcgtccattttcgggaatgctgacta

SEQ ID NO: 121516 - DNA, 60 bp, Artificial
  Synthetic oligonucleotide
cgggcgacatttaaatacggatatccctccacgtatgggatggctgcgggcgatacttcg

SEQ ID NO: 121517 - DNA, 60 bp, Artificial
  Synthetic oligonucleotide
ttgggaatgtatagctggattagtctgattaggccattgatgacgcgatggatggtggcg

SEQ ID NO: 121518 - DNA, 60 bp, Artificial
  Synthetic oligonucleotide
tagcatgtatgagacgcttgaaggtgggttttgcccaaacctggcatggttggaaccgcg

SEQ ID NO: 121519 - DNA, 60 bp, Artificial
  Synthetic oligonucleotide
ctagctatgcttggtatgtgcttaagacgaagtcagtctttccccaaaatacgttacata

SEQ ID NO: 121520 - DNA, 60 bp, Artificial
  Synthetic oligonucleotide
cgccgccccagatcaataatgccgttaaatgtgccacagcaacaagtatcggctccgcac

SEQ ID NO: 121521 - DNA, 60 bp, Artificial
  Synthetic oligonucleotide
ctgttgtccgatttggttaatctggctatcctccagcaaacggctgggctagatccgtct

SEQ ID NO: 121522 - DNA, 60 bp, Artificial
  Synthetic oligonucleotide
cactgtacgcgattaacgtatcacttccagactttaaggggcttccagttaaagcggcga

SEQ ID NO: 121523 - DNA, 60 bp, Artificial
  Synthetic oligonucleotide
aaagcggcgactaagatctttcaagcggcacaactagcgaatctccctttctctcataca

SEQ ID NO: 121524 - DNA, 60 bp, Artificial
  Synthetic oligonucleotide
cacagtatgtgacggcaagaggtggatcaggagctgcactgcgtgagtcactgtacgcga

SEQ ID NO: 121525 - DNA, 60 bp, Artificial
  Synthetic oligonucleotide
atggcctcacaacccagaacgtgggatccgctgtttcaagccatcatgcgatcacagtat

SEQ ID NO: 121526 - DNA, 60 bp, Artificial
  Synthetic oligonucleotide
gacggcacccagtaacgagacgcgagcccggcaattaggagagaaatacggcttgtccac

SEQ ID NO: 121527 - DNA, 55 bp, Artificial
  Synthetic oligonucleotide
atggtatcaaggggcccaagaagctgcgacggctacgcgagaagagttatccgac

SEQ ID NO: 121528 - DNA, 53 bp, Artificial
  Synthetic oligonucleotide
tagagataaaaaggtggagaagtcgctcagaggaagagcgtcctattcacgat

SEQ ID NO: 121529 - DNA, 60 bp, Artificial
  Synthetic oligonucleotide
aagtgatgaaaaaacaatcttataatgacgcggtgaggatgagttttacagagttctcgt

SEQ ID NO: 121530 - DNA, 60 bp, Artificial
  Synthetic oligonucleotide
tggctatttcaccacaatggacttgcagtcacttaaaaaggaattgtctatttaatggaa

SEQ ID NO: 121531 - DNA, 60 bp, Artificial
  Synthetic oligonucleotide
tgatcataaggcattgggctttgactacggattcatgagacgtcatattgatccaaaaat

SEQ ID NO: 121532 - DNA, 60 bp, Artificial
  Synthetic oligonucleotide
cggaatcaaagcctcaattggatcacgccgagtaagctattcgttgcatggattgtttgg

SEQ ID NO: 121533 - DNA, 60 bp, Artificial
  Synthetic oligonucleotide
tcaagtataactaaagccgaacaaagtcgtgtcaaagatgagaacttcctgcttgctgca

SEQ ID NO: 121534 - DNA, 60 bp, Artificial
  Synthetic oligonucleotide
ggtgtagttatcgacagcatgtatgtcggtagttatacggacaatcgtcgtttcatctat

SEQ ID NO: 121535 - DNA, 60 bp, Artificial
  Synthetic oligonucleotide
agacgatattgctatgtttgctacatcattgaaaacgatcgttgattttgacaatcacac

SEQ ID NO: 121536 - DNA, 60 bp, Artificial
  Synthetic oligonucleotide
cgatcgttgattttgacaatcacactgagtttgtacttaataatctaaattcaagtataa

SEQ ID NO: 121537 - DNA, 60 bp, Artificial
  Synthetic oligonucleotide
ccgtaatattttgaaagacgatattgctatgtttgctacatcattgaaaacgatcgttga

SEQ ID NO: 121538 - DNA, 60 bp, Artificial
  Synthetic oligonucleotide
cactagcctcagccttgaaaccgagaccactgatcagtaatgaacgtgagcacgcgaatg

SEQ ID NO: 121539 - DNA, 52 bp, Artificial
  Synthetic oligonucleotide
cacgcgaatgttattcgtattgaccgcattgaacatgatcttgttaaagaca

SEQ ID NO: 121540 - DNA, 55 bp, Artificial
  Synthetic oligonucleotide
tcgattattcacttcagaccaaagtcttggattttggattgactgggatggacaa

SEQ ID NO: 121541 - DNA, 60 bp, Artificial
  Synthetic oligonucleotide
ccgtacccggatccatttcacacagtcatgcctacgtctccgttctcgatgattatgatg

SEQ ID NO: 121542 - DNA, 60 bp, Artificial
  Synthetic oligonucleotide
gtgcttacggaatcaaagcctcaattggatcacgccgagtaagctattcgttgcatggat

SEQ ID NO: 121543 - DNA, 60 bp, Artificial
  Synthetic oligonucleotide
gactactttattggtccgtttactcattccggaaaattcgtaattggtgtagttatcgac

SEQ ID NO: 121544 - DNA, 60 bp, Artificial
  Synthetic oligonucleotide
gccgcagtcaacacgatcaggactggcgaagacctagttccgaagctaaaacagatagtc

SEQ ID NO: 121545 - DNA, 60 bp, Artificial
  Synthetic oligonucleotide
cagtcgccaattcttctgaagctccaatccgacttgagctgactttgacggttaaatctg

SEQ ID NO: 121546 - DNA, 60 bp, Artificial
  Synthetic oligonucleotide
acagatagtcgacagatcacgacgagccaatgaactgactttctctagagttaccgtacc

SEQ ID NO: 121547 - DNA, 60 bp, Artificial
  Synthetic oligonucleotide
cgtcgtttcatctattctcaatattctggacatgaaggacaacggattaattcagtcgcc

SEQ ID NO: 121548 - DNA, 60 bp, Artificial
  Synthetic oligonucleotide
attaattcagtcgccaattcttctgaagctccaatccgacttgagctgactttgacggtt

SEQ ID NO: 121549 - DNA, 60 bp, Artificial
  Synthetic oligonucleotide
tttgacggttaaatctgatctcactattgaaggtgttgaaggtgatagagccgtgtttag

SEQ ID NO: 121550 - DNA, 60 bp, Artificial
  Synthetic oligonucleotide
ctgatctcactattgaaggtgttgaaggtgatagagccgtgtttagagtttatggtgttg

SEQ ID NO: 121551 - DNA, 60 bp, Artificial
  Synthetic oligonucleotide
tcaatacagtcattaacgccgataggtgtcgtgctatgttgatggcgcttcagagcccgg

SEQ ID NO: 121552 - DNA, 60 bp, Artificial
  Synthetic oligonucleotide
gtcattaacgccgataggtgtcgtgctatgttgatggcgcttcagagcccgggattgagt

SEQ ID NO: 121553 - DNA, 60 bp, Artificial
  Synthetic oligonucleotide
gtgccgctattgccgacggagtgggagtaatccctatctttggaccaaatgttgctagtg

SEQ ID NO: 121554 - DNA, 60 bp, Artificial
  Synthetic oligonucleotide
acaatcgtcgtttcatctattctcaatattctggacatgaaggacaacggattaattcag

SEQ ID NO: 121555 - DNA, 60 bp, Artificial
  Synthetic oligonucleotide
gtcgacagatcacgacgagccaatgaactgactttctctagagttaccgtacccggatcc

SEQ ID NO: 121556 - DNA, 60 bp, Artificial
  Synthetic oligonucleotide
cggacattctcgttccccttggacacgtcaatagagcacacagtactcacacgctagcgt

SEQ ID NO: 121557 - DNA, 60 bp, Artificial
  Synthetic oligonucleotide
gaactgttcatgaacatccgaataaattcatcgaagccgcagtcaacacgatcaggactg

SEQ ID NO: 121558 - DNA, 60 bp, Artificial
  Synthetic oligonucleotide
gcactttgatcacgttgctatgcttggccatcttgacacacaccgccagaaacacaagga

SEQ ID NO: 121559 - DNA, 60 bp, Artificial
  Synthetic oligonucleotide
gacttcagagtttacgactactttattggtccgtttactcattccggaaaattcgtaatt

SEQ ID NO: 121560 - DNA, 60 bp, Artificial
  Synthetic oligonucleotide
ggattgtcggagggaagcgatgcagtaattcagccaccgatgactactagtgatcataag

SEQ ID NO: 121561 - DNA, 60 bp, Artificial
  Synthetic oligonucleotide
ccgccagaaacacaaggacaatttggaagctaaactgccaggatcttcggacattctcgt

SEQ ID NO: 121562 - DNA, 60 bp, Artificial
  Synthetic oligonucleotide
cagtatcacggcaatggcaattggactaacattaaaccgagtgaagcttaaaacatccgt

SEQ ID NO: 121563 - DNA, 60 bp, Artificial
  Synthetic oligonucleotide
ccgtgtttagagtttatggtgttgatctccatagtgttcgtgttatcactggattgtcgg

SEQ ID NO: 121564 - DNA, 60 bp, Artificial
  Synthetic oligonucleotide
cagtatctctgtcgagctatagagcctactaatcgtacggtcctgtcagctcttcattcc

SEQ ID NO: 121565 - DNA, 60 bp, Artificial
  Synthetic oligonucleotide
atccaaaaatcgtaaataacacagctgatttgggttatcacgagtgggaacagtatcacg

SEQ ID NO: 121566 - DNA, 60 bp, Artificial
  Synthetic oligonucleotide
cacaacagccgctatcaaagcatcacaaatatcccaacaacttagtacagctttcagcgc

SEQ ID NO: 121567 - DNA, 60 bp, Artificial
  Synthetic oligonucleotide
gtggagcgaaggttctggctgatacggccgaagcggttgcagacacaacagccgctatca

SEQ ID NO: 121568 - DNA, 60 bp, Artificial
  Synthetic oligonucleotide
gttgctagtggagcgaaggttctggctgatacggccgaagcggttgcagacacaacagcc

SEQ ID NO: 121569 - DNA, 60 bp, Artificial
  Synthetic oligonucleotide
ccgacggagtgggagtaatccctatctttggaccaaatgttgctagtggagcgaaggttc

SEQ ID NO: 121570 - DNA, 60 bp, Artificial
  Synthetic oligonucleotide
tcttcggacattctcgttccccttggacacgtcaatagagcacacagtactcacacgcta

SEQ ID NO: 121571 - DNA, 60 bp, Artificial
  Synthetic oligonucleotide
agtcatcaattcatcccgagctgtcgctcacactagtgccgctattgccgacggagtggg

SEQ ID NO: 121572 - DNA, 60 bp, Artificial
  Synthetic oligonucleotide
cctaattatggaacaagtcatcaattcatcccgagctgtcgctcacactagtgccgctat

SEQ ID NO: 121573 - DNA, 60 bp, Artificial
  Synthetic oligonucleotide
gagggaagcgatgcagtaattcagccaccgatgactactagtgatcataaggcattgggc

SEQ ID NO: 121574 - DNA, 60 bp, Artificial
  Synthetic oligonucleotide
catgtctaacgacatgcactttgatcacgttgctatgcttggccatcttgacacacaccg

SEQ ID NO: 121575 - DNA, 60 bp, Artificial
  Synthetic oligonucleotide
atggtgttgatctccatagtgttcgtgttatcactggattgtcggagggaagcgatgcag

SEQ ID NO: 121576 - DNA, 60 bp, Artificial
  Synthetic oligonucleotide
acacacaccgccagaaacacaaggacaatttggaagctaaactgccaggatcttcggaca

SEQ ID NO: 121577 - DNA, 60 bp, Artificial
  Synthetic oligonucleotide
ataacacagctgatttgggttatcacgagtgggaacagtatcacggcaatggcaattgga

SEQ ID NO: 121578 - DNA, 60 bp, Artificial
  Synthetic oligonucleotide
ttggttacttcgaacagtatctctgtcgagctatagagcctactaatcgtacggtcctgt

SEQ ID NO: 121579 - DNA, 60 bp, Artificial
  Synthetic oligonucleotide
cggtcctgtcagctcttcattcctcattcgacagtattcactcagattccatgtctaacg

SEQ ID NO: 121580 - DNA, 60 bp, Artificial
  Synthetic oligonucleotide
ctttcagcgcacttagaactgttcatgaacatccgaataaattcatcgaagccgcagtca

SEQ ID NO: 121581 - DNA, 60 bp, Artificial
  Synthetic oligonucleotide
tcacgcgatcagtttgtgttcttgatttaggacaaaagacttattgcggtaaagtggtta

SEQ ID NO: 121582 - DNA, 60 bp, Artificial
  Synthetic oligonucleotide
tgggagaaccgtacaatgtggggttacgccaaccccgattccaaaaagttatgttttgga

SEQ ID NO: 121583 - DNA, 60 bp, Artificial
  Synthetic oligonucleotide
gtgttcttgatttaggacaaaagacttattgcggtaaagtggttagagcagtagatggag

SEQ ID NO: 121584 - DNA, 60 bp, Artificial
  Synthetic oligonucleotide
gttttggagattcgtgaatgcggacgttaccgtattcaagatgggacggatgttttaagc

SEQ ID NO: 121585 - DNA, 60 bp, Artificial
  Synthetic oligonucleotide
atgttttggagattcgtgaatgcggacgttaccgtattcaagatgggacggatgttttaa

SEQ ID NO: 121586 - DNA, 60 bp, Artificial
  Synthetic oligonucleotide
atgattacagagagtggaattgaggtaacgcaaaaccgatgggaggagtggagtttcgaa

SEQ ID NO: 121587 - DNA, 58 bp, Artificial
  Synthetic oligonucleotide
ggggagcggttgatcctcctgggtgtacgtggcgcatgtaaccgcggatttcaacata

SEQ ID NO: 121588 - DNA, 60 bp, Artificial
  Synthetic oligonucleotide
atgattctcccagcaggggggagcggttgatcctcctgggtgtacgtggcgcatgtaacc

SEQ ID NO: 121589 - DNA, 50 bp, Artificial
  Synthetic oligonucleotide
attaccactgctgtgctaatgacttgagttacatgattctcccagcaggg

SEQ ID NO: 121590 - DNA, 60 bp, Artificial
  Synthetic oligonucleotide
cagtgggaagtcgtacgcattaccactgctgtgctaatgacttgagttacatgattctcc

SEQ ID NO: 121591 - DNA, 60 bp, Artificial
  Synthetic oligonucleotide
gattttttctaaaaagtgtaaatgggagaatgttccgatctacaattacgatgaggctag

SEQ ID NO: 121592 - DNA, 56 bp, Artificial
  Synthetic oligonucleotide
tcttcattggcgatgagagttccaaagaatgagggcaattgtggaaaaccgatttt

SEQ ID NO: 121593 - DNA, 60 bp, Artificial
  Synthetic oligonucleotide
tcttcattggcgatgagagttccaaagaatgagggcaattgtggaaaaccgattttttct

SEQ ID NO: 121594 - DNA, 60 bp, Artificial
  Synthetic oligonucleotide
gatgttttaagcttaatgattacagagagtggaattgaggtaacgcaaaaccgatgggag

SEQ ID NO: 121595 - DNA, 60 bp, Artificial
  Synthetic oligonucleotide
cgccgcgaaaactttctgttcagagcaatgaaagtcgttcagatgatgtggcacgaagac

SEQ ID NO: 121596 - DNA, 60 bp, Artificial
  Synthetic oligonucleotide
agaatgaaccagtacgtactgagagtatgtggtgtcaaagtgatagtgatgatcaatctg

SEQ ID NO: 121597 - DNA, 60 bp, Artificial
  Synthetic oligonucleotide
agccctgagtggtgggctcgatatgggaagctgtagaatgtatgggggaggaagaaatga

SEQ ID NO: 121598 - DNA, 60 bp, Artificial
  Synthetic oligonucleotide
gtacgccgcgaaaactttctgttcagagcaatgaaagtcgttcagatgatgtggcacgaa

SEQ ID NO: 121599 - DNA, 60 bp, Artificial
  Synthetic oligonucleotide
cgtttaaagatgagggagaacagggaggcagaaagggagaagatggaacgagccctgagt

SEQ ID NO: 121600 - DNA, 60 bp, Artificial
  Synthetic oligonucleotide
gggagaacagggaggcagaaagggagaagatggaacgagccctgagtggtgggctcgata

SEQ ID NO: 121601 - DNA, 60 bp, Artificial
  Synthetic oligonucleotide
ccgatgggaggagtggagtttcgaagcgttaacaccagtgccaatggctgtggcggtgaa

SEQ ID NO: 121602 - DNA, 60 bp, Artificial
  Synthetic oligonucleotide
tgagaggaagcggtgcggttccaccttacacgaaaaatggaatggatcgaagagcgatgc

SEQ ID NO: 121603 - DNA, 60 bp, Artificial
  Synthetic oligonucleotide
gtactgagagtatgtggtgtcaaagtgatagtgatgatcaatctgatgaggatcacgagg

SEQ ID NO: 121604 - DNA, 60 bp, Artificial
  Synthetic oligonucleotide
gatcaatctgatgaggatcacgaggttgggggtacagagccagaaaattatatcactgag

SEQ ID NO: 121605 - DNA, 60 bp, Artificial
  Synthetic oligonucleotide
agatttgattcctgaggaggaattcttgaggaattatcgcgtagaaaaagagcatccgtt

SEQ ID NO: 121606 - DNA, 60 bp, Artificial
  Synthetic oligonucleotide
caggatagaatgatgttgatctcgtctgaaagacgaaaggatatcgaggatgtccgaggc

SEQ ID NO: 121607 - DNA, 60 bp, Artificial
  Synthetic oligonucleotide
ccacagtatgatacattgaaaatctttgaacgttcagtacttaacctgagagatttgatt

SEQ ID NO: 121608 - DNA, 54 bp, Artificial
  Synthetic oligonucleotide
aaggaattctgaatttatatggcatacaggtagcggtagaatctagctgggaag

SEQ ID NO: 121609 - DNA, 60 bp, Artificial
  Synthetic oligonucleotide
cctttaggattatcaacaatgagagagttcgttcacaagtatggaagtccgtttaatcaa

SEQ ID NO: 121610 - DNA, 50 bp, Artificial
  Synthetic oligonucleotide
atatatggggacttgcccgttaaagcctggtgtagcttcataagagagta

SEQ ID NO: 121611 - DNA, 60 bp, Artificial
  Synthetic oligonucleotide
cgtgaatttgttgaaatgagagcgaaagcggagatgcagatatatggggacttgcccgtt

SEQ ID NO: 121612 - DNA, 60 bp, Artificial
  Synthetic oligonucleotide
gcggcaagctaggagggaagattattgtaggggaccttgaagccacacgttcacgggtta

SEQ ID NO: 121613 - DNA, 60 bp, Artificial
  Synthetic oligonucleotide
ccgcaaagcggcaagctaggagggaagattattgtaggggaccttgaagccacacgttca

SEQ ID NO: 121614 - DNA, 60 bp, Artificial
  Synthetic oligonucleotide
taagtggaattaggactgctatgatgaaacacagtacgctaagatatgaagggcatacgc

SEQ ID NO: 121615 - DNA, 60 bp, Artificial
  Synthetic oligonucleotide
tgttacgagcaccttattcttggtttgttaagatgtggggtgtatgctgtagcgaggtca

SEQ ID NO: 121616 - DNA, 60 bp, Artificial
  Synthetic oligonucleotide
ggagagggccgtgtcgtgaatacattatggaatggaaaacgtgcagtttataaggcagat

SEQ ID NO: 121617 - DNA, 60 bp, Artificial
  Synthetic oligonucleotide
tatggatatggagagggccgtgtcgtgaatacattatggaatggaaaacgtgcagtttat

SEQ ID NO: 121618 - DNA, 60 bp, Artificial
  Synthetic oligonucleotide
catgtatttctacggagcatgattttgactgtataattcgcgtaatttttgatacaattg

SEQ ID NO: 121619 - DNA, 60 bp, Artificial
  Synthetic oligonucleotide
ggaggtgaaacatcggtgcgctggattaatctcatttctatctgaacagtatgtaggcga

SEQ ID NO: 121620 - DNA, 60 bp, Artificial
  Synthetic oligonucleotide
gattttcgaagaatatgagggaaatacggcgtaaacgtggtgtcaaatataaaactgatg

SEQ ID NO: 121621 - DNA, 60 bp, Artificial
  Synthetic oligonucleotide
gcggaatatatttcagctgagaggttacgttttgatgcaatgaaactgcttaagagaggc

SEQ ID NO: 121622 - DNA, 60 bp, Artificial
  Synthetic oligonucleotide
tgttaagcccgaagacatgtatacctcgatgttaagattagctcggaacaccagttcggg

SEQ ID NO: 121623 - DNA, 60 bp, Artificial
  Synthetic oligonucleotide
atgtccctagatgtgtgtacgcaagaaatgtctgataattttattagatacccgaaagaa

SEQ ID NO: 121624 - DNA, 60 bp, Artificial
  Synthetic oligonucleotide
aaagacagagcaggatgcggcgattttgtatgcatcgcaacttctgatgattcgggcggc

SEQ ID NO: 121625 - DNA, 60 bp, Artificial
  Synthetic oligonucleotide
cccgaaagaatttacaaagacagagcaggatgcggcgattttgtatgcatcgcaacttct

SEQ ID NO: 121626 - DNA, 60 bp, Artificial
  Synthetic oligonucleotide
gctggttttattaatggtactctaccgttctggaatgaaacagaagcggataaacgacag

SEQ ID NO: 121627 - DNA, 60 bp, Artificial
  Synthetic oligonucleotide
tctgatgattcgggcggcacatggacatcatccgggtatacttataattaatgcttctgc

SEQ ID NO: 121628 - DNA, 60 bp, Artificial
  Synthetic oligonucleotide
gaccgaagatatattcttagatcttttgcaaacgggtaatgagtttgttcgacatctagc

SEQ ID NO: 121629 - DNA, 60 bp, Artificial
  Synthetic oligonucleotide
gttgaatggaatggagttggagcttattatgaatcgcttaatatagttatgaccgaagat

SEQ ID NO: 121630 - DNA, 60 bp, Artificial
  Synthetic oligonucleotide
gtatttaattcgagatccattatgtgctttcctcccagttgaatggaatggagttggagc

SEQ ID NO: 121631 - DNA, 60 bp, Artificial
  Synthetic oligonucleotide
agtcggcttccggaaattgaaacgaaccattttcgccgacggagtgtatagggatagacg

SEQ ID NO: 121632 - DNA, 60 bp, Artificial
  Synthetic oligonucleotide
atcattagtcggcttccggaaattgaaacgaaccattttcgccgacggagtgtataggga

SEQ ID NO: 121633 - DNA, 60 bp, Artificial
  Synthetic oligonucleotide
ggatgtccgaggctatctcaaatcacaagttcaaactttgactactaaaatttcaagggg

SEQ ID NO: 121634 - DNA, 60 bp, Artificial
  Synthetic oligonucleotide
gggatggtcaatcatgcaagacgcatcgttggttcgaagcagcgtgcaacgttttctaaa

SEQ ID NO: 121635 - DNA, 60 bp, Artificial
  Synthetic oligonucleotide
gcgtgcaacgttttctaaaatatactaaaatagatgggaaagagccgaaatatatatact

SEQ ID NO: 121636 - DNA, 60 bp, Artificial
  Synthetic oligonucleotide
attgagataacttcgagaattaaagcacttgttatatttcaagaaggccataagatattc

SEQ ID NO: 121637 - DNA, 60 bp, Artificial
  Synthetic oligonucleotide
atgaatatttctcaaaggtaggtggcagcacaaggccgcaaagcggcaagctaggaggga

SEQ ID NO: 121638 - DNA, 60 bp, Artificial
  Synthetic oligonucleotide
tggtgtcaaatataaaactgatgatacttatttcgagcgtaggcgtgatcaaggaattct

SEQ ID NO: 121639 - DNA, 60 bp, Artificial
  Synthetic oligonucleotide
acgggccaggtattaagaatagcattggaaaacagattgagataacttcgagaattaaag

SEQ ID NO: 121640 - DNA, 60 bp, Artificial
  Synthetic oligonucleotide
atcaaagcgtatgacgaggcgctagccgcaggcgaagatattgttaagcccgaagacatg

SEQ ID NO: 121641 - DNA, 60 bp, Artificial
  Synthetic oligonucleotide
agatattgttaagcccgaagacatgtatacctcgatgttaagattagctcggaacaccag

SEQ ID NO: 121642 - DNA, 60 bp, Artificial
  Synthetic oligonucleotide
acacgtaacaactttatcaaagcgtatgacgaggcgctagccgcaggcgaagatattgtt

SEQ ID NO: 121643 - DNA, 60 bp, Artificial
  Synthetic oligonucleotide
tactgggtacggccgtgcttgggtaaaaaatgtttcgagtgatattgagaagcagatgaa

SEQ ID NO: 121644 - DNA, 60 bp, Artificial
  Synthetic oligonucleotide
agcagatgaaaccggacaagagcaatctaatatcaagagtaaacgaatatacacgtaaca

SEQ ID NO: 121645 - DNA, 60 bp, Artificial
  Synthetic oligonucleotide
gagcaccttattcttggtttgttaagatgtggggtgtatgctgtagcgaggtcaaagttc

SEQ ID NO: 121646 - DNA, 60 bp, Artificial
  Synthetic oligonucleotide
ttcgatgctgttccagataatgaatatcgagtcacgtgtggctgatagacttgcggaata

SEQ ID NO: 121647 - DNA, 60 bp, Artificial
  Synthetic oligonucleotide
tcagaatttatcgccctcttttttcttacagaagaatttattagggccaaggatgagcac

SEQ ID NO: 121648 - DNA, 55 bp, Artificial
  Synthetic oligonucleotide
ttttcttacagaagaatttattagggccaaggatgagcacacgagtaaggatgtc

SEQ ID NO: 121649 - DNA, 60 bp, Artificial
  Synthetic oligonucleotide
ggatgagcacacgagtaaggatgtcatatgttgacaggattgattcgattctgcgaggtg

SEQ ID NO: 121650 - DNA, 60 bp, Artificial
  Synthetic oligonucleotide
ataattaacatcttagaaaagataggacacactcataatgcagcagatctttcgatgctg

SEQ ID NO: 121651 - DNA, 51 bp, Artificial
  Synthetic oligonucleotide
gatggcaagacccgctgttcaaagtgtgctgaatagcgacgaactaacaga

SEQ ID NO: 121652 - DNA, 60 bp, Artificial
  Synthetic oligonucleotide
tcaaaatgtttagccatgatctagaactgagtacgaactatattaaaatgtttgacgttc

SEQ ID NO: 121653 - DNA, 60 bp, Artificial
  Synthetic oligonucleotide
ccatgatctagaactgagtacgaactatattaaaatgtttgacgttcagtattcgtctgg

SEQ ID NO: 121654 - DNA, 60 bp, Artificial
  Synthetic oligonucleotide
tttgacgttcagtattcgtctggagtgcaacgccatttttattttccagatcagaattta

SEQ ID NO: 121655 - DNA, 60 bp, Artificial
  Synthetic oligonucleotide
aggcttaaagaagaaaagagctataatacatatgacactactgatagcggcggttgttgc

SEQ ID NO: 121656 - DNA, 60 bp, Artificial
  Synthetic oligonucleotide
tcagtctgcacgttatcgagtgatatgagcgtggcatttaagctaaatggtacatcagct

SEQ ID NO: 121657 - DNA, 60 bp, Artificial
  Synthetic oligonucleotide
tgacgcggtgaggatgagttttacagaattttcatcagtcccgctagatggtttcgaatt

SEQ ID NO: 121658 - DNA, 60 bp, Artificial
  Synthetic oligonucleotide
tcccaaccgccgagatatgctccgagtgcgcccatgccatcgtcaatgcctactgttgca

SEQ ID NO: 121659 - DNA, 60 bp, Artificial
  Synthetic oligonucleotide
aggcagctaattctatagctaacttagcactcattaaaacggtattgtcaaggattgcaa

SEQ ID NO: 121660 - DNA, 60 bp, Artificial
  Synthetic oligonucleotide
cgcaaagcatactagagagtacgcagaattttactcgcagtcaaatcaattgctatcata

SEQ ID NO: 121661 - DNA, 60 bp, Artificial
  Synthetic oligonucleotide
tatgaatactttattgcgcagcacgctgtcgtagaaaaaatgttatcatacgcaaagcat

SEQ ID NO: 121662 - DNA, 60 bp, Artificial
  Synthetic oligonucleotide
tggtcgtaaaacgatattttcaactaagaaaaatatgcatgtcatggatgatattgcaca

SEQ ID NO: 121663 - DNA, 60 bp, Artificial
  Synthetic oligonucleotide
gatgctagaagtaccagttaaacatgatgatcatttacttcgcgattcagaattagccgg

SEQ ID NO: 121664 - DNA, 60 bp, Artificial
  Synthetic oligonucleotide
aatcaaaaagattcagtatggtgctgttgcttcaggagaaaaacaaactaaggcagctaa

SEQ ID NO: 121665 - DNA, 60 bp, Artificial
  Synthetic oligonucleotide
acacaaattaatctcatggactcatacgttcaaatacctgatggtaatgtaatcaaaaag

SEQ ID NO: 121666 - DNA, 60 bp, Artificial
  Synthetic oligonucleotide
cagacgtttcacaatgggattcgtcacaacataacacacagccatttagaaaaggaataa

SEQ ID NO: 121667 - DNA, 60 bp, Artificial
  Synthetic oligonucleotide
gcatactagagagtacgcagaattttactcgcagtcaaatcaattgctatcatatggtga

SEQ ID NO: 121668 - DNA, 60 bp, Artificial
  Synthetic oligonucleotide
gacataaaaccattttttgtcacttctgaagctaatttggcaattcaatacagaaaattt

SEQ ID NO: 121669 - DNA, 51 bp, Artificial
  Synthetic oligonucleotide
acgtcgtgcgcaaatatcagcgttattaactatgttacagaaaccagtttc

SEQ ID NO: 121670 - DNA, 60 bp, Artificial
  Synthetic oligonucleotide
ggcagctaattctatagctaacttagcactcattaaaacggtattgtcaaggattgcaaa

SEQ ID NO: 121671 - DNA, 60 bp, Artificial
  Synthetic oligonucleotide
acaatgcataggatcgaggacgtatcaaatagaagatagtgggtcaaaatcatcgatttc

SEQ ID NO: 121672 - DNA, 60 bp, Artificial
  Synthetic oligonucleotide
ttcattaggagttccaccagttgatgcaagcacgtacgttgggtcaagaatatattcgca

SEQ ID NO: 121673 - DNA, 60 bp, Artificial
  Synthetic oligonucleotide
gtatttagtttcattaggagttccaccagttgatgcaagcacgtacgttgggtcaagaat

SEQ ID NO: 121674 - DNA, 60 bp, Artificial
  Synthetic oligonucleotide
cttgaaataataaactatgctattaagaatggagcttggattagtttgttttgtaactac

SEQ ID NO: 121675 - DNA, 60 bp, Artificial
  Synthetic oligonucleotide
ttaaaggcaagataccagccgtaacatttatattacatctttatgctaaacttgaaataa

SEQ ID NO: 121676 - DNA, 60 bp, Artificial
  Synthetic oligonucleotide
attacggtctccctacactagtgcgaacttctttcaagattagagtgcttagatgtgacc

SEQ ID NO: 121677 - DNA, 60 bp, Artificial
  Synthetic oligonucleotide
tggtgagatgtataatgagtatacaatgttaattagagatgaaatagtcaagatgctaga

SEQ ID NO: 121678 - DNA, 60 bp, Artificial
  Synthetic oligonucleotide
agatgctagaagtaccagttaaacatgatgatcatttacttcgcgattcagaattagccg

SEQ ID NO: 121679 - DNA, 60 bp, Artificial
  Synthetic oligonucleotide
gttagaacgacattcaaatgacgttgctgatgcgaacaaaatttataaacgtagactgga

SEQ ID NO: 121680 - DNA, 60 bp, Artificial
  Synthetic oligonucleotide
gaacgacattcaaatgacgttgctgatgcgaacaaaatttataaacgtagactggatcta

SEQ ID NO: 121681 - DNA, 54 bp, Artificial
  Synthetic oligonucleotide
tttatcatttgtttacaattcacaatctgcagttcaaataccaatttactattc

SEQ ID NO: 121682 - DNA, 55 bp, Artificial
  Synthetic oligonucleotide
aagatgtatcgaatttcatgctaaatgtgttgacagttctaagaaaggtctgtca

SEQ ID NO: 121683 - DNA, 60 bp, Artificial
  Synthetic oligonucleotide
atagatcgacgttagctaaattagtttcatctccaatgtcgatattagttgcattaatag

SEQ ID NO: 121684 - DNA, 60 bp, Artificial
  Synthetic oligonucleotide
taaggcaattgtacctgatcaaattttcgatgaattacaggaaatgatcgacaatatgag

SEQ ID NO: 121685 - DNA, 60 bp, Artificial
  Synthetic oligonucleotide
tgaaggataaaccgtactacttagtaacatgggctaactcgtctatagaaatgcttatgt

SEQ ID NO: 121686 - DNA, 60 bp, Artificial
  Synthetic oligonucleotide
cgtactacttagtaacatgggctaactcgtctatagaaatgcttatgtcagtgttttcac

SEQ ID NO: 121687 - DNA, 55 bp, Artificial
  Synthetic oligonucleotide
ctaaagttaaagcattggtatctacagtcggtattgaaatagcgaaaagatatat

SEQ ID NO: 121688 - DNA, 60 bp, Artificial
  Synthetic oligonucleotide
tctgtagctattactggatcactaaggttatttccgtcagaacgagtgttaactactaat

SEQ ID NO: 121689 - DNA, 60 bp, Artificial
  Synthetic oligonucleotide
ctggatcactaaggttatttccgtcagaacgagtgttaactactaattctacattcaaag

SEQ ID NO: 121690 - DNA, 60 bp, Artificial
  Synthetic oligonucleotide
aatatggaacaactaacgatgaagtatatatacaaagagcatttatgtcgctgtctagtc

SEQ ID NO: 121691 - DNA, 60 bp, Artificial
  Synthetic oligonucleotide
acgatgaagtatatatacaaagagcatttatgtcgctgtctagtcaaaagtcaggaatag

SEQ ID NO: 121692 - DNA, 50 bp, Artificial
  Synthetic oligonucleotide
ctgtctagtcaaaagtcaggaatagctgatgagatagcttcttcacaaac

SEQ ID NO: 121693 - DNA, 60 bp, Artificial
  Synthetic oligonucleotide
gtaattgtatccaaaggtatagctgtaacagaaaaggcgaaattgaattcatatgcacca

SEQ ID NO: 121694 - DNA, 60 bp, Artificial
  Synthetic oligonucleotide
ccaaaggtatagctgtaacagaaaaggcgaaattgaattcatatgcaccagtttatttag

SEQ ID NO: 121695 - DNA, 60 bp, Artificial
  Synthetic oligonucleotide
atatgcaccagtttatttagaaaaacgtcgtgcgcaaatatcagcgttattaactatgtt

SEQ ID NO: 121696 - DNA, 60 bp, Artificial
  Synthetic oligonucleotide
tgcataggatcgaggacgtatcaaatagaagatagtgggtcaaaatcatcgatttcgaag

SEQ ID NO: 121697 - DNA, 60 bp, Artificial
  Synthetic oligonucleotide
aattgcatccaagtggaatcattcaatgatacaacggtgaaatgtgaatttcaaagccaa

SEQ ID NO: 121698 - DNA, 60 bp, Artificial
  Synthetic oligonucleotide
ccatcagtcgcttccaacactacagagtctctcagaagtcaagaattaccaaggcattct

SEQ ID NO: 121699 - DNA, 60 bp, Artificial
  Synthetic oligonucleotide
acgggtacttcttccatcagtcgcttccaacactacagagtctctcagaagtcaagaatt

SEQ ID NO: 121700 - DNA, 60 bp, Artificial
  Synthetic oligonucleotide
ctacatctatattacgccataacacactcaagaatgctatatcagatatgtcggatgatg

SEQ ID NO: 121701 - DNA, 60 bp, Artificial
  Synthetic oligonucleotide
gaatttcatcacactacatctatattacgccataacacactcaagaatgctatatcagat

SEQ ID NO: 121702 - DNA, 60 bp, Artificial
  Synthetic oligonucleotide
ctattgatgttcataacgtccaagatagtattgtacctatgctacaaagtgggcttgttg

SEQ ID NO: 121703 - DNA, 60 bp, Artificial
  Synthetic oligonucleotide
gaaacaaaatgactctattgatgttcataacgtccaagatagtattgtacctatgctaca

SEQ ID NO: 121704 - DNA, 64 bp, Artificial
  Synthetic oligonucleotide
cacatgaacagataaattttgacgagataattgaaggtatagaagcacggaaacaaaatgactc

SEQ ID NO: 121705 - DNA, 60 bp, Artificial
  Synthetic oligonucleotide
acacatgaacagataaattttgacgagataattgaaggtatagaagcacggaaacaaaat

SEQ ID NO: 121706 - DNA, 60 bp, Artificial
  Synthetic oligonucleotide
gtaaagcatttgattttctacttgattcaggagttttaatagaaccagtaacacatgaac

SEQ ID NO: 121707 - DNA, 60 bp, Artificial
  Synthetic oligonucleotide
aatacatcatttacccaagtcgaggcaatcattcaagaaattaacgatagccacgtccac

SEQ ID NO: 121708 - DNA, 54 bp, Artificial
  Synthetic oligonucleotide
tgcattgcgttggctacggctacctgcggggtgttcggggattttgataatagt

SEQ ID NO: 121709 - DNA, 60 bp, Artificial
  Synthetic oligonucleotide
gcgtttcatcatgttgtattcttgcttagggtgaatcggttgcattgcgttggctacggc

SEQ ID NO: 121710 - DNA, 60 bp, Artificial
  Synthetic oligonucleotide
tatcgcaaattcatgacatcagttatagaacaggcagaagaatccaagaacacagactag

SEQ ID NO: 121711 - DNA, 60 bp, Artificial
  Synthetic oligonucleotide
gttaaatttgtatcgcaaattcatgacatcagttatagaacaggcagaagaatccaagaa

SEQ ID NO: 121712 - DNA, 60 bp, Artificial
  Synthetic oligonucleotide
ggcattctaagtcgtttcaatgtgacgccagaacagttaaatttgtatcgcaaattcatg

SEQ ID NO: 121713 - DNA, 60 bp, Artificial
  Synthetic oligonucleotide
gtcaagaattaccaaggcattctaagtcgtttcaatgtgacgccagaacagttaaatttg

SEQ ID NO: 121714 - DNA, 60 bp, Artificial
  Synthetic oligonucleotide
caaataagatgcgtttcatcatgttgtattcttgcttagggtgaatcggttgcattgcgt

SEQ ID NO: 121715 - DNA, 60 bp, Artificial
  Synthetic oligonucleotide
gaagagtactcattagatttggcttccgttagtttcgcgttgagtatcaaataagatgcg

SEQ ID NO: 121716 - DNA, 60 bp, Artificial
  Synthetic oligonucleotide
tttgaagagtactcattagatttggcttccgttagtttcgcgttgagtatcaaataagat

SEQ ID NO: 121717 - DNA, 60 bp, Artificial
  Synthetic oligonucleotide
aacgctaacaacgccagctatcacaatattcgatatactgtgttaggtaatgttttacta

SEQ ID NO: 121718 - DNA, 60 bp, Artificial
  Synthetic oligonucleotide
caatgcatcaccaaatcccttgcgcatacggatcctgcgtctgccgatctcattttcaaa

SEQ ID NO: 121719 - DNA, 60 bp, Artificial
  Synthetic oligonucleotide
gagaggttactcacacgtggatcgccacatgcatccagacgcttccgtgacgaaagttgt

SEQ ID NO: 121720 - DNA, 60 bp, Artificial
  Synthetic oligonucleotide
gcgcggaccaatctagaatcatcttaaaccaccaaaacaggtctgtgacataagcgccgg

SEQ ID NO: 121721 - DNA, 60 bp, Artificial
  Synthetic oligonucleotide
gtggaggtacccggatatcgtaaagaaagatttgacgtatgaccctgcgtgggcgatgaa

SEQ ID NO: 121722 - DNA, 54 bp, Artificial
  Synthetic oligonucleotide
ggggccgatgcggatatgtatgaattaaggaatttcatgagattgagaggttac

SEQ ID NO: 121723 - DNA, 60 bp, Artificial
  Synthetic oligonucleotide
cctattcctaatgtggaggtacccggatatcgtaaagaaagatttgacgtatgaccctgc

SEQ ID NO: 121724 - DNA, 60 bp, Artificial
  Synthetic oligonucleotide
ttgtcgtatcgtccactttgaaacgtctccgtacgcatatacgtctgtcgcgtactttcc

SEQ ID NO: 121725 - DNA, 60 bp, Artificial
  Synthetic oligonucleotide
ctgacgaactgaaacggatgggattggatttgtctggtcatttatatgtcacattaatgt

SEQ ID NO: 121726 - DNA, 60 bp, Artificial
  Synthetic oligonucleotide
cgcgacagacgtatatgcgtacggagacgtttcaaagtggacgatacgacaattacgggg

SEQ ID NO: 121727 - DNA, 60 bp, Artificial
  Synthetic oligonucleotide
gtatttacgaggtaatgaagaagtcggtgatagctactgcttgggtgggccgtgcgcctt

SEQ ID NO: 121728 - DNA, 60 bp, Artificial
  Synthetic oligonucleotide
ccgtgacgaaagttgtttcacgtgatgtgcgcaaaatggtcgaattgtatcacggtcgcg

SEQ ID NO: 121729 - DNA, 60 bp, Artificial
  Synthetic oligonucleotide
ttcgcgttacccagatctaccgttatgctcaacggatcctaccgcgatatcagaattcta

SEQ ID NO: 121730 - DNA, 60 bp, Artificial
  Synthetic oligonucleotide
cggaggcggaaacgttgaacgatgcaaatcctcggctacataaagtttatggaatgccgg

SEQ ID NO: 121731 - DNA, 60 bp, Artificial
  Synthetic oligonucleotide
cgatatgaaggtgttcaaatagtctcttttttagaaatctaccacgatcgcgaccgtgat

SEQ ID NO: 121732 - DNA, 60 bp, Artificial
  Synthetic oligonucleotide
gaatttcatgagattgagaggttactcacacgtggatcgccacatgcatccagacgcttc

SEQ ID NO: 121733 - DNA, 60 bp, Artificial
  Synthetic oligonucleotide
gatacgacaattacggggtcatggattcatttttataagcacgcacaagaacgtacagct

SEQ ID NO: 121734 - DNA, 60 bp, Artificial
  Synthetic oligonucleotide
atagcttatgaaatgggtggtgcattttccagcgcattgattaaacacaggataccgaat

SEQ ID NO: 121735 - DNA, 60 bp, Artificial
  Synthetic oligonucleotide
acctacttattcccccaaccgggggccgatgcggatatgtatgaattaaggaatttcatg

SEQ ID NO: 121736 - DNA, 60 bp, Artificial
  Synthetic oligonucleotide
caaccaggtttgcggaggatagattgggtgaggaaatagcttatgaaatgggtggtgcat

SEQ ID NO: 121737 - DNA, 60 bp, Artificial
  Synthetic oligonucleotide
caatgcactggaaaatgcaccacccatttcataagctatctcctcacccaatctatcctc

SEQ ID NO: 121738 - DNA, 60 bp, Artificial
  Synthetic oligonucleotide
atcatgagtgggagacgaccaggtttgcggaggatagattgggtgaggaaatagcttatg

SEQ ID NO: 121739 - DNA, 60 bp, Artificial
  Synthetic oligonucleotide
gacgaccaggtttgcggaggatagattgggtgaggaaatagcttatgaaatgggtggtgc

SEQ ID NO: 121740 - DNA, 60 bp, Artificial
  Synthetic oligonucleotide
ggaggatcgggtatcggctcctttagcgaaacagcaaaattcatcgcccacgcagggtca

SEQ ID NO: 121741 - DNA, 60 bp, Artificial
  Synthetic oligonucleotide
gctccaatcccatattgcaccgattagtcaaataaaacagatccgctcgtggctcatcac

SEQ ID NO: 121742 - DNA, 60 bp, Artificial
  Synthetic oligonucleotide
cggcccacccaagcagtagctatcaccgacttcttcattacctcataaatactaggctcc

SEQ ID NO: 121743 - DNA, 60 bp, Artificial
  Synthetic oligonucleotide
cctgatcctcctgtgcctgatatttctttgtgtaggttcatcggactgcgcgtcgaatca

SEQ ID NO: 121744 - DNA, 60 bp, Artificial
  Synthetic oligonucleotide
tcaggcacaggaggatcgggtatcggctcctttagcgaaacagcaaaattcatcgcccac

SEQ ID NO: 121745 - DNA, 60 bp, Artificial
  Synthetic oligonucleotide
cagatccgctcgtggctcatcactttcgtgtaacaatccattcttacgtacgatatgaag

SEQ ID NO: 121746 - DNA, 60 bp, Artificial
  Synthetic oligonucleotide
tgttttgcgcggaccaatctagaatcatcttaaaccaccaaaacaggtctgtgacataag

SEQ ID NO: 121747 - DNA, 60 bp, Artificial
  Synthetic oligonucleotide
gattctagattggtctgcgcaaaacagggagcaaaaactacgcgatctaaagaggtctgc

SEQ ID NO: 121748 - DNA, 60 bp, Artificial
  Synthetic oligonucleotide
cctgatatttctttgtgtaggttcatcggactgcgcgtcgaatcatccgtgctgagggtc

SEQ ID NO: 121749 - DNA, 60 bp, Artificial
  Synthetic oligonucleotide
ctcaattacttccgccgcagacctctttagatcgcgtagtttttgctccttgttttgcgc

SEQ ID NO: 121750 - DNA, 60 bp, Artificial
  Synthetic oligonucleotide
gtctgcggcggaagtaattgagtggaaggagcagatggccgagcgtccatggcatgtgag

SEQ ID NO: 121751 - DNA, 60 bp, Artificial
  Synthetic oligonucleotide
atcagatcatttctcacatgccatggacgctcggccatctgctccttccactcaattact

SEQ ID NO: 121752 - DNA, 60 bp, Artificial
  Synthetic oligonucleotide
cataaattttatgtagccgaggatttgcatcgttcaacgtttccgcctccgacccgtgaa

SEQ ID NO: 121753 - DNA, 60 bp, Artificial
  Synthetic oligonucleotide
gtgacataagcgccggacattaatgtgacatataaatgaccagacaaatccaatcccatc

SEQ ID NO: 121754 - DNA, 60 bp, Artificial
  Synthetic oligonucleotide
ctatctcctcacccaatctatcctccgcaaacctggtcgtctcccactcatgatcattca

SEQ ID NO: 121755 - DNA, 60 bp, Artificial
  Synthetic oligonucleotide
cctcacccaatctatcctccgcaaacctggtcgtctcccactcatgatcattcatctgcg

SEQ ID NO: 121756 - DNA, 60 bp, Artificial
  Synthetic oligonucleotide
cataaagtttatggaatgccggaaataccgccattatacatggaatatgcggaaataggg

SEQ ID NO: 121757 - DNA, 60 bp, Artificial
  Synthetic oligonucleotide
acgatcaccaggacggtttagaagggtgttatggcacgtatatgacccaatagcacctga

SEQ ID NO: 121758 - DNA, 60 bp, Artificial
  Synthetic oligonucleotide
ttggatctggacactcaggtgctattgggtcatatacgtgccataacacccttctaaacc

SEQ ID NO: 121759 - DNA, 60 bp, Artificial
  Synthetic oligonucleotide
atgggatgtatcgtcagatcgatcgcagatgaatgatcatgagtgggagacgaccaggtt

SEQ ID NO: 121760 - DNA, 60 bp, Artificial
  Synthetic oligonucleotide
tgagagacttttcatatgggatgtatcgtcagatcgatcgcagatgaatgatcatgagtg

SEQ ID NO: 121761 - DNA, 60 bp, Artificial
  Synthetic oligonucleotide
gagagattagctagtgacttagaagcgttaggcaatgctgatgctcgcgtacgatcgaag

SEQ ID NO: 121762 - DNA, 60 bp, Artificial
  Synthetic oligonucleotide
gtacgatcgaagatagcatatggtagtttgaagagggagatggcggatataccgaagggc

SEQ ID NO: 121763 - DNA, 60 bp, Artificial
  Synthetic oligonucleotide
taaaatagagcagacggcattagatcaggaatcgacagaagaagagactaagttagtaag

SEQ ID NO: 121764 - DNA, 60 bp, Artificial
  Synthetic oligonucleotide
attgcttcaatagacgagcggaacgtgctaatttcttgccaatgatgaagcacctcaaaa

SEQ ID NO: 121765 - DNA, 60 bp, Artificial
  Synthetic oligonucleotide
atgctgacccaagatttaagacgggatttaggatatacaacgagaacgcgagattattag

SEQ ID NO: 121766 - DNA, 60 bp, Artificial
  Synthetic oligonucleotide
ataaggtcaacggtaatgaaaaatactaatgaaagcgcctttgttcgttcacaaatagaa

SEQ ID NO: 121767 - DNA, 60 bp, Artificial
  Synthetic oligonucleotide
gggcgacactcttatccctgtgtggaatgcgtctggtgatataaggtcaacggtaatgaa

SEQ ID NO: 121768 - DNA, 60 bp, Artificial
  Synthetic oligonucleotide
tgtcgttgccatgaataatatgctagaaatggcacggatgtcatttgttgatgagaagtt

SEQ ID NO: 121769 - DNA, 60 bp, Artificial
  Synthetic oligonucleotide
tgcataacttgggcgacactcttatccctgtgtggaatgcgtctggtgatataaggtcaa

SEQ ID NO: 121770 - DNA, 60 bp, Artificial
  Synthetic oligonucleotide
cgtcaaaacgctggatgacgccttcaaaacaaaagaatatccactacgatatttcattgc

SEQ ID NO: 121771 - DNA, 60 bp, Artificial
  Synthetic oligonucleotide
caataggaacagctattatgacaggagtgttaagtcatgttgaaagtgtcgttgccatga

SEQ ID NO: 121772 - DNA, 60 bp, Artificial
  Synthetic oligonucleotide
gactgatgtatcatcgatattaccactactaacatatacatgtatgtcaataggaacagc

SEQ ID NO: 121773 - DNA, 60 bp, Artificial
  Synthetic oligonucleotide
tatggcagtatccagaccattcgtaaacgaattcgttaaactaatcggtaagcacgttca

SEQ ID NO: 121774 - DNA, 60 bp, Artificial
  Synthetic oligonucleotide
gattaatctccgtgtatctaccgttttattggagtttcatggcaggtggcggtgaattac

SEQ ID NO: 121775 - DNA, 60 bp, Artificial
  Synthetic oligonucleotide
ggcgtaacaaaacttttcaatcatttgctatttatgacgtgtagtgatcatgggaggcag

SEQ ID NO: 121776 - DNA, 60 bp, Artificial
  Synthetic oligonucleotide
cacgttcaatatgagttacattccgacaatttggcttacaaaacaagattaatctccgtg

SEQ ID NO: 121777 - DNA, 60 bp, Artificial
  Synthetic oligonucleotide
gcgcgctacatatcacactataaaactactattataacgaccgttcatctaacagtgatc

SEQ ID NO: 121778 - DNA, 60 bp, Artificial
  Synthetic oligonucleotide
caccaggtaactcaacgcgtattgtcgcaatcgagcatatttctcaagatctttatttgc

SEQ ID NO: 121779 - DNA, 60 bp, Artificial
  Synthetic oligonucleotide
tcatggcaggtggcggtgaattacaaccgtatccgtttatgcgatctgatggtagttata

SEQ ID NO: 121780 - DNA, 60 bp, Artificial
  Synthetic oligonucleotide
tggcattgggtgagacagagcgtgaacaaaaattgatcgcagaactgaagtttttgatga

SEQ ID NO: 121781 - DNA, 58 bp, Artificial
  Synthetic oligonucleotide
gacaaggtaaatgcagctaagcaagcaataatgtatgagatagctaacacccaaacat

SEQ ID NO: 121782 - DNA, 60 bp, Artificial
  Synthetic oligonucleotide
gaaaccacgggacatatgaatacatctaagtttggacccttcatgactagaacaatggag

SEQ ID NO: 121783 - DNA, 65 bp, Artificial
  Synthetic oligonucleotide
caaccagaaattaaggagttatataatacgttgacattagaaaccacgggacatatgaatacatc

SEQ ID NO: 121784 - DNA, 60 bp, Artificial
  Synthetic oligonucleotide
ttacttacgtaattgtaaggtgagtagtttgatgttggcattgggtgagacagagcgtga

SEQ ID NO: 121785 - DNA, 60 bp, Artificial
  Synthetic oligonucleotide
acttaccatcatatcagccaccgttactgcctagtggaaactcatcgcataaccgagatg

SEQ ID NO: 121786 - DNA, 60 bp, Artificial
  Synthetic oligonucleotide
ttcttcgtaatgatcggtgccgacggaaatgaacaggaagcaatgcgtagagcattcgca

SEQ ID NO: 121787 - DNA, 60 bp, Artificial
  Synthetic oligonucleotide
ggaacatatccatcaggtcgagccgatacatcaactcaccatacagtgctgttgcaagca

SEQ ID NO: 121788 - DNA, 60 bp, Artificial
  Synthetic oligonucleotide
agcattcgcatactttagtatgtatggtagaatcagatatgaatatatccagtcgccgag

SEQ ID NO: 121789 - DNA, 60 bp, Artificial
  Synthetic oligonucleotide
ctgcgaaacattgtcaaacaagagtggctaaagtctggaaacagttattaattgtcgtca

SEQ ID NO: 121790 - DNA, 60 bp, Artificial
  Synthetic oligonucleotide
ccatacagtactgttgcaagcaattttaaggggtaacgaattgcgacgatgctctgaagg

SEQ ID NO: 121791 - DNA, 60 bp, Artificial
  Synthetic oligonucleotide
cgtattttaggtgacgacgttcgattaacttatcacggctctgaagatctatgtattaaa

SEQ ID NO: 121792 - DNA, 60 bp, Artificial
  Synthetic oligonucleotide
atatttggagagataaagtcaggtgaaggaacatatccatcaggtcgagccgatacatca

SEQ ID NO: 121793 - DNA, 60 bp, Artificial
  Synthetic oligonucleotide
acaaatagaagccgatcgtgaaaaacgtaaacagttaaatagcgtgatgactgcctattt

SEQ ID NO: 121794 - DNA, 60 bp, Artificial
  Synthetic oligonucleotide
cgttaacagagctttcattagataaggcggtgcaaccaattgcaagtatgacggcggtgc

SEQ ID NO: 121795 - DNA, 60 bp, Artificial
  Synthetic oligonucleotide
gctttcattagataaggcggtgcaaccaattgcaagtatgacggcggtgcaaaggccagc

SEQ ID NO: 121796 - DNA, 60 bp, Artificial
  Synthetic oligonucleotide
ctgcagttagggttatgacgaatgatggagcatatttgtcaacgttaacagagctttcat

SEQ ID NO: 121797 - DNA, 60 bp, Artificial
  Synthetic oligonucleotide
gcaagtatgacggcggtgcaaaggccagcagttttggagcatgatgcatctggacgcgcg

SEQ ID NO: 121798 - DNA, 60 bp, Artificial
  Synthetic oligonucleotide
gccggcatccaagcattggattggtaaagatgttaatggacatgttctaagagtagaatg

SEQ ID NO: 121799 - DNA, 60 bp, Artificial
  Synthetic oligonucleotide
ccagatcgtatttccttatggacgcgtgagagacaaaagggaatgtatagatatgatgag

SEQ ID NO: 121800 - DNA, 60 bp, Artificial
  Synthetic oligonucleotide
ttacttcaacaactagttgtaaatggatctttttgggggtttccagatcgtatttcctta

SEQ ID NO: 121801 - DNA, 60 bp, Artificial
  Synthetic oligonucleotide
cgtaatttgcatgtggaggtacaaaaatggtccggaaaatcaagaattgtcatggaagca

SEQ ID NO: 121802 - DNA, 60 bp, Artificial
  Synthetic oligonucleotide
gcgtaacaccatccagtcgtctattgacatctcaggtatggacgcctctatacaaccaga

SEQ ID NO: 121803 - DNA, 60 bp, Artificial
  Synthetic oligonucleotide
gtatccgttagacgatagtgagacgatgttcgctgatgaccatgacatagattacttacg

SEQ ID NO: 121804 - DNA, 60 bp, Artificial
  Synthetic oligonucleotide
ttatcttagaccgtttgcttccgaaattgcaacgaaattaacgaaaacaaaccttgatga

SEQ ID NO: 121805 - DNA, 60 bp, Artificial
  Synthetic oligonucleotide
gtttgatcccaattgacataacgcagccgcctgactttgatctatctatgtatccgttag

SEQ ID NO: 121806 - DNA, 60 bp, Artificial
  Synthetic oligonucleotide
gttctaagagtagaatgtttgatcccaattgacataacgcagccgcctgactttgatcta

SEQ ID NO: 121807 - DNA, 60 bp, Artificial
  Synthetic oligonucleotide
gacggcggtgcaaaggccagcagttttggagcatgatgcatctggacgcgcgtatagaca

SEQ ID NO: 121808 - DNA, 60 bp, Artificial
  Synthetic oligonucleotide
ctggacgcgcgtatagacaaacgtatactagtggagagttaagtgcagcatggaactatc

SEQ ID NO: 121809 - DNA, 60 bp, Artificial
  Synthetic oligonucleotide
acgtacactagtggagagttaagtgcagcatggaattatcttagaccgtttgcttccgaa

SEQ ID NO: 121810 - DNA, 60 bp, Artificial
  Synthetic oligonucleotide
gacgcgtgagagacaaaagggaatgtatagatatgatgagagcgcgaaagaggcgacggc

SEQ ID NO: 121811 - DNA, 51 bp, Artificial
  Synthetic oligonucleotide
tgctgaagtgtggattctttcctgctcattaaaccactccgcccagattag

SEQ ID NO: 121812 - DNA, 60 bp, Artificial
  Synthetic oligonucleotide
tggataagtcttggaagaggattagctacatcagctcttgttccaaccgctggttcaaga

SEQ ID NO: 121813 - DNA, 60 bp, Artificial
  Synthetic oligonucleotide
atctactgcgagctggtaattcgccatggcagctgactcagttcttagattggataagtc

SEQ ID NO: 121814 - DNA, 60 bp, Artificial
  Synthetic oligonucleotide
tggatttggtggtctgcaaaatgtgccaattaatgatgagctatcgtcacatctactgcg

SEQ ID NO: 121815 - DNA, 60 bp, Artificial
  Synthetic oligonucleotide
ggtggtctgcaaaatgtgccaattaatgatgagctatcgtcacatctactgcgagctggt

SEQ ID NO: 121816 - DNA, 60 bp, Artificial
  Synthetic oligonucleotide
ggcatgggctagggaagatgatcagtataatcaggctcatccgaactctacgatgttccg

SEQ ID NO: 121817 - DNA, 60 bp, Artificial
  Synthetic oligonucleotide
cgaggaaataccggagcgactagtgccgcaattgcagcccttatctaatcgtccttggag

SEQ ID NO: 121818 - DNA, 60 bp, Artificial
  Synthetic oligonucleotide
gcgttggcagatcaaactcaacagtttaagagggataaacttgaggcatgggctagggaa

SEQ ID NO: 121819 - DNA, 60 bp, Artificial
  Synthetic oligonucleotide
taaacttgaggcatgggctagggaagatgatcagtataatcaggctcatccgaactctac

SEQ ID NO: 121820 - DNA, 60 bp, Artificial
  Synthetic oligonucleotide
caacaattgagcgccgtaactctgcttaacttgacggggtttggtccaatttcctatgtt

SEQ ID NO: 121821 - DNA, 60 bp, Artificial
  Synthetic oligonucleotide
gcgccgtaactctgcttaacttgacggggtttggtccaatttcctatgttcgagtagacg

SEQ ID NO: 121822 - DNA, 60 bp, Artificial
  Synthetic oligonucleotide
ttcagccaatagaccttgggagtatgatggtacgtatgcgaggatgactcagattatact

SEQ ID NO: 121823 - DNA, 60 bp, Artificial
  Synthetic oligonucleotide
ctgtccttattctggttatcatatgtcggtgtaattcatcagcagaacacgtatcggacg

SEQ ID NO: 121824 - DNA, 60 bp, Artificial
  Synthetic oligonucleotide
cagaacacgtatcggacgttctatttccaatgcaatcggcgcggtgatgctgctgaagtg

SEQ ID NO: 121825 - DNA, 60 bp, Artificial
  Synthetic oligonucleotide
cggacgttctatttccaatgcaatcggcgcggtgatgctgctgaagtgtggattctttcc

SEQ ID NO: 121826 - DNA, 60 bp, Artificial
  Synthetic oligonucleotide
tggcacgcgatccgagatttaagcatcgagtgtatcaacaattgagcgccgtaactctgc

SEQ ID NO: 121827 - DNA, 60 bp, Artificial
  Synthetic oligonucleotide
atgattacccattcttggcacgcgatccgagatttaagcatcgagtgtatcaacaattga

SEQ ID NO: 121828 - DNA, 60 bp, Artificial
  Synthetic oligonucleotide
tcaaatgagttgtctattgagtggtaccctccagattccatttcgccctaatcatcgatg

SEQ ID NO: 121829 - DNA, 60 bp, Artificial
  Synthetic oligonucleotide
tggttcaagatattatcaaatgagttgtctattgagtggtaccctccagattccatttcg

SEQ ID NO: 121830 - DNA, 60 bp, Artificial
  Synthetic oligonucleotide
atcatcgatggggagatgttaggtttctgcgtctagtgtggtcagctcctacgctggacg

SEQ ID NO: 121831 - DNA, 60 bp, Artificial
  Synthetic oligonucleotide
ttccatttcgccctaatcatcgatggggagatgttaggtttctgcgtctagtgtggtcag

SEQ ID NO: 121832 - DNA, 60 bp, Artificial
  Synthetic oligonucleotide
tacgctggacgggttagttgttgccccaccgcaggtcttagctcagccagctttacaggc

SEQ ID NO: 121833 - DNA, 60 bp, Artificial
  Synthetic oligonucleotide
gtgtggtcagctcctacgctggacgggttagttgttgccccaccgcaggtcttagctcag

SEQ ID NO: 121834 - DNA, 60 bp, Artificial
  Synthetic oligonucleotide
ctttacaggcgcaggctgatcgagtgtatgattgtgatgattacccattcttggcacgcg

SEQ ID NO: 121835 - DNA, 60 bp, Artificial
  Synthetic oligonucleotide
cttagctcagccagctttacaggcgcaggctgatcgagtgtatgattgtgatgattaccc

SEQ ID NO: 121836 - DNA, 60 bp, Artificial
  Synthetic oligonucleotide
caaaatcaaattgaagcgttggcagatcaaactcaacagtttaagagggataaacttgag

SEQ ID NO: 121837 - DNA, 60 bp, Artificial
  Synthetic oligonucleotide
gattaagacgcgatcgggttatgactcaagctcagcaaaatcaaattgaagcgttggcag

SEQ ID NO: 121838 - DNA, 60 bp, Artificial
  Synthetic oligonucleotide
tattgacaataactcagtgcctgcggtttcgcgtaacatccatggttggactggcagagt

SEQ ID NO: 121839 - DNA, 60 bp, Artificial
  Synthetic oligonucleotide
acagggtgcttgtgttcgggctctcagttaccgcttattgacaataactcagtgcctgcg

SEQ ID NO: 121840 - DNA, 60 bp, Artificial
  Synthetic oligonucleotide
ttaagttcgacgttgacagggtgcttgtgttcgggctctcagttaccgcttattgacaat

SEQ ID NO: 121841 - DNA, 60 bp, Artificial
  Synthetic oligonucleotide
ttcgtcatgccaacaagtccagattggaatatggacgtcaatttaattttaagttcgacg

SEQ ID NO: 121842 - DNA, 60 bp, Artificial
  Synthetic oligonucleotide
ctgaattctgtgacagattaagacgcgatcgggttatgactcaagctcagcaaaatcaaa

SEQ ID NO: 121843 - DNA, 60 bp, Artificial
  Synthetic oligonucleotide
ccagctgcatggtttccaagtgcgacgaatggtgactgaattctgtgacagattaagacg

SEQ ID NO: 121844 - DNA, 60 bp, Artificial
  Synthetic oligonucleotide
ctggcagagtggcaaccagctgcatggtttccaagtgcgacgaatggtgactgaattctg

SEQ ID NO: 121845 - DNA, 60 bp, Artificial
  Synthetic oligonucleotide
cagtgcctgcggtttcgcgtaacatccatggttggactggcagagtggcaaccagctgca

SEQ ID NO: 121846 - DNA, 60 bp, Artificial
  Synthetic oligonucleotide
ggacggcgttgaatctcatgatcgattcatccgacttggtgcccaacttcatgatgagag

SEQ ID NO: 121847 - DNA, 60 bp, Artificial
  Synthetic oligonucleotide
tggacggcgttgaatctcatgatcgattcatccgacttggtgcccaacttcatgatgaga

SEQ ID NO: 121848 - DNA, 60 bp, Artificial
  Synthetic oligonucleotide
gatgacgtttattggcaataaagggtttggagaaacatcattcttacgcgatgtgatagc

SEQ ID NO: 121849 - DNA, 60 bp, Artificial
  Synthetic oligonucleotide
tatgtttgacacgcgtaatgtggttgacaatatagatggtagcgatgtggaaatagtttg

SEQ ID NO: 121850 - DNA, 60 bp, Artificial
  Synthetic oligonucleotide
ccgcgagaggtgtgatgcaagtttataagctagggcagctaattagtaaattaaccggaa

SEQ ID NO: 121851 - DNA, 60 bp, Artificial
  Synthetic oligonucleotide
attaaccggaataaatattgagcataccgaagtacctgcaatttcgccagtattagttga

SEQ ID NO: 121852 - DNA, 60 bp, Artificial
  Synthetic oligonucleotide
gttaaaaactctcactcgatggtggatctcaagaaagcaatacaatggggaagattacaa

SEQ ID NO: 121853 - DNA, 60 bp, Artificial
  Synthetic oligonucleotide
ctcgatggtggatctcaagaaagcaatacaatggggaagattacaaatactctgtcacgt

SEQ ID NO: 121854 - DNA, 60 bp, Artificial
  Synthetic oligonucleotide
agcggaattgaatgatgcattattgaaagaatcaagagcacggacattagttgaaaacag

SEQ ID NO: 121855 - DNA, 60 bp, Artificial
  Synthetic oligonucleotide
gagcacggacattagttgaaaacagattagttgaagcgatgaagcaaaattttcgaacaa

SEQ ID NO: 121856 - DNA, 60 bp, Artificial
  Synthetic oligonucleotide
gcacggacattagttgaaaacagattagttgaagcgatgaagcaaaattttcgaacaatg

SEQ ID NO: 121857 - DNA, 60 bp, Artificial
  Synthetic oligonucleotide
gtagtttcaggaataggaacaacaattgctaaagtcgcagaaagtgaaattggacaacgg

SEQ ID NO: 121858 - DNA, 60 bp, Artificial
  Synthetic oligonucleotide
ggaagcattagagcaaacgattgatataggtggtgacatctctgaacatctagctgcaga

SEQ ID NO: 121859 - DNA, 60 bp, Artificial
  Synthetic oligonucleotide
tagctgcagaagtaccttttattggagagagtatcgcgtctggaatggcgaccgcgagag

SEQ ID NO: 121860 - DNA, 60 bp, Artificial
  Synthetic oligonucleotide
gcagaagtaccttttattggagagagtatcgcgtctggaatggcgaccgcgagaggtgtg

SEQ ID NO: 121861 - DNA, 60 bp, Artificial
  Synthetic oligonucleotide
accgcgagaggtgtgatgcaagtttataagctagggcagctaattagtaaattaaccgga

SEQ ID NO: 121862 - DNA, 60 bp, Artificial
  Synthetic oligonucleotide
acatctgtacaatcaatgctggagatagccgagcatgaaaacaagaatttagcggaattg

SEQ ID NO: 121863 - DNA, 60 bp, Artificial
  Synthetic oligonucleotide
tattagttgaaacattgttaacagagccgaccgttaatgatgctatactgcaaaaagttg

SEQ ID NO: 121864 - DNA, 60 bp, Artificial
  Synthetic oligonucleotide
ccggaataaatattgagcataccgaagtacctgcaatttcgccagtattagttgaaacat

SEQ ID NO: 121865 - DNA, 60 bp, Artificial
  Synthetic oligonucleotide
tacatcacagtaccagatcaaattatcatgttacaacaactcgtcggccgggtgcacata

SEQ ID NO: 121866 - DNA, 60 bp, Artificial
  Synthetic oligonucleotide
gtagtgacacagttatacatcacagtaccagatcaaattatcatgttacaacaactcgtc

SEQ ID NO: 121867 - DNA, 60 bp, Artificial
  Synthetic oligonucleotide
caactcgtcggccgggtgcacatatatatacggctccgtttgatagcgattacattgtaa

SEQ ID NO: 121868 - DNA, 60 bp, Artificial
  Synthetic oligonucleotide
acaactcgtcggccgggtgcacatatatatacggctccgtttgatagcgattacattgta

SEQ ID NO: 121869 - DNA, 60 bp, Artificial
  Synthetic oligonucleotide
cgctcattgaatatgctattctttgagatcagtcaaatgcggacacactcagtaggaggg

SEQ ID NO: 121870 - DNA, 60 bp, Artificial
  Synthetic oligonucleotide
ttacattgtaataatcctagttgtatcaccatatcatcaacatcgtgctgtcgttttatg

SEQ ID NO: 121871 - DNA, 60 bp, Artificial
  Synthetic oligonucleotide
gtgtggatctactgaatgattttattatgtttcaagatgtatcgcatggaggaaccagag

SEQ ID NO: 121872 - DNA, 60 bp, Artificial
  Synthetic oligonucleotide
tcgttttatgtgtggatctactgaatgattttattatgtttcaagatgtatcgcatggag

SEQ ID NO: 121873 - DNA, 60 bp, Artificial
  Synthetic oligonucleotide
gacacaacaaaaagagtagtttcaggaataggaacaacaattgctaaagtcgcagaaagt

SEQ ID NO: 121874 - DNA, 60 bp, Artificial
  Synthetic oligonucleotide
tgaaaacaagaatttagcggaattgaatgatgcattattgaaagaatcaagagcacggac

SEQ ID NO: 121875 - DNA, 60 bp, Artificial
  Synthetic oligonucleotide
tttcgaacaatgtctaatgtggtaaaagctgaaaaaggtgcgttgattgaggaagcatta

SEQ ID NO: 121876 - DNA, 60 bp, Artificial
  Synthetic oligonucleotide
ggcaacgtattacaaattcacgatgaaccagtgggcccattgaacccaaccgaacaaaag

SEQ ID NO: 121877 - DNA, 60 bp, Artificial
  Synthetic oligonucleotide
ttggcaacgtattacaaattcacgatgaaccagtgggcccattgaacccaaccgaacaaa

SEQ ID NO: 121878 - DNA, 60 bp, Artificial
  Synthetic oligonucleotide
gaaattggacaacgggcaataggcggtgtagttcaagggattgcggaagcgacgttgact

SEQ ID NO: 121879 - DNA, 60 bp, Artificial
  Synthetic oligonucleotide
cgcagaaagtgaaattggacaacgggcaataggcggtgtagttcaagggattgcggaagc

SEQ ID NO: 121880 - DNA, 60 bp, Artificial
  Synthetic oligonucleotide
atggaactattagatacatctgtacaatcaatgctggagatagccgagcatgaaaacaag

SEQ ID NO: 121881 - DNA, 51 bp, Artificial
  Synthetic oligonucleotide
tcatgtgcagctgttggaacgtcaatcagaaaaggtcgaagagaagttggc

SEQ ID NO: 121882 - DNA, 60 bp, Artificial
  Synthetic oligonucleotide
agtaagaagttaaatactctagaacgtgaagtgaatcatgtgcagctgttggaacgtcaa

SEQ ID NO: 121883 - DNA, 60 bp, Artificial
  Synthetic oligonucleotide
accgaacaaaagttaagtaagaagttaaatactctagaacgtgaagtgaatcatgtgcag

SEQ ID NO: 121884 - DNA, 60 bp, Artificial
  Synthetic oligonucleotide
gtcggcgcgaaatgtaatgagtacaaggatgcactcagagaggatgcaaagaggtgtggg

SEQ ID NO: 121885 - DNA, 60 bp, Artificial
  Synthetic oligonucleotide
tatttgtaggagtcaagaaattcaaagacatatcttgcgcggtcctctaaatatgcaaag

SEQ ID NO: 121886 - DNA, 60 bp, Artificial
  Synthetic oligonucleotide
aggagtcaagaaattcaaagacatatcttgcgcggtcctctaaatatgcaaaggaaaagt

SEQ ID NO: 121887 - DNA, 60 bp, Artificial
  Synthetic oligonucleotide
aaagaggtgtgggaaacgaaccaatttacattacttccatgctgtatccttatagtttcc

SEQ ID NO: 121888 - DNA, 60 bp, Artificial
  Synthetic oligonucleotide
gaggtgtgggaaacgaaccaatttacattacttccatgctgtatccttatagtttcctac

SEQ ID NO: 121889 - DNA, 60 bp, Artificial
  Synthetic oligonucleotide
agagtcggcgcgaaatgtaatgagtacaaggatgcactcagagaggatgcaaagaggtgt

SEQ ID NO: 121890 - DNA, 60 bp, Artificial
  Synthetic oligonucleotide
cctagttgtatcaccatatcatcaacatcgtgctgtcgttttatgtgtggatctactgaa

SEQ ID NO: 121891 - DNA, 60 bp, Artificial
  Synthetic oligonucleotide
tcgcatggaggaaccagagtacataaaggagttagaccaactggatttccaagctttaga

SEQ ID NO: 121892 - DNA, 60 bp, Artificial
  Synthetic oligonucleotide
ggaggaaccagagtacataaaggagttagaccaactggatttccaagctttagaaacgca

SEQ ID NO: 121893 - DNA, 60 bp, Artificial
  Synthetic oligonucleotide
ttagtgacgacacaaagaactcgaagcatacagcagagtgggaaagtcttcgctcattga

SEQ ID NO: 121894 - DNA, 60 bp, Artificial
  Synthetic oligonucleotide
cgacacaaagaactcgaagcatacagcagagtgggaaagtcttcgctcattgaatatgct

SEQ ID NO: 121895 - DNA, 60 bp, Artificial
  Synthetic oligonucleotide
atttgcaacgcatatttacagtggcttccattagaagcatgctcattaaatgaggaccaa

SEQ ID NO: 121896 - DNA, 60 bp, Artificial
  Synthetic oligonucleotide
cgttggagtgagagctgctaggccgatatcgggaatgcagaacatgattcagcatctttc

SEQ ID NO: 121897 - DNA, 60 bp, Artificial
  Synthetic oligonucleotide
agtatctgtgatgctatatttcaagatgaggaaacagaaggtgcagtgagacgattcatt

SEQ ID NO: 121898 - DNA, 60 bp, Artificial
  Synthetic oligonucleotide
ccatcatgttcagactattttgcttcgtctgctttggatatgcgccaaggaaggatggaa

SEQ ID NO: 121899 - DNA, 60 bp, Artificial
  Synthetic oligonucleotide
tcatgtttagattgttttgctttgtctgctttggatatgcgccaaggaaggatgggacga

SEQ ID NO: 121900 - DNA, 60 bp, Artificial
  Synthetic oligonucleotide
cttcccaatgcaaatgttaccatacatggaaaatgaaggatttgctaagataataaatcg

SEQ ID NO: 121901 - DNA, 60 bp, Artificial
  Synthetic oligonucleotide
caaatgttaccatacatggaaaatgaaggatttgccaaaataataaatcgatacgcccaa

SEQ ID NO: 121902 - DNA, 60 bp, Artificial
  Synthetic oligonucleotide
tgttaccatacatggaaaatgaaggatttgccaaaataataaatcgatatgcccaaatgg

SEQ ID NO: 121903 - DNA, 60 bp, Artificial
  Synthetic oligonucleotide
aagttctactcaaccgacaaacttgccctcatgctttcgcaggtcggcacccttcattcc

SEQ ID NO: 121904 - DNA, 60 bp, Artificial
  Synthetic oligonucleotide
ccgacaaacttgccctcatgctttcgcaggtcggcacccttcattcctcttcaaccggac

SEQ ID NO: 121905 - DNA, 60 bp, Artificial
  Synthetic oligonucleotide
ccgcctgtcttgtatggtttcgagcgcacaagtactggcagcaagttctactcaaccgac

SEQ ID NO: 121906 - DNA, 60 bp, Artificial
  Synthetic oligonucleotide
cgttgacttgggttcattcatcctttctgatccgccaactcatacgcatcacggggtctc

SEQ ID NO: 121907 - DNA, 60 bp, Artificial
  Synthetic oligonucleotide
ccttcattcctcttcaaccggacttgatgtcctcactctcgtcagcgatcgtgttgataa

SEQ ID NO: 121908 - DNA, 60 bp, Artificial
  Synthetic oligonucleotide
tacgcatcacggggtctctgtactcaaccctgacgcggtcggaattgactactccgccct

SEQ ID NO: 121909 - DNA, 60 bp, Artificial
  Synthetic oligonucleotide
attctctcaccgggcagataccctatgagtacaaaccaccttctcaagctcgcctcggac

SEQ ID NO: 121910 - DNA, 60 bp, Artificial
  Synthetic oligonucleotide
ggccaccatcgcggcggatccgttctctccttctgactttgagcttctcgcctctagagg

SEQ ID NO: 121911 - DNA, 60 bp, Artificial
  Synthetic oligonucleotide
ttaaacgacgatggcgtttttgaggctcagtcggcgcaaccccttgcgtcagacatttat

SEQ ID NO: 121912 - DNA, 60 bp, Artificial
  Synthetic oligonucleotide
gctgtgcgttttaccacgtgtgaaggcatgcccagtaattctctcaccgggcagataccc

SEQ ID NO: 121913 - DNA, 60 bp, Artificial
  Synthetic oligonucleotide
ggaacattatgctcacggatgtggtgtacatcgtccagagtgaggtcaccttccctgaca

SEQ ID NO: 121914 - DNA, 60 bp, Artificial
  Synthetic oligonucleotide
ttccctgacattgacctcaaggttacctccgctaacttcaatgctgaaatgtactcacga

SEQ ID NO: 121915 - DNA, 60 bp, Artificial
  Synthetic oligonucleotide
atagttgcccccgctacttccgcatcaagggtgggggctgacttcgaatcgatatgcgct

SEQ ID NO: 121916 - DNA, 60 bp, Artificial
  Synthetic oligonucleotide
ccacgcttgccctcttcaagaatatggccatcccgccacttcttgatgtctctggtccgg

SEQ ID NO: 121917 - DNA, 60 bp, Artificial
  Synthetic oligonucleotide
atcctctcggccaacgatgttaaatggcgggagtcgagggagtggttgaccacgcttgcc

SEQ ID NO: 121918 - DNA, 60 bp, Artificial
  Synthetic oligonucleotide
gctgtaaccaatgatatcctctcggccaacgatgttaaatggcgggagtcgagggagtgg

SEQ ID NO: 121919 - DNA, 60 bp, Artificial
  Synthetic oligonucleotide
gctccgtcgagcgacgatcctccagaccattcactccccatcctcacagaactcatcaag

SEQ ID NO: 121920 - DNA, 60 bp, Artificial
  Synthetic oligonucleotide
ttcgagcctattttagctccgtcgagcgacgatcctccagaccattcactccccatcctc

SEQ ID NO: 121921 - DNA, 60 bp, Artificial
  Synthetic oligonucleotide
tgactactccgccctcctgggttgcttggatcctcagaaccattatgctgtgacttctga

SEQ ID NO: 121922 - DNA, 60 bp, Artificial
  Synthetic oligonucleotide
gcgcggggttcgttgggatgggagtcaagacgatattcagagacgctacaccctaccctc

SEQ ID NO: 121923 - DNA, 60 bp, Artificial
  Synthetic oligonucleotide
cgagcgcaatgttattctggatgcagacagattcggcggcctcgtcgatatggctcgcgt

SEQ ID NO: 121924 - DNA, 60 bp, Artificial
  Synthetic oligonucleotide
ccctaccctcatgtcacacggtccgtgcactacggaggcttcgagcctattttagctccg

SEQ ID NO: 121925 - DNA, 60 bp, Artificial
  Synthetic oligonucleotide
ttaggatgtatgcttcatcgaagattgtgccacacgaaaactcttcccctccgttaaact

SEQ ID NO: 121926 - DNA, 60 bp, Artificial
  Synthetic oligonucleotide
aaacttctccgttggaggatacgacgcttcgcgtctaaggcatgaccctcgcactggcgc

SEQ ID NO: 121927 - DNA, 60 bp, Artificial
  Synthetic oligonucleotide
cacgcatcgctttactcactcaatgcgtctatttctcggatagactctttctctgccatg

SEQ ID NO: 121928 - DNA, 60 bp, Artificial
  Synthetic oligonucleotide
tgcttacgcatcgctccttcccccacgacagcttatggagatagatatccccacccctta

SEQ ID NO: 121929 - DNA, 60 bp, Artificial
  Synthetic oligonucleotide
cgcctcggactatcaatcaccgtcacgccggttagggaggtgactgcctaccttgctcgt

SEQ ID NO: 121930 - DNA, 60 bp, Artificial
  Synthetic oligonucleotide
tcaatcaccgtcacgccggttagggaggtgactgcctaccttgctcgtcttgtgctggga

SEQ ID NO: 121931 - DNA, 56 bp, Artificial
  Synthetic oligonucleotide
aaaagcaagttactgtcgtggacctaactgcaactcttgacatgggatctcctcac

SEQ ID NO: 121932 - DNA, 60 bp, Artificial
  Synthetic oligonucleotide
cttcatcggagatggagattccagtcaaggggtcaacacgggtcttaaacgacgatggcg

SEQ ID NO: 121933 - DNA, 60 bp, Artificial
  Synthetic oligonucleotide
ccaccccttaccatgcgattggctggagatcggcgcttgctctcgtatttcgtaatgctt

SEQ ID NO: 121934 - DNA, 60 bp, Artificial
  Synthetic oligonucleotide
gcgctggattcaaggatctagcatcttaccgtcccttcagagttgagcgagaaccgcctg

SEQ ID NO: 121935 - DNA, 60 bp, Artificial
  Synthetic oligonucleotide
ctcctgttgtggagtctgtcatctgtgatcagctctctgccgctattgtgagggtcagtc

SEQ ID NO: 121936 - DNA, 60 bp, Artificial
  Synthetic oligonucleotide
ggtgacgtctccctgggaaacatatggaagcatacgctcggtacattgccgaagtgtctc

SEQ ID NO: 121937 - DNA, 60 bp, Artificial
  Synthetic oligonucleotide
catcgcttacggcgtcttctatccgaacgaatttgtcataaatataccgccaccgactgg

SEQ ID NO: 121938 - DNA, 60 bp, Artificial
  Synthetic oligonucleotide
gtgagggtcagtcatatggctgatttctccaatcagtataggggcgccatgggtgacgtc

SEQ ID NO: 121939 - DNA, 60 bp, Artificial
  Synthetic oligonucleotide
ccgcaattggatctctgacggcgtcaggcgcgaaactctaactactaagctcatgggcta

SEQ ID NO: 121940 - DNA, 60 bp, Artificial
  Synthetic oligonucleotide
tgacttctgatgtcgagcgcaatgttattctggatgcagacagattcggcggcctcgtcg

SEQ ID NO: 121941 - DNA, 60 bp, Artificial
  Synthetic oligonucleotide
gacatgtttgacctctttcataggtctagctcgatgagtgtgggtgagatccgcaattgg

SEQ ID NO: 121942 - DNA, 60 bp, Artificial
  Synthetic oligonucleotide
catgggctatgcatgggagtttgcgtgggacattaggaacattatgctcacggatgtggt

SEQ ID NO: 121943 - DNA, 60 bp, Artificial
  Synthetic oligonucleotide
gccctctgtcatatggtccgttcctcgttgtcaaaagccaaatatcatgatgcatgcggc

SEQ ID NO: 121944 - DNA, 60 bp, Artificial
  Synthetic oligonucleotide
gcatgcggctctcacttcaccacttgtggtattcacaaaggtgggaaaccacgcatcgct

SEQ ID NO: 121945 - DNA, 60 bp, Artificial
  Synthetic oligonucleotide
gtctctggtccggagatgatatatgtcttggggacgcagcttcctcctatgccctctgtc

SEQ ID NO: 121946 - DNA, 60 bp, Artificial
  Synthetic oligonucleotide
atagactctttctctgccatgaacgacgacccgcttacgggccccattcgagatcagttg

SEQ ID NO: 121947 - DNA, 60 bp, Artificial
  Synthetic oligonucleotide
gccatgaacgacgacccgcttacgggccccattcgagatcagttggcactcatcgcttac

SEQ ID NO: 121948 - DNA, 60 bp, Artificial
  Synthetic oligonucleotide
cttcttccgtacctcgacgaccattcactctcagtcgccttggctcagcgttgctcctgt

SEQ ID NO: 121949 - DNA, 60 bp, Artificial
  Synthetic oligonucleotide
cctcgacgaccattcactctcagtcgccttggctcagcgttgctcctgttgtggagtctg

SEQ ID NO: 121950 - DNA, 60 bp, Artificial
  Synthetic oligonucleotide
cgagaggtctatccagtacagattcaggtttcccagcgatctatcgctcacttcttccgt

SEQ ID NO: 121951 - DNA, 60 bp, Artificial
  Synthetic oligonucleotide
ctcccgattacatcttttttaaccttggacaatctgtggttacgtatgatcgagaggtct

SEQ ID NO: 121952 - DNA, 60 bp, Artificial
  Synthetic oligonucleotide
ccccatcctcacagaactcatcaagcttctggatgctatgggcatgagacaggtcattaa

SEQ ID NO: 121953 - DNA, 60 bp, Artificial
  Synthetic oligonucleotide
aacctggacgaaaatgttgcatcttccctcgcctctttggtagttgatggcaaactgaga

SEQ ID NO: 121954 - DNA, 60 bp, Artificial
  Synthetic oligonucleotide
ttgctcacccctctgcctccccaacgtcactactatcctgacatcaccctttcgcccatc

SEQ ID NO: 121955 - DNA, 60 bp, Artificial
  Synthetic oligonucleotide
tcctgacatcaccctttcgcccatcttcaaactgcaacgtgaggctttcggggtgcggtc

SEQ ID NO: 121956 - DNA, 60 bp, Artificial
  Synthetic oligonucleotide
cagagtgcgcgctcccttctcgcacctgcgtatgagagagatgtattcatcggaaatctt

SEQ ID NO: 121957 - DNA, 60 bp, Artificial
  Synthetic oligonucleotide
cacctcggaacacattctcgctattattcagcaacttggcctcgcgctcccccaggatca

SEQ ID NO: 121958 - DNA, 60 bp, Artificial
  Synthetic oligonucleotide
catggccattggccgcgttattcaggacgttcttttccagaggttcggtgacgacgtcac

SEQ ID NO: 121959 - DNA, 60 bp, Artificial
  Synthetic oligonucleotide
acactagcggagcgtagtgcgagccttcggttttaggcccgatacctccgttctgaccgt

SEQ ID NO: 121960 - DNA, 60 bp, Artificial
  Synthetic oligonucleotide
cgccaccatctatacccatctctcaggcgagaattctactctcgtcgcaaactctctaca

SEQ ID NO: 121961 - DNA, 60 bp, Artificial
  Synthetic oligonucleotide
cagtcaagaatctttaaagcgctgcgtgtgcagctaacagaacacatgaacagacgccga

SEQ ID NO: 121962 - DNA, 60 bp, Artificial
  Synthetic oligonucleotide
ctccatgtctctcgacgttctcacacattcttttcagcagagttccttcagttgctctcg

SEQ ID NO: 121963 - DNA, 60 bp, Artificial
  Synthetic oligonucleotide
cgaatgctcacttccggggaacagagttgtttacttctcgcagcatctcagacgtccatg

SEQ ID NO: 121964 - DNA, 60 bp, Artificial
  Synthetic oligonucleotide
atttcgtccgcctcctggagtcttttctgttcgttccctctccgatgttcagcttgacga

SEQ ID NO: 121965 - DNA, 60 bp, Artificial
  Synthetic oligonucleotide
gccccgtaccggatgagctcattgacgcgaagcctaaatttcgtccgcctcctggagtct

SEQ ID NO: 121966 - DNA, 60 bp, Artificial
  Synthetic oligonucleotide
ggatggatgtacatttccaggttcggaagacgttttccagaagagaggcgtggcgtcgcg

SEQ ID NO: 121967 - DNA, 60 bp, Artificial
  Synthetic oligonucleotide
agaatctcacggaatactcaggtatctcgctactcgtcgaagaagcgttgactgaggccc

SEQ ID NO: 121968 - DNA, 60 bp, Artificial
  Synthetic oligonucleotide
gcgtggcgtcgcgttaaatctaagcagaagagtcttgcgctgttacactatggtcatctc

SEQ ID NO: 121969 - DNA, 60 bp, Artificial
  Synthetic oligonucleotide
gtttagcgtctgtcatcccaaccccatcgttctgcgctcgcacgctggatcggacatgaa

SEQ ID NO: 121970 - DNA, 60 bp, Artificial
  Synthetic oligonucleotide
acgttgggaagcagaaagtttcccgcgctgcaaattctacacgaacactttctcgtctgc

SEQ ID NO: 121971 - DNA, 60 bp, Artificial
  Synthetic oligonucleotide
cgcgcttccgagatgtatcattccttgacctctctggcaaagaacacctctgctgggatg

SEQ ID NO: 121972 - DNA, 60 bp, Artificial
  Synthetic oligonucleotide
ggccctcctggagataaacctcgtcgatagagaaagggagattggctctcttacgttggg

SEQ ID NO: 121973 - DNA, 56 bp, Artificial
  Synthetic oligonucleotide
tacggcggacccgtgagatctgttcgcgcgggtggacaggatcgaattcatccttc

SEQ ID NO: 121974 - DNA, 60 bp, Artificial
  Synthetic oligonucleotide
tccttccttcgaaacacttcaagagtccaagtcaaatgagactcaagaagcgcgaattcc

SEQ ID NO: 121975 - DNA, 60 bp, Artificial
  Synthetic oligonucleotide
gggtcgtcaacacgtttggacccacgttgcttcagataaagtatctatctcatgcgaagg

SEQ ID NO: 121976 - DNA, 60 bp, Artificial
  Synthetic oligonucleotide
atggggccgtatgatctaatgcacaacatgactaaacaagcggtcctcaaagatcagagt

SEQ ID NO: 121977 - DNA, 60 bp, Artificial
  Synthetic oligonucleotide
catgtttacttctgagtttaacccgacggacgagggacaggttttctcgttatccttcct

SEQ ID NO: 121978 - DNA, 60 bp, Artificial
  Synthetic oligonucleotide
atgtctttcgttcctatgaacaggcctttgcgaatggatttcacccggtgcgcgcttccg

SEQ ID NO: 121979 - DNA, 60 bp, Artificial
  Synthetic oligonucleotide
cgcccaccgccattaacctaatctctactccggagcttctcgttgatcttcgtagaacca

SEQ ID NO: 121980 - DNA, 60 bp, Artificial
  Synthetic oligonucleotide
tctggagagacctttctatccaatgtgggacgagagtcaccccgacccttccctcataca

SEQ ID NO: 121981 - DNA, 60 bp, Artificial
  Synthetic oligonucleotide
ctcagcccaacctgaggaaagccattgacatgttgcctctgcagcgaatggggccgtatg

SEQ ID NO: 121982 - DNA, 60 bp, Artificial
  Synthetic oligonucleotide
tcgcacgctggatcggacatgaattcgaagaatgttacttaccaagggttctcacgggtc

SEQ ID NO: 121983 - DNA, 56 bp, Artificial
  Synthetic oligonucleotide
agcttgacgaggaaggggacgttctagtctcggttggcgatggcagtgacctcgcc

SEQ ID NO: 121984 - DNA, 60 bp, Artificial
  Synthetic oligonucleotide
tgcgcgggatgtacctgttaagcccacgcgtgaggtatattctattgttatgcctactat

SEQ ID NO: 121985 - DNA, 60 bp, Artificial
  Synthetic oligonucleotide
gatgatactctggcctatctacactttcgcactccatcggtcagcgtggtcgatgaggct

SEQ ID NO: 121986 - DNA, 60 bp, Artificial
  Synthetic oligonucleotide
cgatgaggctattagtctcgtcttccagacggttgaaaaatgtgggcacgttgcttctcc

SEQ ID NO: 121987 - DNA, 60 bp, Artificial
  Synthetic oligonucleotide
ccaccgaaaagacacagactcacgccaagcaaggagtgtacattccccaggatcgaatga

SEQ ID NO: 121988 - DNA, 60 bp, Artificial
  Synthetic oligonucleotide
gtcttcggacaccctgtcgttgtcgaacggacgtgggaggagatctctcgagatgtgcct

SEQ ID NO: 121989 - DNA, 60 bp, Artificial
  Synthetic oligonucleotide
acgccgatggcaagattgttggatcgttatggaacgggaaccgtcgcgtgtacagggcca

SEQ ID NO: 121990 - DNA, 60 bp, Artificial
  Synthetic oligonucleotide
tacttttcacctccgcgctcatcggatatcggaagctcaaggcggtaatcgctgatgggg

SEQ ID NO: 121991 - DNA, 60 bp, Artificial
  Synthetic oligonucleotide
cgatggcgttttcccggcccagatggctaagttcgcgtacgccgatggcaagattgttgg

SEQ ID NO: 121992 - DNA, 60 bp, Artificial
  Synthetic oligonucleotide
aagctacgggctctcgcgtcatggatggatcggatgtgtttcgtggcacctccgaccctt

SEQ ID NO: 121993 - DNA, 60 bp, Artificial
  Synthetic oligonucleotide
gagatcgacggcatggtccgagccctatctcgctttgatggagaccccgcctttgactat

SEQ ID NO: 121994 - DNA, 60 bp, Artificial
  Synthetic oligonucleotide
tacgcgtgtggcgggaaaggtcatcatcggcgcgctcgaagctacgggctctcgcgtcat

SEQ ID NO: 121995 - DNA, 60 bp, Artificial
  Synthetic oligonucleotide
acttccgactcttctgaacccttcacacgaggtaccacccacccgagtgatacgcgtgtg

SEQ ID NO: 121996 - DNA, 60 bp, Artificial
  Synthetic oligonucleotide
ctcactttcggacgcttcactttccctgccttcgttcacctccttctatactgacatgtt

SEQ ID NO: 121997 - DNA, 60 bp, Artificial
  Synthetic oligonucleotide
cgcgaattccttcggattctcctgccttctcctcttcgcttcggcgttcacctggagaca

SEQ ID NO: 121998 - DNA, 60 bp, Artificial
  Synthetic oligonucleotide
ccttccttttgcaaattcagacgatgagtggctatggacgagcatgggtcatcaaccgtt

SEQ ID NO: 121999 - DNA, 60 bp, Artificial
  Synthetic oligonucleotide
cttctattcaacaccctgatacattccagcctgaggaggagttcctccgacattatcggc

SEQ ID NO: 122000 - DNA, 60 bp, Artificial
  Synthetic oligonucleotide
tcgtttatacgcttccgagagggaagggaaagcgccactttcggggacctacccctcagg

SEQ ID NO: 122001 - DNA, 60 bp, Artificial
  Synthetic oligonucleotide
ggacctcaacctccaggcgattcgggaggcggtcgaatattcaaactcactttcggacgc

SEQ ID NO: 122002 - DNA, 60 bp, Artificial
  Synthetic oligonucleotide
cctaccgcagggtactctaccatcattgtcagagaccctatctgtgctttcgttcctaaa

SEQ ID NO: 122003 - DNA, 60 bp, Artificial
  Synthetic oligonucleotide
gtgatttaagcgctagagaggcatggatacgacagactctgcatcctacgcactcatacg

SEQ ID NO: 122004 - DNA, 60 bp, Artificial
  Synthetic oligonucleotide
tcagaatcagttggaatcttagctgggatcacggaaggtttattggccaacgcgaaggcg

SEQ ID NO: 122005 - DNA, 60 bp, Artificial
  Synthetic oligonucleotide
tcattacatcaaataagcttatatactcccagcggctgaacattcctggtcatagggtag

SEQ ID NO: 122006 - DNA, 60 bp, Artificial
  Synthetic oligonucleotide
attttgactatttccgacgtctacgaatcagtttacaattttgaaagcctgtgttactgt

SEQ ID NO: 122007 - DNA, 60 bp, Artificial
  Synthetic oligonucleotide
gggatctgcatgtgctgagtcaagcgtaatgattaaaatgtcgggtaaaacaaagccgat

SEQ ID NO: 122008 - DNA, 60 bp, Artificial
  Synthetic oligonucleotide
tagcggcgctcacaggaccagcgaccccagtggttaagaaagcggcgtcacttgtgtttg

SEQ ID NO: 122009 - DNA, 60 bp, Artificial
  Synthetic oligonucleotide
ccagaaccattgaggactttacttttcaaactttccactagtgggttaagtaagcgtgat

SEQ ID NO: 122010 - DNA, 60 bp, Artificial
  Synthetic oligonucleotide
actaaatacggtgggaacgttgaacaaatagggaacgtggtatcagattcagagagactc

SEQ ID NO: 122011 - DNA, 60 bp, Artificial
  Synthetic oligonucleotide
ttttcgttaaccggattgcaactgccaatgttcgcggaagggctgtcgaactcaactatc

SEQ ID NO: 122012 - DNA, 60 bp, Artificial
  Synthetic oligonucleotide
atcacgtcggaacatactcaaaaggtgatgcgccgatccgtgatgaacctttttcgttaa

SEQ ID NO: 122013 - DNA, 60 bp, Artificial
  Synthetic oligonucleotide
gcaggacgtaaagcggcgagcccatgtgcgctagtcaatatccctctcaatcgttcggtc

SEQ ID NO: 122014 - DNA, 60 bp, Artificial
  Synthetic oligonucleotide
ccgatgccgggttctattggatcgtcaggcactttatcgcaaagtgggagaatgtcgatt

SEQ ID NO: 122015 - DNA, 60 bp, Artificial
  Synthetic oligonucleotide
gcaagcttatcgcctttgtgggtacgtctattttgcggaggtcataagaatgctgatcag

SEQ ID NO: 122016 - DNA, 60 bp, Artificial
  Synthetic oligonucleotide
aagacacgaagcaagtttagaaacagcgaatgtttacgctcagtctgagatacctggggc

SEQ ID NO: 122017 - DNA, 60 bp, Artificial
  Synthetic oligonucleotide
tacctggggctgcgttatcgaccgagattagggattacattagacagcagaacttatact

SEQ ID NO: 122018 - DNA, 60 bp, Artificial
  Synthetic oligonucleotide
cgatacctcagagcgtctacgtgtggaacacacaactaaatgacttagcagtagcggtta

SEQ ID NO: 122019 - DNA, 60 bp, Artificial
  Synthetic oligonucleotide
aaagaacggggccttgagtaagccgcgcccattggggtcggggagtgatagagaaggtgc

SEQ ID NO: 122020 - DNA, 60 bp, Artificial
  Synthetic oligonucleotide
ggacatgaggtgactgtctctatgccgcctactgttgcctggtgggaaagaacggggcct

SEQ ID NO: 122021 - DNA, 60 bp, Artificial
  Synthetic oligonucleotide
ctcgctgatcctatcgagttcgcgaagcataacattagtactaaatacggtgggaacgtt

SEQ ID NO: 122022 - DNA, 60 bp, Artificial
  Synthetic oligonucleotide
gttcgcacaagagagtgctgtcagataaagcgatcatatcaaccccaatttcttatgaga

SEQ ID NO: 122023 - DNA, 60 bp, Artificial
  Synthetic oligonucleotide
cagtacttcaagacattttgctgaggtttgctcgtgggtaggagtgtaaggacatgaggt

SEQ ID NO: 122024 - DNA, 60 bp, Artificial
  Synthetic oligonucleotide
tacaatttagtgctgaataattgccaagattttacaagaggattgtttgactacgcgcgt

SEQ ID NO: 122025 - DNA, 60 bp, Artificial
  Synthetic oligonucleotide
aaagacttggcgtaacgctgacttttcaacaggccaactatcagctgaggatgcaaccta

SEQ ID NO: 122026 - DNA, 60 bp, Artificial
  Synthetic oligonucleotide
tcgcaggtcatcgaggacatgagacgtgactctactatgttactgaaagctgagggtcgt

SEQ ID NO: 122027 - DNA, 60 bp, Artificial
  Synthetic oligonucleotide
ctggtcatagggtagcgtcatttgagcttatgattatagcgaatgcggttcataccaccg

SEQ ID NO: 122028 - DNA, 60 bp, Artificial
  Synthetic oligonucleotide
caccgttttcgagccggcgaaggtgaccaaacttcccagttgtgaattggggacatcgtc

SEQ ID NO: 122029 - DNA, 60 bp, Artificial
  Synthetic oligonucleotide
ggggacatcgtctataatgagtaccacttttgagattagagtgcaagatatgtcaacgct

SEQ ID NO: 122030 - DNA, 60 bp, Artificial
  Synthetic oligonucleotide
agagtgcaagatatgtcaacgctaccgtcgccagcttttcacgctcgaaccattcagtcc

SEQ ID NO: 122031 - DNA, 60 bp, Artificial
  Synthetic oligonucleotide
gagctaaagcagcgataagtgatttcatcatggctattccaagatatccactttacagct

SEQ ID NO: 122032 - DNA, 60 bp, Artificial
  Synthetic oligonucleotide
gttaatcgtaagccaatcttgccacagtttaggtatttaggtctcatgttcggtaagccg

SEQ ID NO: 122033 - DNA, 60 bp, Artificial
  Synthetic oligonucleotide
cgcagctcggaactttgcttttagggcctaactccaccacagcgcacgaagtgtcatcgt

SEQ ID NO: 122034 - DNA, 60 bp, Artificial
  Synthetic oligonucleotide
cagctgaggatgcaacctatgagccgaagatgagtggagccgaagatgtcgtgataccgc

SEQ ID NO: 122035 - DNA, 60 bp, Artificial
  Synthetic oligonucleotide
aactaactgaacgtattatttcgcttgaaaagaccatcacgcagctcggaactttgcttt

SEQ ID NO: 122036 - DNA, 60 bp, Artificial
  Synthetic oligonucleotide
ccaagacccaacaagacggcatggaacaaagacagtacatccttgatctggtacgcagag

SEQ ID NO: 122037 - DNA, 60 bp, Artificial
  Synthetic oligonucleotide
ggtctcatgttcggtaagccggctactggaatacagccttacaattttgaagtgagtttc

SEQ ID NO: 122038 - DNA, 60 bp, Artificial
  Synthetic oligonucleotide
gcagtagcggttaagatgactgccgatctcgcaaacgcagctgagattagatcaaaggag

SEQ ID NO: 122039 - DNA, 60 bp, Artificial
  Synthetic oligonucleotide
ggagaatcaattccggttgaatgagatggagcaagctgtgcgtgaaattgaaaatcagct

SEQ ID NO: 122040 - DNA, 60 bp, Artificial
  Synthetic oligonucleotide
cgatttaggattgagagaggaggaagccatgatacaaggggctgttgtgatgcgtactac

SEQ ID NO: 122041 - DNA, 60 bp, Artificial
  Synthetic oligonucleotide
ggattgcgctagctcttataacgaggagtcttcgcttggttatacgagtctatttctggc

SEQ ID NO: 122042 - DNA, 60 bp, Artificial
  Synthetic oligonucleotide
ggagcagatcatacgatagattgctatgaatctgacgactttatagttttactgaagcca

SEQ ID NO: 122043 - DNA, 60 bp, Artificial
  Synthetic oligonucleotide
tctgcggttagctactccgatagaggtaaatcgagaacgagttatgtattggattgcgct

SEQ ID NO: 122044 - DNA, 60 bp, Artificial
  Synthetic oligonucleotide
atctgagcaaagtagaacaaactttgatttccgagttagctccaacggaatcgcaggtca

SEQ ID NO: 122045 - DNA, 60 bp, Artificial
  Synthetic oligonucleotide
gaaaatcagctattactttctggcattattgatggcttagcggcgctcacaggaccagcg

SEQ ID NO: 122046 - DNA, 60 bp, Artificial
  Synthetic oligonucleotide
gtggttacacagaagagcaagtgtggtctatttacaagacgttaggtaaagagtatcgta

SEQ ID NO: 122047 - DNA, 60 bp, Artificial
  Synthetic oligonucleotide
tacatggtagagttcgatataatcggtttagataaggatactggagtgaaagtgatgcgg

SEQ ID NO: 122048 - DNA, 60 bp, Artificial
  Synthetic oligonucleotide
atcctaacccttacaatcttccgaccggcgataaaaatgttggtattggttcgtacatgg

SEQ ID NO: 122049 - DNA, 60 bp, Artificial
  Synthetic oligonucleotide
gcactcatacgccactatatcttacgactacgttctgcctaaaacaggtgggaaccgaag

SEQ ID NO: 122050 - DNA, 60 bp, Artificial
  Synthetic oligonucleotide
gcctaaaacaggtgggaaccgaagagtgctgtgtttcgcgggagttggcgatcctaaccc

SEQ ID NO: 122051 - DNA, 60 bp, Artificial
  Synthetic oligonucleotide
gttgaactgaagccttataccgttgaagatgcgtggcgtgtaatagctaaaagttcgcac

SEQ ID NO: 122052 - DNA, 60 bp, Artificial
  Synthetic oligonucleotide
aggggctgttgtgatgcgtactacatttaggggaaaattgtacgttactaaaggtactga

SEQ ID NO: 122053 - DNA, 60 bp, Artificial
  Synthetic oligonucleotide
ctccgcagttctatatacagaagatgatgattggcccacgagttagctcacgagtacgga

SEQ ID NO: 122054 - DNA, 60 bp, Artificial
  Synthetic oligonucleotide
tgtttccagaccaaaatttgtctccgcagttctatatacagaagatgatgattggcccac

SEQ ID NO: 122055 - DNA, 60 bp, Artificial
  Synthetic oligonucleotide
caaagttacgcttttgaggtgtacgtgaactcaattttgccgtggagtgaacttgatccg

SEQ ID NO: 122056 - DNA, 51 bp, Artificial
  Synthetic oligonucleotide
caaagttacgcttttgaggtgtacgtgaactcaattttgccgtggagtgaa

SEQ ID NO: 122057 - DNA, 60 bp, Artificial
  Synthetic oligonucleotide
ggttcgacacgcttatcgcggcaacggatggaagcgatttggctttgattgatacacacc

SEQ ID NO: 122058 - DNA, 60 bp, Artificial
  Synthetic oligonucleotide
ggttcgacacgcttatcgcggcaacggatggaagcgatttggctttgatcgacacacacc

SEQ ID NO: 122059 - DNA, 60 bp, Artificial
  Synthetic oligonucleotide
gaatgggtacggtgcacatccagcggctcttaatatcgttatgacggaagagatgtatgt

SEQ ID NO: 122060 - DNA, 60 bp, Artificial
  Synthetic oligonucleotide
gatacacacctttccggcgagaattcgactcttatcgccaattcgatgcacaatatggct

SEQ ID NO: 122061 - DNA, 60 bp, Artificial
  Synthetic oligonucleotide
gacggccaaacgttccaaagttacgcttttgaggtgtacgtgaactcaattttgccgtgg

SEQ ID NO: 122062 - DNA, 60 bp, Artificial
  Synthetic oligonucleotide
gacggccaaacgttccaaagttacgcttttgaggtgtacgtgaactcaattttaccgtgg

SEQ ID NO: 122063 - DNA, 60 bp, Artificial
  Synthetic oligonucleotide
tgtttccagaccaaaatttgtctcctcagttctatatacagaagatgatgattggcccac

SEQ ID NO: 122064 - DNA, 60 bp, Artificial
  Synthetic oligonucleotide
gggtacggtgcacatccagcagctcttaatatcgttatgacggaagagatgtatgttgat

SEQ ID NO: 122065 - DNA, 60 bp, Artificial
  Synthetic oligonucleotide
tccctttagggatgcaagttatggctgacttcgtaaaccggttcaattcgccattccacc

SEQ ID NO: 122066 - DNA, 60 bp, Artificial
  Synthetic oligonucleotide
ccaagggatcagagaggctatggctccctatagggatttgcgatatgaaggttatacgtt

SEQ ID NO: 122067 - DNA, 60 bp, Artificial
  Synthetic oligonucleotide
gggtacggtgcacatccagcggctcttaatatcgttatgacggaagagatgtatgttgat

SEQ ID NO: 122068 - DNA, 60 bp, Artificial
  Synthetic oligonucleotide
gaatgggtacggtgcacatccagcagctcttaatatcgttatgacggaagagatgtatgt

SEQ ID NO: 122069 - DNA, 60 bp, Artificial
  Synthetic oligonucleotide
cggttgacaaagggttcgacacgcttatcgcggcaacggatggaagcgatttggctttga

SEQ ID NO: 122070 - DNA, 60 bp, Artificial
  Synthetic oligonucleotide
gtggacaaagggttcgacacgcttatcgcggcaacggatggaagcgatttggctttgatt

SEQ ID NO: 122071 - DNA, 60 bp, Artificial
  Synthetic oligonucleotide
tccctttagggatgcaagttatggctgacttcgtaaaccgtttcaattcgccatttcacc

SEQ ID NO: 122072 - DNA, 60 bp, Artificial
  Synthetic oligonucleotide
attgaatttcgtgctaaaaacgagatgcaaatatacggagatatacccattaaagtatgg

SEQ ID NO: 122073 - DNA, 60 bp, Artificial
  Synthetic oligonucleotide
atcgaatttcgtgctaaaaacgagatgcaaatatacggagatatacccattaaagtatgg

SEQ ID NO: 122074 - DNA, 60 bp, Artificial
  Synthetic oligonucleotide
tcttacgtaattatagagtttcaagggagatgactgaagtggaaaaatttatcgaatttc

SEQ ID NO: 122075 - DNA, 60 bp, Artificial
  Synthetic oligonucleotide
tgactgaagtggaaaaatttatcgaatttcgtgctaaaaacgagatgcaaatatacggag

SEQ ID NO: 122076 - DNA, 60 bp, Artificial
  Synthetic oligonucleotide
tatacagaagatgatgattggcccacgagttagttcacgagtacggaattcttatgtaga

SEQ ID NO: 122077 - DNA, 60 bp, Artificial
  Synthetic oligonucleotide
atacagaagatgatgattggcccacgagttagctcacgggtgcggaattcttatgttgat

SEQ ID NO: 122078 - DNA, 60 bp, Artificial
  Synthetic oligonucleotide
atacagaagatgatgattggcccacgagttagctcacgagtgcggaattcttatgttgat

SEQ ID NO: 122079 - DNA, 53 bp, Artificial
  Synthetic oligonucleotide
tccctttagggatgcaagttatggctgacttcgtaaaccgtttcaattcgcca

SEQ ID NO: 122080 - DNA, 61 bp, Artificial
  Synthetic oligonucleotide
gcccaatcgattcgatatatcttaaacacacttcaatatgttccactttataaaccgtatg

SEQ ID NO: 122081 - DNA, 60 bp, Artificial
  Synthetic oligonucleotide
gaaaataagtgttgcagtgctttcattcactagtagagctcttaccagtatagcacgtgg

SEQ ID NO: 122082 - DNA, 60 bp, Artificial
  Synthetic oligonucleotide
ccctcctatctatagaatgtattaacaaaactttgaccactgaataaggaaccaatgatg

SEQ ID NO: 122083 - DNA, 60 bp, Artificial
  Synthetic oligonucleotide
gagaaagggttagagaacgaagacaatcgtgcaatagaacagttaacactacaaaatgcc

SEQ ID NO: 122084 - DNA, 60 bp, Artificial
  Synthetic oligonucleotide
gggttagagaacgaagacaatcgtgcaatagaacagttaacactacaaaatgcccaatcg

SEQ ID NO: 122085 - DNA, 61 bp, Artificial
  Synthetic oligonucleotide
gtcacagtaaaagatgtttcaaaatcattagtatgcgattttaaaattgacgcagagaccg

SEQ ID NO: 122086 - DNA, 60 bp, Artificial
  Synthetic oligonucleotide
cataattccggacagttatagtatggatatattaggtaatcaagaatttatgttatactt

SEQ ID NO: 122087 - DNA, 60 bp, Artificial
  Synthetic oligonucleotide
catactctacagcgcttgttatattcaaaagaacggttgaggatatatcaattccatcac

SEQ ID NO: 122088 - DNA, 60 bp, Artificial
  Synthetic oligonucleotide
cgtattagtaacgaaaataagtgttgcagtgctttcattcactagtagagctcttaccag

SEQ ID NO: 122089 - DNA, 60 bp, Artificial
  Synthetic oligonucleotide
gcgaaagctttgtgatacttgaacgtgagtatattgagttgtaccttacaagacatgtcc

SEQ ID NO: 122090 - DNA, 60 bp, Artificial
  Synthetic oligonucleotide
tttaggaaacatccaacaacgaacaagacaacggttagtttcagtacttaccaagatact

SEQ ID NO: 122091 - DNA, 60 bp, Artificial
  Synthetic oligonucleotide
caacaacgaacaagacaacggttagtttcagtacttaccaagatactggttatacggcag

SEQ ID NO: 122092 - DNA, 60 bp, Artificial
  Synthetic oligonucleotide
caaggtgagttcatcggcaacattgatacgttaagagagtcaacaataagaggaataagt

SEQ ID NO: 122093 - DNA, 60 bp, Artificial
  Synthetic oligonucleotide
cgtcaactacgaagcacgtcactgctggaagtttcaagttacaatacgaatttaggaaac

SEQ ID NO: 122094 - DNA, 60 bp, Artificial
  Synthetic oligonucleotide
gcaaacatcgacgctcaactctcaacgattcgtcttacctactagtcacagaacaaccgc

SEQ ID NO: 122095 - DNA, 60 bp, Artificial
  Synthetic oligonucleotide
gtcaaaatttctgtcaggattcattgaattggttagagaacggcgttatcaacggatctc

SEQ ID NO: 122096 - DNA, 60 bp, Artificial
  Synthetic oligonucleotide
cgaatccattaactttactctgcaaccaaataccaacatttcgggtaagaaagagcttgt

SEQ ID NO: 122097 - DNA, 60 bp, Artificial
  Synthetic oligonucleotide
ttcgggtaagaaagagcttgttatgtatggcagacaaggcggcggcatgcaaattagtga

SEQ ID NO: 122098 - DNA, 60 bp, Artificial
  Synthetic oligonucleotide
gaagctatcaatacaatgtttgcgtgctatgagtgcaggagtccaagatgttatagtagc

SEQ ID NO: 122099 - DNA, 60 bp, Artificial
  Synthetic oligonucleotide
aacggatctcttattcaacatagtgatcagttagcgataaagtacgttaatgcacttcgt

SEQ ID NO: 122100 - DNA, 60 bp, Artificial
  Synthetic oligonucleotide
caatacaatgtttgcgtgctatgagtgcaggagtccaagatgttatagtagcgtacagtc

SEQ ID NO: 122101 - DNA, 60 bp, Artificial
  Synthetic oligonucleotide
actacattagaagataaggttaaagatatagaaaaatggattcaaaatcagatagacagt

SEQ ID NO: 122102 - DNA, 60 bp, Artificial
  Synthetic oligonucleotide
cgttcaaacaaaagttatttatgaacactcaaagcgttctaactcaggaaaaccctatat

SEQ ID NO: 122103 - DNA, 60 bp, Artificial
  Synthetic oligonucleotide
ttctagagaatatgatgataccatttgcggcagtggatacacttacacgacttcgaacat

SEQ ID NO: 122104 - DNA, 60 bp, Artificial
  Synthetic oligonucleotide
aaccctatatatgaagacacagatataattatatacgcagtttgtgtgatttctagagaa

SEQ ID NO: 122105 - DNA, 60 bp, Artificial
  Synthetic oligonucleotide
ttcgatggaaacgaatccattaactttactctgcaaccaaataccaacatttcgggtaag

SEQ ID NO: 122106 - DNA, 60 bp, Artificial
  Synthetic oligonucleotide
ggctaaaccatcgcaaatcttgttggagaatggtatatcgtactttggtattatatgtga

SEQ ID NO: 122107 - DNA, 60 bp, Artificial
  Synthetic oligonucleotide
aactaagtatattctcggtgtaagtgaaggctttacgtcaactacgaagcacgtcactgc

SEQ ID NO: 122108 - DNA, 60 bp, Artificial
  Synthetic oligonucleotide
gcgaaattatttgacgattttaacgctaaatatgaagacgatgttggacctctgtatgtg

SEQ ID NO: 122109 - DNA, 60 bp, Artificial
  Synthetic oligonucleotide
atgctaagaaggcgaaattatttgacgattttaacgctaaatatgaagacgatgttggac

SEQ ID NO: 122110 - DNA, 60 bp, Artificial
  Synthetic oligonucleotide
gcaagaaaagaatatataccagatgtattgtcgagtttatccgttgaaagattgaagagc

SEQ ID NO: 122111 - DNA, 60 bp, Artificial
  Synthetic oligonucleotide
cacccgcacatgcttatatggtaataacggatgtagatgcaagaagcgagtatgatttag

SEQ ID NO: 122112 - DNA, 60 bp, Artificial
  Synthetic oligonucleotide
cagtgtttaaagaaaacggaaacattgtcagtaactcaggctaaaccatcgcaaatcttg

SEQ ID NO: 122113 - DNA, 60 bp, Artificial
  Synthetic oligonucleotide
caatgaaacaattgcgaatatacaaacacgccttaaacaattgcaagttagtagtgattc

SEQ ID NO: 122114 - DNA, 60 bp, Artificial
  Synthetic oligonucleotide
gatgaagagacgagcggtgatgttaacaatcaacaattaatatccaatgaaacaattgcg

SEQ ID NO: 122115 - DNA, 60 bp, Artificial
  Synthetic oligonucleotide
ctcttaccagtatagcacgtggattgcaagctgccggtcataaagtatcaacattattta

SEQ ID NO: 122116 - DNA, 60 bp, Artificial
  Synthetic oligonucleotide
tgataccatttgcggcagtggatacacttacacgacttcgaacatgtatgctaacagatc

SEQ ID NO: 122117 - DNA, 54 bp, Artificial
  Synthetic oligonucleotide
ctcactaattgacgcaaacagaattggcttgctatataacaaaacacgaacgaa

SEQ ID NO: 122118 - DNA, 60 bp, Artificial
  Synthetic oligonucleotide
gatagacagtcaaaatacaacaatatggggtagtctattagatactttcgttaatttgat

SEQ ID NO: 122119 - DNA, 60 bp, Artificial
  Synthetic oligonucleotide
gttatttatgaacactcaaagcgttctaactcaggaaaaccctatatatgaagacacaga

SEQ ID NO: 122120 - DNA, 55 bp, Artificial
  Synthetic oligonucleotide
ttacctcagctgcgaacaccaacgaagaaattgttatcatctgattttggtacaa

SEQ ID NO: 122121 - DNA, 60 bp, Artificial
  Synthetic oligonucleotide
gagcacagtagagataaattatcatggtcttactgcgataggtaaattacctcagctgcg

SEQ ID NO: 122122 - DNA, 60 bp, Artificial
  Synthetic oligonucleotide
tgacaattagtacggatttacaacttggaaatcgaacagtaaatgtgacaatggatgaca

SEQ ID NO: 122123 - DNA, 55 bp, Artificial
  Synthetic oligonucleotide
tgcacttcgtggggatttatcccttatatgacaggccgcgcaattacactaaaat

SEQ ID NO: 122124 - DNA, 60 bp, Artificial
  Synthetic oligonucleotide
caacatagtgatcagttagcgataaagtacgttaatgcacttcgtggggatttatccctt

SEQ ID NO: 122125 - DNA, 60 bp, Artificial
  Synthetic oligonucleotide
ccaagatactggttatacggcagaagaagtaaaacttttattcaataggtatttcaaaaa

SEQ ID NO: 122126 - DNA, 60 bp, Artificial
  Synthetic oligonucleotide
cgagtatgatttagtaactaagtatattctcggtgtaagtgaaggctttacgtcaactac

SEQ ID NO: 122127 - DNA, 60 bp, Artificial
  Synthetic oligonucleotide
gtaccggtgaaaacatctactatagttaaatgtacatactcactaattgacgcaaacaga

SEQ ID NO: 122128 - DNA, 60 bp, Artificial
  Synthetic oligonucleotide
gcgaatatacaaacacgccttaaacaattgcaagttagtagtgattcagatttagaggat

SEQ ID NO: 122129 - DNA, 60 bp, Artificial
  Synthetic oligonucleotide
gatgtgaagatacagtgtttaaagaaaacggaaacattgtcagtaactcaggctaaacca

SEQ ID NO: 122130 - DNA, 60 bp, Artificial
  Synthetic oligonucleotide
cttacactgttttggagccaatccctaatgggccaccagatcgttctcgtaggaagtggc

SEQ ID NO: 122131 - DNA, 60 bp, Artificial
  Synthetic oligonucleotide
cctgaacagatgatggagtttgtggttcttctaattgccggtgctgctaaaatgggacgc

SEQ ID NO: 122132 - DNA, 60 bp, Artificial
  Synthetic oligonucleotide
atgagtttgggagaggatttgatctcgcttatgttcgtgttaacacttcgggtcaaggta

SEQ ID NO: 122133 - DNA, 60 bp, Artificial
  Synthetic oligonucleotide
ttcgagggggaatgttgccaccatctgtgtcaaaaccgattctgccgtgtgagggggttc

SEQ ID NO: 122134 - DNA, 60 bp, Artificial
  Synthetic oligonucleotide
tggttgctactggaggcggtctatgactatccggtgaggctcgggagctgggattgcagt

SEQ ID NO: 122135 - DNA, 60 bp, Artificial
  Synthetic oligonucleotide
aaacttgtcatggatgctgtgtttgatccagattttggaatgattaagatgcgcaagggg

SEQ ID NO: 122136 - DNA, 60 bp, Artificial
  Synthetic oligonucleotide
ccatcttttattttctgttcggacgttaatgtagcgactcatcgtattagagggacacca

SEQ ID NO: 122137 - DNA, 60 bp, Artificial
  Synthetic oligonucleotide
ctgtactgcgctgactggttgctactggaggcggtctatgactatccggtgaggctcggg

SEQ ID NO: 122138 - DNA, 60 bp, Artificial
  Synthetic oligonucleotide
gtctcttgtaaggtaggagggcagtccttaacgggaattgggttgtcaaatgttgtgggt

SEQ ID NO: 122139 - DNA, 60 bp, Artificial
  Synthetic oligonucleotide
ctcctcatttcacgagatccccccgattcaggttgagatgacagggaacgtcaactatgt

SEQ ID NO: 122140 - DNA, 60 bp, Artificial
  Synthetic oligonucleotide
gaaagcttttcatggtgagcaggtatacccttttattgatccagtcgctaatgagtttgg

SEQ ID NO: 122141 - DNA, 60 bp, Artificial
  Synthetic oligonucleotide
atcctcgtcctggttttttagacccagcgctggagtttattcctgatagaattgtagtca

SEQ ID NO: 122142 - DNA, 60 bp, Artificial
  Synthetic oligonucleotide
gtcctcaagatcgtcatgctcttaccaccttatcgaacttgttaagatggtatactcgtg

SEQ ID NO: 122143 - DNA, 60 bp, Artificial
  Synthetic oligonucleotide
tgtacgtgaggatcgtgagcggagattcgataatcatctcgagggcgtacctttcgattc

SEQ ID NO: 122144 - DNA, 60 bp, Artificial
  Synthetic oligonucleotide
atgcgcaagggggtgactttctctttgagaccaactaacgatttaacgttctcctcattt

SEQ ID NO: 122145 - DNA, 60 bp, Artificial
  Synthetic oligonucleotide
ctacgagaactacccgcatgttcctgaaacattgacggtatttagcgagtatcaatggtt

SEQ ID NO: 122146 - DNA, 60 bp, Artificial
  Synthetic oligonucleotide
ttagacgtcgtgagattcgagacatcatgtaccgtccatatgcgaacgtgcttcgactgc

SEQ ID NO: 122147 - DNA, 60 bp, Artificial
  Synthetic oligonucleotide
agaagacaggcagcgggagctcctctaccatgcgaggttttgcttaatgatgcgattgcc

SEQ ID NO: 122148 - DNA, 60 bp, Artificial
  Synthetic oligonucleotide
gaacgttcgattgagcatcgacttcggggagactatcgagtttattatcctcgtcctggt

SEQ ID NO: 122149 - DNA, 60 bp, Artificial
  Synthetic oligonucleotide
ggcaattggggagtggaaggagttgttacgactaacgaatccacagcaggtctgtcagaa

SEQ ID NO: 122150 - DNA, 60 bp, Artificial
  Synthetic oligonucleotide
ccgtcaattcattctgagtattcttgttcagcaggcgacctcgcgagttggcttgataga

SEQ ID NO: 122151 - DNA, 60 bp, Artificial
  Synthetic oligonucleotide
tgttgtgggtatggatgaaataacctatgatgatgttaaaacacctgaacagatgatgga

SEQ ID NO: 122152 - DNA, 60 bp, Artificial
  Synthetic oligonucleotide
tctccggccaacagctctgattaagcttaatgttgtccagacaaccaatgttcgaggggg

SEQ ID NO: 122153 - DNA, 60 bp, Artificial
  Synthetic oligonucleotide
gctgcggagatcgcccaattttcatcctttctcagtctccggccaacagctctgattaag

SEQ ID NO: 122154 - DNA, 56 bp, Artificial
  Synthetic oligonucleotide
ggaacacgcgattgtgtggtttccgaatctgcgagggattctacaccatcacgcga

SEQ ID NO: 122155 - DNA, 60 bp, Artificial
  Synthetic oligonucleotide
gctgctaaaatgggacgctttgttttggtcgcatcaacgcccgaagggggaggtctactg

SEQ ID NO: 122156 - DNA, 60 bp, Artificial
  Synthetic oligonucleotide
tccaagtttagcgggatttattatgagtttatgttatcggcagtgagaaaggaacacgcg

SEQ ID NO: 122157 - DNA, 60 bp, Artificial
  Synthetic oligonucleotide
ccagcagttatgaaattattgctaacatggaggacattctgggtagggaggtacgagctt

SEQ ID NO: 122158 - DNA, 60 bp, Artificial
  Synthetic oligonucleotide
gcaagttcgatgggaggtagctggccgcgtagtgattatgaatctgctcgttaccagcag

SEQ ID NO: 122159 - DNA, 60 bp, Artificial
  Synthetic oligonucleotide
attctgagacggctaggacgagagcagagtatgatgtgcaagttcgatgggaggtagctg

SEQ ID NO: 122160 - DNA, 60 bp, Artificial
  Synthetic oligonucleotide
atcaatggttcgctcgagaggtggctgacaacatgacggataacgggctcggtacttcgg

SEQ ID NO: 122161 - DNA, 60 bp, Artificial
  Synthetic oligonucleotide
gtgttgagtctcttcggagtgaaaattaatcatggagttctggctcaggttggtgaacgt

SEQ ID NO: 122162 - DNA, 60 bp, Artificial
  Synthetic oligonucleotide
ctgaggctcatgctaatgtcatggaagagttgcaaaacgagaagatgaacgtgagtgcgt

SEQ ID NO: 122163 - DNA, 60 bp, Artificial
  Synthetic oligonucleotide
gtggattgtctgcgtacggcggcgttagtgtccccaaatatccgtcaattcattctgagt

SEQ ID NO: 122164 - DNA, 60 bp, Artificial
  Synthetic oligonucleotide
ctataatcttcacctcaaggcgcagcttgtgaccatgatctcatcatgcttctttcccga

SEQ ID NO: 122165 - DNA, 60 bp, Artificial
  Synthetic oligonucleotide
aggtctactgttcaaaaaatgggtgcgtcgccctgtggcggagaattttcgtaatatcaa

SEQ ID NO: 122166 - DNA, 60 bp, Artificial
  Synthetic oligonucleotide
tgtgcgatattatggctccatttgttgacggactgaaggttgaagattcactcggagtcc

SEQ ID NO: 122167 - DNA, 60 bp, Artificial
  Synthetic oligonucleotide
ggtgatcgctgcgtttgaaccggatgcggcaatgaacccttttaccttacgacagggtgc

SEQ ID NO: 122168 - DNA, 60 bp, Artificial
  Synthetic oligonucleotide
ttctcgtaggaagtggcttttaatgaagagggtgcaagaatggctgctccggaacgacct

SEQ ID NO: 122169 - DNA, 60 bp, Artificial
  Synthetic oligonucleotide
cagggtgctgatttgtttggccgagtacatgcacaaggatcaacatttaagggtggggca

SEQ ID NO: 122170 - DNA, 60 bp, Artificial
  Synthetic oligonucleotide
gcgaggttgaagactatgaggctgagttaacgaggatgatgttatttccaggtgatcaac

SEQ ID NO: 122171 - DNA, 60 bp, Artificial
  Synthetic oligonucleotide
tatctgaatacgaagctctgtaccggatgactgactcagagggaatggtggatgagtaca

SEQ ID NO: 122172 - DNA, 58 bp, Artificial
  Synthetic oligonucleotide
acgtctagtggctgagttgtcgactggagaactgttacgtgacactcctatccttgat

SEQ ID NO: 122173 - DNA, 60 bp, Artificial
  Synthetic oligonucleotide
gactttaatgtcttctcgccagctcttagagggtttacgtctagtggctgagttgtcgac

SEQ ID NO: 122174 - DNA, 60 bp, Artificial
  Synthetic oligonucleotide
caggtactgctggtttgggtgacttctttggccgaatgcgtcctgaaataacagatgcgt

SEQ ID NO: 122175 - DNA, 60 bp, Artificial
  Synthetic oligonucleotide
cgaaccaactcaagctcaagataccaaagtttcatctagtttagacctcgtaagctcgcg

SEQ ID NO: 122176 - DNA, 60 bp, Artificial
  Synthetic oligonucleotide
ttgttcctgtccgctatagtcaagatcgcgaccgtagctatgtccacgcgtaccaaagag

SEQ ID NO: 122177 - DNA, 60 bp, Artificial
  Synthetic oligonucleotide
gggtggggcatatgacagtaatgctgtaattttgttatctgaatacgaagctctgtaccg

SEQ ID NO: 122178 - DNA, 60 bp, Artificial
  Synthetic oligonucleotide
cgatggtcaagtggttgatttgttggctgttggcgaggaaaaggcgctcagtcagtctct

SEQ ID NO: 122179 - DNA, 60 bp, Artificial
  Synthetic oligonucleotide
caactaacggcgaagcagattggcgcgttgggggcacaaggaggttatttgaaagctttt

SEQ ID NO: 122180 - DNA, 60 bp, Artificial
  Synthetic oligonucleotide
gcgactcctcaactttggtcagggaacgtgcgtcatggatcaactccgtccttcgattgc

SEQ ID NO: 122181 - DNA, 60 bp, Artificial
  Synthetic oligonucleotide
cgcccgcacggtcaatctagcagttccctcgtcttggatgtccttggactttgacaccct

SEQ ID NO: 122182 - DNA, 60 bp, Artificial
  Synthetic oligonucleotide
atatcacgcctttctggccggcattggtatgtccgacgctgaagcccatcgcattgctag

SEQ ID NO: 122183 - DNA, 60 bp, Artificial
  Synthetic oligonucleotide
ccgctcgtcgtatcggtttaagtggattggtgtgacgcagttgtatgaaggcctacgccc

SEQ ID NO: 122184 - DNA, 60 bp, Artificial
  Synthetic oligonucleotide
ccgtccttcgattgctatgcgctaccgtcgccatgtcccgagtaggtcccgtttgccaag

SEQ ID NO: 122185 - DNA, 60 bp, Artificial
  Synthetic oligonucleotide
tggtactaacgcctggcgacggttgaccgacactcacccaggcaggttaccctcccgcgt

SEQ ID NO: 122186 - DNA, 60 bp, Artificial
  Synthetic oligonucleotide
gataagatatttaccaccgctgccgatgcctggcatgtacgcccccgctcccaagcatat

SEQ ID NO: 122187 - DNA, 60 bp, Artificial
  Synthetic oligonucleotide
ccctgctagatttgaagtccattttccccaacctcagcctccatagcatgtatcgcgaag

SEQ ID NO: 122188 - DNA, 60 bp, Artificial
  Synthetic oligonucleotide
cctcgaagatctaccaaactgcccaactcgcgcatttcagcttccaaacgcttatcccca

SEQ ID NO: 122189 - DNA, 60 bp, Artificial
  Synthetic oligonucleotide
tatcgcgaaggtgagttcggtggcaagtgcccgcgtattgagtggacggaaccccgctcg

SEQ ID NO: 122190 - DNA, 60 bp, Artificial
  Synthetic oligonucleotide
ctgacccaggcaatttacaagactcagttcgtgactccacgtggtggctcaagtgcggct

SEQ ID NO: 122191 - DNA, 60 bp, Artificial
  Synthetic oligonucleotide
gtggacatcaaggcctgcgacgcctccatcacctacgctgccttcctggcgccgatctgt

SEQ ID NO: 122192 - DNA, 60 bp, Artificial
  Synthetic oligonucleotide
cgccgtccgtgtgtacttggccgcggcttccactcctaactacgctcacgccctgctaga

SEQ ID NO: 122193 - DNA, 60 bp, Artificial
  Synthetic oligonucleotide
ttggctgtaaacgctttcgcgactcgactctcccccgagctcgagatgtgcgccgtccgt

SEQ ID NO: 122194 - DNA, 60 bp, Artificial
  Synthetic oligonucleotide
tacccaacatcagtcgacacccgccagtcggtaaggaatatgcgtctcccgagaccggtg

SEQ ID NO: 122195 - DNA, 60 bp, Artificial
  Synthetic oligonucleotide
aatccagctgctccatacaaccgccccgtttctggactgcagacgatgacccagcacctg

SEQ ID NO: 122196 - DNA, 60 bp, Artificial
  Synthetic oligonucleotide
gttgggcgtttgcatgcttcgcttcacgcggctcctttcaccctaagacaggtccccgcg

SEQ ID NO: 122197 - DNA, 60 bp, Artificial
  Synthetic oligonucleotide
caccgattgcctcgagtggcgtgattggctcaggttcagttgggcgtttgcatgcttcgc

SEQ ID NO: 122198 - DNA, 60 bp, Artificial
  Synthetic oligonucleotide
gtttctagtgtggatggtggcgtgaatcagatcgtcggttgcttgcgtgcctggatgcgg

SEQ ID NO: 122199 - DNA, 60 bp, Artificial
  Synthetic oligonucleotide
ggtccccgcgttgacgcccagtaccccgtgtggtcgttcatttacatgggtcttcccccg

SEQ ID NO: 122200 - DNA, 60 bp, Artificial
  Synthetic oligonucleotide
atgcagcgctacaagctgaacgggaactattatgccccagccttggtcgtgaacaccgga

SEQ ID NO: 122201 - DNA, 60 bp, Artificial
  Synthetic oligonucleotide
ggtgcgaaagatgcggactattgccacaattctaacatttcccctatcctgtcgcctctt

SEQ ID NO: 122202 - DNA, 60 bp, Artificial
  Synthetic oligonucleotide
ctagcttcgtcccaagcacggcaggtgaagatagaccccactcgtttcctcgagttcctg

SEQ ID NO: 122203 - DNA, 60 bp, Artificial
  Synthetic oligonucleotide
gactgcatcctcaccccgggtaccctcaggtgttgactctgatcagcccaatccatggct

SEQ ID NO: 122204 - DNA, 60 bp, Artificial
  Synthetic oligonucleotide
cagagacgtgctcagcttaaccagtggtatgtatctagtcagaccaccgaccatgtccgt

SEQ ID NO: 122205 - DNA, 60 bp, Artificial
  Synthetic oligonucleotide
atacttcgatgctaccctcttcgttggaaaaactgtctccggtctggacgttgaggctgt

SEQ ID NO: 122206 - DNA, 60 bp, Artificial
  Synthetic oligonucleotide
aacaagcatatgaatcgctccaccacttccggtagcgcagttcaggacaaagtgatcccc

SEQ ID NO: 122207 - DNA, 60 bp, Artificial
  Synthetic oligonucleotide
aaggcctacgccctctaaccccttcccgtgactctaaagcccttctaaagatgcgtgact

SEQ ID NO: 122208 - DNA, 60 bp, Artificial
  Synthetic oligonucleotide
atctcggtaccaagcgcatttcccctgaggacctcgccgagctaatggaactgcttgaaa

SEQ ID NO: 122209 - DNA, 60 bp, Artificial
  Synthetic oligonucleotide
acgtgccacctccgactacccccctctgaagcgtcgtcaccccgtttggcatctcgcaga

SEQ ID NO: 122210 - DNA, 60 bp, Artificial
  Synthetic oligonucleotide
ctgcttgaaaagtacggtcgaggctttgggtgggtgtacgatattgacagctctgactcg

SEQ ID NO: 122211 - DNA, 60 bp, Artificial
  Synthetic oligonucleotide
gtgccgcctcgtctagccgtaaagacttctctcgcctgctcgaactgtatctccacgtgc

SEQ ID NO: 122212 - DNA, 60 bp, Artificial
  Synthetic oligonucleotide
ctggcacgtctgtatcaagccggtttctcatacaaggtggatgacccgttctccagcggc

SEQ ID NO: 122213 - DNA, 60 bp, Artificial
  Synthetic oligonucleotide
aaggctaagggcccgctggctcatctctactcagtctggttggaagccgctcgtcaagtc

SEQ ID NO: 122214 - DNA, 60 bp, Artificial
  Synthetic oligonucleotide
tccaccgagcacaccgctaacaatggggctatggccgacttcttcctccgtgagtacgtc

SEQ ID NO: 122215 - DNA, 60 bp, Artificial
  Synthetic oligonucleotide
cagacgtgccgtcgctattgtcggacttaggtgtgtatcgtggctactgggctgcgcaag

SEQ ID NO: 122216 - DNA, 60 bp, Artificial
  Synthetic oligonucleotide
gatgttaactatattttgaatatggatatgaatttgccatcaacagcgagatatattaga

SEQ ID NO: 122217 - DNA, 60 bp, Artificial
  Synthetic oligonucleotide
cattgaataacgaaatcatttttaattatataccagaaagaataaggaatgatgttaact

SEQ ID NO: 122218 - DNA, 60 bp, Artificial
  Synthetic oligonucleotide
agtgttaaatcaaacacttaacgacaacattaggaatggacaagttattaatcaattaat

SEQ ID NO: 122219 - DNA, 60 bp, Artificial
  Synthetic oligonucleotide
cgaacgaattaacgatgctgtggctattattacggctgctaatagattaaacttatatca

SEQ ID NO: 122220 - DNA, 60 bp, Artificial
  Synthetic oligonucleotide
tgaaactctaatggcttgtataactatgaatatgcaacatgttcaaactctcactaccga

SEQ ID NO: 122221 - DNA, 56 bp, Artificial
  Synthetic oligonucleotide
agcttcagataaaattgctcaaggagtgataattgcttacagagatatgcagctag

SEQ ID NO: 122222 - DNA, 60 bp, Artificial
  Synthetic oligonucleotide
gggatgctggtaaagttgtagattctgagactgcaagtatttgtgatgctatatttcaag

SEQ ID NO: 122223 - DNA, 60 bp, Artificial
  Synthetic oligonucleotide
taaaaactctagggatgctggtaaagttgtagattctgagactgcaagtatttgtgatgc

SEQ ID NO: 122224 - DNA, 60 bp, Artificial
  Synthetic oligonucleotide
tagaaaacagcaattatctgacaaagtgctatcacaaaaagaagaaataataactgatgt

SEQ ID NO: 122225 - DNA, 60 bp, Artificial
  Synthetic oligonucleotide
ggctattaaaggctcaatggcgtacaggaagcgcggagctaaacgtgaagacttatcaca

SEQ ID NO: 122226 - DNA, 60 bp, Artificial
  Synthetic oligonucleotide
ttcaagatgaggaaacagagggagttgttagaagatttatcgcagatatgagacaacaag

SEQ ID NO: 122227 - DNA, 60 bp, Artificial
  Synthetic oligonucleotide
tttgtgatgctatatttcaagatgaggaaacagagggagttgttagaagatttatcgcag

SEQ ID NO: 122228 - DNA, 58 bp, Artificial
  Synthetic oligonucleotide
tgggatcatcatgtaccgttaaagtgtgtccattaaatactcagacattaggaattgg

SEQ ID NO: 122229 - DNA, 60 bp, Artificial
  Synthetic oligonucleotide
tcgtctaatcgccgagtgaagcgtgactcatacgcaggagtggtcaaacgtgggtacaca

SEQ ID NO: 122230 - DNA, 60 bp, Artificial
  Synthetic oligonucleotide
attatggatgagtatactgacgcaatggatgtcaatcagaagaggcaattacgtttgaac

SEQ ID NO: 122231 - DNA, 60 bp, Artificial
  Synthetic oligonucleotide
aacgtttcatgacaacattgaatgcgagctttcaaaggatacaatcgccattggataagg

SEQ ID NO: 122232 - DNA, 60 bp, Artificial
  Synthetic oligonucleotide
ggatgagtatactgacgcaatggatgtcaatcagaagaggcaattacgtttgaacaacgc

SEQ ID NO: 122233 - DNA, 60 bp, Artificial
  Synthetic oligonucleotide
gaggtaccgatgaatctgaatataagaagaagagagttgatgacatgtgcaccttcgccc

SEQ ID NO: 122234 - DNA, 60 bp, Artificial
  Synthetic oligonucleotide
tttctaacaaatgtgaagcgttttgattttatgagtgaatcatacgctaagactggacag

SEQ ID NO: 122235 - DNA, 60 bp, Artificial
  Synthetic oligonucleotide
cgtttcatgacaacattgaatgcgagctttcaaaggatacaatcgccattggataaggat

SEQ ID NO: 122236 - DNA, 60 bp, Artificial
  Synthetic oligonucleotide
ttggataaggatattgttaagaagttgcgtaaatgcggaagtactaatttaactcgtcaa

SEQ ID NO: 122237 - DNA, 60 bp, Artificial
  Synthetic oligonucleotide
gttaagaagttgcgtaaatgcggaagtactaatttaactcgtcaattgtcctttgtggca

SEQ ID NO: 122238 - DNA, 60 bp, Artificial
  Synthetic oligonucleotide
aactcgtcaattgtcctttgtggcatccggcgctttatgttattcatcttatttacagac

SEQ ID NO: 122239 - DNA, 60 bp, Artificial
  Synthetic oligonucleotide
cctttgtggcatccggcgctttatgttattcatcttatttacagacaaccctaaacaagg

SEQ ID NO: 122240 - DNA, 60 bp, Artificial
  Synthetic oligonucleotide
atttacagacaaccctaaacaaggatggtgttttgccgccgatagagttataccaacatt

SEQ ID NO: 122241 - DNA, 60 bp, Artificial
  Synthetic oligonucleotide
gacaaccctaaacaaggatggtgttttgccgccgatagagttataccaacatttgcttga

SEQ ID NO: 122242 - DNA, 60 bp, Artificial
  Synthetic oligonucleotide
gggttacagaggtaccgatgaatctgaatataagaagaagagagttgatgacatgtgcac

SEQ ID NO: 122243 - DNA, 60 bp, Artificial
  Synthetic oligonucleotide
gcgcaatgacactccaaatcatgaacaaaccaatgattacgattgtcaaaaagtttacta

SEQ ID NO: 122244 - DNA, 60 bp, Artificial
  Synthetic oligonucleotide
ttcattcagacacatcgtaatgcagtcaagagatcgagttttacgagtggatacctacta

SEQ ID NO: 122245 - DNA, 60 bp, Artificial
  Synthetic oligonucleotide
cctaagatcagtaggtagagtggcgccccgaggtctgcatcgtgtagagtggttgatctc

SEQ ID NO: 122246 - DNA, 60 bp, Artificial
  Synthetic oligonucleotide
ttgatgacgtcgaaagatttagacaggagggtttctattacactaatatgctagaagctc

SEQ ID NO: 122247 - DNA, 60 bp, Artificial
  Synthetic oligonucleotide
ctacccaggtgatcactaacgtgatggtatccccgcgtggacccccagctccgtgccgac

SEQ ID NO: 122248 - DNA, 60 bp, Artificial
  Synthetic oligonucleotide
tagccgtcgatcccatcgttactatgcctacgctgcgccaattccctgccagtcgatccc

SEQ ID NO: 122249 - DNA, 60 bp, Artificial
  Synthetic oligonucleotide
ccctgccagtcgatcccgctgcgattgtcgttgctatgttgtgtgcgccaaactgaagcg

SEQ ID NO: 122250 - DNA, 60 bp, Artificial
  Synthetic oligonucleotide
ttccgcgatcactcccatgttcctgtccgaagaattattcactcgcaaccaaagagcggt

SEQ ID NO: 122251 - DNA, 60 bp, Artificial
  Synthetic oligonucleotide
ccagcgaggccttcgtctgcgccaggtctatcatagcccagtgcgtgccagatggattcc

SEQ ID NO: 122252 - DNA, 60 bp, Artificial
  Synthetic oligonucleotide
accccatcagtgtgcttcaggtgtcagtagctaatttcagggaccatgtctggccgatga

SEQ ID NO: 122253 - DNA, 60 bp, Artificial
  Synthetic oligonucleotide
gattgacacctggctcgctggcatctccccaactggcatcccacctttcccattgagtgc

SEQ ID NO: 122254 - DNA, 60 bp, Artificial
  Synthetic oligonucleotide
gttcgttctgtccaatctcaagatcaacaagtctactccgtggactcaggaccagacccc

SEQ ID NO: 122255 - DNA, 60 bp, Artificial
  Synthetic oligonucleotide
ctggtgacgtgagcgcgcacatcgatacttacgagctgtgcgacgatctaaccctcgcca

SEQ ID NO: 122256 - DNA, 60 bp, Artificial
  Synthetic oligonucleotide
aggctaaccgcaacgcgcttttcctggatgaatcactccccgaccgcgtcggttgtatcg

SEQ ID NO: 122257 - DNA, 60 bp, Artificial
  Synthetic oligonucleotide
ttttatcatcacgcatcatgccacgcacctcgcgcaacgtacgcgccaccgaggttgcca

SEQ ID NO: 122258 - DNA, 59 bp, Artificial
  Synthetic oligonucleotide
ccccgatcccgtggtcgatacgtccgattctttgacaacaaggagttgtttgctgtcgc

SEQ ID NO: 122259 - DNA, 60 bp, Artificial
  Synthetic oligonucleotide
tcgtcttcacaacttggacccgctggagtttcagataaggttccttcctccgtcgtgacc

SEQ ID NO: 122260 - DNA, 60 bp, Artificial
  Synthetic oligonucleotide
cgtcgctccaaccatcgctagtgcagacgccgcccaacatgcatccaacatctcgtcttc

SEQ ID NO: 122261 - DNA, 60 bp, Artificial
  Synthetic oligonucleotide
tgggcgagcaaggattcagtgtcgcgccacttggacgtccgtctttctcctcccactcat

SEQ ID NO: 122262 - DNA, 60 bp, Artificial
  Synthetic oligonucleotide
gcccagtgcgtgccagatggattccaagtcccaagacctttacaagacttcaatcagtac

SEQ ID NO: 122263 - DNA, 60 bp, Artificial
  Synthetic oligonucleotide
atggcaggtcacgtctgggttcagcgaatctcttcctgcccgccaaccaactcacctacc

SEQ ID NO: 122264 - DNA, 60 bp, Artificial
  Synthetic oligonucleotide
gatcccagcgctgcctgagggagccgttaatcatccgatctgtcacaccggttgggcgag

SEQ ID NO: 122265 - DNA, 60 bp, Artificial
  Synthetic oligonucleotide
atcctgtctgaagccatcaagcgtgtgccggaaacgacgacgatcgtcccctcacccacc

SEQ ID NO: 122266 - DNA, 60 bp, Artificial
  Synthetic oligonucleotide
tgccataccacctagcaatgccgctactgacactaccgttgatactaccgtcgctccaac

SEQ ID NO: 122267 - DNA, 57 bp, Artificial
  Synthetic oligonucleotide
tcgccgcatccatccccttcgctcagactgacaccatcctgtgcccatgggctgcgt

SEQ ID NO: 122268 - DNA, 60 bp, Artificial
  Synthetic oligonucleotide
cctactcaacgtggccaacaatacctcagccgccctcccactcatcgaggccgcagccac

SEQ ID NO: 122269 - DNA, 60 bp, Artificial
  Synthetic oligonucleotide
caacaatacctcagccgccctcccactcatcgaggccgcagccactctcattatgggcat

SEQ ID NO: 122270 - DNA, 60 bp, Artificial
  Synthetic oligonucleotide
ccgcagccactctcattatgggcatcaccccactccgaatggaaccgcgaatcctgtctg

SEQ ID NO: 122271 - DNA, 60 bp, Artificial
  Synthetic oligonucleotide
cgtcatggagatcgtgcaagacgtgtctcaacagttggtcgccgcatccatccccttcgc

SEQ ID NO: 122272 - DNA, 60 bp, Artificial
  Synthetic oligonucleotide
aacgccactcacaacaactgggatccactgaaccccgtcggcctacccatcttcgctcgt

SEQ ID NO: 122273 - DNA, 60 bp, Artificial
  Synthetic oligonucleotide
actatgatccatgcacactggccccaacccggcgtgatccagtatggcaggtcacgtctg

SEQ ID NO: 122274 - DNA, 60 bp, Artificial
  Synthetic oligonucleotide
gttcgttgatccgaccaccctcgatcgcaatcgcacccccctgctccacgcgctggcgac

SEQ ID NO: 122275 - DNA, 59 bp, Artificial
  Synthetic oligonucleotide
tgacgacatgttcaagactgcttttgacattgatggttcccttatcgagggcattggct

SEQ ID NO: 122276 - DNA, 60 bp, Artificial
  Synthetic oligonucleotide
caaccatcgtcggggataccacacgccgcaccttgacgggtttgatggccgcactcatgc

SEQ ID NO: 122277 - DNA, 60 bp, Artificial
  Synthetic oligonucleotide
gtccatactgccccagattcctcattcctccacgaagctatgcaggtcacgtctcaggtc

SEQ ID NO: 122278 - DNA, 60 bp, Artificial
  Synthetic oligonucleotide
gtggccgatctctctgttgcctacctccgtcagaatggcgcggtcgagcgtgtccatact

SEQ ID NO: 122279 - DNA, 60 bp, Artificial
  Synthetic oligonucleotide
ttactcggctatctatcgatgcatcgctggctgtctgtacagtggtcttgtccagatgtt

SEQ ID NO: 122280 - DNA, 60 bp, Artificial
  Synthetic oligonucleotide
gggtgtgaccgtctttcctccgttccaagtccctatcactcggttagatcctacccaggt

SEQ ID NO: 122281 - DNA, 60 bp, Artificial
  Synthetic oligonucleotide
tgcggaccgagcatcgaactggcgcgggctccctggtgacatctcctgcgattaatcaag

SEQ ID NO: 122282 - DNA, 60 bp, Artificial
  Synthetic oligonucleotide
ggtctttgcacttcatttcttgcttctgacactatctcaattgctgggctgcaacgagag

SEQ ID NO: 122283 - DNA, 60 bp, Artificial
  Synthetic oligonucleotide
ctagcgcctaccatcgccactgacgccttaaacaagtacatgggagaggctgtagccaag

SEQ ID NO: 122284 - DNA, 60 bp, Artificial
  Synthetic oligonucleotide
cattgagtgccccaattccccaaatcaccatcccgatcaccgcccgccgtgtgtacttcg

SEQ ID NO: 122285 - DNA, 60 bp, Artificial
  Synthetic oligonucleotide
ctgcaacgagagattgtcggattcacctggttcatggagaccttgcagatgatcccagcg

SEQ ID NO: 122286 - DNA, 60 bp, Artificial
  Synthetic oligonucleotide
catttggaaatcccttatcgtcatgctggccgcgcctatgaccactgatcctcacgctgc

SEQ ID NO: 122287 - DNA, 60 bp, Artificial
  Synthetic oligonucleotide
aatcgatggccggccctcatcgaccccaactacatccctggccagtcccaacttcccgct

SEQ ID NO: 122288 - DNA, 60 bp, Artificial
  Synthetic oligonucleotide
cccaacttcccgctcgtgtccagctttacaatccactgcgccgctataactatcgttacc

SEQ ID NO: 122289 - DNA, 60 bp, Artificial
  Synthetic oligonucleotide
cagtccactccagccgtacagttcagccaccccgaggtctggcctcctgggttcgttgat

SEQ ID NO: 122290 - DNA, 60 bp, Artificial
  Synthetic oligonucleotide
ccgagcccatcatcatccccgcgccgggcatgacgcagtccactccagccgtacagttca

SEQ ID NO: 122291 - DNA, 60 bp, Artificial
  Synthetic oligonucleotide
gcatcccacctttcccattgagtgccccaattccccaaatcaccatcccgatcaccgccc

SEQ ID NO: 122292 - DNA, 60 bp, Artificial
  Synthetic oligonucleotide
tgatcctcacgctgctgtgaaggcgttcatgtcgatggccaacctactcgctcagcccga

SEQ ID NO: 122293 - DNA, 60 bp, Artificial
  Synthetic oligonucleotide
tactgaagctcccgcgattgacacctggctcgctggcatctccccaactggcatcccacc

SEQ ID NO: 122294 - DNA, 60 bp, Artificial
  Synthetic oligonucleotide
tacccatctctgaagggcatgctgtacatccccggtgttgagtaggcgtacgtgtcgccc

SEQ ID NO: 122295 - DNA, 60 bp, Artificial
  Synthetic oligonucleotide
ctccgcagatgcttaccctgatcctacccagtccatcacaagtatccctgccatttggaa

SEQ ID NO: 122296 - DNA, 60 bp, Artificial
  Synthetic oligonucleotide
atcaccgcccgccgtgtgtacttcggatactgcaccatgaacaacaccggtgccacgttt

SEQ ID NO: 122297 - DNA, 60 bp, Artificial
  Synthetic oligonucleotide
gaattaccattaacctaagatcagtaggtagagtggcgccccgaggtctgcatcgtgtag

SEQ ID NO: 122298 - DNA, 60 bp, Artificial
  Synthetic oligonucleotide
gacgtctgaagaaccagcgagtatcgggatcactatagagggggtcatgagtcaaaagaa

SEQ ID NO: 122299 - DNA, 60 bp, Artificial
  Synthetic oligonucleotide
ccacaaatacagcgacatttgaagaggtggctacaagtgaaaaattagtaataactgacg

SEQ ID NO: 122300 - DNA, 60 bp, Artificial
  Synthetic oligonucleotide
caatgggctaacgcttagatcagtcacaatgcgaccaacttcgcaagaacaacggaatga

SEQ ID NO: 122301 - DNA, 60 bp, Artificial
  Synthetic oligonucleotide
tacaatgggctaacgcttagatcagtcacaatgcgaccaacttcgcaagaacaacggaat

SEQ ID NO: 122302 - DNA, 60 bp, Artificial
  Synthetic oligonucleotide
ctgttccaaaagatgaagcgtgaaagtaatccgttcaaggggctgtcaactgataggaag

SEQ ID NO: 122303 - DNA, 51 bp, Artificial
  Synthetic oligonucleotide
ctataaagtgtatgttgacagcgaaagtggataaaaaagatcaggataaat

SEQ ID NO: 122304 - DNA, 60 bp, Artificial
  Synthetic oligonucleotide
tattgcgccaccaccacaattcaaaaaacggtataacacaaatgacaattcaagaggaat

SEQ ID NO: 122305 - DNA, 60 bp, Artificial
  Synthetic oligonucleotide
catgtaagaaactactgttccaaaagatgaagcgtgaaagtaatccgttcaaggggctgt

SEQ ID NO: 122306 - DNA, 60 bp, Artificial
  Synthetic oligonucleotide
gaactggtatgcatttacatcttcaatgaaacaaggtaatactcttgaaacatgtaagaa

SEQ ID NO: 122307 - DNA, 60 bp, Artificial
  Synthetic oligonucleotide
gataaaccactttcagaatcccatataaaagagctcattgctgagttgcggtggcaatac

SEQ ID NO: 122308 - DNA, 60 bp, Artificial
  Synthetic oligonucleotide
atgaagataaaccactttcagaatcccatataaaagagctcattgctgagttgcggtggc

SEQ ID NO: 122309 - DNA, 60 bp, Artificial
  Synthetic oligonucleotide
attcatcagttgcgaatcatgcagatagagtctacgctacgttcaagagcaatagtaaaa

SEQ ID NO: 122310 - DNA, 50 bp, Artificial
  Synthetic oligonucleotide
ttgcggtggcaatacaataaatttgctgtaattacacatggtaaaggtca

SEQ ID NO: 122311 - DNA, 60 bp, Artificial
  Synthetic oligonucleotide
caggatgtacttttccattctagagatttgttgctgaaatcagtcctaatagctattggt

SEQ ID NO: 122312 - DNA, 55 bp, Artificial
  Synthetic oligonucleotide
gttgcgaatgtactatcaaaagtagtttctgtaagacatctagagaatctggtgc

SEQ ID NO: 122313 - DNA, 60 bp, Artificial
  Synthetic oligonucleotide
gctaatgccaattttagatcaaaattttgttgagtataaaattacagtcaatgaagataa

SEQ ID NO: 122314 - DNA, 60 bp, Artificial
  Synthetic oligonucleotide
gtacttttccattctagagatttgttgctgaaatcagtcctaatagctattggtcactct

SEQ ID NO: 122315 - DNA, 60 bp, Artificial
  Synthetic oligonucleotide
cagagctgttgctcaaaacgcctatgtgtgagggctgttatggcacggcataacgctcac

SEQ ID NO: 122316 - DNA, 60 bp, Artificial
  Synthetic oligonucleotide
acagagctgttgctcaaaacgcctatgtgtgagggctgttatggcacggcataacgctca

SEQ ID NO: 122317 - DNA, 60 bp, Artificial
  Synthetic oligonucleotide
acaaggtccaataaacagagctgttgcccaaaacgcctatgtgtgagggctgttatggca

SEQ ID NO: 122318 - DNA, 60 bp, Artificial
  Synthetic oligonucleotide
cctatgtgtgagggctgttatggcacggcataacgctcacatacgcccgtgtcgttgtta

SEQ ID NO: 122319 - DNA, 60 bp, Artificial
  Synthetic oligonucleotide
gctgttatggcacggcataacgctcacatacgcccgtgtcgttgttatggatagcgtgcc

SEQ ID NO: 122320 - DNA, 60 bp, Artificial
  Synthetic oligonucleotide
cccagataccatcaagtttggggatttgaattatccagtgatgattggcgatccgatgat

SEQ ID NO: 122321 - DNA, 60 bp, Artificial
  Synthetic oligonucleotide
caagagggatgggacaaaacaatctcagcacagccagatatgatggtatgtggtggcgcc

SEQ ID NO: 122322 - DNA, 60 bp, Artificial
  Synthetic oligonucleotide
gggatgggacaaaacaatctcagcacagccagatatgatggtatgtggtggcgccgtcgt

SEQ ID NO: 122323 - DNA, 60 bp, Artificial
  Synthetic oligonucleotide
tcaaattgtgaatccaacatttatatcaagatatcgccaaattgcatactatttctacaa

SEQ ID NO: 122324 - DNA, 66 bp, Artificial
  Synthetic oligonucleotide
gtcaaattgtgaatccaacatttatatcaagatatcgccaaattgcatactatttctacaatccgg

SEQ ID NO: 122325 - DNA, 65 bp, Artificial
  Synthetic oligonucleotide
ggtcaaattgtgaatccaacatttatatcaagatatcgccaaattgcatactatttctacaaccc

SEQ ID NO: 122326 - DNA, 60 bp, Artificial
  Synthetic oligonucleotide
ctgatagcgaaaaattggcaataattgatgttgttgacagcgtaaatcataaattagatg

SEQ ID NO: 122327 - DNA, 60 bp, Artificial
  Synthetic oligonucleotide
ctgacagcgaaaaattggcaataattgatgttgttgacagcgtaaatcataaattagatg

SEQ ID NO: 122328 - DNA, 60 bp, Artificial
  Synthetic oligonucleotide
atgaagttggttttagaagaagaggcgtgggcggtggctaatgatttcgaagaattgatg

SEQ ID NO: 122329 - DNA, 60 bp, Artificial
  Synthetic oligonucleotide
gccgcaccttgggattcagacgacgtgttcatattgcattgtgtcgcaccacatcatgcg

SEQ ID NO: 122330 - DNA, 60 bp, Artificial
  Synthetic oligonucleotide
aggagaccaagaggattcttcctaaaactgcaatgcgatttaaggtgccattaagccagc

SEQ ID NO: 122331 - DNA, 60 bp, Artificial
  Synthetic oligonucleotide
ctcgcggcgtagattcccactgctgtataacgggggagggtgcgcgatactacacactta

SEQ ID NO: 122332 - DNA, 60 bp, Artificial
  Synthetic oligonucleotide
gagactaagacagatcaaacgtcatgttaatgaacagatcctcccaaagctaaagagtga

SEQ ID NO: 122333 - DNA, 60 bp, Artificial
  Synthetic oligonucleotide
gactgcagcaatgtaagaggttgagctgccgtcgactgtcttcggaagcggcggagttct

SEQ ID NO: 122334 - DNA, 60 bp, Artificial
  Synthetic oligonucleotide
cggggaagttatcaatctcgctgcgcgtatgtctcagatgtggatggagtattagttact

SEQ ID NO: 122335 - DNA, 60 bp, Artificial
  Synthetic oligonucleotide
gggaagtaattaatcttgctgcgcgcatgtctcagatgtggatggagtattagttactga

SEQ ID NO: 122336 - DNA, 60 bp, Artificial
  Synthetic oligonucleotide
agcgccctaacacaacttctcatgtacgagatgtacgctatgcagacgtctgtcacctta

SEQ ID NO: 122337 - DNA, 60 bp, Artificial
  Synthetic oligonucleotide
acaacggcggcggcactcgggaaacaaacaggtacggcaacggacatttcttcgatgtta

SEQ ID NO: 122338 - DNA, 60 bp, Artificial
  Synthetic oligonucleotide
ggagtactttgcccaacacattactttcatctgcagatgtgaaggcgatggacgcgtcaa

SEQ ID NO: 122339 - DNA, 60 bp, Artificial
  Synthetic oligonucleotide
gctcttaagcagtatgatgcagaagagacggaggtgagcgccctaacacaacttctcatg

SEQ ID NO: 122340 - DNA, 56 bp, Artificial
  Synthetic oligonucleotide
cggaagaaacgggaaaagctaccgaaggcactccagagtcatattaacgatgttgg

SEQ ID NO: 122341 - DNA, 60 bp, Artificial
  Synthetic oligonucleotide
cggctttcatttcgtaaatatggatatatgctcttgtttacccagcttgtgctacgcact

SEQ ID NO: 122342 - DNA, 60 bp, Artificial
  Synthetic oligonucleotide
tcgagtcatcacacttcattactagccatgagtaatcgatctggtgagacaatgtatcat

SEQ ID NO: 122343 - DNA, 59 bp, Artificial
  Synthetic oligonucleotide
tgtcaccttagaaacgtcgacatttggtgaaatcccagctcctgaagcctccttccaat

SEQ ID NO: 122344 - DNA, 60 bp, Artificial
  Synthetic oligonucleotide
cgattagtgatgatctacgattcaacgcaattagggagatgttatcctatctacaatgtc

SEQ ID NO: 122345 - DNA, 60 bp, Artificial
  Synthetic oligonucleotide
cccacagcgtaccatgatgagcgatgaccataaatatgattatctaacgacctttcgtgt

SEQ ID NO: 122346 - DNA, 60 bp, Artificial
  Synthetic oligonucleotide
gagcttacttctccgaaggccttcacgtatttggactatccattaaacccacagcgtacc

SEQ ID NO: 122347 - DNA, 60 bp, Artificial
  Synthetic oligonucleotide
tctatcaaacagggcccgaatggatttaagattgacgcgaggcatacacggacattttag

SEQ ID NO: 122348 - DNA, 60 bp, Artificial
  Synthetic oligonucleotide
gcacagagttattggcatatgtcggtttccaggacaatctatcaaacagggcccgaatgg

SEQ ID NO: 122349 - DNA, 60 bp, Artificial
  Synthetic oligonucleotide
ggcccgaatggatttaagattgacgcgaggcatacacggacattttagatttgacgaccc

SEQ ID NO: 122350 - DNA, 60 bp, Artificial
  Synthetic oligonucleotide
cccagcttgtgctacgcacttttccatctaggattcgaatacggtgtcgaaaacatagat

SEQ ID NO: 122351 - DNA, 60 bp, Artificial
  Synthetic oligonucleotide
tctgcctttcatgtggttctttctgcataaagggggtgagatgccatgtccttcaattca

SEQ ID NO: 122352 - DNA, 60 bp, Artificial
  Synthetic oligonucleotide
cgcgtgagtgtaccaccagcaaaaccatggttagtgactgtttatctgcctttcatgtgg

SEQ ID NO: 122353 - DNA, 60 bp, Artificial
  Synthetic oligonucleotide
cgagttcctaaggcatgacatcccaatcgcgtacaaccagtattacggttctgagagcac

SEQ ID NO: 122354 - DNA, 60 bp, Artificial
  Synthetic oligonucleotide
tcagcgccgcgatgggtcattcacgatatctgaaagcattcactgtccaacaggcgagtt

SEQ ID NO: 122355 - DNA, 60 bp, Artificial
  Synthetic oligonucleotide
aagcaagatatcacgccgcattttcgacttatagcatgtatagagaaaatcagtttcaaa

SEQ ID NO: 122356 - DNA, 60 bp, Artificial
  Synthetic oligonucleotide
gacgaccctacatttcaatttggttttaagatttggagttctcgacgtgatttaatgtcg

SEQ ID NO: 122357 - DNA, 60 bp, Artificial
  Synthetic oligonucleotide
ttgagggtatagcaggagcagaatcattcaacacttctagggaggcagcaaatgacttaa

SEQ ID NO: 122358 - DNA, 60 bp, Artificial
  Synthetic oligonucleotide
ggtctttaattacgttgatggctcaatgattagtgacaagtttatcgagttcctaaggca

SEQ ID NO: 122359 - DNA, 60 bp, Artificial
  Synthetic oligonucleotide
cagtaccaatggagtcatcagtggaaatggcatcatcatttcgagctcttgggttacgcg

SEQ ID NO: 122360 - DNA, 54 bp, Artificial
  Synthetic oligonucleotide
gctgaccaatacagagagatggatgagtatctaaaacagataagcacaacgacc

SEQ ID NO: 122361 - DNA, 60 bp, Artificial
  Synthetic oligonucleotide
cggcgaaataagtattatcaaccccaagtgtaccggacagacgttaattttggcttggtc

SEQ ID NO: 122362 - DNA, 60 bp, Artificial
  Synthetic oligonucleotide
gaagttcggtttggccttggcgatgatgtgtgctaacagatttactatcgcagtaccaat

SEQ ID NO: 122363 - DNA, 60 bp, Artificial
  Synthetic oligonucleotide
ctgagcacaccactaatggaacatgacatcacttgaacatctaacacctgaatcgatcgc

SEQ ID NO: 122364 - DNA, 60 bp, Artificial
  Synthetic oligonucleotide
gagtgcaggcgtgaaaaacctcgagagtgaatttgtaactggaaccgagcggatagcgat

SEQ ID NO: 122365 - DNA, 55 bp, Artificial
  Synthetic oligonucleotide
acgagacgtatttcatgctcacctagtggcgagagtggcctcagatgacggtact

SEQ ID NO: 122366 - DNA, 60 bp, Artificial
  Synthetic oligonucleotide
aaagcgaattacccaaacttattcgaaagaccagtggtagcaccaatcgaggttaaaaag

SEQ ID NO: 122367 - DNA, 60 bp, Artificial
  Synthetic oligonucleotide
taaaagggaaacgatagacacagcatacataaaaggtttaagtaggcgtcttgagggtat

SEQ ID NO: 122368 - DNA, 60 bp, Artificial
  Synthetic oligonucleotide
tctaacacctgaatcgatcgcaactctcgaagatatatcctataacctaaccactgacta

SEQ ID NO: 122369 - DNA, 60 bp, Artificial
  Synthetic oligonucleotide
gataactgaggggaaaatgtcatacgatacagagtggctgacaaagttgggagtgatacg

SEQ ID NO: 122370 - DNA, 56 bp, Artificial
  Synthetic oligonucleotide
ggctgacaaagttgggagtgatacgggcactgcgattaatagaatgtgatgtagtt

SEQ ID NO: 122371 - DNA, 60 bp, Artificial
  Synthetic oligonucleotide
ttaagaagacatgggttcgtggcgccagcggcaatcatatatggtgagaaactgacagag

SEQ ID NO: 122372 - DNA, 60 bp, Artificial
  Synthetic oligonucleotide
gcctttacggaaatcgcaaatgcacctcttcagtaccagcttaattgactccttacggcg

SEQ ID NO: 122373 - DNA, 60 bp, Artificial
  Synthetic oligonucleotide
tcaaattgatcgtagagtgcgattgatctcgggagtgaacaatgaaaaactactatcgag

SEQ ID NO: 122374 - DNA, 60 bp, Artificial
  Synthetic oligonucleotide
cttggtatatcactaatcctgtccaaatttctatcattaacaacggcggcggcactcggg

SEQ ID NO: 122375 - DNA, 60 bp, Artificial
  Synthetic oligonucleotide
aatgtatcatgcgattgaaccttcaacgagagcagagccagaggtgcttggtgacgatgt

SEQ ID NO: 122376 - DNA, 60 bp, Artificial
  Synthetic oligonucleotide
gcgattgaaccttcaacgagagcagagccagaggtgcttggtgacgatgttcgcaaagga

SEQ ID NO: 122377 - DNA, 60 bp, Artificial
  Synthetic oligonucleotide
gttcgcaaaggatataatggtttactaccacacatgatagcaaacgttgaacgggaccag

SEQ ID NO: 122378 - DNA, 60 bp, Artificial
  Synthetic oligonucleotide
gttgaacgggaccagaaaatatgtgcgcagctaggactgactatagaggagaatttaagc

SEQ ID NO: 122379 - DNA, 60 bp, Artificial
  Synthetic oligonucleotide
tcagtaggatgttacgttggttatcctgatagaataggtgttggaacaaaagagcataat

SEQ ID NO: 122380 - DNA, 60 bp, Artificial
  Synthetic oligonucleotide
agagcataataatgaacaaacatctgtattgcagcacatccaagagttgaatgccttaac

SEQ ID NO: 122381 - DNA, 60 bp, Artificial
  Synthetic oligonucleotide
ggatagcgattagattgctcaaaaagcgtcttccacaagccgcgtcgaaggctgaccaat

SEQ ID NO: 122382 - DNA, 60 bp, Artificial
  Synthetic oligonucleotide
gaaatagcacatgctttcgttcacaaacccgaagagaagtggtcacctttggagcaaagc

SEQ ID NO: 122383 - DNA, 60 bp, Artificial
  Synthetic oligonucleotide
ttcgttcacaaacccgaagagaagtggtcacctttggagcaaagcttaatgtacgcggag

SEQ ID NO: 122384 - DNA, 60 bp, Artificial
  Synthetic oligonucleotide
ggagcaaagcttaatgtacgcggaggtgttgcgcaattgtggtcagcatatgatgcgtgt

SEQ ID NO: 122385 - DNA, 60 bp, Artificial
  Synthetic oligonucleotide
aatttacaatttgattttctcttctcgaatcatctggcataccccgaacacgatgaagca

SEQ ID NO: 122386 - DNA, 60 bp, Artificial
  Synthetic oligonucleotide
aagaaaagatgaaacacaatcaagatagagttgaagagctgagtttagtgcgtgtggatg

SEQ ID NO: 122387 - DNA, 60 bp, Artificial
  Synthetic oligonucleotide
tgagtctgtcgttggagtgagagctgctaggccgatatcgggaatgcagaacatgattca

SEQ ID NO: 122388 - DNA, 60 bp, Artificial
  Synthetic oligonucleotide
atccattgtaaatgatgagtctgtcgttggagtgagagctgctaggccgatatcgggaat

SEQ ID NO: 122389 - DNA, 60 bp, Artificial
  Synthetic oligonucleotide
tgtcgttggagtgagagctgctaggccgatatcgggaatgcagaacatgattcagcatct

SEQ ID NO: 122390 - DNA, 60 bp, Artificial
  Synthetic oligonucleotide
gattccagatctatcgcataattgccctttatggtgttttagagaaatctgtcgtcatat

SEQ ID NO: 122391 - DNA, 60 bp, Artificial
  Synthetic oligonucleotide
gaatggaagaatactctgtcccaattattcttgactaaagggtggccaactggatcagtc

SEQ ID NO: 122392 - DNA, 60 bp, Artificial
  Synthetic oligonucleotide
gaatggaaggatactctgtcccaattattcttgactaaagggtggccaactggatcagtc

SEQ ID NO: 122393 - DNA, 60 bp, Artificial
  Synthetic oligonucleotide
gaatggaaggatactctgtcccaattattcttgactaaagggtggccaactgggtcagtc

SEQ ID NO: 122394 - DNA, 60 bp, Artificial
  Synthetic oligonucleotide
gcagactttaggaataggttgtattaccacaaatacagcgacatttgaagaggtggctac

SEQ ID NO: 122395 - DNA, 60 bp, Artificial
  Synthetic oligonucleotide
acaaactgaacgtatgatgcgagtaaattggaagaaatggtggcaagttttctatacggt

SEQ ID NO: 122396 - DNA, 60 bp, Artificial
  Synthetic oligonucleotide
ggaatggaaggatactctgtcccaattattcttgactaaagggtggccaactggatcagt

SEQ ID NO: 122397 - DNA, 52 bp, Artificial
  Synthetic oligonucleotide
actactacaccacaaactgaacgtatgatgcgagtaaattggaagaaagggg

SEQ ID NO: 122398 - DNA, 60 bp, Artificial
  Synthetic oligonucleotide
actacaccacaaactgaacgtatgatgcgagtaaattggaaaaaatggtggcaggttttc

SEQ ID NO: 122399 - DNA, 60 bp, Artificial
  Synthetic oligonucleotide
ggaatggaaggatactctgtcccaattattcttgactaaagggtggccaactgggtcagt

SEQ ID NO: 122400 - DNA, 60 bp, Artificial
  Synthetic oligonucleotide
ggtgtgaaccataaacttgatgtgactacaaatacctgtacaattaggaattgtaagaag

SEQ ID NO: 122401 - DNA, 60 bp, Artificial
  Synthetic oligonucleotide
ggaatggaaggatactctgtcccaattattcttgactaaaggggggccaactggatcagt

SEQ ID NO: 122402 - DNA, 60 bp, Artificial
  Synthetic oligonucleotide
ccataaacttgatgtgactacaaatacctgtacaattaggaattgtaagaagttaggacc

SEQ ID NO: 122403 - DNA, 60 bp, Artificial
  Synthetic oligonucleotide
tgatggtgtgaaccataaacttgatgtgactacaaatacctgtacaattaggaattgtaa

SEQ ID NO: 122404 - DNA, 60 bp, Artificial
  Synthetic oligonucleotide
gtccattgaatacgcagactttaggaataggttgtattaccacaaatacagcgacatttg

SEQ ID NO: 122405 - DNA, 60 bp, Artificial
  Synthetic oligonucleotide
ggtatgtccattgaatacgcagactttaggaataggttgtattaccacaaatacagcgac

SEQ ID NO: 122406 - DNA, 60 bp, Artificial
  Synthetic oligonucleotide
ccattgaatacgcagactttaggaataggttgtattaccacaaatacagcgacatttgaa

SEQ ID NO: 122407 - DNA, 60 bp, Artificial
  Synthetic oligonucleotide
gtccattgaatacccagactttaggaataggttgtattaccacaaatacagcaacatttg

SEQ ID NO: 122408 - DNA, 60 bp, Artificial
  Synthetic oligonucleotide
ccataaacttgatgtgactacaaatacctgtacaattaggaattgtaagagttaggacca

SEQ ID NO: 122409 - DNA, 60 bp, Artificial
  Synthetic oligonucleotide
cttgatgtgactacaaatacctgtacaattaggaattgtaagaagttaggaccaagagaa

SEQ ID NO: 122410 - DNA, 60 bp, Artificial
  Synthetic oligonucleotide
ggaatggaagaatactctgtcccaattattcttgactaaagggtggccaactggatcagt

SEQ ID NO: 122411 - DNA, 60 bp, Artificial
  Synthetic oligonucleotide
gtattaacaactagctgatttgagtaatatgaattccaaccttaaagagatctcgtgttg

SEQ ID NO: 122412 - DNA, 60 bp, Artificial
  Synthetic oligonucleotide
gtattaacaactagctgatttgagtaatatgaattccaaccggaaagagatctcgtgttg

SEQ ID NO: 122413 - DNA, 60 bp, Artificial
  Synthetic oligonucleotide
cgtggtgtacgacgctttcttttacaatctgttcatcaaattcctctggcaactaagctc

SEQ ID NO: 122414 - DNA, 60 bp, Artificial
  Synthetic oligonucleotide
tttcacgaacgtggtgtacgacgctttcttttacaatctgttcatcaaattcctctggca

SEQ ID NO: 122415 - DNA, 60 bp, Artificial
  Synthetic oligonucleotide
gcttggccccaacttctgatgatgacaccaatttccctatgctatccgttaaacaggttg

SEQ ID NO: 122416 - DNA, 60 bp, Artificial
  Synthetic oligonucleotide
ggtttgtgtagtttggccccaacttctgatgatgacaccaatttccctatgctatccgct

SEQ ID NO: 122417 - DNA, 60 bp, Artificial
  Synthetic oligonucleotide
cttatggtttgtgtagcttggccccaacttctgatgatgacaccaatttccctatgctat

SEQ ID NO: 122418 - DNA, 60 bp, Artificial
  Synthetic oligonucleotide
cttatggtttgtgtagtttggccccaacttctgatgatgacaccaatttccctatgctat

SEQ ID NO: 122419 - DNA, 60 bp, Artificial
  Synthetic oligonucleotide
agcagcaagagagtaatggatttagactgtttggtgaatgtattgacaaagtacgtgccc

SEQ ID NO: 122420 - DNA, 60 bp, Artificial
  Synthetic oligonucleotide
atgaatccgatgatgagcagcaagagagtaatggatttagactgtttggtgaatgtattg

SEQ ID NO: 122421 - DNA, 51 bp, Artificial
  Synthetic oligonucleotide
gaaaaaacgctacgcacgtccatctaacaaaacttctcctcaacctaactc

SEQ ID NO: 122422 - DNA, 60 bp, Artificial
  Synthetic oligonucleotide
ctgcccacctgaccaatttagcccttctgaaaaaacgaatccaaagacgaaacaacaccg

SEQ ID NO: 122423 - DNA, 60 bp, Artificial
  Synthetic oligonucleotide
aaaagaaccatctaacaccttccagtccgtgattgacaaaatgtcatatgaagattttct

SEQ ID NO: 122424 - DNA, 60 bp, Artificial
  Synthetic oligonucleotide
gaaaaagaaccatctaacaccttccagtccgtgattgacaaaatgtcatatgaagatttt

SEQ ID NO: 122425 - DNA, 60 bp, Artificial
  Synthetic oligonucleotide
actactcgtcaacaaaatcaacgatatgagtgaaagatttagcgcaatgcctgatggtac

SEQ ID NO: 122426 - DNA, 60 bp, Artificial
  Synthetic oligonucleotide
cgcgcaaccaaactctcaactacttgtcaacaaaatcaacgatatgagtgaaagatttag

SEQ ID NO: 122427 - DNA, 60 bp, Artificial
  Synthetic oligonucleotide
gttaatcctgtgaatgttctgtttgatcacaaacaactgtattccctgcttttttcgtat

SEQ ID NO: 122428 - DNA, 60 bp, Artificial
  Synthetic oligonucleotide
ctcgtcaacaaaatcaacgatatgagtgaaagatttagcgcaatgcctgatggtactcat

SEQ ID NO: 122429 - DNA, 60 bp, Artificial
  Synthetic oligonucleotide
gaacaaagtgaaaacgtgctccaatttattgacgcgcaaccaaactctcaactactcgtc

SEQ ID NO: 122430 - DNA, 54 bp, Artificial
  Synthetic oligonucleotide
cttcgccaccttaaagatatcgaaattgaagcttctgatgtccagtcttcattg

SEQ ID NO: 122431 - DNA, 60 bp, Artificial
  Synthetic oligonucleotide
tccaatttattgacgcgcaaccaaactctcaactacttgtcaacaaaatcaacgatatga

SEQ ID NO: 122432 - DNA, 60 bp, Artificial
  Synthetic oligonucleotide
cgtgctccaatttattgacgcgcaaccaaactctcaactactcgtcaacaaaatcaacga

SEQ ID NO: 122433 - DNA, 60 bp, Artificial
  Synthetic oligonucleotide
gtcctctgtcatcctagctctccacaagccaacgtttctgctactttgtacactggtaat

SEQ ID NO: 122434 - DNA, 60 bp, Artificial
  Synthetic oligonucleotide
gctaatgaaacgaatgatgaatccgatgatgaacaacaagaaagtaatggatttagactg

SEQ ID NO: 122435 - DNA, 60 bp, Artificial
  Synthetic oligonucleotide
gatgaatccgatgatgaacaacaagaaagtaatggatttagactgtttggtgaatgcatt

SEQ ID NO: 122436 - DNA, 54 bp, Artificial
  Synthetic oligonucleotide
gactgttttgaccttcagataacagagttgaacgacgcgtactgctctttactg

SEQ ID NO: 122437 - DNA, 60 bp, Artificial
  Synthetic oligonucleotide
ttttgaccttcagataacagagttgaacgacgcttactgttctttactaaaagagaaaga

SEQ ID NO: 122438 - DNA, 58 bp, Artificial
  Synthetic oligonucleotide
ttgaaagaagcgaatcatgttgttgtcgaacgaacctcccgtcttaacgaagttatcg

SEQ ID NO: 122439 - DNA, 60 bp, Artificial
  Synthetic oligonucleotide
ttgaaagaagcgaatcatgttgttgtcgaacgaacctcccgtcttaatgaagttatcgat

SEQ ID NO: 122440 - DNA, 51 bp, Artificial
  Synthetic oligonucleotide
tcagtccgtgattgacaaaatgtcatatgaagattttctcactaatgtcaa

SEQ ID NO: 122441 - DNA, 51 bp, Artificial
  Synthetic oligonucleotide
cgactgtcgatttagctcgtatgtcggaagagaacggtcaactacaggtat

SEQ ID NO: 122442 - DNA, 51 bp, Artificial
  Synthetic oligonucleotide
caactgtcgatttagctcgtatgtcggaagagaacggtcaactacaggtat

SEQ ID NO: 122443 - DNA, 60 bp, Artificial
  Synthetic oligonucleotide
gactgttttgaccttcagataacagagttgaacgacgcgtactgctctttactgaaagag

SEQ ID NO: 122444 - DNA, 60 bp, Artificial
  Synthetic oligonucleotide
ctgcccacctgaccaatttagcccttctgaaaaaacgaatccaaagacgaaacaacactg

SEQ ID NO: 122445 - DNA, 60 bp, Artificial
  Synthetic oligonucleotide
tgagtctgagatactgttacccattgcgaccctgagaacgagttcaacagaatctcacgc

SEQ ID NO: 122446 - DNA, 60 bp, Artificial
  Synthetic oligonucleotide
gtgaatgccacttgccagctacgaatgaaaaatctcgataattggaaaggttttgtcctc

SEQ ID NO: 122447 - DNA, 60 bp, Artificial
  Synthetic oligonucleotide
gtgaatgccacttgccagttacgaatgaaaaatctcgataattggaaaggttttgtcctc

SEQ ID NO: 122448 - DNA, 52 bp, Artificial
  Synthetic oligonucleotide
gtggtgatgaaacctaattcagacgtactcaacctgtccaaaactcaaacta

SEQ ID NO: 122449 - DNA, 58 bp, Artificial
  Synthetic oligonucleotide
tcctccgtggtgatgaaacctaattcagacgtactcaacctgtctaaaactcaaacta

SEQ ID NO: 122450 - DNA, 60 bp, Artificial
  Synthetic oligonucleotide
gtcctctgtcatcctagttctccgcaagccaacgtttctgctactttgtacactggtaat

SEQ ID NO: 122451 - DNA, 60 bp, Artificial
  Synthetic oligonucleotide
aagttttttgagtctgagatactgttacccattgcgaccctgagaacgagttcaacagaa

SEQ ID NO: 122452 - DNA, 60 bp, Artificial
  Synthetic oligonucleotide
ttttgtcctctgtcatcctagttctccgcaagccaacgtttctgctactttgtacactgg

SEQ ID NO: 122453 - DNA, 60 bp, Artificial
  Synthetic oligonucleotide
ttttgtcctctgtcatcctagctctccacaagccaacgtttctgctactttgtacactgg

SEQ ID NO: 122454 - DNA, 56 bp, Artificial
  Synthetic oligonucleotide
tttcatggtttcattgtacaacgctccttctaacatcctcattgtggacagtgatt

SEQ ID NO: 122455 - DNA, 60 bp, Artificial
  Synthetic oligonucleotide
cttcgtcaccttaaagatatcgaaattgaagcttctgatgttcagtcttcattgttcatt

SEQ ID NO: 122456 - DNA, 60 bp, Artificial
  Synthetic oligonucleotide
tgatttgagtaatatgaattccaaccttaaagagatctcgtgttgaattggattatcggc

SEQ ID NO: 122457 - DNA, 60 bp, Artificial
  Synthetic oligonucleotide
tgatttgagtaatatgaattccaaccggaaagagatctcgtgttgaattggattatcggc

SEQ ID NO: 122458 - DNA, 60 bp, Artificial
  Synthetic oligonucleotide
ctgatcgggttactgctcactggaaacgtggtatgctatcatttgtctctcagatgcatg

SEQ ID NO: 122459 - DNA, 60 bp, Artificial
  Synthetic oligonucleotide
cgggttactgctcactggaaacgtggtatgctatcatttgtctctcagatgcatgctatc

SEQ ID NO: 122460 - DNA, 60 bp, Artificial
  Synthetic oligonucleotide
taagtgcaaccaacagctacgccaacaggactacgttgatgtgcagttcgctgatcgggt

SEQ ID NO: 122461 - DNA, 60 bp, Artificial
  Synthetic oligonucleotide
cagctacgccaacaggactacgttgatgtgcagttcgctgatcgggttactgctcactgg

SEQ ID NO: 122462 - DNA, 60 bp, Artificial
  Synthetic oligonucleotide
tggatcctggctcaatgtttcgatcaattcattccagctggactgatccccttcaagtgg

SEQ ID NO: 122463 - DNA, 60 bp, Artificial
  Synthetic oligonucleotide
cgttaaatctaatgattgactcatcagacttggtgccgaactttatgatgcgtgatccat

SEQ ID NO: 122464 - DNA, 60 bp, Artificial
  Synthetic oligonucleotide
aagagtgagaactgacggaggttctttggctgagcttaactggctacaagtggatcctgg

SEQ ID NO: 122465 - DNA, 60 bp, Artificial
  Synthetic oligonucleotide
gtgagaactgacggaggttctttggctgagcttaactggctacaagtggatcctggctca

SEQ ID NO: 122466 - DNA, 60 bp, Artificial
  Synthetic oligonucleotide
ctaatgattgactcatcagacttggtgccgaactttatgatgcgtgatccatcgcatgct

SEQ ID NO: 122467 - DNA, 60 bp, Artificial
  Synthetic oligonucleotide
cgtgatccatcgcatgcttttaatggggtgaagttggaaggtgaggcacgacagactcag

SEQ ID NO: 122468 - DNA, 60 bp, Artificial
  Synthetic oligonucleotide
tcataaaagggactgccaaattaagaacggtcaaaaagctagtagatgctgtgaatcata

SEQ ID NO: 122469 - DNA, 60 bp, Artificial
  Synthetic oligonucleotide
gtgaatcatacgtggggctctgagaagattagatacgcgttgggtcctggcggaatgaca

SEQ ID NO: 122470 - DNA, 60 bp, Artificial
  Synthetic oligonucleotide
gccagccgtcttttccgggatgctcactggaaactgcaaaatgtaccccttcataaaagg

SEQ ID NO: 122471 - DNA, 60 bp, Artificial
  Synthetic oligonucleotide
ccagccgtcttttccgggatgctcactggaaactgcaaaatgtaccccttcataaaaggg

SEQ ID NO: 122472 - DNA, 60 bp, Artificial
  Synthetic oligonucleotide
cgagcctacaggaaggaggttgttacaccagcgagagattttggtcactttggactgtcg

SEQ ID NO: 122473 - DNA, 60 bp, Artificial
  Synthetic oligonucleotide
ggaggttgttacaccagcgagagattttggtcactttggactgtcgcattactctcgcgc

SEQ ID NO: 122474 - DNA, 60 bp, Artificial
  Synthetic oligonucleotide
gcgtcatgatctatgactattctgaattagaaagagatcccctaaaagggcgagcctaca

SEQ ID NO: 122475 - DNA, 60 bp, Artificial
  Synthetic oligonucleotide
gactattctgaattagaaagagatcccctaaaagggcgagcctacaggaaggaggttgtt

SEQ ID NO: 122476 - DNA, 60 bp, Artificial
  Synthetic oligonucleotide
acagactcagttttctcgtacattcgattcaagatcgaacttggagtggggcgtcatgat

SEQ ID NO: 122477 - DNA, 60 bp, Artificial
  Synthetic oligonucleotide
cagactcagttttctcgtacattcgattcaagatcgaacttggagtggggcgtcatgatc

SEQ ID NO: 122478 - DNA, 60 bp, Artificial
  Synthetic oligonucleotide
gtggtggcgccgtcgtatgcatgcattgtctaggtgtggttgggtcactgcagcgaaagc

SEQ ID NO: 122479 - DNA, 60 bp, Artificial
  Synthetic oligonucleotide
cggacatgatggtgtgtggtggcgccgtcgtatgcatgcattgtctaggtgtggttgggt

SEQ ID NO: 122480 - DNA, 60 bp, Artificial
  Synthetic oligonucleotide
gcctcttcctagacgttgtcgcaatggaggtgtgcctgcctaacggtcatcagatcgtcg

SEQ ID NO: 122481 - DNA, 60 bp, Artificial
  Synthetic oligonucleotide
gctatttttgcctcttcctagacgttgtcgcaatggaggtgtgcctgcctaacggtcatc

SEQ ID NO: 122482 - DNA, 60 bp, Artificial
  Synthetic oligonucleotide
cgtcgactggatcaataacgcatttgaaggacgagtgtcaatttacagtgctcagcaagg

SEQ ID NO: 122483 - DNA, 60 bp, Artificial
  Synthetic oligonucleotide
aacggtcatcagatcgtcgactggatcaataacgcatttgaaggacgagtgtcaatttac

SEQ ID NO: 122484 - DNA, 60 bp, Artificial
  Synthetic oligonucleotide
cggaatgacaggatggtataacaggaccatgcagcaagctccgattgtgttgactcctgc

SEQ ID NO: 122485 - DNA, 60 bp, Artificial
  Synthetic oligonucleotide
catacgtggggctctgagaagattagatacgcgttgggtcctggcggaatgacaggatgg

SEQ ID NO: 122486 - DNA, 60 bp, Artificial
  Synthetic oligonucleotide
tgactcctgcggccctaacgatgtttccagacatgactaaatttggtgatctccagtacc

SEQ ID NO: 122487 - DNA, 60 bp, Artificial
  Synthetic oligonucleotide
ggatggtataacaggaccatgcagcaagctccgattgtgttgactcctgcggccctaacg

SEQ ID NO: 122488 - DNA, 60 bp, Artificial
  Synthetic oligonucleotide
ctccagtacccgattatgattggcgatccggctgtccttgggtaaatgcctccatcttct

SEQ ID NO: 122489 - DNA, 60 bp, Artificial
  Synthetic oligonucleotide
ctcctgcggccctaacgatgtttccagacatgactaaatttggtgatctccagtacccga

SEQ ID NO: 122490 - DNA, 60 bp, Artificial
  Synthetic oligonucleotide
atgattggcgatccggctgtccttgggtaaatgcctccatcttctcagcgccgggcctga

SEQ ID NO: 122491 - DNA, 60 bp, Artificial
  Synthetic oligonucleotide
ggctttaaaagagagaatttccgtcttgctaacggatagctccttttgatgtatggtatt

SEQ ID NO: 122492 - DNA, 60 bp, Artificial
  Synthetic oligonucleotide
ggctttaaaagagagaatttccgtctggctaacggatagctccttttgatgtatggtatt

SEQ ID NO: 122493 - DNA, 55 bp, Artificial
  Synthetic oligonucleotide
ctcattatcacaaatgtttcttataaaaggttggccaacaggatcagtctatttt

SEQ ID NO: 122494 - DNA, 56 bp, Artificial
  Synthetic oligonucleotide
aaacaacgaatggagactcatttgaaacagttgctgaaaatgaaaaattagctata

SEQ ID NO: 122495 - DNA, 60 bp, Artificial
  Synthetic oligonucleotide
gataaatcataaaataaatttgacgactacgacatgtactattcgaaattgtaagaagtt

SEQ ID NO: 122496 - DNA, 60 bp, Artificial
  Synthetic oligonucleotide
gagaatttccgtttggctaacggttagctccttttgatgtatggtattgaatataccaca

SEQ ID NO: 122497 - DNA, 60 bp, Artificial
  Synthetic oligonucleotide
gtatggtattgaatataccacaattctaatctttctgatatcaatcattctactccacta

SEQ ID NO: 122498 - DNA, 58 bp, Artificial
  Synthetic oligonucleotide
ggatcaatggacactgtatactccaactctactcaagaaggaatatttctaacatcca

SEQ ID NO: 122499 - DNA, 60 bp, Artificial
  Synthetic oligonucleotide
gagaatttccgtcttgctaacggatagctccttttgatgtatggtattgaatataccaca

SEQ ID NO: 122500 - DNA, 60 bp, Artificial
  Synthetic oligonucleotide
gtatggtattgaatataccacaattctaatctttctgatatcaatcattctactcaacta

SEQ ID NO: 122501 - DNA, 60 bp, Artificial
  Synthetic oligonucleotide
gatcattaaattctgctgcgttttattatagagtatagatactctctaaaatagaactgt

SEQ ID NO: 122502 - DNA, 60 bp, Artificial
  Synthetic oligonucleotide
tatagtagattatattaatcagattgtacaggtaatgtccaaaagatcaagatcattaaa

SEQ ID NO: 122503 - DNA, 60 bp, Artificial
  Synthetic oligonucleotide
gatcattaaattctgctgcgttttattatagagtatagatatatcttagaatagaactgt

SEQ ID NO: 122504 - DNA, 60 bp, Artificial
  Synthetic oligonucleotide
gatcattaaattctgctgcgttttattatagagtatagatataccctaaaatagaattgt

SEQ ID NO: 122505 - DNA, 60 bp, Artificial
  Synthetic oligonucleotide
gctctaatatattagacataacagcggatccaacgactaatccacaaattgagagaatga

SEQ ID NO: 122506 - DNA, 60 bp, Artificial
  Synthetic oligonucleotide
gataaatcataaaataaatttgacgactacgacatgtactattcgaaattgtaagaagct

SEQ ID NO: 122507 - DNA, 60 bp, Artificial
  Synthetic oligonucleotide
gagagaatgatgagagtgaattggaaaagatggtggcaagtattttatactatagtagat

SEQ ID NO: 122508 - DNA, 60 bp, Artificial
  Synthetic oligonucleotide
gacataacagcggatccaacgactaatccacaaattgagagaatgatgagagtgaattgg

SEQ ID NO: 122509 - DNA, 60 bp, Artificial
  Synthetic oligonucleotide
gccttgaaccagcagatagatatgataaagaaagaagtgatgaaaaaacaatcttataat

SEQ ID NO: 122510 - DNA, 60 bp, Artificial
  Synthetic oligonucleotide
gacgagaaatcacgaaacatgaaacaactattcgcattcccactcacgtaccaatcacgc

SEQ ID NO: 122511 - DNA, 60 bp, Artificial
  Synthetic oligonucleotide
cacgaaacatgaaacaactattcgcattcccactcacatatcaatcacgtaaacacgaga

SEQ ID NO: 122512 - DNA, 60 bp, Artificial
  Synthetic oligonucleotide
tttgacgagaaatcacgaaacatgaaacaactattcgcattcccactcacataccaatca

SEQ ID NO: 122513 - DNA, 60 bp, Artificial
  Synthetic oligonucleotide
tttgacgagaaatcacgaaacatgaaacaactattcgcattcccactcacgtaccaatca

SEQ ID NO: 122514 - DNA, 60 bp, Artificial
  Synthetic oligonucleotide
ttgacgagaaatcacgaaacatgaaacaactattcgcattcccactcacatatcaatcac

SEQ ID NO: 122515 - DNA, 60 bp, Artificial
  Synthetic oligonucleotide
gacgagaaatcacgaaacatgaaacaactattcgcattcccactcacataccaatcacgc

SEQ ID NO: 122516 - DNA, 60 bp, Artificial
  Synthetic oligonucleotide
gttgacggagtcaatcacaagcttgatgtaaccacagctacttgtactattagaaattgc

SEQ ID NO: 122517 - DNA, 60 bp, Artificial
  Synthetic oligonucleotide
tgatgttgttgacggagtcaatcacaagcttgatgtaaccacagctacttgtactattag

SEQ ID NO: 122518 - DNA, 56 bp, Artificial
  Synthetic oligonucleotide
aaaattgggaccgcgggaaaatgtagctgtaatccaagttggtggttctgacgtac

SEQ ID NO: 122519 - DNA, 60 bp, Artificial
  Synthetic oligonucleotide
gtactattagaaattgcaaaaaattgggaccgcgggaaaatgtagctgtaatccaagttg

SEQ ID NO: 122520 - DNA, 60 bp, Artificial
  Synthetic oligonucleotide
gaatggttatgcaatccgatggacattactctgtactattatcaacagacagatgaggct

SEQ ID NO: 122521 - DNA, 60 bp, Artificial
  Synthetic oligonucleotide
ttaatattgaatgaatggttatgcaatccgatggacattactctgtactattatcaacag

SEQ ID NO: 122522 - DNA, 59 bp, Artificial
  Synthetic oligonucleotide
taaacacgcaaactctaggaattggttgcctgaccaccgatacagcgacatttgaagaa

SEQ ID NO: 122523 - DNA, 54 bp, Artificial
  Synthetic oligonucleotide
ttatcaacagacagatgaggctaataagtggatttctatggggtcttcatgtac

SEQ ID NO: 122524 - DNA, 60 bp, Artificial
  Synthetic oligonucleotide
ggtggttctgacgtacttgatataacagctgatccgaccacagcgccacaaactgagaga

SEQ ID NO: 122525 - DNA, 60 bp, Artificial
  Synthetic oligonucleotide
atccaagttggtggttctgacgtacttgatataacagctgatccgaccacagcgccacaa

SEQ ID NO: 122526 - DNA, 60 bp, Artificial
  Synthetic oligonucleotide
tccaaaagatcgcgatcgttgaattccgctgcattttactatagagtataggtatagctt

SEQ ID NO: 122527 - DNA, 60 bp, Artificial
  Synthetic oligonucleotide
agcgccacaaactgagagaatgatgcgtattaattggaagaaatggtggcaagtgtttta

SEQ ID NO: 122528 - DNA, 60 bp, Artificial
  Synthetic oligonucleotide
gcgccacaaactgagagaatgatgcgtattaattggaagaaatggtggcaagtgttttat

SEQ ID NO: 122529 - DNA, 60 bp, Artificial
  Synthetic oligonucleotide
gatcgcgatcgttgaattccgctgcattttactatagagtataggtatagctttggttag

SEQ ID NO: 122530 - DNA, 60 bp, Artificial
  Synthetic oligonucleotide
tataccacagttctaacctttttgatatcattcattttactgaattatatacttaaatct

SEQ ID NO: 122531 - DNA, 60 bp, Artificial
  Synthetic oligonucleotide
acttaaatctttgactagaatgatggactttgtcatttatagatttcttttcgttatagt

SEQ ID NO: 122532 - DNA, 60 bp, Artificial
  Synthetic oligonucleotide
atcctactgaggctgcaacagaaataaatgataattcgtggaaagacacgctctcacaat

SEQ ID NO: 122533 - DNA, 60 bp, Artificial
  Synthetic oligonucleotide
cctactgaggctgcaacagaaataaatgataattcgtggaaagacacgctctcacaatta

SEQ ID NO: 122534 - DNA, 60 bp, Artificial
  Synthetic oligonucleotide
tcagagagtatacagacatagtatccttctcagttgatccacaattatactgtgactaca

SEQ ID NO: 122535 - DNA, 60 bp, Artificial
  Synthetic oligonucleotide
gagagtatacagacatagtatccttctcagttgatccacaattatactgtgactacaacg

SEQ ID NO: 122536 - DNA, 52 bp, Artificial
  Synthetic oligonucleotide
tgtgactacaacgtagtgttaatgaaatatgacgcggcattacagttagaca

SEQ ID NO: 122537 - DNA, 51 bp, Artificial
  Synthetic oligonucleotide
gtgactacaacgtagtgttaatgaaatatgacgcggcattacagttagaca

SEQ ID NO: 122538 - DNA, 60 bp, Artificial
  Synthetic oligonucleotide
gtcatacaatctagaacagacgtatttaacgagcaattcgctaacgaagctctccatcct

SEQ ID NO: 122539 - DNA, 60 bp, Artificial
  Synthetic oligonucleotide
ctagaacagacgtatttaacgagcaattcgccaatgaagctcttcatcctacgacaaagg

SEQ ID NO: 122540 - DNA, 60 bp, Artificial
  Synthetic oligonucleotide
ttagccggcgcgaacactataattgcgatcatgcgcttatttacaccacagggtttccta

SEQ ID NO: 122541 - DNA, 60 bp, Artificial
  Synthetic oligonucleotide
ctgtcgagtatggaattttcatccaacgaggagcaacatacacgattaatgctgcaggcg

SEQ ID NO: 122542 - DNA, 60 bp, Artificial
  Synthetic oligonucleotide
gccggcgcgaacactataattgcgatcatgcgcttatttacaccacagggtttcctacgt

SEQ ID NO: 122543 - DNA, 60 bp, Artificial
  Synthetic oligonucleotide
actgtcatacaatctagaacagacgtatttaacgagcaattcgccaatgaagctcttcat

SEQ ID NO: 122544 - DNA, 60 bp, Artificial
  Synthetic oligonucleotide
ttcgctaacgaagctctccatcctacgacaaaggttatattcaatggtcttgatgtgaat

SEQ ID NO: 122545 - DNA, 60 bp, Artificial
  Synthetic oligonucleotide
cgctaacgaagctctccatcctacgacaaaggttatattcaatggtcttgatgtgaatac

SEQ ID NO: 122546 - DNA, 60 bp, Artificial
  Synthetic oligonucleotide
atggctttggatgtattgactacgacgttcggaggaccacatggctcagatgaaattcaa

SEQ ID NO: 122547 - DNA, 60 bp, Artificial
  Synthetic oligonucleotide
ttgactacgacgttcggaggaccacatggctcagatgaaattcaaaagcgtgagaagggt

SEQ ID NO: 122548 - DNA, 60 bp, Artificial
  Synthetic oligonucleotide
gctagctgttgtcccggcgtctgctcctcgctacgaagaaggatataacactgaaaatga

SEQ ID NO: 122549 - DNA, 60 bp, Artificial
  Synthetic oligonucleotide
ataacactgaaaatgaaaagacgcatcaaaaagagaacttgctggacttatctttgcctg

SEQ ID NO: 122550 - DNA, 60 bp, Artificial
  Synthetic oligonucleotide
tcatttgctagctgttgtcccggcgtctgctcctcgctacgaagaaggatataacactga

SEQ ID NO: 122551 - DNA, 60 bp, Artificial
  Synthetic oligonucleotide
ccataaagtacaggctttggttaacgattgaaataattgctgctctgttgtccataacgg

SEQ ID NO: 122552 - DNA, 60 bp, Artificial
  Synthetic oligonucleotide
agcgtccataaagtacaggctttggttaacgattgaaataattgctgctctgttgtccat

SEQ ID NO: 122553 - DNA, 60 bp, Artificial
  Synthetic oligonucleotide
gaagacaaaggaacacgaaaactccgcgtttacatgaaccatcagatcctaccgcggtta

SEQ ID NO: 122554 - DNA, 60 bp, Artificial
  Synthetic oligonucleotide
tgaatgaagacaaaggaacacgaaaactccgcgtttacatgaaccatcagatcctaccgc

SEQ ID NO: 122555 - DNA, 60 bp, Artificial
  Synthetic oligonucleotide
ttctgttgatttctagccgaatggcaggtggactgagagaatcgatgaaacggttgaaac

SEQ ID NO: 122556 - DNA, 60 bp, Artificial
  Synthetic oligonucleotide
gggaatgtctatcgttagcatgctagcaacggttcttctgttgatttctagccgaatggc

SEQ ID NO: 122557 - DNA, 60 bp, Artificial
  Synthetic oligonucleotide
tgaaattcaaaagcgtgagaagggtgcatatgttgcggcgacacaggctttgaatgaaga

SEQ ID NO: 122558 - DNA, 60 bp, Artificial
  Synthetic oligonucleotide
gcgtgagaagggtgcatatgttgcggcgacacaggctttgaatgaagacaaaggaacacg

SEQ ID NO: 122559 - DNA, 60 bp, Artificial
  Synthetic oligonucleotide
cgaggaaatggcgcttgagaccgaaacacacgggaaagagatggaaacacgattaagtag

SEQ ID NO: 122560 - DNA, 60 bp, Artificial
  Synthetic oligonucleotide
tttctagccgaatggcaggtggactgagagaatcgatgaaacggttgaaacgggaagttg

SEQ ID NO: 122561 - DNA, 60 bp, Artificial
  Synthetic oligonucleotide
gtttgggattagaatgggaatgtctatcgttagcatgctagcaacggttcttctgttgat

SEQ ID NO: 122562 - DNA, 56 bp, Artificial
  Synthetic oligonucleotide
gatggaaacacgattaagtagttcgaagtatccggtatggttcgacgccacgggta

SEQ ID NO: 122563 - DNA, 60 bp, Artificial
  Synthetic oligonucleotide
aattatgtttccgaggaaatggcgcttgagaccgaaacacacgggaaagagatggaaaca

SEQ ID NO: 122564 - DNA, 59 bp, Artificial
  Synthetic oligonucleotide
tgttgtccataacggtttttggtattatggcaacaactgaaatggaacaaacggttgac

SEQ ID NO: 122565 - DNA, 60 bp, Artificial
  Synthetic oligonucleotide
ctcatgcaggtgtaaagcagcgacactggatgttcgcataaagtccgcggaggtttacgg

SEQ ID NO: 122566 - DNA, 60 bp, Artificial
  Synthetic oligonucleotide
agaacgcagtctccagaaagagctggggatttcgcgtgagggagtggctgagcagacgga

SEQ ID NO: 122567 - DNA, 60 bp, Artificial
  Synthetic oligonucleotide
cgaaagttgatgtttacagagatgaggttccagcacagatcatcgaagtagaacgcagtc

SEQ ID NO: 122568 - DNA, 60 bp, Artificial
  Synthetic oligonucleotide
aatctaaatacggtacgaaagttgatgtttacagagatgaggttccagcacagatcatcg

SEQ ID NO: 122569 - DNA, 60 bp, Artificial
  Synthetic oligonucleotide
tccgaggagttaaaacagaggcagattcaaattaatttagtcgattggacagagagtgag

SEQ ID NO: 122570 - DNA, 55 bp, Artificial
  Synthetic oligonucleotide
agaattaaaggatggtgagggggcgcagtcggagagcagccagaagaaagagagc

SEQ ID NO: 122571 - DNA, 60 bp, Artificial
  Synthetic oligonucleotide
cagaggcagattcaaattaatttagtcgattggacagagagtgagaacggaaaagagggt

SEQ ID NO: 122572 - DNA, 60 bp, Artificial
  Synthetic oligonucleotide
cctcatggcgatgcgcagaaagagggtaccgaggaggagaagacgtctgaagaaccagcg

SEQ ID NO: 122573 - DNA, 60 bp, Artificial
  Synthetic oligonucleotide
gggaagaagcctcatggcgatgcgcagaaagagggtaccgaggaggagaagacgtctgaa

SEQ ID NO: 122574 - DNA, 60 bp, Artificial
  Synthetic oligonucleotide
tgagggagtggctgagcagacggagagattgagagatctgcggcgaaaagagaagagtgg

SEQ ID NO: 122575 - DNA, 60 bp, Artificial
  Synthetic oligonucleotide
gatccacattggaaggaagtggctcgcgaagcttcaaaaaagaagaacatattagcctac

SEQ ID NO: 122576 - DNA, 60 bp, Artificial
  Synthetic oligonucleotide
cggtgtggagagaaagatggctccaattggcgcacgggagagcgcagttatgttagtttc

SEQ ID NO: 122577 - DNA, 60 bp, Artificial
  Synthetic oligonucleotide
agtggctctggtcactatattcctaatatcggttatacattactgaggcgatcgatactg

SEQ ID NO: 122578 - DNA, 60 bp, Artificial
  Synthetic oligonucleotide
ggctctggtcactatattcctaatatcggttatacattactgaggcgatcgatactggac

SEQ ID NO: 122579 - DNA, 59 bp, Artificial
  Synthetic oligonucleotide
aggtataccagcatacagattaacacagtcaactgagttatcaattcgtgatgacaatg

SEQ ID NO: 122580 - DNA, 60 bp, Artificial
  Synthetic oligonucleotide
ggtgatatgcgaacagtgatgagtaacagtgataaactgagtattgtaggtataccagca

SEQ ID NO: 122581 - DNA, 60 bp, Artificial
  Synthetic oligonucleotide
catcaactacgatatgattgctcgaaacttaacggtcagtaaaatgaattgtgaacagag

SEQ ID NO: 122582 - DNA, 60 bp, Artificial
  Synthetic oligonucleotide
acatcaactacgatatgattgctcgaaacttaacggtcagtaaaatgaattgtgaacaga

SEQ ID NO: 122583 - DNA, 60 bp, Artificial
  Synthetic oligonucleotide
cgatactggacattctaactaagcatgacactgggttgaacacgaacaacatcaactacg

SEQ ID NO: 122584 - DNA, 60 bp, Artificial
  Synthetic oligonucleotide
atcgatactggacattctaactaagcatgacactgggttgaacacgaacaacatcaacta

SEQ ID NO: 122585 - DNA, 60 bp, Artificial
  Synthetic oligonucleotide
cctggtgatatgcgaacagtgatgagtaacagtgataaactgagtattgtaggtatacca

SEQ ID NO: 122586 - DNA, 60 bp, Artificial
  Synthetic oligonucleotide
cagaatatatcattgaaacaaattgctccaaatttcattcctggtgatatgcgaacagtg

SEQ ID NO: 122587 - DNA, 60 bp, Artificial
  Synthetic oligonucleotide
cgtatttgaatcagaatatatcattgaaacaaattgctccaaatttcattcctggtgata

SEQ ID NO: 122588 - DNA, 59 bp, Artificial
  Synthetic oligonucleotide
tgtgaacagagaaaaaggatgttaatatgtttcaaactcctagcatacaaagatggtaa

SEQ ID NO: 122589 - DNA, 60 bp, Artificial
  Synthetic oligonucleotide
gcttgaaaagctttgctgacactaagagctaatgactctggaaattgagcttcgaaaggt

SEQ ID NO: 122590 - DNA, 60 bp, Artificial
  Synthetic oligonucleotide
tctggaaattgagcttcgaaaggtaccgggcaaccatgctttccgaggggctcttgggac

SEQ ID NO: 122591 - DNA, 60 bp, Artificial
  Synthetic oligonucleotide
ttcttttctacgagaagggaatgattttaatttgataagtcttaaagatagagataataa

SEQ ID NO: 122592 - DNA, 60 bp, Artificial
  Synthetic oligonucleotide
gttaacacgataaagcttgaaaagctttgctgacactaagagctaatgactctggaaatt

SEQ ID NO: 122593 - DNA, 60 bp, Artificial
  Synthetic oligonucleotide
agtagaggatcccgctgggatgtcaaccaccctctaccaacggtgtcggagtgctccctt

SEQ ID NO: 122594 - DNA, 60 bp, Artificial
  Synthetic oligonucleotide
cttcgaaaggtaccgggcaaccatgctttccgaggggctcttgggactggaaagtagagg

SEQ ID NO: 122595 - DNA, 60 bp, Artificial
  Synthetic oligonucleotide
ctcttgggactggaaagtagaggatcccgctgggatgtcaaccaccctctaccaacggtg

SEQ ID NO: 122596 - DNA, 60 bp, Artificial
  Synthetic oligonucleotide
gtatttaaaattgtgaggaaagaccaacatggatgtactgagtaaaagttctttgaagga

SEQ ID NO: 122597 - DNA, 60 bp, Artificial
  Synthetic oligonucleotide
gtgaggaaagaccaacatggatgtactgagtaaaagttctttgaaggagttgttagctca

SEQ ID NO: 122598 - DNA, 60 bp, Artificial
  Synthetic oligonucleotide
ctttgaaggagttgttagctcatttggagagaactccacttgaggaagcgatttcttata

SEQ ID NO: 122599 - DNA, 60 bp, Artificial
  Synthetic oligonucleotide
ggagttgttagctcatttggagagaactccacttgaggaagcgatttcttataagattgg

SEQ ID NO: 122600 - DNA, 60 bp, Artificial
  Synthetic oligonucleotide
ctacgttaagctgtttgaactctataagtaagggtacgtttacgtattcgctacgtagag

SEQ ID NO: 122601 - DNA, 60 bp, Artificial
  Synthetic oligonucleotide
tacgttaagctgtttgaactctacaagtaagggtacgtttacgtattcgctacgtagagt

SEQ ID NO: 122602 - DNA, 51 bp, Artificial
  Synthetic oligonucleotide
gctaatgtaacatctgttagacaagaatatgcaataccagttgggccagtt

SEQ ID NO: 122603 - DNA, 60 bp, Artificial
  Synthetic oligonucleotide
agctaatgtaacatctgttagacaagaatatgcaataccagttggaccagtttttccacc

SEQ ID NO: 122604 - DNA, 60 bp, Artificial
  Synthetic oligonucleotide
cagtttgtgagtcagtgcttgctgatgctagtgaaacaatgttagctaatgtaacatctg

SEQ ID NO: 122605 - DNA, 60 bp, Artificial
  Synthetic oligonucleotide
gaatctgcaatttgtgagtcagtgcttgctgatgctagtgaaacaatgttagctaatgta

SEQ ID NO: 122606 - DNA, 60 bp, Artificial
  Synthetic oligonucleotide
agctaatgtaacatctgttagacaagaatatgcaataccagttgggccagtttttccacc

SEQ ID NO: 122607 - DNA, 60 bp, Artificial
  Synthetic oligonucleotide
caatttgtgagtcagtgcttgctgatgctagtgaaacaatgttagctaatgtaacatctg

SEQ ID NO: 122608 - DNA, 60 bp, Artificial
  Synthetic oligonucleotide
cgcgcagccatttgaacatcatgctactgtaggcctaacattacgaattgaatctgcagt

SEQ ID NO: 122609 - DNA, 60 bp, Artificial
  Synthetic oligonucleotide
acgcgcagccatttgaacatcatgctactgtaggcctaacattacgaattgaatctgcag

SEQ ID NO: 122610 - DNA, 60 bp, Artificial
  Synthetic oligonucleotide
agataacgtatgtatggatgagatggttagagaatcacaaagaaacggaattgcaccgca

SEQ ID NO: 122611 - DNA, 60 bp, Artificial
  Synthetic oligonucleotide
ggatgctagagacaaaattgtcgaaggcactttatactctaatgttagtgatctaattca

SEQ ID NO: 122612 - DNA, 60 bp, Artificial
  Synthetic oligonucleotide
gaatctgcagtttgtgagtcagtgcttgctgatgctagtgaaacaatgttagctaatgta

SEQ ID NO: 122613 - DNA, 60 bp, Artificial
  Synthetic oligonucleotide
cgcgcagccatttgaacatcatgctactgtaggactaacattacgcatcgaatctgcaat

SEQ ID NO: 122614 - DNA, 60 bp, Artificial
  Synthetic oligonucleotide
tttggtacaattgtagctagaaattttgatactattagattatcatttcaattgatgaga

SEQ ID NO: 122615 - DNA, 60 bp, Artificial
  Synthetic oligonucleotide
tttggtacaattgtagctagaaattttgatacaattagattatcatttcaattaatgaga

SEQ ID NO: 122616 - DNA, 60 bp, Artificial
  Synthetic oligonucleotide
attaatgagaccaccaaatatgaccccatcagtcgcagcacttttccctaacgcgcagcc

SEQ ID NO: 122617 - DNA, 60 bp, Artificial
  Synthetic oligonucleotide
attgatgagaccaccaaatatgaccccatcagtcgcagcacttttccctaacgcgcagcc

SEQ ID NO: 122618 - DNA, 60 bp, Artificial
  Synthetic oligonucleotide
gatgctgaaagatttagttttcctagagtaattaattcagctgatggagcaactacatgg

SEQ ID NO: 122619 - DNA, 60 bp, Artificial
  Synthetic oligonucleotide
tgaaaggtttagtttccctagagtaattaattcagctgatggagcaactacatggtattt

SEQ ID NO: 122620 - DNA, 60 bp, Artificial
  Synthetic oligonucleotide
ccctagagtaattaattcagctgatggagcaactacatggtattttaatccagtaatact

SEQ ID NO: 122621 - DNA, 50 bp, Artificial
  Synthetic oligonucleotide
gatggagcaactacatggtattttaatccagtaatacttagaccgaataa

SEQ ID NO: 122622 - DNA, 60 bp, Artificial
  Synthetic oligonucleotide
gaccaccaaatatgaccccatcagtcgcagcacttttccctaacgcgcagccatttgaac

SEQ ID NO: 122623 - DNA, 60 bp, Artificial
  Synthetic oligonucleotide
acgcgcagccatttgaacatcatgctactgtaggactaacattacgcatcgaatctgcaa

SEQ ID NO: 122624 - DNA, 60 bp, Artificial
  Synthetic oligonucleotide
ctagagaggataatttacaacgtgtatttacagtagcttccattagaagcatgcttgtta

SEQ ID NO: 122625 - DNA, 60 bp, Artificial
  Synthetic oligonucleotide
ttacaacgtgtgtttacagtagcttccattagaagcatgcttgttaaatgaggaccgagc

SEQ ID NO: 122626 - DNA, 60 bp, Artificial
  Synthetic oligonucleotide
tctagagaggataatttacaacgtgtgtttacagtagcttccattagaagcatgcttgtt

SEQ ID NO: 122627 - DNA, 60 bp, Artificial
  Synthetic oligonucleotide
tctagagaggataatttacaacgtgtatttacagtagcttccattagaagcatgcttgtt

SEQ ID NO: 122628 - DNA, 60 bp, Artificial
  Synthetic oligonucleotide
gaactctacaagtaagggtacgtttacgtattcgctacgtagagtaatcactcagatgac

SEQ ID NO: 122629 - DNA, 55 bp, Artificial
  Synthetic oligonucleotide
tacgtattcgctacgtagagtaatcactcagatgacgtagtgagaggatgtgacc

SEQ ID NO: 122630 - DNA, 60 bp, Artificial
  Synthetic oligonucleotide
aggcgatacaaacgtatattaaacccttttgcgcggctttcggaataataaatctagccg

SEQ ID NO: 122631 - DNA, 57 bp, Artificial
  Synthetic oligonucleotide
aataccttcagacgatgaagttaaatcgctagttccaacactgttctcaagtgatga

SEQ ID NO: 122632 - DNA, 60 bp, Artificial
  Synthetic oligonucleotide
tggtgactatggcgttttcgaacatgggccgaggagtgttggtggaggaccacgtctgat

SEQ ID NO: 122633 - DNA, 60 bp, Artificial
  Synthetic oligonucleotide
tgatattccctagaatggtgactatggcgttttcgaacatgggccgaggagtgttggtgg

SEQ ID NO: 122634 - DNA, 60 bp, Artificial
  Synthetic oligonucleotide
cggaatgaacatcgtggtgattgatcatgagaataatcaggcatatctgactcgcacatg

SEQ ID NO: 122635 - DNA, 60 bp, Artificial
  Synthetic oligonucleotide
acataagcattcgtgcacactagatctacatgcgcttacaggcagtggaataggaccaag

SEQ ID NO: 122636 - DNA, 60 bp, Artificial
  Synthetic oligonucleotide
atatctcacgcgctgtttcccggtgaagctctgaaaccagtggatggtagtgagttcttt

SEQ ID NO: 122637 - DNA, 60 bp, Artificial
  Synthetic oligonucleotide
cacttaaatatttcccattttgtaacatcttgatgcgaggctactcacgagagacgagcc

SEQ ID NO: 122638 - DNA, 60 bp, Artificial
  Synthetic oligonucleotide
ggtggaggaccacgtctgatattgcgagcggacgtgagaatcacggggagatggttagcc

SEQ ID NO: 122639 - DNA, 60 bp, Artificial
  Synthetic oligonucleotide
aagcgtgccattcgtaggcgatgacgagactcatgtgcgatatgtttcaagagttacgat

SEQ ID NO: 122640 - DNA, 60 bp, Artificial
  Synthetic oligonucleotide
cgcgctgtttcccggtgaagctctgaaaccagtggatggtagtgagttctttgactctcc

SEQ ID NO: 122641 - DNA, 60 bp, Artificial
  Synthetic oligonucleotide
gagatgtcctgtgattatgggatagatgagctggttcagctcttggtcccgaatgattat

SEQ ID NO: 122642 - DNA, 60 bp, Artificial
  Synthetic oligonucleotide
ctcgttaagggcgacttagtgagattgccatgcggtatgataacaacggtcgacaatcct

SEQ ID NO: 122643 - DNA, 60 bp, Artificial
  Synthetic oligonucleotide
ctcacgagagacgagcctatgtatgacaccctatgcgctgttcgaactaagcgaaaccac

SEQ ID NO: 122644 - DNA, 60 bp, Artificial
  Synthetic oligonucleotide
gatttccagcaggacgtttttcgctctaattatgacctactaaagttgtgcggtgatatc

SEQ ID NO: 122645 - DNA, 60 bp, Artificial
  Synthetic oligonucleotide
ttccaaatacgtgtcacagacgaatggcgtgttcctgctcatgcgaatatatatccgtga

SEQ ID NO: 122646 - DNA, 60 bp, Artificial
  Synthetic oligonucleotide
tcgattcaggtgtgatttacgtgacgttgcgcgtcggaaatgatggcattggtacacacg

SEQ ID NO: 122647 - DNA, 60 bp, Artificial
  Synthetic oligonucleotide
gcattggtacacacgtgatactcactacatcctatttagaacgaattggacagtctatgt

SEQ ID NO: 122648 - DNA, 60 bp, Artificial
  Synthetic oligonucleotide
ggagcaacatttaacttcagacgaggcttatgagatcaatgcatcgtatcgtactgggtg

SEQ ID NO: 122649 - DNA, 60 bp, Artificial
  Synthetic oligonucleotide
gcatggggccacttaatgacgaacaggcgaaggagtacgcaaaggcaagtatacgcattt

SEQ ID NO: 122650 - DNA, 60 bp, Artificial
  Synthetic oligonucleotide
gtaatgtactgaaagagcataacagcgtaaatggcagagccataatgaaacgtgcggatt

SEQ ID NO: 122651 - DNA, 60 bp, Artificial
  Synthetic oligonucleotide
attgtaccaacagataaataaaacagagcgtgagatatcgcggcaaataggtaatgtgct

SEQ ID NO: 122652 - DNA, 60 bp, Artificial
  Synthetic oligonucleotide
tggcatgattagaagtgaatttaatgtaccaagaacgcagtggtcacgattcgatgtgtt

SEQ ID NO: 122653 - DNA, 60 bp, Artificial
  Synthetic oligonucleotide
gcagacttaccccaatgcacgatcttaacagtgcaatcaaattatccaatgactacgcgc

SEQ ID NO: 122654 - DNA, 60 bp, Artificial
  Synthetic oligonucleotide
tgatcatgtgcaagagcagacttaccccaatgcacgatcttaacagtgcaatcaaattat

SEQ ID NO: 122655 - DNA, 60 bp, Artificial
  Synthetic oligonucleotide
ccttcagacagtgttcagacgatgacattattcaatacactacgctcaaaaggcgacacc

SEQ ID NO: 122656 - DNA, 60 bp, Artificial
  Synthetic oligonucleotide
taccaatcacgcaaacacgaaagatccatcgcgcaatatgctcatgacctgatcatgtgc

SEQ ID NO: 122657 - DNA, 60 bp, Artificial
  Synthetic oligonucleotide
tcatcgctttcagtagaggcaatcacactgtgcccgcctatcagaataccttcagacgat

SEQ ID NO: 122658 - DNA, 60 bp, Artificial
  Synthetic oligonucleotide
gactacgcgcagatattagaccagttcgacctaaacatgtattttcgacttgcatatgca

SEQ ID NO: 122659 - DNA, 60 bp, Artificial
  Synthetic oligonucleotide
gagacgcgctagtaccacgtattaaacgtaggctcacgtccacaaaacaggagcaacatt

SEQ ID NO: 122660 - DNA, 60 bp, Artificial
  Synthetic oligonucleotide
cgcttacaggcagtggaataggaccaaggaagttgaggattcacagtgcgtttaaatgta

SEQ ID NO: 122661 - DNA, 60 bp, Artificial
  Synthetic oligonucleotide
gcataacgtgaagcatccatttgactatggcaattcgtacactgcagcatacaaacatgc

SEQ ID NO: 122662 - DNA, 60 bp, Artificial
  Synthetic oligonucleotide
cgatgacattattcaatacactacgctcaaaaggcgacacctttagcaagctgagtgaac

SEQ ID NO: 122663 - DNA, 60 bp, Artificial
  Synthetic oligonucleotide
cgacaatcctatcttacataagcattcgtgcacactagatctacatgcgcttacaggcag

SEQ ID NO: 122664 - DNA, 52 bp, Artificial
  Synthetic oligonucleotide
cgcagtggtcacgattcgatgtgttaagtcgaaagaatccggtttatcctcc

SEQ ID NO: 122665 - DNA, 60 bp, Artificial
  Synthetic oligonucleotide
gctttgcatatgttaacagaaataatgtattcacgaactgatacagttttcctgccactt

SEQ ID NO: 122666 - DNA, 60 bp, Artificial
  Synthetic oligonucleotide
gcagtggaataggaccaaggaagttgaggattcacagtgcgtttaaatgtagtaagtgtc

SEQ ID NO: 122667 - DNA, 60 bp, Artificial
  Synthetic oligonucleotide
cgcaggtacatccattatcaatcacaaacaatgtgcagcggataataaacagctagcacc

SEQ ID NO: 122668 - DNA, 60 bp, Artificial
  Synthetic oligonucleotide
cgtgcggatttccgacttgtaatgcacgagacagatgaagttcgttctaaacaaattagt

SEQ ID NO: 122669 - DNA, 60 bp, Artificial
  Synthetic oligonucleotide
caaattagtgtgagcgtgcacagattcaaggtgcttcagattcctgtgtttacacacctg

SEQ ID NO: 122670 - DNA, 60 bp, Artificial
  Synthetic oligonucleotide
tatcctacatcgcacgcaggtacatccattatcaatcacaaacaatgtgcagcggataat

SEQ ID NO: 122671 - DNA, 60 bp, Artificial
  Synthetic oligonucleotide
gagtacggtatacctttgtttgtcagagacgcgctagtaccacgtattaaacgtaggctc

SEQ ID NO: 122672 - DNA, 60 bp, Artificial
  Synthetic oligonucleotide
agcggataataaacagctagcaccattatttggttcaacccccaagaagttattttccaa

SEQ ID NO: 122673 - DNA, 60 bp, Artificial
  Synthetic oligonucleotide
tatttggttcaacccccaagaagttattttccaaatacgtgtcacagacgaatggcgtgt

SEQ ID NO: 122674 - DNA, 60 bp, Artificial
  Synthetic oligonucleotide
ccccaagaagttattttccaaatacgtgtcacagacgaatggcgtgttcctgctcatgcg

SEQ ID NO: 122675 - DNA, 60 bp, Artificial
  Synthetic oligonucleotide
aaagtgatcaaatattgtatagtcacgattattaatactcttttaaaattggcaggatat

SEQ ID NO: 122676 - DNA, 60 bp, Artificial
  Synthetic oligonucleotide
taattatttttctttaggccgggagacgggagattttatatataaatgggacatcaggac

SEQ ID NO: 122677 - DNA, 60 bp, Artificial
  Synthetic oligonucleotide
gaggagtgtacaattatgggaaatatagaatggggtcggtttatcacgcaatgcgaacag

SEQ ID NO: 122678 - DNA, 60 bp, Artificial
  Synthetic oligonucleotide
ggaggatgaactgaagaaggagaacgagatgtggcttttacctgtgtattcagttgtgga

SEQ ID NO: 122679 - DNA, 60 bp, Artificial
  Synthetic oligonucleotide
gcagcgattgagctgtttgattttacgcgggatgcttatgtagatgaagcgggtttcctg

SEQ ID NO: 122680 - DNA, 60 bp, Artificial
  Synthetic oligonucleotide
gagcaagcggcgattgaactgtttgattttacgcgggatgcttatgtagatgaagcgggt

SEQ ID NO: 122681 - DNA, 60 bp, Artificial
  Synthetic oligonucleotide
taatgaaagagcaagcggcgattgaactgtttgattttacgcgggatgcttatgtagatg

SEQ ID NO: 122682 - DNA, 60 bp, Artificial
  Synthetic oligonucleotide
gaagaaggagaacgagatgtggcttttacctgtgtattcagttgtggaccgagcgttctg

SEQ ID NO: 122683 - DNA, 60 bp, Artificial
  Synthetic oligonucleotide
cgcaataaattcaaaaggaaattacaggttaatctccagaaaacggatggtgaaatacga

SEQ ID NO: 122684 - DNA, 60 bp, Artificial
  Synthetic oligonucleotide
cgtgtcgaaccggctaatacagaagatatccgcaataaattcaaaaggaaattacaagtt

SEQ ID NO: 122685 - DNA, 60 bp, Artificial
  Synthetic oligonucleotide
caaaaggaaattacaggttaatctccagaaaacggatggtgaaatacgaaacataaggaa

SEQ ID NO: 122686 - DNA, 60 bp, Artificial
  Synthetic oligonucleotide
aaacacaggcgatggtcgcggattgatttcatcagatgatgcgtttgaagagttaatgcg

SEQ ID NO: 122687 - DNA, 60 bp, Artificial
  Synthetic oligonucleotide
gttaatctccagaaaacggatggtgaaatacgaaacataaggaattatcatcagcatggt

SEQ ID NO: 122688 - DNA, 60 bp, Artificial
  Synthetic oligonucleotide
gttctcaaggaatcaaaacacaggcgatggtcgcggattgatttcatcagatgatgcgtt

SEQ ID NO: 122689 - DNA, 57 bp, Artificial
  Synthetic oligonucleotide
atggaggagatttttataagcgtaattgatagcagtcagcgcgtaccgaaacagttg

SEQ ID NO: 122690 - DNA, 55 bp, Artificial
  Synthetic oligonucleotide
tgaaatacgaaacataaggaattatcatcagcatggtgaaccgaaacggttggcc

SEQ ID NO: 122691 - DNA, 60 bp, Artificial
  Synthetic oligonucleotide
cgtgtggtgaaacatagaatgataaagagagagcaccgaaacgacatcatgagcacgctt

SEQ ID NO: 122692 - DNA, 60 bp, Artificial
  Synthetic oligonucleotide
agaatgataaagagagagcaccgaaacgacatcatgagcacgcttttgccggaattttcg

SEQ ID NO: 122693 - DNA, 60 bp, Artificial
  Synthetic oligonucleotide
gaaggagaacgagatgtggcttttacctgtgtattcagttgtagaccgagcgttctgtat

SEQ ID NO: 122694 - DNA, 51 bp, Artificial
  Synthetic oligonucleotide
cagttgtagaccgagcgttctgtatgactggcaatatattaagcactgcaa

SEQ ID NO: 122695 - DNA, 60 bp, Artificial
  Synthetic oligonucleotide
gagagaagtacgagaaagatattcacgtaatgatagttacacttgcccaatgttaaacgt

SEQ ID NO: 122696 - DNA, 60 bp, Artificial
  Synthetic oligonucleotide
ccaggtgtgaaacatagaatgataaagagagagcaccgaaacgacatcatgagtacgctt

SEQ ID NO: 122697 - DNA, 60 bp, Artificial
  Synthetic oligonucleotide
agtaagaggagtgtacaattatgggaaatatagaatggggtcggtttatcacgcaatgcg

SEQ ID NO: 122698 - DNA, 60 bp, Artificial
  Synthetic oligonucleotide
aggagatcgctatcacggtagaaaaacgcgacttaattaaatatgatgatgaaataatgc

SEQ ID NO: 122699 - DNA, 60 bp, Artificial
  Synthetic oligonucleotide
catccaaagggagaaaagatgataacgaggagattcggaggtggcgagataaagacgctg

SEQ ID NO: 122700 - DNA, 60 bp, Artificial
  Synthetic oligonucleotide
gggagaaaagatgataacaaggagattcggaggtggcgagataaagacgctgaccacaag

SEQ ID NO: 122701 - DNA, 60 bp, Artificial
  Synthetic oligonucleotide
cgccgatgacctggaaaaaatcatattattgctggaagcaataggagaaaaagataaacg

SEQ ID NO: 122702 - DNA, 60 bp, Artificial
  Synthetic oligonucleotide
tcggaatcagaacgccgatgacctggaaaaaatcatattattgctggaagcaataggaga

SEQ ID NO: 122703 - DNA, 60 bp, Artificial
  Synthetic oligonucleotide
caataggagaaaaggataaacgtgtcgaaccggctaatacagaagatatccgcaataaat

SEQ ID NO: 122704 - DNA, 60 bp, Artificial
  Synthetic oligonucleotide
gaaaaggataaacgtgtcgaaccggctaatacagaagatatccgcaataaattcaaaagg

SEQ ID NO: 122705 - DNA, 60 bp, Artificial
  Synthetic oligonucleotide
ctgttacattcaacaagtgtgtagaaataagcatttgttcattctggacacgcgttcaat

SEQ ID NO: 122706 - DNA, 60 bp, Artificial
  Synthetic oligonucleotide
tcgttgaccctgtacaggctataactaagaatataaaacgtttagtctcacgccgtcttc

SEQ ID NO: 122707 - DNA, 60 bp, Artificial
  Synthetic oligonucleotide
cagagaacttgaatccaactttgatggagaaaatgcatgcagcggtagctcgcgtgtcgc

SEQ ID NO: 122708 - DNA, 52 bp, Artificial
  Synthetic oligonucleotide
gcgcttttagtcactataaccttgatacacaaattccttagaggtgagggtg

SEQ ID NO: 122709 - DNA, 60 bp, Artificial
  Synthetic oligonucleotide
cgacagcagaaccattggatagcgtatgcctgctttgattcttccgatgcgcttttagtc

SEQ ID NO: 122710 - DNA, 60 bp, Artificial
  Synthetic oligonucleotide
cacgacagcagaaccattggatagcgtatgcctgctttgattcttccgatgcgcttttag

SEQ ID NO: 122711 - DNA, 60 bp, Artificial
  Synthetic oligonucleotide
tagtagtgtagagttaagtcatggagaagtgttatcacgacagcagaaccattggatagc

SEQ ID NO: 122712 - DNA, 60 bp, Artificial
  Synthetic oligonucleotide
gaaaacagagaacttgaatccaactttgatggagaaaatgcatgcagcggtagctcgcgt

SEQ ID NO: 122713 - DNA, 60 bp, Artificial
  Synthetic oligonucleotide
cacaccactccatggtatgacttgggaacatttatggatttaattcagaaaacagagaac

SEQ ID NO: 122714 - DNA, 60 bp, Artificial
  Synthetic oligonucleotide
gatcacaccactccatggtatgacttgggaacatttatggatttaattcagaaaacagag

SEQ ID NO: 122715 - DNA, 60 bp, Artificial
  Synthetic oligonucleotide
ctgcaagtcgcgatgaattgtttagcacgatgctatttatattgggggccagttgataat

SEQ ID NO: 122716 - DNA, 60 bp, Artificial
  Synthetic oligonucleotide
ttcccagtttcaagagactgtcatgacccttgtacgtaataatgaacctgcgaccccggt

SEQ ID NO: 122717 - DNA, 57 bp, Artificial
  Synthetic oligonucleotide
acactgcaacagttagaagatgcattttctcattcccagtttcaagagactgtcatg

SEQ ID NO: 122718 - DNA, 60 bp, Artificial
  Synthetic oligonucleotide
cgaccccggtgtacgttgatgactcgcaatctttgattcacacattctacatgcctatgt

SEQ ID NO: 122719 - DNA, 60 bp, Artificial
  Synthetic oligonucleotide
gactgtcatgacccttgtacgtaataatgaacctgcgaccccggtgtacgttgatgactc

SEQ ID NO: 122720 - DNA, 60 bp, Artificial
  Synthetic oligonucleotide
ggcagcaatccaaccaagcgaaacacttcgtacatgaaactctattatggggtcgaactc

SEQ ID NO: 122721 - DNA, 60 bp, Artificial
  Synthetic oligonucleotide
gaccccggtgtacgttgatgactcgcaatctttgattcacacattctacatgcctatgtc

SEQ ID NO: 122722 - DNA, 60 bp, Artificial
  Synthetic oligonucleotide
cctgaatgtgattttacaaaatcgaagcggaccgcatcatggattgtctggtttccggaa

SEQ ID NO: 122723 - DNA, 60 bp, Artificial
  Synthetic oligonucleotide
ggtcgaactcatttacctgaatgtgattttacaaaatcgaagcggaccgcatcatggatt

SEQ ID NO: 122724 - DNA, 60 bp, Artificial
  Synthetic oligonucleotide
ggattgtctggtttccggaaactgctaaatgccttctgaatgatctaaagattaaaggtc

SEQ ID NO: 122725 - DNA, 60 bp, Artificial
  Synthetic oligonucleotide
atcatggattgtctggtttccggaaactgctaaatgccttctgaatgatctaaagattaa

SEQ ID NO: 122726 - DNA, 60 bp, Artificial
  Synthetic oligonucleotide
agtgtgtagaaataagcatttgttcattctggacacgcgttcaatggattatcttgggcg

SEQ ID NO: 122727 - DNA, 60 bp, Artificial
  Synthetic oligonucleotide
ttgacgctaccgatgcttttaattcgtggatatctatttgggtattactcccagtcgaag

SEQ ID NO: 122728 - DNA, 60 bp, Artificial
  Synthetic oligonucleotide
gcttttaattcgtggatatctatttgggtattactcccagtcgaagtgcaagggtggtca

SEQ ID NO: 122729 - DNA, 60 bp, Artificial
  Synthetic oligonucleotide
gttaaaaatcactacgagtttgccagaactatggatcatttcattcgctatttcaagctt

SEQ ID NO: 122730 - DNA, 60 bp, Artificial
  Synthetic oligonucleotide
gagtttgccagaactatggatcatttcattcgctatttcaagctttcaacgcaggacgcg

SEQ ID NO: 122731 - DNA, 60 bp, Artificial
  Synthetic oligonucleotide
tttcaagctttcaacgcaggacgcgttacatgtcaggctgagtgcgacaatttccgtttc

SEQ ID NO: 122732 - DNA, 60 bp, Artificial
  Synthetic oligonucleotide
cgcaggacgcgttacatgtcaggctgagtgcgacaatttccgtttcttggaaatgctcgc

SEQ ID NO: 122733 - DNA, 60 bp, Artificial
  Synthetic oligonucleotide
tttccgtttcttggaaatgctcgcatcgtcatcgtgattgtttcgtgtacgataaatgtg

SEQ ID NO: 122734 - DNA, 60 bp, Artificial
  Synthetic oligonucleotide
ccgtttcttggaaatgctcgcatcgtcatcgtgattgtttcgtgtacgataaatgtgtaa

SEQ ID NO: 122735 - DNA, 60 bp, Artificial
  Synthetic oligonucleotide
tattcaatgatgcaggttagaggagatctatggtgtaatgctttgaactattcgaagaat

SEQ ID NO: 122736 - DNA, 60 bp, Artificial
  Synthetic oligonucleotide
attcaatgatgcaggttagaggagatctatggtgtaatgctttgaactattcgaagaatc

SEQ ID NO: 122737 - DNA, 60 bp, Artificial
  Synthetic oligonucleotide
ttaaacgaaaaagaggagacactgcaacagttagaagatgcattttctcattcccagttt

SEQ ID NO: 122738 - DNA, 60 bp, Artificial
  Synthetic oligonucleotide
ggtagagatccaacacggatttgttatcagcgtttcggtattcgaggtacgagtgtttca

SEQ ID NO: 122739 - DNA, 60 bp, Artificial
  Synthetic oligonucleotide
cggtattcgaggtacgagtgtttcatccttaacttcatttttattaaccccaatcggagg

SEQ ID NO: 122740 - DNA, 60 bp, Artificial
  Synthetic oligonucleotide
taaagattaaaggtcagttattacgattgttagatatggatctgaaaacaattcaaagtt

SEQ ID NO: 122741 - DNA, 60 bp, Artificial
  Synthetic oligonucleotide
attcaaagttttgaaggtagagatccaacacggatttgttatcagcgtttcggtattcga

SEQ ID NO: 122742 - DNA, 60 bp, Artificial
  Synthetic oligonucleotide
aggctataactaagaatataaaacgtttagtctcacgccgtcttccaacgcttctgccgc

SEQ ID NO: 122743 - DNA, 50 bp, Artificial
  Synthetic oligonucleotide
cgccgtcttccaacgcttctgccgccccacgacgtacggtgcgcaagtgc

SEQ ID NO: 122744 - DNA, 60 bp, Artificial
  Synthetic oligonucleotide
ctatgtgcttattctgtatatagttactcattaccgttttacgcccattaagctcaagcg

SEQ ID NO: 122745 - DNA, 60 bp, Artificial
  Synthetic oligonucleotide
gtatatagttactcattaccgttttacgcccattaagctcaagcgtgcgcatgtttccgt

SEQ ID NO: 122746 - DNA, 50 bp, Artificial
  Synthetic oligonucleotide
cgcgttcaatggattatcttgggcgtgctcctgaacgtgccgcaaggttg

SEQ ID NO: 122747 - DNA, 60 bp, Artificial
  Synthetic oligonucleotide
tgacataacgctaattagtagtgtagagttaagtcatggagaagtgttatcacgacagca

SEQ ID NO: 122748 - DNA, 60 bp, Artificial
  Synthetic oligonucleotide
tatgcgcgccaattaagataccatcggatgatgacgttgggaacattatcgatacattat

SEQ ID NO: 122749 - DNA, 60 bp, Artificial
  Synthetic oligonucleotide
acgatgagccgtttgatttctccagcactacatacgatactgcttacgctgcagcgatgc

SEQ ID NO: 122750 - DNA, 60 bp, Artificial
  Synthetic oligonucleotide
tcaaacgcaactcaaatcagaaatcatgaaacaattacacgcatacccactcacacatca

SEQ ID NO: 122751 - DNA, 60 bp, Artificial
  Synthetic oligonucleotide
ggtgttaacttagtcattatcgatcatgagaataacaaggcataccttacacgcacgtgc

SEQ ID NO: 122752 - DNA, 60 bp, Artificial
  Synthetic oligonucleotide
gaagtgtttgactctggagtgatctacgttacattgcgcgtaggtaatgatggcatcggg

SEQ ID NO: 122753 - DNA, 60 bp, Artificial
  Synthetic oligonucleotide
cattgctgggaagaatgaaatatatcctcccagaccgcagatttacggctcgggtccact

SEQ ID NO: 122754 - DNA, 60 bp, Artificial
  Synthetic oligonucleotide
agtatctgctgaggatgaaaagcgtgatttaatggctgaactcggtgaggaaaatcctga

SEQ ID NO: 122755 - DNA, 60 bp, Artificial
  Synthetic oligonucleotide
aggctatcttttgtctttcttgaagtggaagggttagtatctgctgaggatgaaaagcgt

SEQ ID NO: 122756 - DNA, 60 bp, Artificial
  Synthetic oligonucleotide
gcgatgcttaagcgcgagagcagactcacacactcaaatgatctatctagactcatttcg

SEQ ID NO: 122757 - DNA, 60 bp, Artificial
  Synthetic oligonucleotide
ggatatgccaatcaatgttggtaaaccacgtctacaagatcgagaggattaatggtaggc

SEQ ID NO: 122758 - DNA, 60 bp, Artificial
  Synthetic oligonucleotide
cgactgaattttcgcgactactcaatcaacataatgtccaagccttccaacgcttcgcct

SEQ ID NO: 122759 - DNA, 60 bp, Artificial
  Synthetic oligonucleotide
agctataatgaaaaggagcgattttaggctggtaatgcatgacagtgatggagctaaacc

SEQ ID NO: 122760 - DNA, 60 bp, Artificial
  Synthetic oligonucleotide
cgcattgtgggcatgcacgaataatacattccagctatgtcttgagggtcagcttgcggc

SEQ ID NO: 122761 - DNA, 60 bp, Artificial
  Synthetic oligonucleotide
ggatgaaaagcgtgatttaatggctgaactcggtgaggaaaatcctgacatattacgcgc

SEQ ID NO: 122762 - DNA, 60 bp, Artificial
  Synthetic oligonucleotide
gcattctggcatagcacactaccatcataaagttctctactttactgatttcgccatcca

SEQ ID NO: 122763 - DNA, 60 bp, Artificial
  Synthetic oligonucleotide
gagtgtacgacgcgatctgaagagtgttggtgatggattatacctaacatgctggcgggt

SEQ ID NO: 122764 - DNA, 60 bp, Artificial
  Synthetic oligonucleotide
gtgaaaagtgagattgaatatggcgtaccactgtacattagagattccctagcaccacgt

SEQ ID NO: 122765 - DNA, 60 bp, Artificial
  Synthetic oligonucleotide
cccaagtactgatatgccaactgcaaccttattcgaacttctgtgttcacgtgaggcaga

SEQ ID NO: 122766 - DNA, 60 bp, Artificial
  Synthetic oligonucleotide
gcaaagatatcgtctacaacattttccaagagtacgcgctcattgacccaagtactgata

SEQ ID NO: 122767 - DNA, 60 bp, Artificial
  Synthetic oligonucleotide
cctatcttccgatgaggcgttagagataaatccttcgtatcgtacgatgtgtgaggctag

SEQ ID NO: 122768 - DNA, 60 bp, Artificial
  Synthetic oligonucleotide
gagaggattaatggtaggctatcttttgtctttcttgaagtggaagggttagtatctgct

SEQ ID NO: 122769 - DNA, 60 bp, Artificial
  Synthetic oligonucleotide
tacccgttattcatacagatgacgaaattatcaattcaaataaagcggccaggtattatt

SEQ ID NO: 122770 - DNA, 60 bp, Artificial
  Synthetic oligonucleotide
cggctcgggtccacttaatgatgagcaagctaagaaatatgctaaagcaagtatcagaat

SEQ ID NO: 122771 - DNA, 60 bp, Artificial
  Synthetic oligonucleotide
tcacacatcactatcgagcactagagaaaccagtcgctgtaagcatcagagcgatgctta

SEQ ID NO: 122772 - DNA, 60 bp, Artificial
  Synthetic oligonucleotide
tgggtgcgcacattagtttgtttattggttagattaagttgtggtgagtgtatgtgaagt

SEQ ID NO: 122773 - DNA, 60 bp, Artificial
  Synthetic oligonucleotide
agtaaaacctggcatcactataggattacgtttaaagaaacgcacaacactcaaacgcaa

SEQ ID NO: 122774 - DNA, 60 bp, Artificial
  Synthetic oligonucleotide
cattcatgtactataggactacacgcactaacacggagtgagcagtcagatacgaaacta

SEQ ID NO: 122775 - DNA, 60 bp, Artificial
  Synthetic oligonucleotide
ggagcgattttaggctggtaatgcatgacagtgatggagctaaacctaatcaactaagct

SEQ ID NO: 122776 - DNA, 60 bp, Artificial
  Synthetic oligonucleotide
atcagaaatcatgaaacaattacacgcatacccactcacacatcactatcgagcactaga

SEQ ID NO: 122777 - DNA, 60 bp, Artificial
  Synthetic oligonucleotide
actcatttcgttaacgactgaattttcgcgactactcaatcaacataatgtccaagcctt

SEQ ID NO: 122778 - DNA, 60 bp, Artificial
  Synthetic oligonucleotide
catatttgcgatatgtatcacgcgttaccacatcatctgagatcttgcatgcattatttc

SEQ ID NO: 122779 - DNA, 60 bp, Artificial
  Synthetic oligonucleotide
agcaagtatcagaatatttaacaaagcatgtcctgaacacgagatcaagatacccgttat

SEQ ID NO: 122780 - DNA, 60 bp, Artificial
  Synthetic oligonucleotide
gtttgtttattggttagattaagttgtggtgagtgtatgtgaagtgagtgtacgacgcga

SEQ ID NO: 122781 - DNA, 60 bp, Artificial
  Synthetic oligonucleotide
tcgccatccatgatcacgatgagccgtttgatttctccagcactacatacgatactgctt

SEQ ID NO: 122782 - DNA, 60 bp, Artificial
  Synthetic oligonucleotide
cggtttggctgcccattaagttctacccgttttgtaaccttttatttagtgggtatcgta

SEQ ID NO: 122783 - DNA, 60 bp, Artificial
  Synthetic oligonucleotide
gcgcgtcatattggcaatgtcctaaaggagatgaatatcgtcaatggcagagctataatg

SEQ ID NO: 122784 - DNA, 60 bp, Artificial
  Synthetic oligonucleotide
gcagcgatgcgcttgcttaacgcaatcactactcgtaaatctgatacggtttggctgccc

SEQ ID NO: 122785 - DNA, 60 bp, Artificial
  Synthetic oligonucleotide
cataaacaatgtgctggtgacgctcaaagattggccccactatttggttcaaccccaaag

SEQ ID NO: 122786 - DNA, 60 bp, Artificial
  Synthetic oligonucleotide
taattaccagcaagactttctttgaaacgccctctctgtcagtgttcacagaagacactt

SEQ ID NO: 122787 - DNA, 60 bp, Artificial
  Synthetic oligonucleotide
gcaaacttgcgtgatatggagattactagatcgaaggatgacatacttggtatccatgct

SEQ ID NO: 122788 - DNA, 60 bp, Artificial
  Synthetic oligonucleotide
gcgcgtaggtaatgatggcatcgggacgcatgtaatactcacaacttcatacttagagcg

SEQ ID NO: 122789 - DNA, 60 bp, Artificial
  Synthetic oligonucleotide
atttaacaaagcatgtcctgaacacgagatcaagatacccgttattcatacagatgacga

SEQ ID NO: 122790 - DNA, 60 bp, Artificial
  Synthetic oligonucleotide
gagattccctagcaccacgtattaagaggcgtttaatgtctactaagcaggaacaaaacc

SEQ ID NO: 122791 - DNA, 60 bp, Artificial
  Synthetic oligonucleotide
ggactacacgcactaacacggagtgagcagtcagatacgaaactaaggatacatagtgca

SEQ ID NO: 122792 - DNA, 60 bp, Artificial
  Synthetic oligonucleotide
tattgctcagcgatgcgctagattacattaagcttgatagtaaggtgatttgggtgcgca

SEQ ID NO: 122793 - DNA, 60 bp, Artificial
  Synthetic oligonucleotide
aagcgtaggaacggacagcgttagaataccatttcagggtgagcatgtaacatatttgcg

SEQ ID NO: 122794 - DNA, 60 bp, Artificial
  Synthetic oligonucleotide
cgtgaattagacaacgaagtgtttgactctggagtgatctacgttacattgcgcgtaggt

SEQ ID NO: 122795 - DNA, 60 bp, Artificial
  Synthetic oligonucleotide
gattatgcgaaaggtacagttacccagctcctcataccgaataaatatgatacagatagc

SEQ ID NO: 122796 - DNA, 60 bp, Artificial
  Synthetic oligonucleotide
ggtcagcttgcggctattcgctcatgtttcgttgggacgaacatgtcatggcattctggc

SEQ ID NO: 122797 - DNA, 60 bp, Artificial
  Synthetic oligonucleotide
gtaatagtgcagatagattcctagtcagcgagaagttaacactaagtattgcgttaggtg

SEQ ID NO: 122798 - DNA, 53 bp, Artificial
  Synthetic oligonucleotide
tagatatggttttagctgcggccaatttgaatgttggaaacatatctcctgac

SEQ ID NO: 122799 - DNA, 60 bp, Artificial
  Synthetic oligonucleotide
tacaattggagttttagctacacctgaaataccctacacaatggaatcggcaaacgagat

SEQ ID NO: 122800 - DNA, 60 bp, Artificial
  Synthetic oligonucleotide
gattacgagcgggtcaaaatattacaacagcatacgtgtcatcaactctagcgcaagtat

SEQ ID NO: 122801 - DNA, 60 bp, Artificial
  Synthetic oligonucleotide
aataggacgaccttgccaaataatattccaccgatatatccgccaaacgatcgcgaaaat

SEQ ID NO: 122802 - DNA, 60 bp, Artificial
  Synthetic oligonucleotide
acttgagcttagataaaacaatgactcaatacccatccttacaggcacaaattttcaacg

SEQ ID NO: 122803 - DNA, 60 bp, Artificial
  Synthetic oligonucleotide
ttgaggtcatttattacttgagcttagataaaacaatgactcaatacccatccttacagg

SEQ ID NO: 122804 - DNA, 60 bp, Artificial
  Synthetic oligonucleotide
cgagtcaaacgtattagaaatattgggaatcgcaatcaatagatacaatgggctaacgct

SEQ ID NO: 122805 - DNA, 60 bp, Artificial
  Synthetic oligonucleotide
cgaatgcagcaggaaacgcacaagatacaccacagggagtcacgttgaacgtaggtggcg

SEQ ID NO: 122806 - DNA, 60 bp, Artificial
  Synthetic oligonucleotide
cgagcgggtcaaaatattacaacagcatacgtgtcatcaactctagcgcaagtatcgatg

SEQ ID NO: 122807 - DNA, 60 bp, Artificial
  Synthetic oligonucleotide
agctacacctgaaataccctacacaatggaatcggcaaacgagattgcgagaatgagtgg

SEQ ID NO: 122808 - DNA, 60 bp, Artificial
  Synthetic oligonucleotide
ttgtggtcgagtcaaacgtattagaaatattgggaatcgcaatcaatagatacaatgggc

SEQ ID NO: 122809 - DNA, 50 bp, Artificial
  Synthetic oligonucleotide
atggacacgattgctgcaagagccctaacggttatcaaagcttgtaacac

SEQ ID NO: 122810 - DNA, 60 bp, Artificial
  Synthetic oligonucleotide
gtaggtggcgtaaacatgagagctggcgttattgttgcatacgacggtcaggctccggtt

SEQ ID NO: 122811 - DNA, 60 bp, Artificial
  Synthetic oligonucleotide
gtatgcatattttagcgagttagcgaaggggggatttgacgataatggagtgactttttc

SEQ ID NO: 122812 - DNA, 60 bp, Artificial
  Synthetic oligonucleotide
tgactttttcgcctgacttaaagtctgttgtctttgttcattctatgcctgagctgttcg

SEQ ID NO: 122813 - DNA, 60 bp, Artificial
  Synthetic oligonucleotide
ccttcaatttttgagaccgagatggatcggctttgtactgtattcacagctcggggaatg

SEQ ID NO: 122814 - DNA, 60 bp, Artificial
  Synthetic oligonucleotide
gagaccgagatggatcggctttgtactgtattcacagctcggggaatgaagccttataca

SEQ ID NO: 122815 - DNA, 54 bp, Artificial
  Synthetic oligonucleotide
tcggggaatgaagccttatacattggactgtcagttacaggctggaagacttca

SEQ ID NO: 122816 - DNA, 58 bp, Artificial
  Synthetic oligonucleotide
tcggggaatgaagccttatacattggactgtcagttacaggctggaagacttcattgg

SEQ ID NO: 122817 - DNA, 60 bp, Artificial
  Synthetic oligonucleotide
caagagttctatgaccgtacaattcggattgttactcctgatagttttaggtatgcatat

SEQ ID NO: 122818 - DNA, 60 bp, Artificial
  Synthetic oligonucleotide
cgtacaattcggattgttactcctgatagttttaggtatgcatattttagcgagttagcg

SEQ ID NO: 122819 - DNA, 60 bp, Artificial
  Synthetic oligonucleotide
cttgatctgcaagcgggatggagaatggagtatggtgttactcgctcattggaagatgga

SEQ ID NO: 122820 - DNA, 60 bp, Artificial
  Synthetic oligonucleotide
atctgcaagcgggatggagaatggagtatggtgttactcgctcattggaagatggagctc

SEQ ID NO: 122821 - DNA, 60 bp, Artificial
  Synthetic oligonucleotide
gagctgttcgaggccatgggtggatgtgttgcggagattgtgcctactcacagtacgcgg

SEQ ID NO: 122822 - DNA, 60 bp, Artificial
  Synthetic oligonucleotide
gccatgggtggatgtgttgcggagattgtgcctactcacagtacgcggctggcgatactc

SEQ ID NO: 122823 - DNA, 60 bp, Artificial
  Synthetic oligonucleotide
ctcgaccctcacatgttttggtttcgttgacccttctcacgggtgcaaatttaacttaat

SEQ ID NO: 122824 - DNA, 60 bp, Artificial
  Synthetic oligonucleotide
gaccctcacatgttttggtttcgttgacccttctcacgggtgcaaatttaacttaattcc

SEQ ID NO: 122825 - DNA, 60 bp, Artificial
  Synthetic oligonucleotide
gaagggcttggcgaagttgagggcttaacggtaaaatatggtggtaattggatgtctctt

SEQ ID NO: 122826 - DNA, 60 bp, Artificial
  Synthetic oligonucleotide
gggcttggcgaagttgagggcttaacggtaaaatatggtggtaattggatgtctcttatg

SEQ ID NO: 122827 - DNA, 60 bp, Artificial
  Synthetic oligonucleotide
cttataaaggtagagtccgtgccaatcagatattaattttgttggaaccggaagggcttg

SEQ ID NO: 122828 - DNA, 59 bp, Artificial
  Synthetic oligonucleotide
ccgtgccaatcagatattaattttgttggaaccggaagggcttggcgaagttgagggct

SEQ ID NO: 122829 - DNA, 60 bp, Artificial
  Synthetic oligonucleotide
gtgttttgagacgttttgttcggttgactcctgatgaaaggaaagtgatcccttcaattt

SEQ ID NO: 122830 - DNA, 60 bp, Artificial
  Synthetic oligonucleotide
agtctcggctgtcgaagactttctctgagctagggtataacgtgctcgattctgatactt

SEQ ID NO: 122831 - DNA, 60 bp, Artificial
  Synthetic oligonucleotide
gacgttgaagtaaaaagcgtaatggggatttccagttttaaggatgggactcaatatacc

SEQ ID NO: 122832 - DNA, 60 bp, Artificial
  Synthetic oligonucleotide
ggatactcctagtaggtatgctataactattgtttcgggcatgcaggtggacgttgaagt

SEQ ID NO: 122833 - DNA, 60 bp, Artificial
  Synthetic oligonucleotide
tggatactcctagtaggtatgctataactattgtttcgggcatgcaggtggacgttgaag

SEQ ID NO: 122834 - DNA, 51 bp, Artificial
  Synthetic oligonucleotide
gcgagaccatcttccccacatagggtttcattcaggtgaggactttagtaa

SEQ ID NO: 122835 - DNA, 60 bp, Artificial
  Synthetic oligonucleotide
atcattagagagtctctatcgatggtacgtgtttttagcttcttaattgggcgagaccat

SEQ ID NO: 122836 - DNA, 54 bp, Artificial
  Synthetic oligonucleotide
gtatgcatttcagtctcagttgacggttaaggcgaagcgaacaggtcttcatta

SEQ ID NO: 122837 - DNA, 58 bp, Artificial
  Synthetic oligonucleotide
tcatttaccacttatgcggttcggacttggcctggatatgagaaatatgttggaagcg

SEQ ID NO: 122838 - DNA, 60 bp, Artificial
  Synthetic oligonucleotide
gcgacgtcttgcaaaaacttacaatatacttgaaaacttaacacttctcccaaaagcaga

SEQ ID NO: 122839 - DNA, 60 bp, Artificial
  Synthetic oligonucleotide
attcaagaataccgaagcgactggcgagacagactttcccaccatgagagatatggcgtg

SEQ ID NO: 122840 - DNA, 60 bp, Artificial
  Synthetic oligonucleotide
aagttgaaatggatgattcaagaataccgaagcgactggcgagacagactttcccaccat

SEQ ID NO: 122841 - DNA, 60 bp, Artificial
  Synthetic oligonucleotide
ttaacttaattccatatttgaagaatttgaatccagctgacaagtggttgcttgatctgc

SEQ ID NO: 122842 - DNA, 60 bp, Artificial
  Synthetic oligonucleotide
cggctgtcgaagactttctctgagctagggtataacgtgctcgattctgatacttatgga

SEQ ID NO: 122843 - DNA, 60 bp, Artificial
  Synthetic oligonucleotide
aatgatttgttgaaaatgaggtagtgagccggtgggattggtgaccggtgcaggatgctg

SEQ ID NO: 122844 - DNA, 52 bp, Artificial
  Synthetic oligonucleotide
gatttttatgttgcaattaatcagaatggtgctaggaaagtatctctcggat

SEQ ID NO: 122845 - DNA, 60 bp, Artificial
  Synthetic oligonucleotide
atgaggtagtgagccggtgggattggtgaccggtgcaggatgctgatctcctttgtagtc

SEQ ID NO: 122846 - DNA, 60 bp, Artificial
  Synthetic oligonucleotide
ccaccatgagagatatggcgtgaagttaagattaacctatcgttctgagagtgaacgtag

SEQ ID NO: 122847 - DNA, 60 bp, Artificial
  Synthetic oligonucleotide
ccatatttgaagaatttgaatccagctgacaagtggttgcttgatctgcaagcgggatgg

SEQ ID NO: 122848 - DNA, 60 bp, Artificial
  Synthetic oligonucleotide
ttcccaccatgagagatatggcgtgaagttaagattaacctatcgttctgagagtgaacg

SEQ ID NO: 122849 - DNA, 60 bp, Artificial
  Synthetic oligonucleotide
tttgataattcgtcggaatacatagaaaactggaacttgcaaaatagaagacaaagaact

SEQ ID NO: 122850 - DNA, 60 bp, Artificial
  Synthetic oligonucleotide
ataaattttgataattcgtcggaatacatagaaaactggaatttgcaaaatagaagacag

SEQ ID NO: 122851 - DNA, 60 bp, Artificial
  Synthetic oligonucleotide
gtgtcgctgccatgctatccgggctgatccaaaggttcgaggaagaaaagatgaaacaca

SEQ ID NO: 122852 - DNA, 60 bp, Artificial
  Synthetic oligonucleotide
gtgtcgctgccatgctatccgggctgatccaaaggttcgaggaagaaaagatgaaacata

SEQ ID NO: 122853 - DNA, 60 bp, Artificial
  Synthetic oligonucleotide
ttagttcaggcggaagcgagagagctgttctcatacgaatcaaaggcgggttatgatatc

SEQ ID NO: 122854 - DNA, 60 bp, Artificial
  Synthetic oligonucleotide
tggttacactggatataggcaacggagatttgtattctctatcttgaagaatcatttacc

SEQ ID NO: 122855 - DNA, 60 bp, Artificial
  Synthetic oligonucleotide
ttatgcttcacagggaatatattaagcacggcgagacaaaaacaaagtgcgcgatttact

SEQ ID NO: 122856 - DNA, 60 bp, Artificial
  Synthetic oligonucleotide
gaacggacccatggatccagaagacggaggatgaggtcaagaaagagaatgaaatgtggc

SEQ ID NO: 122857 - DNA, 60 bp, Artificial
  Synthetic oligonucleotide
gaaagaataaaggaacggacccatggatccagaagacggaggatgaggtcaagaaagaga

SEQ ID NO: 122858 - DNA, 60 bp, Artificial
  Synthetic oligonucleotide
tgaatcatcctttcgaatcagacgaatagatattagaaagaataaaggaacggacccatg

SEQ ID NO: 122859 - DNA, 60 bp, Artificial
  Synthetic oligonucleotide
agtgccggttcgaacgaacttttggctgaaggttatacctttattatcagttttgcacat

SEQ ID NO: 122860 - DNA, 60 bp, Artificial
  Synthetic oligonucleotide
gcgaataagtcccatccaatgttaatgctttgcgagaaaagaataagaatagtgccggtt

SEQ ID NO: 122861 - DNA, 61 bp, Artificial
  Synthetic oligonucleotide
gaattcaaacgaaaagaaataactgatccaactatgatacgaatacatcccatgaatacgc

SEQ ID NO: 122862 - DNA, 60 bp, Artificial
  Synthetic oligonucleotide
gaaatatcatgcgggatggcgtacacgagaggagccaaccgaggaagatattcgaaccgt

SEQ ID NO: 122863 - DNA, 60 bp, Artificial
  Synthetic oligonucleotide
accgaggaagatattcgaaccgtatggccatatttgactaagtactggcttaatctcgaa

SEQ ID NO: 122864 - DNA, 60 bp, Artificial
  Synthetic oligonucleotide
tacatcccatgaatacgcatttaagtacttactgtaatcgcatgtctgaaatttatagct

SEQ ID NO: 122865 - DNA, 60 bp, Artificial
  Synthetic oligonucleotide
atggaggagattttctttagcgtaattgatagcaccaagcaaataccaaaacagctgtat

SEQ ID NO: 122866 - DNA, 60 bp, Artificial
  Synthetic oligonucleotide
cagtggaacgtttacaggataagcataccatagagttagttcaggcggaagcgagagagc

SEQ ID NO: 122867 - DNA, 60 bp, Artificial
  Synthetic oligonucleotide
gagaagggaggctgacagtggaacgtttacaggataagcataccatagagttagttcagg

SEQ ID NO: 122868 - DNA, 60 bp, Artificial
  Synthetic oligonucleotide
ctatccagtcgtgatagatataggacggcgtaaaggagaagggaggctgacagtggaacg

SEQ ID NO: 122869 - DNA, 60 bp, Artificial
  Synthetic oligonucleotide
acagctgtatgatggctatccagtcgtgatagatataggacggcgtaaaggagaagggag

SEQ ID NO: 122870 - DNA, 60 bp, Artificial
  Synthetic oligonucleotide
cattgttggaagaaataggtcggaaggataaacgtattgagccagttaattcggaggata

SEQ ID NO: 122871 - DNA, 60 bp, Artificial
  Synthetic oligonucleotide
cggaggatatgcgcaatcgattcaaacagcagttagttattaacttgcgcaaaacagatg

SEQ ID NO: 122872 - DNA, 60 bp, Artificial
  Synthetic oligonucleotide
tcaacggcaaggaaaaccaaaacgtttagcgaccgttctaatgataacgatgtgcgacgt

SEQ ID NO: 122873 - DNA, 60 bp, Artificial
  Synthetic oligonucleotide
cttgcgcaaaacagatggagaagtgcggaacataagagataatcaacggcaaggaaaacc

SEQ ID NO: 122874 - DNA, 60 bp, Artificial
  Synthetic oligonucleotide
gcgacgtattaaagcgagctatatgggcaaacgataggtttgagttagtgaggggaacgt

SEQ ID NO: 122875 - DNA, 60 bp, Artificial
  Synthetic oligonucleotide
gtgaggggaacgtatacttacgcaagatgcagattaggttcggtatataacgctatgtgg

SEQ ID NO: 122876 - DNA, 60 bp, Artificial
  Synthetic oligonucleotide
cgctatgtggaaagatatggcttggcaattacgtccggcctataaagattcatgtccacg

SEQ ID NO: 122877 - DNA, 60 bp, Artificial
  Synthetic oligonucleotide
tatggcttggcaattacgtccggcctataaagattcatgtccacgcatctgtgatagacg

SEQ ID NO: 122878 - DNA, 60 bp, Artificial
  Synthetic oligonucleotide
catgtccacgcatctgtgatagacggaaatatataatgcaacgctatgactatttttctc

SEQ ID NO: 122879 - DNA, 60 bp, Artificial
  Synthetic oligonucleotide
gacacgatatataagtgggatgtaaagattttgcgggaggacgggaaaacgaatagagag

SEQ ID NO: 122880 - DNA, 60 bp, Artificial
  Synthetic oligonucleotide
gtgggatgtaaagattttgcgggaggacgggaaaacgaatagagagatgggatggctgta

SEQ ID NO: 122881 - DNA, 60 bp, Artificial
  Synthetic oligonucleotide
gaagataagtacactgaatatatgcaaagggtaattcaaggaccatggatagaaaaagat

SEQ ID NO: 122882 - DNA, 60 bp, Artificial
  Synthetic oligonucleotide
gactgcgattgagaagtttgacttcgcacaggatgcatacgtcgatgaggcagggttcct

SEQ ID NO: 122883 - DNA, 60 bp, Artificial
  Synthetic oligonucleotide
tcaaatgctcaggggttttcgatcatcaaacagagattcagttcaattgtgcgttatgtc

SEQ ID NO: 122884 - DNA, 58 bp, Artificial
  Synthetic oligonucleotide
atttatagctttgcgttacccatagtacatccagctaagggaataatcatcgtcggaa

SEQ ID NO: 122885 - DNA, 60 bp, Artificial
  Synthetic oligonucleotide
tgctgcggtaagaaaacgaaaatagtgagggtcaagttgaatggaaaggtctatgctaat

SEQ ID NO: 122886 - DNA, 60 bp, Artificial
  Synthetic oligonucleotide
tccaggtatatggtgaagggaatgtaaaatgtagtatattagaaaagttttgctgcggta

SEQ ID NO: 122887 - DNA, 60 bp, Artificial
  Synthetic oligonucleotide
cacgcgtgcgtgctactgaaggtacaggaggatggacatgtccaggtatatggtgaaggg

SEQ ID NO: 122888 - DNA, 60 bp, Artificial
  Synthetic oligonucleotide
ccgaaggatgtattaatggatatgtatcctgaggaagaggcagagtacgaccctcgtgat

SEQ ID NO: 122889 - DNA, 60 bp, Artificial
  Synthetic oligonucleotide
gggcttcgaaagacagatctcaacactaagcgaggaagacatacgtataattaaacaaag

SEQ ID NO: 122890 - DNA, 60 bp, Artificial
  Synthetic oligonucleotide
gaccctcgtgattatacggattgcaacggaagagaacaagtattaacgagaatgaagtcg

SEQ ID NO: 122891 - DNA, 60 bp, Artificial
  Synthetic oligonucleotide
ttaaacaaaggatggtaggaggagaaagtcggaatgaggtactacaaactcttgcgccta

SEQ ID NO: 122892 - DNA, 60 bp, Artificial
  Synthetic oligonucleotide
gatctcaacactaagcgaggaagacatacgtataattaaacaaaggatggtaggaggaga

SEQ ID NO: 122893 - DNA, 58 bp, Artificial
  Synthetic oligonucleotide
ggcgggagagaaaacggcggatacgatgaagaatgaagatttgctaccgatgtatttt

SEQ ID NO: 122894 - DNA, 60 bp, Artificial
  Synthetic oligonucleotide
caagcgctcatcctatcaaatgaaattatatatgaggatgcgaataagtcccatccaatg

SEQ ID NO: 122895 - DNA, 57 bp, Artificial
  Synthetic oligonucleotide
gaatctttaatggtgatatagctcttgaagtagaaaaacgaaatttattgcagtatg

SEQ ID NO: 122896 - DNA, 60 bp, Artificial
  Synthetic oligonucleotide
atggatcggattgcggagaaatggattgataaccagagtgctgacgattcggataagatc

SEQ ID NO: 122897 - DNA, 60 bp, Artificial
  Synthetic oligonucleotide
attagtgacgtcggagggtgcgttcgaagaattaatgcgaagttcaagttcaaatacgaa

SEQ ID NO: 122898 - DNA, 60 bp, Artificial
  Synthetic oligonucleotide
tccagatgcattatcggttggaatacgacgatatgattggagatacgccaagaactcaaa

SEQ ID NO: 122899 - DNA, 60 bp, Artificial
  Synthetic oligonucleotide
ggtcggttcttatgcccgcgatcatacggacgcattaggaaggttacatccgcagggaga

SEQ ID NO: 122900 - DNA, 60 bp, Artificial
  Synthetic oligonucleotide
caagacgttaagcagcagcataacgccgaccgactttgacttaaaaaggagaatctttaa

SEQ ID NO: 122901 - DNA, 60 bp, Artificial
  Synthetic oligonucleotide
caaattcatcacgagctttctttttgcgatgtttacatgaacgcaacaatcgcagaaaca

SEQ ID NO: 122902 - DNA, 60 bp, Artificial
  Synthetic oligonucleotide
cgcagaaacattagaaataaatgcccacaacaatgaaaaggataattgttttcatggtga

SEQ ID NO: 122903 - DNA, 60 bp, Artificial
  Synthetic oligonucleotide
gtattgcgaggagacagcagaagccatctgtgtgcttaagacatgccttgtgttaaattg

SEQ ID NO: 122904 - DNA, 60 bp, Artificial
  Synthetic oligonucleotide
gagggatgacgtcggtcagcaagtttgtcctaattatgtcatgctgcggtcctctgtcac

SEQ ID NO: 122905 - DNA, 60 bp, Artificial
  Synthetic oligonucleotide
gatctccaagatcaagagggatgacgtcggtcagcaagtttgtcctaattatgtcatgct

SEQ ID NO: 122906 - DNA, 60 bp, Artificial
  Synthetic oligonucleotide
gtcctctgtcacaacaaaggtggtacgaaatgtggttgagtatcaaattcgtacgggcgg

SEQ ID NO: 122907 - DNA, 60 bp, Artificial
  Synthetic oligonucleotide
atgtcatgctgcggtcctctgtcacaacaaaggtggtacgaaatgtggttgagtatcaaa

SEQ ID NO: 122908 - DNA, 60 bp, Artificial
  Synthetic oligonucleotide
atgcatggatatctcctatggatgtgaggtggacgcgaatagccggccggctggtgatca

SEQ ID NO: 122909 - DNA, 60 bp, Artificial
  Synthetic oligonucleotide
ctcctatggatgtgaggtggacgcgaatagccggccggctggtgatcagagtatggactc

SEQ ID NO: 122910 - DNA, 60 bp, Artificial
  Synthetic oligonucleotide
ccaacactgtcagcggaacagcttctggacgacggactcaaaggattagcatgcatggat

SEQ ID NO: 122911 - DNA, 60 bp, Artificial
  Synthetic oligonucleotide
ctgtcagcggaacagcttctggacgacggactcaaaggattagcatgcatggatatctcc

SEQ ID NO: 122912 - DNA, 60 bp, Artificial
  Synthetic oligonucleotide
ctctaccttacatgattacgcttgatggtgatactgtggttcctgtcgctccaacactgt

SEQ ID NO: 122913 - DNA, 60 bp, Artificial
  Synthetic oligonucleotide
ttacgcttgatggtgatactgtggttcctgtcgctccaacactgtcagcggaacagcttc

SEQ ID NO: 122914 - DNA, 60 bp, Artificial
  Synthetic oligonucleotide
gcgtgttccgattatgcacttagctgcggacttggactgtatgacgctggctctacctta

SEQ ID NO: 122915 - DNA, 60 bp, Artificial
  Synthetic oligonucleotide
cgtgttccgattatgcacttagctgcggacttggactgtatgacgctggctctaccttac

SEQ ID NO: 122916 - DNA, 60 bp, Artificial
  Synthetic oligonucleotide
tttaccatgggcatggctgggctgcacattaccactgagccatcttataagcgtgttccg

SEQ ID NO: 122917 - DNA, 60 bp, Artificial
  Synthetic oligonucleotide
ggcatggctgggctgcacattaccactgagccatcttataagcgtgttccgattatgcac

SEQ ID NO: 122918 - DNA, 60 bp, Artificial
  Synthetic oligonucleotide
ccacgtcatctttaagtatttccttggaccggggtcgatgggtggcggctgacgccagtg

SEQ ID NO: 122919 - DNA, 60 bp, Artificial
  Synthetic oligonucleotide
ctttaagtatttccctggaccggggtcgatgggtggcggctgacgccagtgatgctagac

SEQ ID NO: 122920 - DNA, 60 bp, Artificial
  Synthetic oligonucleotide
ccacgtcatctttaagtatttccctggaccggggtcgatgggtggcggctgacgccagtg

SEQ ID NO: 122921 - DNA, 60 bp, Artificial
  Synthetic oligonucleotide
gcgtgaaacgacgagactgtggactcgttcagcatcagatgattctgtggccacgtcatc

SEQ ID NO: 122922 - DNA, 60 bp, Artificial
  Synthetic oligonucleotide
acttcaaggtcgatcatgcggatgggttgaaatatatacccatggatgagagatactctc

SEQ ID NO: 122923 - DNA, 60 bp, Artificial
  Synthetic oligonucleotide
agctgatttgcagttacttcaaggtcgatcatgcggatgggttgaaatatatacccatgg

SEQ ID NO: 122924 - DNA, 60 bp, Artificial
  Synthetic oligonucleotide
gggatatccttcagactcgtgatttacactcactatgtatgccaactcctgatgcgccaa

SEQ ID NO: 122925 - DNA, 60 bp, Artificial
  Synthetic oligonucleotide
gagtatcaaattcgtacgggcggattcttttcgtgcttagctatgctaaggccactccag

SEQ ID NO: 122926 - DNA, 60 bp, Artificial
  Synthetic oligonucleotide
ccaactcctgatgcgccaatgtctaatcatcaagcatccaccatgagagagctgatttgc

SEQ ID NO: 122927 - DNA, 60 bp, Artificial
  Synthetic oligonucleotide
gccaactcctgatgcgccaatgtctaatcatcaagcatccaccatgagagagctgatttg

SEQ ID NO: 122928 - DNA, 60 bp, Artificial
  Synthetic oligonucleotide
ggcctcgtcctttgcgactattgatgcccagtgttttaggttttgcgtgatgatgaagga

SEQ ID NO: 122929 - DNA, 60 bp, Artificial
  Synthetic oligonucleotide
ttttaggatggcctcgtcctttgcgactattgatgcccagtgttttaggttttgcgtgat

SEQ ID NO: 122930 - DNA, 53 bp, Artificial
  Synthetic oligonucleotide
gctgctgagctggacaagatacagatgatgatacccttcagtgagcgtgtttt

SEQ ID NO: 122931 - DNA, 60 bp, Artificial
  Synthetic oligonucleotide
gctgctgagctggacaagatacagatgatgatacccttcagtgagcgtgtttttaggatg

SEQ ID NO: 122932 - DNA, 60 bp, Artificial
  Synthetic oligonucleotide
gcatgcagtttaaacttgagatggatgacctagcacataacgctgctgagctggacaaga

SEQ ID NO: 122933 - DNA, 60 bp, Artificial
  Synthetic oligonucleotide
tgttaaattgcatgcagtttaaacttgagatggatgacctagcacataacgctgctgagc

SEQ ID NO: 122934 - DNA, 60 bp, Artificial
  Synthetic oligonucleotide
gcgaggagacagcagaagccatctgtgtgcttaagacatgccttgtgttaaattgcatgc

SEQ ID NO: 122935 - DNA, 60 bp, Artificial
  Synthetic oligonucleotide
gttccaaccgctggttcaagatattatcaaatgagttgccttttaagtggtactcttcag

SEQ ID NO: 122936 - DNA, 60 bp, Artificial
  Synthetic oligonucleotide
tcgttccaaccgctggttcaagatattatcaaatgagttgccttttaagtggtactcttc

SEQ ID NO: 122937 - DNA, 60 bp, Artificial
  Synthetic oligonucleotide
tacaataacaacttcaaactatattctggcaagatcggtagtaccagatttaaaggaatt

SEQ ID NO: 122938 - DNA, 60 bp, Artificial
  Synthetic oligonucleotide
gatcttctcgcgttcgtatcagctgatacagtagaacctataaatgcagttgcatttgac

SEQ ID NO: 122939 - DNA, 59 bp, Artificial
  Synthetic oligonucleotide
cttgcattcgtatcggccgatacagtagaacctataaatgcagttgcatttgataatat

SEQ ID NO: 122940 - DNA, 60 bp, Artificial
  Synthetic oligonucleotide
atctcaatgacttaaccattcacactgtcagagcgaccgattgtcgtggcatgtacgaga

SEQ ID NO: 122941 - DNA, 60 bp, Artificial
  Synthetic oligonucleotide
caatgacttaaccattcacactgtcagagcgaccgattgtcgtggcatgtacgagatgac

SEQ ID NO: 122942 - DNA, 60 bp, Artificial
  Synthetic oligonucleotide
gtcttgagatccacgctgagcgcgccttcttttcgtcctttcctcaccatgtcaatggca

SEQ ID NO: 122943 - DNA, 60 bp, Artificial
  Synthetic oligonucleotide
cgctgagcgcgccttcttttcgtcctttcctcaccatgtcaatggcaagtgggtcgcacc

SEQ ID NO: 122944 - DNA, 60 bp, Artificial
  Synthetic oligonucleotide
tccctcaccagcttcatcacttcgcacccgctcgtgttcgtaaacccgcttgccgccgcc

SEQ ID NO: 122945 - DNA, 60 bp, Artificial
  Synthetic oligonucleotide
atcacttcgcacccgctcgtgttcgtaaacccgcttgccgccgccctgatggtccagtta

SEQ ID NO: 122946 - DNA, 60 bp, Artificial
  Synthetic oligonucleotide
tggtgtctaagctcaacgtcatgttcatcgacgcgaccactactcttgcatccctcacca

SEQ ID NO: 122947 - DNA, 60 bp, Artificial
  Synthetic oligonucleotide
acgtcatgttcatcgacgcgaccactactcttgcatccctcaccagcttcatcacttcgc

SEQ ID NO: 122948 - DNA, 60 bp, Artificial
  Synthetic oligonucleotide
atcatgtctgcgtgaactgtcatgaggagcccttccttaatgcaaccgttggcatcgagg

SEQ ID NO: 122949 - DNA, 60 bp, Artificial
  Synthetic oligonucleotide
catgtctgcgtgaactgtcatgaggagcccttccttaatgcaaccgttggcatcgaggca

SEQ ID NO: 122950 - DNA, 60 bp, Artificial
  Synthetic oligonucleotide
tgccgccgccctgatggtccagttacggcttaccaaaggcgtgttttccaaatcccacag

SEQ ID NO: 122951 - DNA, 60 bp, Artificial
  Synthetic oligonucleotide
cgccgccctgatggtccagttacggcttaccaaaggcgtgttttccaaatcccacaggcg

SEQ ID NO: 122952 - DNA, 60 bp, Artificial
  Synthetic oligonucleotide
aagagcggccgacaagatacgtcaggctgtgagcgctggcttcgctgacaccgttactac

SEQ ID NO: 122953 - DNA, 60 bp, Artificial
  Synthetic oligonucleotide
gatacgtcaggctgtgagcgctggcttcgctgacaccgttactactctgcaggacaggac

SEQ ID NO: 122954 - DNA, 60 bp, Artificial
  Synthetic oligonucleotide
ccgttactactctgcaggacaggactcgatccctggacgcccgtgtcaaggcgacggccg

SEQ ID NO: 122955 - DNA, 60 bp, Artificial
  Synthetic oligonucleotide
aggacaggactcgatccctggacgcccgtgtcaaggcgacggccgatgaattgaacgcta

SEQ ID NO: 122956 - DNA, 60 bp, Artificial
  Synthetic oligonucleotide
tcagatatccactctcgagtcccagctcgaagccgctaccctcgccctggccactacccg

SEQ ID NO: 122957 - DNA, 60 bp, Artificial
  Synthetic oligonucleotide
tgtgtatgacctcctgcctgcccctggacccagctacctgcctcctcctgtgtatgacct

SEQ ID NO: 122958 - DNA, 60 bp, Artificial
  Synthetic oligonucleotide
cccgcccgtcaagtccctgatgcctgacctggaccctgctgatctactcggttaattcca

SEQ ID NO: 122959 - DNA, 60 bp, Artificial
  Synthetic oligonucleotide
tgccgacgctcccgcccgtcaagtccctgatgcctgacctggaccctgctgatctactcg

SEQ ID NO: 122960 - DNA, 60 bp, Artificial
  Synthetic oligonucleotide
tctgtcagccgctgagggccgtgtccatgacctctgccaacgtaatgacctccttgagac

SEQ ID NO: 122961 - DNA, 60 bp, Artificial
  Synthetic oligonucleotide
gagccgtctgtcagccgctgagggccgtgtccatgacctctgccaacgtaatgacctcct

SEQ ID NO: 122962 - DNA, 60 bp, Artificial
  Synthetic oligonucleotide
gacccagcttgctgaaacccgccaattagcctcatacaccgatcgtcaccagcagcagac

SEQ ID NO: 122963 - DNA, 60 bp, Artificial
  Synthetic oligonucleotide
atgacctccttgagacccagcttgctgaaacccgccaattagcctcatacaccgatcgtc

SEQ ID NO: 122964 - DNA, 60 bp, Artificial
  Synthetic oligonucleotide
gcagcagactattaccgtcctccaagataccgtacgtgataacatcccctacatcccgag

SEQ ID NO: 122965 - DNA, 60 bp, Artificial
  Synthetic oligonucleotide
ggcatcgaggcagcgggtcaaatcctctccgctcgtcagtctgcccgtgaaagagcggcc

SEQ ID NO: 122966 - DNA, 60 bp, Artificial
  Synthetic oligonucleotide
taacatcccctacatcccgagtcactatggccaaggccagttcgtcatgccgacgctccc

SEQ ID NO: 122967 - DNA, 60 bp, Artificial
  Synthetic oligonucleotide
tgataacatcccctacatcccgagtcactatggccaaggccagttcgtcatgccgacgct

SEQ ID NO: 122968 - DNA, 57 bp, Artificial
  Synthetic oligonucleotide
ggccactacccgcgagtccatccagcgtgaacaagccgtccactcggccgactcgct

SEQ ID NO: 122969 - DNA, 60 bp, Artificial
  Synthetic oligonucleotide
ggtcaaatcctctccgctcgtcagtctgcccgtgaaagagcggccgacaagatacgtcag

SEQ ID NO: 122970 - DNA, 60 bp, Artificial
  Synthetic oligonucleotide
tgtgtatgacctcctgcctgcccctggacccagctacctgcatcctcctgtgtatgacct

SEQ ID NO: 122971 - DNA, 60 bp, Artificial
  Synthetic oligonucleotide
ctgcctcctcctgtgtatgacctcctgcctgcccctggacccagctacctgcatcctcct

SEQ ID NO: 122972 - DNA, 60 bp, Artificial
  Synthetic oligonucleotide
ccaccaccgttgctaaccgctggaccaaacgttcattgcccagttgcgtgtcagcggcct

SEQ ID NO: 122973 - DNA, 60 bp, Artificial
  Synthetic oligonucleotide
ccccgtggtgtggcctttggaacattcctgacccagcatctacttcaaagtacgctgaga

SEQ ID NO: 122974 - DNA, 60 bp, Artificial
  Synthetic oligonucleotide
gacccccgtggtgtggcctttggaacattcctgacccagcatctacttcaaagtacgctg

SEQ ID NO: 122975 - DNA, 60 bp, Artificial
  Synthetic oligonucleotide
aatcccacaggcgaatggtcatgggcatcgatcccattatgatccaccttgacccccgtg

SEQ ID NO: 122976 - DNA, 60 bp, Artificial
  Synthetic oligonucleotide
gctcagatatccactctcgagtcccagctcgaagccgctaccctcgccctggccactacc

SEQ ID NO: 122977 - DNA, 60 bp, Artificial
  Synthetic oligonucleotide
tttccgagctggaagctgagaacaccgccctcaccgctcagatatccactctcgagtccc

SEQ ID NO: 122978 - DNA, 60 bp, Artificial
  Synthetic oligonucleotide
ctagtggtcttcgcgtttccgagctggaagctgagaacaccgccctcaccgctcagatat

SEQ ID NO: 122979 - DNA, 60 bp, Artificial
  Synthetic oligonucleotide
accgctggaccaaacgttcattgcccagttgcgtgtcagcggcctgtgagatgcgtacag

SEQ ID NO: 122980 - DNA, 60 bp, Artificial
  Synthetic oligonucleotide
tgaattgaacgctactgcctcccaactccgaacgaccctgagccgtctgtcagccgctga

SEQ ID NO: 122981 - DNA, 60 bp, Artificial
  Synthetic oligonucleotide
acctgcctcctcctgtgtatgacctcctgcctgcccctggacccagctacctgcctcctc

SEQ ID NO: 122982 - DNA, 60 bp, Artificial
  Synthetic oligonucleotide
gcgacggccgatgaattgaacgctactgcctcccaactccgaacgaccctgagccgtctg

SEQ ID NO: 122983 - DNA, 60 bp, Artificial
  Synthetic oligonucleotide
accgatcgtcaccagcagcagactattaccgtcctccaagataccgtacgtgataacatc

SEQ ID NO: 122984 - DNA, 58 bp, Artificial
  Synthetic oligonucleotide
acccgcggatatgtcaggccgatctcggcggacgttaccagtgtctgactgctctttt

SEQ ID NO: 122985 - DNA, 60 bp, Artificial
  Synthetic oligonucleotide
caaggagttggttgcgctaactcgcggatatgtcaggccgatctcggcggacgttaccag

SEQ ID NO: 122986 - DNA, 60 bp, Artificial
  Synthetic oligonucleotide
tcacaatagatctcatgtcatcattcactattcaccattcgctcaatccccagcagcgaa

SEQ ID NO: 122987 - DNA, 60 bp, Artificial
  Synthetic oligonucleotide
acccgcggatatgtcaggccgatctcggcggacgttaccagtgtctgactgctcttttta

SEQ ID NO: 122988 - DNA, 60 bp, Artificial
  Synthetic oligonucleotide
caggtctggtactcactttctcaatcgacacgtagggggtggctcccgccgtcgagaaca

SEQ ID NO: 122989 - DNA, 60 bp, Artificial
  Synthetic oligonucleotide
cggcgaatcggttaaacaggcagtcctactgaatgttctaggtagtggtgaggagattcc

SEQ ID NO: 122990 - DNA, 60 bp, Artificial
  Synthetic oligonucleotide
ttctaggtagtggtgaggagattccggacccgttgagcccgggtgagcaaggtatgcaaa

SEQ ID NO: 122991 - DNA, 60 bp, Artificial
  Synthetic oligonucleotide
ttaggcgcgttaaagtttgggtgcaagatacttggagatcggttggacgtgcccctcttc

SEQ ID NO: 122992 - DNA, 60 bp, Artificial
  Synthetic oligonucleotide
cagagacgagctatattaggcgcgttaaagtttgggtgcaagatacttggagatcggttg

SEQ ID NO: 122993 - DNA, 60 bp, Artificial
  Synthetic oligonucleotide
tacagatgcacattttgcgcggtccgctacatttccagagacgagctatattaggcgcgt

SEQ ID NO: 122994 - DNA, 60 bp, Artificial
  Synthetic oligonucleotide
tatacgatgacgaattacagatgcacattttgcgcggtccgctacatttccagagacgag

SEQ ID NO: 122995 - DNA, 60 bp, Artificial
  Synthetic oligonucleotide
cactatgacatctctttcgctgatctacgagggaacgctcaacgtatcgtatacgatgac

SEQ ID NO: 122996 - DNA, 60 bp, Artificial
  Synthetic oligonucleotide
ccactatgacatctctttcgctgatctacgagggaacgctcaacgtatcgtatacgatga

SEQ ID NO: 122997 - DNA, 60 bp, Artificial
  Synthetic oligonucleotide
tttatagtacaataggcaaagcagctgaaagattcgcggaaagtgaaattggttcagcgg

SEQ ID NO: 122998 - DNA, 60 bp, Artificial
  Synthetic oligonucleotide
gcaaagcagctgaaagattcgcggaaagtgaaattggttcagcggcgattgatggcttag

SEQ ID NO: 122999 - DNA, 60 bp, Artificial
  Synthetic oligonucleotide
ggttcagcggcgattgatggcttagtgcagggtagcgtacattcaatattgacaggcgag

SEQ ID NO: 123000 - DNA, 60 bp, Artificial
  Synthetic oligonucleotide
gacaggcgagtcttacggcgaatcggttaaacaggcagtcctactgaatgttctaggtag

SEQ ID NO: 123001 - DNA, 60 bp, Artificial
  Synthetic oligonucleotide
ctaaagtgatgatgaaatttaagatcccgaggtcacagcaaccgcaaattcatatttata

SEQ ID NO: 123002 - DNA, 57 bp, Artificial
  Synthetic oligonucleotide
gaatcgtgcaattcaagaaaaccataaggagttaatgcatattaaagatgaaatttt

SEQ ID NO: 123003 - DNA, 60 bp, Artificial
  Synthetic oligonucleotide
catatttatacggcgccatgggattctgatgatgtattcttcttccattgtatttcacat

SEQ ID NO: 123004 - DNA, 60 bp, Artificial
  Synthetic oligonucleotide
gaaatttaagatcccgaggtcacagcaaccgcaaattcatatttatacggcgccatggga

SEQ ID NO: 123005 - DNA, 60 bp, Artificial
  Synthetic oligonucleotide
tatttcacatcatcatgcgaatgaatcattttttataggattcgatctgagtatcgactt

SEQ ID NO: 123006 - DNA, 60 bp, Artificial
  Synthetic oligonucleotide
cggcgccatgggattctgatgatgtattcttcttccattgtatttcacatcatcatgcga

SEQ ID NO: 123007 - DNA, 60 bp, Artificial
  Synthetic oligonucleotide
actatgaggatttaacggctcattggcatgcattgggagcggctcagatggctgtaggac

SEQ ID NO: 123008 - DNA, 60 bp, Artificial
  Synthetic oligonucleotide
gtatcgacttagttcactatgaggatttaacggctcattggcatgcattgggagcggctc

SEQ ID NO: 123009 - DNA, 60 bp, Artificial
  Synthetic oligonucleotide
ggtcgaaaacggtgcatccgatttatttgggatctctccactatgacatctctttcgctg

SEQ ID NO: 123010 - DNA, 60 bp, Artificial
  Synthetic oligonucleotide
cgaaggttgattaggtcgaaaacggtgcatccgatttatttgggatctctccactatgac

SEQ ID NO: 123011 - DNA, 60 bp, Artificial
  Synthetic oligonucleotide
cggaataagatcgacgctcttaaaagtgcaatagagattgaaagagacggcatgcaggaa

SEQ ID NO: 123012 - DNA, 60 bp, Artificial
  Synthetic oligonucleotide
atggtaaaagaatatcggaataagatcgacgctcttaaaagtgcaatagagattgaaaga

SEQ ID NO: 123013 - DNA, 60 bp, Artificial
  Synthetic oligonucleotide
gaagaagtcggagatgagaagcagtttgatatcttaagtaaggcagttaattcatacaat

SEQ ID NO: 123014 - DNA, 60 bp, Artificial
  Synthetic oligonucleotide
gagctggagcaggtgtatgagtttatgaacggtgcggcgaaggaagaagtcggagatgag

SEQ ID NO: 123015 - DNA, 60 bp, Artificial
  Synthetic oligonucleotide
ttggagaagagctggagcaggtgtatgagtttatgaacggtgcggcgaaggaagaagtcg

SEQ ID NO: 123016 - DNA, 60 bp, Artificial
  Synthetic oligonucleotide
ggtagtggtgaggagattccggacccgttgagcccgggtgagcaaggtatgcaaactaag

SEQ ID NO: 123017 - DNA, 60 bp, Artificial
  Synthetic oligonucleotide
cgattgctctacagaaagagattggtgagaggacacatgtagaaacagctatggtaaaag

SEQ ID NO: 123018 - DNA, 60 bp, Artificial
  Synthetic oligonucleotide
attaaccgaagaagaccaacaaatgcgtcgacttgcgattgctctacagaaagagattgg

SEQ ID NO: 123019 - DNA, 60 bp, Artificial
  Synthetic oligonucleotide
ttcatacaataagatattaaccgaagaagaccaacaaatgcgtcgacttgcgattgctct

SEQ ID NO: 123020 - DNA, 60 bp, Artificial
  Synthetic oligonucleotide
gaagtcggagatgagaagcagtttgatatcttaagtaaggcagttaattcatacaataag

SEQ ID NO: 123021 - DNA, 60 bp, Artificial
  Synthetic oligonucleotide
aattaatgcattaagcgggatagatctaacacatttgcgtacgccgaaaattgaaccgag

SEQ ID NO: 123022 - DNA, 60 bp, Artificial
  Synthetic oligonucleotide
tgcgtacgccgaaaattgaaccgagtgtagtttctacgattttggagtatcgtgcaaagg

SEQ ID NO: 123023 - DNA, 60 bp, Artificial
  Synthetic oligonucleotide
gcgggtatggcgacagccgtcgcaacgggaagagcgattgagggggcgtataagttgaag

SEQ ID NO: 123024 - DNA, 60 bp, Artificial
  Synthetic oligonucleotide
taagttgaagaaagtaattaatgcattaagcgggatagatctaacacatttgcgtacgcc

SEQ ID NO: 123025 - DNA, 60 bp, Artificial
  Synthetic oligonucleotide
tgactgctgatgtgttagaggcagcatctgaggaggtgcccctaatcggagcgggtatgg

SEQ ID NO: 123026 - DNA, 60 bp, Artificial
  Synthetic oligonucleotide
tagaggcagcatctgaggaggtgcccctaatcggagcgggtatggcgacagccgtcgcaa

SEQ ID NO: 123027 - DNA, 60 bp, Artificial
  Synthetic oligonucleotide
gattgaaagagacggcatgcaggaagaggcgatacaagaaatagcggggatgactgctga

SEQ ID NO: 123028 - DNA, 60 bp, Artificial
  Synthetic oligonucleotide
cggcatgcaggaagaggcgatacaagaaatagcggggatgactgctgatgtgttagaggc

SEQ ID NO: 123029 - DNA, 60 bp, Artificial
  Synthetic oligonucleotide
cgtacgccgaaaattgaaccgagtgtagtttctacgattttggagtatcgtgcaaaggac

SEQ ID NO: 123030 - DNA, 60 bp, Artificial
  Synthetic oligonucleotide
cgtgcaaaggacattccagacaatgcactcgcggtcagcgtgttgtcgaagaatcgtgca

SEQ ID NO: 123031 - DNA, 60 bp, Artificial
  Synthetic oligonucleotide
caacttgttcgcgacgacatttctgttcgctcgcacgatcgaaggcccgactctccaagc

SEQ ID NO: 123032 - DNA, 60 bp, Artificial
  Synthetic oligonucleotide
ccgacgatccttcgctacgtcatgatgtcgatacgtatgccagactttctcgtgagcttc

SEQ ID NO: 123033 - DNA, 60 bp, Artificial
  Synthetic oligonucleotide
actataccgacgatccttcgctacgtcatgatgtcgatacgtatgccagactttctcgtg

SEQ ID NO: 123034 - DNA, 60 bp, Artificial
  Synthetic oligonucleotide
cgaactacccttgaacttattcctgctcggtgtgtgttttgttggcgatggcgatgttcc

SEQ ID NO: 123035 - DNA, 60 bp, Artificial
  Synthetic oligonucleotide
gtcgaactacccttgaacttattcctgctcggtgtgtgttttgttggcgatggcgatgtt

SEQ ID NO: 123036 - DNA, 60 bp, Artificial
  Synthetic oligonucleotide
ccatatctactgatcaggcagattgcaggatacacgtggcacatcgatccagggtatggc

SEQ ID NO: 123037 - DNA, 60 bp, Artificial
  Synthetic oligonucleotide
tggcgatgttccatatctactgatcaggcagattgcaggatacacgtggcacatcgatcc

SEQ ID NO: 123038 - DNA, 60 bp, Artificial
  Synthetic oligonucleotide
cttgcatacgttatgactattgatgaaagagattacctgtatccagtcattacagtcgac

SEQ ID NO: 123039 - DNA, 60 bp, Artificial
  Synthetic oligonucleotide
gctagaattgactcacttgcatacgttatgactattgatgaaagagattacctgtatcca

SEQ ID NO: 123040 - DNA, 60 bp, Artificial
  Synthetic oligonucleotide
tacagtcgacgaggatggtcgaacgctaaacatcaactataccgacgatccttcgctacg

SEQ ID NO: 123041 - DNA, 60 bp, Artificial
  Synthetic oligonucleotide
cctgtatccagtcattacagtcgacgaggatggtcgaacgctaaacatcaactataccga

SEQ ID NO: 123042 - DNA, 60 bp, Artificial
  Synthetic oligonucleotide
gattgacgccgccacatcactcgagatggctaaggatgtcctgtatttgtttgggcgcgc

SEQ ID NO: 123043 - DNA, 60 bp, Artificial
  Synthetic oligonucleotide
tgccacggttctatcgattgacgccgccacatcactcgagatggctaaggatgtcctgta

SEQ ID NO: 123044 - DNA, 60 bp, Artificial
  Synthetic oligonucleotide
acgtcactcgttaaactttccactgtcgcatggtgaatggcgattgtctgataacgcgct

SEQ ID NO: 123045 - DNA, 60 bp, Artificial
  Synthetic oligonucleotide
ccagatggtcaaccttctatgctatggacgctgacttacgacataaaatacgtcactcgt

SEQ ID NO: 123046 - DNA, 60 bp, Artificial
  Synthetic oligonucleotide
accagatggtcaaccttctatgctatggacgctgacttacgacataaaatacgtcactcg

SEQ ID NO: 123047 - DNA, 60 bp, Artificial
  Synthetic oligonucleotide
ggtcaatgttgtataacccgattcctgttccgccccctcaacctcttgagaccagatggt

SEQ ID NO: 123048 - DNA, 60 bp, Artificial
  Synthetic oligonucleotide
attgatctaggagctgtgtgttcgaacggacttggtgccacggttctatcgattgacgcc

SEQ ID NO: 123049 - DNA, 60 bp, Artificial
  Synthetic oligonucleotide
attgataagcgatacattgatctaggagctgtgtgttcgaacggacttggtgccacggtt

SEQ ID NO: 123050 - DNA, 55 bp, Artificial
  Synthetic oligonucleotide
ataacgcgctacgaggtgtaggaatgatgccaagacctagtggaggtgtgtacca

SEQ ID NO: 123051 - DNA, 60 bp, Artificial
  Synthetic oligonucleotide
cctgagtcgggactatcctatctcgtcttgttggcactaatcatagttgtttcggaccgg

SEQ ID NO: 123052 - DNA, 60 bp, Artificial
  Synthetic oligonucleotide
acaattttaaacgaacgcgatggcacaacaggttcatgcagtgcaactctccccacgact

SEQ ID NO: 123053 - DNA, 60 bp, Artificial
  Synthetic oligonucleotide
cgaacgcgatggcacaacaggttcatgcagtgcaactctccccacgactccgaaatgacg

SEQ ID NO: 123054 - DNA, 60 bp, Artificial
  Synthetic oligonucleotide
tattcttatcttaacacatttaagtacagaatcgatcaacgtgagaacgtgcgcatggtg

SEQ ID NO: 123055 - DNA, 60 bp, Artificial
  Synthetic oligonucleotide
ctcacttcgtgcagcgtaccgtccacccaacacaacgacaacattagttaggtcaatgtt

SEQ ID NO: 123056 - DNA, 60 bp, Artificial
  Synthetic oligonucleotide
gcagcgtaccgtccacccaacacaacgacaacattagttaggtcaatgttgtataacccg

SEQ ID NO: 123057 - DNA, 60 bp, Artificial
  Synthetic oligonucleotide
gttgaatctgaggatgatacagaggatggattcgttcgaatatcgtatgcctcacttcgt

SEQ ID NO: 123058 - DNA, 60 bp, Artificial
  Synthetic oligonucleotide
gccgcctgagtcgggactatcctatctcgtcttgttggcactaatcatagttgtttcgga

SEQ ID NO: 123059 - DNA, 60 bp, Artificial
  Synthetic oligonucleotide
ctaacacacctccccgcccaatcactccgccctatcttcgcgactatgatgttgaatctg

SEQ ID NO: 123060 - DNA, 60 bp, Artificial
  Synthetic oligonucleotide
cacctccccgcccaatcactccgccctatcttcgcgactatgatgttgaatctgaggatg

SEQ ID NO: 123061 - DNA, 60 bp, Artificial
  Synthetic oligonucleotide
cgatcgaaggcccgactctccaagcatctattctgaccaaaggtcccgccctaacacacc

SEQ ID NO: 123062 - DNA, 60 bp, Artificial
  Synthetic oligonucleotide
ccgactctccaagcatctattctgaccaaaggtcccgccctaacacacctccccgcccaa

SEQ ID NO: 123063 - DNA, 60 bp, Artificial
  Synthetic oligonucleotide
ctttctcgtgagcttcaacttgttcgcgacgacatttctgttcgctcgcacgatcgaagg

SEQ ID NO: 123064 - DNA, 60 bp, Artificial
  Synthetic oligonucleotide
caggatgcaggagttgatgacatacatgttcttttaaggccgcctgagtcgggactatcc

SEQ ID NO: 123065 - DNA, 60 bp, Artificial
  Synthetic oligonucleotide
gggcttccgtgttggcgttaatatatatggttactaacagacagcttccaggaagtcagg

SEQ ID NO: 123066 - DNA, 60 bp, Artificial
  Synthetic oligonucleotide
cttccaggaagtcaggatgcaggagttgatgacatacatgttcttttaaggccgcctgag

SEQ ID NO: 123067 - DNA, 58 bp, Artificial
  Synthetic oligonucleotide
ttgtttcggaccggtgagattcctgatgaacctgaccgagggacgttctattgcagac

SEQ ID NO: 123068 - DNA, 60 bp, Artificial
  Synthetic oligonucleotide
gatacagaggatggattcgttcgaatatcgtatgcctcacttcgtgcagcgtaccgtcca

SEQ ID NO: 123069 - DNA, 52 bp, Artificial
  Synthetic oligonucleotide
atgtcctgtatttgtttgggcgcgcagttgtcacttttcgcgagtggaaacg

SEQ ID NO: 123070 - DNA, 60 bp, Artificial
  Synthetic oligonucleotide
acgaacttctcatgagagtattcccagacaaaatcatcacggtagttgactattcttatc

SEQ ID NO: 123071 - DNA, 60 bp, Artificial
  Synthetic oligonucleotide
cgaacttctcatgagagtattcccagacaaaatcatcacggtagttgactattcttatct

SEQ ID NO: 123072 - DNA, 60 bp, Artificial
  Synthetic oligonucleotide
ctttccactgtcgcatggtgaatggcgattgtctgataacgcgctacgaggtgtaggaat

SEQ ID NO: 123073 - DNA, 60 bp, Artificial
  Synthetic oligonucleotide
cacatttaagtacagaatcgatcaacgtgagaacgtgcgcatggtgcttggtttaatcaa

SEQ ID NO: 123074 - DNA, 60 bp, Artificial
  Synthetic oligonucleotide
gcgcatggtgcttggtttaatcaatggtgcactgtcagattcaaatcgcgaagagtgggc

SEQ ID NO: 123075 - DNA, 60 bp, Artificial
  Synthetic oligonucleotide
ggtttaatcaatggtgcactgtcagattcaaatcgcgaagagtgggcttccgtgttggcg

SEQ ID NO: 123076 - DNA, 60 bp, Artificial
  Synthetic oligonucleotide
aagagtgggcttccgtgttggcgttaatatatatggttactaacagacagcttccaggaa

SEQ ID NO: 123077 - DNA, 60 bp, Artificial
  Synthetic oligonucleotide
ctcttgtatccactcagaccgttcgagtcaacgctcaaattcgtgattatttaaaaggaa

SEQ ID NO: 123078 - DNA, 60 bp, Artificial
  Synthetic oligonucleotide
aattgtatcgcaagtgtaagcaatggatggagaatctcttgtatccactcagaccgttcg

SEQ ID NO: 123079 - DNA, 60 bp, Artificial
  Synthetic oligonucleotide
gagcaaatcatagtcatgcttaacgcgttgaaaattcagaacgcgaaaaagaaatgacta

SEQ ID NO: 123080 - DNA, 60 bp, Artificial
  Synthetic oligonucleotide
gaaatgactagtacgagatattattatgggtggattcatccttttgatattcaccgttgt

SEQ ID NO: 123081 - DNA, 60 bp, Artificial
  Synthetic oligonucleotide
gagaaactagccatcaaaatgatgtgaacgattattctggcttcacaaaggagcaaatca

SEQ ID NO: 123082 - DNA, 60 bp, Artificial
  Synthetic oligonucleotide
gccatcaaaatgatgtgaacgattattctggcttcacaaaggagcaaatcatagtcatgc

SEQ ID NO: 123083 - DNA, 60 bp, Artificial
  Synthetic oligonucleotide
atctaccatgactggtattggctttgatattgcgactaaacgattaagtccatcatccgt

SEQ ID NO: 123084 - DNA, 60 bp, Artificial
  Synthetic oligonucleotide
ccatgactggtattggctttgatattgcgactaaacgattaagtccatcatccgtgtcta

SEQ ID NO: 123085 - DNA, 60 bp, Artificial
  Synthetic oligonucleotide
gtccacaaaccgaccatttaagtgaaacatgtccatccggagatgtacttttatcagttg

SEQ ID NO: 123086 - DNA, 54 bp, Artificial
  Synthetic oligonucleotide
ttagccacgatatataatccatcaagtgttaaatcccgtccatctgggagggga

SEQ ID NO: 123087 - DNA, 60 bp, Artificial
  Synthetic oligonucleotide
ccactcagaccgttcgagtcaacgctcaaattcgtgattatttaaaaggaaagttcggga

SEQ ID NO: 123088 - DNA, 58 bp, Artificial
  Synthetic oligonucleotide
gtccacaaaccgaccatttaagtgaaacatgtccatccggagatgtacttttatcagt

SEQ ID NO: 123089 - DNA, 60 bp, Artificial
  Synthetic oligonucleotide
ccccgcgcgatgttgagcctacttgggtagggcacctaggcggacttagtaaagaatgtg

SEQ ID NO: 123090 - DNA, 60 bp, Artificial
  Synthetic oligonucleotide
gcgtgaatcccccgcgcgatgttgagcctacttgggtagggcacctaggcggacttagta

SEQ ID NO: 123091 - DNA, 60 bp, Artificial
  Synthetic oligonucleotide
aggcattgcgagtcgtttggctcgtacccctggttcccttgcaacaaagcgtgaatcccc

SEQ ID NO: 123092 - DNA, 60 bp, Artificial
  Synthetic oligonucleotide
tcaggcattgcgagtcgtttggctcgtacccctggttcccttgcaacaaagcgtgaatcc

SEQ ID NO: 123093 - DNA, 60 bp, Artificial
  Synthetic oligonucleotide
ggtataatcctctgaaattgtatcgcaagtgtaagcaatggatggagaatctcttgtatc

SEQ ID NO: 123094 - DNA, 60 bp, Artificial
  Synthetic oligonucleotide
tcaccgttgttggcacttgccaattccgagacgtgtctgccgatggtgaatcaggcattg

SEQ ID NO: 123095 - DNA, 60 bp, Artificial
  Synthetic oligonucleotide
cgagatattattatgggtggattcatccttttgatattcaccgttgttggcacttgccaa

SEQ ID NO: 123096 - DNA, 60 bp, Artificial
  Synthetic oligonucleotide
cttgccaattccgagacgtgtctgccgatggtgaatcaggcattgcgagtcgtttggctc

SEQ ID NO: 123097 - DNA, 60 bp, Artificial
  Synthetic oligonucleotide
ttgacctcgcggcgtaaattcccactgctgtataacgggggagggtgcgcggcactacac

SEQ ID NO: 123098 - DNA, 60 bp, Artificial
  Synthetic oligonucleotide
cgccgtggtgttgcatcgttgaacgtgagggaacggaggaagctgtttattgtttcgcgc

SEQ ID NO: 123099 - DNA, 60 bp, Artificial
  Synthetic oligonucleotide
tttgccatccctccaaagccagctgattataacgtaagaactttgaaaattgatgaggcg

SEQ ID NO: 123100 - DNA, 60 bp, Artificial
  Synthetic oligonucleotide
gtaccagctccggtttttgccatccctccaaagccagctgattataacgtaagaactttg

SEQ ID NO: 123101 - DNA, 60 bp, Artificial
  Synthetic oligonucleotide
gcagacattactaccaacaaacgtgccgatcggtgaggtctcatgtcccatgcagtcagt

SEQ ID NO: 123102 - DNA, 60 bp, Artificial
  Synthetic oligonucleotide
caagcggcactgaaagcgttagagaaatgggaaattgatttaagagtagcgcagacatta

SEQ ID NO: 123103 - DNA, 60 bp, Artificial
  Synthetic oligonucleotide
aggtgcctgtgataaccccaacacgtcagacaatgtacgtggattccattcaagcggcac

SEQ ID NO: 123104 - DNA, 60 bp, Artificial
  Synthetic oligonucleotide
gtgggacgcgttgctaaccatgtcaccattgtctgctggtgaagtgactgtgaaaggggc

SEQ ID NO: 123105 - DNA, 60 bp, Artificial
  Synthetic oligonucleotide
tcaccgaagtactccgatctgttgacgtacgtcgattgctacgttggagtctccgcgcgc

SEQ ID NO: 123106 - DNA, 60 bp, Artificial
  Synthetic oligonucleotide
ttgctacgttggagtctccgcgcgccaggcgctcaataacttccaaaaacaggtgcctgt

SEQ ID NO: 123107 - DNA, 53 bp, Artificial
  Synthetic oligonucleotide
tgcatcgcaaatagggcaagcgacagttgttaactacgttcagttgtacgccg

SEQ ID NO: 123108 - DNA, 60 bp, Artificial
  Synthetic oligonucleotide
gctcagtccatcattgctaccacttcgttggcgtataattacgaacctgagcagttgaac

SEQ ID NO: 123109 - DNA, 60 bp, Artificial
  Synthetic oligonucleotide
aacaaaacggatcctgaaatgaattactatttgcttgccgcattcattgattcagcagcg

SEQ ID NO: 123110 - DNA, 60 bp, Artificial
  Synthetic oligonucleotide
tggggggtaaaagttataaggagacgagttgggatcctaacgggaagaaagttggcttca

SEQ ID NO: 123111 - DNA, 60 bp, Artificial
  Synthetic oligonucleotide
ataaggagacgagttgggatcctaacgggaagaaagttggcttcattgttttccagtcca

SEQ ID NO: 123112 - DNA, 60 bp, Artificial
  Synthetic oligonucleotide
gttggcttcattgttttccagtccaaaatacctttcgaactatggacggctgcatcgcaa

SEQ ID NO: 123113 - DNA, 60 bp, Artificial
  Synthetic oligonucleotide
gtcagtggttaaattgctagacgaccagctgccagatgacagtctaatcagaaggtaccc

SEQ ID NO: 123114 - DNA, 60 bp, Artificial
  Synthetic oligonucleotide
gctaatctgctgaccgttactctgcaaacatggggaacgcttcgtccattgttcagacaa

SEQ ID NO: 123115 - DNA, 60 bp, Artificial
  Synthetic oligonucleotide
ccgttactctgcaaacatggggaacgcttcgtccattgttcagacaatcaatgtcacagg

SEQ ID NO: 123116 - DNA, 60 bp, Artificial
  Synthetic oligonucleotide
cgcaggagttaagacggccgttagcaaattgagttcatcagagtcgattcaatcttggac

SEQ ID NO: 123117 - DNA, 60 bp, Artificial
  Synthetic oligonucleotide
tcgattcaatcttggactcaagggtttctggataaggtttccactcatttcccagcgcca

SEQ ID NO: 123118 - DNA, 60 bp, Artificial
  Synthetic oligonucleotide
aaagcctgattgccctcagtctggggatagtggtgacgggtctgctagacggctgaagcg

SEQ ID NO: 123119 - DNA, 60 bp, Artificial
  Synthetic oligonucleotide
acggctgaagcgggactcatacgcaggagtggttaagcgtgggtatacgcgctagaccac

SEQ ID NO: 123120 - DNA, 60 bp, Artificial
  Synthetic oligonucleotide
gactcaagggtttctggataaggtttccactcatttcccagcgccaaagcctgattgccc

SEQ ID NO: 123121 - DNA, 60 bp, Artificial
  Synthetic oligonucleotide
cccagcgccaaagcctgattgccctcagtctggggatagtggtgacgggtctgctagacg

SEQ ID NO: 123122 - DNA, 59 bp, Artificial
  Synthetic oligonucleotide
tatacgcgctagaccactcaccctggtgacgcgggggtaaggaatgcaggcaaatcatc

SEQ ID NO: 123123 - DNA, 60 bp, Artificial
  Synthetic oligonucleotide
ttccagtccaaaatacctttcgaactatggacggctgcatcgcaaatagggcaagcgaca

SEQ ID NO: 123124 - DNA, 60 bp, Artificial
  Synthetic oligonucleotide
gagggatacaatggatggatgtttcagagggcactgttatgaacgaggccgttaacgcgg

SEQ ID NO: 123125 - DNA, 60 bp, Artificial
  Synthetic oligonucleotide
tggctaagagaaatggagggatacaatggatggatgtttcagagggcactgttatgaacg

SEQ ID NO: 123126 - DNA, 60 bp, Artificial
  Synthetic oligonucleotide
tgaacgaggccgttaacgcggtagccgctagcgcactagctccttctgcatccgcgccac

SEQ ID NO: 123127 - DNA, 60 bp, Artificial
  Synthetic oligonucleotide
agttacagccgcggagccagaaataattgcatccttggttcctgtaccagctccggtttt

SEQ ID NO: 123128 - DNA, 60 bp, Artificial
  Synthetic oligonucleotide
caactggatagcgctagcacaaggggtgaagacgagcttgcgtacaaagagcctttccgc

SEQ ID NO: 123129 - DNA, 60 bp, Artificial
  Synthetic oligonucleotide
gtcgcgcgctatgcaagcatttatcggagacccaagtaccatcattactcaggctgctcc

SEQ ID NO: 123130 - DNA, 60 bp, Artificial
  Synthetic oligonucleotide
cacggataacactggcaccagttggcacatgaatctaagaggtggaacacgggttgtcaa

SEQ ID NO: 123131 - DNA, 58 bp, Artificial
  Synthetic oligonucleotide
aagaactttgaaaattgatgaggcgacgtggctgagaatgattccgaagacgatgaac

SEQ ID NO: 123132 - DNA, 60 bp, Artificial
  Synthetic oligonucleotide
tattcccctaactctgtgccaatccaaggccaattggcgatatctcagcttgagaccggc

SEQ ID NO: 123133 - DNA, 58 bp, Artificial
  Synthetic oligonucleotide
aaaatcgcggaagctatcaagatcgatgatgacgctggtccagatgagtattccccta

SEQ ID NO: 123134 - DNA, 60 bp, Artificial
  Synthetic oligonucleotide
tgattgacagggcttcaaaaatcgcggaagctatcaagatcgatgatgacgctggtccag

SEQ ID NO: 123135 - DNA, 60 bp, Artificial
  Synthetic oligonucleotide
ggagtcactcaacgcctcattacctaacgacgccgcgcgctgcatgattgacagggcttc

SEQ ID NO: 123136 - DNA, 60 bp, Artificial
  Synthetic oligonucleotide
cacgccggagtcactcaacgcctcattacctaacgacgccgcgcgctgcatgattgacag

SEQ ID NO: 123137 - DNA, 60 bp, Artificial
  Synthetic oligonucleotide
ggctgtaccctcattgagcctttcacctgggatgctcaaccctggcggtgtgccatggat

SEQ ID NO: 123138 - DNA, 60 bp, Artificial
  Synthetic oligonucleotide
tgaaacgtcttcaacggctgtaccctcattgagcctttcacctgggatgctcaaccctgg

SEQ ID NO: 123139 - DNA, 60 bp, Artificial
  Synthetic oligonucleotide
gtcacaggagacggaaatgtcttcaaaccatcagctgaaacgtcttcaacggctgtaccc

SEQ ID NO: 123140 - DNA, 60 bp, Artificial
  Synthetic oligonucleotide
gccatacaatgatgaaccgctagtagttgtcactgagcatgcaattgctaacttcaccaa

SEQ ID NO: 123141 - DNA, 60 bp, Artificial
  Synthetic oligonucleotide
tcatctggggctgtaccgagcgagtccgctttagtgccatacaatgatgaaccgctagta

SEQ ID NO: 123142 - DNA, 60 bp, Artificial
  Synthetic oligonucleotide
atcaacactgataattcatctggggctgtaccgagcgagtccgctttagtgccatacaat

SEQ ID NO: 123143 - DNA, 60 bp, Artificial
  Synthetic oligonucleotide
tggcggtgtgccatggattgccatcggggacgaaacgtcggtgacttcaccaggtgcttt

SEQ ID NO: 123144 - DNA, 60 bp, Artificial
  Synthetic oligonucleotide
cgagtgttatccgtgtcaccgaagtactccgatctgttgacgtacgtcgattgctacgtt

SEQ ID NO: 123145 - DNA, 60 bp, Artificial
  Synthetic oligonucleotide
gaaccgctagtagttgtcactgagcatgcaattgctaacttcaccaaagccgagatggcc

SEQ ID NO: 123146 - DNA, 60 bp, Artificial
  Synthetic oligonucleotide
gactcagccagatgtgtgggacgcgttgctaaccatgtcaccattgtctgctggtgaagt

SEQ ID NO: 123147 - DNA, 60 bp, Artificial
  Synthetic oligonucleotide
gtctaatcgccgagtgaagcgtgactcatacgcaggagtggtcaaacgtgggtacacacg

SEQ ID NO: 123148 - DNA, 60 bp, Artificial
  Synthetic oligonucleotide
gcatacctacgacgtgaatggcagtcttatggggaaactgtcatagctgaaggtactttc

SEQ ID NO: 123149 - DNA, 60 bp, Artificial
  Synthetic oligonucleotide
gcccgaggagtatgaattaggcataatatacaattccatgagaacacggaaattgattga

SEQ ID NO: 123150 - DNA, 60 bp, Artificial
  Synthetic oligonucleotide
cagatggacgttactgttatcaagccgagatcggtcgcaacgcttatagcatggacgcta

SEQ ID NO: 123151 - DNA, 60 bp, Artificial
  Synthetic oligonucleotide
aacagggaaacggccactgaactatttgatgaatttctcacacgaattaaaagcatgcta

SEQ ID NO: 123152 - DNA, 60 bp, Artificial
  Synthetic oligonucleotide
tgaccataagttatacagtcatgaaaccgtccgatccggatttcgttacaggaggagata

SEQ ID NO: 123153 - DNA, 50 bp, Artificial
  Synthetic oligonucleotide
gaggtactcattaccgtcaaggcgcatgtgcaggtttcgcagcaggatac

SEQ ID NO: 123154 - DNA, 60 bp, Artificial
  Synthetic oligonucleotide
catatgctacattggggactcatacacgttatcgggaggtactcattaccgtcaaggcgc

SEQ ID NO: 123155 - DNA, 60 bp, Artificial
  Synthetic oligonucleotide
tgcattgaatccgtacatatgctacattggggactcatacacgttatcgggaggtactca

SEQ ID NO: 123156 - DNA, 60 bp, Artificial
  Synthetic oligonucleotide
ggacgttactgttatcaagccgagatcggtcgcaacgcttatagcatggacgctagaggc

SEQ ID NO: 123157 - DNA, 60 bp, Artificial
  Synthetic oligonucleotide
gggaaacggccactgaactatttgatgaatttctcacacgaattaaaagcatgctagtga

SEQ ID NO: 123158 - DNA, 60 bp, Artificial
  Synthetic oligonucleotide
ttgggcgaactaccatctctttttagcaacataaccaaggtgtttaacagagcgaaggat

SEQ ID NO: 123159 - DNA, 60 bp, Artificial
  Synthetic oligonucleotide
cagtcaggttgagggtgaactgactaacaatggtgcgttgatatttaaaatgaattacat

SEQ ID NO: 123160 - DNA, 60 bp, Artificial
  Synthetic oligonucleotide
gaatgcccgaggagtatgaattaggcataatatacaattccatgagaacacggaaattga

SEQ ID NO: 123161 - DNA, 60 bp, Artificial
  Synthetic oligonucleotide
cctacgacgtgaatggcagtcttatggggaaactgtcatagctgaaggtactttcaactc

SEQ ID NO: 123162 - DNA, 60 bp, Artificial
  Synthetic oligonucleotide
ctaggaatgataggtatgacaggaaatggacgagttatgctcacgtcgaccatcattcag

SEQ ID NO: 123163 - DNA, 60 bp, Artificial
  Synthetic oligonucleotide
tgaattacataccctcgttagcgggaataaccaataagggcggaaaagttaaatataggt

SEQ ID NO: 123164 - DNA, 60 bp, Artificial
  Synthetic oligonucleotide
gttgagggtgaactgactaacaatggtgcgttgatatttaaaatgaattacataccctcg

SEQ ID NO: 123165 - DNA, 56 bp, Artificial
  Synthetic oligonucleotide
aaatataggtatataagtgggggctttgcacagatagatacttctagacatacggg

SEQ ID NO: 123166 - DNA, 60 bp, Artificial
  Synthetic oligonucleotide
cctcgttagcgggaataaccaataagggcggaaaagttaaatataggtatataagtgggg

SEQ ID NO: 123167 - DNA, 60 bp, Artificial
  Synthetic oligonucleotide
gttcaccgtgcttcaaccagaagacgaattctcggtgtggtattttgaagataagtggca

SEQ ID NO: 123168 - DNA, 60 bp, Artificial
  Synthetic oligonucleotide
ggataacataaagaaactgaggagcaggagcaattcagatatatcaccgataggagcgac

SEQ ID NO: 123169 - DNA, 60 bp, Artificial
  Synthetic oligonucleotide
gataagtggcaaatcagtcaggctatatatgcaaaaaatttccaatcagacagtcaggtt

SEQ ID NO: 123170 - DNA, 60 bp, Artificial
  Synthetic oligonucleotide
ttctatgctgataacaacaattacccagtagacaatgcattgaatccgtacatatgctac

SEQ ID NO: 123171 - DNA, 60 bp, Artificial
  Synthetic oligonucleotide
tgttatggaaagaaattctatgctgataacaacaattacccagtagacaatgcattgaat

SEQ ID NO: 123172 - DNA, 60 bp, Artificial
  Synthetic oligonucleotide
cgatgatgggcaactaatagacgtactaaacaatctaaacagggaaacggccactgaact

SEQ ID NO: 123173 - DNA, 60 bp, Artificial
  Synthetic oligonucleotide
acggttttagaaagctaggaatgataggtatgacaggaaatggacgagttatgctcacgt

SEQ ID NO: 123174 - DNA, 60 bp, Artificial
  Synthetic oligonucleotide
cggttcacagtatacaatacgtggctatagagatagaaacctaacagccactgaaacaca

SEQ ID NO: 123175 - DNA, 60 bp, Artificial
  Synthetic oligonucleotide
gcaccgtgtcgcgtcaatctacgttgaggttgatagtgtaacatacgacggttcacagta

SEQ ID NO: 123176 - DNA, 60 bp, Artificial
  Synthetic oligonucleotide
tatgcaccgtgtcgcgtcaatctacgttgaggttgatagtgtaacatacgacggttcaca

SEQ ID NO: 123177 - DNA, 56 bp, Artificial
  Synthetic oligonucleotide
actgcaatatagagcctccttgtggaacgctgctgcgtatgcattttgatgtgtcc

SEQ ID NO: 123178 - DNA, 60 bp, Artificial
  Synthetic oligonucleotide
cgctagaggcttcatgttaggcgagagtgatagacatgttgacacaacacaatttctacc

SEQ ID NO: 123179 - DNA, 60 bp, Artificial
  Synthetic oligonucleotide
cggaaattgattgatgaacgcaagcatgacttcgatacattcgctgtagccacggagatg

SEQ ID NO: 123180 - DNA, 60 bp, Artificial
  Synthetic oligonucleotide
gatgaacgcaagcatgacttcgatacattcgctgtagccacggagatggaattaccctac

SEQ ID NO: 123181 - DNA, 60 bp, Artificial
  Synthetic oligonucleotide
cacggagatggaattaccctacatttcaaaggttaacacactgactaaggaattcaagga

SEQ ID NO: 123182 - DNA, 54 bp, Artificial
  Synthetic oligonucleotide
aattcaaggactatctaaagaaacctgggcttctatccaacgacgatgtagcag

SEQ ID NO: 123183 - DNA, 54 bp, Artificial
  Synthetic oligonucleotide
gatccagaactagcgcatgaagtgctttctaacatgtcaaacagcgctactagg

SEQ ID NO: 123184 - DNA, 60 bp, Artificial
  Synthetic oligonucleotide
gctcacgtcgaccatcattcagaagattagttataaacatcagtttacatttcaaatgca

SEQ ID NO: 123185 - DNA, 60 bp, Artificial
  Synthetic oligonucleotide
agcgaaggataacataaagaaactgaggagcaggagcaattcagatatatcaccgatagg

SEQ ID NO: 123186 - DNA, 60 bp, Artificial
  Synthetic oligonucleotide
gcaaatagctatgaacaattcattctcggaaccaactttcagtcaaataattgatagaat

SEQ ID NO: 123187 - DNA, 60 bp, Artificial
  Synthetic oligonucleotide
ttgatagaatgttcgatgatgggcaactaatagacgtactaaacaatctaaacagggaaa

SEQ ID NO: 123188 - DNA, 60 bp, Artificial
  Synthetic oligonucleotide
caaggctggcattaatcaatcatggaggccggccacagactacaacggtcagttcaccgt

SEQ ID NO: 123189 - DNA, 60 bp, Artificial
  Synthetic oligonucleotide
ggctggcattaatcaatcatggaggccggccacagactacaacggtcagttcaccgtgct

SEQ ID NO: 123190 - DNA, 60 bp, Artificial
  Synthetic oligonucleotide
atggacgctagaggcttcatgttaggcgagagtgatagacatgttgacacaacacaattt

SEQ ID NO: 123191 - DNA, 60 bp, Artificial
  Synthetic oligonucleotide
taaaaacacgcgtacaaggcaatgactcacgcataataatctacgaacaagaagatgggt

SEQ ID NO: 123192 - DNA, 60 bp, Artificial
  Synthetic oligonucleotide
aaacacgcgtacaaggcaatgactcacgcataataatctacgaacaagaagatgggtttt

SEQ ID NO: 123193 - DNA, 60 bp, Artificial
  Synthetic oligonucleotide
atttcaaatgcattcagaatcgtacgtatggggcccatgttccggacgtataaaaacacg

SEQ ID NO: 123194 - DNA, 60 bp, Artificial
  Synthetic oligonucleotide
tcgagaaacatgaatacacttactcgtatgaacgtgatggccaagtagtgaacgccacca

SEQ ID NO: 123195 - DNA, 60 bp, Artificial
  Synthetic oligonucleotide
gatggccaagtagtgaacgccaccactgtgacctatgtaaagccaacaggcaaggctggc

SEQ ID NO: 123196 - DNA, 60 bp, Artificial
  Synthetic oligonucleotide
gccatattttaagccgtatggaacgatgggaggtgcttttaaaaactggttgattgattc

SEQ ID NO: 123197 - DNA, 60 bp, Artificial
  Synthetic oligonucleotide
tgattgattctggattcgagaaacatgaatacacttactcgtatgaacgtgatggccaag

SEQ ID NO: 123198 - DNA, 60 bp, Artificial
  Synthetic oligonucleotide
aggtgctgacccgttgccccaagactggcctcttacttgtccatgacactcacgcgcacg

SEQ ID NO: 123199 - DNA, 60 bp, Artificial
  Synthetic oligonucleotide
gcccaacgagcatcctactaaaccgttggacgatacgcacccccacgataaggtgctgac

SEQ ID NO: 123200 - DNA, 60 bp, Artificial
  Synthetic oligonucleotide
ggacgtcttaccttatacaccaaaaccagaactgagaccactaaccttgatcacgccgag

SEQ ID NO: 123201 - DNA, 60 bp, Artificial
  Synthetic oligonucleotide
ctgctacaggacgtcttaccttatacaccaaaaccagaactgagaccactaaccttgatc

SEQ ID NO: 123202 - DNA, 60 bp, Artificial
  Synthetic oligonucleotide
acttagatgattcttctgccaccgcctgcgtccgcaatcactgccaggccggtcatgacg

SEQ ID NO: 123203 - DNA, 60 bp, Artificial
  Synthetic oligonucleotide
ctgtgacttagatgattcttctgccaccgcctgcgtccgcaatcactgccaggccggtca

SEQ ID NO: 123204 - DNA, 60 bp, Artificial
  Synthetic oligonucleotide
catgcatgacctccttacatcggcgaatgtggatgatggtcatcaagcacggtctgcttg

SEQ ID NO: 123205 - DNA, 60 bp, Artificial
  Synthetic oligonucleotide
taccgccgtagttgccaccgccgctacgagggccatcctcatgcatgacctccttacatc

SEQ ID NO: 123206 - DNA, 60 bp, Artificial
  Synthetic oligonucleotide
cacgcgcacgctaccgccgtagttgccaccgccgctacgagggccatcctcatgcatgac

SEQ ID NO: 123207 - DNA, 60 bp, Artificial
  Synthetic oligonucleotide
tgccccaagactggcctcttacttgtccatgacactcacgcgcacgctaccgccgtagtt

SEQ ID NO: 123208 - DNA, 60 bp, Artificial
  Synthetic oligonucleotide
ggtctgcttgttacggtccaacgttcagtaacctgacctttgcttgccactccacctgcg

SEQ ID NO: 123209 - DNA, 60 bp, Artificial
  Synthetic oligonucleotide
cctccttacatcggcgaatgtggatgatggtcatcaagcacggtctgcttgttacggtcc

SEQ ID NO: 123210 - DNA, 60 bp, Artificial
  Synthetic oligonucleotide
cacatgattccgcaagtcgcccacgctatggtgcgtgcagctgctacaggacgtcttacc

SEQ ID NO: 123211 - DNA, 60 bp, Artificial
  Synthetic oligonucleotide
gatgccacttcacatgattccgcaagtcgcccacgctatggtgcgtgcagctgctacagg

SEQ ID NO: 123212 - DNA, 60 bp, Artificial
  Synthetic oligonucleotide
ccatccgattaagcaccggcctacccacccggtgcgggtgtaggggtctctcgtttcatc

SEQ ID NO: 123213 - DNA, 60 bp, Artificial
  Synthetic oligonucleotide
tgcatgtggagccatccgattaagcaccggcctacccacccggtgcgggtgtaggggtct

SEQ ID NO: 123214 - DNA, 60 bp, Artificial
  Synthetic oligonucleotide
cggtccaacgttcagtaacctgacctttgcttgccactccacctgcgcttcagatatggc

SEQ ID NO: 123215 - DNA, 60 bp, Artificial
  Synthetic oligonucleotide
aaccttgatcacgccgagtacgtcacctgcgggcggtacaccatctgcgccttctgtctc

SEQ ID NO: 123216 - DNA, 60 bp, Artificial
  Synthetic oligonucleotide
tcacgccgagtacgtcacctgcgggcggtacaccatctgcgccttctgtctcacgacttt

SEQ ID NO: 123217 - DNA, 60 bp, Artificial
  Synthetic oligonucleotide
cttctgtctcacgactttggcccctcacgctaacgtcaagaccatccaagactcccacgc

SEQ ID NO: 123218 - DNA, 60 bp, Artificial
  Synthetic oligonucleotide
actttggcccctcacgctaacgtcaagaccatccaagactcccacgcttgctcccgtcag

SEQ ID NO: 123219 - DNA, 60 bp, Artificial
  Synthetic oligonucleotide
agtcgaagtgagtgacaaagcgcagatcgccctcgtcggtagccgtaccgtggactatca

SEQ ID NO: 123220 - DNA, 60 bp, Artificial
  Synthetic oligonucleotide
cgaagtgagtgacaaagcgcagatcgccctcgtcggtagccgtaccgtggactatcacga

SEQ ID NO: 123221 - DNA, 60 bp, Artificial
  Synthetic oligonucleotide
tggactatcacgaattggatgtgaaagctggattcgtcgccccaacagcagatgagacag

SEQ ID NO: 123222 - DNA, 60 bp, Artificial
  Synthetic oligonucleotide
tcacgaattggatgtgaaagctggattcgtcgccccaacagcagatgagacagtcgcccc

SEQ ID NO: 123223 - DNA, 60 bp, Artificial
  Synthetic oligonucleotide
gatgagacagtcgccccctccaaggacatcgtcgaacttccgtttcgcacctgtgactta

SEQ ID NO: 123224 - DNA, 60 bp, Artificial
  Synthetic oligonucleotide
ccctccaaggacatcgtcgaacttccgtttcgcacctgtgacttagatgattcttctgcc

SEQ ID NO: 123225 - DNA, 60 bp, Artificial
  Synthetic oligonucleotide
tgcatcagaggtgaaaagtcgtttgggggcggatatagtaacaatattcaaaccaattat

SEQ ID NO: 123226 - DNA, 60 bp, Artificial
  Synthetic oligonucleotide
aaccaattattaagttgatgtatcaagacatcggtcgttgtatgaagcttggagacattg

SEQ ID NO: 123227 - DNA, 60 bp, Artificial
  Synthetic oligonucleotide
tcaaattttacagctgatttggcgaacgttcgctcacaattgcagggtgctgcatcagag

SEQ ID NO: 123228 - DNA, 58 bp, Artificial
  Synthetic oligonucleotide
tttggcgaacgttcgctcacaattgcagggtgctgcatcagaggtgaaaagtcgtttg

SEQ ID NO: 123229 - DNA, 60 bp, Artificial
  Synthetic oligonucleotide
aaacgcaccaagtattggaccagactgtcagggatcaagtgcaacaaggatcaaatttta

SEQ ID NO: 123230 - DNA, 60 bp, Artificial
  Synthetic oligonucleotide
tggaccagactgtcagggatcaagtgcaacaaggatcaaattttacagctgatttggcga

SEQ ID NO: 123231 - DNA, 60 bp, Artificial
  Synthetic oligonucleotide
acagaggggaacagtgtctttgctagaggctgaatttgctgcgcttaagaaaacgcacca

SEQ ID NO: 123232 - DNA, 60 bp, Artificial
  Synthetic oligonucleotide
gaggggaacagtgtctttgctagaggctgaatttgctgcgcttaagaaaacgcaccaagt

SEQ ID NO: 123233 - DNA, 60 bp, Artificial
  Synthetic oligonucleotide
cgagttctggtgtttttacgatttccttttcacatttaatcgcaatttatattcctaggt

SEQ ID NO: 123234 - DNA, 60 bp, Artificial
  Synthetic oligonucleotide
ttacgatttccttttcacatttaatcgcaatttatattcctaggtgtcccgggctgaggt

SEQ ID NO: 123235 - DNA, 60 bp, Artificial
  Synthetic oligonucleotide
actgttggtgagggatgctgtgccgccagacaatctgcatcatgatgtagagtcagacat

SEQ ID NO: 123236 - DNA, 60 bp, Artificial
  Synthetic oligonucleotide
tgatgtatcaagacatcggtcgttgtatgaagcttggagacattgatcaagtgcggaatg

SEQ ID NO: 123237 - DNA, 60 bp, Artificial
  Synthetic oligonucleotide
ggagacattgatcaagtgcggaatgatatgaatcagacgacggcgaagcttggtgacttt

SEQ ID NO: 123238 - DNA, 60 bp, Artificial
  Synthetic oligonucleotide
ctaattgcaatcgaaggaagtgcaatacgtcacagggctggtaaacttgttctatggtct

SEQ ID NO: 123239 - DNA, 54 bp, Artificial
  Synthetic oligonucleotide
tctatggtctttatataatgttgggacacatctaaaattcgggagactaattga

SEQ ID NO: 123240 - DNA, 60 bp, Artificial
  Synthetic oligonucleotide
tgagacaggatattttaaaggagtggtgaagaagaaagatgagattaaagctttaaatat

SEQ ID NO: 123241 - DNA, 60 bp, Artificial
  Synthetic oligonucleotide
taaaggagtggtgaagaagaaagatgagattaaagctttaaatattccacaaggtgaggc

SEQ ID NO: 123242 - DNA, 60 bp, Artificial
  Synthetic oligonucleotide
ctttaaatattccacaaggtgaggcatggtattacgcagagttatgggctaatactcccc

SEQ ID NO: 123243 - DNA, 60 bp, Artificial
  Synthetic oligonucleotide
caaggtgaggcatggtattacgcagagttatgggctaatactcccctagatacgagtgga

SEQ ID NO: 123244 - DNA, 60 bp, Artificial
  Synthetic oligonucleotide
aatactcccctagatacgagtggaactgggttgagctttttcatacgtgttagaggtgta

SEQ ID NO: 123245 - DNA, 60 bp, Artificial
  Synthetic oligonucleotide
cgggatgtttttcgccctcctgaagtacgtctagaatctgatttttcttatgctgtacat

SEQ ID NO: 123246 - DNA, 60 bp, Artificial
  Synthetic oligonucleotide
ccggatatagattcggctgacgaaactcatctgccaattgggtctgttgatagtattgca

SEQ ID NO: 123247 - DNA, 60 bp, Artificial
  Synthetic oligonucleotide
cggctgacgaaactcatctgccaattgggtctgttgatagtattgcagctcttttggatc

SEQ ID NO: 123248 - DNA, 60 bp, Artificial
  Synthetic oligonucleotide
ccaccagttaccttggaaactcattgatgatgacattcgggtagatattaccggtccatt

SEQ ID NO: 123249 - DNA, 60 bp, Artificial
  Synthetic oligonucleotide
gttcgcggcatgttacaagaattatccgcgtcaaggaagagtgctgcggatgtccaagaa

SEQ ID NO: 123250 - DNA, 60 bp, Artificial
  Synthetic oligonucleotide
tatagttcgcggcatgttacaagaattatccgcgtcaaggaagagtgctgcggatgtcca

SEQ ID NO: 123251 - DNA, 60 bp, Artificial
  Synthetic oligonucleotide
ctcgatgtgattgcttcacatgtatatttggggtggatcggtcagaaatttttatgtccg

SEQ ID NO: 123252 - DNA, 60 bp, Artificial
  Synthetic oligonucleotide
agtcagacataattttggaccaatgtgatcatgttccaggaatggttgtgttatcgagag

SEQ ID NO: 123253 - DNA, 60 bp, Artificial
  Synthetic oligonucleotide
tttggatctactatatcgaagatcggaagaggtgactcgagcgctgaacggggattacag

SEQ ID NO: 123254 - DNA, 60 bp, Artificial
  Synthetic oligonucleotide
tagtattgcagctcttttggatctactatatcgaagatcggaagaggtgactcgagcgct

SEQ ID NO: 123255 - DNA, 60 bp, Artificial
  Synthetic oligonucleotide
cggggattacaggcccagaaggcggagagctgctgttgctccccaaattattgacccagc

SEQ ID NO: 123256 - DNA, 60 bp, Artificial
  Synthetic oligonucleotide
ctcgagcgctgaacggggattacaggcccagaaggcggagagctgctgttgctccccaaa

SEQ ID NO: 123257 - DNA, 60 bp, Artificial
  Synthetic oligonucleotide
ccccaaattattgacccagctgttccttcaattcaaacgtatcagaatatagttcgcggc

SEQ ID NO: 123258 - DNA, 60 bp, Artificial
  Synthetic oligonucleotide
attcagacggtgcatttagatagaggcacaatgatactgttggtgagggatgctgtgccg

SEQ ID NO: 123259 - DNA, 60 bp, Artificial
  Synthetic oligonucleotide
ttagtagcgtgtactattcagacggtgcatttagatagaggcacaatgatactgttggtg

SEQ ID NO: 123260 - DNA, 50 bp, Artificial
  Synthetic oligonucleotide
tttatgtccggctgtattaggtcccccatttcatcatgaccgattcattc

SEQ ID NO: 123261 - DNA, 60 bp, Artificial
  Synthetic oligonucleotide
gtgtcggcgcgatttcggactattgaggataggttgggcgagttagaaaaacagagggga

SEQ ID NO: 123262 - DNA, 60 bp, Artificial
  Synthetic oligonucleotide
cctcgctgataagagcgaaattaaggccgctgcaggatcactcgatgtgattgcttcaca

SEQ ID NO: 123263 - DNA, 60 bp, Artificial
  Synthetic oligonucleotide
gattgttttacctcgctgataagagcgaaattaaggccgctgcaggatcactcgatgtga

SEQ ID NO: 123264 - DNA, 60 bp, Artificial
  Synthetic oligonucleotide
ggtcgacgagttacttcattagagaatcgagatttgcctagattgttttacctcgctgat

SEQ ID NO: 123265 - DNA, 60 bp, Artificial
  Synthetic oligonucleotide
tggtgactttggtcgacgagttacttcattagagaatcgagatttgcctagattgtttta

SEQ ID NO: 123266 - DNA, 60 bp, Artificial
  Synthetic oligonucleotide
gtgcggaatgatatgaatcagacgacggcgaagcttggtgactttggtcgacgagttact

SEQ ID NO: 123267 - DNA, 60 bp, Artificial
  Synthetic oligonucleotide
gcaaccccgggatgggagacagtggtaccgagaacctcaagctttgattataatattgtg

SEQ ID NO: 123268 - DNA, 60 bp, Artificial
  Synthetic oligonucleotide
gacattttaataatggcaaccccgggatgggagacagtggtaccgagaacctcaagcttt

SEQ ID NO: 123269 - DNA, 60 bp, Artificial
  Synthetic oligonucleotide
ctactatccaccagttaccttggaaactcattgatgatgacattcgggtagatattaccg

SEQ ID NO: 123270 - DNA, 60 bp, Artificial
  Synthetic oligonucleotide
cccaggaatacacagccttggacgtcatttgataagttaactactatccaccagttacct

SEQ ID NO: 123271 - DNA, 60 bp, Artificial
  Synthetic oligonucleotide
tgtgaggattcccaggaatacacagccttggacgtcatttgataagttaactactatcca

SEQ ID NO: 123272 - DNA, 51 bp, Artificial
  Synthetic oligonucleotide
cttgattattcagttccagcctgcatcttatttcttcggcgtagcttggac

SEQ ID NO: 123273 - DNA, 60 bp, Artificial
  Synthetic oligonucleotide
atattgggacaatgtattatactgcaacgtttttgttaagcgctattcctgagaatggtt

SEQ ID NO: 123274 - DNA, 60 bp, Artificial
  Synthetic oligonucleotide
tggaccaatgtgatcatgttccaggaatggttgtgttatcgagagatcgggtgtcacctg

SEQ ID NO: 123275 - DNA, 60 bp, Artificial
  Synthetic oligonucleotide
ttgccgcggtccaatttctaaataacgatcaacgcattgatgcgtttaggatcatgggag

SEQ ID NO: 123276 - DNA, 60 bp, Artificial
  Synthetic oligonucleotide
cgcggaagcgtttcgtgatgatgtgaggttaagacaaattaagcgacatgtgaatgagca

SEQ ID NO: 123277 - DNA, 60 bp, Artificial
  Synthetic oligonucleotide
gctactgttccagaagatgaagcgagaaagcaatccgtttaaggggctgtcaactgatag

SEQ ID NO: 123278 - DNA, 60 bp, Artificial
  Synthetic oligonucleotide
tatgtaagaagctactgttccagaagatgaagcgagaaagcaatccgtttaaggggctgt

SEQ ID NO: 123279 - DNA, 60 bp, Artificial
  Synthetic oligonucleotide
cacgagtgataattcaagaggaatgaactatgaaacttcaatgtttaataaagtggcggc

SEQ ID NO: 123280 - DNA, 60 bp, Artificial
  Synthetic oligonucleotide
caaaagagttgttactgaaatcagtactaatagctattggtcattcaaaagaaatcgaga

SEQ ID NO: 123281 - DNA, 60 bp, Artificial
  Synthetic oligonucleotide
ttgttactgaaatcagtactaatagctattggtcattcaaaagaaatcgagacaactgcc

SEQ ID NO: 123282 - DNA, 60 bp, Artificial
  Synthetic oligonucleotide
agagaacttggtgctaagaagagagaatcatcaggacgtgctattccattcaaaagagtt

SEQ ID NO: 123283 - DNA, 60 bp, Artificial
  Synthetic oligonucleotide
gagaacttggtgctaagaagagagaatcatcaggacgtgctattccattcaaaagagttg

SEQ ID NO: 123284 - DNA, 60 bp, Artificial
  Synthetic oligonucleotide
caaaaaacgttacaacacgagtgataattcaagaggaatgaactatgaaacttcaatgtt

SEQ ID NO: 123285 - DNA, 60 bp, Artificial
  Synthetic oligonucleotide
tgaactgcggtggcaatacaataaatttgcagtaattacacatggtaaaggtcactacag

SEQ ID NO: 123286 - DNA, 60 bp, Artificial
  Synthetic oligonucleotide
gttgtaaaatattcatcagttgcgaatcatgcagatagagtttacgctactttcaagagc

SEQ ID NO: 123287 - DNA, 60 bp, Artificial
  Synthetic oligonucleotide
tttattccatttaacagtttagctataaagtgtatgttgacagcaaaagtggacaaaaaa

SEQ ID NO: 123288 - DNA, 60 bp, Artificial
  Synthetic oligonucleotide
cgtttacgtcctcaatgaaacaaggcaatactcttgaaatatgtaagaagctactgttcc

SEQ ID NO: 123289 - DNA, 60 bp, Artificial
  Synthetic oligonucleotide
gtcactacagagttgtaaaatattcatcagttgcgaatcatgcagatagagtttacgcta

SEQ ID NO: 123290 - DNA, 60 bp, Artificial
  Synthetic oligonucleotide
gataaaccaatttcagagtcacacgtcaaagagctcattgctgaactgcggtggcaatac

SEQ ID NO: 123291 - DNA, 60 bp, Artificial
  Synthetic oligonucleotide
ctgaatgaagataaaccaatttcagagtcacacgtcaaagagctcattgctgaactgcgg

SEQ ID NO: 123292 - DNA, 60 bp, Artificial
  Synthetic oligonucleotide
gaattggtatgcgtttacgtcctcaatgaaacaaggcaatactcttgaaatatgtaagaa

SEQ ID NO: 123293 - DNA, 60 bp, Artificial
  Synthetic oligonucleotide
gcggtggcaatacaataaatttgcagtaattacacatggtaaaggtcactacagagttgt

SEQ ID NO: 123294 - DNA, 60 bp, Artificial
  Synthetic oligonucleotide
ggaagtacctgtacgccaaactgagagcacaacaaaagatatcaaatcgaagtccaaaac

SEQ ID NO: 123295 - DNA, 60 bp, Artificial
  Synthetic oligonucleotide
attactggccacataggtcccttaaagtacgaatgagcgatgagtatatcgcacgtcacg

SEQ ID NO: 123296 - DNA, 60 bp, Artificial
  Synthetic oligonucleotide
ggccacataggtcccttaaagtacgaatgagcgatgagtatatcgcacgtcacgctgacg

SEQ ID NO: 123297 - DNA, 60 bp, Artificial
  Synthetic oligonucleotide
gcacgtcacgctgacgaggaaaacaactcattcttcaatccagtttcacctttcacagcg

SEQ ID NO: 123298 - DNA, 60 bp, Artificial
  Synthetic oligonucleotide
catggtgtgagctaaaattatacgatgctggcacagatacgtttactgtcatgcatcatg

SEQ ID NO: 123299 - DNA, 60 bp, Artificial
  Synthetic oligonucleotide
gtgtgagctaaaattatacgatgctggcacagatacgtttactgtcatgcatcatgcacc

SEQ ID NO: 123300 - DNA, 60 bp, Artificial
  Synthetic oligonucleotide
atgcatcatgcacctaagtatacaatcgaggttactcttaacaagcaacaaatgaacata

SEQ ID NO: 123301 - DNA, 60 bp, Artificial
  Synthetic oligonucleotide
tcatgcacctaagtatacaatcgaggttactcttaacaagcaacaaatgaacataacgga

SEQ ID NO: 123302 - DNA, 60 bp, Artificial
  Synthetic oligonucleotide
cggtagtcccaaatgcagtaattgagttcgaaggcctggtcatggaatccatcaagactc

SEQ ID NO: 123303 - DNA, 60 bp, Artificial
  Synthetic oligonucleotide
ggtagtcccaaatgcagtaattgagttcgaaggcctggtcatggaatccatcaagactcg

SEQ ID NO: 123304 - DNA, 60 bp, Artificial
  Synthetic oligonucleotide
ctaatggtattaagcttagaaaactcgaacgtgggatgttcttgcgtgctggtgacatcg

SEQ ID NO: 123305 - DNA, 60 bp, Artificial
  Synthetic oligonucleotide
gttcttgcgtgctggtgacatcgatttaaagatggcgccatgcgctaatcttgcggaagc

SEQ ID NO: 123306 - DNA, 60 bp, Artificial
  Synthetic oligonucleotide
cgcctaagtctgtcgatcctgctgaagggaaccgcactgtcattgtgacttcgaaaccag

SEQ ID NO: 123307 - DNA, 60 bp, Artificial
  Synthetic oligonucleotide
tcgaaaccagtatctaatggtattaagcttagaaaactcgaacgtgggatgttcttgcgt

SEQ ID NO: 123308 - DNA, 60 bp, Artificial
  Synthetic oligonucleotide
cataactcgaaacttcagtaaagaaaagctgaagttagtcataattgagacgcctaagtc

SEQ ID NO: 123309 - DNA, 60 bp, Artificial
  Synthetic oligonucleotide
cagtaaagaaaagctgaagttagtcataattgagacgcctaagtctgtcgatcctgctga

SEQ ID NO: 123310 - DNA, 60 bp, Artificial
  Synthetic oligonucleotide
atcaagactcgtatgctaaatgagagcccgtcgtctgttatggtcgctggccaaggcatg

SEQ ID NO: 123311 - DNA, 60 bp, Artificial
  Synthetic oligonucleotide
cgtatgctaaatgagagcccgtcgtctgttatggtcgctggccaaggcatgtacatcaag

SEQ ID NO: 123312 - DNA, 60 bp, Artificial
  Synthetic oligonucleotide
gcgtgctggtgacatcgatttaaagatggcgccatgcgctaatcttgcggaagcaacctc

SEQ ID NO: 123313 - DNA, 60 bp, Artificial
  Synthetic oligonucleotide
ttgcggaagcaacctctgagtgtaccaaatttgttcgtgctttctgcaaagcgtataaca

SEQ ID NO: 123314 - DNA, 60 bp, Artificial
  Synthetic oligonucleotide
gaagaactttgctactctcagtcctgacgtgtacatcatacaatgagtggtatcattgtt

SEQ ID NO: 123315 - DNA, 60 bp, Artificial
  Synthetic oligonucleotide
gactacacaccaaagtatcatacccttataaaggagggaaagattgaaaagggatcaccc

SEQ ID NO: 123316 - DNA, 60 bp, Artificial
  Synthetic oligonucleotide
attaatgcagactacacaccaaagtatcatacccttataaaggagggaaagattgaaaag

SEQ ID NO: 123317 - DNA, 52 bp, Artificial
  Synthetic oligonucleotide
ttacgaattgtacctcggaaatctacacttttacgaattcacgtccatagtt

SEQ ID NO: 123318 - DNA, 60 bp, Artificial
  Synthetic oligonucleotide
gcattgttggtaatgacattattcacatcaacgattacgcgttacgaattgtacctcgga

SEQ ID NO: 123319 - DNA, 60 bp, Artificial
  Synthetic oligonucleotide
acatctcaagcattgttggtaatgacattattcacatcaacgattacgcgttacgaattg

SEQ ID NO: 123320 - DNA, 60 bp, Artificial
  Synthetic oligonucleotide
ccatggtgatacgccaatcgcgatgagtcagactaccgacatctcaagcattgttggtaa

SEQ ID NO: 123321 - DNA, 60 bp, Artificial
  Synthetic oligonucleotide
tatcattgttttccatggtgatacgccaatcgcgatgagtcagactaccgacatctcaag

SEQ ID NO: 123322 - DNA, 60 bp, Artificial
  Synthetic oligonucleotide
gctactctcagtcctgacgtgtacatcatacaatgagtggtatcattgttttccatggtg

SEQ ID NO: 123323 - DNA, 60 bp, Artificial
  Synthetic oligonucleotide
gaaaagggatcaccctttgatgcgatacgaaacatcaacgatatgtcatggtgtgagcta

SEQ ID NO: 123324 - DNA, 60 bp, Artificial
  Synthetic oligonucleotide
gattgaaaagggatcaccctttgatgcgatacgaaacatcaacgatatgtcatggtgtga

SEQ ID NO: 123325 - DNA, 60 bp, Artificial
  Synthetic oligonucleotide
gcgtataacagtgtcgttaacagtaaccttgcaatcaagtttccatcagagcttgattag

SEQ ID NO: 123326 - DNA, 60 bp, Artificial
  Synthetic oligonucleotide
cggaagcaacctctgagtgtaccaaatttgttcgtgctttctgcaaagcgtataacagtg

SEQ ID NO: 123327 - DNA, 60 bp, Artificial
  Synthetic oligonucleotide
gcttgattaggttggcacttccaatgtagaaccgcgtaagcgtttctggataaatacgag

SEQ ID NO: 123328 - DNA, 60 bp, Artificial
  Synthetic oligonucleotide
gtcgttaacagtaaccttgcaatcaagtttccatcagagcttgattaggttggcacttcc

SEQ ID NO: 123329 - DNA, 60 bp, Artificial
  Synthetic oligonucleotide
ggttggcacttccaatgtagaaccgcgtaagcgtttctggataaatacgagagaacccat

SEQ ID NO: 123330 - DNA, 60 bp, Artificial
  Synthetic oligonucleotide
aaaacgctagatgagtgggagagcggaaaaaatccatatgaaccgatagaagtgactgca

SEQ ID NO: 123331 - DNA, 60 bp, Artificial
  Synthetic oligonucleotide
gacagttctaaaccctacttctgtgagctcgattgtgtccttattcgcgtgactccttta

SEQ ID NO: 123332 - DNA, 60 bp, Artificial
  Synthetic oligonucleotide
agacgtacttaccacaaggagttggttgcgctaactcgcggatatgtcaggccgatctcg

SEQ ID NO: 123333 - DNA, 60 bp, Artificial
  Synthetic oligonucleotide
cgttgacattccactagaccaccctcagcgtgttagtttgccgcacattgcaacggatcc

SEQ ID NO: 123334 - DNA, 60 bp, Artificial
  Synthetic oligonucleotide
ttgctgttggtggtggtattatcctggtcatctttctgctcgggctgttctactgctgtt

SEQ ID NO: 123335 - DNA, 60 bp, Artificial
  Synthetic oligonucleotide
ggtggtggtattatcctggtcatctttctgctcgggctgttctactgctgttacctcaag

SEQ ID NO: 123336 - DNA, 60 bp, Artificial
  Synthetic oligonucleotide
aggtggagatttacaggctacgtctatcttgactacttattggcctcatcttgctgttgg

SEQ ID NO: 123337 - DNA, 60 bp, Artificial
  Synthetic oligonucleotide
ggctacgtctatcttgactacttattggcctcatcttgctgttggtggtggtattatcct

SEQ ID NO: 123338 - DNA, 60 bp, Artificial
  Synthetic oligonucleotide
ctggtttccgtgtttgggagtgtccattgtcaatcatctaagaataaggcaggtggagat

SEQ ID NO: 123339 - DNA, 60 bp, Artificial
  Synthetic oligonucleotide
gggagtgtccattgtcaatcatctaagaataaggcaggtggagatttacaggctacgtct

SEQ ID NO: 123340 - DNA, 60 bp, Artificial
  Synthetic oligonucleotide
agaccaccctcagcgtgttagtttgccgcacattgcaacggatccagtggtttggcacgt

SEQ ID NO: 123341 - DNA, 60 bp, Artificial
  Synthetic oligonucleotide
caacggatccagtggtttggcacgtgcagctcgttggtcgtcgtgcggctgacagttcta

SEQ ID NO: 123342 - DNA, 60 bp, Artificial
  Synthetic oligonucleotide
atgaaccctagattttgtcgcgatagtgcaggtttggcgtcttactcatctcagacactg

SEQ ID NO: 123343 - DNA, 60 bp, Artificial
  Synthetic oligonucleotide
actctgacacttaatatgaaccctagattttgtcgcgatagtgcaggtttggcgtcttac

SEQ ID NO: 123344 - DNA, 60 bp, Artificial
  Synthetic oligonucleotide
cccagactgtgccgaagcaagtactgtctccattggcaattaacgatggaactctgacac

SEQ ID NO: 123345 - DNA, 60 bp, Artificial
  Synthetic oligonucleotide
cgcgtccttgaggactgatgttaccaacctgaagtctagtttatcaacgttggccgccca

SEQ ID NO: 123346 - DNA, 60 bp, Artificial
  Synthetic oligonucleotide
attcccaacactaacttggccacaaccatcattgttcactcccatgggagcgtgtctacg

SEQ ID NO: 123347 - DNA, 60 bp, Artificial
  Synthetic oligonucleotide
catctagtattcccaacactaacttggccacaaccatcattgttcactcccatgggagcg

SEQ ID NO: 123348 - DNA, 60 bp, Artificial
  Synthetic oligonucleotide
ctcatctcagacactgctccaaacattctcagcgaacctggcatctagtattcccaacac

SEQ ID NO: 123349 - DNA, 60 bp, Artificial
  Synthetic oligonucleotide
ggcgtcttactcatctcagacactgctccaaacattctcagcgaacctggcatctagtat

SEQ ID NO: 123350 - DNA, 60 bp, Artificial
  Synthetic oligonucleotide
acgctgcgaaaactcagctgactctcgatatcagacagttccagccaacgccgactgact

SEQ ID NO: 123351 - DNA, 60 bp, Artificial
  Synthetic oligonucleotide
atgcttttgaacctaacgctgcgaaaactcagctgactctcgatatcagacagttccagc

SEQ ID NO: 123352 - DNA, 60 bp, Artificial
  Synthetic oligonucleotide
ctctgacactcttagtacattgtcttcaaccatcgcctcccacactgacaagctttccga

SEQ ID NO: 123353 - DNA, 60 bp, Artificial
  Synthetic oligonucleotide
tttccaggctagcgattttctgggttacgcatgggctagtgttgctggtatctgggctcc

SEQ ID NO: 123354 - DNA, 60 bp, Artificial
  Synthetic oligonucleotide
ccaggctagcgattttctgggttacgcatgggctagtgttgctggtatctgggctccaat

SEQ ID NO: 123355 - DNA, 60 bp, Artificial
  Synthetic oligonucleotide
cagttccagccaacgccgactgactggtccgtcctactggctcaaccagctttccaggct

SEQ ID NO: 123356 - DNA, 60 bp, Artificial
  Synthetic oligonucleotide
gccgactgactggtccgtcctactggctcaaccagctttccaggctagcgattttctggg

SEQ ID NO: 123357 - DNA, 60 bp, Artificial
  Synthetic oligonucleotide
tctgggctccaattactttagtaggccgtgtcgattccaatcctaaagtaatcactcttc

SEQ ID NO: 123358 - DNA, 60 bp, Artificial
  Synthetic oligonucleotide
gggctccaattactttagtaggccgtgtcgattccaatcctaaagtaatcactcttcagc

SEQ ID NO: 123359 - DNA, 60 bp, Artificial
  Synthetic oligonucleotide
ccagtggtttggcacgtgcagctcgttggtcgtcgtgcggctgacagttctaaaccctac

SEQ ID NO: 123360 - DNA, 60 bp, Artificial
  Synthetic oligonucleotide
tctcgagtgtcgctatgagtggtgattgtgccggtctggtttccgtgtttgggagtgtcc

SEQ ID NO: 123361 - DNA, 60 bp, Artificial
  Synthetic oligonucleotide
cagttctaaaccctacttctgtgagctcgattgtgtccttattcgcgtgactcctttaac

SEQ ID NO: 123362 - DNA, 60 bp, Artificial
  Synthetic oligonucleotide
gactcctttaacaaatcacaatagatctcatgtcatcattcactattcaccattcgctca

SEQ ID NO: 123363 - DNA, 59 bp, Artificial
  Synthetic oligonucleotide
ttcgcgatgagttagcatctttgcgcacgaaagtcactgatgtgtcttcgcagctggca

SEQ ID NO: 123364 - DNA, 60 bp, Artificial
  Synthetic oligonucleotide
acacagctatctacgcaatgtagcgctctttcggccgaattagcgtcctactctgacact

SEQ ID NO: 123365 - DNA, 51 bp, Artificial
  Synthetic oligonucleotide
gctctttcggccgaattagcgtcctactctgacactcttagtacattgtct

SEQ ID NO: 123366 - DNA, 60 bp, Artificial
  Synthetic oligonucleotide
gcttattttttttgttctcgagtgtcgctatgagtggtgattgtgccggtctggtttccg

SEQ ID NO: 123367 - DNA, 60 bp, Artificial
  Synthetic oligonucleotide
gtacattgtcttcaaccatcgcctcccacactgacaagctttccgagctttccacttcac

SEQ ID NO: 123368 - DNA, 60 bp, Artificial
  Synthetic oligonucleotide
tcatcagactacgcgtccttgaggactgatgttaccaacctgaagtctagtttatcaacg

SEQ ID NO: 123369 - DNA, 60 bp, Artificial
  Synthetic oligonucleotide
gagatagaacattccttgaccaggcatggcccgcaattactagttttatcgaaactcacg

SEQ ID NO: 123370 - DNA, 60 bp, Artificial
  Synthetic oligonucleotide
ccttgaccaggcatggcccgcaattactagttttatcgaaactcacgacctagcaactaa

SEQ ID NO: 123371 - DNA, 60 bp, Artificial
  Synthetic oligonucleotide
acgaaacgatacgaatccagcactggcagaaaagatgctaatttagttacacacgacgca

SEQ ID NO: 123372 - DNA, 60 bp, Artificial
  Synthetic oligonucleotide
cgaatccagcactggcagaaaagatgctaatttagttacacacgacgcatcaagtttacc

SEQ ID NO: 123373 - DNA, 60 bp, Artificial
  Synthetic oligonucleotide
ttatgaattcgacgttaattactaatgcggttaatttgattagacaggatacgaaacgat

SEQ ID NO: 123374 - DNA, 60 bp, Artificial
  Synthetic oligonucleotide
ttccagattctgaaattgatgggaattacgtcggtgtaacgactcatggattaagtttat

SEQ ID NO: 123375 - DNA, 60 bp, Artificial
  Synthetic oligonucleotide
gaaattgatgggaattacgtcggtgtaacgactcatggattaagtttatttgctaacgcg

SEQ ID NO: 123376 - DNA, 58 bp, Artificial
  Synthetic oligonucleotide
ttaagtttatttgctaacgcgaaaaatgacgcggaagaaatcgaacgtgttcaaattg

SEQ ID NO: 123377 - DNA, 60 bp, Artificial
  Synthetic oligonucleotide
ttgcaaagaattcccagcgcatgtgggtactatactagaggaagttaagtattgcttaat

SEQ ID NO: 123378 - DNA, 60 bp, Artificial
  Synthetic oligonucleotide
aaacattattaaagcgccaaaagagcattctgtgcaatcgaccgttaatatatatgttaa

SEQ ID NO: 123379 - DNA, 60 bp, Artificial
  Synthetic oligonucleotide
ttacaatcagtcgacacgtcaacactcccgtatattagccaaatcaaagaagcacttcgc

SEQ ID NO: 123380 - DNA, 60 bp, Artificial
  Synthetic oligonucleotide
agtttaattccttaacagggacattccaatgaattttgtgtttcgtgcagcggtggcagg

SEQ ID NO: 123381 - DNA, 60 bp, Artificial
  Synthetic oligonucleotide
agcacttcgctcctttttgcataatgatattcagtatgtatttactcgaattccagattc

SEQ ID NO: 123382 - DNA, 60 bp, Artificial
  Synthetic oligonucleotide
gaattcccagcgcatgtgggtactatactagaggaagttaagtattgcttaatcttagga

SEQ ID NO: 123383 - DNA, 60 bp, Artificial
  Synthetic oligonucleotide
attgcttaatcttaggaaaattaagactagcgggtggttatgattacaattgtccttcca

SEQ ID NO: 123384 - DNA, 60 bp, Artificial
  Synthetic oligonucleotide
caatcagtcgacacgtcaacactcccgtatattagccaaatcaaagaagcacttcgctcc

SEQ ID NO: 123385 - DNA, 60 bp, Artificial
  Synthetic oligonucleotide
taattactaatgcggttaatttgattagacaggatacgaaacgatacgaatccagcactg

SEQ ID NO: 123386 - DNA, 60 bp, Artificial
  Synthetic oligonucleotide
cctatatcacgatgactagcataagcctgaccattgctccagaccttattcattgtggtg

SEQ ID NO: 123387 - DNA, 60 bp, Artificial
  Synthetic oligonucleotide
aagttttttaaccctatatcacgatgactagcataagcctgaccattgctccagacctta

SEQ ID NO: 123388 - DNA, 60 bp, Artificial
  Synthetic oligonucleotide
ctctcgacgacgtagttagttttattgagaaaggtcctggttatttagctactttacaaa

SEQ ID NO: 123389 - DNA, 60 bp, Artificial
  Synthetic oligonucleotide
actctcgacgacgtagttagttttattgagaaaggtcctggttatttagctactttacaa

SEQ ID NO: 123390 - DNA, 60 bp, Artificial
  Synthetic oligonucleotide
cgctaaactcgaagacggtatagttattaatcgagaattgtatgaaaaagctgcggataa

SEQ ID NO: 123391 - DNA, 60 bp, Artificial
  Synthetic oligonucleotide
gaaactcacgacctagcaactaaagtaaaaacagatgatccagacacctatgtacttaag

SEQ ID NO: 123392 - DNA, 60 bp, Artificial
  Synthetic oligonucleotide
gacaaatcgatcactgttgatacttcagcaggtgaaatgaccttagataaatatcgtgca

SEQ ID NO: 123393 - DNA, 60 bp, Artificial
  Synthetic oligonucleotide
agaaatctgacaaatcgatcactgttgatacttcagcaggtgaaatgaccttagataaat

SEQ ID NO: 123394 - DNA, 55 bp, Artificial
  Synthetic oligonucleotide
aatgtttaacaagttaactcgattttataatgtctctctagctttggtgccgtgt

SEQ ID NO: 123395 - DNA, 60 bp, Artificial
  Synthetic oligonucleotide
ggaaaattaagactagcgggtggttatgattacaattgtccttccagcacaacagacgtt

SEQ ID NO: 123396 - DNA, 60 bp, Artificial
  Synthetic oligonucleotide
ccttattcattgtggtgttcctcagagactatccgatacaataatactaaacgacaagcc

SEQ ID NO: 123397 - DNA, 60 bp, Artificial
  Synthetic oligonucleotide
ccagaccttattcattgtggtgttcctcagagactatccgatacaataatactaaacgac

SEQ ID NO: 123398 - DNA, 60 bp, Artificial
  Synthetic oligonucleotide
gatcggttctatgtgctgatggtgatagccgcttcagatacaaacaatagtagggtttgg

SEQ ID NO: 123399 - DNA, 60 bp, Artificial
  Synthetic oligonucleotide
tgcggtcatggtatgaatggagcgtacgtgagggatataagcctcgagatttagatcgcc

SEQ ID NO: 123400 - DNA, 60 bp, Artificial
  Synthetic oligonucleotide
ggcgcgttaattgcggctgagtgtaaattaggtgacgtttattataaattgcggtcatgg

SEQ ID NO: 123401 - DNA, 60 bp, Artificial
  Synthetic oligonucleotide
gatacaaacaatagtagggtttggtggtccaatccatacccctgcttgcgaggcgcgtta

SEQ ID NO: 123402 - DNA, 60 bp, Artificial
  Synthetic oligonucleotide
agggtttggtggtccaatccatacccctgcttgcgaggcgcgttaattgcggctgagtgt

SEQ ID NO: 123403 - DNA, 60 bp, Artificial
  Synthetic oligonucleotide
agcgtaatgatcaggatcggttctatgtgctgatggtgatagccgcttcagatacaaaca

SEQ ID NO: 123404 - DNA, 60 bp, Artificial
  Synthetic oligonucleotide
cgatccctatgtaaagcggacgcatagacctctgaaagcggattgcatcgagttaatgcg

SEQ ID NO: 123405 - DNA, 60 bp, Artificial
  Synthetic oligonucleotide
ttagatcgccagtatgagaaatacatcgtgggacgtgtgaacctatttgatttggaagcg

SEQ ID NO: 123406 - DNA, 60 bp, Artificial
  Synthetic oligonucleotide
ccagtatgagaaatacatcgtgggacgtgtgaacctatttgatttggaagcggaacctgg

SEQ ID NO: 123407 - DNA, 60 bp, Artificial
  Synthetic oligonucleotide
gaagtggagggcacgctacatgacgtttcgcaggttatggttcatctattcgacaggttc

SEQ ID NO: 123408 - DNA, 60 bp, Artificial
  Synthetic oligonucleotide
cccatccttctaaatgtttgatcgcgcttgaggtttcagacgcgttgacgagtcccgaac

SEQ ID NO: 123409 - DNA, 60 bp, Artificial
  Synthetic oligonucleotide
attcgacaggttctttgagaagaggcgtttcctgagaacggttgatgagtctagatggat

SEQ ID NO: 123410 - DNA, 60 bp, Artificial
  Synthetic oligonucleotide
gagagtatcactgcaaggaacgagtttgagcattaagcaaactccctcaagcatacacca

SEQ ID NO: 123411 - DNA, 60 bp, Artificial
  Synthetic oligonucleotide
gttaatgcgttatcatatgtctcagtacatggatttgagagtatcactgcaaggaacgag

SEQ ID NO: 123412 - DNA, 60 bp, Artificial
  Synthetic oligonucleotide
gatcctaatacagactccgggctacgtcttcggtaacgacgaactacttacgaaactctt

SEQ ID NO: 123413 - DNA, 60 bp, Artificial
  Synthetic oligonucleotide
gcaaggaacgagtttgagcattaagcaaactccctcaagcatacaccaatcgcttgcccg

SEQ ID NO: 123414 - DNA, 60 bp, Artificial
  Synthetic oligonucleotide
ctagatggattctacatttgatccgatccgcgagcggcgctagaaggctcgaggtgttat

SEQ ID NO: 123415 - DNA, 60 bp, Artificial
  Synthetic oligonucleotide
cagcaaaattgcatgtcgattcgaggaaagcggataccacatcatacaatatactcgctc

SEQ ID NO: 123416 - DNA, 60 bp, Artificial
  Synthetic oligonucleotide
tcgattcgaggaaagcggataccacatcatacaatatactcgctctcgagacgaaggaag

SEQ ID NO: 123417 - DNA, 60 bp, Artificial
  Synthetic oligonucleotide
taaggttcagccaataagagatgcaatcgattacaagccggttgagaatgatggggaggt

SEQ ID NO: 123418 - DNA, 61 bp, Artificial
  Synthetic oligonucleotide
cctcgtattttagatatgtcgattgcatgttatgatatgaggaaaagaatgatgaagagag

SEQ ID NO: 123419 - DNA, 60 bp, Artificial
  Synthetic oligonucleotide
atgaggaaaagaatgatgaagagagatggcgtagattttgtttcagatactaaatggcta

SEQ ID NO: 123420 - DNA, 60 bp, Artificial
  Synthetic oligonucleotide
gatgaagagagatggcgtagattttgtttcagatactaaatggctagagtggatgattca

SEQ ID NO: 123421 - DNA, 60 bp, Artificial
  Synthetic oligonucleotide
gaaggtagatatgaaagaggatcatagtacggtgcaatatgacatgttttcagcaaaatt

SEQ ID NO: 123422 - DNA, 60 bp, Artificial
  Synthetic oligonucleotide
ttcctttatcgagcaaccatttaaaagggattgtacaaatttccgtacgacctgatcgta

SEQ ID NO: 123423 - DNA, 60 bp, Artificial
  Synthetic oligonucleotide
tgtcttctatatgtggtggcttttcagaagcgatcctgtggtatttaccaattacccatc

SEQ ID NO: 123424 - DNA, 60 bp, Artificial
  Synthetic oligonucleotide
cgtgaccaagttcgacgatacaagatatagtgatatgattcaaacgataataaatgaagg

SEQ ID NO: 123425 - DNA, 60 bp, Artificial
  Synthetic oligonucleotide
cgagggcaaccagtgcgatttacatccagatgagggtgagatcgtgaccaagttcgacga

SEQ ID NO: 123426 - DNA, 60 bp, Artificial
  Synthetic oligonucleotide
aggatgaaggcaacccattactatacgatttagagaaggacataaagttggatcgcgttt

SEQ ID NO: 123427 - DNA, 60 bp, Artificial
  Synthetic oligonucleotide
cgttcctatgtttaacgctaggataaagccgtgtgaagtagaggtgggtgagcgtaagaa

SEQ ID NO: 123428 - DNA, 60 bp, Artificial
  Synthetic oligonucleotide
gatcgcgtttcgcgagtagtatttccaccatattttgatcaatggacctacgttcctatg

SEQ ID NO: 123429 - DNA, 60 bp, Artificial
  Synthetic oligonucleotide
agcgtaagaatatcgatccctatgtaaagcggacgcatagacctctgaaagcggattgca

SEQ ID NO: 123430 - DNA, 60 bp, Artificial
  Synthetic oligonucleotide
cgctaggataaagccgtgtgaagtagaggtgggtgagcgtaagaatatcgatccctatgt

SEQ ID NO: 123431 - DNA, 60 bp, Artificial
  Synthetic oligonucleotide
ggaagagcttgtgatacccgtgataaccgaacgattcgataaaagattggtggggcgtta

SEQ ID NO: 123432 - DNA, 57 bp, Artificial
  Synthetic oligonucleotide
gaggtgttatcgagatttttccctgcgtttagtgatggattacgcattcgtgaattt

SEQ ID NO: 123433 - DNA, 60 bp, Artificial
  Synthetic oligonucleotide
ctgcctttcttatttctaactggcgacaacatagcttatgaacataggcagtgggcggtc

SEQ ID NO: 123434 - DNA, 60 bp, Artificial
  Synthetic oligonucleotide
ggcccaattatcaattactatctagacacaacgatttcgaatggtggcattcagacaagc

SEQ ID NO: 123435 - DNA, 60 bp, Artificial
  Synthetic oligonucleotide
cattcagacaagcatcgtctctacgaaagcgttgctttacgaaacatatctgtcttctat

SEQ ID NO: 123436 - DNA, 60 bp, Artificial
  Synthetic oligonucleotide
ggcggtcccagttattttctatgcagataaaatcaggatcatcccggcggaagtaggcgc

SEQ ID NO: 123437 - DNA, 60 bp, Artificial
  Synthetic oligonucleotide
cttcctacgatacccgaaatgagaatctcagtgaagacgtacgtgcatgtataggcccaa

SEQ ID NO: 123438 - DNA, 60 bp, Artificial
  Synthetic oligonucleotide
atactcgctctcgagacgaaggaaggagcacagtgccatcatgtgcataccaacatttgg

SEQ ID NO: 123439 - DNA, 60 bp, Artificial
  Synthetic oligonucleotide
gcatacaccaatcgcttgcccgagatgcatcttatgcagaaattctcagccgacgtagag

SEQ ID NO: 123440 - DNA, 60 bp, Artificial
  Synthetic oligonucleotide
ccattggtaggaaaatggtcaacctcgaagaagaaccgaaagatgagagagatttatccc

SEQ ID NO: 123441 - DNA, 60 bp, Artificial
  Synthetic oligonucleotide
gagcgcactcacattaagtctcttgaactatgcaatctattatccgccattggtaggaaa

SEQ ID NO: 123442 - DNA, 60 bp, Artificial
  Synthetic oligonucleotide
gagtggccacgatgttacgcatatcccagataggcgaatgtttgacattaaggttcagcc

SEQ ID NO: 123443 - DNA, 60 bp, Artificial
  Synthetic oligonucleotide
cggaggacccctgatgaggactttcagattggtaatcctcagtttctaacgctaaggcgc

SEQ ID NO: 123444 - DNA, 55 bp, Artificial
  Synthetic oligonucleotide
cacttatttcacgccgtacaagaatcatgctatatcttcaaacccacctacaaat

SEQ ID NO: 123445 - DNA, 60 bp, Artificial
  Synthetic oligonucleotide
tggggcgttatgattatgtgattgagttggcgaggccagagggcgatgagtggagtggcc

SEQ ID NO: 123446 - DNA, 60 bp, Artificial
  Synthetic oligonucleotide
ctgcgaaaggattggtccaggttttagtcaatggtgttgttccggatataatacgtaatg

SEQ ID NO: 123447 - DNA, 60 bp, Artificial
  Synthetic oligonucleotide
ggcgcaatcagcagatatttctaggtgatgacgcgtataagaaaactgcgaaaggattgg

SEQ ID NO: 123448 - DNA, 60 bp, Artificial
  Synthetic oligonucleotide
catgtcaaaatgtttcaagcattgtcgccacagtggacgtgctcgcatctgcggcgtaat

SEQ ID NO: 123449 - DNA, 60 bp, Artificial
  Synthetic oligonucleotide
ctgaaaaaattcaaacatgtggtagggaattattggataaatacaaaaatagtgatatgg

SEQ ID NO: 123450 - DNA, 60 bp, Artificial
  Synthetic oligonucleotide
tattggataaatacaaaaatagtgatatggtaaccaaaattgataacatgataaaatttg

SEQ ID NO: 123451 - DNA, 60 bp, Artificial
  Synthetic oligonucleotide
atcgggagacattttaccacattgatgtccgaacctcggagatggtaggctgcagtacag

SEQ ID NO: 123452 - DNA, 60 bp, Artificial
  Synthetic oligonucleotide
cgggagacattttaccacattgatgtccgaacctcggagatggtaggctgcagtacagtc

SEQ ID NO: 123453 - DNA, 60 bp, Artificial
  Synthetic oligonucleotide
gagcacgtagatgcatcccttccagtgcagaagattaaattaactgggactgaacatcta

SEQ ID NO: 123454 - DNA, 60 bp, Artificial
  Synthetic oligonucleotide
catcccttccagtgcagaagattaaattaactgggactgaacatctaggtcgagcaagtg

SEQ ID NO: 123455 - DNA, 60 bp, Artificial
  Synthetic oligonucleotide
catcccttccagtgcagaagattaaattaactgggactgaacatctaggccgagcaagtg

SEQ ID NO: 123456 - DNA, 60 bp, Artificial
  Synthetic oligonucleotide
gccggtgtgtgatgacattagcttatgcagagaaaatcaaggttgtgactttcaatgcac

SEQ ID NO: 123457 - DNA, 60 bp, Artificial
  Synthetic oligonucleotide
ccggtgtgtgatgacattagcttatgcagagaaaatcaaggttgtgactttcaatgcacc

SEQ ID NO: 123458 - DNA, 60 bp, Artificial
  Synthetic oligonucleotide
cagttatgaatatcgctcaggcaatggctaacatgtgggataactaaattgtaatcatca

SEQ ID NO: 123459 - DNA, 60 bp, Artificial
  Synthetic oligonucleotide
cagttatgaatatcgctcaggcaatggctaatatgtgggataactagacagtgactatca

SEQ ID NO: 123460 - DNA, 60 bp, Artificial
  Synthetic oligonucleotide
ggatcttgtagcttcacaggttttagtggcccagtgttccaagtcatgttcttcccaatg

SEQ ID NO: 123461 - DNA, 58 bp, Artificial
  Synthetic oligonucleotide
agtgatatggtaaccaaaattgataacatgattaaattcgatccaacacgtattgtgt

SEQ ID NO: 123462 - DNA, 60 bp, Artificial
  Synthetic oligonucleotide
cacaggttttagtggcccagtgttccaagtcatgttcttcccgatgcaaatgttaccata

SEQ ID NO: 123463 - DNA, 60 bp, Artificial
  Synthetic oligonucleotide
gatcttgtagcttcacaggttttagtggcccagtgttccaagtcatgttcttcccaatgc

SEQ ID NO: 123464 - DNA, 60 bp, Artificial
  Synthetic oligonucleotide
taataaatcgatatgcccaaatggctgtgcagcaatatctgcgagttggctatctcgagg

SEQ ID NO: 123465 - DNA, 60 bp, Artificial
  Synthetic oligonucleotide
gtggcccagtgttccaagtcatgttcttcccgatgcaaatgttaccatacatggaaaatg

SEQ ID NO: 123466 - DNA, 60 bp, Artificial
  Synthetic oligonucleotide
ctcgaggaaagacgttatgtcacgcaactatttggggagtgcccagcgggtgaatttccg

SEQ ID NO: 123467 - DNA, 60 bp, Artificial
  Synthetic oligonucleotide
tatctcgaggaaagacgttatgtcacgcaactatttggggagtgcccagcgggtgaattt

SEQ ID NO: 123468 - DNA, 60 bp, Artificial
  Synthetic oligonucleotide
cacgcaactatttggggagtgcccagcgggtgaatttccgatgcaccatatgatgctcag

SEQ ID NO: 123469 - DNA, 60 bp, Artificial
  Synthetic oligonucleotide
acgttatgtcacgcaactatttggggagtgcccagcgggtgaatttccgatgcaccatat

SEQ ID NO: 123470 - DNA, 60 bp, Artificial
  Synthetic oligonucleotide
acgtactaacaggtaaagatacctttggcgttctagaggcggagtagagtgtttcgcgtt

SEQ ID NO: 123471 - DNA, 60 bp, Artificial
  Synthetic oligonucleotide
gaggcggagtagagtgtttcgcgtttgcgggctatcggttaacatcttctggccagattg

SEQ ID NO: 123472 - DNA, 60 bp, Artificial
  Synthetic oligonucleotide
tgcctaaagcagcagcacgaccggtcgaagagttcctttcttccgtgttcacatcgttat

SEQ ID NO: 123473 - DNA, 60 bp, Artificial
  Synthetic oligonucleotide
gcagcacgaccggtcgaagagttcctttcttccgtgttcacatcgttattcgaagcttgg

SEQ ID NO: 123474 - DNA, 60 bp, Artificial
  Synthetic oligonucleotide
ctcaagtttttcatcacctgacattgttagtgcaagcataaccgcacccatgcctaaagc

SEQ ID NO: 123475 - DNA, 60 bp, Artificial
  Synthetic oligonucleotide
gcttggttcgtacgcgtgttgccactcattaaacaaggcaaaccagtatacatgatgccg

SEQ ID NO: 123476 - DNA, 60 bp, Artificial
  Synthetic oligonucleotide
gtatgatctcagaagaggaactgatgccaactgatatggaagtggcgacaccgaaggtgt

SEQ ID NO: 123477 - DNA, 60 bp, Artificial
  Synthetic oligonucleotide
gagcagagaatgtcacgcaagcctgtcacacgcactactaagccatccttctcaagtttt

SEQ ID NO: 123478 - DNA, 60 bp, Artificial
  Synthetic oligonucleotide
ttgattttagtagagatggaatcaatcacgagggcgcttcagccaggcgagcttgaggat

SEQ ID NO: 123479 - DNA, 60 bp, Artificial
  Synthetic oligonucleotide
gtagagatggaatcaatcacgagggcgcttcagccaggcgagcttgaggatcgaaaagag

SEQ ID NO: 123480 - DNA, 60 bp, Artificial
  Synthetic oligonucleotide
cccaagacgacgaggcagagaagaaagacgtcgaaatacgtatgaattggagtgaggaga

SEQ ID NO: 123481 - DNA, 60 bp, Artificial
  Synthetic oligonucleotide
agtgaggagattgttgaactaccgaggcagcaagaagaaaacgttttagtgctgagcaaa

SEQ ID NO: 123482 - DNA, 60 bp, Artificial
  Synthetic oligonucleotide
acatcgttattcgaagcttggttcgtacgcgtgttgccactcattaaacaaggcaaacca

SEQ ID NO: 123483 - DNA, 60 bp, Artificial
  Synthetic oligonucleotide
cacctgacattgttagtgcaagcataaccgcacccatgcctaaagcagcagcacgaccgg

SEQ ID NO: 123484 - DNA, 60 bp, Artificial
  Synthetic oligonucleotide
cacaaattacagatactaaaacacgttatttcaactcagtgagtgggaagttgattttag

SEQ ID NO: 123485 - DNA, 60 bp, Artificial
  Synthetic oligonucleotide
gagcccgttattgagagcgagggagaggtgaacgatactccccaagacgacgaggcagag

SEQ ID NO: 123486 - DNA, 60 bp, Artificial
  Synthetic oligonucleotide
acttacagttgagcccgttattgagagcgagggagaggtgaacgatactccccaagacga

SEQ ID NO: 123487 - DNA, 60 bp, Artificial
  Synthetic oligonucleotide
ctaaaacacgttatttcaactcagtgagtgggaagttgattttagtagagatggaatcaa

SEQ ID NO: 123488 - DNA, 60 bp, Artificial
  Synthetic oligonucleotide
ggagattgttgaactaccgaggcagcaagaagaaaacgttttagtgctgagcaaaccaag

SEQ ID NO: 123489 - DNA, 60 bp, Artificial
  Synthetic oligonucleotide
gtttcgcgtttgcgggctatcggttaacatcttctggccagattggaaggggtggtgaag

SEQ ID NO: 123490 - DNA, 60 bp, Artificial
  Synthetic oligonucleotide
cgacgggcataggttcattacaaactataatgcaacgagcagacttaatagcgcaatgac

SEQ ID NO: 123491 - DNA, 60 bp, Artificial
  Synthetic oligonucleotide
gcaaccagcacgcccatcaactcgagcaggggtacgccgacgggcataggttcattacaa

SEQ ID NO: 123492 - DNA, 60 bp, Artificial
  Synthetic oligonucleotide
acaccacaccaagtcaccaccatacctgagggatactctttcggagtagtgaaagaaaag

SEQ ID NO: 123493 - DNA, 60 bp, Artificial
  Synthetic oligonucleotide
aagtttactactaatacaccacaccaagtcaccaccatacctgagggatactctttcgga

SEQ ID NO: 123494 - DNA, 60 bp, Artificial
  Synthetic oligonucleotide
gcttgaggatcgaaaagagttaattagacagactctcgagacagtatgtgcgggtaacaa

SEQ ID NO: 123495 - DNA, 60 bp, Artificial
  Synthetic oligonucleotide
gctgagcaaaccaagtatgatctcagaagaggaactgatgccaactgatatggaagtggc

SEQ ID NO: 123496 - DNA, 60 bp, Artificial
  Synthetic oligonucleotide
cgggtaacaatatatacgtactaacaggtaaagatacctttggcgttctagaggcggagt

SEQ ID NO: 123497 - DNA, 60 bp, Artificial
  Synthetic oligonucleotide
gaccaactgaaggatttatatctctgtcgaccgccacctacacggtagcttcttactttg

SEQ ID NO: 123498 - DNA, 60 bp, Artificial
  Synthetic oligonucleotide
atttatatctctgtcgaccgccacctacacggtagcttcttactttgaacggggcatcgc

SEQ ID NO: 123499 - DNA, 60 bp, Artificial
  Synthetic oligonucleotide
ccgtcttggacaacatcattgataagaccgatcaactgaatacaaccgataccgtcgttg

SEQ ID NO: 123500 - DNA, 60 bp, Artificial
  Synthetic oligonucleotide
ggacaacatcattgataagaccgatcaactgaatacaaccgataccgtcgttgagctacc

SEQ ID NO: 123501 - DNA, 60 bp, Artificial
  Synthetic oligonucleotide
accgtcgttgagctaccatccattccgccagaggactcgtcaattgaagtggcgacgccg

SEQ ID NO: 123502 - DNA, 60 bp, Artificial
  Synthetic oligonucleotide
accatccattccgccagaggactcgtcaattgaagtggcgacgccgtcgcacgagacgtt

SEQ ID NO: 123503 - DNA, 60 bp, Artificial
  Synthetic oligonucleotide
gcgacgccgtcgcacgagacgttctttgatatcaacaccatgatatacatcataatgtgc

SEQ ID NO: 123504 - DNA, 60 bp, Artificial
  Synthetic oligonucleotide
tcataatgtgctgtggaagcatcactaatcctatgatccagcgcctaaacggtatcgtca

SEQ ID NO: 123505 - DNA, 60 bp, Artificial
  Synthetic oligonucleotide
ggaagcatcactaatcctatgatccagcgcctaaacggtatcgtcaccagatacaacacg

SEQ ID NO: 123506 - DNA, 60 bp, Artificial
  Synthetic oligonucleotide
aacgttccagtcacttctagttacgcagagtttaaaggcagtaacagtggtctgccacct

SEQ ID NO: 123507 - DNA, 60 bp, Artificial
  Synthetic oligonucleotide
gtcaccagatacaacacgaccaattacgtggtaagttatcctgatactgacgatggaagg

SEQ ID NO: 123508 - DNA, 60 bp, Artificial
  Synthetic oligonucleotide
gacgatggaaggaagaaggcattggctgagcgtgcggttatcactgtggacggtaagtac

SEQ ID NO: 123509 - DNA, 60 bp, Artificial
  Synthetic oligonucleotide
acaccacgaacggttatgacatcttttgcgcattggaatttatgggcgtggatgcttgat

SEQ ID NO: 123510 - DNA, 60 bp, Artificial
  Synthetic oligonucleotide
ataagtgctacaacgatatcaaggctgacacagataagcgaagaattctcaacccagctg

SEQ ID NO: 123511 - DNA, 60 bp, Artificial
  Synthetic oligonucleotide
tggacggtaagtactataagtgctacaacgatatcaaggctgacacagataagcgaagaa

SEQ ID NO: 123512 - DNA, 60 bp, Artificial
  Synthetic oligonucleotide
ctcaacccagctgtcatcaaagaggttatgattagtctgcgtcactattgtggtagtgtc

SEQ ID NO: 123513 - DNA, 60 bp, Artificial
  Synthetic oligonucleotide
aagcgaagaattctcaacccagctgtcatcaaagaggttatgattagtctgcgtcactat

SEQ ID NO: 123514 - DNA, 60 bp, Artificial
  Synthetic oligonucleotide
gttgctttaggtgagacggcttagcattgcctcatgaacttggtcacctgagtggctctc

SEQ ID NO: 123515 - DNA, 60 bp, Artificial
  Synthetic oligonucleotide
cgtctagctccgttcctactccgcatgtttagtttagttgattatgtcgcggcagcagcg

SEQ ID NO: 123516 - DNA, 60 bp, Artificial
  Synthetic oligonucleotide
gtcaacgtctagctccgttcctactccgcatgtttagtttagttgattatgtcgcggcag

SEQ ID NO: 123517 - DNA, 60 bp, Artificial
  Synthetic oligonucleotide
ccgcttttacatctacatctatagttcgtgatgtttcttcgtgtcaacgtctagctccgt

SEQ ID NO: 123518 - DNA, 60 bp, Artificial
  Synthetic oligonucleotide
gggctacaccgcttttacatctacatctatagttcgtgatgtttcttcgtgtcaacgtct

SEQ ID NO: 123519 - DNA, 60 bp, Artificial
  Synthetic oligonucleotide
tactgacgatggaaggaagaaggcattggctgagcgtgcggttatcactgtggacggtaa

SEQ ID NO: 123520 - DNA, 60 bp, Artificial
  Synthetic oligonucleotide
tcctcattagaaaatagcgccaacattttaggtccttttccatcgttttcgggctacacc

SEQ ID NO: 123521 - DNA, 60 bp, Artificial
  Synthetic oligonucleotide
acgttttgaacgctttcagtcatttagttcttaattcctcattagaaaatagcgccaaca

SEQ ID NO: 123522 - DNA, 60 bp, Artificial
  Synthetic oligonucleotide
cgtgttgaacctcgtccaaaacgtagagagataacgcttggaggacagaggcctttgcag

SEQ ID NO: 123523 - DNA, 60 bp, Artificial
  Synthetic oligonucleotide
gtggttgaggaagaacgtgttgaacctcgtccaaaacgtagagagataacgcttggagga

SEQ ID NO: 123524 - DNA, 60 bp, Artificial
  Synthetic oligonucleotide
gccaaatgatgtaagattgaaagaaaagacgcttaaagcagcggtggttgaggaagaacg

SEQ ID NO: 123525 - DNA, 60 bp, Artificial
  Synthetic oligonucleotide
ttgttttgccaaatgatgtaagattgaaagaaaagacgcttaaagcagcggtggttgagg

SEQ ID NO: 123526 - DNA, 60 bp, Artificial
  Synthetic oligonucleotide
gaatcctgcgagtaattcaatcctaccggccaaaatctcgcgaatcatcactgaacaagt

SEQ ID NO: 123527 - DNA, 60 bp, Artificial
  Synthetic oligonucleotide
gcagaataacaccgacattatcatccatcgacttggtttagccaagatgaatcctgcgag

SEQ ID NO: 123528 - DNA, 60 bp, Artificial
  Synthetic oligonucleotide
gaccaaggcagaataacaccgacattatcatccatcgacttggtttagccaagatgaatc

SEQ ID NO: 123529 - DNA, 60 bp, Artificial
  Synthetic oligonucleotide
cactgaacaagtatttggagctggagtgaacgtcgattacattgccagaccaactgaagg

SEQ ID NO: 123530 - DNA, 60 bp, Artificial
  Synthetic oligonucleotide
acggcttagcattgcctcatgaacttggtcacctgagtggctctcaggcctggcactggg

SEQ ID NO: 123531 - DNA, 60 bp, Artificial
  Synthetic oligonucleotide
ctcatattagtcaagtgttttgtcttctgatgggaatatgctatggtggcttagatacca

SEQ ID NO: 123532 - DNA, 60 bp, Artificial
  Synthetic oligonucleotide
gcgtcactattgtggtagtgtcattcattacagagagaggatggaagcgactcatattag

SEQ ID NO: 123533 - DNA, 60 bp, Artificial
  Synthetic oligonucleotide
agcgccaacattttaggtccttttccatcgttttcgggctacaccgcttttacatctaca

SEQ ID NO: 123534 - DNA, 60 bp, Artificial
  Synthetic oligonucleotide
ccaaggacgagcgacaggtcaacttcttaatcgccattatccatgttgctatttcgttgt

SEQ ID NO: 123535 - DNA, 60 bp, Artificial
  Synthetic oligonucleotide
gaatggcgactatgagagtagtaagttcgattggaatgtggtgttcgacattgttttgcc

SEQ ID NO: 123536 - DNA, 60 bp, Artificial
  Synthetic oligonucleotide
gaagatcaggtgtcgatggtttgagtggcccgccgtatctaacgttccagtcacttctag

SEQ ID NO: 123537 - DNA, 60 bp, Artificial
  Synthetic oligonucleotide
gcttgatttagcaattgacaaacgcatgtcgtcagatcgtcatcttagtattatgaagat

SEQ ID NO: 123538 - DNA, 60 bp, Artificial
  Synthetic oligonucleotide
tgttttgtcttctgatgggaatatgctatggtggcttagataccaagaagatcaggtgtc

SEQ ID NO: 123539 - DNA, 60 bp, Artificial
  Synthetic oligonucleotide
ttagataccaagaagatcaggtgtcgatggtttgagtggcccgccgtatctaacgttcca

SEQ ID NO: 123540 - DNA, 60 bp, Artificial
  Synthetic oligonucleotide
ctcccaggaccaagcatgaataccaagggcttcgcgcagaagatccagagaaccttccac

SEQ ID NO: 123541 - DNA, 60 bp, Artificial
  Synthetic oligonucleotide
tccagagaaccttccacttgattcaccagagtcactacacacctccaccaaacaaaatat

SEQ ID NO: 123542 - DNA, 60 bp, Artificial
  Synthetic oligonucleotide
gataaatctcccaggaccaagcatgaataccaagggcttcgcgcagaagatccagagaac

SEQ ID NO: 123543 - DNA, 60 bp, Artificial
  Synthetic oligonucleotide
gactatgaatggcagagggcagcgatcggcgcttcacgatgggttgagttagctgctgag

SEQ ID NO: 123544 - DNA, 60 bp, Artificial
  Synthetic oligonucleotide
taataccaaggacgagcgacaggtcaacttcttaatcgccattatccatgttgctatttc

SEQ ID NO: 123545 - DNA, 60 bp, Artificial
  Synthetic oligonucleotide
ccttccacttgattcaccagagtcactacacacctccaccaaacaaaatatctacccatg

SEQ ID NO: 123546 - DNA, 60 bp, Artificial
  Synthetic oligonucleotide
ctgctaacatacgttgactatgaatggcagagggcagcgatcggcgcttcacgatgggtt

SEQ ID NO: 123547 - DNA, 60 bp, Artificial
  Synthetic oligonucleotide
tagacccgaagatattagttacgttgatgactcgaccattcaggccaaaaccgcattgac

SEQ ID NO: 123548 - DNA, 60 bp, Artificial
  Synthetic oligonucleotide
cttgttcgataatttcatatactgatataaccacaaataatccagttaatactagggtaa

SEQ ID NO: 123549 - DNA, 60 bp, Artificial
  Synthetic oligonucleotide
actagggtaaataatatcggtgcttcaattatagatctaagccagagatattttactcat

SEQ ID NO: 123550 - DNA, 51 bp, Artificial
  Synthetic oligonucleotide
attacttgcttttataattacacctcgtttagcatggtggaatagtcacaa

SEQ ID NO: 123551 - DNA, 60 bp, Artificial
  Synthetic oligonucleotide
aactcgtgctaagtatccattttttgagacaacagttagagggtatttgccttgttcgat

SEQ ID NO: 123552 - DNA, 60 bp, Artificial
  Synthetic oligonucleotide
agacgtgttcaaggcaatattgctaaaaacgcagctgattattttattaatgtcatgtca

SEQ ID NO: 123553 - DNA, 60 bp, Artificial
  Synthetic oligonucleotide
tacgctcgattttcaaaatttaacatagaatgtagttatttagaaactgaatatcttgat

SEQ ID NO: 123554 - DNA, 60 bp, Artificial
  Synthetic oligonucleotide
tggccaaaactaaacaaatgatgctctctcgaaatttattcggacaaagtgagataggat

SEQ ID NO: 123555 - DNA, 56 bp, Artificial
  Synthetic oligonucleotide
cttatttaattaatatgggaatgcagagattgcttgatcatcgtatgaatgctaat

SEQ ID NO: 123556 - DNA, 57 bp, Artificial
  Synthetic oligonucleotide
acaagcaaactatccgagtagggttagtcttcatgtatttgatactttattggatga

SEQ ID NO: 123557 - DNA, 60 bp, Artificial
  Synthetic oligonucleotide
ttctaaatcaactgacgagatcttatctcctgttcgagagcgtttatccaaattttggac

SEQ ID NO: 123558 - DNA, 60 bp, Artificial
  Synthetic oligonucleotide
gggtggcatctttggtaatcctaaccgtgccgaatcgaaattaactgacataaataaaga

SEQ ID NO: 123559 - DNA, 60 bp, Artificial
  Synthetic oligonucleotide
cataaataaagatatttattgttttggcgatgataatgatcaaacaactaagtattttac

SEQ ID NO: 123560 - DNA, 60 bp, Artificial
  Synthetic oligonucleotide
tgatacgaggtttataattcagaatcaatctaatcagctcttaagtcaatatctgtttga

SEQ ID NO: 123561 - DNA, 60 bp, Artificial
  Synthetic oligonucleotide
atctgtttgaaagttatcgtaacattactcctttgaaagatttcgttgtgatgggtggca

SEQ ID NO: 123562 - DNA, 60 bp, Artificial
  Synthetic oligonucleotide
atcgtaacattactcctttgaaagatttcgttgtgatgggtggcatctttggtaatccta

SEQ ID NO: 123563 - DNA, 60 bp, Artificial
  Synthetic oligonucleotide
atgggtggcatctttggtaatcctaaccgtgccgaatcgaaattaactgacataaataaa

SEQ ID NO: 123564 - DNA, 60 bp, Artificial
  Synthetic oligonucleotide
tgatgaagatactttatatttcagtattgatttggatgaacatcctgaagtgtttacgac

SEQ ID NO: 123565 - DNA, 60 bp, Artificial
  Synthetic oligonucleotide
atatttcagtattgatttggatgaacatcctgaagtgtttacgaccgttggcacaaatgg

SEQ ID NO: 123566 - DNA, 60 bp, Artificial
  Synthetic oligonucleotide
tctttgcagacggttttaataaaacaagtccctgggttgttcctcgtaaattagggtaca

SEQ ID NO: 123567 - DNA, 60 bp, Artificial
  Synthetic oligonucleotide
gttaagtactcaaagacatctaattgtgttacgtaaagttgttgttgattataatgttat

SEQ ID NO: 123568 - DNA, 60 bp, Artificial
  Synthetic oligonucleotide
cgagatcttatctcctgttcgagagcgtttatccaaattttggactacgagtaatgccag

SEQ ID NO: 123569 - DNA, 60 bp, Artificial
  Synthetic oligonucleotide
tctgaagctgataattcagttaaagatcaagaaggtataacaaacaaaaatagacccgaa

SEQ ID NO: 123570 - DNA, 60 bp, Artificial
  Synthetic oligonucleotide
ttttcaccgtataactaaggacgaccgcaaccttgcgcgagaaatgaaatcgttcaaatg

SEQ ID NO: 123571 - DNA, 60 bp, Artificial
  Synthetic oligonucleotide
aagtttttttcaccgtataactaaggacgaccgcaaccttgcgcgagaaatgaaatcgtt

SEQ ID NO: 123572 - DNA, 60 bp, Artificial
  Synthetic oligonucleotide
tattaaatggactggagaaacttttaatcctagtattggcgacccctcaaatataggaac

SEQ ID NO: 123573 - DNA, 52 bp, Artificial
  Synthetic oligonucleotide
gctgttagatatactacaacgtttgggatatcagagatatcagatgaaattt

SEQ ID NO: 123574 - DNA, 60 bp, Artificial
  Synthetic oligonucleotide
gacccgaagatattagttacgttgatgactcgaccattcaggccaaaaccgcattgacag

SEQ ID NO: 123575 - DNA, 61 bp, Artificial
  Synthetic oligonucleotide
cctactaaaacatcaactaaagaagcatatgatctaatcttagatactatcggtaacaccg

SEQ ID NO: 123576 - DNA, 60 bp, Artificial
  Synthetic oligonucleotide
ttttactcataaacctactaaaacatcaactaaagaagcatatgatctaatcttagatac

SEQ ID NO: 123577 - DNA, 60 bp, Artificial
  Synthetic oligonucleotide
aggaaggagatgttgatattgattttggcaaaatttttaagtacggaagagaagttgtga

SEQ ID NO: 123578 - DNA, 60 bp, Artificial
  Synthetic oligonucleotide
tgttggagttcataactctgataattataaagatcggaaactatacagtagacttaaaat

SEQ ID NO: 123579 - DNA, 60 bp, Artificial
  Synthetic oligonucleotide
cggaatatttgttcatggagtagttaggtgcgatatggtaacaagcactggttcttatat

SEQ ID NO: 123580 - DNA, 60 bp, Artificial
  Synthetic oligonucleotide
tacttatatcggaatatttgttcatggagtagttaggtgcgatatggtaacaagcactgg

SEQ ID NO: 123581 - DNA, 60 bp, Artificial
  Synthetic oligonucleotide
atattacaagttctcattatgatccagatagtatttccattatgccgtttaacgggtccg

SEQ ID NO: 123582 - DNA, 60 bp, Artificial
  Synthetic oligonucleotide
caagcactggttcttatattacaagttctcattatgatccagatagtatttccattatgc

SEQ ID NO: 123583 - DNA, 60 bp, Artificial
  Synthetic oligonucleotide
acgatacttttttattctttgcagacggttttaataaaacaagtccctgggttgttcctc

SEQ ID NO: 123584 - DNA, 60 bp, Artificial
  Synthetic oligonucleotide
cttgggcccgctgaaatcagactaccaatcttagaaattagacctactgcacagtactcg

SEQ ID NO: 123585 - DNA, 60 bp, Artificial
  Synthetic oligonucleotide
gtacttgggcccgctgaaatcagactaccaatcttagaaattagacctactgcacagtac

SEQ ID NO: 123586 - DNA, 60 bp, Artificial
  Synthetic oligonucleotide
tttaaagttgcgtgcgagttattcttacaaccggtggaagtcagcagatgtctacaaccg

SEQ ID NO: 123587 - DNA, 60 bp, Artificial
  Synthetic oligonucleotide
tgaagtttaaagttgcgtgcgagttattcttacaaccggtggaagtcagcagatgtctac

SEQ ID NO: 123588 - DNA, 60 bp, Artificial
  Synthetic oligonucleotide
aatagaataggtaatttaaatgcacatttcgttcaatttattaatcgtatgttaagtact

SEQ ID NO: 123589 - DNA, 60 bp, Artificial
  Synthetic oligonucleotide
tgtggatactttactagtagttcgaattcccctgatgactattttagtgttgatgaagat

SEQ ID NO: 123590 - DNA, 60 bp, Artificial
  Synthetic oligonucleotide
gaattacctttatttagacagactgaaggattggtttgtggatactttactagtagttcg

SEQ ID NO: 123591 - DNA, 60 bp, Artificial
  Synthetic oligonucleotide
ttgcttttgatgacgaattacctttatttagacagactgaaggattggtttgtggatact

SEQ ID NO: 123592 - DNA, 60 bp, Artificial
  Synthetic oligonucleotide
tgaatttggagatacttatttaaatgagatgttaaaagttatatcacatgttgcttttga

SEQ ID NO: 123593 - DNA, 60 bp, Artificial
  Synthetic oligonucleotide
ggaaatattgatagtgttcaaccagctaattgtgcagtaaataaacagtatgaatttgga

SEQ ID NO: 123594 - DNA, 60 bp, Artificial
  Synthetic oligonucleotide
ctcggatcctagagtttataaaccaactttatattccgtcagttcaacaggaaatattga

SEQ ID NO: 123595 - DNA, 60 bp, Artificial
  Synthetic oligonucleotide
ctattgaaagatattttacgcagatgaatgcttatgatactatgcactcggatcctagag

SEQ ID NO: 123596 - DNA, 60 bp, Artificial
  Synthetic oligonucleotide
ttgtcctattgaaagatattttacgcagatgaatgcttatgatactatgcactcggatcc

SEQ ID NO: 123597 - DNA, 60 bp, Artificial
  Synthetic oligonucleotide
cgatccctccgattatccgttagctgaagatgaatctttcttcaaacaaggtcacaagta

SEQ ID NO: 123598 - DNA, 60 bp, Artificial
  Synthetic oligonucleotide
cgaacctgtgtcctaacgcggatgcgggagagtcatttacttccatgtcacacgatttat

SEQ ID NO: 123599 - DNA, 60 bp, Artificial
  Synthetic oligonucleotide
cagcctgatataactgatgacgaaagtcccgtcactaaccctggccctagcgcaccacca

SEQ ID NO: 123600 - DNA, 60 bp, Artificial
  Synthetic oligonucleotide
atggatgcgcctgatggcttccatgattacttgacgagggagcatgagaacaacttcgac

SEQ ID NO: 123601 - DNA, 60 bp, Artificial
  Synthetic oligonucleotide
gctactacctggaaagttggtgctttcactcttctgggtagcgttggtgacgaagatccc

SEQ ID NO: 123602 - DNA, 60 bp, Artificial
  Synthetic oligonucleotide
tgcttcagaagatgttgcttatctgaccggattcataaagcctgacgactccaaggactc

SEQ ID NO: 123603 - DNA, 60 bp, Artificial
  Synthetic oligonucleotide
gtgaggatgagcatatcggaatttagcgaggtgccgttagacggattcgacataccacca

SEQ ID NO: 123604 - DNA, 53 bp, Artificial
  Synthetic oligonucleotide
attaacaagcgatttgggaattctattgaagcataatacaacggtcgaggcga

SEQ ID NO: 123605 - DNA, 60 bp, Artificial
  Synthetic oligonucleotide
ggatgagcatatcggaatttagcgaggtgccgttagacggattcgacataccaccagagc

SEQ ID NO: 123606 - DNA, 60 bp, Artificial
  Synthetic oligonucleotide
gttagttcccggtgtagaaactagaatagaaatgaaggcaagtgacgaagtgagtttagt

SEQ ID NO: 123607 - DNA, 60 bp, Artificial
  Synthetic oligonucleotide
atgaccttggtaatagctgcggtcatcgctttgataacttctgctagcacattaacaagc

SEQ ID NO: 123608 - DNA, 60 bp, Artificial
  Synthetic oligonucleotide
tgaccttggtaatagctgcggtcatcgctttgataacttctgctagcacattaacaagcg

SEQ ID NO: 123609 - DNA, 60 bp, Artificial
  Synthetic oligonucleotide
ccatcagcgcctatacctgcgtcgatgccaaaagtcgcccttgatattttagataaggca

SEQ ID NO: 123610 - DNA, 60 bp, Artificial
  Synthetic oligonucleotide
atattttagataaggcaatgtcaaatcaaacaggcgcaacgatggcgcagaaggtagaaa

SEQ ID NO: 123611 - DNA, 60 bp, Artificial
  Synthetic oligonucleotide
gttcccggtgtagaaactagaatagaaatgaaggcaagtgacgaagtgagtttagtacca

SEQ ID NO: 123612 - DNA, 60 bp, Artificial
  Synthetic oligonucleotide
ctatgttccatcagcgcctatacctgcgtcgatgccaaaagtcgcccttgatattttaga

SEQ ID NO: 123613 - DNA, 60 bp, Artificial
  Synthetic oligonucleotide
aaatgcgggtggaattatctgcaatgaagagacgacgcgcgatagcacatatgaccttgg

SEQ ID NO: 123614 - DNA, 60 bp, Artificial
  Synthetic oligonucleotide
tatctgcaatgaagagacgacgcgcgatagcacatatgaccttggtaatagctgcggtca

SEQ ID NO: 123615 - DNA, 60 bp, Artificial
  Synthetic oligonucleotide
tattttagataaggcaatgtcaaatcaaacaggcgcaacgatggcgcagaaggtagaaaa

SEQ ID NO: 123616 - DNA, 60 bp, Artificial
  Synthetic oligonucleotide
aaggtagaaaaagtggcatatgcatcgtatgccgaagcatttagagacgatctaagactg

SEQ ID NO: 123617 - DNA, 60 bp, Artificial
  Synthetic oligonucleotide
aacctaacaactgaacaatggcatacacaacgcaagctaccggaatcatgagacaattaa

SEQ ID NO: 123618 - DNA, 60 bp, Artificial
  Synthetic oligonucleotide
ggagcgatatgttttaaccattttaagtgcattgaatctacgcatgcagaatactaaagc

SEQ ID NO: 123619 - DNA, 60 bp, Artificial
  Synthetic oligonucleotide
agacaattaatgactcttaggccgttaaaaaaggtacccgacgtcgatgctgcgatcatc

SEQ ID NO: 123620 - DNA, 60 bp, Artificial
  Synthetic oligonucleotide
gagacaattaatgacacttaggctattaaaaaaggtacccgacgtcgatgctgcgatcat

SEQ ID NO: 123621 - DNA, 60 bp, Artificial
  Synthetic oligonucleotide
caatggcatacacaacgcaagctaccggaatcatgagacaattaatgactcttaggctgt

SEQ ID NO: 123622 - DNA, 60 bp, Artificial
  Synthetic oligonucleotide
caatggcatacacaacgcaagctaccggaatcatgagacaattaatgactcttaggccgt

SEQ ID NO: 123623 - DNA, 60 bp, Artificial
  Synthetic oligonucleotide
gcgatcatcatgcaacgtgacctgccagaaatgccttcagctgatcaatcattaaaatac

SEQ ID NO: 123624 - DNA, 60 bp, Artificial
  Synthetic oligonucleotide
tgcgatcatcatgcaacgtgacctgccagaaatgccttcagctgatcaatcattaaaata

SEQ ID NO: 123625 - DNA, 60 bp, Artificial
  Synthetic oligonucleotide
ctgcgatcatcatgcaacgtgacctgccagaaatgccttcagctgatcaatcattaaaat

SEQ ID NO: 123626 - DNA, 60 bp, Artificial
  Synthetic oligonucleotide
agacaattaatgactcttaggctgttaaaaaaggtacccgacgtcgatgctgcgatcatc

SEQ ID NO: 123627 - DNA, 60 bp, Artificial
  Synthetic oligonucleotide
cattaaaatacaatcgatttttgcaggatatgtctgtgctcggtcaagtggttacggttg

SEQ ID NO: 123628 - DNA, 60 bp, Artificial
  Synthetic oligonucleotide
tcattaaaatacaatcgatttttgcaggatatgtctgtgctcggtcaagtggttacggtt

SEQ ID NO: 123629 - DNA, 57 bp, Artificial
  Synthetic oligonucleotide
ttttgcaggatatgtctgtgctcggtcaagtggttacggttgaggctcagaacagcg

SEQ ID NO: 123630 - DNA, 56 bp, Artificial
  Synthetic oligonucleotide
ttttgcaggatatgtctgtgctcggtcaagtggttacggttgaggctcagaacagc

SEQ ID NO: 123631 - DNA, 60 bp, Artificial
  Synthetic oligonucleotide
ggttacggttgaggctcagaacagcgttatgccgttattgcgtgctatgggcagtgatct

SEQ ID NO: 123632 - DNA, 60 bp, Artificial
  Synthetic oligonucleotide
gttacggttgaggctcagaacagcgttatgccgttattgcgtgctatgggcagtgatcta

SEQ ID NO: 123633 - DNA, 60 bp, Artificial
  Synthetic oligonucleotide
ggtgatattacaaaggagcgatatgttttaaccattttaagtgcattgaatctacgcatg

SEQ ID NO: 123634 - DNA, 60 bp, Artificial
  Synthetic oligonucleotide
ggtgatattacaaaggagcaatatgttttaaccattttaagtgcattgaatctacgcatg

SEQ ID NO: 123635 - DNA, 60 bp, Artificial
  Synthetic oligonucleotide
ggagcaatatgttttaaccattttaagtgcattgaatctacgcatgcagaatactaaagc

SEQ ID NO: 123636 - DNA, 60 bp, Artificial
  Synthetic oligonucleotide
acaatggcatacacaacgcaagctaccggaatcatgagacaattaatgacacttaggcta

SEQ ID NO: 123637 - DNA, 60 bp, Artificial
  Synthetic oligonucleotide
cagtactctcaacaagtcaatacactcggaaaagaaaacctaacaactaaacaatggcat

SEQ ID NO: 123638 - DNA, 60 bp, Artificial
  Synthetic oligonucleotide
aaacctaacaactaaacaatggcatacacaacgcaagctaccggaatcatgagacaatta

SEQ ID NO: 123639 - DNA, 60 bp, Artificial
  Synthetic oligonucleotide
agaatttctttcttcagtactctcaacaagtcaatacactcggaaaagaaaacctaacaa

SEQ ID NO: 123640 - DNA, 60 bp, Artificial
  Synthetic oligonucleotide
cagtactctcaacaagtcaatacactcggaaaagaaaacctaacaactgaacaatggcat

SEQ ID NO: 123641 - DNA, 60 bp, Artificial
  Synthetic oligonucleotide
agaaatttctttcttcagtactctcaacaagtcaatacactcggaaaagaaaacctaaca

SEQ ID NO: 123642 - DNA, 60 bp, Artificial
  Synthetic oligonucleotide
tcagaaatgagtgtagtgccatatcaaccaccggcatatccaacagcgcctacgggaacg

SEQ ID NO: 123643 - DNA, 60 bp, Artificial
  Synthetic oligonucleotide
gctatgagaccagaatcagaaatgagtgtagtgccatatcaaccaccggcatatccaaca

SEQ ID NO: 123644 - DNA, 60 bp, Artificial
  Synthetic oligonucleotide
acctgagacaaaaacattgaaggaagagtggatcagcatattaatccacgtggggaacct

SEQ ID NO: 123645 - DNA, 60 bp, Artificial
  Synthetic oligonucleotide
atttcatcagactgattttatttattatgagcgttatcgcaattataacatcaagtttaa

SEQ ID NO: 123646 - DNA, 52 bp, Artificial
  Synthetic oligonucleotide
agaagagagtgtcatcccgtacaattatagcacttgaaaaagagtataatca

SEQ ID NO: 123647 - DNA, 56 bp, Artificial
  Synthetic oligonucleotide
atatccaacagcgcctacgggaacgaatggcgaaaaagatttcagtagtatatctt

SEQ ID NO: 123648 - DNA, 60 bp, Artificial
  Synthetic oligonucleotide
accgcgagtagtggattccgaacgcccggatgaaactcttggttcgtctgtccaagcgcg

SEQ ID NO: 123649 - DNA, 60 bp, Artificial
  Synthetic oligonucleotide
gaaagcggctgcgtaaccgcgagtagtggattccgaacgcccggatgaaactcttggttc

SEQ ID NO: 123650 - DNA, 59 bp, Artificial
  Synthetic oligonucleotide
tggggaacctatttgcaactggagtatatgttggcatgagtaagtatgctgaaagattg

SEQ ID NO: 123651 - DNA, 60 bp, Artificial
  Synthetic oligonucleotide
cattgaaggaagagtggatcagcatattaatccacgtggggaacctatttgcaactggag

SEQ ID NO: 123652 - DNA, 60 bp, Artificial
  Synthetic oligonucleotide
ggagatcatgggtggacggattttggagcttttaaggcagccattatggctccgggtccc

SEQ ID NO: 123653 - DNA, 60 bp, Artificial
  Synthetic oligonucleotide
gagatcgacctcggagatcatgggtggacggattttggagcttttaaggcagccattatg

SEQ ID NO: 123654 - DNA, 60 bp, Artificial
  Synthetic oligonucleotide
cgtctcgttctataccttgaatatggcttgaatgcggagatcgacctcggagatcatggg

SEQ ID NO: 123655 - DNA, 60 bp, Artificial
  Synthetic oligonucleotide
tcatcgcttctttccgtctcgttctataccttgaatatggcttgaatgcggagatcgacc

SEQ ID NO: 123656 - DNA, 60 bp, Artificial
  Synthetic oligonucleotide
ggcggggatgtgtcacgttctactcgaccacccactaaccttccactcactcatcgcttc

SEQ ID NO: 123657 - DNA, 60 bp, Artificial
  Synthetic oligonucleotide
ctgcgggtgtttccagtcgagttgagcttgagatgcttcgggcggggatgtgtcacgttc

SEQ ID NO: 123658 - DNA, 60 bp, Artificial
  Synthetic oligonucleotide
tacttacgagctgcgggtgtttccagtcgagttgagcttgagatgcttcgggcggggatg

SEQ ID NO: 123659 - DNA, 60 bp, Artificial
  Synthetic oligonucleotide
cagacgatgccttccatatctatctcaatctcacacatcgttacttacgagctgcgggtg

SEQ ID NO: 123660 - DNA, 60 bp, Artificial
  Synthetic oligonucleotide
cggtttctccagacgatgccttccatatctatctcaatctcacacatcgttacttacgag

SEQ ID NO: 123661 - DNA, 60 bp, Artificial
  Synthetic oligonucleotide
atgactggcgtttccttccctgctacgtacgctggcagagttttgtcacggcagggctcg

SEQ ID NO: 123662 - DNA, 60 bp, Artificial
  Synthetic oligonucleotide
gtctatacaagagttcaaatcaactctatatcctgctgcccgagttgaagaaatcgctcg

SEQ ID NO: 123663 - DNA, 60 bp, Artificial
  Synthetic oligonucleotide
tgcccgagttgaagaaatcgctcgtccgaatgacggacgtccgccagtctatcttgatga

SEQ ID NO: 123664 - DNA, 60 bp, Artificial
  Synthetic oligonucleotide
ataatttgatcagttgagatcagtttgctgccacaaacgcatatggagcggttcctaagc

SEQ ID NO: 123665 - DNA, 60 bp, Artificial
  Synthetic oligonucleotide
gcgtgacctgatcactgccggggattcgaaccacttctatcgccagatcgagctcgccta

SEQ ID NO: 123666 - DNA, 60 bp, Artificial
  Synthetic oligonucleotide
tcccagccgcatggcgtgacctgatcactgccggggattcgaaccacttctatcgccaga

SEQ ID NO: 123667 - DNA, 53 bp, Artificial
  Synthetic oligonucleotide
ccttcagccccgaaggacggggggtcgctcaggacatcatcgacgctatacgt

SEQ ID NO: 123668 - DNA, 60 bp, Artificial
  Synthetic oligonucleotide
ccccatcgtttttgtagatggtgactatgcttcctcctcccccctccatcccttcagccc

SEQ ID NO: 123669 - DNA, 50 bp, Artificial
  Synthetic oligonucleotide
ccccgttggaaagcgggctcccctccctttgtgcgcctgggtcccagccg

SEQ ID NO: 123670 - DNA, 60 bp, Artificial
  Synthetic oligonucleotide
ggcgccaccccccgttggaaagcgggctcccctccctttgtgcgcctgggtcccagccgc

SEQ ID NO: 123671 - DNA, 60 bp, Artificial
  Synthetic oligonucleotide
cgctgttaccgcgttcaaccttttctttccaccattaccttcaggggatgaggagtttcg

SEQ ID NO: 123672 - DNA, 60 bp, Artificial
  Synthetic oligonucleotide
atcttgatgacgctgttaccgcgttcaaccttttctttccaccattaccttcaggggatg

SEQ ID NO: 123673 - DNA, 60 bp, Artificial
  Synthetic oligonucleotide
caggggatgaggagtttcgatgtgctcccgagattactccgggaggcgtccccatcgttt

SEQ ID NO: 123674 - DNA, 60 bp, Artificial
  Synthetic oligonucleotide
tcaggggatgaggagtttcgatgtgctcccgagattactccgggaggcgtccccatcgtt

SEQ ID NO: 123675 - DNA, 60 bp, Artificial
  Synthetic oligonucleotide
agccattatggctccgggtcccaaagatctcgtccgcctcgaggatgatctgtggaacgc

SEQ ID NO: 123676 - DNA, 57 bp, Artificial
  Synthetic oligonucleotide
tcccaaagatctcgtccgcctcgaggatgatctgtggaacgccatgttccaatgggc

SEQ ID NO: 123677 - DNA, 60 bp, Artificial
  Synthetic oligonucleotide
tgtggaacgccatgttccaatgggctctcgcccatctttcgcgacagggttctgacggct

SEQ ID NO: 123678 - DNA, 60 bp, Artificial
  Synthetic oligonucleotide
tccaatgggctctcgcccatctttcgcgacagggttctgacggctggccattcctatagg

SEQ ID NO: 123679 - DNA, 60 bp, Artificial
  Synthetic oligonucleotide
aacgggaaggtcccctcggaaggtgagattaaacggatgcactcactcctggatcggatt

SEQ ID NO: 123680 - DNA, 60 bp, Artificial
  Synthetic oligonucleotide
caggtcggtgctttctgactcatcctctcgaagctttcccaaacgggaaggtcccctcgg

SEQ ID NO: 123681 - DNA, 50 bp, Artificial
  Synthetic oligonucleotide
cctcaagtactcccgacgtattattctccaagttttcggggtaaggggaa

SEQ ID NO: 123682 - DNA, 60 bp, Artificial
  Synthetic oligonucleotide
gacttgagggagaatggcgtaacgctttatgctgctctggtctgtgccacctctatctca

SEQ ID NO: 123683 - DNA, 60 bp, Artificial
  Synthetic oligonucleotide
tatcgccagatcgagctcgcctatagacacctcgtcaagatgcgttcagacctcaagtac

SEQ ID NO: 123684 - DNA, 60 bp, Artificial
  Synthetic oligonucleotide
gatcgagctcgcctatagacacctcgtcaagatgcgttcagacctcaagtactcccgacg

SEQ ID NO: 123685 - DNA, 60 bp, Artificial
  Synthetic oligonucleotide
catccagatcacctcctatttccttccatacttgccaggacgttggcctatcgccaggct

SEQ ID NO: 123686 - DNA, 60 bp, Artificial
  Synthetic oligonucleotide
ttctgatcgttcatgtcagctgtgctttctgctcgctcaggggattcctactgctgttat

SEQ ID NO: 123687 - DNA, 60 bp, Artificial
  Synthetic oligonucleotide
ggcgtaacgctttatgctgctctggtctgtgccacctctatctcacatccagatcacctc

SEQ ID NO: 123688 - DNA, 60 bp, Artificial
  Synthetic oligonucleotide
ctctatctcacatccagatcacctcctatttccttccatacttgccaggacgttggccta

SEQ ID NO: 123689 - DNA, 60 bp, Artificial
  Synthetic oligonucleotide
gagatcagtttgctgccacaaacgcatatggagcggttcctaagcctcttctccctgaga

SEQ ID NO: 123690 - DNA, 60 bp, Artificial
  Synthetic oligonucleotide
gtcaattttcaggtcggtgctttctgactcatcctctcgaagctttcccaaacgggaagg

SEQ ID NO: 123691 - DNA, 60 bp, Artificial
  Synthetic oligonucleotide
tcagctgtgctttctgctcgctcaggggattcctactgctgttatcgctgacacgcgcgc

SEQ ID NO: 123692 - DNA, 60 bp, Artificial
  Synthetic oligonucleotide
gatatcagagcacatgactggcgtttccttccctgctacgtacgctggcagagttttgtc

SEQ ID NO: 123693 - DNA, 60 bp, Artificial
  Synthetic oligonucleotide
cctcggaaggtgagattaaacggatgcactcactcctggatcggatttctcagccgcacc

SEQ ID NO: 123694 - DNA, 60 bp, Artificial
  Synthetic oligonucleotide
ggatcggatttctcagccgcaccatttattcactgtgtttagtcgatgcactgacgtgct

SEQ ID NO: 123695 - DNA, 60 bp, Artificial
  Synthetic oligonucleotide
cggatttctcagccgcaccatttattcactgtgtttagtcgatgcactgacgtgcttcct

SEQ ID NO: 123696 - DNA, 60 bp, Artificial
  Synthetic oligonucleotide
ctctctcctttgcagtctatacaagagttcaaatcaactctatatcctgctgcccgagtt

SEQ ID NO: 123697 - DNA, 60 bp, Artificial
  Synthetic oligonucleotide
atggaatcaattttagaattcaatattaaaatgcgtatgcgtgaagaagacatttcggcg

SEQ ID NO: 123698 - DNA, 60 bp, Artificial
  Synthetic oligonucleotide
gtcgcatataccacgccgctcttatttgagatgtgttgcatggaatcaattttagaattc

SEQ ID NO: 123699 - DNA, 60 bp, Artificial
  Synthetic oligonucleotide
gttgcatacaccacgccgcttttatttgaaatgtgttgcatggaatcaattttagaattc

SEQ ID NO: 123700 - DNA, 60 bp, Artificial
  Synthetic oligonucleotide
atggaatcaattttagaattcaatattaaaatgcgtatgcgtgaagaagatatctcggcg

SEQ ID NO: 123701 - DNA, 60 bp, Artificial
  Synthetic oligonucleotide
atggaatcaattttagaattcaatattaaaatgcgtatgcgtgaagaagacatctcggcg

SEQ ID NO: 123702 - DNA, 60 bp, Artificial
  Synthetic oligonucleotide
cggcgttgtaccgatacaaggtccaataaacagagctgttgctcaaaacgcctatgtgtg

SEQ ID NO: 123703 - DNA, 60 bp, Artificial
  Synthetic oligonucleotide
tctattcggcgtcgtaccgatacaaggtccaataaacagagctgttgctcaaaacgccta

SEQ ID NO: 123704 - DNA, 60 bp, Artificial
  Synthetic oligonucleotide
ggggccagattttaatctattcggcgtcgtaccgatacaaggtccaataaacagagctgt

SEQ ID NO: 123705 - DNA, 60 bp, Artificial
  Synthetic oligonucleotide
tctattcggcgttgtaccgatacaaggtccaataaacagagctgttgctcaaaacgccta

SEQ ID NO: 123706 - DNA, 60 bp, Artificial
  Synthetic oligonucleotide
taaaaatccgttatggcacggtctgcgggcggcgatactcaggggaacaacattaccgaa

SEQ ID NO: 123707 - DNA, 60 bp, Artificial
  Synthetic oligonucleotide
ggcgccagattttaatctattcggcgtcgtaccgatacaaggtccaataaacagagctgt

SEQ ID NO: 123708 - DNA, 60 bp, Artificial
  Synthetic oligonucleotide
gaccaggtatgatagaaatagaagtaatctactatttgagtttagataaaacaatgaccc

SEQ ID NO: 123709 - DNA, 60 bp, Artificial
  Synthetic oligonucleotide
aaccaggtatgatagaaatagaagtaatctactatttgagtttagataaaacaatgaccc

SEQ ID NO: 123710 - DNA, 60 bp, Artificial
  Synthetic oligonucleotide
gagcgggaccgggtatgatagaaatagaagtaatctactatttgagtttagataaaacaa

SEQ ID NO: 123711 - DNA, 60 bp, Artificial
  Synthetic oligonucleotide
gcgggaccgggtatgatagaaatagaagtaatctactatttgagtttagataaaacaatg

SEQ ID NO: 123712 - DNA, 60 bp, Artificial
  Synthetic oligonucleotide
aatgtgggaggtgtgaatatgagggcaggagtgatcgtggcttatgatggtcaggctccc

SEQ ID NO: 123713 - DNA, 60 bp, Artificial
  Synthetic oligonucleotide
aatgtgggaggtgtgaatatgagggcaggagtgatcgtggcttatgacggtcaagctccc

SEQ ID NO: 123714 - DNA, 60 bp, Artificial
  Synthetic oligonucleotide
ggacactattgcagcaagagctctgacagtcataaaagcttgtaatactttgaaagaagt

SEQ ID NO: 123715 - DNA, 60 bp, Artificial
  Synthetic oligonucleotide
ggacacgattgcagcaagagctctgacagtcataaaagcttgtaatactttgaaagaagt

SEQ ID NO: 123716 - DNA, 60 bp, Artificial
  Synthetic oligonucleotide
ataaaagcttgtaatactttgaaagaagttagaatagtagtagaatccaatgtgttggaa

SEQ ID NO: 123717 - DNA, 60 bp, Artificial
  Synthetic oligonucleotide
cttggaatagctattaacagatataatgggctaactttgagatcagtaaccatgcggcca

SEQ ID NO: 123718 - DNA, 60 bp, Artificial
  Synthetic oligonucleotide
atggacactattgcagcaagagctctgacagtcataaaagcttgtaatactttgaaagaa

SEQ ID NO: 123719 - DNA, 60 bp, Artificial
  Synthetic oligonucleotide
atggacacgattgcagcaagagctctgacagtcataaaagcttgtaatactttgaaagaa

SEQ ID NO: 123720 - DNA, 60 bp, Artificial
  Synthetic oligonucleotide
gtgaaaatggacacgattgcagcaagagctctgacagtcataaaagcttgtaatactttg

SEQ ID NO: 123721 - DNA, 56 bp, Artificial
  Synthetic oligonucleotide
gaatagctattaacagatataatgggctaactttgagatcagtaaccatgcggcca

SEQ ID NO: 123722 - DNA, 60 bp, Artificial
  Synthetic oligonucleotide
gaatagctataaacagatataatggactaactttgagatcagtaaccatgcggccaacat

SEQ ID NO: 123723 - DNA, 60 bp, Artificial
  Synthetic oligonucleotide
gaaggatagggacattttcaagcgcggcgggaaatgcacaggagacaccgcaaggagtga

SEQ ID NO: 123724 - DNA, 60 bp, Artificial
  Synthetic oligonucleotide
gcaacatggacgatttaggcaacgcgcgggacaaaatatcacaaccacggttgtttcgtc

SEQ ID NO: 123725 - DNA, 60 bp, Artificial
  Synthetic oligonucleotide
tgaatatcggaaacatatctccagactacatacaaaatttagcaacaattggggttttag

SEQ ID NO: 123726 - DNA, 60 bp, Artificial
  Synthetic oligonucleotide
gaatagctattaatagatataatgggctaactttgagatcagtaaccatgcggccaacat

SEQ ID NO: 123727 - DNA, 60 bp, Artificial
  Synthetic oligonucleotide
aagttacgcagcatggacggtttaggcaacgcgcgggacaaaatatcacaaccgcggttg

SEQ ID NO: 123728 - DNA, 60 bp, Artificial
  Synthetic oligonucleotide
tgaatatgggaaacatatctccagactacatacaaaatttcgctacaatcggggtttcgg

SEQ ID NO: 123729 - DNA, 60 bp, Artificial
  Synthetic oligonucleotide
tgaagttacgcagcatggacggtttaggcaacgcgcgggacaaaatatcacaaccgcggt

SEQ ID NO: 123730 - DNA, 59 bp, Artificial
  Synthetic oligonucleotide
agttacgcagcatggacggtttaggcaacgcgcgggacaaaatatcacaaccgcggttg

SEQ ID NO: 123731 - DNA, 60 bp, Artificial
  Synthetic oligonucleotide
tgaagttacgcaacatggacgatttaggcaacgcgcgggacaaaatatcacaaccacggt

SEQ ID NO: 123732 - DNA, 60 bp, Artificial
  Synthetic oligonucleotide
agttacgcagcatggacggtttaggcaacgcgcgggacaaaatatcacaaccgcggttgt

SEQ ID NO: 123733 - DNA, 60 bp, Artificial
  Synthetic oligonucleotide
catcaagcggatcaacgacgcgattaccactttcaaaaattacaagcttgatgaactgga

SEQ ID NO: 123734 - DNA, 60 bp, Artificial
  Synthetic oligonucleotide
gcgcaggttacatccgaggtgctacgtgtgcgtaatttgattaccaccaagatccagaag

SEQ ID NO: 123735 - DNA, 58 bp, Artificial
  Synthetic oligonucleotide
caacttcgacttggcgcagttggggctcgcaccctcagtttgactttatgctggagta

SEQ ID NO: 123736 - DNA, 60 bp, Artificial
  Synthetic oligonucleotide
gcgcaggttacatccgaggtgctacgtgtgcgtaatttgattaccaccaagattcagaag

SEQ ID NO: 123737 - DNA, 60 bp, Artificial
  Synthetic oligonucleotide
gattcagaagtacattaatttgtacgaagattcacagttaccgcattttcggcaggcggc

SEQ ID NO: 123738 - DNA, 60 bp, Artificial
  Synthetic oligonucleotide
tcaatctacagcgcgcaagagggatgggacaaaacaatctcagcacagccagatatgatg

SEQ ID NO: 123739 - DNA, 60 bp, Artificial
  Synthetic oligonucleotide
atcaatctacagcgcgcaagagggatgggacaaaacaatctcagcacagccagatatgat

SEQ ID NO: 123740 - DNA, 60 bp, Artificial
  Synthetic oligonucleotide
gattcagcagtacattaatttgtacgaagattcgcagttaccgcattttcggcgagcggc

SEQ ID NO: 123741 - DNA, 60 bp, Artificial
  Synthetic oligonucleotide
taatttgtacgaagattcgcagttaccgcattttcggcgagcggctttgtcctacactca

SEQ ID NO: 123742 - DNA, 60 bp, Artificial
  Synthetic oligonucleotide
gaaagcttactatactgcttcagaagacgttgcttatttgaccggatttataaagcctga

SEQ ID NO: 123743 - DNA, 60 bp, Artificial
  Synthetic oligonucleotide
gatggacgcacctgatggcttccatgattacttaacgagggaacatgagaacaacttcga

SEQ ID NO: 123744 - DNA, 60 bp, Artificial
  Synthetic oligonucleotide
cgaaattgcttgatacacacttcatcccatcttgggtttatgaagtttatgattgatatt

SEQ ID NO: 123745 - DNA, 60 bp, Artificial
  Synthetic oligonucleotide
cgtgtataggttgcttgtaaacaacggagtggtgatcgttagatccgtctggcgtggaag

SEQ ID NO: 123746 - DNA, 60 bp, Artificial
  Synthetic oligonucleotide
gattcttcagaatgttgattcgtgtattaggttgcttgtaaacaacggagtggtgatcgg

SEQ ID NO: 123747 - DNA, 60 bp, Artificial
  Synthetic oligonucleotide
gcaccctcagtttgactttatgctggagtagatgaatgcctcaccaacatttgttactcc

SEQ ID NO: 123748 - DNA, 60 bp, Artificial
  Synthetic oligonucleotide
cctacattcaggactgggatgttgatggcggtgtgcccgctgcactcccacagcctgata

SEQ ID NO: 123749 - DNA, 60 bp, Artificial
  Synthetic oligonucleotide
cccgctgcactcccacagcctgatacaactgacgatgaaaggcccgtcactaagcctggc

SEQ ID NO: 123750 - DNA, 60 bp, Artificial
  Synthetic oligonucleotide
taagatcagtaggtagagtggcgccccgaggtttgcaccgcgtggagtggttgatccagc

SEQ ID NO: 123751 - DNA, 60 bp, Artificial
  Synthetic oligonucleotide
gaggaaggagttcatagtgcgatgtcaatggaattgggtattcacgacattgaagataga

SEQ ID NO: 123752 - DNA, 60 bp, Artificial
  Synthetic oligonucleotide
agatgaggaaggagttcatagtgcgatgtcaatggaattgggtattcacgacattgaaga

SEQ ID NO: 123753 - DNA, 60 bp, Artificial
  Synthetic oligonucleotide
agtatctgatgatcaatgattccttctcatcgatgatgtcagcgttcttagatgaggaag

SEQ ID NO: 123754 - DNA, 60 bp, Artificial
  Synthetic oligonucleotide
gagtatctgatgatcaatgattccttctcatcgatgatgtcagcgttcttagatgaggaa

SEQ ID NO: 123755 - DNA, 60 bp, Artificial
  Synthetic oligonucleotide
tgcatgttgttatgactaaggccttttgcaaccttgattttgcaaaagatgagtatctga

SEQ ID NO: 123756 - DNA, 60 bp, Artificial
  Synthetic oligonucleotide
cttggagtgtcgagtcagaactacccattctatgacttgcatgttgttatgactaaggcc

SEQ ID NO: 123757 - DNA, 60 bp, Artificial
  Synthetic oligonucleotide
ggactttacgttacttggagtgtcgagtcagaactacccattctatgacttgcatgttgt

SEQ ID NO: 123758 - DNA, 60 bp, Artificial
  Synthetic oligonucleotide
ttccttttggacattgctctctccactaggtttggggactttacgttacttggagtgtcg

SEQ ID NO: 123759 - DNA, 60 bp, Artificial
  Synthetic oligonucleotide
ttgttctgcgtactaagcggcttttctacatcattcatgaatatcacatgagcctggacg

SEQ ID NO: 123760 - DNA, 60 bp, Artificial
  Synthetic oligonucleotide
acattgaagatagatttgttctgcgtactaagcggcttttctacatcattcatgaatatc

SEQ ID NO: 123761 - DNA, 60 bp, Artificial
  Synthetic oligonucleotide
ctgcctgatgcatcagggggtacgctactcaaccaaaagagtaaagagcaaatgcgggta

SEQ ID NO: 123762 - DNA, 59 bp, Artificial
  Synthetic oligonucleotide
ggggtacgctactcaaccaaaagagtaaagagcaaatgcgggtaatcttttcgaatgct

SEQ ID NO: 123763 - DNA, 60 bp, Artificial
  Synthetic oligonucleotide
aatgcgggtaatcttttcgaatgctaaagttagaattgcgaacagtattaacttgtatgt

SEQ ID NO: 123764 - DNA, 59 bp, Artificial
  Synthetic oligonucleotide
tcgaatgctaaagttagaattgcgaacagtattaacttgtatgtaactacgcacaccaa

SEQ ID NO: 123765 - DNA, 60 bp, Artificial
  Synthetic oligonucleotide
acttgtatgtaactacgcacaccaatagttacaatgagtacgttcgcgaagtcgcagagt

SEQ ID NO: 123766 - DNA, 60 bp, Artificial
  Synthetic oligonucleotide
cgcacaccaatagttacaatgagtacgttcgcgaagtcgcagagtatgtcgctgacttgt

SEQ ID NO: 123767 - DNA, 60 bp, Artificial
  Synthetic oligonucleotide
gtcgcagagtatgtcgctgacttgtggaacatccaaacgaccacaaatactcaaggacat

SEQ ID NO: 123768 - DNA, 60 bp, Artificial
  Synthetic oligonucleotide
cgcagagtatgtcgctgacttgtggaacatccaaacgaccacaaatactcaaggacatga

SEQ ID NO: 123769 - DNA, 60 bp, Artificial
  Synthetic oligonucleotide
tcaaggacatgaaaacgaacttgcagctgaggatttcggagtgttggcttcatcttcaca

SEQ ID NO: 123770 - DNA, 60 bp, Artificial
  Synthetic oligonucleotide
cgaacttgcagctgaggatttcggagtgttggcttcatcttcacagatgaatggaacgaa

SEQ ID NO: 123771 - DNA, 60 bp, Artificial
  Synthetic oligonucleotide
gacgcaatggccggcaaacttcaggacggtgttgccatagcgaagatcaaggagacgatc

SEQ ID NO: 123772 - DNA, 60 bp, Artificial
  Synthetic oligonucleotide
catagcgaagatcaaggagacgatcaacctgttctgcgaatattcctttggtgatttggt

SEQ ID NO: 123773 - DNA, 60 bp, Artificial
  Synthetic oligonucleotide
ggagacgatcaacctgttctgcgaatattcctttggtgatttggtcaacaataggcgtga

SEQ ID NO: 123774 - DNA, 57 bp, Artificial
  Synthetic oligonucleotide
gtgatttggtcaacaataggcgtgagattgttggccgggtccatgacgcaaggaaaa

SEQ ID NO: 123775 - DNA, 60 bp, Artificial
  Synthetic oligonucleotide
ggtatttttcgcatagacgcaatggccggcaaacttcaggacggtgttgccatagcgaag

SEQ ID NO: 123776 - DNA, 60 bp, Artificial
  Synthetic oligonucleotide
gtgatttggtcaacaataggcgtgagattgttggccgggtccatgacgcaaggaaaaacg

SEQ ID NO: 123777 - DNA, 60 bp, Artificial
  Synthetic oligonucleotide
tatggtgtggtgaaattccttttggacattgctctctccactaggtttggggactttacg

SEQ ID NO: 123778 - DNA, 60 bp, Artificial
  Synthetic oligonucleotide
attcacgagcctgttgagcgacgacggaagaatggggtaagtacgcttacttcagcggca

SEQ ID NO: 123779 - DNA, 60 bp, Artificial
  Synthetic oligonucleotide
gttagctggatctgaattcacgagcctgttgagcgacgacggaagaatggggtaagtacg

SEQ ID NO: 123780 - DNA, 60 bp, Artificial
  Synthetic oligonucleotide
atggaacgaaatctgagttgggagattcagtaatcaagagcgacggaaatgaagtgaagc

SEQ ID NO: 123781 - DNA, 60 bp, Artificial
  Synthetic oligonucleotide
catcttcacagatgaatggaacgaaatctgagttgggagattcagtaatcaagagcgacg

SEQ ID NO: 123782 - DNA, 60 bp, Artificial
  Synthetic oligonucleotide
ggagcccgggtacccaccttgtgtggaatcccttggacaaggagaccttgctatgcgaga

SEQ ID NO: 123783 - DNA, 60 bp, Artificial
  Synthetic oligonucleotide
tctggagcccgggtacccaccttgtgtggaatcccttggacaaggagaccttgctatgcg

SEQ ID NO: 123784 - DNA, 53 bp, Artificial
  Synthetic oligonucleotide
tcatttaacatctttgaaagggatgccgctgcactggtgatcgggtcatcatc

SEQ ID NO: 123785 - DNA, 60 bp, Artificial
  Synthetic oligonucleotide
ggtaagtacgcttacttcagcggcatccaactgatcaccagggtgaaagatactgttgta

SEQ ID NO: 123786 - DNA, 60 bp, Artificial
  Synthetic oligonucleotide
tttaacaggtatgcttcgatggcgatacagcaatatttgagagttggttatgctgaagag

SEQ ID NO: 123787 - DNA, 60 bp, Artificial
  Synthetic oligonucleotide
gatgattggcgatccgatgattcttggctaaacacccccatcttcacagcgccgggcttg

SEQ ID NO: 123788 - DNA, 60 bp, Artificial
  Synthetic oligonucleotide
ggcgatccgatgattcttggctaaacacccccatcttcacagcgccgggcctgaccaacc

SEQ ID NO: 123789 - DNA, 60 bp, Artificial
  Synthetic oligonucleotide
atggcggaaccaccagatgcggctacacctaaaacaagtccatatttaaagggagatgaa

SEQ ID NO: 123790 - DNA, 60 bp, Artificial
  Synthetic oligonucleotide
tccgtgatatgctacctgaaccaaggttagatgatattgaaaggttcagacaagaaggga

SEQ ID NO: 123791 - DNA, 60 bp, Artificial
  Synthetic oligonucleotide
gccgtttgattatcagacgagtgagaaaggtgggctaacctatgctacgattaaatatgc

SEQ ID NO: 123792 - DNA, 60 bp, Artificial
  Synthetic oligonucleotide
gatgttaacggatcaggtgtacatgttccgcgatatgctacctgaaccaaggttagatga

SEQ ID NO: 123793 - DNA, 60 bp, Artificial
  Synthetic oligonucleotide
ccaagtgtacatgttccgcgatatgctacctgaaccaaggttagatgatattgaaaggtt

SEQ ID NO: 123794 - DNA, 60 bp, Artificial
  Synthetic oligonucleotide
aagtgtacatgttccgtgatatgctacctgaaccaaggttagatgatattgaaaggttca

SEQ ID NO: 123795 - DNA, 60 bp, Artificial
  Synthetic oligonucleotide
gttccgcgatatgctacctgaaccaaggttagatgatattgaaaggttcagacaagaggg

SEQ ID NO: 123796 - DNA, 60 bp, Artificial
  Synthetic oligonucleotide
ccacgaattgcatcaataacgcttacccagagaataacgacgaccggtccttttgctatt

SEQ ID NO: 123797 - DNA, 60 bp, Artificial
  Synthetic oligonucleotide
ccgcgaattgcatcaataacgcttacccagagaataacaacgactggcccttttgctatc

SEQ ID NO: 123798 - DNA, 60 bp, Artificial
  Synthetic oligonucleotide
agaattgatgttaacggatcaagtgtacatgttccgcgatatgctacctgaaccaaggtt

SEQ ID NO: 123799 - DNA, 60 bp, Artificial
  Synthetic oligonucleotide
gatgttaacggatcaagtgtacatgttccgcgatatgctacctgaaccaaggttagatga

SEQ ID NO: 123800 - DNA, 60 bp, Artificial
  Synthetic oligonucleotide
ccaaatccacgaattgcatcaataacgcttacccagagaataacgacgaccggtcctttt

SEQ ID NO: 123801 - DNA, 60 bp, Artificial
  Synthetic oligonucleotide
aacgtatgaccttttcgcaggagtttctcacagactttagacgggcggatacgatatggg

SEQ ID NO: 123802 - DNA, 60 bp, Artificial
  Synthetic oligonucleotide
ggaagatgcgtatcatggatattacgcaagcgcttaaggtgggcaccaagctagcagctc

SEQ ID NO: 123803 - DNA, 60 bp, Artificial
  Synthetic oligonucleotide
gagcgatggcggaaccaccagatgcggctacacctaaaacaagtccatatttaaagggag

SEQ ID NO: 123804 - DNA, 60 bp, Artificial
  Synthetic oligonucleotide
ccagatgcggctacacctaaaacaagtccatatttaaagggagatgaattgtcgagcgac

SEQ ID NO: 123805 - DNA, 60 bp, Artificial
  Synthetic oligonucleotide
cagacgagtgagaaaggtgggctaacctatgctacgattaaatatgctaatgacacgacg

SEQ ID NO: 123806 - DNA, 60 bp, Artificial
  Synthetic oligonucleotide
gtggcttgaaagactgggaagacgtaaacgtatgaccttttcgcaggagtttctcacaga

SEQ ID NO: 123807 - DNA, 60 bp, Artificial
  Synthetic oligonucleotide
gtggcttgaaagactggggagacgtaaacgtatgaccttttcgcaggagtttctcacaga

SEQ ID NO: 123808 - DNA, 60 bp, Artificial
  Synthetic oligonucleotide
ggggagacgtaaacgtatgaccttttcgcaggagtttctcacagactttagacgagcgga

SEQ ID NO: 123809 - DNA, 60 bp, Artificial
  Synthetic oligonucleotide
aagactgggaagacgtaaacgcatgaccttttcgcaggagtttctcacagactttagacg

SEQ ID NO: 123810 - DNA, 60 bp, Artificial
  Synthetic oligonucleotide
tcaaaatacgttacatagtatgtatgaatctctagagggaggatattgtcctaatcttga

SEQ ID NO: 123811 - DNA, 60 bp, Artificial
  Synthetic oligonucleotide
tccgcgagtctctgtacgcaattaatgtgtcgttacctgattttaagggcttaccagtga

SEQ ID NO: 123812 - DNA, 60 bp, Artificial
  Synthetic oligonucleotide
gtctctgtacgcaattaatgtgtcgttacctgattttaagggcttaccagtgaaggcagc

SEQ ID NO: 123813 - DNA, 60 bp, Artificial
  Synthetic oligonucleotide
atgcgattaatgtgtcgttacctgattttaagggcttacctgtgaaggcagcgactaaga

SEQ ID NO: 123814 - DNA, 60 bp, Artificial
  Synthetic oligonucleotide
gggtatcttctttaatggagttcatgacgggttacagtggcagcggtggatacgttattc

SEQ ID NO: 123815 - DNA, 60 bp, Artificial
  Synthetic oligonucleotide
cgatgggaccgccgaatacctaaagctgtatttcatatttggctgtcggattccaaatct

SEQ ID NO: 123816 - DNA, 60 bp, Artificial
  Synthetic oligonucleotide
caagatgtaagtactgtgcaattagccagagtggtcaacttagctgtgccagatacttgg

SEQ ID NO: 123817 - DNA, 60 bp, Artificial
  Synthetic oligonucleotide
gctacaagatgtaagtactgtgcaattagccagagtggtcaacttagctgtgccagatac

SEQ ID NO: 123818 - DNA, 60 bp, Artificial
  Synthetic oligonucleotide
attcgcatcgtacgcagaagcgtttcgtgatgatgtgaggttgagacaaattaaacgcca

SEQ ID NO: 123819 - DNA, 60 bp, Artificial
  Synthetic oligonucleotide
ttcgcatcgtacgcagaagcgtttcgtgatgatgtgaggttgagacaaattaaacgccat

SEQ ID NO: 123820 - DNA, 60 bp, Artificial
  Synthetic oligonucleotide
ggatccaggaatggcgtattttccttatatagcatctgtcttaacaggtttgtttgcgct

SEQ ID NO: 123821 - DNA, 60 bp, Artificial
  Synthetic oligonucleotide
acttgaggatccaggaatggcgtattttccttatatagcatctgtcttaacaggtttgtt

SEQ ID NO: 123822 - DNA, 60 bp, Artificial
  Synthetic oligonucleotide
ttgcttaaacgcatttacgataaattgacggtgcaaacgacaggcgaaatagatatgaca

SEQ ID NO: 123823 - DNA, 60 bp, Artificial
  Synthetic oligonucleotide
cgcatttacgataaattgacggtgcaaacgacaggcgaaatagatatgacaaaagagatc

SEQ ID NO: 123824 - DNA, 60 bp, Artificial
  Synthetic oligonucleotide
ttgaaaacgtcaaaatgttcatataaagtggtgaaatattgtattgtaacaatttttaat

SEQ ID NO: 123825 - DNA, 60 bp, Artificial
  Synthetic oligonucleotide
aatttttaatacgttgttaaaattggcaggttataaagagcagataactactaaagatga

SEQ ID NO: 123826 - DNA, 52 bp, Artificial
  Synthetic oligonucleotide
tttacagtaagcaccatcggacctgatggctgactgagaagccacagtcagc

SEQ ID NO: 123827 - DNA, 60 bp, Artificial
  Synthetic oligonucleotide
agatatgacaaaagagatcaatcaaaaaaacgtgagaacgctagaagaatgggaaagtgg

SEQ ID NO: 123828 - DNA, 60 bp, Artificial
  Synthetic oligonucleotide
tctttacagtaagcaccatcggacctgatggctgactgagaagccacagtcagccatatc

SEQ ID NO: 123829 - DNA, 60 bp, Artificial
  Synthetic oligonucleotide
ggtttgtttgcgctaaataaagcatccattccaacaatgaaaattgcattgaaaacgtca

SEQ ID NO: 123830 - DNA, 60 bp, Artificial
  Synthetic oligonucleotide
caggtttgtttgcgctaaataaagcatccattccaacaatgaaaattgcattgaaaacgt

SEQ ID NO: 123831 - DNA, 60 bp, Artificial
  Synthetic oligonucleotide
gcgccagtctgtgagagtggagaagtcattaatcttgccgcacgtatgtcgcagatgtgg

SEQ ID NO: 123832 - DNA, 60 bp, Artificial
  Synthetic oligonucleotide
tgctggattcgctgcgccagtctgtgagagtggagaagtcattaatcttgccgcacgtat

SEQ ID NO: 123833 - DNA, 58 bp, Artificial
  Synthetic oligonucleotide
attggtcacgaccgctattcatatacatcgatggattagagggtgcggcatctggaat

SEQ ID NO: 123834 - DNA, 60 bp, Artificial
  Synthetic oligonucleotide
gcggtgcatcattactctgtgctatgccgagaaggttcactttgctggattcgctgcgcc

SEQ ID NO: 123835 - DNA, 60 bp, Artificial
  Synthetic oligonucleotide
acggatatgcgccacgcgcagatggaacagtaccggactggaataacttgggcagtttct

SEQ ID NO: 123836 - DNA, 60 bp, Artificial
  Synthetic oligonucleotide
gggagggattggaccgatcggagagatgggaatggcttctagattatatggatagaaagc

SEQ ID NO: 123837 - DNA, 60 bp, Artificial
  Synthetic oligonucleotide
ctggcaaagctggctactaccaatgatcatagtacgggagggattggaccgatcggagag

SEQ ID NO: 123838 - DNA, 60 bp, Artificial
  Synthetic oligonucleotide
tgcgtgcgtcagaattaattggatgttcgcccttcagaatggttaagatcggagagcatg

SEQ ID NO: 123839 - DNA, 60 bp, Artificial
  Synthetic oligonucleotide
gtggtgtgatcgatgtgcgtgcgtcagaattaattggatgttcgcccttcagaatggtta

SEQ ID NO: 123840 - DNA, 60 bp, Artificial
  Synthetic oligonucleotide
caagcaaaattttgaaagagcaatgattgcagcgactgatgccgaagaaccgcgaaaggc

SEQ ID NO: 123841 - DNA, 60 bp, Artificial
  Synthetic oligonucleotide
tttctcaaccgtacgaagaggacatcgaagggaaaatgaagagatgtggcgtacaactgc

SEQ ID NO: 123842 - DNA, 60 bp, Artificial
  Synthetic oligonucleotide
gctatatcacctcaatggacttgcagtcatttgaaaaggaattgtttatttaatgggatg

SEQ ID NO: 123843 - DNA, 60 bp, Artificial
  Synthetic oligonucleotide
taatgggatgtgtgtcaagcaaaattttgaaagagcaatgattgcagcgactgatgccga

SEQ ID NO: 123844 - DNA, 60 bp, Artificial
  Synthetic oligonucleotide
ctgctcgaagattatcgcaaaagtggaatgatggatgaagcggtgaagcagtccgcattg

SEQ ID NO: 123845 - DNA, 60 bp, Artificial
  Synthetic oligonucleotide
agattggatgactcgctgtcggcggtgccatacatctatgtaccaatcagagaaggccaa

SEQ ID NO: 123846 - DNA, 60 bp, Artificial
  Synthetic oligonucleotide
ctcaaccgtacgaagaggacatcgaagggaaaatgaagagatgtggcgtacaactgctcg

SEQ ID NO: 123847 - DNA, 60 bp, Artificial
  Synthetic oligonucleotide
gtacaactgctcgaagattatcgcaaaagtggaatgatggatgaagcggtgaagcagtcc

SEQ ID NO: 123848 - DNA, 60 bp, Artificial
  Synthetic oligonucleotide
ggatgactcgctgtcggcggtgccatacatctatgtaccaatcagagaaggccaaatcgt

SEQ ID NO: 123849 - DNA, 60 bp, Artificial
  Synthetic oligonucleotide
atcgggtgatgaaaactggcaaagctggctactaccaatgatcatagtacgggagggatt

SEQ ID NO: 123850 - DNA, 60 bp, Artificial
  Synthetic oligonucleotide
gcactgtgggtcagtcgagttagccggtcccggaaggggtcaacccccacctgaaagggc

SEQ ID NO: 123851 - DNA, 60 bp, Artificial
  Synthetic oligonucleotide
gcactgtgggtcagtcgagttagccggtcccggaagggtgcaacccccacctgaaagggc

SEQ ID NO: 123852 - DNA, 60 bp, Artificial
  Synthetic oligonucleotide
aatgctaaattatgcttgtttcgaagtcattcagtcgtcggtaggcatcggcactgtggg

SEQ ID NO: 123853 - DNA, 60 bp, Artificial
  Synthetic oligonucleotide
ttgtttcgaagtcattcagtcgtcggtaggcatcggcactgtgggtcagtcgagttagcc

SEQ ID NO: 123854 - DNA, 60 bp, Artificial
  Synthetic oligonucleotide
gaaacggatttgagttctgacagtgatgccaatactcgcaaatcaaagcgtaagtaaggc

SEQ ID NO: 123855 - DNA, 60 bp, Artificial
  Synthetic oligonucleotide
cggatttgagttctgacagtgatgccaatactcgcaaatcaaagcgtaagtaaggcttgc

SEQ ID NO: 123856 - DNA, 60 bp, Artificial
  Synthetic oligonucleotide
ccagtgttaacccaggggaaagctcaaaagctgaagccggcacctcgaaatccacgcaaa

SEQ ID NO: 123857 - DNA, 60 bp, Artificial
  Synthetic oligonucleotide
cgaaatctacgcaaaaggcgtacgacagaaaggataagtccccttctaaaggcaaaaatt

SEQ ID NO: 123858 - DNA, 50 bp, Artificial
  Synthetic oligonucleotide
tgctctcgacaggaaattacctgccaatctgaaagtaccatacatgaaaa

SEQ ID NO: 123859 - DNA, 60 bp, Artificial
  Synthetic oligonucleotide
tgctctcgacaggaaattacctgccaatctgaaagtaccatacatgaaaaatgctaaata

SEQ ID NO: 123860 - DNA, 60 bp, Artificial
  Synthetic oligonucleotide
ggtaaatgagtggaacattacccttggctatgacggcgagtgaatcattcgttggcatgc

SEQ ID NO: 123861 - DNA, 60 bp, Artificial
  Synthetic oligonucleotide
gttggcatgcaagttttggctcaagacaaagaagtcaaagcgacctttattgctctcgac

SEQ ID NO: 123862 - DNA, 60 bp, Artificial
  Synthetic oligonucleotide
ggcatgcaagttttggctcaagacaaagaagtcaaagcgacctttattgctctcgacagg

SEQ ID NO: 123863 - DNA, 60 bp, Artificial
  Synthetic oligonucleotide
atgctaaatatagaacttgtatttgtccaagttcaaaccatttggtagatgactgtgtat

SEQ ID NO: 123864 - DNA, 60 bp, Artificial
  Synthetic oligonucleotide
atgctaaatatagaacttgtatttgtccaagttcaaaccatttagtagatgactgtgtat

SEQ ID NO: 123865 - DNA, 60 bp, Artificial
  Synthetic oligonucleotide
gaacttgtatttgtccaagttcaaaccatttagtagatgactgtgtatgcgaagatgtga

SEQ ID NO: 123866 - DNA, 60 bp, Artificial
  Synthetic oligonucleotide
gaacttgtatttgtccaagttcaaaccatttggtagatgactgtgtatgcgaagatgtga

SEQ ID NO: 123867 - DNA, 60 bp, Artificial
  Synthetic oligonucleotide
gactgtgtatgcgaagatgtgattattgcgtataccgcacacagaaataatgcggtagct

SEQ ID NO: 123868 - DNA, 60 bp, Artificial
  Synthetic oligonucleotide
gactgtgtatgcgaagatgtgattattgcgtatactgcacacagaaataatgcggtagct

SEQ ID NO: 123869 - DNA, 60 bp, Artificial
  Synthetic oligonucleotide
gtgtatgcgaagatgtgattattgcgtatactgcacacagaaataatgcggtagctgccc

SEQ ID NO: 123870 - DNA, 60 bp, Artificial
  Synthetic oligonucleotide
gtgtatgcgaagatgtgattattgcgtataccgcacacagaaataatgcggtagctgccc

SEQ ID NO: 123871 - DNA, 60 bp, Artificial
  Synthetic oligonucleotide
tgcggtagctgcccttttgtatagtgacggaaacgtcatacacaagagcggtactttgaa

SEQ ID NO: 123872 - DNA, 58 bp, Artificial
  Synthetic oligonucleotide
tgcggtagctgcccttttgtatagtgacggaaacgtcatacacaggagcggtactttg

SEQ ID NO: 123873 - DNA, 60 bp, Artificial
  Synthetic oligonucleotide
agagggagcctcgattgattcgtggctagaattactgcgtcacttataatgcgtgactgc

SEQ ID NO: 123874 - DNA, 60 bp, Artificial
  Synthetic oligonucleotide
ggatgagagagggagcctcgattgattcgtggctagaattactgcgtcacttataatgcg

SEQ ID NO: 123875 - DNA, 60 bp, Artificial
  Synthetic oligonucleotide
gaaaaaggggatgagagagggagcctcgattgattcgtggctagaattactgcgtcactt

SEQ ID NO: 123876 - DNA, 60 bp, Artificial
  Synthetic oligonucleotide
gaaaatggggatgagagagggagcctcgattgattcgtggctagaattactgcgtcactt

SEQ ID NO: 123877 - DNA, 60 bp, Artificial
  Synthetic oligonucleotide
cgtgctgagggtccgaaacccaacattacatgaaacggctgacgaactgaaacggatggg

SEQ ID NO: 123878 - DNA, 60 bp, Artificial
  Synthetic oligonucleotide
agccacgagcggatctgttttatttgaccaatcggtgcaacatgggattggagcctagta

SEQ ID NO: 123879 - DNA, 60 bp, Artificial
  Synthetic oligonucleotide
gccacgagcggatctgttttatttgaccaatcggtgcaacatgggattggagcctagtat

SEQ ID NO: 123880 - DNA, 60 bp, Artificial
  Synthetic oligonucleotide
cgttgaatcatccgtgctgagggtccgaaacccaacattacatgaaacggctgacgaact

SEQ ID NO: 123881 - DNA, 60 bp, Artificial
  Synthetic oligonucleotide
tcttttttcacacaaccaaagtttcgcaccaattacccgattttgccgttggtcagcctc

SEQ ID NO: 123882 - DNA, 60 bp, Artificial
  Synthetic oligonucleotide
tcttttttcacacaaccaaagtttcgcaccaattacccgattttgccgttggtcagacga

SEQ ID NO: 123883 - DNA, 61 bp, Artificial
  Synthetic oligonucleotide
cgtgaaattgaacaagttgaattgcttaaacgtatacatgacaacttaataactagaccgg

SEQ ID NO: 123884 - DNA, 60 bp, Artificial
  Synthetic oligonucleotide
ttaactactcgtgaaattgaacaagttgaattgcttaaacgtatacatgacaacctgata

SEQ ID NO: 123885 - DNA, 60 bp, Artificial
  Synthetic oligonucleotide
attgaacaagttgaattgcttaaacgtatacatgacaacctgataactagaccagttgac

SEQ ID NO: 123886 - DNA, 60 bp, Artificial
  Synthetic oligonucleotide
cctccttaatgcacaaaattatggaataaatcttccgattactggctcaatggacacacc

SEQ ID NO: 123887 - DNA, 60 bp, Artificial
  Synthetic oligonucleotide
cctccttaatgcacaaaattatggaataaatcttccgattactgggtcaatggacacacc

SEQ ID NO: 123888 - DNA, 60 bp, Artificial
  Synthetic oligonucleotide
agttatattatcccccctccttaatgcacaaaattatggaataaatcttccgattactgg

SEQ ID NO: 123889 - DNA, 60 bp, Artificial
  Synthetic oligonucleotide
agttatattatcacccctccttaatgcacaaaattatggaataaatcttccgattactgg

SEQ ID NO: 123890 - DNA, 60 bp, Artificial
  Synthetic oligonucleotide
gggtcaatggacacaccatatacgaactcaacgcgagaggaagtattcctaacttcgact

SEQ ID NO: 123891 - DNA, 60 bp, Artificial
  Synthetic oligonucleotide
ggctcaatggacacaccatatacgaactcaacgcgagaggaagtattcctaacttccact

SEQ ID NO: 123892 - DNA, 60 bp, Artificial
  Synthetic oligonucleotide
cgattactgggtcaatggacacaccatatacgaactcaacgcgagaggaagtattcctaa

SEQ ID NO: 123893 - DNA, 60 bp, Artificial
  Synthetic oligonucleotide
cgattactggctcaatggacacaccatatacgaactcaacgcgagaggaagtattcctaa

SEQ ID NO: 123894 - DNA, 60 bp, Artificial
  Synthetic oligonucleotide
tcaaaggatggccaacaggatctatttattttaaagattatactgatattgcctcgtttt

SEQ ID NO: 123895 - DNA, 60 bp, Artificial
  Synthetic oligonucleotide
tcatggaaggatacactttctcagctatttttaatcaaaggatggccaacaggatctatt

SEQ ID NO: 123896 - DNA, 60 bp, Artificial
  Synthetic oligonucleotide
gccaacaggatctatttattttaaagattatactgatattgcctcgttttcagtcgatcc

SEQ ID NO: 123897 - DNA, 60 bp, Artificial
  Synthetic oligonucleotide
aggatctatttattttaaagattatactgatattgcctcgttttcagtcgatccacaact

SEQ ID NO: 123898 - DNA, 66 bp, Artificial
  Synthetic oligonucleotide
gatctatttattttaaagattatactgatattgcctcgttttcagtcgatccacaactgtattggg

SEQ ID NO: 123899 - DNA, 60 bp, Artificial
  Synthetic oligonucleotide
gcctcgttttcagtcgatccacaactgtattgggattataatttggtattaatgaaatat

SEQ ID NO: 123900 - DNA, 60 bp, Artificial
  Synthetic oligonucleotide
cgatccacaactgtattgggattataatttggtattaatgaaatatgacgctacactgca

SEQ ID NO: 123901 - DNA, 60 bp, Artificial
  Synthetic oligonucleotide
aatgaaatatgacgctacactgcaactagacatgtccgaactaacaaatttgttacttaa

SEQ ID NO: 123902 - DNA, 60 bp, Artificial
  Synthetic oligonucleotide
accctgcaactagacatgtccgaactaacaaatttgttacttaatgagggggtatgtaat

SEQ ID NO: 123903 - DNA, 60 bp, Artificial
  Synthetic oligonucleotide
tactgacgttgtagatggagtcaatcataaattgaacgtgacaacaaacacttgtacgat

SEQ ID NO: 123904 - DNA, 60 bp, Artificial
  Synthetic oligonucleotide
gacgttgtagatggagtcaatcataaattgaacgtgacaacaaacacttgtacgattaga

SEQ ID NO: 123905 - DNA, 52 bp, Artificial
  Synthetic oligonucleotide
ttgttgaattacgtactcaaatccttaactagaataatggactttattattt

SEQ ID NO: 123906 - DNA, 52 bp, Artificial
  Synthetic oligonucleotide
ttgttgaattacgtacttaaatccttaactagaataatggactttattattt

SEQ ID NO: 123907 - DNA, 60 bp, Artificial
  Synthetic oligonucleotide
ttctacagggtggtggcccagatgtacttgacataacagctgatccaacgacaatgcccc

SEQ ID NO: 123908 - DNA, 60 bp, Artificial
  Synthetic oligonucleotide
cacctgttatcgtcgccatggcttcctcactcagagctgcgatctcaaagatcaagcgcg

SEQ ID NO: 123909 - DNA, 60 bp, Artificial
  Synthetic oligonucleotide
ggacaagcaagacgtgagtgctatgctaaatatgaaatttactttcaatgcttatacgtt

SEQ ID NO: 123910 - DNA, 60 bp, Artificial
  Synthetic oligonucleotide
cttatacgtttgtatgttattcaatcatgctgatgcagtaactaggacaccacgtacacg

SEQ ID NO: 123911 - DNA, 60 bp, Artificial
  Synthetic oligonucleotide
cagaaggtaaacgtaacagatgcgtttgaggatttgactttcttatatcgtcgtgcacca

SEQ ID NO: 123912 - DNA, 55 bp, Artificial
  Synthetic oligonucleotide
gactttcttatatcgtcgtgcaccaacggagactatgcctcggtttgatatcgta

SEQ ID NO: 123913 - DNA, 53 bp, Artificial
  Synthetic oligonucleotide
gtcgggtcatgagtactatgatgatgcaaaagttaagaaatttgctgcttgct

SEQ ID NO: 123914 - DNA, 60 bp, Artificial
  Synthetic oligonucleotide
tttcagattcctgctcagaaggtaaacgtaacagatgcgtttgaggatttgactttctta

SEQ ID NO: 123915 - DNA, 60 bp, Artificial
  Synthetic oligonucleotide
gtgccaatcggatacctctcaacaagtggaataattcaccgcactcaacggtcgggtcat

SEQ ID NO: 123916 - DNA, 60 bp, Artificial
  Synthetic oligonucleotide
ccaatcggatacctctcaacaagtggaataattcaccgcactcaacggtcgggtcatgag

SEQ ID NO: 123917 - DNA, 60 bp, Artificial
  Synthetic oligonucleotide
caggatataattctaattacattagtagcttgtgttcgttggataaagacgtgccaatcg

SEQ ID NO: 123918 - DNA, 60 bp, Artificial
  Synthetic oligonucleotide
attacattagtagcttgtgttcgttggataaagacgtgccaatcggatacctctcaacaa

SEQ ID NO: 123919 - DNA, 60 bp, Artificial
  Synthetic oligonucleotide
ggaggaatatgtatgagacaaagcttacccaatatgatgagcgtcttaataaacgcattg

SEQ ID NO: 123920 - DNA, 60 bp, Artificial
  Synthetic oligonucleotide
gagacaaagcttacccaatatgatgagcgtcttaataaacgcattggctctatgtcgtaa

SEQ ID NO: 123921 - DNA, 60 bp, Artificial
  Synthetic oligonucleotide
aaacgcattggctctatgtcgtaaaccctcatttatctattgatacgcgccgtgactggt

SEQ ID NO: 123922 - DNA, 60 bp, Artificial
  Synthetic oligonucleotide
ggctctatgtcgtaaaccctcatttatctattgatacgcgccgtgactggtttgggatgg

SEQ ID NO: 123923 - DNA, 60 bp, Artificial
  Synthetic oligonucleotide
cgaaaatgagttagtatcgcctatattatgcccagactttcacgcaggatataattctaa

SEQ ID NO: 123924 - DNA, 60 bp, Artificial
  Synthetic oligonucleotide
tagtatcgaaaatgagttagtatcgcctatattatgcccagactttcacgcaggatataa

SEQ ID NO: 123925 - DNA, 60 bp, Artificial
  Synthetic oligonucleotide
acgtctgatcaagccgtagtccaagcagagacattcataacagacatagaatttgttgac

SEQ ID NO: 123926 - DNA, 60 bp, Artificial
  Synthetic oligonucleotide
cattaatacgtctgatcaagccgtagtccaagcagagacattcataacagacatagaatt

SEQ ID NO: 123927 - DNA, 60 bp, Artificial
  Synthetic oligonucleotide
cgatagtgtgtgcttcaaacgactttgatgttggtcggaggaatatgtatgagacaaagc

SEQ ID NO: 123928 - DNA, 60 bp, Artificial
  Synthetic oligonucleotide
tactagattttatgcgatagtgtgtgcttcaaacgactttgatgttggtcggaggaatat

SEQ ID NO: 123929 - DNA, 60 bp, Artificial
  Synthetic oligonucleotide
gccatgactaacagcgagatgattttacaacaagcatatcacggagatgaagcggcttta

SEQ ID NO: 123930 - DNA, 60 bp, Artificial
  Synthetic oligonucleotide
agccatgactaacagcgagatgattttacaacaagcatatcacggagatgaagcggcttt

SEQ ID NO: 123931 - DNA, 60 bp, Artificial
  Synthetic oligonucleotide
gtacacgtaataatactatacacattggagacttcagccgtcagcgtacctcttctcgag

SEQ ID NO: 123932 - DNA, 60 bp, Artificial
  Synthetic oligonucleotide
cacgtacacgtaataatactatacacattggagacttcagccgtcagcgtacctcttctc

SEQ ID NO: 123933 - DNA, 60 bp, Artificial
  Synthetic oligonucleotide
gactttgcgcgatcttaaacaacatcactacaacaatactagattttatgcgatagtgtg

SEQ ID NO: 123934 - DNA, 60 bp, Artificial
  Synthetic oligonucleotide
cacttagaagacatgactttgcgcgatcttaaacaacatcactacaacaatactagattt

SEQ ID NO: 123935 - DNA, 60 bp, Artificial
  Synthetic oligonucleotide
aaatgtatgagagaattgatcagcatactctcgctcacttagaagacatgactttgcgcg

SEQ ID NO: 123936 - DNA, 60 bp, Artificial
  Synthetic oligonucleotide
aagcggctttaactcaaatgtatgagagaattgatcagcatactctcgctcacttagaag

SEQ ID NO: 123937 - DNA, 60 bp, Artificial
  Synthetic oligonucleotide
gaacgtatgatgcgagtaaattggaagaaatggtggcaagttttcttatacagtagtaga

SEQ ID NO: 123938 - DNA, 60 bp, Artificial
  Synthetic oligonucleotide
ctgaacgtatgatgcgagtaaattggaagaaatggtggcaagttttctatacggtagtag

SEQ ID NO: 123939 - DNA, 60 bp, Artificial
  Synthetic oligonucleotide
cactaacggaaatcactacatcttgggtactctgacgcagatggttagtgcacctccgca

SEQ ID NO: 123940 - DNA, 60 bp, Artificial
  Synthetic oligonucleotide
gagcagcacttgtacgaaggccataggaaaatccagttaataaaatgcgcttttactcat

SEQ ID NO: 123941 - DNA, 60 bp, Artificial
  Synthetic oligonucleotide
tgtcgaatcaaacgggcgcaactatggcgcaaaaagtagagaaggttgcttatgcttcgt

SEQ ID NO: 123942 - DNA, 60 bp, Artificial
  Synthetic oligonucleotide
tgcaactgctcgaggattaccgcaaaagtgggatgatggatgaggccgtgaagcagtctg

SEQ ID NO: 123943 - DNA, 60 bp, Artificial
  Synthetic oligonucleotide
gtgtgtccgatgggattgtgaatagaaagaatgtcaaagtgtgcgttggtttcgaccctt

SEQ ID NO: 123944 - DNA, 60 bp, Artificial
  Synthetic oligonucleotide
gtgtgtccgacgggattgtgaatagaaagaatgtcaaagtgtgtgttggttttgaccctt

SEQ ID NO: 123945 - DNA, 60 bp, Artificial
  Synthetic oligonucleotide
gtgtccgacgggattgtgaatagaaagaatgtcaaagtgtgtgttggttttgaccctttg

SEQ ID NO: 123946 - DNA, 61 bp, Artificial
  Synthetic oligonucleotide
ccatgtgtgaatgtaaacatatggagaagagagatagcatataaagcaaatggaatatgtc

SEQ ID NO: 123947 - DNA, 60 bp, Artificial
  Synthetic oligonucleotide
gttgaatggtttgaaaactttactcaattaacgggaatgcattatgacttcattaaaaca

SEQ ID NO: 123948 - DNA, 60 bp, Artificial
  Synthetic oligonucleotide
aatatctctatcttctgtcataccagatggacacgctttatataccaacattgacatatt

SEQ ID NO: 123949 - DNA, 60 bp, Artificial
  Synthetic oligonucleotide
ccaatttctgagtgtgattatttaatcgaagcatgcctatgtaacgaaaacaatgaatgg

SEQ ID NO: 123950 - DNA, 60 bp, Artificial
  Synthetic oligonucleotide
acgaaaacaatgaatggaaattttcagctgtaatgggaagagacaaaatacctgtaacta

SEQ ID NO: 123951 - DNA, 60 bp, Artificial
  Synthetic oligonucleotide
agtcagatggtattgtttgagtattggattatgtataaagactattttctaagtaaattc

SEQ ID NO: 123952 - DNA, 60 bp, Artificial
  Synthetic oligonucleotide
acgtagaccaatttctgagtgtgattatttaatcgaagcatgcctatgtaacgaaaacaa

SEQ ID NO: 123953 - DNA, 60 bp, Artificial
  Synthetic oligonucleotide
ggctttaaaaaagagctggacttggaggtgtgtcaacatggcaaattcatttagagaaat

SEQ ID NO: 123954 - DNA, 60 bp, Artificial
  Synthetic oligonucleotide
atggaatatgtcttaactgtctaaatgaatgtaaagtttgtccatgtgattattgtggaa

SEQ ID NO: 123955 - DNA, 60 bp, Artificial
  Synthetic oligonucleotide
accatgtgtgaatgtaaacatatggagaagagagatagcatataaagcaaatggaatatg

SEQ ID NO: 123956 - DNA, 60 bp, Artificial
  Synthetic oligonucleotide
agctggacttggaggtgtgtcaacatggcaaattcatttagagaaatgctgtattggtac

SEQ ID NO: 123957 - DNA, 60 bp, Artificial
  Synthetic oligonucleotide
ggatgtgctatgatcctccaaaatctgtgtctgatcgcaacagactaaactctatgtggc

SEQ ID NO: 123958 - DNA, 60 bp, Artificial
  Synthetic oligonucleotide
tggatgtgctatgatcctccaaaatctgtgtctgatcgcaacagactaaactctatgtgg

SEQ ID NO: 123959 - DNA, 60 bp, Artificial
  Synthetic oligonucleotide
cttctgtcataccagatggacacgctttatataccaacattgacatattaaggatttctc

SEQ ID NO: 123960 - DNA, 52 bp, Artificial
  Synthetic oligonucleotide
ttgacatattaaggatttctcttatgttagctattgatgttgctttaaatag

SEQ ID NO: 123961 - DNA, 60 bp, Artificial
  Synthetic oligonucleotide
caatcgatgtcatgcctgatatatatgacttcgttaaacccattggcgctgtgctgccta

SEQ ID NO: 123962 - DNA, 60 bp, Artificial
  Synthetic oligonucleotide
ggcaggatgtaaagagcaggttactactaaagacgaaattgagcaacagatggacagaat

SEQ ID NO: 123963 - DNA, 60 bp, Artificial
  Synthetic oligonucleotide
gttgcacacaatattggaggatccgggaatggcatattttccttacgttgcatctgtcct

SEQ ID NO: 123964 - DNA, 55 bp, Artificial
  Synthetic oligonucleotide
attgagtgttatcactctaatgaacagtacgttgcacacaatattggaggatccg

SEQ ID NO: 123965 - DNA, 60 bp, Artificial
  Synthetic oligonucleotide
cttaccgacctcaactacacattgagtgttatcactctaatgaacagtacgttgcacaca

SEQ ID NO: 123966 - DNA, 60 bp, Artificial
  Synthetic oligonucleotide
acgatatttaacacgctactgaagttggcgggttacaaagaacaaataactactaaagat

SEQ ID NO: 123967 - DNA, 60 bp, Artificial
  Synthetic oligonucleotide
gcacacaatattggaggatccgggaatggcatattttccttacgttgcatctgtcctaac

SEQ ID NO: 123968 - DNA, 60 bp, Artificial
  Synthetic oligonucleotide
aaatagacatgacgaaagaaattaatcaaaagaatataaaaacgatagaagaatggggaa

SEQ ID NO: 123969 - DNA, 60 bp, Artificial
  Synthetic oligonucleotide
actgtctccggaagcgtcggagttcttgacagtaagccccatcggacctgatggctggct

SEQ ID NO: 123970 - DNA, 60 bp, Artificial
  Synthetic oligonucleotide
tgaattactaaaacgcattcatgatagattgatggtgcggccgattgacgaaatagacat

SEQ ID NO: 123971 - DNA, 60 bp, Artificial
  Synthetic oligonucleotide
cgcattcatgatagattgatggtgcggccgattgacgaaatagacatgacgaaagaaatt

SEQ ID NO: 123972 - DNA, 60 bp, Artificial
  Synthetic oligonucleotide
aacacgctactgaagttggcgggttacaaagaacaaataactactaaagatgagattgag

SEQ ID NO: 123973 - DNA, 60 bp, Artificial
  Synthetic oligonucleotide
cgtcagttggaaatgattgacaagttgactacacgtgaaatagaacaagttgaattacta

SEQ ID NO: 123974 - DNA, 60 bp, Artificial
  Synthetic oligonucleotide
gaggaagatatatttagcgttaatgttcccaggtcaaataatcttagatttaaaaataga

SEQ ID NO: 123975 - DNA, 60 bp, Artificial
  Synthetic oligonucleotide
gagaaagatatatttagcgttaatgttcccaggtcaaataatcttagatttaaaaataga

SEQ ID NO: 123976 - DNA, 60 bp, Artificial
  Synthetic oligonucleotide
ccactaatatcatatcgacatattgtgatgcaatccagagatagatttttacgggttgat

SEQ ID NO: 123977 - DNA, 60 bp, Artificial
  Synthetic oligonucleotide
gggaagacgtaaacgtatgaccttttcgcaggagtttctcacagattttagacgagcgga

SEQ ID NO: 123978 - DNA, 60 bp, Artificial
  Synthetic oligonucleotide
tttctatttggtacgcgttcaatcgatcttttgaaccaacgcgcagaaacgagatgttag

SEQ ID NO: 123979 - DNA, 60 bp, Artificial
  Synthetic oligonucleotide
ggaaccggtacgtgcaatcatggatctagcgcattcgcacagtttcataaatatccgaga

SEQ ID NO: 123980 - DNA, 60 bp, Artificial
  Synthetic oligonucleotide
ggaaccggtacgtgcaatcatggatctagcgcattcgcacagtttcataaatattcgaga

SEQ ID NO: 123981 - DNA, 60 bp, Artificial
  Synthetic oligonucleotide
tggatctagcgcattcgcacagtttcataaatattcgagatatgatgcgatggattggtc

SEQ ID NO: 123982 - DNA, 60 bp, Artificial
  Synthetic oligonucleotide
gcaggcgcgcaagaaaggatggaccctgtggtgttggatattagttggatttctatttgg

SEQ ID NO: 123983 - DNA, 60 bp, Artificial
  Synthetic oligonucleotide
cgcaggcgcgcaagaaaggatggaccctgtggtgttggatattagttggatttctatttg

SEQ ID NO: 123984 - DNA, 50 bp, Artificial
  Synthetic oligonucleotide
atataacggatggggattagtagatgttgaaaatagagagccagcaccat

SEQ ID NO: 123985 - DNA, 60 bp, Artificial
  Synthetic oligonucleotide
atttagcattaatgtttccaggtcaaataatcttagatttaaaaatagatccgggtgaaa

SEQ ID NO: 123986 - DNA, 60 bp, Artificial
  Synthetic oligonucleotide
ggaagatgcgtatcatggatattacgcaagcacttaaggtgggcaccaagctagctgctc

SEQ ID NO: 123987 - DNA, 60 bp, Artificial
  Synthetic oligonucleotide
tttctatttggtacgcgttcaatcgatcttttgaaccaacgcgcagaaatgagatgttag

SEQ ID NO: 123988 - DNA, 60 bp, Artificial
  Synthetic oligonucleotide
tttctatttggtacgcgttcaatcgatcttttgaaccaacgcgtagaaatgagatgttag

SEQ ID NO: 123989 - DNA, 60 bp, Artificial
  Synthetic oligonucleotide
cactgatatcatatcggcatatcgtgatgcaatccagagatagatttttacgggttgata

SEQ ID NO: 123990 - DNA, 60 bp, Artificial
  Synthetic oligonucleotide
atggaaagatacactatctcagctgtttttaaccaaaggatggccgacaagttcagttta

SEQ ID NO: 123991 - DNA, 56 bp, Artificial
  Synthetic oligonucleotide
atggaaagatacactatctcagctgtttttaaccaaaggatggccgacaagttcag

SEQ ID NO: 123992 - DNA, 60 bp, Artificial
  Synthetic oligonucleotide
gggtggcgtaaacatgagagcaggcgttatcgttgcatacgacggtcaggctccggttaa

SEQ ID NO: 123993 - DNA, 60 bp, Artificial
  Synthetic oligonucleotide
caccaaatcaaccaagaaatcaaaccaaccacaatcaagaagaaagaactagcgccaacg

SEQ ID NO: 123994 - DNA, 60 bp, Artificial
  Synthetic oligonucleotide
cgatccactcaagcatccaaagttatacgaagaatatggcctatacttacgtcctcacca

SEQ ID NO: 123995 - DNA, 60 bp, Artificial
  Synthetic oligonucleotide
acttacgtcctcaccaaatcaaccaagaaatcaaaccaaccacaatcaagaagaaagaac

SEQ ID NO: 123996 - DNA, 60 bp, Artificial
  Synthetic oligonucleotide
ccaacgattcgctccatcaaatacgcttcactaatacatagcatgctcgcaaagcacgcc

SEQ ID NO: 123997 - DNA, 60 bp, Artificial
  Synthetic oligonucleotide
gccaacgattcgctccatcaaatacgcttcactaatacacagcatgctcgcgaaacacgc

SEQ ID NO: 123998 - DNA, 60 bp, Artificial
  Synthetic oligonucleotide
aagaaagaattagcgccaacgattcgctccatcaaatacgcttcactaatacatagcatg

SEQ ID NO: 123999 - DNA, 60 bp, Artificial
  Synthetic oligonucleotide
aagaaagaactagcgccaacgattcgctccatcaaatacgcttcactaatacacagcatg

SEQ ID NO: 124000 - DNA, 60 bp, Artificial
  Synthetic oligonucleotide
cgcaatcgatccactcaagcatccaaagttatacgaagaatatggcctatacttacgtcc

SEQ ID NO: 124001 - DNA, 60 bp, Artificial
  Synthetic oligonucleotide
caccaaatcaaccaagaaatcaaaccaaccacaatcaagaagaaagaattagcgccaacg

SEQ ID NO: 124002 - DNA, 60 bp, Artificial
  Synthetic oligonucleotide
acttacgtcctcaccaaatcaaccaagaaatcaaaccaaccacaatcaagaagaaagaat

SEQ ID NO: 124003 - DNA, 60 bp, Artificial
  Synthetic oligonucleotide
caggagggatgggacaaaacaatctcagcacagccagatatgatggtatgtggtggcgcc

SEQ ID NO: 124004 - DNA, 60 bp, Artificial
  Synthetic oligonucleotide
gtgttgactgttctgttcactttgcataaagcatcaattccaacaatgaaaattgcgtta

SEQ ID NO: 124005 - DNA, 60 bp, Artificial
  Synthetic oligonucleotide
aattgcgttaaaaacatccagatgttcttacaaagttattaagtattgcattgtaaccat

SEQ ID NO: 124006 - DNA, 60 bp, Artificial
  Synthetic oligonucleotide
gaatggaaagaatccatacgaaccaagtgaagtgaccgcatcattgtgagaggttgggct

SEQ ID NO: 124007 - DNA, 60 bp, Artificial
  Synthetic oligonucleotide
gctagatgaatgggagaatggaaagaatccatacgaaccaagtgaagtgaccgcatcatt

SEQ ID NO: 124008 - DNA, 60 bp, Artificial
  Synthetic oligonucleotide
ccgcatcattgtgagaggttgggctgccgtcgactgtcctcggaagcggcggagtccttc

SEQ ID NO: 124009 - DNA, 60 bp, Artificial
  Synthetic oligonucleotide
gacgtcagttggaaatgattgataaattgacaactcgtgaaattgagcaggtggagctgc

SEQ ID NO: 124010 - DNA, 60 bp, Artificial
  Synthetic oligonucleotide
agtcagagaaatgagacgtcagttggaaatgattgataaattgacaactcgtgaaattga

SEQ ID NO: 124011 - DNA, 60 bp, Artificial
  Synthetic oligonucleotide
gagcaggtggagctgctaagacgtatatacgacagattaacggtacagaagactgacgaa

SEQ ID NO: 124012 - DNA, 60 bp, Artificial
  Synthetic oligonucleotide
gtgaaattgagcaggtggagctgctaagacgtatatacgacagattaacggtacagaaga

SEQ ID NO: 124013 - DNA, 60 bp, Artificial
  Synthetic oligonucleotide
cttaccgacctcaattacacattgagtgtgatcactttaatgaatagtacattgcataaa

SEQ ID NO: 124014 - DNA, 66 bp, Artificial
  Synthetic oligonucleotide
ccgacctcaattacacattgagtgtgatcactttaatgaatagtacattgcataaaatattggaag

SEQ ID NO: 124015 - DNA, 60 bp, Artificial
  Synthetic oligonucleotide
ctgctagacggctgaagcgggactcatacgcaggagtggttaagcgtgggtatacgcgct

SEQ ID NO: 124016 - DNA, 60 bp, Artificial
  Synthetic oligonucleotide
ttcgcatcgtacgcggaagcgtttcgtgatgatgtgagattgagacagatcaaacgccat

SEQ ID NO: 124017 - DNA, 60 bp, Artificial
  Synthetic oligonucleotide
gagatagactttctgaaagaaggagttaaaatcggattacatcaagttggaacatcgttt

SEQ ID NO: 124018 - DNA, 60 bp, Artificial
  Synthetic oligonucleotide
ctgaaagaaggagttaaaatcggattacatcaagttggaacatcgtttagaatggtcgag

SEQ ID NO: 124019 - DNA, 55 bp, Artificial
  Synthetic oligonucleotide
ggacacgactcacatggcgacgggcgctcaggagtgataaacctgccgccgtcat

SEQ ID NO: 124020 - DNA, 60 bp, Artificial
  Synthetic oligonucleotide
tgatggagatcaattcggtgttaggcgagtagaagggacacgactcacatggcgacgggc

SEQ ID NO: 124021 - DNA, 60 bp, Artificial
  Synthetic oligonucleotide
atgtcatggtgaacttgatggagatcaattcggtgttaggcgagtagaagggacacgact

SEQ ID NO: 124022 - DNA, 60 bp, Artificial
  Synthetic oligonucleotide
agttattaaccctgtgtttagtgaaagccataacttcgaacatgatgactagtagaacac

SEQ ID NO: 124023 - DNA, 60 bp, Artificial
  Synthetic oligonucleotide
ctgtgtttagtgaaagccataacttcgaacatgatgactagtagaacacctgataggagc

SEQ ID NO: 124024 - DNA, 60 bp, Artificial
  Synthetic oligonucleotide
gtcaattatgcgggagcaaattagatgggcatcaagtgcacataattggcttagtaaatt

SEQ ID NO: 124025 - DNA, 60 bp, Artificial
  Synthetic oligonucleotide
gcgggagcaaattagatgggcatcaagtgcacataattggcttagtaaattggcaaaacg

SEQ ID NO: 124026 - DNA, 60 bp, Artificial
  Synthetic oligonucleotide
ttagtaaattggcaaaacgaaataacgaaaacttaatgcatacaggaattatatcgcgtt

SEQ ID NO: 124027 - DNA, 60 bp, Artificial
  Synthetic oligonucleotide
aattaaaggagggttcgttaaaacgagaggaatcaaaagaagtacgagatgaaagccaag

SEQ ID NO: 124028 - DNA, 60 bp, Artificial
  Synthetic oligonucleotide
ggagggttcgttaaaacgagaggaatcaaaagaagtacgagatgaaagccaaggtatact

SEQ ID NO: 124029 - DNA, 50 bp, Artificial
  Synthetic oligonucleotide
atctcagctacgtttcatatcagaaattgagtgtatctaaaaggcgagaa

SEQ ID NO: 124030 - DNA, 60 bp, Artificial
  Synthetic oligonucleotide
gtatattagtatctacgagaaaattattgatgatttcatgacgaaagaaaatctcagcta

SEQ ID NO: 124031 - DNA, 51 bp, Artificial
  Synthetic oligonucleotide
agggcagatagacagaaggctgatagacggacttgaagaattcaacgaaaa

SEQ ID NO: 124032 - DNA, 60 bp, Artificial
  Synthetic oligonucleotide
agggcagatagacagaaggctgatagacggacttgaagaattcaacgaaaaagcatttta

SEQ ID NO: 124033 - DNA, 60 bp, Artificial
  Synthetic oligonucleotide
tggttcatgagatggtacctgtgaatagcatattaatattagaagcgcatagaataacac

SEQ ID NO: 124034 - DNA, 60 bp, Artificial
  Synthetic oligonucleotide
aagcattttatgacatggttcatgagatggtacctgtgaatagcatattaatattagaag

SEQ ID NO: 124035 - DNA, 60 bp, Artificial
  Synthetic oligonucleotide
gcatagaataacacaagacgctgttttgggaggaaccgatatttcaatgttatatcaagg

SEQ ID NO: 124036 - DNA, 60 bp, Artificial
  Synthetic oligonucleotide
atattagaagcgcatagaataacacaagacgctgttttgggaggaaccgatatttcaatg

SEQ ID NO: 124037 - DNA, 60 bp, Artificial
  Synthetic oligonucleotide
ctacacgatatatatcaaagagattactcttattctcatgtcatggtgaacttgatggag

SEQ ID NO: 124038 - DNA, 60 bp, Artificial
  Synthetic oligonucleotide
tgttgaaatggtgctacacgatatatatcaaagagattactcttattctcatgtcatggt

SEQ ID NO: 124039 - DNA, 60 bp, Artificial
  Synthetic oligonucleotide
agagttaactctttacgtaagcgttccaccactaatgttttcaggatcaattggagaaaa

SEQ ID NO: 124040 - DNA, 60 bp, Artificial
  Synthetic oligonucleotide
gagtgtacatcccacgcgcttcaaaattaatattcaagaagaaagatagagagttaactc

SEQ ID NO: 124041 - DNA, 60 bp, Artificial
  Synthetic oligonucleotide
acggtaagtaatgttttatatactgatgagtattacgcaagactaacatttgaaaagcca

SEQ ID NO: 124042 - DNA, 60 bp, Artificial
  Synthetic oligonucleotide
cacccaaatatatcaatcaattgagagctaaaattaacatcgaaaaagtaacggtaagta

SEQ ID NO: 124043 - DNA, 66 bp, Artificial
  Synthetic oligonucleotide
catcgtttagaatggtcgagatagaaataccatcgttgatgaaattaacacccaaatatatcaatc

SEQ ID NO: 124044 - DNA, 60 bp, Artificial
  Synthetic oligonucleotide
aacatcgtttagaatggtcgagatagaaataccatcgttgatgaaattaacacccaaata

SEQ ID NO: 124045 - DNA, 60 bp, Artificial
  Synthetic oligonucleotide
agagtgtacatcccacgcgcttcaaaattaatattcaagaagaaagatagagagttaact

SEQ ID NO: 124046 - DNA, 60 bp, Artificial
  Synthetic oligonucleotide
gagaatgacgtgaaggcgcttcgtgaaaagggattaagagtgtacatcccacgcgcttca

SEQ ID NO: 124047 - DNA, 60 bp, Artificial
  Synthetic oligonucleotide
atatcatgactgaagagaatgacgtgaaggcgcttcgtgaaaagggattaagagtgtaca

SEQ ID NO: 124048 - DNA, 60 bp, Artificial
  Synthetic oligonucleotide
gatctcaacaacacaaatacgaaagttaaaatcggaagatagattaatatatatcatgac

SEQ ID NO: 124049 - DNA, 60 bp, Artificial
  Synthetic oligonucleotide
ggaactattggacggtagaaatggtcgaagatgttttagaatagactcggacgcgccagg

SEQ ID NO: 124050 - DNA, 60 bp, Artificial
  Synthetic oligonucleotide
ttagaatagactcggacgcgccaggaagatggatgttagatgcacaaaacaaaataaaag

SEQ ID NO: 124051 - DNA, 60 bp, Artificial
  Synthetic oligonucleotide
gtagtaacatgcgttctaattggaaataaaggaagtggaaaaacaacagcgactaagcga

SEQ ID NO: 124052 - DNA, 60 bp, Artificial
  Synthetic oligonucleotide
gactaagcgaatggtggaactattggacggtagaaatggtcgaagatgttttagaataga

SEQ ID NO: 124053 - DNA, 60 bp, Artificial
  Synthetic oligonucleotide
caagagccactttacggaaactgttaatggaaatagaatccgaaagaaaagtagtaacat

SEQ ID NO: 124054 - DNA, 60 bp, Artificial
  Synthetic oligonucleotide
gagccactttacggaaactgttaatggaaatagaatccgaaagaaaagtagtaacatgcg

SEQ ID NO: 124055 - DNA, 60 bp, Artificial
  Synthetic oligonucleotide
cgtaagcgttccaccactaatgttttcaggatcaattggagaaaattacgctatgatgtc

SEQ ID NO: 124056 - DNA, 57 bp, Artificial
  Synthetic oligonucleotide
ttggagaaaattacgctatgatgtcaaatgatatagcttcactgtcaatgattccat

SEQ ID NO: 124057 - DNA, 60 bp, Artificial
  Synthetic oligonucleotide
gactcggacgcgccaggaagatggatgttagatgcacaaaacaaaataaaagcgaagagt

SEQ ID NO: 124058 - DNA, 60 bp, Artificial
  Synthetic oligonucleotide
aaaataaaagcgaagagttttgaagaattgctttcatacaataacgacatgtatattagt

SEQ ID NO: 124059 - DNA, 60 bp, Artificial
  Synthetic oligonucleotide
cgttgttcttgtctagatgtgctgaactgttaagtgaaaagttaggggcacctgttggac

SEQ ID NO: 124060 - DNA, 60 bp, Artificial
  Synthetic oligonucleotide
gaaaagttaggggcacctgttggacatgtatcatcggatgcgtatgggagatggtttcat

SEQ ID NO: 124061 - DNA, 60 bp, Artificial
  Synthetic oligonucleotide
gggcacctgttggacatgtatcatcggatgcgtatgggagatggtttcatgcgaatcgag

SEQ ID NO: 124062 - DNA, 60 bp, Artificial
  Synthetic oligonucleotide
tagctgagatgtctgatgtgcttcgtcgtcagttagataacagtgacacgcattcagcac

SEQ ID NO: 124063 - DNA, 60 bp, Artificial
  Synthetic oligonucleotide
gctgagatgtctgatgtgcttcgtcgtcagttagataacagtgacacgcattcagcacgc

SEQ ID NO: 124064 - DNA, 60 bp, Artificial
  Synthetic oligonucleotide
cattcagcacgcaatttctacaacaagttagcaacgcacatcaacacacctagagtacta

SEQ ID NO: 124065 - DNA, 60 bp, Artificial
  Synthetic oligonucleotide
cagcacgcaatttctacaacaagttagcaacgcacatcaacacacctagagtactaattc

SEQ ID NO: 124066 - DNA, 52 bp, Artificial
  Synthetic oligonucleotide
tagagtactaattcttgagggacatatcaacgctcaagatgcggtaatcggc

SEQ ID NO: 124067 - DNA, 60 bp, Artificial
  Synthetic oligonucleotide
acacgtcaattgtgatgcgagaaagagtcagaggaggtcatacccaactctttcttcgtg

SEQ ID NO: 124068 - DNA, 55 bp, Artificial
  Synthetic oligonucleotide
gaaagagtcagaggaggtcatacccaactctttcttcgtgacacatactatactc

SEQ ID NO: 124069 - DNA, 60 bp, Artificial
  Synthetic oligonucleotide
acgacttccagtttatacgttatgatgggttattagtcgaaatgagtggcgcatatggca

SEQ ID NO: 124070 - DNA, 60 bp, Artificial
  Synthetic oligonucleotide
ccctgatgcattcattaagaagaagtttggttataacgacttccagtttatacgttatga

SEQ ID NO: 124071 - DNA, 60 bp, Artificial
  Synthetic oligonucleotide
ctgaccgctccaattaagtataatctcacgtcatatctacgatctatcttcaattgtact

SEQ ID NO: 124072 - DNA, 60 bp, Artificial
  Synthetic oligonucleotide
ctacttacgtatgtatttcaagcgcccatttactctcacagactacaatctgaccgctcc

SEQ ID NO: 124073 - DNA, 60 bp, Artificial
  Synthetic oligonucleotide
caattgtactagttaccctgatgcattcattaagaagaagtttggttataacgacttcca

SEQ ID NO: 124074 - DNA, 60 bp, Artificial
  Synthetic oligonucleotide
gaccgctccaattaagtataatctcacgtcatatctacgatctatcttcaattgtactag

SEQ ID NO: 124075 - DNA, 60 bp, Artificial
  Synthetic oligonucleotide
tcaatggtgccagattatataaaccagatgcttccatactgtgacgcgcatcttgtgcct

SEQ ID NO: 124076 - DNA, 60 bp, Artificial
  Synthetic oligonucleotide
ccgatcctttcagacataaacgaaacagttaatgacgccgctgctacagtagctgtgaat

SEQ ID NO: 124077 - DNA, 60 bp, Artificial
  Synthetic oligonucleotide
actacttacgtatgtatttcaagcgcccatttactctcacagactacaatctgaccgctc

SEQ ID NO: 124078 - DNA, 60 bp, Artificial
  Synthetic oligonucleotide
gattatataaaccagatgcttccatactgtgacgcgcatcttgtgccttcatgggacgga

SEQ ID NO: 124079 - DNA, 60 bp, Artificial
  Synthetic oligonucleotide
tgcgcaaagtactcaaatgaggaaggtgattttagtagtctatgctgagaagggatcagg

SEQ ID NO: 124080 - DNA, 60 bp, Artificial
  Synthetic oligonucleotide
gctgaatatttcgccatctgggctctcaaatggttcaaaagtgctcaaaattacgcctca

SEQ ID NO: 124081 - DNA, 60 bp, Artificial
  Synthetic oligonucleotide
tttaaaggtcggcgatctattcattacgcagtacaccaaactgttatcctatagcactgt

SEQ ID NO: 124082 - DNA, 60 bp, Artificial
  Synthetic oligonucleotide
gcatggtccagttgtctgttaatttaggcagacgcgatttgggtttaaaggtcggcgatc

SEQ ID NO: 124083 - DNA, 60 bp, Artificial
  Synthetic oligonucleotide
gcatatggcatggtccagttgtctgttaatttaggcagacgcgatttgggtttaaaggtc

SEQ ID NO: 124084 - DNA, 60 bp, Artificial
  Synthetic oligonucleotide
tacgttatgatgggttattagtcgaaatgagtggcgcatatggcatggtccagttgtctg

SEQ ID NO: 124085 - DNA, 60 bp, Artificial
  Synthetic oligonucleotide
gcgatcgattacgcgttggaagtgggattagtctggagatagggtagctcgcaggagaca

SEQ ID NO: 124086 - DNA, 60 bp, Artificial
  Synthetic oligonucleotide
gaattattgcgatcgattacgcgttggaagtgggattagtctggagatagggtagctcgc

SEQ ID NO: 124087 - DNA, 60 bp, Artificial
  Synthetic oligonucleotide
atagcactgtgctgaatatttcgccatctgggctctcaaatggttcaaaagtgctcaaaa

SEQ ID NO: 124088 - DNA, 60 bp, Artificial
  Synthetic oligonucleotide
ggtcggcgatctattcattacgcagtacaccaaactgttatcctatagcactgtgctgaa

SEQ ID NO: 124089 - DNA, 60 bp, Artificial
  Synthetic oligonucleotide
agggatcaggtaagacgttgttcttgtctagatgtgctgaactgttaagtgaaaagttag

SEQ ID NO: 124090 - DNA, 60 bp, Artificial
  Synthetic oligonucleotide
gcgcaaagtactcaaatgaggaaggtgattttagtagtctatgctgagaagggatcaggt

SEQ ID NO: 124091 - DNA, 59 bp, Artificial
  Synthetic oligonucleotide
ggtagctcgcaggagacatacctgtgccgaaggccagacaaaggagggtaccgttagct

SEQ ID NO: 124092 - DNA, 60 bp, Artificial
  Synthetic oligonucleotide
aaataaacaactacctgttactgtccggacaatctcagatgcttcattggtacacgacat

SEQ ID NO: 124093 - DNA, 60 bp, Artificial
  Synthetic oligonucleotide
tgttactgtccggacaatctcagatgcttcattggtacacgacatgctcaaaaggcatgc

SEQ ID NO: 124094 - DNA, 60 bp, Artificial
  Synthetic oligonucleotide
ctaagagatcataaacttaaccccaaacaacagacacacaccctcagtcgaaataaacaa

SEQ ID NO: 124095 - DNA, 60 bp, Artificial
  Synthetic oligonucleotide
cttaaccccaaacaacagacacacaccctcagtcgaaataaacaactacctgttactgtc

SEQ ID NO: 124096 - DNA, 60 bp, Artificial
  Synthetic oligonucleotide
taaagttgtaattgatggtaccgtcaagaaaacccaactggatactcttaaaatgagtgg

SEQ ID NO: 124097 - DNA, 60 bp, Artificial
  Synthetic oligonucleotide
gatggtaccgtcaagaaaacccaactggatactcttaaaatgagtggactcacagtagtc

SEQ ID NO: 124098 - DNA, 60 bp, Artificial
  Synthetic oligonucleotide
tacacgacatgctcaaaaggcatgcatcccggcataatggaacgctgatcaacccgaaaa

SEQ ID NO: 124099 - DNA, 60 bp, Artificial
  Synthetic oligonucleotide
ctcaaaaggcatgcatcccggcataatggaacgctgatcaacccgaaaatgtacgccgag

SEQ ID NO: 124100 - DNA, 60 bp, Artificial
  Synthetic oligonucleotide
aaatgagtggactcacagtagtcaagagcagacgaaacaaatcaaaggctccgatccttt

SEQ ID NO: 124101 - DNA, 60 bp, Artificial
  Synthetic oligonucleotide
gtggactcacagtagtcaagagcagacgaaacaaatcaaaggctccgatcctttcagaca

SEQ ID NO: 124102 - DNA, 60 bp, Artificial
  Synthetic oligonucleotide
acgctacaatcgcacgcacagatactactgtactattaagaacgataaatgacaccacac

SEQ ID NO: 124103 - DNA, 60 bp, Artificial
  Synthetic oligonucleotide
cgcacgcacagatactactgtactattaagaacgataaatgacaccacacaggcaatgag

SEQ ID NO: 124104 - DNA, 60 bp, Artificial
  Synthetic oligonucleotide
tccctgactacatcaaccaattgatcacatacacacaaccgcacatcattcccacttggc

SEQ ID NO: 124105 - DNA, 60 bp, Artificial
  Synthetic oligonucleotide
ccctgactacatcaaccaattgatcacatacacacaaccgcacatcattcccacttggca

SEQ ID NO: 124106 - DNA, 60 bp, Artificial
  Synthetic oligonucleotide
aagagccatcatttgagtatgattatgtgttatctcgtgacacagacgatactgaaagct

SEQ ID NO: 124107 - DNA, 60 bp, Artificial
  Synthetic oligonucleotide
tgatcaatccacgtatgtacgccgacatgatcacattaggtaacacgaaggttacagtta

SEQ ID NO: 124108 - DNA, 60 bp, Artificial
  Synthetic oligonucleotide
tgtacgccgacatgatcacattaggtaacacgaaggttacagttaccaaaggtacaccga

SEQ ID NO: 124109 - DNA, 60 bp, Artificial
  Synthetic oligonucleotide
gctacattagttgtatatgcagaaaagggtgcaggtaagacctcatttttgtccacgtac

SEQ ID NO: 124110 - DNA, 50 bp, Artificial
  Synthetic oligonucleotide
ctgagcgcaatttctactacatggtgtctactggcaagaataccccacgt

SEQ ID NO: 124111 - DNA, 60 bp, Artificial
  Synthetic oligonucleotide
ctgagcgcaatttctactacatggtgtctactggcaagaataccccacgtacattaatag

SEQ ID NO: 124112 - DNA, 60 bp, Artificial
  Synthetic oligonucleotide
tgagatgaatgagattctgatagcccagctggagaacgccgatacgcattctgagcgcaa

SEQ ID NO: 124113 - DNA, 60 bp, Artificial
  Synthetic oligonucleotide
caagaaaaaggaattagcaccaacaattcgctcaattagatatgcttcactattacatag

SEQ ID NO: 124114 - DNA, 60 bp, Artificial
  Synthetic oligonucleotide
agcaccaacaattcgctcaattagatatgcttcactattacatagtatgctcgcgaagca

SEQ ID NO: 124115 - DNA, 60 bp, Artificial
  Synthetic oligonucleotide
agtatgattatgtgttatctcgtgacacagacgatactgaaagctactatgagcaaaggg

SEQ ID NO: 124116 - DNA, 60 bp, Artificial
  Synthetic oligonucleotide
cagttctctcaaagttcttagaagctgtggtttccgctaatgtgattaacgctacattag

SEQ ID NO: 124117 - DNA, 60 bp, Artificial
  Synthetic oligonucleotide
gtgtcagacacaacggcaaccaccgacgaaaacactaatgatattgtcacatataaggcg

SEQ ID NO: 124118 - DNA, 60 bp, Artificial
  Synthetic oligonucleotide
cacctcataagatgatgaatccgagtggtggcgcactcgcagttctctcaaagttcttag

SEQ ID NO: 124119 - DNA, 60 bp, Artificial
  Synthetic oligonucleotide
tataaagatctcacctcataagatgatgaatccgagtggtggcgcactcgcagttctctc

SEQ ID NO: 124120 - DNA, 55 bp, Artificial
  Synthetic oligonucleotide
cccctcaggtatatcagcaaaatctacggttataaagatctcacctcataagatg

SEQ ID NO: 124121 - DNA, 60 bp, Artificial
  Synthetic oligonucleotide
ggagtgattactgatgcgaccccctcaggtatatcagcaaaatctacggttataaagatc

SEQ ID NO: 124122 - DNA, 60 bp, Artificial
  Synthetic oligonucleotide
aatatgaaggatgtttgatcacatggacaggcgtctatggtgcagttgcaatgatggtta

SEQ ID NO: 124123 - DNA, 60 bp, Artificial
  Synthetic oligonucleotide
attaaatatgaaggatgtttgatcacatggacaggcgtctatggtgcagttgcaatgatg

SEQ ID NO: 124124 - DNA, 60 bp, Artificial
  Synthetic oligonucleotide
cgcctcaaaagcataacctatcaccgttgaccagaagcatattcaataatacaggaagag

SEQ ID NO: 124125 - DNA, 60 bp, Artificial
  Synthetic oligonucleotide
tcaaatctagcatcgcctcaaaagcataacctatcaccgttgaccagaagcatattcaat

SEQ ID NO: 124126 - DNA, 60 bp, Artificial
  Synthetic oligonucleotide
ccttcgttcatattttagacgaccattcgaactaactgcatcaaatctagcatcgcctca

SEQ ID NO: 124127 - DNA, 60 bp, Artificial
  Synthetic oligonucleotide
gtgatccttaccttcgttcatattttagacgaccattcgaactaactgcatcaaatctag

SEQ ID NO: 124128 - DNA, 60 bp, Artificial
  Synthetic oligonucleotide
caccacacaggcaatgagagataggcaacgaagcggtgtagttcagctgttcttacgaga

SEQ ID NO: 124129 - DNA, 60 bp, Artificial
  Synthetic oligonucleotide
gacaccacacaggcaatgagagataggcaacgaagcggtgtagttcagctgttcttacga

SEQ ID NO: 124130 - DNA, 60 bp, Artificial
  Synthetic oligonucleotide
tctgatagcccagctggagaacgccgatacgcattctgagcgcaatttctactacatggt

SEQ ID NO: 124131 - DNA, 60 bp, Artificial
  Synthetic oligonucleotide
ccaaagtttcgcaccaattacccgattttgccgttggtcagacgatcggacttagaaagc

SEQ ID NO: 124132 - DNA, 60 bp, Artificial
  Synthetic oligonucleotide
ccgattttgccgttggtcagacgatcggacttagaaagcgcgaagaaatttttgaaagtg

SEQ ID NO: 124133 - DNA, 60 bp, Artificial
  Synthetic oligonucleotide
ggtcagacgatcggacttagaaagcgcgaagaaatttttgaaagtgaattttaaagtggt

SEQ ID NO: 124134 - DNA, 60 bp, Artificial
  Synthetic oligonucleotide
ccagagtttcgcaccaattacccgattttgccgttggtcagacgatcggacttagaaagc

SEQ ID NO: 124135 - DNA, 52 bp, Artificial
  Synthetic oligonucleotide
ccgattttgccgttggtcagacgatcggacttagaaagcgcgaagaaatttt

SEQ ID NO: 124136 - DNA, 60 bp, Artificial
  Synthetic oligonucleotide
tccaagaattgaagcagactctgattccgaagattacgttctagatgattcagacagtga

SEQ ID NO: 124137 - DNA, 60 bp, Artificial
  Synthetic oligonucleotide
aagtaggaaacactatccaagaattgaagcagactctgattccgaagattacgttctaga

SEQ ID NO: 124138 - DNA, 60 bp, Artificial
  Synthetic oligonucleotide
cacgaccttcaagcaacgttgggtgcgagcaagtggatttctccttaactaaaggtatta

SEQ ID NO: 124139 - DNA, 60 bp, Artificial
  Synthetic oligonucleotide
tcacgaccttcaagcaacgttgggtgcgagcaagtggatttctccttaactaaaggtatt

SEQ ID NO: 124140 - DNA, 60 bp, Artificial
  Synthetic oligonucleotide
gcagatgctgacgtatttatggattcattaacgtaatcacgaccttcaagcaacgttggg

SEQ ID NO: 124141 - DNA, 60 bp, Artificial
  Synthetic oligonucleotide
cagttaagacaaatgcagatgctgacgtatttatggattcattaacgtaatcacgacctt

SEQ ID NO: 124142 - DNA, 60 bp, Artificial
  Synthetic oligonucleotide
tgatccattcaccagcttttcgattagatcgaatgcagttaagacaaatgcagatgctga

SEQ ID NO: 124143 - DNA, 60 bp, Artificial
  Synthetic oligonucleotide
tgattctactttaaatgatccattcaccagcttttcgattagatcgaatgcagttaagac

SEQ ID NO: 124144 - DNA, 60 bp, Artificial
  Synthetic oligonucleotide
gcactcaataaatacatactgtcgaagtctccagaggatattggaccatctgattctact

SEQ ID NO: 124145 - DNA, 60 bp, Artificial
  Synthetic oligonucleotide
ggtaggaatgaacagtacatttcaccagatgcaaaagcactcaataaatacatactgtcg

SEQ ID NO: 124146 - DNA, 60 bp, Artificial
  Synthetic oligonucleotide
ctcaatttcttctagtatctttaagaatgaatcgtcttctacaacgtcaactctttctgg

SEQ ID NO: 124147 - DNA, 60 bp, Artificial
  Synthetic oligonucleotide
tccctcaatttcttctagtatctttaagaatgaatcgtcttctacaacgtcaactctttc

SEQ ID NO: 124148 - DNA, 60 bp, Artificial
  Synthetic oligonucleotide
ctttctggaaaatctattggtaggagtgaacagtacatttcaccagatgcagaagcattc

SEQ ID NO: 124149 - DNA, 60 bp, Artificial
  Synthetic oligonucleotide
caactctttctggaaaatctattggtaggagtgaacagtacatttcaccagatgcagaag

SEQ ID NO: 124150 - DNA, 60 bp, Artificial
  Synthetic oligonucleotide
gcgctacagtgatgtctctcagcattgacgtaacgagtcttccctcaatttcttctagta

SEQ ID NO: 124151 - DNA, 60 bp, Artificial
  Synthetic oligonucleotide
ggcttttaaagcgctacagtgatgtctctcagcattgacgtaacgagtcttccctcaatt

SEQ ID NO: 124152 - DNA, 60 bp, Artificial
  Synthetic oligonucleotide
gcattcaataaatacatgctgtcgaagtctccagaggatattggaccatctgattctgct

SEQ ID NO: 124153 - DNA, 60 bp, Artificial
  Synthetic oligonucleotide
gatgcagaagcattcaataaatacatgctgtcgaagtctccagaggatattggaccatct

SEQ ID NO: 124154 - DNA, 60 bp, Artificial
  Synthetic oligonucleotide
gatttgtgatgtcatcttgaatgaatcgtcttcaataacgtcagctttttctggaaaatc

SEQ ID NO: 124155 - DNA, 60 bp, Artificial
  Synthetic oligonucleotide
ctggaaaatctattggtaggaatgaacagtacatttcaccagatgcaaaagcactcaata

SEQ ID NO: 124156 - DNA, 60 bp, Artificial
  Synthetic oligonucleotide
tcaacgcaatcacgaccttcaagtaacgttgggtgcgatcaagtggatttctccttaact

SEQ ID NO: 124157 - DNA, 60 bp, Artificial
  Synthetic oligonucleotide
gcaatcacgaccttcaagtaacgttgggtgcgatcaagtggatttctccttaactaaagg

SEQ ID NO: 124158 - DNA, 60 bp, Artificial
  Synthetic oligonucleotide
gcagttaagacaaatgcagatgctggcgtgtctatggattcatcaacgcaatcacgacct

SEQ ID NO: 124159 - DNA, 60 bp, Artificial
  Synthetic oligonucleotide
atttcgtacttagaatgaggatgaagcaagtcgcaatgcaattgatcgtagatttgtaat

SEQ ID NO: 124160 - DNA, 60 bp, Artificial
  Synthetic oligonucleotide
tgaggatgaagcaagtcgcaatgcaattgatcgtagatttgtaatgtcaacctgagagca

SEQ ID NO: 124161 - DNA, 60 bp, Artificial
  Synthetic oligonucleotide
gataaaagtaggaaacactacccaagaattgaagcagattctgattccgaagattacgtt

SEQ ID NO: 124162 - DNA, 60 bp, Artificial
  Synthetic oligonucleotide
cgcacttagaatgaggatgaagcaagtcgcaatgcaattgatcgaagatttgtgatgtca

SEQ ID NO: 124163 - DNA, 60 bp, Artificial
  Synthetic oligonucleotide
gtaggaaacactacccaagaattgaagcagattctgattccgaagattacgttttagatg

SEQ ID NO: 124164 - DNA, 60 bp, Artificial
  Synthetic oligonucleotide
atttcgcacttagaatgaggatgaagcaagtcgcaatgcaattgatcgaagatttgtgat

SEQ ID NO: 124165 - DNA, 60 bp, Artificial
  Synthetic oligonucleotide
aaagaaggtcaaattgtgaatccaacatttatatcaagatatcgccaaattgcatactat

SEQ ID NO: 124166 - DNA, 60 bp, Artificial
  Synthetic oligonucleotide
ccaagcgtgctgcgtctatgttcgtctctaacccctccctggccttgcaggtaggtatcc

SEQ ID NO: 124167 - DNA, 60 bp, Artificial
  Synthetic oligonucleotide
cgtgctgcgtctatgttcgtctctaacccctccctggccttgcaggtaggtatccctgtg

SEQ ID NO: 124168 - DNA, 60 bp, Artificial
  Synthetic oligonucleotide
atgtcgtaggagacgccatccccgttgcctcaaagacggatgattccgcgactagcgcta

SEQ ID NO: 124169 - DNA, 60 bp, Artificial
  Synthetic oligonucleotide
ggagacgccatccccgttgcctcaaagacggatgattccgcgactagcgctatcgtcagt

SEQ ID NO: 124170 - DNA, 60 bp, Artificial
  Synthetic oligonucleotide
gctaccgtgatggccaaccaaacttctgaggaggtcgcttctgccttagctaacgacgca

SEQ ID NO: 124171 - DNA, 60 bp, Artificial
  Synthetic oligonucleotide
ccgtgatggccaaccaaacttctgaggaggtcgcttctgccttagctaacgacgcaatcg

SEQ ID NO: 124172 - DNA, 60 bp, Artificial
  Synthetic oligonucleotide
aggccaaacctcacccaccccccccgattacccacttctgtggcgtcgtgccaagcgtgc

SEQ ID NO: 124173 - DNA, 54 bp, Artificial
  Synthetic oligonucleotide
ccccgattacccacttctgtggcgtcgtgccaagcgtgctgcgtctatgttcgt

SEQ ID NO: 124174 - DNA, 60 bp, Artificial
  Synthetic oligonucleotide
actagcgctatcgtcagtcgactcgctgtccagcacaagttgtcacaagtaggccaaacc

SEQ ID NO: 124175 - DNA, 60 bp, Artificial
  Synthetic oligonucleotide
cgtcagtcgactcgctgtccagcacaagttgtcacaagtaggccaaacctcacccacccc

SEQ ID NO: 124176 - DNA, 60 bp, Artificial
  Synthetic oligonucleotide
gcggaccatcgctgctcgcatgcgtgatgtcgctctctggcagcaacacttagacaccgc

SEQ ID NO: 124177 - DNA, 60 bp, Artificial
  Synthetic oligonucleotide
cgttttcatcagtacggtgcaagtcatgaacctccagcggaccatcgctgctcgcatgcg

SEQ ID NO: 124178 - DNA, 60 bp, Artificial
  Synthetic oligonucleotide
ggcgacccgtcggtacttccgttgccaccatcgactcacttgccatcgtcagcgatcgtt

SEQ ID NO: 124179 - DNA, 55 bp, Artificial
  Synthetic oligonucleotide
ccccacctctgacatgacatccactgccgccccggccattgaccttaaacctggg

SEQ ID NO: 124180 - DNA, 60 bp, Artificial
  Synthetic oligonucleotide
cccggccattgaccttaaacctggggtcctcaatcctactggcaagctatggcgacccgt

SEQ ID NO: 124181 - DNA, 55 bp, Artificial
  Synthetic oligonucleotide
gttatttcgacacttcgcactctctctacaatggggaacgttcaaacctccgtca

SEQ ID NO: 124182 - DNA, 60 bp, Artificial
  Synthetic oligonucleotide
ggggatggtaattcatttacccccacctctgacatgacatccactgccgccccggccatt

SEQ ID NO: 124183 - DNA, 60 bp, Artificial
  Synthetic oligonucleotide
cagacaccaagctgcccgatgcccaggcccatccgctgggagaagtcgccggtgctttca

SEQ ID NO: 124184 - DNA, 60 bp, Artificial
  Synthetic oligonucleotide
acaccaagctgcccgatgcccaggcccatccgctgggagaagtcgccggtgctttcaatg

SEQ ID NO: 124185 - DNA, 60 bp, Artificial
  Synthetic oligonucleotide
ggtgctttcaatgccgccacctctgaagttggaagtctcgttggttccagctccactctc

SEQ ID NO: 124186 - DNA, 60 bp, Artificial
  Synthetic oligonucleotide
gccgccacctctgaagttggaagtctcgttggttccagctccactctctcacaggccatc

SEQ ID NO: 124187 - DNA, 60 bp, Artificial
  Synthetic oligonucleotide
ccatgctgacacctgacatttctgctggtagtgcctcctgcaactggaagagcctgctcg

SEQ ID NO: 124188 - DNA, 60 bp, Artificial
  Synthetic oligonucleotide
tcctgcaactggaagagcctgctcgctttcgcgaaggatatcctgcccctcgacaacctg

SEQ ID NO: 124189 - DNA, 60 bp, Artificial
  Synthetic oligonucleotide
aagagcctgctcgctttcgcgaaggatatcctgcccctcgacaacctgtgcctcacctac

SEQ ID NO: 124190 - DNA, 60 bp, Artificial
  Synthetic oligonucleotide
cgacaacctgtgcctcacctacccgaatgagttctataacgttgccatccaccgttatcc

SEQ ID NO: 124191 - DNA, 60 bp, Artificial
  Synthetic oligonucleotide
gtaggtatccctgtgttaactcaatctggcatgctttccgccctaacgtccggcgtgggt

SEQ ID NO: 124192 - DNA, 60 bp, Artificial
  Synthetic oligonucleotide
ctccactctctcacaggccatctccaccatggctggcaaagacctagatctaattgaagc

SEQ ID NO: 124193 - DNA, 60 bp, Artificial
  Synthetic oligonucleotide
ttaaacctgaggatgctaagtggatcgcggagttcaataactcatctctcatacgtaaga

SEQ ID NO: 124194 - DNA, 60 bp, Artificial
  Synthetic oligonucleotide
ccctgtgttaactcaatctggcatgctttccgccctaacgtccggcgtgggtacggcttt

SEQ ID NO: 124195 - DNA, 60 bp, Artificial
  Synthetic oligonucleotide
cttttcaaaagcactcttcgacatcaatatgtggcaacctctgttccaagcgacaaagac

SEQ ID NO: 124196 - DNA, 60 bp, Artificial
  Synthetic oligonucleotide
gcgaagcaagcgttcttcgatcagatagggagcctgtggcccggcaagtgaggggtgggt

SEQ ID NO: 124197 - DNA, 60 bp, Artificial
  Synthetic oligonucleotide
tgtgagcggtacgatcctcccctatgacacaaatcctgatctgtctacttcagttccagc

SEQ ID NO: 124198 - DNA, 60 bp, Artificial
  Synthetic oligonucleotide
tgaccttagatgtgagcggtacgatcctcccctatgacacaaatcctgatctgtctactt

SEQ ID NO: 124199 - DNA, 60 bp, Artificial
  Synthetic oligonucleotide
ctccacctgcaagccaccttcgagcgcgagaccatcaccgggattccgtatatctatggc

SEQ ID NO: 124200 - DNA, 60 bp, Artificial
  Synthetic oligonucleotide
gattcaacatgctccacctgcaagccaccttcgagcgcgagaccatcaccgggattccgt

SEQ ID NO: 124201 - DNA, 60 bp, Artificial
  Synthetic oligonucleotide
ctaagtggatcgcggagttcaataactcatctctcatacgtaagactctcacctactcgg

SEQ ID NO: 124202 - DNA, 60 bp, Artificial
  Synthetic oligonucleotide
ccccggtccaactcgcgtcattgatatgaatgcgatgatcgactccgtgctgaccttaga

SEQ ID NO: 124203 - DNA, 60 bp, Artificial
  Synthetic oligonucleotide
tacgtaagactctcacctactcgggtgccacctacgccgttcaactcggccccggtccaa

SEQ ID NO: 124204 - DNA, 60 bp, Artificial
  Synthetic oligonucleotide
atggacggtctcctcactgtcaccccagtgctgctgcgtgagacgacatacaagggcgaa

SEQ ID NO: 124205 - DNA, 60 bp, Artificial
  Synthetic oligonucleotide
caaccccacgctgatggacggtctcctcactgtcaccccagtgctgctgcgtgagacgac

SEQ ID NO: 124206 - DNA, 60 bp, Artificial
  Synthetic oligonucleotide
aagcgttcttcgatcagatagggagcctgtggcccggcaagtgaggggtgggttgacaac

SEQ ID NO: 124207 - DNA, 60 bp, Artificial
  Synthetic oligonucleotide
aggggtgggttgacaacccccttccatgcccgcgtgaacggcggggagtgtcgtactttc

SEQ ID NO: 124208 - DNA, 60 bp, Artificial
  Synthetic oligonucleotide
cctgtgacgaatggcgttttcatcagtacggtgcaagtcatgaacctccagcggaccatc

SEQ ID NO: 124209 - DNA, 60 bp, Artificial
  Synthetic oligonucleotide
cctctggttatgttggtgccactgccggtgatgcccttgataaccctgtgacgaatggcg

SEQ ID NO: 124210 - DNA, 60 bp, Artificial
  Synthetic oligonucleotide
ccaccacctctggttatgttggtgccactgccggtgatgcccttgataaccctgtgacga

SEQ ID NO: 124211 - DNA, 60 bp, Artificial
  Synthetic oligonucleotide
ctcttcgacatcaatatgtggcaacctctgttccaagcgacaaagactggctgcggaccg

SEQ ID NO: 124212 - DNA, 60 bp, Artificial
  Synthetic oligonucleotide
cggcgtgggtacggctttacgtactggtagcttgggtaaaggtgtgaccgatgcgtcaga

SEQ ID NO: 124213 - DNA, 60 bp, Artificial
  Synthetic oligonucleotide
cgttttggtcagtattcatttgtcaatgaaggcatgcgagagaccttttcaaaagcactc

SEQ ID NO: 124214 - DNA, 60 bp, Artificial
  Synthetic oligonucleotide
tagacaccgccatgaccatgctgacacctgacatttctgctggtagtgcctcctgcaact

SEQ ID NO: 124215 - DNA, 60 bp, Artificial
  Synthetic oligonucleotide
gctcgcatgcgtgatgtcgctctctggcagcaacacttagacaccgccatgaccatgctg

SEQ ID NO: 124216 - DNA, 60 bp, Artificial
  Synthetic oligonucleotide
gaagaacagtctgaccgtaacccggacgaaaatgagcaattgaaacccaaaacgcgaaga

SEQ ID NO: 124217 - DNA, 60 bp, Artificial
  Synthetic oligonucleotide
gagtttatcaagaatgaagaacagtctgaccgtaacccggacgaaaatgagcaattgaaa

SEQ ID NO: 124218 - DNA, 60 bp, Artificial
  Synthetic oligonucleotide
ggacagtataaaattggatttagcgaagctcaacttgatggttatactttgaacaagacg

SEQ ID NO: 124219 - DNA, 60 bp, Artificial
  Synthetic oligonucleotide
gtcaatggacagtataaaattggatttagcgaagctcaacttgatggttatactttgaac

SEQ ID NO: 124220 - DNA, 61 bp, Artificial
  Synthetic oligonucleotide
ctaatttagagacagtgttcaatactgctagcgattatgtcaatggacagtataaaattgg

SEQ ID NO: 124221 - DNA, 60 bp, Artificial
  Synthetic oligonucleotide
acagtcatttacctaatttagagacagtgttcaatactgctagcgattatgtcaatggac

SEQ ID NO: 124222 - DNA, 54 bp, Artificial
  Synthetic oligonucleotide
gctatatgccctattcgaccaacttctaaaaggagtaacatttgaagaaagcat

SEQ ID NO: 124223 - DNA, 56 bp, Artificial
  Synthetic oligonucleotide
ttttaccatttatttaaatgtgtgttctgtaatcctttaactaggtgtttttgtag

SEQ ID NO: 124224 - DNA, 60 bp, Artificial
  Synthetic oligonucleotide
ttagtgattccgaattggacgataaagttgacgaccttgagattaaaattgaaaaagtga

SEQ ID NO: 124225 - DNA, 60 bp, Artificial
  Synthetic oligonucleotide
cggtcgttttgtcagcattcgtgaagtcgaagcagccacttgtgatgccgggtttacagc

SEQ ID NO: 124226 - DNA, 60 bp, Artificial
  Synthetic oligonucleotide
ttcggtaaggtacggtcgttttgtcagcattcgtgaagtcgaagcagccacttgtgatgc

SEQ ID NO: 124227 - DNA, 52 bp, Artificial
  Synthetic oligonucleotide
ttattagttatgacttaagtaaaattgactttggattttaatttgacaagtc

SEQ ID NO: 124228 - DNA, 60 bp, Artificial
  Synthetic oligonucleotide
cgtcaagtacgttctagagatgactcaaacgtaagagagattattagttatgacttaagt

SEQ ID NO: 124229 - DNA, 60 bp, Artificial
  Synthetic oligonucleotide
tacacaaccggttaatggatacatcgcataaagtatacaatttcgaatgtcccttcgaac

SEQ ID NO: 124230 - DNA, 60 bp, Artificial
  Synthetic oligonucleotide
tacgctatttatatctacacaaccggttaatggatacatcgcataaagtatacaatttcg

SEQ ID NO: 124231 - DNA, 60 bp, Artificial
  Synthetic oligonucleotide
cgaggtattgacaacagtagtttatttctcgcgcccaaacattatcgtcaagtacgttct

SEQ ID NO: 124232 - DNA, 60 bp, Artificial
  Synthetic oligonucleotide
caaacattatcgtcaagtacgttctagagatgactcaaacgtaagagagattattagtta

SEQ ID NO: 124233 - DNA, 60 bp, Artificial
  Synthetic oligonucleotide
atagagacgaaattgaatacactccagaacaagttagaggagagattgcattgatagcgt

SEQ ID NO: 124234 - DNA, 60 bp, Artificial
  Synthetic oligonucleotide
agaaatacagacctttgctcgttgcgattgttggctttgaatcgattgatgttaagttga

SEQ ID NO: 124235 - DNA, 60 bp, Artificial
  Synthetic oligonucleotide
gcaattgaaacccaaaacgcgaagaattgtagttgaattggtatcattatttaatagaga

SEQ ID NO: 124236 - DNA, 60 bp, Artificial
  Synthetic oligonucleotide
ttaatagagacgaaattgaatacactccagaacaagttagaggagagattgcattgatag

SEQ ID NO: 124237 - DNA, 58 bp, Artificial
  Synthetic oligonucleotide
cgttacagtttgaaaacgattgtcgaagtgactaatgaaatggatcaaattattaaac

SEQ ID NO: 124238 - DNA, 60 bp, Artificial
  Synthetic oligonucleotide
gttggatattcgttacgaggtattgacaacagtagtttatttctcgcgcccaaacattat

SEQ ID NO: 124239 - DNA, 60 bp, Artificial
  Synthetic oligonucleotide
tgctcgttgcgattgttggctttgaatcgattgatgttaagttgaagaaattaactccgt

SEQ ID NO: 124240 - DNA, 54 bp, Artificial
  Synthetic oligonucleotide
gttaagttgaagaaattaactccgttatactataccctagctacttttagcaac

SEQ ID NO: 124241 - DNA, 60 bp, Artificial
  Synthetic oligonucleotide
atacagctgagaacgataggagacgtcggtccacgacctcgcgatcacgtagacgtatta

SEQ ID NO: 124242 - DNA, 60 bp, Artificial
  Synthetic oligonucleotide
aattccagcggagggaaatcgctgacgggacggtgataaggatgcagccattgaagacgc

SEQ ID NO: 124243 - DNA, 60 bp, Artificial
  Synthetic oligonucleotide
gcaacgatatgactacttctctctgaatcgtgagacgggagattcgatatataagtggga

SEQ ID NO: 124244 - DNA, 60 bp, Artificial
  Synthetic oligonucleotide
agccagctcataccgaaacaactatatgaaaattatcctgtcgttattgatgtcgggcat

SEQ ID NO: 124245 - DNA, 60 bp, Artificial
  Synthetic oligonucleotide
cgaattacatagggtcggggacgtgttatgacttggaggatcatatacagctgagaacga

SEQ ID NO: 124246 - DNA, 60 bp, Artificial
  Synthetic oligonucleotide
tcaatctattattcaatgcggacagatgtgacgtggcagttgcgaacaagctacgtggat

SEQ ID NO: 124247 - DNA, 60 bp, Artificial
  Synthetic oligonucleotide
tgtcgggcatcggaaaaacgagggtagattgccagtggaacggctagaagataagcacac

SEQ ID NO: 124248 - DNA, 60 bp, Artificial
  Synthetic oligonucleotide
cagagtcgaattacatagggtcggggacgtgttatgacttgggggatcatatacagctga

SEQ ID NO: 124249 - DNA, 60 bp, Artificial
  Synthetic oligonucleotide
taataccggacgtgatctcgaatgcgcaaggattttcaataattaagcaaaggttttatt

SEQ ID NO: 124250 - DNA, 60 bp, Artificial
  Synthetic oligonucleotide
aaacgagggtagattgccagtggaacggctagaagataagcacaccatagaattaatcca

SEQ ID NO: 124251 - DNA, 56 bp, Artificial
  Synthetic oligonucleotide
gtcatctttccggatgcactgtcgattggtatacgcagatatgactggagacgtgc

SEQ ID NO: 124252 - DNA, 60 bp, Artificial
  Synthetic oligonucleotide
ccctagaggagagaagcatataattcggagatatggaggtgatgagatcaaaacactaac

SEQ ID NO: 124253 - DNA, 60 bp, Artificial
  Synthetic oligonucleotide
gattgtaaccatgtgtgacacaatgaaccgcgctatttggggagacaatagattcaagtt

SEQ ID NO: 124254 - DNA, 60 bp, Artificial
  Synthetic oligonucleotide
gtgacacaatgaaccgcgccatttggggagacaatagattcaagttagtgaggggtgtgt

SEQ ID NO: 124255 - DNA, 60 bp, Artificial
  Synthetic oligonucleotide
aggttttattcaatcgatcgttacgtgcatgcgagggtgatccttagaatacaaaaggat

SEQ ID NO: 124256 - DNA, 60 bp, Artificial
  Synthetic oligonucleotide
gatcgttacgtgcatgcgagggtgatcctcagaatacaaaaggatggcagcgtaaatgtg

SEQ ID NO: 124257 - DNA, 60 bp, Artificial
  Synthetic oligonucleotide
gataaaacacaggatgatcaagaaagagcatcgagatggaatagtggacatactagctcc

SEQ ID NO: 124258 - DNA, 60 bp, Artificial
  Synthetic oligonucleotide
aagagagaatgaaaagatgataaaggtcgagaagtatgaagatttattgccaatgtactt

SEQ ID NO: 124259 - DNA, 60 bp, Artificial
  Synthetic oligonucleotide
ggggtgtgtatgaatatgcgaaatatagaatggggtcaatctattattcaatgcggacag

SEQ ID NO: 124260 - DNA, 64 bp, Artificial
  Synthetic oligonucleotide
gagatctatatttgaagtcatactctatttgatccatctgggtttcgaaaatcaaatcacaacc

SEQ ID NO: 124261 - DNA, 60 bp, Artificial
  Synthetic oligonucleotide
cgagaatatgaataaatcccacccgatgttaatgttctgtgataatagagtcagaattgt

SEQ ID NO: 124262 - DNA, 60 bp, Artificial
  Synthetic oligonucleotide
tgacatccgaactgtatggccacatctgaccagatattggttagatgtagaattccagcg

SEQ ID NO: 124263 - DNA, 60 bp, Artificial
  Synthetic oligonucleotide
gtcgggatgagatctatatttgaagtcatactctatttgatccatctgggtttcgaaaat

SEQ ID NO: 124264 - DNA, 60 bp, Artificial
  Synthetic oligonucleotide
ggcttcttcctctaccgacggtggtggataaaactctatgcttaaccggtaatatcttga

SEQ ID NO: 124265 - DNA, 60 bp, Artificial
  Synthetic oligonucleotide
acacaatgaaccgcgccatttggggagacaatagattcaagttagtgaggggtgtgtatg

SEQ ID NO: 124266 - DNA, 60 bp, Artificial
  Synthetic oligonucleotide
cggacgtgatctcgaatgcgcaaggattttcaataattaagcaaaggttttattcaatcg

SEQ ID NO: 124267 - DNA, 60 bp, Artificial
  Synthetic oligonucleotide
ccagcggagggaaatcgctgacgggacggtgataaggatgcagccattgaagacgcatct

SEQ ID NO: 124268 - DNA, 60 bp, Artificial
  Synthetic oligonucleotide
ctttgcgttacccattgtgcatcctacaaaaggtataattgcggtgggtgtaataccgga

SEQ ID NO: 124269 - DNA, 60 bp, Artificial
  Synthetic oligonucleotide
gggtcggggacgtgttatgacttggaggatcatatacagctgagaacgataggagacgtc

SEQ ID NO: 124270 - DNA, 60 bp, Artificial
  Synthetic oligonucleotide
aaacgaaatgatttacgagaatatgaataaatcccacccgatgttaatgttctgtgataa

SEQ ID NO: 124271 - DNA, 60 bp, Artificial
  Synthetic oligonucleotide
gcgaaatatagaatggggtcaatctattattcaatgcggacagatgtgacgtggcagttg

SEQ ID NO: 124272 - DNA, 60 bp, Artificial
  Synthetic oligonucleotide
ccgcgccatttggggagacaatagattcaagttagtgaggggtgtgtatgaatacgcgaa

SEQ ID NO: 124273 - DNA, 60 bp, Artificial
  Synthetic oligonucleotide
gttagggcggacacaccctagaggagagaagcatataattcggagatatggaggtgatga

SEQ ID NO: 124274 - DNA, 60 bp, Artificial
  Synthetic oligonucleotide
ttgaagacgcatctaagtacatattgctcgtatatgtcggaagtctacagctttgcgtta

SEQ ID NO: 124275 - DNA, 60 bp, Artificial
  Synthetic oligonucleotide
gggagattcgatatataagtgggatgtgggagacatacgtggcggtaagaaaacatcacg

SEQ ID NO: 124276 - DNA, 60 bp, Artificial
  Synthetic oligonucleotide
agacgtattagggcggacacaccctagaggagagaagcatataattcggagatatggagg

SEQ ID NO: 124277 - DNA, 60 bp, Artificial
  Synthetic oligonucleotide
acaaaaggatggcagcgtaaatgtgtacggtgagggggacattaaatgtaacgtattaga

SEQ ID NO: 124278 - DNA, 60 bp, Artificial
  Synthetic oligonucleotide
tcatcgttgtatgagtcatcctttaagataagacgggtcgagatcatgcatgggaaaaag

SEQ ID NO: 124279 - DNA, 60 bp, Artificial
  Synthetic oligonucleotide
cggggacgtgttatgacttggaggatcatatacagctgagaacgataggagacgtcggtc

SEQ ID NO: 124280 - DNA, 60 bp, Artificial
  Synthetic oligonucleotide
gttaaattgttcccaggatggaggagattttctttagcgtcattgatagcagccagctca

SEQ ID NO: 124281 - DNA, 60 bp, Artificial
  Synthetic oligonucleotide
ccaggatggaggagattttctttagcgtcattgatagcagccagctcataccgaaacaac

SEQ ID NO: 124282 - DNA, 60 bp, Artificial
  Synthetic oligonucleotide
gtccacgacctcgcgatcacgtagacgtattagggcggacacaccctagaggagagaagc

SEQ ID NO: 124283 - DNA, 60 bp, Artificial
  Synthetic oligonucleotide
attattcaatgcggacagatgtgacgtggcagttgcgaacaagctacgtggatgcatgcc

SEQ ID NO: 124284 - DNA, 60 bp, Artificial
  Synthetic oligonucleotide
agtacatattgctcgtatatgtcggaagtctacagctttgcgttacccattgtgcatcct

SEQ ID NO: 124285 - DNA, 60 bp, Artificial
  Synthetic oligonucleotide
aggagatacataatgcaacgatatgactacttctctctgaatcgtgagacgggagattcg

SEQ ID NO: 124286 - DNA, 60 bp, Artificial
  Synthetic oligonucleotide
gggcggacacaccctagaggagagaagcatataattcggagatatggaggtgatgagatc

SEQ ID NO: 124287 - DNA, 59 bp, Artificial
  Synthetic oligonucleotide
taatctcaaagcttatgaactagatccttgaccggatctactggggacaataaccttac

SEQ ID NO: 124288 - DNA, 60 bp, Artificial
  Synthetic oligonucleotide
cccattgtgcatcctacaaaaggtataattgcggtgggtgtaataccggacgcgatctcg

SEQ ID NO: 124289 - DNA, 60 bp, Artificial
  Synthetic oligonucleotide
taagtgggatgtgggagacgtacgtggcggtaagaaaacatcacgatgggaaggatggcc

SEQ ID NO: 124290 - DNA, 60 bp, Artificial
  Synthetic oligonucleotide
gattcaagttagtgaggggtgtgtatgaatatgcgaaatatagaatggggtcaatctatt

SEQ ID NO: 124291 - DNA, 60 bp, Artificial
  Synthetic oligonucleotide
atggtgcatgactactttgtgttaattggtgagagcccaggcccacattataagaagtac

SEQ ID NO: 124292 - DNA, 60 bp, Artificial
  Synthetic oligonucleotide
actacttggtagtatattaggattaccttatggaataaagaaatacctgaaggagattga

SEQ ID NO: 124293 - DNA, 60 bp, Artificial
  Synthetic oligonucleotide
tggcggtggtcagattacatctcatgactttgttaatgctattatcaccgatcaagaaca

SEQ ID NO: 124294 - DNA, 60 bp, Artificial
  Synthetic oligonucleotide
gattagtattgtaaagtccagctgtcactattctaatttacataactgtcctgtgtgggg

SEQ ID NO: 124295 - DNA, 60 bp, Artificial
  Synthetic oligonucleotide
gaatgtagatgaaagattagtattgtaaagtccagctgtcactattctaatttacataac

SEQ ID NO: 124296 - DNA, 60 bp, Artificial
  Synthetic oligonucleotide
ttgcgttagtgatgtcatcgatgaatacatggtatgtacgcatgatgatagaagtaaact

SEQ ID NO: 124297 - DNA, 60 bp, Artificial
  Synthetic oligonucleotide
tgaatagaaactctgaattacataactacattcctactgttgaagcaagcttcagtgaaa

SEQ ID NO: 124298 - DNA, 60 bp, Artificial
  Synthetic oligonucleotide
gaagtcaacttgagagacgatgtctatttggtaccactttacgcaatagttggcggtggt

SEQ ID NO: 124299 - DNA, 60 bp, Artificial
  Synthetic oligonucleotide
gaagctacagcgattggtgtcttactattctggacgaagtcaacttgagagacgatgtct

SEQ ID NO: 124300 - DNA, 60 bp, Artificial
  Synthetic oligonucleotide
aggagattgagttaaacatattgaagccaggatcatcttatgagcgtggtgtaggtggac

SEQ ID NO: 124301 - DNA, 60 bp, Artificial
  Synthetic oligonucleotide
gattaatgctcttgatagtagagttacgatttgtgctaagttgcgacccgctttcatgaa

SEQ ID NO: 124302 - DNA, 60 bp, Artificial
  Synthetic oligonucleotide
aggcttaggattcaagagtaaggggtcaaaaatcaatgcttcaaagactcaaattttgag

SEQ ID NO: 124303 - DNA, 60 bp, Artificial
  Synthetic oligonucleotide
gagatagagtgtattacatgcttggtgatgcttatcaagcaaacttgtcaggtaagtgtc

SEQ ID NO: 124304 - DNA, 60 bp, Artificial
  Synthetic oligonucleotide
caacgagatagagtgtattacatgcttggtgatgcttatcaagcaaacttgtcaggtaag

SEQ ID NO: 124305 - DNA, 60 bp, Artificial
  Synthetic oligonucleotide
gttgcgacccgctttcatgaaggtaggtgacatgcgtaaactgctgagaccagtacgcat

SEQ ID NO: 124306 - DNA, 60 bp, Artificial
  Synthetic oligonucleotide
ggaacgtgtgatcaagagtgagataattagagttgggaacggcagcttgaatagaaactc

SEQ ID NO: 124307 - DNA, 60 bp, Artificial
  Synthetic oligonucleotide
cgcgacgtcgtcgaatatacagcgaatgctctaagtaaaggattaaagccattggttctt

SEQ ID NO: 124308 - DNA, 60 bp, Artificial
  Synthetic oligonucleotide
gatttcaaatcacattgtaccgataggtgggggatgtctttatcgccatctttggaacgt

SEQ ID NO: 124309 - DNA, 60 bp, Artificial
  Synthetic oligonucleotide
agaagttatacgacatatattcttataaaagtagtttaaatccattcgatgatttcaaat

SEQ ID NO: 124310 - DNA, 60 bp, Artificial
  Synthetic oligonucleotide
taaaccatggaggatttcgtaagacgtacaaacttcaacgagatagagtgtattacatgc

SEQ ID NO: 124311 - DNA, 60 bp, Artificial
  Synthetic oligonucleotide
gtgcatgactactttgtgttaattggtgagagcccaggcccacattataagaagtacgcc

SEQ ID NO: 124312 - DNA, 60 bp, Artificial
  Synthetic oligonucleotide
acgcctgagggagctatcgaatgggaacggatggtacatgaagacaacaacctaataatt

SEQ ID NO: 124313 - DNA, 60 bp, Artificial
  Synthetic oligonucleotide
tttggaacgtgtgatcaagagtgagataattagagttgggaacggcagcttgaatagaaa

SEQ ID NO: 124314 - DNA, 60 bp, Artificial
  Synthetic oligonucleotide
ctaagttgcgacccgctttcatgaaggtaggtgacatgcgtaaactgctgagaccagtac

SEQ ID NO: 124315 - DNA, 60 bp, Artificial
  Synthetic oligonucleotide
aggttcgaattggactgaaattgaccatgagattagaaatcgtagattagccagcttaag

SEQ ID NO: 124316 - DNA, 60 bp, Artificial
  Synthetic oligonucleotide
cctaataattgatatgattaatgctcttgatagtagagttacgatttgtgctaagttgcg

SEQ ID NO: 124317 - DNA, 60 bp, Artificial
  Synthetic oligonucleotide
cgcctgagggagctatcgaatgggaacggatggtacatgaagacaacaacctaataattg

SEQ ID NO: 124318 - DNA, 60 bp, Artificial
  Synthetic oligonucleotide
tgtttgattattcactaaaccatggaggatttcgtaagacgtacaaacttcaacgagata

SEQ ID NO: 124319 - DNA, 60 bp, Artificial
  Synthetic oligonucleotide
cagttgaagatccaagacttaagaatgagttcagatcaaagggtttgattatggtgcatg

SEQ ID NO: 124320 - DNA, 60 bp, Artificial
  Synthetic oligonucleotide
gtttcgttcatactgaaggattcatttacagcaaaaggttcgaattggactgaaattgac

SEQ ID NO: 124321 - DNA, 60 bp, Artificial
  Synthetic oligonucleotide
tggaaagttgatgactgatggtatctgcttcaggcctacattgtcgaaatcagttgaaga

SEQ ID NO: 124322 - DNA, 60 bp, Artificial
  Synthetic oligonucleotide
gatgactgatggtatctgcttcaggcctacattgtcgaaatcagttgaagatccaagact

SEQ ID NO: 124323 - DNA, 60 bp, Artificial
  Synthetic oligonucleotide
taagaagtacgccaaaatgaatagagacaacactatattttgggatcctaggcgcaccga

SEQ ID NO: 124324 - DNA, 60 bp, Artificial
  Synthetic oligonucleotide
gaagtacgccaaaatgaatagagacaacactatattttgggatcctaggcgcaccgacca

SEQ ID NO: 124325 - DNA, 60 bp, Artificial
  Synthetic oligonucleotide
ggcggtggtcagattacatctcatgactttgttaatgctattatcaccgatcaagaacag

SEQ ID NO: 124326 - DNA, 60 bp, Artificial
  Synthetic oligonucleotide
atcaagaacagttgattgatttcactcagtctgaaaaagcattatctactcaagttgtga

SEQ ID NO: 124327 - DNA, 60 bp, Artificial
  Synthetic oligonucleotide
ggcgcaccgaccataagttccagaacattgtgagctatttcaagaatgagaacatacgcg

SEQ ID NO: 124328 - DNA, 60 bp, Artificial
  Synthetic oligonucleotide
aacatacgcgacgtcgtcgaatatacagcgaatgctctaagtaaaggattaaagccattg

SEQ ID NO: 124329 - DNA, 60 bp, Artificial
  Synthetic oligonucleotide
ccagcttaagcggtgttgggttcacggtgacaaagatgcttgatggtaaagtcttggtta

SEQ ID NO: 124330 - DNA, 60 bp, Artificial
  Synthetic oligonucleotide
gtcttggttaatgataaagtcgtaacagtgagtggacatatgttatatatactacttggt

SEQ ID NO: 124331 - DNA, 60 bp, Artificial
  Synthetic oligonucleotide
caagttgtgaaattggtttcgttcatactgaaggattcatttacagcaaaaggttcgaat

SEQ ID NO: 124332 - DNA, 60 bp, Artificial
  Synthetic oligonucleotide
ccaagacttaagaatgagttcagatcaaagggtttgattatggtgcatgactactttgtg

SEQ ID NO: 124333 - DNA, 60 bp, Artificial
  Synthetic oligonucleotide
aattacataactacattcctactgttgaagcaagcttcagtgaaatgacgcgtggtccag

SEQ ID NO: 124334 - DNA, 60 bp, Artificial
  Synthetic oligonucleotide
gacaattcaaaggaagaagctacagcgattggtgtcttactattctggacgaagtcaact

SEQ ID NO: 124335 - DNA, 60 bp, Artificial
  Synthetic oligonucleotide
gtcaacttgagagacgatgtctatttggtaccactttacgcaatagttggcggtggtcag

SEQ ID NO: 124336 - DNA, 60 bp, Artificial
  Synthetic oligonucleotide
ggacgagtatggcacgggctgatttctcactatctagctgttgattgcgttagtgatgtc

SEQ ID NO: 124337 - DNA, 60 bp, Artificial
  Synthetic oligonucleotide
ggactgaaattgaccatgagattagaaatcgtagattagccagcttaagcggtgttgggt

SEQ ID NO: 124338 - DNA, 60 bp, Artificial
  Synthetic oligonucleotide
gtaggtggacgagtatggcacgggctgatttctcactatctagctgttgattgcgttagt

SEQ ID NO: 124339 - DNA, 60 bp, Artificial
  Synthetic oligonucleotide
acatattgaagccaggatcatcttatgagcgtggtgtaggtggacgagtatggcacgggc

SEQ ID NO: 124340 - DNA, 60 bp, Artificial
  Synthetic oligonucleotide
tgagtctagtaccgtatcaggagataaccaggccaccgagttatgcaccgacggctccac

SEQ ID NO: 124341 - DNA, 60 bp, Artificial
  Synthetic oligonucleotide
tatcaggagataaccaggccaccgagttatgcaccgacggctccaccgccaacggcaatg

SEQ ID NO: 124342 - DNA, 60 bp, Artificial
  Synthetic oligonucleotide
gcggtagtagccttgataacatcagcaagcactttaacgagcgatttgggaataatactc

SEQ ID NO: 124343 - DNA, 60 bp, Artificial
  Synthetic oligonucleotide
ggcggtagtagccttgataacatcagcaagcactttaacgagcgatttgggaataatact

SEQ ID NO: 124344 - DNA, 60 bp, Artificial
  Synthetic oligonucleotide
cgggtaaatgaacaagtattgccaaaattacgtgttgaactgactgtgatgaagagaaag

SEQ ID NO: 124345 - DNA, 60 bp, Artificial
  Synthetic oligonucleotide
aggcagattaagaaacgggtaaatgaacaagtattgccaaaattacgtgttgaactgact

SEQ ID NO: 124346 - DNA, 60 bp, Artificial
  Synthetic oligonucleotide
cgcatcatatgcggaggcatttagggatgacttacgattaaggcagattaagaaacgggt

SEQ ID NO: 124347 - DNA, 60 bp, Artificial
  Synthetic oligonucleotide
aggtcgcttacgcatcatatgcggaggcatttagggatgacttacgattaaggcagatta

SEQ ID NO: 124348 - DNA, 60 bp, Artificial
  Synthetic oligonucleotide
ccaaacaggcgctacaatggctcaaaaggtagaaaaggtcgcttacgcatcatatgcgga

SEQ ID NO: 124349 - DNA, 60 bp, Artificial
  Synthetic oligonucleotide
taaggcaatgtctaaccaaacaggcgctacaatggctcaaaaggtagaaaaggtcgctta

SEQ ID NO: 124350 - DNA, 60 bp, Artificial
  Synthetic oligonucleotide
ggctccaccgccaacggcaatgccgaaagttgccctcgatatcctagataaggcaatgtc

SEQ ID NO: 124351 - DNA, 60 bp, Artificial
  Synthetic oligonucleotide
acggctccaccgccaacggcaatgccgaaagttgccctcgatatcctagataaggcaatg

SEQ ID NO: 124352 - DNA, 60 bp, Artificial
  Synthetic oligonucleotide
tccaaggtcatcatgatgtgagattggcaggtctcgacatgatgattcctactgctgtat

SEQ ID NO: 124353 - DNA, 60 bp, Artificial
  Synthetic oligonucleotide
gatgtgagattggcaggtctcgacatgatgattcctactgctgtatagcggaggagggta

SEQ ID NO: 124354 - DNA, 60 bp, Artificial
  Synthetic oligonucleotide
aatgatgtttatggcgaagaatgaaaaagtgattaatcagcaaattgatcatacgaaaaa

SEQ ID NO: 124355 - DNA, 60 bp, Artificial
  Synthetic oligonucleotide
atgcgtacaacgaggcggtgagaatgagtatatctgagtttagcgagatacctttagatg

SEQ ID NO: 124356 - DNA, 60 bp, Artificial
  Synthetic oligonucleotide
gcgtacaacgaggcggtgagaatgagtatatctgagtttagcgagatacctttagatggt

SEQ ID NO: 124357 - DNA, 60 bp, Artificial
  Synthetic oligonucleotide
gacataccatctgagctaaccagatagagtggcgctccaaggtcatcatgatgtgagatt

SEQ ID NO: 124358 - DNA, 60 bp, Artificial
  Synthetic oligonucleotide
gaataatactcaaaaatacaacagcgacggagatcattcaaaagcagataaagccgttct

SEQ ID NO: 124359 - DNA, 60 bp, Artificial
  Synthetic oligonucleotide
atacaacagcgacggagatcattcaaaagcagataaagccgttctgtgcagcatttggaa

SEQ ID NO: 124360 - DNA, 51 bp, Artificial
  Synthetic oligonucleotide
aagccgttctgtgcagcatttggaattatcaacttagccgctaccatgata

SEQ ID NO: 124361 - DNA, 60 bp, Artificial
  Synthetic oligonucleotide
aagccgttctgtgcagcatttggaattatcaacttagccgctaccatgataatgatgttt

SEQ ID NO: 124362 - DNA, 60 bp, Artificial
  Synthetic oligonucleotide
gtgtttgtaatgttactccccgtaagccaagtttaagtttaatgtttattagagctcttc

SEQ ID NO: 124363 - DNA, 60 bp, Artificial
  Synthetic oligonucleotide
acgagcattgtgcgtcaatatcttacgaatggttacttcactctctcttggtaacgcttt

SEQ ID NO: 124364 - DNA, 60 bp, Artificial
  Synthetic oligonucleotide
aagttttttttcgacctgtctggaccagtacataaaggaacatggatagacctgctcgag

SEQ ID NO: 124365 - DNA, 60 bp, Artificial
  Synthetic oligonucleotide
cgacctgtctggaccagtacataaaggaacatggatagacctgctcgagaacatttaaaa

SEQ ID NO: 124366 - DNA, 57 bp, Artificial
  Synthetic oligonucleotide
agatactgaattcttaatgtctcgtcggggtggtctttcatgttcttattgtaggtg

SEQ ID NO: 124367 - DNA, 66 bp, Artificial
  Synthetic oligonucleotide
gcagagttaggactaaagtgttaatagctaatactgatgtagattattggtattctctgtttatgc

SEQ ID NO: 124368 - DNA, 66 bp, Artificial
  Synthetic oligonucleotide
cagagttaggactaaagtgttaatagctaatactgatgtagattattggtattctctgtttatgcg

SEQ ID NO: 124369 - DNA, 51 bp, Artificial
  Synthetic oligonucleotide
cactctattcctgaatatttggatcattggtttcgaacagacgatttttct

SEQ ID NO: 124370 - DNA, 60 bp, Artificial
  Synthetic oligonucleotide
gtttttagcagagttaggactaaagtgttaatagctaatactgatgtagattattggtat

SEQ ID NO: 124371 - DNA, 55 bp, Artificial
  Synthetic oligonucleotide
ttaagtgacagccttttttgtcctggaattagtgttattggaaaattaagtatga

SEQ ID NO: 124372 - DNA, 60 bp, Artificial
  Synthetic oligonucleotide
ttaagtgacagccttttttgtcctggaattagtgttattggaaaattaagtatgataccc

SEQ ID NO: 124373 - DNA, 60 bp, Artificial
  Synthetic oligonucleotide
tgtaagctcacatatcactcgtcatttgctaatagttttaaattctaatcctaatgtctt

SEQ ID NO: 124374 - DNA, 60 bp, Artificial
  Synthetic oligonucleotide
ttagagcttttaatcttaaaagtaaccaattcgaagttgttactaaattattaagtgaca

SEQ ID NO: 124375 - DNA, 53 bp, Artificial
  Synthetic oligonucleotide
gcaacgctttcatatctgaaggtagatatcattatgctattgacacaaccgaa

SEQ ID NO: 124376 - DNA, 60 bp, Artificial
  Synthetic oligonucleotide
gttgcttgatcaggagataggagaagagtggtgtgacactagtaatttcatggatttacg

SEQ ID NO: 124377 - DNA, 60 bp, Artificial
  Synthetic oligonucleotide
tgctgatgctttaaggtttctagctcgcattgcaaaaatagtaatcaaaaatgacgttga

SEQ ID NO: 124378 - DNA, 60 bp, Artificial
  Synthetic oligonucleotide
ggttactctacttctgaagtttgtcttgatcactacattcgcatgaaaatcgatcttttc

SEQ ID NO: 124379 - DNA, 60 bp, Artificial
  Synthetic oligonucleotide
ctacttctgaagtttgtcttgatcactacattcgcatgaaaatcgatcttttcaaaggtc

SEQ ID NO: 124380 - DNA, 60 bp, Artificial
  Synthetic oligonucleotide
gaagtttgtcttgatcactacattcgcatgaaaatcgatcttttcaaaggtcttcgttcc

SEQ ID NO: 124381 - DNA, 60 bp, Artificial
  Synthetic oligonucleotide
tgagttgcttgatcaggagataggagaagagtggtgtgacactagtaatttcatggattt

SEQ ID NO: 124382 - DNA, 60 bp, Artificial
  Synthetic oligonucleotide
gtgtttgtaatgttactccccgtaagccaagtttaagtttaatgtttatcagagctcttc

SEQ ID NO: 124383 - DNA, 60 bp, Artificial
  Synthetic oligonucleotide
gaatacactgctgaaatttttgattcattcgacgttcctttaccttttgctgagttgctt

SEQ ID NO: 124384 - DNA, 58 bp, Artificial
  Synthetic oligonucleotide
ttttgattcattcgacgttcctttaccttttgctgagttgcttgatcaggagatagga

SEQ ID NO: 124385 - DNA, 60 bp, Artificial
  Synthetic oligonucleotide
caagagtttgatgaagatgattatacagacttagatgtgaatttactatctgatgacctt

SEQ ID NO: 124386 - DNA, 60 bp, Artificial
  Synthetic oligonucleotide
gatgaagatgattatacagacttagatgtgaatttactatctgatgaccttagccgtttg

SEQ ID NO: 124387 - DNA, 60 bp, Artificial
  Synthetic oligonucleotide
ctgctcctttagaatttgatcctcatgaccccgaaattaatcttgtcaatcaagagtttg

SEQ ID NO: 124388 - DNA, 65 bp, Artificial
  Synthetic oligonucleotide
caagagtttgatgaagatgattatacagacttagatgtgaatttactatctgatgaccttagctg

SEQ ID NO: 124389 - DNA, 60 bp, Artificial
  Synthetic oligonucleotide
cactttaagtgatcattacgcttcgatgtatcgttctgctcctttagaatttgatcctca

SEQ ID NO: 124390 - DNA, 60 bp, Artificial
  Synthetic oligonucleotide
cactttaggtgatcattacgcttcgatgtatcgttctgctcctttagaatttgatcctca

SEQ ID NO: 124391 - DNA, 60 bp, Artificial
  Synthetic oligonucleotide
gcacctcctccaccccgaaaatgtcactttctgattattttagctcagttagttgctctt

SEQ ID NO: 124392 - DNA, 53 bp, Artificial
  Synthetic oligonucleotide
gtaacgctttcatatctgaaggtagatatcattatgctattgacacaaccgaa

SEQ ID NO: 124393 - DNA, 60 bp, Artificial
  Synthetic oligonucleotide
gttttaaatgaattacactttaagtgatcattacgcttcgatgtatcgttctgctccttt

SEQ ID NO: 124394 - DNA, 60 bp, Artificial
  Synthetic oligonucleotide
gttttaaatgaattacactttaggtgatcattacgcttcgatgtatcgttctgctccttt

SEQ ID NO: 124395 - DNA, 60 bp, Artificial
  Synthetic oligonucleotide
gatgcacctcctccaccccgaaaatgtcactctctgattattttagctcagttagttgct

SEQ ID NO: 124396 - DNA, 60 bp, Artificial
  Synthetic oligonucleotide
gatgcacctcctccaccccgaaaatgtcactttctgattattttagctcagttagttgct

SEQ ID NO: 124397 - DNA, 54 bp, Artificial
  Synthetic oligonucleotide
cctgctcgagaacatttaaaattcagtaaagcaaacaccaaaaacgaaattaga

SEQ ID NO: 124398 - DNA, 60 bp, Artificial
  Synthetic oligonucleotide
acgagcattgtgcgtcaatattttacgaatggttacttcactctctcttggcaacgcttt

SEQ ID NO: 124399 - DNA, 60 bp, Artificial
  Synthetic oligonucleotide
gatggcgaaatgcgtatacctgacgtgcctttgaagatgtatggcgatctccacttccac

SEQ ID NO: 124400 - DNA, 60 bp, Artificial
  Synthetic oligonucleotide
gttagttgctcttttgatggcgaaatgcgtatacctgacgtgcctttgaagatgtatggc

SEQ ID NO: 124401 - DNA, 60 bp, Artificial
  Synthetic oligonucleotide
gcacctcctccaccccgaaaatgtcactctctgattattttagctcagttagttgctctt

SEQ ID NO: 124402 - DNA, 60 bp, Artificial
  Synthetic oligonucleotide
ctgacaatggcttgagatcagaagttccaattaatgcaaattcttctagcacagctgctc

SEQ ID NO: 124403 - DNA, 60 bp, Artificial
  Synthetic oligonucleotide
actgacaatggcttgagatcagaagttccaattaatgcaaactcttctagcacagctgct

SEQ ID NO: 124404 - DNA, 60 bp, Artificial
  Synthetic oligonucleotide
gatcagaagttccaattaatgcaaattcttctagcacagctgctcctactgagttgcctg

SEQ ID NO: 124405 - DNA, 60 bp, Artificial
  Synthetic oligonucleotide
gagatcagaagttccaattaatgcaaactcttctagcacagctgctcctactgagttgcc

SEQ ID NO: 124406 - DNA, 60 bp, Artificial
  Synthetic oligonucleotide
acagctgctcctactgagttgcctgtcttttcatctccttctgcttaatcttgttttcct

SEQ ID NO: 124407 - DNA, 60 bp, Artificial
  Synthetic oligonucleotide
cacagctgctcctactgagttgcctgtcttttcatctccttctgcttaatcttgttctcc

SEQ ID NO: 124408 - DNA, 60 bp, Artificial
  Synthetic oligonucleotide
ctgctcctactgagttgcctgtcttttcatctccttctgcttaatcttgttttccttcgc

SEQ ID NO: 124409 - DNA, 60 bp, Artificial
  Synthetic oligonucleotide
ctgctcctactgagttgcctgtcttttcatctccttctgcttaatcttgttctcctccac

SEQ ID NO: 124410 - DNA, 60 bp, Artificial
  Synthetic oligonucleotide
ctccccgtaagccaagtttaagtttaatgtttatcagagctcttctagtcatcgcgttga

SEQ ID NO: 124411 - DNA, 60 bp, Artificial
  Synthetic oligonucleotide
ctccccgtaagccaagtttaagtttaatgtttattagagctcttctagtcatcgcgttga

SEQ ID NO: 124412 - DNA, 60 bp, Artificial
  Synthetic oligonucleotide
cggcggaactcttcaccgcaagccccattggacctgatggttgactgagaagccacagtc

SEQ ID NO: 124413 - DNA, 60 bp, Artificial
  Synthetic oligonucleotide
aaatcctcaagtagtttgggacgttcctcggagttcgattgctaacctcattatgaacat

SEQ ID NO: 124414 - DNA, 60 bp, Artificial
  Synthetic oligonucleotide
gctgactgatcaagtatatatgcatagagatatgctcccagaacctcggcttgatgacat

SEQ ID NO: 124415 - DNA, 60 bp, Artificial
  Synthetic oligonucleotide
cgtgctgcccgtgctaacggctgaacacagagcaatgatacagaatgctttggatggatc

SEQ ID NO: 124416 - DNA, 60 bp, Artificial
  Synthetic oligonucleotide
atgacgtcgaaagatttagacaggagggtttctattacactaatatgctagaagctcctc

SEQ ID NO: 124417 - DNA, 60 bp, Artificial
  Synthetic oligonucleotide
gactgatcaagtatatatgcatagagatatgctcccagaacctcggcttgatgacatcga

SEQ ID NO: 124418 - DNA, 57 bp, Artificial
  Synthetic oligonucleotide
tcccgtgaatgtaaacaatccgggagcgggaccgggtatgatagaaatagaggtaat

SEQ ID NO: 124419 - DNA, 54 bp, Artificial
  Synthetic oligonucleotide
tcccgtgaatgtaaacaatccgggagcgggaccaggtatgatagaaatagaagt

SEQ ID NO: 124420 - DNA, 60 bp, Artificial
  Synthetic oligonucleotide
aaaccattctgcgctgctttcggtataataaatttagccgcaacgatgattatgatgttc

SEQ ID NO: 124421 - DNA, 60 bp, Artificial
  Synthetic oligonucleotide
cggaaggaatcaagtacgatgctgagaatgatttatatcccaaatgttggactatggctg

SEQ ID NO: 124422 - DNA, 60 bp, Artificial
  Synthetic oligonucleotide
ctcgcaatgtacgtacttgaacatctacgtgaacacggacgtatgccacataggttcgca

SEQ ID NO: 124423 - DNA, 60 bp, Artificial
  Synthetic oligonucleotide
gccgcttggattccaacgtgagttgagaaacctgatgcgttccctatattggacggaagg

SEQ ID NO: 124424 - DNA, 60 bp, Artificial
  Synthetic oligonucleotide
cctatattggacggaaggaatcaagtacgatgctgagaatgatttatatcccaaatgttg

SEQ ID NO: 124425 - DNA, 60 bp, Artificial
  Synthetic oligonucleotide
tgtaaatacaagatcttcagcttcagttcaagatgatattccaattgtgctgaccgtgat

SEQ ID NO: 124426 - DNA, 60 bp, Artificial
  Synthetic oligonucleotide
atattccaattgtgctgaccgtgatgaacctaccgggtaaaacatcacaagcgtatgtag

SEQ ID NO: 124427 - DNA, 60 bp, Artificial
  Synthetic oligonucleotide
cgcattcattgcctggatgatcgagagtgatgaagtgagccgtggttcgccagatcagca

SEQ ID NO: 124428 - DNA, 60 bp, Artificial
  Synthetic oligonucleotide
tgagccgtggttcgccagatcagcaaaagttgtattacggtgcattcggtggtgatgcgc

SEQ ID NO: 124429 - DNA, 60 bp, Artificial
  Synthetic oligonucleotide
agcctattactcagtagtcctttaatgtccgatacgatggatggaaggcgtaaagttacg

SEQ ID NO: 124430 - DNA, 60 bp, Artificial
  Synthetic oligonucleotide
tgcatcgcttaacagtaaatcaacactatctgatatacgtggaaaattcttcaatgacta

SEQ ID NO: 124431 - DNA, 60 bp, Artificial
  Synthetic oligonucleotide
gcatcgcttaacagtaaatcaacactatctgatatacgtggaaaattcttcaatgactac

SEQ ID NO: 124432 - DNA, 60 bp, Artificial
  Synthetic oligonucleotide
tttaactcatgttaatgtaaatacaagatcttcagcttcagttcaagatgatattccaat

SEQ ID NO: 124433 - DNA, 60 bp, Artificial
  Synthetic oligonucleotide
gcacactgtgctctgcagatgtacagtacatccttaagaatgtgctctcgcattataatt

SEQ ID NO: 124434 - DNA, 60 bp, Artificial
  Synthetic oligonucleotide
cattataattcatccaacgatacgatatctgtatcaaagcgagctaaatcgttaaggata

SEQ ID NO: 124435 - DNA, 60 bp, Artificial
  Synthetic oligonucleotide
catccaacgatacgatatctgtatcaaagcgagctaaatcgttaaggataatccaggaac

SEQ ID NO: 124436 - DNA, 60 bp, Artificial
  Synthetic oligonucleotide
cgagcctattactcagtagtcctttaatgtccgatacgatggatggaaggcgtaaagtta

SEQ ID NO: 124437 - DNA, 60 bp, Artificial
  Synthetic oligonucleotide
gccgtggttcgccagatcagcaaaagttgtattacggtgcattcggtggtgatgcgccgc

SEQ ID NO: 124438 - DNA, 60 bp, Artificial
  Synthetic oligonucleotide
ggtgatgcgccgcttggattccaacgtgagttgagaaacctgatgcgttccctatattgg

SEQ ID NO: 124439 - DNA, 60 bp, Artificial
  Synthetic oligonucleotide
gtgttgacgatactctttggtgtgaacacgtacttagaaccactcgtaaaaatgaccccc

SEQ ID NO: 124440 - DNA, 51 bp, Artificial
  Synthetic oligonucleotide
gtgttgacgatactctttggtgtgaacacgtacttagaaccactcgtaaaa

SEQ ID NO: 124441 - DNA, 60 bp, Artificial
  Synthetic oligonucleotide
ccccaaagaacaaaagttaccattttggatgctgcggctcaaattttcttgcaaaatgtg

SEQ ID NO: 124442 - DNA, 60 bp, Artificial
  Synthetic oligonucleotide
aatgacccccaaagaacaaaagttaccattttggatgctgcggctcaaattttcttgcaa

SEQ ID NO: 124443 - DNA, 60 bp, Artificial
  Synthetic oligonucleotide
gtgagtcgcaacgcgccaaaaccgcgttgatatttgacttagccctatgcacgggcagaa

SEQ ID NO: 124444 - DNA, 60 bp, Artificial
  Synthetic oligonucleotide
tttcttgcaaaatgtgagtcgcaacgcgccaaaaccgcgttgatatttgacttagcccta

SEQ ID NO: 124445 - DNA, 60 bp, Artificial
  Synthetic oligonucleotide
ttttcaaccgatgtgcgcattcattgcctggatgatcgagagtgatgaagtgagccgtgg

SEQ ID NO: 124446 - DNA, 60 bp, Artificial
  Synthetic oligonucleotide
cgagcggtcaaacctaatgcaagaagtcatcataaacggatcgcagcagcttttcaaccg

SEQ ID NO: 124447 - DNA, 60 bp, Artificial
  Synthetic oligonucleotide
cacttgacgctaatgggctcaaggaagtgaaaaaggaaacaagagaccaagtaatgtatc

SEQ ID NO: 124448 - DNA, 60 bp, Artificial
  Synthetic oligonucleotide
tcaggaagcacgtcttgctgcacataatgaaaatctaactatgtatgaactgacaaagag

SEQ ID NO: 124449 - DNA, 60 bp, Artificial
  Synthetic oligonucleotide
attcaggaagcacgtcttgctgcacataatgaaaatctaactatgtatgaactgacaaag

SEQ ID NO: 124450 - DNA, 60 bp, Artificial
  Synthetic oligonucleotide
gcgaacatttgagaataaaaccgaaactcgcgttattagcactcaattatcggagggttc

SEQ ID NO: 124451 - DNA, 60 bp, Artificial
  Synthetic oligonucleotide
gatgatgaggagatgcgaacatttgagaataaaaccgaaactcgcgttattagcactcaa

SEQ ID NO: 124452 - DNA, 60 bp, Artificial
  Synthetic oligonucleotide
gtcgtaaaagtacgagtgtgtataacatgaatccggatgatgaggagatgcgaacatttg

SEQ ID NO: 124453 - DNA, 60 bp, Artificial
  Synthetic oligonucleotide
accttaagcttatatgtcgtaaaagtacgagtgtgtataacatgaatccggatgatgagg

SEQ ID NO: 124454 - DNA, 60 bp, Artificial
  Synthetic oligonucleotide
tattccaattgtgctgaccgtgatgaacctaccgggtaaaacatcacaagcgtatgtagt

SEQ ID NO: 124455 - DNA, 60 bp, Artificial
  Synthetic oligonucleotide
cattccctctacaatgttgtcatttagaaaccaacctggcaatcccagtggtaatctgac

SEQ ID NO: 124456 - DNA, 60 bp, Artificial
  Synthetic oligonucleotide
gaagaacattccctctacaatgttgtcatttagaaaccaacctggcaatcccagtggtaa

SEQ ID NO: 124457 - DNA, 60 bp, Artificial
  Synthetic oligonucleotide
catttggtggggtttcaaatcgtgcccgtgagcctagagctcttgagatacggttggatc

SEQ ID NO: 124458 - DNA, 60 bp, Artificial
  Synthetic oligonucleotide
ccagtggtaatctgacatttggtggggtttcaaatcgtgcccgtgagcctagagctcttg

SEQ ID NO: 124459 - DNA, 60 bp, Artificial
  Synthetic oligonucleotide
cgcaatgtacgtacttgaacatctacgtgaacacggacgtatgccacataggttcgcaca

SEQ ID NO: 124460 - DNA, 60 bp, Artificial
  Synthetic oligonucleotide
ccgcacacccccagtaataggagcagtcgcacgtgctttacgtaaagtatgtgttgacga

SEQ ID NO: 124461 - DNA, 60 bp, Artificial
  Synthetic oligonucleotide
cgttgcaacgcccgacccaaatgtggatcgtcgcggcacactgtgctctgcagatgtaca

SEQ ID NO: 124462 - DNA, 60 bp, Artificial
  Synthetic oligonucleotide
gcgaggtgtacatttcgttgcaacgcccgacccaaatgtggatcgtcgcggcacactgtg

SEQ ID NO: 124463 - DNA, 60 bp, Artificial
  Synthetic oligonucleotide
agtaggtagagtggcgccccaaggtccgtatcgtgtagagtggttgatctcacgatgcgg

SEQ ID NO: 124464 - DNA, 60 bp, Artificial
  Synthetic oligonucleotide
gtctgcatcgtgtagagtggttgatctcacgatgcagactcctactgctgtctaacgggg

SEQ ID NO: 124465 - DNA, 58 bp, Artificial
  Synthetic oligonucleotide
ctgtatcgtgtagagtggttgatctcacgatgcagactcccactgctgtctaacgggg

SEQ ID NO: 124466 - DNA, 60 bp, Artificial
  Synthetic oligonucleotide
catcgtgtagagtggttgatctcacgatgcagactcctactgctgtctaacgggggaggg

SEQ ID NO: 124467 - DNA, 58 bp, Artificial
  Synthetic oligonucleotide
ctgtatcgtgtagagtggttgatctcacgatgcagactcctactgctgtctaacgggg

SEQ ID NO: 124468 - DNA, 60 bp, Artificial
  Synthetic oligonucleotide
catttaaaagtggagatcgtaggctcacaaaagaaaggtattaccaagcgattaatgctg

SEQ ID NO: 124469 - DNA, 60 bp, Artificial
  Synthetic oligonucleotide
tttccccacttcggactctagtctcgttgaacgtactccactcccatctggtactgattc

SEQ ID NO: 124470 - DNA, 60 bp, Artificial
  Synthetic oligonucleotide
cacaagttgcatcatacaagttattcacatggaaagaaggtgcaagcaaggtactagacg

SEQ ID NO: 124471 - DNA, 60 bp, Artificial
  Synthetic oligonucleotide
gtactgattcacaagttgcatcatacaagttattcacatggaaagaaggtgcaagcaagg

SEQ ID NO: 124472 - DNA, 60 bp, Artificial
  Synthetic oligonucleotide
caaggtactagacgaaatgaatcgtgatgcgaccaatttcttaaacgtcattcaacagac

SEQ ID NO: 124473 - DNA, 60 bp, Artificial
  Synthetic oligonucleotide
gtgtaccatctcaagaagtttaatttgctgttcgattcatggcataagacgggtggaagc

SEQ ID NO: 124474 - DNA, 60 bp, Artificial
  Synthetic oligonucleotide
gtaccatctcaagaagtttaatttgctgttcgattcatggcataagacgggtggaagcgc

SEQ ID NO: 124475 - DNA, 60 bp, Artificial
  Synthetic oligonucleotide
tcttgcccagtggtgatgcgtcgagcaaagtaagagatgatctttgcgctgtgtaccatc

SEQ ID NO: 124476 - DNA, 60 bp, Artificial
  Synthetic oligonucleotide
cccagtggtgatgcgtcgagcaaagtaagagatgatctttgcgctgtgtaccatctcaag

SEQ ID NO: 124477 - DNA, 60 bp, Artificial
  Synthetic oligonucleotide
ttatctgtgaaggagcagcgtaccgaccgatcgattttgagaattataagaccaacggcc

SEQ ID NO: 124478 - DNA, 60 bp, Artificial
  Synthetic oligonucleotide
ctgtgaaggagcagcgtaccgaccgatcgattttgagaattataagaccaacggcccaaa

SEQ ID NO: 124479 - DNA, 60 bp, Artificial
  Synthetic oligonucleotide
accagttgagatgtatcaattcggcatcgttccatttattgctgcggacattatctgtga

SEQ ID NO: 124480 - DNA, 60 bp, Artificial
  Synthetic oligonucleotide
acatcgtaaattactaacctagaacactatggaagcctatatccgcgaaaaccgtaaacc

SEQ ID NO: 124481 - DNA, 60 bp, Artificial
  Synthetic oligonucleotide
aacctagaacactatggaagcctatatccgcgaaaaccgtaaacccaaaactactaacac

SEQ ID NO: 124482 - DNA, 60 bp, Artificial
  Synthetic oligonucleotide
accgtaaacccaaaactactaacactgcacctgcacgcactttcaagcaagccactcata

SEQ ID NO: 124483 - DNA, 60 bp, Artificial
  Synthetic oligonucleotide
gggtggaagcgctttagtatcttcacgtcctcagacagagcgcattgtttcaggtagcac

SEQ ID NO: 124484 - DNA, 60 bp, Artificial
  Synthetic oligonucleotide
gtggaagcgctttagtatcttcacgtcctcagacagagcgcattgtttcaggtagcacgc

SEQ ID NO: 124485 - DNA, 57 bp, Artificial
  Synthetic oligonucleotide
agattcatatggtatgggtgcgagccggacttctattcttcatacccacctcgaccc

SEQ ID NO: 124486 - DNA, 60 bp, Artificial
  Synthetic oligonucleotide
ttttcatcgcgcgatccatcaactaatgtgccagcactcacaaagcagactttccccact

SEQ ID NO: 124487 - DNA, 60 bp, Artificial
  Synthetic oligonucleotide
tcaattcggcatcgttccatttattgctgcggacattatctgtgaaggagcagcgtaccg

SEQ ID NO: 124488 - DNA, 60 bp, Artificial
  Synthetic oligonucleotide
aagtttgttctgcttggtcgactttgctttagccatgttggaaatcctccaccagttgag

SEQ ID NO: 124489 - DNA, 60 bp, Artificial
  Synthetic oligonucleotide
ggtattaccaagcgattaatgctgagtcacgtgatttctgtaaccatatgaagtttgttc

SEQ ID NO: 124490 - DNA, 60 bp, Artificial
  Synthetic oligonucleotide
ccccacttcggactctagtctcgttgaacgtactccactcccatctggtactgattcaca

SEQ ID NO: 124491 - DNA, 60 bp, Artificial
  Synthetic oligonucleotide
gcaagcaaggtactagacgaaatgaatcgtgatgcgaccaatttcttaaacgtcattcaa

SEQ ID NO: 124492 - DNA, 60 bp, Artificial
  Synthetic oligonucleotide
acgtaacagaactaacgctcacatcaaactcgaactacccgctaccgaacagattcatat

SEQ ID NO: 124493 - DNA, 60 bp, Artificial
  Synthetic oligonucleotide
ctggttcttcctgcctatgacgcattggttgaatcgctacgtaacagaactaacgctcac

SEQ ID NO: 124494 - DNA, 60 bp, Artificial
  Synthetic oligonucleotide
gccactcatagactggttcttcctgcctatgacgcattggttgaatcgctacgtaacaga

SEQ ID NO: 124495 - DNA, 60 bp, Artificial
  Synthetic oligonucleotide
ctactaacactgcacctgcacgcactttcaagcaagccactcatagactggttcttcctg

SEQ ID NO: 124496 - DNA, 60 bp, Artificial
  Synthetic oligonucleotide
gcgcgatccatcaactaatgtgccagcactcacaaagcagactttccccacttcggactc

SEQ ID NO: 124497 - DNA, 60 bp, Artificial
  Synthetic oligonucleotide
cgtcattcaacagacatttaaaagtggagatcgtaggctcacaaaagaaaggtattacca

SEQ ID NO: 124498 - DNA, 60 bp, Artificial
  Synthetic oligonucleotide
cgattaatgctgagtcacgtgatttctgtaaccatatgaagtttgttctgcttggtcgac

SEQ ID NO: 124499 - DNA, 60 bp, Artificial
  Synthetic oligonucleotide
cgctcacatcaaactcgaactacccgctaccgaacagattcatatggtatgggtgcgagc

SEQ ID NO: 124500 - DNA, 60 bp, Artificial
  Synthetic oligonucleotide
ggtcgactttgctttagccatgttggaaatcctccaccagttgagatgtatcaattcggc

SEQ ID NO: 124501 - DNA, 60 bp, Artificial
  Synthetic oligonucleotide
tcatatgtgttactatttagttgagggtgtcgggtagaatatatagaccttagggtggct

SEQ ID NO: 124502 - DNA, 60 bp, Artificial
  Synthetic oligonucleotide
tattaggtgttttaatcatatgtgttactatttagttgagggtgtcgggtagaatatata

SEQ ID NO: 124503 - DNA, 60 bp, Artificial
  Synthetic oligonucleotide
gcgtagtggggtagatgttattggtagagggtagatggtattctttgtatattaggtgtt

SEQ ID NO: 124504 - DNA, 60 bp, Artificial
  Synthetic oligonucleotide
tgcgtagtggggtagatgttattggtagagggtagatggtattctttgtatattaggtgt

SEQ ID NO: 124505 - DNA, 60 bp, Artificial
  Synthetic oligonucleotide
gcagatatcgattccgacagtgatggaccagatactgcgtagtggggtagatgttattgg

SEQ ID NO: 124506 - DNA, 60 bp, Artificial
  Synthetic oligonucleotide
ctaacttttgatgatgcagatatcgattccgacagtgatggaccagatactgcgtagtgg

SEQ ID NO: 124507 - DNA, 60 bp, Artificial
  Synthetic oligonucleotide
caggtagcacgctaataccgacatctctgacgccactagctgtcaaagagctaacttttg

SEQ ID NO: 124508 - DNA, 60 bp, Artificial
  Synthetic oligonucleotide
tatgaaccgatagaagtgactgcatctatgtgagaggttgagttgccgttgtctgtcttc

SEQ ID NO: 124509 - DNA, 60 bp, Artificial
  Synthetic oligonucleotide
cgatagaagtgactgcatctatgtgagaggttgagttgccgtcgtctgtcttcggaagcg

SEQ ID NO: 124510 - DNA, 60 bp, Artificial
  Synthetic oligonucleotide
tagaagtgactgcatctatgtgagaggttgagttgccgccgtctgtcttcggaagcggcg

SEQ ID NO: 124511 - DNA, 60 bp, Artificial
  Synthetic oligonucleotide
atatgaaccgatagaagtgactgcatctatgtgagaggttgagttgccgtcgtctgtctt

SEQ ID NO: 124512 - DNA, 60 bp, Artificial
  Synthetic oligonucleotide
agtgactgcatctatgtgagaggttgagttgccgccgtctgtcttcggaagcggcagaac

SEQ ID NO: 124513 - DNA, 60 bp, Artificial
  Synthetic oligonucleotide
gttaaataagttgtctcatgtcttcggcattactccttgcacctggcgatctaatcgaaa

SEQ ID NO: 124514 - DNA, 60 bp, Artificial
  Synthetic oligonucleotide
gaagagtggagagccagaaatctgagggaggcggaccagccgattgtcaacgtggcgcag

SEQ ID NO: 124515 - DNA, 60 bp, Artificial
  Synthetic oligonucleotide
atagaatggaagatgtttcaagagcgaaggcgatgttcacagcgccgacgggtgatgagg

SEQ ID NO: 124516 - DNA, 65 bp, Artificial
  Synthetic oligonucleotide
gctgttcaaactcaaagttcttctatcaggtatattagtaatagaatggaagatgtttcaagagc

SEQ ID NO: 124517 - DNA, 60 bp, Artificial
  Synthetic oligonucleotide
gcggggtgggttagggagggaagacattctacatcaatcagatattgtaaaagagattag

SEQ ID NO: 124518 - DNA, 60 bp, Artificial
  Synthetic oligonucleotide
attgcttaagcggggtgggttagggagggaagacattctacatcaatcagatattgtaaa

SEQ ID NO: 124519 - DNA, 50 bp, Artificial
  Synthetic oligonucleotide
gcaacttatttactgtagataaatcattgcttaagcggggtgggttaggg

SEQ ID NO: 124520 - DNA, 60 bp, Artificial
  Synthetic oligonucleotide
gttcaggtgttttctaaaggaatgagcaacttatttactgtagataaatcattgcttaag

SEQ ID NO: 124521 - DNA, 60 bp, Artificial
  Synthetic oligonucleotide
tgaaatcaaagctgttcaaactcaaagttcttctatcaggtatattagtaatagaatgga

SEQ ID NO: 124522 - DNA, 60 bp, Artificial
  Synthetic oligonucleotide
ccacagtaaagagaatgatagcggaattcggaggaacagaggaggatgaaatcaaagctg

SEQ ID NO: 124523 - DNA, 60 bp, Artificial
  Synthetic oligonucleotide
ctttccacagtaaagagaatgatagcggaattcggaggaacagaggaggatgaaatcaaa

SEQ ID NO: 124524 - DNA, 60 bp, Artificial
  Synthetic oligonucleotide
atattgtaaaagagattagagcaagcgataaaaaagtcaagattattcctctttccacag

SEQ ID NO: 124525 - DNA, 60 bp, Artificial
  Synthetic oligonucleotide
cgtgtcgctaatgatgatgcaacacgcaatgttggttccagtgaggtatcacctggtgga

SEQ ID NO: 124526 - DNA, 60 bp, Artificial
  Synthetic oligonucleotide
ggtgatgaggggtggaaagaggtcgctaaagcagcaactcagcgtcctaacatcatggcg

SEQ ID NO: 124527 - DNA, 60 bp, Artificial
  Synthetic oligonucleotide
gggtgcagcctcggatggaaagggagtgggtaaatctaagaccggagcagatcgtgtcgc

SEQ ID NO: 124528 - DNA, 60 bp, Artificial
  Synthetic oligonucleotide
agaaatctgagggaggcggaccagccgattgtcaacgtggcgcaggaagccgaggagcaa

SEQ ID NO: 124529 - DNA, 60 bp, Artificial
  Synthetic oligonucleotide
tgagggagaggaggcgaaggctggagggggcgatagacggattggaggattagcaacgca

SEQ ID NO: 124530 - DNA, 52 bp, Artificial
  Synthetic oligonucleotide
tgcaaagagtggtgaatgtggcggggaatcattggataggataggcggctgc

SEQ ID NO: 124531 - DNA, 60 bp, Artificial
  Synthetic oligonucleotide
gcaacgcaggagattgcagactttgtgaagaagaagatcggagttgaagttcaggtgttt

SEQ ID NO: 124532 - DNA, 60 bp, Artificial
  Synthetic oligonucleotide
tagcaacgcaggagattgcagactttgtgaagaagaagatcggagttgaagttcaggtgt

SEQ ID NO: 124533 - DNA, 60 bp, Artificial
  Synthetic oligonucleotide
tttcaagagcgaaggcgatgttcacagcgccgacgggtgatgaggggtggaaagaggtcg

SEQ ID NO: 124534 - DNA, 60 bp, Artificial
  Synthetic oligonucleotide
atcgtgtcgctaatgatgatgcaacacgcaatgttggttccagtgaggtatcacctggtg

SEQ ID NO: 124535 - DNA, 60 bp, Artificial
  Synthetic oligonucleotide
catcatggcgtatgtgcacgaaggggaaggtgatggattgaaagagcttttacatctgat

SEQ ID NO: 124536 - DNA, 60 bp, Artificial
  Synthetic oligonucleotide
ggcgtatgtgcacgaaggggaaggtgatggattgaaagagcttttacatctgattgatca

SEQ ID NO: 124537 - DNA, 60 bp, Artificial
  Synthetic oligonucleotide
tacatctgattgatcatatctaggtccaggggtaaacggcagcttgagggcaacttaaaa

SEQ ID NO: 124538 - DNA, 60 bp, Artificial
  Synthetic oligonucleotide
ctgattgatcatatctaggtccaggggtaaacggcagcttgagggcaacttaaaacttac

SEQ ID NO: 124539 - DNA, 60 bp, Artificial
  Synthetic oligonucleotide
acttcaggaggtcttcaaggccgaggaggactcgttgcaaagagtggtgaatgtggcggg

SEQ ID NO: 124540 - DNA, 60 bp, Artificial
  Synthetic oligonucleotide
tcacctggtggaatcacttcaggaggtcttcaaggccgaggaggactcgttgcaaagagt

SEQ ID NO: 124541 - DNA, 60 bp, Artificial
  Synthetic oligonucleotide
atatcggctgtttcagctagtggttgcaaaaacgataaaccattttgtgttcataaagta

SEQ ID NO: 124542 - DNA, 60 bp, Artificial
  Synthetic oligonucleotide
tagtaatattattgtggtcggtctatctgttgtgggaatgaccgccagttcaaagaccaa

SEQ ID NO: 124543 - DNA, 60 bp, Artificial
  Synthetic oligonucleotide
ggtcggtctatctgttgtgggaatgaccgccagttcaaagaccaaacaagtattaactga

SEQ ID NO: 124544 - DNA, 60 bp, Artificial
  Synthetic oligonucleotide
tagagagtcggtctcagagctaaatgttgataacaggtaagattcatccccttcatttgg

SEQ ID NO: 124545 - DNA, 60 bp, Artificial
  Synthetic oligonucleotide
catttattgtaacatctgatttagtaaaaccgcttattttagagagtcggtctcagagct

SEQ ID NO: 124546 - DNA, 51 bp, Artificial
  Synthetic oligonucleotide
acaacttttaacagattaaattgaattttgtaagtaaattcgtcgaaaagt

SEQ ID NO: 124547 - DNA, 60 bp, Artificial
  Synthetic oligonucleotide
cggtctcagagctaaatgttgataacaggtaagattcatccccttcatttgggttaccac

SEQ ID NO: 124548 - DNA, 60 bp, Artificial
  Synthetic oligonucleotide
tttgagttaaagagtgagtttgcaggcaaaagtttgataactgataatcgtactgggcaa

SEQ ID NO: 124549 - DNA, 56 bp, Artificial
  Synthetic oligonucleotide
gtaaagatttgaagagtaatgataataagcctgatccttcagcaccaccaaaatat

SEQ ID NO: 124550 - DNA, 60 bp, Artificial
  Synthetic oligonucleotide
tactgggcaatcatttattgtaacatctgatttagtaaaaccgcttattttagagagtcg

SEQ ID NO: 124551 - DNA, 60 bp, Artificial
  Synthetic oligonucleotide
gagttaaagagtgagtttgcaggcaaaagtttgataactgataatcgtactgggcaatca

SEQ ID NO: 124552 - DNA, 54 bp, Artificial
  Synthetic oligonucleotide
cttcatttgggttaccactttggatcttatttggtttggaatgaagaaaacgac

SEQ ID NO: 124553 - DNA, 60 bp, Artificial
  Synthetic oligonucleotide
gcgattatcaaaactgggaggagtgttctaccatactgcgctacttaaaacggcttcaca

SEQ ID NO: 124554 - DNA, 60 bp, Artificial
  Synthetic oligonucleotide
gtaatacatactctcccggcttattctgcggttgtattgatgttcagtcagcaccacttg

SEQ ID NO: 124555 - DNA, 60 bp, Artificial
  Synthetic oligonucleotide
gcaccacttgcgctatcacagctgaagtcatattgctcggaagcaacaacctggcgagtg

SEQ ID NO: 124556 - DNA, 60 bp, Artificial
  Synthetic oligonucleotide
gatacgcctacacgcgacatttggccagccgatgagcaagtggaacagaaaggagatgca

SEQ ID NO: 124557 - DNA, 60 bp, Artificial
  Synthetic oligonucleotide
acccagattgacaaaatacgtaatgttgccacagctatgctaacaaggacgaattgcgtt

SEQ ID NO: 124558 - DNA, 60 bp, Artificial
  Synthetic oligonucleotide
gcatacatctcattttatgagtcgggaataattacgaggttaagtcagtccaccgcgcat

SEQ ID NO: 124559 - DNA, 60 bp, Artificial
  Synthetic oligonucleotide
cctgtggatacgcttcctgaggcagatgtaacattaatgttgcgcgatattggtataacg

SEQ ID NO: 124560 - DNA, 58 bp, Artificial
  Synthetic oligonucleotide
cacgtgagttgaggagctccgtcccgggagggacagcgtgcggtggggaacgttagcc

SEQ ID NO: 124561 - DNA, 60 bp, Artificial
  Synthetic oligonucleotide
ttctcagagacagatagaggacatcccttattccgcttacctcttaagtatccatcgaaa

SEQ ID NO: 124562 - DNA, 60 bp, Artificial
  Synthetic oligonucleotide
gcaagtggaacagaaaggagatgcagtcgctttatatgacacaaagacgtccagagctct

SEQ ID NO: 124563 - DNA, 60 bp, Artificial
  Synthetic oligonucleotide
ctgcacatattactgcaagctatatctctaacacggggcaaggtcgtatcaagcattcac

SEQ ID NO: 124564 - DNA, 60 bp, Artificial
  Synthetic oligonucleotide
ggatgttaggtgtgtacgcacgttcaaccaactacactacgccggtcggacagttagtag

SEQ ID NO: 124565 - DNA, 60 bp, Artificial
  Synthetic oligonucleotide
caactaggcacagactatctgtacactttcaatccacaacgccgatcacatacactacga

SEQ ID NO: 124566 - DNA, 60 bp, Artificial
  Synthetic oligonucleotide
tggtcgagccaatgagtatagctgcagaggacatgtatggatatgtaattgatacgccta

SEQ ID NO: 124567 - DNA, 60 bp, Artificial
  Synthetic oligonucleotide
gcaaggtcgtatcaagcattcactagccgttactggaacaactgagcatagcactgtacc

SEQ ID NO: 124568 - DNA, 60 bp, Artificial
  Synthetic oligonucleotide
gatgacggttcaacgccttacaacgttcgtatctggcacgcgcctaccatgacagaagtt

SEQ ID NO: 124569 - DNA, 60 bp, Artificial
  Synthetic oligonucleotide
gccgacatatccgttgtaccgctcaccatgaagtatatagtgatagacccagccgcacgt

SEQ ID NO: 124570 - DNA, 60 bp, Artificial
  Synthetic oligonucleotide
acgagaacaaatatcgctaaccgagagtatgacccaagtcgtaagtattggtggacgtaa

SEQ ID NO: 124571 - DNA, 60 bp, Artificial
  Synthetic oligonucleotide
gtgccaaacgggcttggtttcaagatacggaaaacacgagaattcagatacatgcatcgt

SEQ ID NO: 124572 - DNA, 60 bp, Artificial
  Synthetic oligonucleotide
gacgcgttcgaacactagcgcccatcacgagtaccaacgttgtgtgccaaacgggcttgg

SEQ ID NO: 124573 - DNA, 60 bp, Artificial
  Synthetic oligonucleotide
atagtgatagacccagccgcacgtattgaaacactcacgcaagagaaaaagaacatagag

SEQ ID NO: 124574 - DNA, 60 bp, Artificial
  Synthetic oligonucleotide
cgcgcctaccatgacagaagttaatcatattcttacattgatgcggaagagcactttagt

SEQ ID NO: 124575 - DNA, 60 bp, Artificial
  Synthetic oligonucleotide
gtgagacgatgtcggtagtgacaacgtgtgccagcgctgcaacgcgctcgcttgtgaaga

SEQ ID NO: 124576 - DNA, 60 bp, Artificial
  Synthetic oligonucleotide
cgctcgcttgtgaagattaaccacccgtctgagtatatgataaatagtgtaattgagcga

SEQ ID NO: 124577 - DNA, 60 bp, Artificial
  Synthetic oligonucleotide
gtcgaggctgatagagtgattcagaggctgataccactaagctcttcaacatacgtgcaa

SEQ ID NO: 124578 - DNA, 60 bp, Artificial
  Synthetic oligonucleotide
gcactttagtatcaacgcattcgtcgtggcattggaacgtccttcataccttccattaca

SEQ ID NO: 124579 - DNA, 60 bp, Artificial
  Synthetic oligonucleotide
cttgttatccccattactgggccgggtatatagaacatacgctaaaggcgacacaatggc

SEQ ID NO: 124580 - DNA, 60 bp, Artificial
  Synthetic oligonucleotide
gtacaacgattcaagaactttatacatgacggcgaggcaccaagaactgctactagcgca

SEQ ID NO: 124581 - DNA, 60 bp, Artificial
  Synthetic oligonucleotide
tagcgctagaccccaaaccgaatcaaatcagaacaataacaaaaccaaacacagtacctc

SEQ ID NO: 124582 - DNA, 60 bp, Artificial
  Synthetic oligonucleotide
cggcgaattcatatctaatgtctccagatacatctatcattttactcggtgctgagcgag

SEQ ID NO: 124583 - DNA, 60 bp, Artificial
  Synthetic oligonucleotide
cggatcctctccaagtagtggatgaccttgatactaagctggatcagtactggacggcat

SEQ ID NO: 124584 - DNA, 60 bp, Artificial
  Synthetic oligonucleotide
ctcatgatcgattcatccgacttggtgccgaacttcatgatgagagatccttcccatgcg

SEQ ID NO: 124585 - DNA, 60 bp, Artificial
  Synthetic oligonucleotide
gcttcaagttgatccgaattcaatgtttagatccatacactcaagttggacggatcctct

SEQ ID NO: 124586 - DNA, 60 bp, Artificial
  Synthetic oligonucleotide
ccgaattcaatgtttagatccatacactcaagttggacggatcctctccaagtagtggat

SEQ ID NO: 124587 - DNA, 60 bp, Artificial
  Synthetic oligonucleotide
caaatgcacgcaatgatgaatgatgtgtcaccagaagatctggatcgtgtacgcactgaa

SEQ ID NO: 124588 - DNA, 60 bp, Artificial
  Synthetic oligonucleotide
gcacgcaatgatgaatgatgtgtcaccagaagatctggatcgtgtacgcactgaaggagg

SEQ ID NO: 124589 - DNA, 60 bp, Artificial
  Synthetic oligonucleotide
cgtcagcaagactatgttgacgtgcagttcgcagatcgggttacagctcactggaaacgg

SEQ ID NO: 124590 - DNA, 60 bp, Artificial
  Synthetic oligonucleotide
cagcaagactatgttgacgtgcagttcgcagatcgggttacagctcactggaaacggggc

SEQ ID NO: 124591 - DNA, 53 bp, Artificial
  Synthetic oligonucleotide
catgatgagagatccttcccatgcgttcaatggtgtgaagttggagggcgacg

SEQ ID NO: 124592 - DNA, 60 bp, Artificial
  Synthetic oligonucleotide
ctcaagatcaaatttggagtggggtgtaatggtctacgattattccgaactggagcatga

SEQ ID NO: 124593 - DNA, 60 bp, Artificial
  Synthetic oligonucleotide
caacgcaagctgaagcatttgcctcatcatagatgtaatcaacagattcgtcagcaagac

SEQ ID NO: 124594 - DNA, 60 bp, Artificial
  Synthetic oligonucleotide
tgtttccagatactactaaatttggggatttgaactatccagtgatgattggcgatccga

SEQ ID NO: 124595 - DNA, 60 bp, Artificial
  Synthetic oligonucleotide
ggagcatgatccattgaagggccgtgcctatagaaaggagttggtgacgccagctcgaga

SEQ ID NO: 124596 - DNA, 60 bp, Artificial
  Synthetic oligonucleotide
cgattattccgaactggagcatgatccattgaagggccgtgcctatagaaaggagttggt

SEQ ID NO: 124597 - DNA, 60 bp, Artificial
  Synthetic oligonucleotide
cgccagctcgagattttggtcactttggactatctcattattcgagagcaaccactccga

SEQ ID NO: 124598 - DNA, 60 bp, Artificial
  Synthetic oligonucleotide
aggagttggtgacgccagctcgagattttggtcactttggactatctcattattcgagag

SEQ ID NO: 124599 - DNA, 60 bp, Artificial
  Synthetic oligonucleotide
gacagtgcgtaaactagtggatgcggtaaaccatgcatggggcgtcgaaaagatcaggta

SEQ ID NO: 124600 - DNA, 60 bp, Artificial
  Synthetic oligonucleotide
gctaagttgaagacagtgcgtaaactagtggatgcggtaaaccatgcatggggcgtcgaa

SEQ ID NO: 124601 - DNA, 60 bp, Artificial
  Synthetic oligonucleotide
ctactaaatttggggatttgaactatccagtgatgattggcgatccgatgatccttggct

SEQ ID NO: 124602 - DNA, 60 bp, Artificial
  Synthetic oligonucleotide
tacaacgcaagctgaagcatttgcctcatcatagatgtaatcaacagattcgtcagcaag

SEQ ID NO: 124603 - DNA, 60 bp, Artificial
  Synthetic oligonucleotide
acgcttttgaaggtcgtgtgtcaatttacagcgcacaggagggatgggacaaaacaatct

SEQ ID NO: 124604 - DNA, 60 bp, Artificial
  Synthetic oligonucleotide
tggacttgattaataacgcttttgaaggtcgtgtgtcaatttacagcgcacaggagggat

SEQ ID NO: 124605 - DNA, 60 bp, Artificial
  Synthetic oligonucleotide
acttaaataagctaaactcagtttttgccatcacaagaccttctggactagagtagcgcc

SEQ ID NO: 124606 - DNA, 60 bp, Artificial
  Synthetic oligonucleotide
gaccgacacattggttagattagaagaagagggtaaactagctgaagaatatgagcttct

SEQ ID NO: 124607 - DNA, 60 bp, Artificial
  Synthetic oligonucleotide
tatattatggcactcaattactaaataccttgatcaaaccattgaaaagttgttcaatgc

SEQ ID NO: 124608 - DNA, 60 bp, Artificial
  Synthetic oligonucleotide
ggacattgcagttcaattgaacgcgtttatccattggtaaaagatatattatggcactca

SEQ ID NO: 124609 - DNA, 60 bp, Artificial
  Synthetic oligonucleotide
acccagtacaagtgaatgatcagaaagtaattagttttcattggcagatagacattgcac

SEQ ID NO: 124610 - DNA, 60 bp, Artificial
  Synthetic oligonucleotide
tgttcaatgcaatgaacccagtacaagtgaatgatcagaaagtaattagttttcattggc

SEQ ID NO: 124611 - DNA, 60 bp, Artificial
  Synthetic oligonucleotide
aagggaattgtgaatcaatggtgcaacgtgagtgaattggatgatttacctctatgtact

SEQ ID NO: 124612 - DNA, 60 bp, Artificial
  Synthetic oligonucleotide
tttcattggcagatagacattgcactatatacgcatatcaagatgatattaaaaactgaa

SEQ ID NO: 124613 - DNA, 60 bp, Artificial
  Synthetic oligonucleotide
tctatgtactgaacagaccgacacattggttagattagaagaagagggtaaactagctga

SEQ ID NO: 124614 - DNA, 60 bp, Artificial
  Synthetic oligonucleotide
caatggtgcaacgtgagtgaattggatgatttacctctatgtactgaacagaccgacaca

SEQ ID NO: 124615 - DNA, 60 bp, Artificial
  Synthetic oligonucleotide
aatcaattgctacttccaatcactctaaatgctgcagtgtttaagtttcattcaagggaa

SEQ ID NO: 124616 - DNA, 60 bp, Artificial
  Synthetic oligonucleotide
gatcatggtataatcaattgctacttccaatcactctaaatgctgcagtgtttaagtttc

SEQ ID NO: 124617 - DNA, 51 bp, Artificial
  Synthetic oligonucleotide
cagcaaatttgcaatccatttatgcgaataagtatttcaagttgagtagac

SEQ ID NO: 124618 - DNA, 60 bp, Artificial
  Synthetic oligonucleotide
cgataaattgttactagatcaaataaattttgatagaatgagctcccttccagcaaattt

SEQ ID NO: 124619 - DNA, 51 bp, Artificial
  Synthetic oligonucleotide
gcaattcgaaacgcacgacttaaatctgggaagaataaaagctgacgtttt

SEQ ID NO: 124620 - DNA, 60 bp, Artificial
  Synthetic oligonucleotide
taaagcaattcgaaacgcacgacttaaatctgggaagaataaaagctgacgtttttgaac

SEQ ID NO: 124621 - DNA, 60 bp, Artificial
  Synthetic oligonucleotide
ctcggacgtcattgcaaaccaaattatatttcatcaaatcattggcagccagcgtcaacg

SEQ ID NO: 124622 - DNA, 60 bp, Artificial
  Synthetic oligonucleotide
aacgtaggacattgcagttcaattgaacgcgtttatccattggtaaaagatatattatgg

SEQ ID NO: 124623 - DNA, 55 bp, Artificial
  Synthetic oligonucleotide
ttggcagccagcgtcaacgatttctcagtgtaagtggtgtaatgtaaaatatgca

SEQ ID NO: 124624 - DNA, 50 bp, Artificial
  Synthetic oligonucleotide
ttttgccatcacaagaccttctggactagagtagcgcctagccagcaaaa

SEQ ID NO: 124625 - DNA, 60 bp, Artificial
  Synthetic oligonucleotide
ttgctttcattacagaagaatcacaaaactgaatagagaactactgagaataggagcaaa

SEQ ID NO: 124626 - DNA, 60 bp, Artificial
  Synthetic oligonucleotide
aagaatcacaaaactgaatagagaactactgagaataggagcaaattcagtgtggactcc

SEQ ID NO: 124627 - DNA, 60 bp, Artificial
  Synthetic oligonucleotide
ggcttttttttgaaaagtcttgtgttagccatggcaactttcaaagatgcttgctttcat

SEQ ID NO: 124628 - DNA, 60 bp, Artificial
  Synthetic oligonucleotide
agtcttgtgttagccatggcaactttcaaagatgcttgctttcattacagaagaatcaca

SEQ ID NO: 124629 - DNA, 60 bp, Artificial
  Synthetic oligonucleotide
taggagcaaattcagtgtggactccagtttctacgaataaaattaaggggtggtgtgttg

SEQ ID NO: 124630 - DNA, 60 bp, Artificial
  Synthetic oligonucleotide
cagtgtggactccagtttctacgaataaaattaaggggtggtgtgttgaatgctgtcaac

SEQ ID NO: 124631 - DNA, 60 bp, Artificial
  Synthetic oligonucleotide
tcatatcgattaaaactaatctctaattcagtttagttcatcattgagttttgaaaactg

SEQ ID NO: 124632 - DNA, 54 bp, Artificial
  Synthetic oligonucleotide
ttacgagacgccattagaatatgaaagcgtgggtatagtagctgaggctgcagg

SEQ ID NO: 124633 - DNA, 60 bp, Artificial
  Synthetic oligonucleotide
catgctctatatggctagacgcggcagatcagttaaagcaagcacaacaccgacagttgt

SEQ ID NO: 124634 - DNA, 60 bp, Artificial
  Synthetic oligonucleotide
ctaacacgtggacttggtctggagggtatgaagtacatgctctatatggctagacgcggc

SEQ ID NO: 124635 - DNA, 60 bp, Artificial
  Synthetic oligonucleotide
gaaatcgaaaagcgccacgattctgacgcacccagaggacttcatttatgcatctgatga

SEQ ID NO: 124636 - DNA, 60 bp, Artificial
  Synthetic oligonucleotide
caaacggtataactctaagtatgttagaaaaatggatttagttcacgagaatattgtagg

SEQ ID NO: 124637 - DNA, 60 bp, Artificial
  Synthetic oligonucleotide
acgtgtcagccgaaatgatcaaacaacgcgttaagatttcaggtagtgagagagctggga

SEQ ID NO: 124638 - DNA, 60 bp, Artificial
  Synthetic oligonucleotide
tctgatgatatgttaaagtgccgtgttaaaatgggctctaggttagtgcgtggtacgcgt

SEQ ID NO: 124639 - DNA, 60 bp, Artificial
  Synthetic oligonucleotide
cttttcagcttcagttatacccgacgtaatcgacttttgttcaaagaacatgcaccgtta

SEQ ID NO: 124640 - DNA, 60 bp, Artificial
  Synthetic oligonucleotide
gctacgacaggaccattaatggagttattcatgagagatatcatattaattgaaggcgtt

SEQ ID NO: 124641 - DNA, 60 bp, Artificial
  Synthetic oligonucleotide
agtagagttaatgcccaacaaacttgggtcacagtacttgaacttcttgacttttcagct

SEQ ID NO: 124642 - DNA, 60 bp, Artificial
  Synthetic oligonucleotide
gcataagatagttggtttggctgatgctaatgttaaggtgcttaatccagctgcacggct

SEQ ID NO: 124643 - DNA, 60 bp, Artificial
  Synthetic oligonucleotide
aggtgcttaatccagctgcacggctgagcgctttacttagatctagacccggaacacatc

SEQ ID NO: 124644 - DNA, 60 bp, Artificial
  Synthetic oligonucleotide
atattgtaggtgacgataaatacgtaatattagtgatgacagatggtaaaccagttacga

SEQ ID NO: 124645 - DNA, 60 bp, Artificial
  Synthetic oligonucleotide
atacgttataattcgccgttcttcactgacgacgatttagattcaaagtccgataaggtg

SEQ ID NO: 124646 - DNA, 60 bp, Artificial
  Synthetic oligonucleotide
cagctgaaaatcacctcgtcatatcaggtaaacgatctgttgctggtaatataaagggag

SEQ ID NO: 124647 - DNA, 60 bp, Artificial
  Synthetic oligonucleotide
taatataaagggagaacacattaagatatgggttattaaaggatacattacacaagatgt

SEQ ID NO: 124648 - DNA, 60 bp, Artificial
  Synthetic oligonucleotide
ttgcaactactttgaaatcgaaaagcgccacgattctgacgcacccagaggacttcattt

SEQ ID NO: 124649 - DNA, 60 bp, Artificial
  Synthetic oligonucleotide
acccaactacgtaatactgatccgaataaagctcatacgacgttaactctcaaacggtat

SEQ ID NO: 124650 - DNA, 60 bp, Artificial
  Synthetic oligonucleotide
cgccgttcttcactgacgacgatttagattcaaagtccgataaggtggttaaaactgtgg

SEQ ID NO: 124651 - DNA, 60 bp, Artificial
  Synthetic oligonucleotide
agagctgggatggtgctaacacgtggacttggtctggagggtatgaagtacatgctctat

SEQ ID NO: 124652 - DNA, 60 bp, Artificial
  Synthetic oligonucleotide
tcttaaggaatgtagtgttgagatatatatgaaggatgataacggtatacctgatccagc

SEQ ID NO: 124653 - DNA, 60 bp, Artificial
  Synthetic oligonucleotide
gcaatattacgtggttgggacatcagtactatacctgagtcaattcaactgccttctggt

SEQ ID NO: 124654 - DNA, 60 bp, Artificial
  Synthetic oligonucleotide
gcttgcatgcgtaggatcaacgatgaagcacctttctatctctatacaagtatatttcaa

SEQ ID NO: 124655 - DNA, 60 bp, Artificial
  Synthetic oligonucleotide
tgcgactagaatagatatggacgatccatacacacggatttggttgaagtattttatcgg

SEQ ID NO: 124656 - DNA, 60 bp, Artificial
  Synthetic oligonucleotide
ggatttggttgaagtattttatcggagctgaagacttcttctcatataatggtagagtta

SEQ ID NO: 124657 - DNA, 60 bp, Artificial
  Synthetic oligonucleotide
cgaaagtatcgccaaataaattttgtgacattacagctaagaattacgagacgccattag

SEQ ID NO: 124658 - DNA, 60 bp, Artificial
  Synthetic oligonucleotide
ttgttatctagtaggataccaaatatgccagctttgtccgtttctggtagaataggaaca

SEQ ID NO: 124659 - DNA, 60 bp, Artificial
  Synthetic oligonucleotide
ttaattgaaggcgttaaaatgggatatcttaactttataccgactgttaagctaattagt

SEQ ID NO: 124660 - DNA, 60 bp, Artificial
  Synthetic oligonucleotide
gacgacaaatcttacgtcaagtgcgtgaggatgaaatcgttaaaaatgagccactggtat

SEQ ID NO: 124661 - DNA, 60 bp, Artificial
  Synthetic oligonucleotide
attagtgcagttggtggacctgaaatgtgtccatctgctccagagttacggggtatggct

SEQ ID NO: 124662 - DNA, 60 bp, Artificial
  Synthetic oligonucleotide
agttgactgaagatttgatatcaactttgaaagagccagttgctggcagaatggatgata

SEQ ID NO: 124663 - DNA, 60 bp, Artificial
  Synthetic oligonucleotide
ccactggtatcaccactttggcgtatacatttcagacgcaggaatgggatcatcgtagat

SEQ ID NO: 124664 - DNA, 60 bp, Artificial
  Synthetic oligonucleotide
acagagtataaaactactggcgtagaatcaccatacttaggagcttgtgagggtgttagg

SEQ ID NO: 124665 - DNA, 60 bp, Artificial
  Synthetic oligonucleotide
gtaagttaggtaagtatgatagacccaagtttaagtacaaatttttcttgacagagtata

SEQ ID NO: 124666 - DNA, 60 bp, Artificial
  Synthetic oligonucleotide
gggtgttaggatggtgcataagatagttggtttggctgatgctaatgttaaggtgcttaa

SEQ ID NO: 124667 - DNA, 60 bp, Artificial
  Synthetic oligonucleotide
atgcaagtttgtatccaaagggctcaaattatgacgatgctgagattgttgacttaacga

SEQ ID NO: 124668 - DNA, 60 bp, Artificial
  Synthetic oligonucleotide
tagtttacatggcgacatctcaaaagctcatgctgaaggattacgcaaatatgcaagttt

SEQ ID NO: 124669 - DNA, 60 bp, Artificial
  Synthetic oligonucleotide
tgaaggtgcattgccgcatgtagttatggctccaatgatggcagctttaagtggatcaac

SEQ ID NO: 124670 - DNA, 60 bp, Artificial
  Synthetic oligonucleotide
aataggaacaacttatgaaggtgcattgccgcatgtagttatggctccaatgatggcagc

SEQ ID NO: 124671 - DNA, 60 bp, Artificial
  Synthetic oligonucleotide
gcttagaggtgcatttggcgatctaaatcaacatgtgtttgcgaggacggattcacctgc

SEQ ID NO: 124672 - DNA, 60 bp, Artificial
  Synthetic oligonucleotide
gaaccacaatacagacttgatgtgttaatgaaaggtggaacttcatcagcaagtagcacc

SEQ ID NO: 124673 - DNA, 60 bp, Artificial
  Synthetic oligonucleotide
gacccttcgtgattacggtcttagtaaaaatgcagacttacttcaacgtgcagttagatt

SEQ ID NO: 124674 - DNA, 60 bp, Artificial
  Synthetic oligonucleotide
gaatgagagaggggacggggataactgactctgattcccgtatcaacttgattgacggtg

SEQ ID NO: 124675 - DNA, 60 bp, Artificial
  Synthetic oligonucleotide
agttaaaagatgaacgactattaagatgtgttgagtatgataatggttggtatcaactat

SEQ ID NO: 124676 - DNA, 60 bp, Artificial
  Synthetic oligonucleotide
gtgtgacaaaagtctattagctcataaacgcttcgagatgatgatagctgctcaacgtgc

SEQ ID NO: 124677 - DNA, 60 bp, Artificial
  Synthetic oligonucleotide
gctgctcaacgtgcagcattgaaatatgacatggttggaaatgatatctttaaggagtgt

SEQ ID NO: 124678 - DNA, 60 bp, Artificial
  Synthetic oligonucleotide
tatcaactatgtgttaagatacaacgcgctatcgataacggattggagatagagaaagct

SEQ ID NO: 124679 - DNA, 60 bp, Artificial
  Synthetic oligonucleotide
ggtttatgtggttatacgggttcgcatggtaattctgctgtggtgaagcagtttactggg

SEQ ID NO: 124680 - DNA, 60 bp, Artificial
  Synthetic oligonucleotide
ggtctttctaacgtataagtcagctctgcaaatgggtgattttgttgaaccacaatacag

SEQ ID NO: 124681 - DNA, 60 bp, Artificial
  Synthetic oligonucleotide
cgcatcgtacgcagaagcgtttcgtgatgatgtgaggctgagacagattaaacgacatgt

SEQ ID NO: 124682 - DNA, 60 bp, Artificial
  Synthetic oligonucleotide
cgcatcgtacgcagaagcgtttcgtgatgatgtgaggctgagacaaattaaacgacatgt

SEQ ID NO: 124683 - DNA, 60 bp, Artificial
  Synthetic oligonucleotide
gaacaggaaatagagatagattcacttgtaacaggacaggcgtttgaacagataccattg

SEQ ID NO: 124684 - DNA, 60 bp, Artificial
  Synthetic oligonucleotide
taacagcaacagagactacagctatatctgacttagatgaaaactggcgtatcgctaatg

SEQ ID NO: 124685 - DNA, 60 bp, Artificial
  Synthetic oligonucleotide
gatgaaaactggcgtatcgctaatggaatgaatgttaacataaaatctgtatttcgaata

SEQ ID NO: 124686 - DNA, 60 bp, Artificial
  Synthetic oligonucleotide
ttataagcacaattgggtcattactattagacatcagcttatctgttgcgatgggtggag

SEQ ID NO: 124687 - DNA, 60 bp, Artificial
  Synthetic oligonucleotide
caaccataacaactaacactcaacggcgatctaaagctactggtctatttgttcgagctg

SEQ ID NO: 124688 - DNA, 60 bp, Artificial
  Synthetic oligonucleotide
gataccattgataccaatcgcaggcagtaggacgcttactagtagatatattacgaatgg

SEQ ID NO: 124689 - DNA, 60 bp, Artificial
  Synthetic oligonucleotide
acgaatcagagcgcactgtggatagtgaaactgcaaataatcctgtaccttatcccatgt

SEQ ID NO: 124690 - DNA, 55 bp, Artificial
  Synthetic oligonucleotide
cgtgatatccaattagtattagagtcaatggaattagagattcaacgtttgtctg

SEQ ID NO: 124691 - DNA, 60 bp, Artificial
  Synthetic oligonucleotide
ctaacactgcaagaatagatgagttatttgctaccgtacctcgctatgtagaacaggaaa

SEQ ID NO: 124692 - DNA, 60 bp, Artificial
  Synthetic oligonucleotide
ctggcggtgatagtactgtcatgataatagacggcatacgttatagtggaatggtcttta

SEQ ID NO: 124693 - DNA, 60 bp, Artificial
  Synthetic oligonucleotide
atagattcacttgtaacaggacaggcgtttgaacagataccattgataccaatcgcaggc

SEQ ID NO: 124694 - DNA, 60 bp, Artificial
  Synthetic oligonucleotide
ttatctattaccacgaatctaccctcacgtaatgaaaatatattgttaagattggtgcta

SEQ ID NO: 124695 - DNA, 60 bp, Artificial
  Synthetic oligonucleotide
gatcaatatcataatgttcttcagacgcgtttaacaagaatgcaatctttagacacaacc

SEQ ID NO: 124696 - DNA, 60 bp, Artificial
  Synthetic oligonucleotide
cgagactttgataaatgatgccttggattccggaaaagctgaatttgatgttcatgttga

SEQ ID NO: 124697 - DNA, 60 bp, Artificial
  Synthetic oligonucleotide
gaagatgttggtcattatctctctcgaatgacattttctaacactgcaagaatagatgag

SEQ ID NO: 124698 - DNA, 60 bp, Artificial
  Synthetic oligonucleotide
caagtttaaaaagacaattagccaaaggtagttccacacccattgaagccatcaacaaac

SEQ ID NO: 124699 - DNA, 60 bp, Artificial
  Synthetic oligonucleotide
gacaattagccaaaggtagttccacacccattgaagccatcaacaaacatttattttcgc

SEQ ID NO: 124700 - DNA, 60 bp, Artificial
  Synthetic oligonucleotide
ttttcgcatgtcggagtgagggaagctaagtatagttcaacgagttggcagcgcatacct

SEQ ID NO: 124701 - DNA, 60 bp, Artificial
  Synthetic oligonucleotide
acgttccagatgattacgcggggcctattagtaagcttgggattcattatcagcctctca

SEQ ID NO: 124702 - DNA, 60 bp, Artificial
  Synthetic oligonucleotide
gattacgcggggcctattagtaagcttgggattcattatcagcctctcaaagttggtgga

SEQ ID NO: 124703 - DNA, 60 bp, Artificial
  Synthetic oligonucleotide
cgcgcaatatatgttccgggctaataaggttcgagcgagaaaaccagcacatgcttgggg

SEQ ID NO: 124704 - DNA, 60 bp, Artificial
  Synthetic oligonucleotide
gcacatgcttggggatcattagatacctatgaacaagactcgttaggtaactctattcgt

SEQ ID NO: 124705 - DNA, 60 bp, Artificial
  Synthetic oligonucleotide
actttgtctgtatttggtgtgggtgagcatggtggtatgaatgctaactctatgagtggt

SEQ ID NO: 124706 - DNA, 60 bp, Artificial
  Synthetic oligonucleotide
atacttgtacaacggatcgaaatgcttgatctaaagtacatgatatagggtgttaactgc

SEQ ID NO: 124707 - DNA, 51 bp, Artificial
  Synthetic oligonucleotide
cttccttctagtcacctcgaagtttctgaatgctggatgttgttacataaa

SEQ ID NO: 124708 - DNA, 57 bp, Artificial
  Synthetic oligonucleotide
cagtgtaatttttcgtgcgatgggacaaactttagatgcaattgatgctacatcacg

SEQ ID NO: 124709 - DNA, 60 bp, Artificial
  Synthetic oligonucleotide
ctacagttcccacagtgcttgggctatcaatagaagtactagaactattacttcaaatca

SEQ ID NO: 124710 - DNA, 60 bp, Artificial
  Synthetic oligonucleotide
aggattagacgcaccattgattgattctgtgcaaggagacatttcgatatattcaactaa

SEQ ID NO: 124711 - DNA, 60 bp, Artificial
  Synthetic oligonucleotide
cgatgtccttgatgaggatcttacctttgaatacggtcaattagtgatagattatcaact

SEQ ID NO: 124712 - DNA, 54 bp, Artificial
  Synthetic oligonucleotide
aaggtaatagacatgtgagcgtaagcgaattgcagataataagcaaaggagcta

SEQ ID NO: 124713 - DNA, 60 bp, Artificial
  Synthetic oligonucleotide
gggatactggcaaattgaacatatgttgatatggcgaacttcagaagatatacacgtgca

SEQ ID NO: 124714 - DNA, 60 bp, Artificial
  Synthetic oligonucleotide
atgtccgatgcgactagtgatgttatgaaacgtactttaactggcggtgatagtactgtc

SEQ ID NO: 124715 - DNA, 60 bp, Artificial
  Synthetic oligonucleotide
attcaactaacatgtccgatgcgactagtgatgttatgaaacgtactttaactggcggtg

SEQ ID NO: 124716 - DNA, 60 bp, Artificial
  Synthetic oligonucleotide
ccattgattgattctgtgcaaggagacatttcgatatattcaactaacatgtccgatgcg

SEQ ID NO: 124717 - DNA, 58 bp, Artificial
  Synthetic oligonucleotide
gctaatagacgttaatctcgccacacaactcattacagcaggactgagtgttgatgtc

SEQ ID NO: 124718 - DNA, 53 bp, Artificial
  Synthetic oligonucleotide
cacaccgaggttatattccaattcccatggctaatgctagatattttcagtca

SEQ ID NO: 124719 - DNA, 60 bp, Artificial
  Synthetic oligonucleotide
cacaacgaatggggattaatacttgcgcatcgagataatatagacggattgctaatagac

SEQ ID NO: 124720 - DNA, 60 bp, Artificial
  Synthetic oligonucleotide
ttacgaaccagacttatttgcacttaaagttggtctaatgagtggaacttcacaccgagg

SEQ ID NO: 124721 - DNA, 60 bp, Artificial
  Synthetic oligonucleotide
taaagatacttgttgaaggtcagatctctcactttcctgctgcggagccaaacgtagata

SEQ ID NO: 124722 - DNA, 52 bp, Artificial
  Synthetic oligonucleotide
aataatcctgtaccttatcccatgtcattgacttatgtggcacatcctccgt

SEQ ID NO: 124723 - DNA, 60 bp, Artificial
  Synthetic oligonucleotide
ggatatccaattagtgatgcttggggtttacagatgaataggcgaatggacagtgtaatt

SEQ ID NO: 124724 - DNA, 60 bp, Artificial
  Synthetic oligonucleotide
gcgtggttaacagtaacaaagctcatgaatatactttcgcaagtccttatatgcacaagg

SEQ ID NO: 124725 - DNA, 60 bp, Artificial
  Synthetic oligonucleotide
aaaaagttagttccagcgtggttaacagtaacaaagctcatgaatatactttcgcaagtc

SEQ ID NO: 124726 - DNA, 60 bp, Artificial
  Synthetic oligonucleotide
gggtcattactattagacatcagcttatctgttgcgatgggtggagttggttatgcgatg

SEQ ID NO: 124727 - DNA, 60 bp, Artificial
  Synthetic oligonucleotide
tgcggtacataacggaacaacttatagatggagtcagtttatgcccgttcagccgatagg

SEQ ID NO: 124728 - DNA, 60 bp, Artificial
  Synthetic oligonucleotide
ggtctatttgttcgagctgccagatttaattccatgcaagtagctgcggtacataacgga

SEQ ID NO: 124729 - DNA, 60 bp, Artificial
  Synthetic oligonucleotide
caattgacgatttgaagcttaaatatcgaatacaaatggcgccggaaggagcgggaatag

SEQ ID NO: 124730 - DNA, 60 bp, Artificial
  Synthetic oligonucleotide
cggaacaacttatagatggagtcagtttatgcccgttcagccgataggaagagtgcatgg

SEQ ID NO: 124731 - DNA, 60 bp, Artificial
  Synthetic oligonucleotide
agctatgaaggttgcgatgagtactttaagtaaatctaagacagtattttcaagtttaaa

SEQ ID NO: 124732 - DNA, 60 bp, Artificial
  Synthetic oligonucleotide
ggagttggttatgcgatgagtacaatagttaaaagtggagttggagctatgaaggttgcg

SEQ ID NO: 124733 - DNA, 60 bp, Artificial
  Synthetic oligonucleotide
gattaaataaaatagtaagaatgtatagccctgtcagcattttggacataagacaagggc

SEQ ID NO: 124734 - DNA, 57 bp, Artificial
  Synthetic oligonucleotide
ttttgactagcagaggctagaaggagagagatgggtgcgagagcgtcaatattaagc

SEQ ID NO: 124735 - DNA, 56 bp, Artificial
  Synthetic oligonucleotide
accagcaaagctactctggaaaggtgaaggggcagtagtaatacaagacaatagtg

SEQ ID NO: 124736 - DNA, 53 bp, Artificial
  Synthetic oligonucleotide
gtaaaattaaagccaggaatggatggcccaaaggttaaacaatggccattgac

SEQ ID NO: 124737 - DNA, 60 bp, Artificial
  Synthetic oligonucleotide
actactctggaaaggtgaaggggcagtagtaatacaagacaatagtgaaataaaggtagt

SEQ ID NO: 124738 - DNA, 60 bp, Artificial
  Synthetic oligonucleotide
cgctgcaatagacgcgttccgaaagcttgcaaggagtgctgagcccactactccgtggac

SEQ ID NO: 124739 - DNA, 59 bp, Artificial
  Synthetic oligonucleotide
ccccgccctaccctaagcagccgttatatccttccttggcaacgacatcggagcagggg

SEQ ID NO: 124740 - DNA, 60 bp, Artificial
  Synthetic oligonucleotide
ccctcctaattctattgcgctgtcgccgcccccgccctaccctaagcagccgttatatcc

SEQ ID NO: 124741 - DNA, 60 bp, Artificial
  Synthetic oligonucleotide
taaggcagtggaaggctcggatctgcccagagcagttcacggtcccgtcatcctggattg

SEQ ID NO: 124742 - DNA, 60 bp, Artificial
  Synthetic oligonucleotide
tcctggattgcttgtatcagaagtccagtgaaggggtgcaggggattttgcgagcggcgc

SEQ ID NO: 124743 - DNA, 60 bp, Artificial
  Synthetic oligonucleotide
ccaaacccctggtgaggccatcaagtatgtcctagataagcaaaaggcctgcccgtctgt

SEQ ID NO: 124744 - DNA, 60 bp, Artificial
  Synthetic oligonucleotide
gccagggcagagcacaaacttggcgcggtcatgagcggggagggagctccggggagcgga

SEQ ID NO: 124745 - DNA, 60 bp, Artificial
  Synthetic oligonucleotide
gagagagaggaagattgcgagaaggacaacgaagagtcgcagaggctcggggggggggtg

SEQ ID NO: 124746 - DNA, 60 bp, Artificial
  Synthetic oligonucleotide
ggggagcggatctctggagttttgcaggaccggcgctcagaccggcgctcagacgacagc

SEQ ID NO: 124747 - DNA, 60 bp, Artificial
  Synthetic oligonucleotide
gcgaggtggcggcaggtcgcatacgtaacaatggaccaagtcattaaggtacttgtgcag

SEQ ID NO: 124748 - DNA, 60 bp, Artificial
  Synthetic oligonucleotide
gagaaaccggcgttgcttacaccattggtggcgcgtgtccccggaactcttctggggcgg

SEQ ID NO: 124749 - DNA, 60 bp, Artificial
  Synthetic oligonucleotide
gaggacgaacaccggaagagcgaacggagactacatgcaacaagtggtgaccccgacgtg

SEQ ID NO: 124750 - DNA, 60 bp, Artificial
  Synthetic oligonucleotide
ggagaagggcctgtgaggtggcggcaggtcgcgcacggaagacgtattgcggttaagagc

SEQ ID NO: 124751 - DNA, 60 bp, Artificial
  Synthetic oligonucleotide
cgcgaaaggtgttaagacgctactgtttgccttgcttgtcatagcctgtctattagctat

SEQ ID NO: 124752 - DNA, 60 bp, Artificial
  Synthetic oligonucleotide
tggataacatatgggccgaacattacgggtcaccgccgtagcaggcgctcgctgagtcgt

SEQ ID NO: 124753 - DNA, 59 bp, Artificial
  Synthetic oligonucleotide
atagaattagggagcagctgtaggttccgaacgcgatgtgacgggagctatcggcatag

SEQ ID NO: 124754 - DNA, 60 bp, Artificial
  Synthetic oligonucleotide
ggtacaaggggttgtgattaacagggatggctccttagagaaaccggcgttgcttacacc

SEQ ID NO: 124755 - DNA, 60 bp, Artificial
  Synthetic oligonucleotide
ggaggcctcgcagtctattatgggggttggaggggcgaccccctcacgccggtctaccaa

SEQ ID NO: 124756 - DNA, 60 bp, Artificial
  Synthetic oligonucleotide
gccttgggagggccctgttatctaggacaattgactatgctctctcctaactttaccacc

SEQ ID NO: 124757 - DNA, 60 bp, Artificial
  Synthetic oligonucleotide
gccgacgttactgtggtcgcggaaacagaatggccatcctcgtggcccgcggaggcctcg

SEQ ID NO: 124758 - DNA, 60 bp, Artificial
  Synthetic oligonucleotide
ttttcttgatttgtggggacagggcttggcaaggcgtcccgcgtaatgccttgggagggc

SEQ ID NO: 124759 - DNA, 60 bp, Artificial
  Synthetic oligonucleotide
gtgtgacgcgtgcaggttcctatgccacctgtgtgttatgccacctgtgtgtgccaagtg

SEQ ID NO: 124760 - DNA, 60 bp, Artificial
  Synthetic oligonucleotide
agcagcagcacaggccttaaaggagatcgaacgattggcatgttggtcggttaagcaagc

SEQ ID NO: 124761 - DNA, 60 bp, Artificial
  Synthetic oligonucleotide
gagggaaacgaggtgtgttgtaggcgtagcgagggaaacgaggtgtgacgcgtgcaggtt

SEQ ID NO: 124762 - DNA, 60 bp, Artificial
  Synthetic oligonucleotide
tgttgtaggcgtagcgagggaaacgaggtgtgttgtaggcgtagcgagggaaacgaggtg

SEQ ID NO: 124763 - DNA, 60 bp, Artificial
  Synthetic oligonucleotide
gatgatggcctgtagggaggcggaccatcgtagtgcggaccgacagttaggaccttgctt

SEQ ID NO: 124764 - DNA, 60 bp, Artificial
  Synthetic oligonucleotide
taagcaaaaggcctgtccgtctgtggcaggggaggtagctgcggcggtagcaggagtgat

SEQ ID NO: 124765 - DNA, 60 bp, Artificial
  Synthetic oligonucleotide
gcccgtctgtggcaggggaggtagctgcggcggtagcaggagtgatgatggcctgtaggg

SEQ ID NO: 124766 - DNA, 60 bp, Artificial
  Synthetic oligonucleotide
ggtccgatatacagagattaacgggcaatgcaccaggtctgctgacccctcaagcacaag

SEQ ID NO: 124767 - DNA, 60 bp, Artificial
  Synthetic oligonucleotide
cggaccatcgtagtgcggaccgacagttaggaccttgctttaaatgtggccagttgggcc

SEQ ID NO: 124768 - DNA, 60 bp, Artificial
  Synthetic oligonucleotide
ataccaaattaaaacaaatgctgattacggcgcagggtgatcaaagaaaccccatatatg

SEQ ID NO: 124769 - DNA, 60 bp, Artificial
  Synthetic oligonucleotide
aagtacccatgagcgccctctggtgaaagccactatttcttgcaccaacctcccgccgga

SEQ ID NO: 124770 - DNA, 60 bp, Artificial
  Synthetic oligonucleotide
ggaaacagccagaggtgttgtggaacaatgggactgctaaggcactccccccaggtattt

SEQ ID NO: 124771 - DNA, 60 bp, Artificial
  Synthetic oligonucleotide
ggctgaaatcgccattgacgatgaatgcccttgaggccctcacagcatcgggcccaatgc

SEQ ID NO: 124772 - DNA, 60 bp, Artificial
  Synthetic oligonucleotide
cgggcccaatgctgccttatgatattgaaaatttaatgcgcatggtgttgaaaccagtgc

SEQ ID NO: 124773 - DNA, 60 bp, Artificial
  Synthetic oligonucleotide
aacgccatttgcctcacttactcctggggtctgggtgagcatctggccccgacctggtaa

SEQ ID NO: 124774 - DNA, 60 bp, Artificial
  Synthetic oligonucleotide
aaacgtggggactgatgttaggagcccttaaggcggccagggcagagcacaaacttggcg

SEQ ID NO: 124775 - DNA, 60 bp, Artificial
  Synthetic oligonucleotide
cgctatgccagcgcgccatggccagtcagaaggctacggaacttaaaacgtggggactga

SEQ ID NO: 124776 - DNA, 60 bp, Artificial
  Synthetic oligonucleotide
ctggactctccccgccacgttttggattcgagtaggtgggacttgctcaccttggcgcta

SEQ ID NO: 124777 - DNA, 60 bp, Artificial
  Synthetic oligonucleotide
tcgctgagtcgtctctcgcctgactgcggtgatgaactacagctatggagcgtgacagcc

SEQ ID NO: 124778 - DNA, 60 bp, Artificial
  Synthetic oligonucleotide
gctgagcccactactccgtggacagagatcgcgcaaggccccacagagccgtttcaggag

SEQ ID NO: 124779 - DNA, 60 bp, Artificial
  Synthetic oligonucleotide
cctggcgcagggacacgggtgtcaagacgtggaagggatgtgttgcttcaatctcagcga

SEQ ID NO: 124780 - DNA, 60 bp, Artificial
  Synthetic oligonucleotide
ggggcgggatttcttgcgacagataggcattccacagtatcctctgaacaccttcaaggg

SEQ ID NO: 124781 - DNA, 60 bp, Artificial
  Synthetic oligonucleotide
gggatacgtcactaatgttactgcttgcgataacgatgccgatttagccagccaaacagc

SEQ ID NO: 124782 - DNA, 60 bp, Artificial
  Synthetic oligonucleotide
gcggggtacagcaacgggacaaaatgttccagcaacacgacgggttgcggtggtaattgc

SEQ ID NO: 124783 - DNA, 60 bp, Artificial
  Synthetic oligonucleotide
ttagccagccaaacagcatgcttgataaaggctctaaatacaaccctcccttgggacccc

SEQ ID NO: 124784 - DNA, 60 bp, Artificial
  Synthetic oligonucleotide
gcacgacggaatggaattattatgcatatgggtttaccttcgggaaacagccagaggtgt

SEQ ID NO: 124785 - DNA, 60 bp, Artificial
  Synthetic oligonucleotide
ccataggggattggtttacgcgcacgtttggtgatctaggaaggtggctcgcgaaaggtg

SEQ ID NO: 124786 - DNA, 60 bp, Artificial
  Synthetic oligonucleotide
tgcgtgacttcatagcaaaatggaaaagtgatgaccttcttataaggccctatgtcaacc

SEQ ID NO: 124787 - DNA, 60 bp, Artificial
  Synthetic oligonucleotide
cctgacctaagtttacccatggcggcgctgtctctaagtacccatgagcgccctctggtg

SEQ ID NO: 124788 - DNA, 60 bp, Artificial
  Synthetic oligonucleotide
aggggaagccatgcatggacaagtagactgtagtccaggaatatggcaattagattgcac

SEQ ID NO: 124789 - DNA, 60 bp, Artificial
  Synthetic oligonucleotide
gggactatggaaaacagatggcaggtgctgattgtgtggcaggtagacaggatgaggatt

SEQ ID NO: 124790 - DNA, 60 bp, Artificial
  Synthetic oligonucleotide
gggattatggaaaacagatggcaggtgctgattgtgtggcaggtagacaggatgaggatc

SEQ ID NO: 124791 - DNA, 60 bp, Artificial
  Synthetic oligonucleotide
ttctgggattaaataaaatagtaagaatgtatagccctgttagcattttggatataaaac

SEQ ID NO: 124792 - DNA, 60 bp, Artificial
  Synthetic oligonucleotide
ggaggctagaaggagagagatgggtgcgagagcgtcagtattaagcgggggaaaattaga

SEQ ID NO: 124793 - DNA, 52 bp, Artificial
  Synthetic oligonucleotide
ctatgggcgcagcgtcaataacgctgacggtacaggccagacaattattgtc

SEQ ID NO: 124794 - DNA, 60 bp, Artificial
  Synthetic oligonucleotide
tcctaggattaaataaaatagtaagaatgtatagccctgttggcattttggacataaaac

SEQ ID NO: 124795 - DNA, 60 bp, Artificial
  Synthetic oligonucleotide
ctatgggcgcagcgtcaataacgctgacggtacaggccagacaattattgtctggtatag

SEQ ID NO: 124796 - DNA, 60 bp, Artificial
  Synthetic oligonucleotide
ccaaggggaagtgacatagcaggaactactagtacccttcaggaacaaatagcatggatg

SEQ ID NO: 124797 - DNA, 59 bp, Artificial
  Synthetic oligonucleotide
ggggtacagtgcaggggaaagaataatagacataatagcaacagacatacaaactaaag

SEQ ID NO: 124798 - DNA, 65 bp, Artificial
  Synthetic oligonucleotide
ctgggattaaataaaatagtaagaatgtatagccctgttagcattttggatataaaacaagggcc

SEQ ID NO: 124799 - DNA, 58 bp, Artificial
  Synthetic oligonucleotide
ttttgactagcggaggctagaaggagagagatgggtgcgagagcgtcagtattaagcg

SEQ ID NO: 124800 - DNA, 53 bp, Artificial
  Synthetic oligonucleotide
ttttgactagcggaggctagaaggagagagatgggtgcgagagcgtcagtatt

SEQ ID NO: 124801 - DNA, 60 bp, Artificial
  Synthetic oligonucleotide
aattttgactagcggaggctagaaggagagagatgggtgcgagagcgtcagtattaagcg

SEQ ID NO: 124802 - DNA, 59 bp, Artificial
  Synthetic oligonucleotide
ttttgactagcggaggctagaaggagagagatgggtgcgagagcgtcagtattaagcgg

SEQ ID NO: 124803 - DNA, 60 bp, Artificial
  Synthetic oligonucleotide
tttgactagcggaggctagaaggagagagatgggtgcgagagcgtcagtattaagcggag

SEQ ID NO: 124804 - DNA, 60 bp, Artificial
  Synthetic oligonucleotide
gtaatcagtttatgggatcaaagcctaaagccatgtgtaaagttgaccccactctgtgtc

SEQ ID NO: 124805 - DNA, 60 bp, Artificial
  Synthetic oligonucleotide
aatcagtttatgggatcaaagcctaaagccatgtgtaaagttgaccccactctgtgtcac

SEQ ID NO: 124806 - DNA, 57 bp, Artificial
  Synthetic oligonucleotide
gataagagagcaagctgaacaccttaagacagcagtacaaatggcagtattcattca

SEQ ID NO: 124807 - DNA, 60 bp, Artificial
  Synthetic oligonucleotide
ccaaggggaagtgacatagcaggaactactagtacccttcaggaacaaataggatggatg

SEQ ID NO: 124808 - DNA, 56 bp, Artificial
  Synthetic oligonucleotide
accagcaaaactactctggaaaggtgaaggggcagtagtaatacaagacaataacg

SEQ ID NO: 124809 - DNA, 60 bp, Artificial
  Synthetic oligonucleotide
aggagaagccatgcatggacaagtagactgtagtccagggatatggcaattagattgtac

SEQ ID NO: 124810 - DNA, 60 bp, Artificial
  Synthetic oligonucleotide
cttttagcccggaggtaatacccatgtttacagcattatcagaaggagccaccccacaag

SEQ ID NO: 124811 - DNA, 60 bp, Artificial
  Synthetic oligonucleotide
agctttgcaagattcaggatcagaagtaaacatagtaacagactcacaatatgcattagg

SEQ ID NO: 124812 - DNA, 60 bp, Artificial
  Synthetic oligonucleotide
cctggctatagaaagatacctaaaggatcaacagctcctaggaatttggggctgctctgg

SEQ ID NO: 124813 - DNA, 60 bp, Artificial
  Synthetic oligonucleotide
gggaagccatgcatggacaagtagactgtagtccagggatatggcaattagattgtacac

SEQ ID NO: 124814 - DNA, 60 bp, Artificial
  Synthetic oligonucleotide
gtcagctaaaaggggaagccatgcatggacaagtagactgtagtccaggaatatggcaac

SEQ ID NO: 124815 - DNA, 60 bp, Artificial
  Synthetic oligonucleotide
gccagttaaaaggggaagccatgcatggacaagtagactgtagtccaggaatatggcaat

SEQ ID NO: 124816 - DNA, 60 bp, Artificial
  Synthetic oligonucleotide
cagcccagaagtaatacccatgttttcagcattatcagaaggagccaccccacaagattt

SEQ ID NO: 124817 - DNA, 60 bp, Artificial
  Synthetic oligonucleotide
ggggtacagtgcaggggaaagaataatagacataatagcaacagacatacaaactagaga

SEQ ID NO: 124818 - DNA, 57 bp, Artificial
  Synthetic oligonucleotide
ggggtacagtgcaggggaaagaataatagacataatagcaacagacatacaaactag

SEQ ID NO: 124819 - DNA, 60 bp, Artificial
  Synthetic oligonucleotide
tcctgggattaaataaaatagtaagaatgtatagccctaccagcattctggacataaaac

SEQ ID NO: 124820 - DNA, 60 bp, Artificial
  Synthetic oligonucleotide
ccaaggggaagtgacatagcaggaactactagtaatcttcaggagcaaataggatggatg

SEQ ID NO: 124821 - DNA, 60 bp, Artificial
  Synthetic oligonucleotide
ccaaggggaagtgacatagcaggaactactagtagtcttcaggagcaaataggatggatg

SEQ ID NO: 124822 - DNA, 60 bp, Artificial
  Synthetic oligonucleotide
gggactatggaaaacagatggcaggtgatgattgtgtggcaggtagacaggatgaagatt

SEQ ID NO: 124823 - DNA, 57 bp, Artificial
  Synthetic oligonucleotide
gactagcggaggctagaaggagagagatgggtgcgagagcgtcagtattaagtgggg

SEQ ID NO: 124824 - DNA, 60 bp, Artificial
  Synthetic oligonucleotide
agtgacatagcaggaactactagtacccttcaggaacaaatagcatggatgacaggtaac

SEQ ID NO: 124825 - DNA, 60 bp, Artificial
  Synthetic oligonucleotide
ccagcaaaactactctggaaaggtgaaggggcagtagtaatacaagacaatagtgatata

SEQ ID NO: 124826 - DNA, 60 bp, Artificial
  Synthetic oligonucleotide
tttgactagcggaggctagaaggagagagatgggtgcgagagcgtcaatattaagagggg

SEQ ID NO: 124827 - DNA, 57 bp, Artificial
  Synthetic oligonucleotide
ggggtatagtgcaggggaaagaataatagacataatagcaacagacatacaaagtaa

SEQ ID NO: 124828 - DNA, 57 bp, Artificial
  Synthetic oligonucleotide
ggggtatagtgcaggggaaagaataatagacataatagcaacagacatacaaaccaa

SEQ ID NO: 124829 - DNA, 59 bp, Artificial
  Synthetic oligonucleotide
tataatcagtttatgggatcaaagcctaaagccatgtgtaaagttgaccccactctgtg

SEQ ID NO: 124830 - DNA, 57 bp, Artificial
  Synthetic oligonucleotide
ggggtacactgcaggggaaagaataatagacataatagcaacagacatacaaactaa

SEQ ID NO: 124831 - DNA, 60 bp, Artificial
  Synthetic oligonucleotide
gggggattggggggtacagtgcaggggaaagaataatagacataatagcatcagacttac

SEQ ID NO: 124832 - DNA, 60 bp, Artificial
  Synthetic oligonucleotide
gtttggaagggaccagccaaactactctggaaaggtgaaggggcagtagtaatacaagac

SEQ ID NO: 124833 - DNA, 60 bp, Artificial
  Synthetic oligonucleotide
ctgtttggaagggaccagccaaactactctggaaaggtgaaggggcagtagtaatacaag

SEQ ID NO: 124834 - DNA, 60 bp, Artificial
  Synthetic oligonucleotide
cagtacaatgtgcttccacagggatggaaaggatcaccagcaatattccaaagtagcatg

SEQ ID NO: 124835 - DNA, 60 bp, Artificial
  Synthetic oligonucleotide
aggattatggaaaacagatggcaggtgctgattgtgtggcaggtagacaggatgaggatt

SEQ ID NO: 124836 - DNA, 60 bp, Artificial
  Synthetic oligonucleotide
aggactatggaaaacagatggcaggtgctgattgtgtggcaggtagacaggatgaggatt

SEQ ID NO: 124837 - DNA, 60 bp, Artificial
  Synthetic oligonucleotide
ttagggattatggaaaacagatggcaggtgatgattgtgtggcaggtagacaggatgagg

SEQ ID NO: 124838 - DNA, 60 bp, Artificial
  Synthetic oligonucleotide
ccaggaaaatggaaaccaaaaatgataggaggaattggaggttttatcaaagtaagacaa

SEQ ID NO: 124839 - DNA, 60 bp, Artificial
  Synthetic oligonucleotide
gccaggaagatggaaaccaaaaatgataggaggaattggaggttttatcaaagtaagaca

SEQ ID NO: 124840 - DNA, 60 bp, Artificial
  Synthetic oligonucleotide
caccagggattagatatcaatataatgtgcttccacagggatggaaaggatcaccagcaa

SEQ ID NO: 124841 - DNA, 60 bp, Artificial
  Synthetic oligonucleotide
ttctggggttaaataaaatagtaagaatgtatagccctgtcagcattttggacatcagac

SEQ ID NO: 124842 - DNA, 60 bp, Artificial
  Synthetic oligonucleotide
ttctgggattaaataaaatagtaagaatgtatagccctgtcagcattttggacataagac

SEQ ID NO: 124843 - DNA, 60 bp, Artificial
  Synthetic oligonucleotide
gctttacaggattcaggatcagaagtaaacatagtaacagactcacaatatgcattagga

SEQ ID NO: 124844 - DNA, 60 bp, Artificial
  Synthetic oligonucleotide
gactagcggaggctagaaggagagagatgggtgcgagagcgtcagtattgagcggcggaa

SEQ ID NO: 124845 - DNA, 58 bp, Artificial
  Synthetic oligonucleotide
tgactagcggaggctagaaggagagagatgggtgcgagagcgtcagtattaagcgggg

SEQ ID NO: 124846 - DNA, 60 bp, Artificial
  Synthetic oligonucleotide
tttgactagcggaggctagaaggagagagatgggtgcgagagcgtcagtattaagcgggg

SEQ ID NO: 124847 - DNA, 60 bp, Artificial
  Synthetic oligonucleotide
tttgactagcggaggctagaaggagagagatgggtgcgagagcgtcagtattaagtgggg

SEQ ID NO: 124848 - DNA, 60 bp, Artificial
  Synthetic oligonucleotide
ccaaggggaagtgacatagcaggaactactagtactcttcaggagcaaataggatggatg

SEQ ID NO: 124849 - DNA, 60 bp, Artificial
  Synthetic oligonucleotide
ccaaggggaagtgacatagcaggaactactagtacccttcaggagcaaataggatggatg

SEQ ID NO: 124850 - DNA, 60 bp, Artificial
  Synthetic oligonucleotide
gactagcggaggctagaaggagagagatgggtgcgagagcgtcagtattaagcggcggaa

SEQ ID NO: 124851 - DNA, 57 bp, Artificial
  Synthetic oligonucleotide
ggtaagagatcaagctgagcaccttaagacagcagtacaaatggcagtattcattca

SEQ ID NO: 124852 - DNA, 60 bp, Artificial
  Synthetic oligonucleotide
tcctgggtttaaataaaatagtaagaatgtatagccctgtcagtattttggacatcaaac

SEQ ID NO: 124853 - DNA, 55 bp, Artificial
  Synthetic oligonucleotide
tagtaggacctacacctgtcaacataattggaagaaatatgttgactcaaattgg

SEQ ID NO: 124854 - DNA, 60 bp, Artificial
  Synthetic oligonucleotide
cagcccagaagtaatacccatgttctcagcattatcagaaggagccaccccacaagattt

SEQ ID NO: 124855 - DNA, 60 bp, Artificial
  Synthetic oligonucleotide
gtcagctaaaaggggaagccatgcatggacaagtagactgtagtccagggatatggcaat

SEQ ID NO: 124856 - DNA, 60 bp, Artificial
  Synthetic oligonucleotide
ccagcaaagctcctctggaaaggtgaaggggcagtagtaatacaagataatagtgacata

SEQ ID NO: 124857 - DNA, 60 bp, Artificial
  Synthetic oligonucleotide
ccagcaaagcttctctggaaaggtgaaggggcagtagtaatacaagataatagtgacata

SEQ ID NO: 124858 - DNA, 60 bp, Artificial
  Synthetic oligonucleotide
accagcaaagcttctctggaaaggtgaaggggcagtagtaatacaagataatagtgacat

SEQ ID NO: 124859 - DNA, 60 bp, Artificial
  Synthetic oligonucleotide
gactagcggaggctagaaggagagagatgggtgcgagagcgtcaatattaagaggcggaa

SEQ ID NO: 124860 - DNA, 60 bp, Artificial
  Synthetic oligonucleotide
tttgactagcagaggctagaaggagagagatgggtgcgagagcgtcagtattaagtgggg

SEQ ID NO: 124861 - DNA, 53 bp, Artificial
  Synthetic oligonucleotide
agcggaggctagaaggagagagatgggtgcgagagcgtcaatattaagcgggg

SEQ ID NO: 124862 - DNA, 52 bp, Artificial
  Synthetic oligonucleotide
gcggaggctagaaggagagagatgggtgcgagagcgtcagtattaagtgggg

SEQ ID NO: 124863 - DNA, 52 bp, Artificial
  Synthetic oligonucleotide
gcggaggctagaaggagagagatgggtgcgagagcgtcagtattaagcgggg

SEQ ID NO: 124864 - DNA, 50 bp, Artificial
  Synthetic oligonucleotide
ggaggctagaaggagagagatgggtgcgagagcgtcagtattaagcgggg

SEQ ID NO: 124865 - DNA, 55 bp, Artificial
  Synthetic oligonucleotide
cggaggctagaaggagagagatgggtgcgagagcgtcaatatcaagaggggaaaa

SEQ ID NO: 124866 - DNA, 60 bp, Artificial
  Synthetic oligonucleotide
tagcggaggctagaaggagagagatgggtgcgagagcgtcaatattaagagggggaaaat

SEQ ID NO: 124867 - DNA, 60 bp, Artificial
  Synthetic oligonucleotide
ccaggtcaaaggtaaatcaggcgcaccttggcaccacctgacacattgtacaccagcacc

SEQ ID NO: 124868 - DNA, 60 bp, Artificial
  Synthetic oligonucleotide
gaagtcacactccggtattgactcctcttcctgggacaattggatggatgtgtttgggaa

SEQ ID NO: 124869 - DNA, 60 bp, Artificial
  Synthetic oligonucleotide
atctagaccagcgcatgcaggacagggcaggtgggaaggtacagtggaaagaccataaga

SEQ ID NO: 124870 - DNA, 60 bp, Artificial
  Synthetic oligonucleotide
cggttcatggacaattgtcagccaccagtcttatggcatttcaaaatcgcattgctgtgg

SEQ ID NO: 124871 - DNA, 60 bp, Artificial
  Synthetic oligonucleotide
ggctggctgtgaccagtgaggttttaactgtacacagggtttcacaaggctttaattgga

SEQ ID NO: 124872 - DNA, 60 bp, Artificial
  Synthetic oligonucleotide
gggttcagattaggacttggggacatgagagcactgttggctagggcaacagaccacgtg

SEQ ID NO: 124873 - DNA, 60 bp, Artificial
  Synthetic oligonucleotide
taacagagagcagtttccgagtgggggtggaggaccataccagctgagggggacgtttct

SEQ ID NO: 124874 - DNA, 60 bp, Artificial
  Synthetic oligonucleotide
agccaaccaggccccaggaggtcgcaacggctcatagaacaacgaaacaggacccatctc

SEQ ID NO: 124875 - DNA, 60 bp, Artificial
  Synthetic oligonucleotide
gagcacaatggaaggagaattaagagagggaaagcagagagcgaaggacagcgaagtgga

SEQ ID NO: 124876 - DNA, 60 bp, Artificial
  Synthetic oligonucleotide
gcaagggaaatgatgcagctgaccaagccgcgaagaaggcaggaggatactcacctggac

SEQ ID NO: 124877 - DNA, 60 bp, Artificial
  Synthetic oligonucleotide
gggcaaagaccacatggcggactgtacatggggaaccacatgacgcatcagaaacatcgc

SEQ ID NO: 124878 - DNA, 60 bp, Artificial
  Synthetic oligonucleotide
cctcagctcaattggcagagatcattggcctgacccgagcgttgaccctagccgaaggga

SEQ ID NO: 124879 - DNA, 60 bp, Artificial
  Synthetic oligonucleotide
ggggaccgtcaacggtacgacaccagtttctatactgccctaactgtcccatcaacctgt

SEQ ID NO: 124880 - DNA, 60 bp, Artificial
  Synthetic oligonucleotide
ccgagctgtcaatgatgtcaccacaggggtggacctcccggtaccagatcctcacgtttc

SEQ ID NO: 124881 - DNA, 60 bp, Artificial
  Synthetic oligonucleotide
gttcctacacaagttaggagcaccaccctatgtttagccttaaacgccaccactacagtc

SEQ ID NO: 124882 - DNA, 60 bp, Artificial
  Synthetic oligonucleotide
tatcaccccatgagataatgacaggccgagtgatgcctgggccgccaagagagggaggtc

SEQ ID NO: 124883 - DNA, 60 bp, Artificial
  Synthetic oligonucleotide
ccacgaggacctctgagggcgccccagccgataccagccccatacagccctgctggacca

SEQ ID NO: 124884 - DNA, 60 bp, Artificial
  Synthetic oligonucleotide
gcagcttacccaccaaggccaacttcctgtttaccgatctcaatatcgtttgaagtatga

SEQ ID NO: 124885 - DNA, 60 bp, Artificial
  Synthetic oligonucleotide
ctccctgggaatgaagatgcccaccaccacctgaggctgaggtccaacgttactctgtat

SEQ ID NO: 124886 - DNA, 60 bp, Artificial
  Synthetic oligonucleotide
ggcgacgggtgtctcaggattctctaacaactggcttttgttgacagaggaagcaggaaa

SEQ ID NO: 124887 - DNA, 60 bp, Artificial
  Synthetic oligonucleotide
gcttctcctaccttcacttccggtcccaccgctgtcgttaacgcaagaagtctactggct

SEQ ID NO: 124888 - DNA, 60 bp, Artificial
  Synthetic oligonucleotide
cggtctataagccgcaatcgcagggacttgtggaacgctgtaaccaaactttgaaggcta

SEQ ID NO: 124889 - DNA, 60 bp, Artificial
  Synthetic oligonucleotide
gcgccccttaaagtggtagccagagcagatgtatggtggtggtgtggaggtaatacacta

SEQ ID NO: 124890 - DNA, 60 bp, Artificial
  Synthetic oligonucleotide
gtatctcacatcatacaatatgccacaggaagaggacgaaaatgatcccgcacccaccca

SEQ ID NO: 124891 - DNA, 60 bp, Artificial
  Synthetic oligonucleotide
ctcgtctgatctgatccttgaccggctcgctagcctaagcacctcaccttttatcaacag

SEQ ID NO: 124892 - DNA, 60 bp, Artificial
  Synthetic oligonucleotide
acatgaaggagggtggggtccctactatctcaccagccaccccagccgaaaaccaaaccc

SEQ ID NO: 124893 - DNA, 60 bp, Artificial
  Synthetic oligonucleotide
aaagggagaagtgcacctggtagaaggaacaatagatgtggagaactcggagccgcccca

SEQ ID NO: 124894 - DNA, 60 bp, Artificial
  Synthetic oligonucleotide
gcccaagtgcaggagacaggaggaagtcgttccaaacgagaggtgcatttgactcccgac

SEQ ID NO: 124895 - DNA, 60 bp, Artificial
  Synthetic oligonucleotide
agtcaagagcagacatacaccccttttctcctcagatgtggctatgggaaactttacctg

SEQ ID NO: 124896 - DNA, 60 bp, Artificial
  Synthetic oligonucleotide
tcctagaccaaccattttcaagcccaccgccgtcgggatcgctgagctacagaccactcc

SEQ ID NO: 124897 - DNA, 60 bp, Artificial
  Synthetic oligonucleotide
acgtgaaggtgtgggagcgagttggtggaaggacggctcaaggagacagacgaaccgatc

SEQ ID NO: 124898 - DNA, 60 bp, Artificial
  Synthetic oligonucleotide
cgctctcaacgctgacgaaggttcacctcacgtatgtgcagaaagagcagcacaagagct

SEQ ID NO: 124899 - DNA, 60 bp, Artificial
  Synthetic oligonucleotide
ttgtatgattatttgggatactattcatagatgtcggcagcgtccgaatgaggaatagat

SEQ ID NO: 124900 - DNA, 60 bp, Artificial
  Synthetic oligonucleotide
tgtccacagctcaccgtaactcaattttacaccaccccaggcccaccacagtctccggac

SEQ ID NO: 124901 - DNA, 60 bp, Artificial
  Synthetic oligonucleotide
cgggtccagactggtctgattggtctaaagggaatcttgttggaggatggaggaaggtcc

SEQ ID NO: 124902 - DNA, 60 bp, Artificial
  Synthetic oligonucleotide
ccagggaccaatgagaagagactacgcccgaagcaggaccaatccagagaccgggacttc

SEQ ID NO: 124903 - DNA, 60 bp, Artificial
  Synthetic oligonucleotide
acagacctctcagtagcagctgctcttgctgcccctgactacagcaagccgtttcatctg

SEQ ID NO: 124904 - DNA, 60 bp, Artificial
  Synthetic oligonucleotide
gctagagcaatggagtgtattgtttggcctctcttaggctgcgagtgagttgatgactgt

SEQ ID NO: 124905 - DNA, 60 bp, Artificial
  Synthetic oligonucleotide
cattcctgattacacctgcagaaccgaaccattgagagaaattgtcaggcaggctggggc

SEQ ID NO: 124906 - DNA, 60 bp, Artificial
  Synthetic oligonucleotide
gacattggggatcacgttacatgaataatggtgcctgttacaattgtggacagccggggc

SEQ ID NO: 124907 - DNA, 60 bp, Artificial
  Synthetic oligonucleotide
cgaagcaagaagcctgggtcctatgatacgacgtgcatctaaacttgattgggtgcccac

SEQ ID NO: 124908 - DNA, 60 bp, Artificial
  Synthetic oligonucleotide
ctgttaaacagatgctggccacaccatcacccaatccagcgccatacccacagccaccgt

SEQ ID NO: 124909 - DNA, 60 bp, Artificial
  Synthetic oligonucleotide
cgcactccacccatataagacacccctacccgaggttcactgcaccatgaacgttacgga

SEQ ID NO: 124910 - DNA, 60 bp, Artificial
  Synthetic oligonucleotide
agcagagttctgctcccacgtacaccaccacatctcacaacaccacaaggacgcgggagg

SEQ ID NO: 124911 - DNA, 60 bp, Artificial
  Synthetic oligonucleotide
tattgtatgtggacccgagggtgtggcagcacctgtcatcctaccttcacatctcaaacc

SEQ ID NO: 124912 - DNA, 60 bp, Artificial
  Synthetic oligonucleotide
cccagtgtttgttctactagtgataacgttgggatgtgtagcgggaataatgctctgggc

SEQ ID NO: 124913 - DNA, 60 bp, Artificial
  Synthetic oligonucleotide
gcaccagccaatctctgcccagaacttatcagagaagcacatggcctaacacatgagggg

SEQ ID NO: 124914 - DNA, 60 bp, Artificial
  Synthetic oligonucleotide
gtctctcacttccccgtcaccatggaaaaccttattctgaccatccctcagcaacagccc

SEQ ID NO: 124915 - DNA, 59 bp, Artificial
  Synthetic oligonucleotide
acccatcaaacacaagacccagatggaggtgttaatctcagcggtggcactcccgaaaa

SEQ ID NO: 124916 - DNA, 60 bp, Artificial
  Synthetic oligonucleotide
cccggtgcccaatgcctgttttcaagacatcagcatagattacacagacatgggagcaga

SEQ ID NO: 124917 - DNA, 54 bp, Artificial
  Synthetic oligonucleotide
tagcggaggctagaaggagagagatgggtgcgagagcgtcaatcttaagagggg

SEQ ID NO: 124918 - DNA, 57 bp, Artificial
  Synthetic oligonucleotide
ggtaagagatcaagctgaacaccttaagacagcagtacaaatggcagtattcattca

SEQ ID NO: 124919 - DNA, 57 bp, Artificial
  Synthetic oligonucleotide
ggtaagagagcaagctgaacaccttaagacagcagtacaaatggcagtattcattca

SEQ ID NO: 124920 - DNA, 57 bp, Artificial
  Synthetic oligonucleotide
ggtcagagatcaagctgaacaccttaagacagcagtacaaatggcagtattcattca

SEQ ID NO: 124921 - DNA, 57 bp, Artificial
  Synthetic oligonucleotide
ggtaagagaacaagctgaacaccttaagacagcagtacaaatggcagtattcattca

SEQ ID NO: 124922 - DNA, 52 bp, Artificial
  Synthetic oligonucleotide
gagatcaagctgaacaccttaagacagcagtacaaatggcagtattcattca

SEQ ID NO: 124923 - DNA, 53 bp, Artificial
  Synthetic oligonucleotide
ctagaaggagagagatgggtgcgagagcgtcagtattaagcggaggaaaatta

SEQ ID NO: 124924 - DNA, 60 bp, Artificial
  Synthetic oligonucleotide
aggggaagccatgcatggacaagtagactgtagtccagggatatggcaattagattgtac

SEQ ID NO: 124925 - DNA, 55 bp, Artificial
  Synthetic oligonucleotide
ggggtacactgcaggggaaagaataatagacataatagcaacagacatacaaact

SEQ ID NO: 124926 - DNA, 60 bp, Artificial
  Synthetic oligonucleotide
aatttgccaggaaaatggaaaccaaaaatgatagggggaattggaggttttatcaaggta

SEQ ID NO: 124927 - DNA, 56 bp, Artificial
  Synthetic oligonucleotide
ggggtacagtgcaggggaaagaataatagacataatagcaacagacatacaaacta

SEQ ID NO: 124928 - DNA, 60 bp, Artificial
  Synthetic oligonucleotide
aaaatggaaaccaaaaatgatagggggaattggaggttttatcaaagtaagacagtatga

SEQ ID NO: 124929 - DNA, 60 bp, Artificial
  Synthetic oligonucleotide
ccagcaaagctactctggaaaggtgaaggggcagtagtaatacaagacaataacgaaata

SEQ ID NO: 124930 - DNA, 57 bp, Artificial
  Synthetic oligonucleotide
agcggaggctagaaggagagagatgggtgcgagagcgtcaatattaagaggggaaaa

SEQ ID NO: 124931 - DNA, 53 bp, Artificial
  Synthetic oligonucleotide
agcggaggctagaaggagagagatgggtgcgagagcgtcaatattaagagggg

SEQ ID NO: 124932 - DNA, 55 bp, Artificial
  Synthetic oligonucleotide
cggaggctagaaggagagagatgggtgcgagagcgtcaatattaagaggggaaaa

SEQ ID NO: 124933 - DNA, 51 bp, Artificial
  Synthetic oligonucleotide
cggaggctagaaggagagagatgggtgcgagagcgtcaatattaagagggg

SEQ ID NO: 124934 - DNA, 51 bp, Artificial
  Synthetic oligonucleotide
cagaggctagaaggagagagatgggtgcgagagcgtcaatattaagagggg

SEQ ID NO: 124935 - DNA, 54 bp, Artificial
  Synthetic oligonucleotide
tagcggaggctagaaggagagagatgggtgcgagagcgtcaatattaagagggg

SEQ ID NO: 124936 - DNA, 57 bp, Artificial
  Synthetic oligonucleotide
ggggtatagtgcaggggaaagaataatagacataatagcaacagacatacaaactaa

SEQ ID NO: 124937 - DNA, 57 bp, Artificial
  Synthetic oligonucleotide
ggggtacagtgcaggggaaagaataatagacataatagcaacagacatacaaactaa

SEQ ID NO: 124938 - DNA, 60 bp, Artificial
  Synthetic oligonucleotide
cccatgtttacagcattatcagaaggagccaccccacaagatttaaacaccatgttaaat

SEQ ID NO: 124939 - DNA, 60 bp, Artificial
  Synthetic oligonucleotide
gctaaaaggagaagccatgcatggacaagtagactgtagtccagggatatggcaattaga

SEQ ID NO: 124940 - DNA, 60 bp, Artificial
  Synthetic oligonucleotide
ccagggattagatatcagtacaatgtgcttccacagggatggaaaggatcaccagcaata

SEQ ID NO: 124941 - DNA, 60 bp, Artificial
  Synthetic oligonucleotide
tttgactagcggaggctagaaggagagagatgggtgcgagagcgtcaatactaagcgggg

SEQ ID NO: 124942 - DNA, 56 bp, Artificial
  Synthetic oligonucleotide
ggggtacagtgcaggggaaagaataatagacataatagcaacagacatacaaacca

SEQ ID NO: 124943 - DNA, 56 bp, Artificial
  Synthetic oligonucleotide
ggggtacagtgcaggggaaagaataatagacataatagcaacagacatacaaagta

SEQ ID NO: 124944 - DNA, 54 bp, Artificial
  Synthetic oligonucleotide
cactatgggcgcggcgtcaataacgctgacggtacaggccagacaattattgtc

SEQ ID NO: 124945 - DNA, 60 bp, Artificial
  Synthetic oligonucleotide
gacaccagggattagatatcagtacaatgtgcttccacagggatggaaaggatcaccagc

SEQ ID NO: 124946 - DNA, 60 bp, Artificial
  Synthetic oligonucleotide
cctgtttggaagggaccagccaaactactctggaaaggtgaaggggcagtagtaatacaa

SEQ ID NO: 124947 - DNA, 60 bp, Artificial
  Synthetic oligonucleotide
gggattatggaaaacagatggcaggtgatgattgtgtggcaggtagacaggatgaggatt

SEQ ID NO: 124948 - DNA, 60 bp, Artificial
  Synthetic oligonucleotide
gagggaaccaaggggaagtgacatagcaggaactactagtacccttcaagagcaaatagg

SEQ ID NO: 124949 - DNA, 60 bp, Artificial
  Synthetic oligonucleotide
gggaagccatgcatggacaagtagactgtagtccaggaatatggcaattagattgcacac

SEQ ID NO: 124950 - DNA, 60 bp, Artificial
  Synthetic oligonucleotide
tttgactagcggaggctagaaggagagagatgggtgcgagagcttcagtattaagtgggg

SEQ ID NO: 124951 - DNA, 59 bp, Artificial
  Synthetic oligonucleotide
ttgactagcggaggctagaaggagagagatgggtgcgagagcgtcagtgttaagtgggg

SEQ ID NO: 124952 - DNA, 60 bp, Artificial
  Synthetic oligonucleotide
ccaatttggaaaggaccagcaaaactcctttggaaaggtgaaggggcagtagtaatacaa

SEQ ID NO: 124953 - DNA, 60 bp, Artificial
  Synthetic oligonucleotide
gggggattggggggtacagtgcaggggaaagaataatagacataatagcatcagatatac

SEQ ID NO: 124954 - DNA, 56 bp, Artificial
  Synthetic oligonucleotide
ggggtacagtgtaggggaaagaataatagacataatagcaacagacatacaaacta

SEQ ID NO: 124955 - DNA, 57 bp, Artificial
  Synthetic oligonucleotide
aagcactatgggcgcggcgtcaataacgctgacggtacaggccagacaattattgtc

SEQ ID NO: 124956 - DNA, 57 bp, Artificial
  Synthetic oligonucleotide
caggcaagagtcctggctgtggaaagatacctaaaggatcaacagctcctagggatt

SEQ ID NO: 124957 - DNA, 60 bp, Artificial
  Synthetic oligonucleotide
agaaccaaggggaagtgacatagcaggaactactagtaacctgcaggagcaaatagcatg

SEQ ID NO: 124958 - DNA, 54 bp, Artificial
  Synthetic oligonucleotide
aagagatcaggctgaacatcttaagacagcagtacaaatggcagtattcattca

SEQ ID NO: 124959 - DNA, 53 bp, Artificial
  Synthetic oligonucleotide
ggggtacagtgcaggggaaagaataatagacataatagcaacagacatacaaa

SEQ ID NO: 124960 - DNA, 60 bp, Artificial
  Synthetic oligonucleotide
gtgtcagctaaaaggggaagccatgcatggacaagtagactgtagtccagggatatggca

SEQ ID NO: 124961 - DNA, 60 bp, Artificial
  Synthetic oligonucleotide
gaggtaatacccatgtttacagcattatcagaaggagccaccccacaagatttaaacacc

SEQ ID NO: 124962 - DNA, 60 bp, Artificial
  Synthetic oligonucleotide
cttttagcccagaagtaatacccatgttttcagcattatcagaaggagccaccccacaag

SEQ ID NO: 124963 - DNA, 60 bp, Artificial
  Synthetic oligonucleotide
gggattaaataaaatagtaagaatgtatagccctaccagcattctggacataagacaagg

SEQ ID NO: 124964 - DNA, 60 bp, Artificial
  Synthetic oligonucleotide
gggagaagccatgcatggacaagtagactgtagtccaggaatatggcaactagattgtac

SEQ ID NO: 124965 - DNA, 53 bp, Artificial
  Synthetic oligonucleotide
gaggctagaaggagagagatgggtgcgagagcgtcagtattaagaggcgaaaa

SEQ ID NO: 124966 - DNA, 57 bp, Artificial
  Synthetic oligonucleotide
ggtaagagaacaagctgagcaccttaagacagcagtacaaatggcagtattcattca

SEQ ID NO: 124967 - DNA, 52 bp, Artificial
  Synthetic oligonucleotide
ctatgggcgcggcgtcaataacgctgacggtacaggccagacaattattgtc

SEQ ID NO: 124968 - DNA, 60 bp, Artificial
  Synthetic oligonucleotide
ccaaggggaagtgacatagcaggaactactagtacccttcaagaacaaataggatggatg

SEQ ID NO: 124969 - DNA, 60 bp, Artificial
  Synthetic oligonucleotide
gcccagaggtaatacccatgtttacagcattatcagaaggagccaccccacaagatttga

SEQ ID NO: 124970 - DNA, 53 bp, Artificial
  Synthetic oligonucleotide
tagcggaggctagaaggagagagatgggtgcgagagcgtcagtattaagcggg

SEQ ID NO: 124971 - DNA, 55 bp, Artificial
  Synthetic oligonucleotide
ctagcggaggctagaaggagagagatgggtgcgagagcgtcagtattaagcgggg

SEQ ID NO: 124972 - DNA, 60 bp, Artificial
  Synthetic oligonucleotide
agtatgggcaagcagagagctggaaagattcgcatgtaatcctgagctactagaaactgc

SEQ ID NO: 124973 - DNA, 60 bp, Artificial
  Synthetic oligonucleotide
acactgcgggactttccagactgctgacactgcggggactttccagcgtgggagggataa

SEQ ID NO: 124974 - DNA, 60 bp, Artificial
  Synthetic oligonucleotide
agagatagcagagaccctatttggaaaggaccggcacaactcctgtggaaaggtgagggg

SEQ ID NO: 124975 - DNA, 60 bp, Artificial
  Synthetic oligonucleotide
aacccctctcgttgcagatccctgtcccacaccggcaggaagcagaaacgccaggaagaa

SEQ ID NO: 124976 - DNA, 60 bp, Artificial
  Synthetic oligonucleotide
ggggcacgaggccaggcaattatgtgcagaaacaagtgtccccatcagccccaccaatgg

SEQ ID NO: 124977 - DNA, 60 bp, Artificial
  Synthetic oligonucleotide
gggcatcacaagcctgcgttcctacagatcccaatccacatgaatttccactaggcaatg

SEQ ID NO: 124978 - DNA, 60 bp, Artificial
  Synthetic oligonucleotide
ctgcctatttcctgttaaaattagcagcaagatggcctgtcaaagtaatacatacagaca

SEQ ID NO: 124979 - DNA, 60 bp, Artificial
  Synthetic oligonucleotide
ggaggctagaaggagagagatgggtgcgagagcgtcagtattaagaggcggaaaattaga

SEQ ID NO: 124980 - DNA, 60 bp, Artificial
  Synthetic oligonucleotide
ccgggagctctctgactgcctagggaacccactgcttaagcctcaataaagcttgccttg

SEQ ID NO: 124981 - DNA, 60 bp, Artificial
  Synthetic oligonucleotide
gaaaggaccagcaaagctcctctggaaaggtgaaggggcagtagtaatacaagataatag

SEQ ID NO: 124982 - DNA, 54 bp, Artificial
  Synthetic oligonucleotide
tagcggaggctagaaggagagagatgggtgcgagagcgtcagtattaagcgggg

SEQ ID NO: 124983 - DNA, 54 bp, Artificial
  Synthetic oligonucleotide
tagcggaggctagaaggagagagatgggtgcgagagcgtcaatcttaagcgggg

SEQ ID NO: 124984 - DNA, 60 bp, Artificial
  Synthetic oligonucleotide
gcctgggagctctctggctacctagggaacccactgcttaagcctcaataaagcttgcct

SEQ ID NO: 124985 - DNA, 58 bp, Artificial
  Synthetic oligonucleotide
cctgagagctctctggctagctagggaacccactgcttaagcctcaataaagcttgcc

SEQ ID NO: 124986 - DNA, 60 bp, Artificial
  Synthetic oligonucleotide
gcctgggagctctctggctagctagggaacccactgcttaagcctcaataaagcttgcct

SEQ ID NO: 124987 - DNA, 60 bp, Artificial
  Synthetic oligonucleotide
agcctgggagctctctggctagctagggaacccactgcttaagcctcaataaagcttgcc

SEQ ID NO: 124988 - DNA, 60 bp, Artificial
  Synthetic oligonucleotide
agcctgggagctctctggctgactagggaacccactgcttaagcctcaataaagcttgcc

SEQ ID NO: 124989 - DNA, 60 bp, Artificial
  Synthetic oligonucleotide
agcccgggagctctctggctagctagggaacccactgcttaagcctcaataaagcttgcc

SEQ ID NO: 124990 - DNA, 60 bp, Artificial
  Synthetic oligonucleotide
gcctgggagctctctggctgactagggaacccactgcttaagcctcaataaagcttgcct

SEQ ID NO: 124991 - DNA, 60 bp, Artificial
  Synthetic oligonucleotide
gcccgggagctctctggctaactagggaacccactgcttaagcctcaataaagcttgcct

SEQ ID NO: 124992 - DNA, 60 bp, Artificial
  Synthetic oligonucleotide
ggcgggacggggagtggtcaaccctcagatgctgcatataagcagctgcttttcgcctgt

SEQ ID NO: 124993 - DNA, 60 bp, Artificial
  Synthetic oligonucleotide
aaaatctctagcagtggcgcccgaacagggaccttaaagtgaaagtggaaccagaggagc

SEQ ID NO: 124994 - DNA, 60 bp, Artificial
  Synthetic oligonucleotide
gaaaatctctagcagtggcgcccgaacagggacgcgaaagcgaaagagaaaccagaggag

SEQ ID NO: 124995 - DNA, 57 bp, Artificial
  Synthetic oligonucleotide
ttttgactagcggaggctagaaggagagagatgggtgcgagagcgtcagtattaagc

SEQ ID NO: 124996 - DNA, 53 bp, Artificial
  Synthetic oligonucleotide
gtaaaattaaagccaggaatggatggcccaaaagtcaaacaatggccattgac

SEQ ID NO: 124997 - DNA, 60 bp, Artificial
  Synthetic oligonucleotide
cggaggctagaaggagagagatgggtgcgagagcgtcaatattaagaggcggaaaattag

SEQ ID NO: 124998 - DNA, 60 bp, Artificial
  Synthetic oligonucleotide
cggaggctagaaggagagagatgggtgcgagagcgtcagtattaagaggcggaaaattag

SEQ ID NO: 124999 - DNA, 60 bp, Artificial
  Synthetic oligonucleotide
ggaggctagaaggagagagatgggtgcgagagcgtcaatattaagagggggaaaattaga

SEQ ID NO: 125000 - DNA, 60 bp, Artificial
  Synthetic oligonucleotide
cggaggctagaaggagagagatgggtgcgagagcgtcaatattaagagggggaaaattag

SEQ ID NO: 125001 - DNA, 60 bp, Artificial
  Synthetic oligonucleotide
cggaggctagaaggagagagatgggtgcgagagcgtcaatattacgaggcggaaaattag

SEQ ID NO: 125002 - DNA, 51 bp, Artificial
  Synthetic oligonucleotide
gaatttggaattccctacaatccccaaagtcaaggagtagtagaatctatg

SEQ ID NO: 125003 - DNA, 60 bp, Artificial
  Synthetic oligonucleotide
cctttaaagcagcctttgacctcagcttctttttaaaagaaaagggaggactggatgggt

SEQ ID NO: 125004 - DNA, 60 bp, Artificial
  Synthetic oligonucleotide
cccagtaagacctcaagtgcctctaaggccaatgacctttaaagcagcctttgacctcag

SEQ ID NO: 125005 - DNA, 60 bp, Artificial
  Synthetic oligonucleotide
cagcagttagagccagctctcaagacagggtcagaggacctgaaatctctctggaacgca

SEQ ID NO: 125006 - DNA, 60 bp, Artificial
  Synthetic oligonucleotide
catcaccctgggagcaagccccaaaccccttgtaataattgctattgcaaaagatgctgc

SEQ ID NO: 125007 - DNA, 60 bp, Artificial
  Synthetic oligonucleotide
cccagatcccttgtaataattgctattgcaaaagatgctgctatcattgctatgtttgtt

SEQ ID NO: 125008 - DNA, 60 bp, Artificial
  Synthetic oligonucleotide
cctgaaacagcagacaggatgatacatctgcattatttcacatgttttacagaatcagca

SEQ ID NO: 125009 - DNA, 60 bp, Artificial
  Synthetic oligonucleotide
cagcagacaggatgatacatctgcattattttacctgttttacagcatcagcagtcagga

SEQ ID NO: 125010 - DNA, 60 bp, Artificial
  Synthetic oligonucleotide
taagtgcagcaggtagcactatgggcgcagcggcaacagcgctgacggtacggacccaca

SEQ ID NO: 125011 - DNA, 60 bp, Artificial
  Synthetic oligonucleotide
cttgccttgagtgagaagcagtgtgtgctcatctgttcaaccctggtgtctagagatccc

SEQ ID NO: 125012 - DNA, 60 bp, Artificial
  Synthetic oligonucleotide
cagtactattctgtgcttcagatgctaacctaacaagcactgaacagcataatatttggg

SEQ ID NO: 125013 - DNA, 60 bp, Artificial
  Synthetic oligonucleotide
ttcttgggggtgctaagtgcagcaggtagcactatgggcgcagcggcaacagcgctgacg

SEQ ID NO: 125014 - DNA, 60 bp, Artificial
  Synthetic oligonucleotide
gggtctcggttagaggaccaggtctgagcccgggagctccctggcctctagctgaacccg

SEQ ID NO: 125015 - DNA, 60 bp, Artificial
  Synthetic oligonucleotide
ccgggagctccctggcctctagctgaacccgctgcttaacgctcaataaagcttgccttg

SEQ ID NO: 125016 - DNA, 60 bp, Artificial
  Synthetic oligonucleotide
cagctagaggagggataccaagttcccatactcctcaaaacaatgcagcccttgcattcc

SEQ ID NO: 125017 - DNA, 60 bp, Artificial
  Synthetic oligonucleotide
cgctgacggtacggacccacagtgtactgaagggtatagtgcaacagcaggacaacctgc

SEQ ID NO: 125018 - DNA, 60 bp, Artificial
  Synthetic oligonucleotide
agttattatgataatacttaatctagtgaagaacattaggcagggatatcaacccctctc

SEQ ID NO: 125019 - DNA, 60 bp, Artificial
  Synthetic oligonucleotide
taacgctcaataaagcttgccttgagtgagaagcagtgtgtgctcatctgttcaaccctg

SEQ ID NO: 125020 - DNA, 60 bp, Artificial
  Synthetic oligonucleotide
agagggtgagtaattttgctggcggtggccagacctaggggaagggcgaagtctctaggg

SEQ ID NO: 125021 - DNA, 60 bp, Artificial
  Synthetic oligonucleotide
gaggaactcacaagagggtgagtaaatttgctggcggtggccagacctaggggaagggcg

SEQ ID NO: 125022 - DNA, 60 bp, Artificial
  Synthetic oligonucleotide
ggatggaccaaaagtaaaacaatggcccctatctagagagaaaatagaagcactaactgc

SEQ ID NO: 125023 - DNA, 60 bp, Artificial
  Synthetic oligonucleotide
agcttgccttgagtgagaagcagtgtgtgctcatctgttcaaccctggtgtctagagatc

SEQ ID NO: 125024 - DNA, 60 bp, Artificial
  Synthetic oligonucleotide
ctagagatccctcagatcacttagactgaagcagaaaatctctagcagtggcgcccgaac

SEQ ID NO: 125025 - DNA, 60 bp, Artificial
  Synthetic oligonucleotide
tgtgctcatctgttcaaccctggtgtctagagatccctcagatcacttagactgaagcag

SEQ ID NO: 125026 - DNA, 54 bp, Artificial
  Synthetic oligonucleotide
agggaagaaaacctccgacgcaacgggctcggcttagcggagtgcacctgctaa

SEQ ID NO: 125027 - DNA, 54 bp, Artificial
  Synthetic oligonucleotide
tagactgaagcagaaaatctctagcagtggcgcccgaacagggacttgaagtga

SEQ ID NO: 125028 - DNA, 60 bp, Artificial
  Synthetic oligonucleotide
acacagattgatcctgaaacagcagacaggatgatacatctgcattatttcacatgtttt

SEQ ID NO: 125029 - DNA, 52 bp, Artificial
  Synthetic oligonucleotide
tggaaaacagatggcaggtactgatagtatggcaaatagacagacagaaagt

SEQ ID NO: 125030 - DNA, 50 bp, Artificial
  Synthetic oligonucleotide
ggaggctagaaggagagagatgggtgcgagagcgtcggtattaagcgggg

SEQ ID NO: 125031 - DNA, 50 bp, Artificial
  Synthetic oligonucleotide
ggaggctagaaggagagagatgggtgcgagagcgtcaatattaagagggg

SEQ ID NO: 125032 - DNA, 60 bp, Artificial
  Synthetic oligonucleotide
agcctgggagctctctggctaactagggaacccactgcttaagcctcaataaagcttgcc

SEQ ID NO: 125033 - DNA, 55 bp, Artificial
  Synthetic oligonucleotide
ggggtatagtgcaggggaaagaataatagacataatagcaacagacatacaaact

SEQ ID NO: 125034 - DNA, 57 bp, Artificial
  Synthetic oligonucleotide
ggggtatagtgcaggggaaagaataatagacataatagcaacagacatacaaactag

SEQ ID NO: 125035 - DNA, 60 bp, Artificial
  Synthetic oligonucleotide
aaaatctctagcagtggcgcccgaacagggacttgaaagcgaaagagaaaccagagaagc

SEQ ID NO: 125036 - DNA, 60 bp, Artificial
  Synthetic oligonucleotide
cagatggcaggtgctgattgtgtggcaggtagacaggatgaggattagaacatggaatag

SEQ ID NO: 125037 - DNA, 60 bp, Artificial
  Synthetic oligonucleotide
ttctggggttaaataaaatagtaagaatgtatagccctgtcagcattttagacataagac

SEQ ID NO: 125038 - DNA, 56 bp, Artificial
  Synthetic oligonucleotide
actagcggaggctagaaggagagagatgggtgcgagagcgtcagtattaagcgggg

SEQ ID NO: 125039 - DNA, 60 bp, Artificial
  Synthetic oligonucleotide
ggaccagctaaactactctggaaaggtgaaggggcagtagtaatacaagataacagtgaa

SEQ ID NO: 125040 - DNA, 57 bp, Artificial
  Synthetic oligonucleotide
ttttgactagcagaggctagaaggagagagatgggtgcgagagcgtcagtattaagc

SEQ ID NO: 125041 - DNA, 60 bp, Artificial
  Synthetic oligonucleotide
agcctgggagctctctggctagctggggaacccactgcttaagcctcaataaagcttgcc

SEQ ID NO: 125042 - DNA, 60 bp, Artificial
  Synthetic oligonucleotide
aagaaatgaatttgccaggaaaatggaaaccaaaaatgatagggggaattggaggtttta

SEQ ID NO: 125043 - DNA, 58 bp, Artificial
  Synthetic oligonucleotide
ggggatacagtgcaggggaaagaataatagacataatagcaacagacatacaaactaa

SEQ ID NO: 125044 - DNA, 58 bp, Artificial
  Synthetic oligonucleotide
ggggatacagtgcaggggaaagaataatagacataatagcaacagacatacaaactag

SEQ ID NO: 125045 - DNA, 55 bp, Artificial
  Synthetic oligonucleotide
ggggtacagtgcaggggaaagaataatagacataatagcaacagacatacaaact

SEQ ID NO: 125046 - DNA, 59 bp, Artificial
  Synthetic oligonucleotide
ggggtacagtgcaggggaaagaataatagacataatagcaacagacatacaaactaagg

SEQ ID NO: 125047 - DNA, 60 bp, Artificial
  Synthetic oligonucleotide
gggggattggggggtacagtgcaggggaaagaataatagacataatagcaacagacatac

SEQ ID NO: 125048 - DNA, 54 bp, Artificial
  Synthetic oligonucleotide
gctagaaggagagagatgggtgcgagagcgtcaatattaagaggcggaaaatta

SEQ ID NO: 125049 - DNA, 51 bp, Artificial
  Synthetic oligonucleotide
gctagaaggagagagatgggtgcgagagcgtcaatattacgaggcggaaaa

SEQ ID NO: 125050 - DNA, 60 bp, Artificial
  Synthetic oligonucleotide
cggcgactggtgagtacgccaaattttgactagcggaggctagaaggagagagatgggtg

SEQ ID NO: 125051 - DNA, 60 bp, Artificial
  Synthetic oligonucleotide
ccctatttggaaaggaccagccaaactactctggaaaggtgaaggggcagtagtaatcca

SEQ ID NO: 125052 - DNA, 60 bp, Artificial
  Synthetic oligonucleotide
gctagaaggagagagatgggtgcgagagcgtcagtattaagcgggggaaaattggatgct

SEQ ID NO: 125053 - DNA, 60 bp, Artificial
  Synthetic oligonucleotide
gggggattggggggtacagtgcaggggaaagaatagtagacataatagcatcagatatac

SEQ ID NO: 125054 - DNA, 60 bp, Artificial
  Synthetic oligonucleotide
gggggattggggggtacagtgcaggggaaagaatagtagacataatagcatcagacatac

SEQ ID NO: 125055 - DNA, 60 bp, Artificial
  Synthetic oligonucleotide
ctagcggaggctagaaggagagagatgggtgcgagagcgtcaatattaagaggcggaaaa

SEQ ID NO: 125056 - DNA, 55 bp, Artificial
  Synthetic oligonucleotide
gaggctagaaggagagagatgggtgcgagagcgtcagtattaagcgggggagaat

SEQ ID NO: 125057 - DNA, 58 bp, Artificial
  Synthetic oligonucleotide
tagcggaggctagaaggagagagatgggtgcgagagcgtcaatattaagaggggaaaa

SEQ ID NO: 125058 - DNA, 60 bp, Artificial
  Synthetic oligonucleotide
gaaagtggaaaccaaaaatgataggaggaattggaggttttatcaaagtaagacagtatg

SEQ ID NO: 125059 - DNA, 60 bp, Artificial
  Synthetic oligonucleotide
ccaaggggaagtgacatagcaggaactactagtaatcttcaggagcaaatagcatggatg

SEQ ID NO: 125060 - DNA, 60 bp, Artificial
  Synthetic oligonucleotide
ccaaggggaagtgacatagcaggaactactagtaatcttcaggaacaaataacatggatg

SEQ ID NO: 125061 - DNA, 60 bp, Artificial
  Synthetic oligonucleotide
ccaaggggaagtgacatagcaggaactactagtactcttcaggagcaagtagcttggatg

SEQ ID NO: 125062 - DNA, 55 bp, Artificial
  Synthetic oligonucleotide
ctagcggaggctagaaggagagagatgggtgcgagagcgtcggtattaagcgggg

SEQ ID NO: 125063 - DNA, 60 bp, Artificial
  Synthetic oligonucleotide
gggggattggggggtacagtgcaggggaaagaatagtagacataatagcaacagacatac

SEQ ID NO: 125064 - DNA, 60 bp, Artificial
  Synthetic oligonucleotide
gctaaaacacctagtatgggcaagcagggagctggaaagatttgcacttaaccctagcct

SEQ ID NO: 125065 - DNA, 60 bp, Artificial
  Synthetic oligonucleotide
ggagtggctaaccctcagatgctgcatataagcagctgcttctcgcctgtactgggtctc

SEQ ID NO: 125066 - DNA, 55 bp, Artificial
  Synthetic oligonucleotide
cagaggctagaaggagagagatgggtgcgagagcgtcagtattaagaggggaaaa

SEQ ID NO: 125067 - DNA, 54 bp, Artificial
  Synthetic oligonucleotide
tagcggtggctagaaggagagagatgggtgcgagagcgtcaatattaagagggg

SEQ ID NO: 125068 - DNA, 60 bp, Artificial
  Synthetic oligonucleotide
ggctaaaacacttagtatgggcaagcagggagctggaaagatttgcacttaaccctggcc

SEQ ID NO: 125069 - DNA, 53 bp, Artificial
  Synthetic oligonucleotide
gtaaaattaaagccaggaatggatggcccaagggttaaacaatggccattgac

SEQ ID NO: 125070 - DNA, 53 bp, Artificial
  Synthetic oligonucleotide
gtaaaattaaagccaggaatggatggcccaaaggttaaacagtggccattaac

SEQ ID NO: 125071 - DNA, 60 bp, Artificial
  Synthetic oligonucleotide
gcccgggagctctctggctatctagggaacccactgcttaagcctcaataaagcttgcct

SEQ ID NO: 125072 - DNA, 60 bp, Artificial
  Synthetic oligonucleotide
ccaaggggaagtgacatagcaggaactactagtacccttcaggaacaggtagcatggatg

SEQ ID NO: 125073 - DNA, 60 bp, Artificial
  Synthetic oligonucleotide
ccaaggggaagtgacatagcaggaactactagtacccttcaggaacacataggatggatg

SEQ ID NO: 125074 - DNA, 60 bp, Artificial
  Synthetic oligonucleotide
ccaaggggaagtgacatagcaggaactactagtacccttcaggaacagatagcatggatg

SEQ ID NO: 125075 - DNA, 60 bp, Artificial
  Synthetic oligonucleotide
gcccgggagctctctggctatctggggaacccactgcttaagcctcaataaagcttgcct

SEQ ID NO: 125076 - DNA, 60 bp, Artificial
  Synthetic oligonucleotide
cctgggagctctctggctatctggggaacccactgcttaagcctcaataaagcttgcctt

SEQ ID NO: 125077 - DNA, 60 bp, Artificial
  Synthetic oligonucleotide
gactagcggaggctagaaggagagagatgggtgcgagagcgtcagtattaagtggggaaa

SEQ ID NO: 125078 - DNA, 60 bp, Artificial
  Synthetic oligonucleotide
aggattatggaaaacagatggcaggtgctgattgtgtggcaggtagacaggatgaggatc

SEQ ID NO: 125079 - DNA, 50 bp, Artificial
  Synthetic oligonucleotide
caaaaatgatagggggaattggaggttttatcaaagtaagacagtatgat

SEQ ID NO: 125080 - DNA, 60 bp, Artificial
  Synthetic oligonucleotide
tctctagcagtggcgcccgaacagggacgcgaaagcgaaagtaggaccagagaagatctc

SEQ ID NO: 125081 - DNA, 56 bp, Artificial
  Synthetic oligonucleotide
aggcaagagtcctggctgtggaaagatacctaaaggatcaacagctcctagggatt

SEQ ID NO: 125082 - DNA, 60 bp, Artificial
  Synthetic oligonucleotide
ccagccaaactactctggaaaggtgaaggggcagtagtaatacaagacaataacgaaata

SEQ ID NO: 125083 - DNA, 60 bp, Artificial
  Synthetic oligonucleotide
aaaatctctagcagtggcgcccgaacagggacctgaaagcaaaagagaaaccagaggagc

SEQ ID NO: 125084 - DNA, 60 bp, Artificial
  Synthetic oligonucleotide
tcctgggattaaataaaatagtaagaatgtatagccctgtcagcattttggacataagac

SEQ ID NO: 125085 - DNA, 60 bp, Artificial
  Synthetic oligonucleotide
ggaccagcaaagctactctggaaaggtgaaggggcagtagtaatacaagacaatagtgat

SEQ ID NO: 125086 - DNA, 60 bp, Artificial
  Synthetic oligonucleotide
gacaagagtcctggctgtggaaagatacctaaaggatcaacagctcctagggatttgggg

SEQ ID NO: 125087 - DNA, 60 bp, Artificial
  Synthetic oligonucleotide
ggctaaaacacttagtatgggcaagcagggagctggaaagatttgcacttaactctggcc

SEQ ID NO: 125088 - DNA, 60 bp, Artificial
  Synthetic oligonucleotide
ggaccagcaaagctcctctggaaaggtgaaggggcagtagtaatacaagataatagtgaa

SEQ ID NO: 125089 - DNA, 51 bp, Artificial
  Synthetic oligonucleotide
taaaattaaagccaggaatggatggcccaaaggttaaacaatggccattga

SEQ ID NO: 125090 - DNA, 52 bp, Artificial
  Synthetic oligonucleotide
aaaggaccagcaaagcttctctggaaaggtgaaggggcagtagtaatacaag

SEQ ID NO: 125091 - DNA, 60 bp, Artificial
  Synthetic oligonucleotide
ggggaagtgacatagcaggaactactagtacccttcaggaacaaataggatggatgacac

SEQ ID NO: 125092 - DNA, 60 bp, Artificial
  Synthetic oligonucleotide
cggaggctagaaggagagagatgggtgcgagagcgtcaatattacgagggggaaaattag

SEQ ID NO: 125093 - DNA, 60 bp, Artificial
  Synthetic oligonucleotide
cggaggctagaaggagagagatgggtgcgagagcgtcaatactaagagggggaaaattag

SEQ ID NO: 125094 - DNA, 60 bp, Artificial
  Synthetic oligonucleotide
ttgtgggattaaataaaatagtaagaatgtatagccctgtcagcattttggacataagac

SEQ ID NO: 125095 - DNA, 60 bp, Artificial
  Synthetic oligonucleotide
gactagcggaggctagaaggagagagatgggtgcgagagcgtcagtattaagaggcggaa

SEQ ID NO: 125096 - DNA, 50 bp, Artificial
  Synthetic oligonucleotide
gctagaaggagagagatgggtgcgagagcgtcagtattaagaggcgaaaa

SEQ ID NO: 125097 - DNA, 60 bp, Artificial
  Synthetic oligonucleotide
ccaaggggaagtgacatagcaggaactactagtaccctgcaggaacaaatagcatggatg

SEQ ID NO: 125098 - DNA, 60 bp, Artificial
  Synthetic oligonucleotide
ttatggggttaaataaaatagtaagaatgtatagccctgtcagcattttggacataaaac

SEQ ID NO: 125099 - DNA, 60 bp, Artificial
  Synthetic oligonucleotide
ggataatcctgggattaaataaaatagtaagaatgtatagccctgtcagcattttggaca

SEQ ID NO: 125100 - DNA, 60 bp, Artificial
  Synthetic oligonucleotide
cctaggggaagtgacatagcaggaactactagtacccttcaggaacaaatagcatggatg

SEQ ID NO: 125101 - DNA, 60 bp, Artificial
  Synthetic oligonucleotide
gcccgggagctctctggctagcaagggaacccactgcttaagcctcaataaagcttgcct

SEQ ID NO: 125102 - DNA, 60 bp, Artificial
  Synthetic oligonucleotide
gccaaatgagagaaccaaggggaagtgacatagcaggaactactagtacccttcaggaac

SEQ ID NO: 125103 - DNA, 60 bp, Artificial
  Synthetic oligonucleotide
gccaaatgagagaaccaaggggaagtgacatagcaggaactactagtacccttcaggagc

SEQ ID NO: 125104 - DNA, 60 bp, Artificial
  Synthetic oligonucleotide
gggagctctctggctatctggggaacccactgcttaagcctcaataaagcttgccttgag

SEQ ID NO: 125105 - DNA, 60 bp, Artificial
  Synthetic oligonucleotide
gcctgggagctctctggctatctagagaacccactgcttaagcctcaataaagcttgcct

SEQ ID NO: 125106 - DNA, 60 bp, Artificial
  Synthetic oligonucleotide
gcctgggagctctctggctaattagggaacccactgcttaagcctcaataaagcttgcct

SEQ ID NO: 125107 - DNA, 60 bp, Artificial
  Synthetic oligonucleotide
ccaggaaaatggaaaccaaaaatgataggaggaattggaggttttatcaaagtaagacag

SEQ ID NO: 125108 - DNA, 54 bp, Artificial
  Synthetic oligonucleotide
gtaccagtaaaattaaagccaggaatggatggcccaaaggttaaacaatggcca

SEQ ID NO: 125109 - DNA, 57 bp, Artificial
  Synthetic oligonucleotide
gactagcggaggctagaaggagagagatgggtgcgagagcgtcaatattaagagggg

SEQ ID NO: 125110 - DNA, 53 bp, Artificial
  Synthetic oligonucleotide
gtaaaattaaagccaggaatggatggcccaaaagttaaacaatggccattgac

SEQ ID NO: 125111 - DNA, 51 bp, Artificial
  Synthetic oligonucleotide
cggaggctagaaggagagagatgggtgcgagagcgtcaatactaagagggg

SEQ ID NO: 125112 - DNA, 51 bp, Artificial
  Synthetic oligonucleotide
cggaggctagaaggagagagatgggtgcgagagcgtcaatattacgagggg

SEQ ID NO: 125113 - DNA, 51 bp, Artificial
  Synthetic oligonucleotide
cggaggctagaaggagagagatgggtgcgagagcgtcagtattaagcgggg

SEQ ID NO: 125114 - DNA, 50 bp, Artificial
  Synthetic oligonucleotide
cggaggctagaaggagagagatgggtgcgagagcgtcagtattaagcggg

SEQ ID NO: 125115 - DNA, 60 bp, Artificial
  Synthetic oligonucleotide
gctaaaacacttagtatgggcaagcagggagctggaaagatttgcacttaactctggcct

SEQ ID NO: 125116 - DNA, 60 bp, Artificial
  Synthetic oligonucleotide
gctaaaacacttagtatgggcaagcagggagctggaaagatttgcacttaaccctagcct

SEQ ID NO: 125117 - DNA, 50 bp, Artificial
  Synthetic oligonucleotide
gagtcctggctgtggaaagatacctaaaggatcaacagctcctagggatt

SEQ ID NO: 125118 - DNA, 55 bp, Artificial
  Synthetic oligonucleotide
cggaggctagaaggagagagatgggtgcgagagcgtcagtattaaaaggggaaaa

SEQ ID NO: 125119 - DNA, 60 bp, Artificial
  Synthetic oligonucleotide
actagcggaggctagaaggagagagatgggtgcgagagcgtcagtattaagcgggggaga

SEQ ID NO: 125120 - DNA, 60 bp, Artificial
  Synthetic oligonucleotide
gactagcggaggctagaaggagagagatgggtgcgagagcgtcaatattaagaggcgaaa

SEQ ID NO: 125121 - DNA, 60 bp, Artificial
  Synthetic oligonucleotide
gaaaatctctagcagtggcgcccgaacagggacttgaaaacgaaagtaagaccagaggag

SEQ ID NO: 125122 - DNA, 60 bp, Artificial
  Synthetic oligonucleotide
gggaagctatgcatggacaagtagactgtagtccagggatatggcaattagattgcacac

SEQ ID NO: 125123 - DNA, 60 bp, Artificial
  Synthetic oligonucleotide
gaaaggaccagcaaagctcctctggaaaggtgaaggggcagtagtaatacaagacaagag

SEQ ID NO: 125124 - DNA, 60 bp, Artificial
  Synthetic oligonucleotide
gctaaaacacttagtatgggcaagcagggagctggaaagattcgcacttaaccctggcct

SEQ ID NO: 125125 - DNA, 60 bp, Artificial
  Synthetic oligonucleotide
gggactatggaaaacagatggcaggtgctgattgtgtggcaggtagacaggatgaggatc

SEQ ID NO: 125126 - DNA, 60 bp, Artificial
  Synthetic oligonucleotide
atacccatgtttacagcattatcagaaggagccaccccacaagatttaaacaccatgtta

SEQ ID NO: 125127 - DNA, 60 bp, Artificial
  Synthetic oligonucleotide
aatacccatgtttacagcattatcagaaggagccaccccacaagatttaaacaccatgtt

SEQ ID NO: 125128 - DNA, 60 bp, Artificial
  Synthetic oligonucleotide
gaccagccaaactactctggaaaggtgaaggggcagtagtaatacaagataatagtgaca

SEQ ID NO: 125129 - DNA, 60 bp, Artificial
  Synthetic oligonucleotide
gcctggggagctctctggctaactagggaacccactgcttaagcctcaataaagcttgcc

SEQ ID NO: 125130 - DNA, 60 bp, Artificial
  Synthetic oligonucleotide
gctaaaacacctagtatgggcaagcagggagctggaaagatttgcacttaaccctggcct

SEQ ID NO: 125131 - DNA, 60 bp, Artificial
  Synthetic oligonucleotide
gtcagcacagtacaatgtacacatggaattaagccagtggtatcaactcaactactgtta

SEQ ID NO: 125132 - DNA, 60 bp, Artificial
  Synthetic oligonucleotide
ggaccagcaaagcttctctggaaaggtgaaggggcagtagtaatacaagataatagtgac

SEQ ID NO: 125133 - DNA, 60 bp, Artificial
  Synthetic oligonucleotide
cggaggctagaaggagagagatgggtgcgagagcgtcagtattaagcgggggaaaattag

SEQ ID NO: 125134 - DNA, 60 bp, Artificial
  Synthetic oligonucleotide
gagggataaggggcggttcggggagtggctaaccctcagatgctgcatataagcagctgc

SEQ ID NO: 125135 - DNA, 60 bp, Artificial
  Synthetic oligonucleotide
aaattttgactagcggaggctagaaggagagagatgggtgcgagagcgtcagtattaagc

SEQ ID NO: 125136 - DNA, 60 bp, Artificial
  Synthetic oligonucleotide
gtcagcattttggacataagacaagggccaaaggaaccctttagagactatgtagaccgg

SEQ ID NO: 125137 - DNA, 60 bp, Artificial
  Synthetic oligonucleotide
cctgattggcagaactacacaccaggaccaggaaccaggttcccactgacatttggatgg

SEQ ID NO: 125138 - DNA, 60 bp, Artificial
  Synthetic oligonucleotide
tgtcagcacagtacaatgtacacatggaattaagccagtggtatcaactcaactactgtt

SEQ ID NO: 125139 - DNA, 60 bp, Artificial
  Synthetic oligonucleotide
aaaatctctagcagtggcgcccgaacagggacccgaaagcgaaagggaaaccagaggagc

SEQ ID NO: 125140 - DNA, 60 bp, Artificial
  Synthetic oligonucleotide
ctgggagctctcaggctagctagggaacccactgcttaagcctcaataaagcttgccttg

SEQ ID NO: 125141 - DNA, 60 bp, Artificial
  Synthetic oligonucleotide
gcctgggagctctctggctaactagggaacccactgcttaagcctcaataaagcttgcct

SEQ ID NO: 125142 - DNA, 56 bp, Artificial
  Synthetic oligonucleotide
gagctctctggccggctagggaacccactgcttaagcctcaataaagcttgccttg

SEQ ID NO: 125143 - DNA, 60 bp, Artificial
  Synthetic oligonucleotide
gcttctctggaaaggtgaaggggcagtagtaatacaagacaatagtgacataaaggtagt

SEQ ID NO: 125144 - DNA, 60 bp, Artificial
  Synthetic oligonucleotide
gcacacccatcagccccaccgatggaggaggaagtgaagggacaggagaatcaggaacag

SEQ ID NO: 125145 - DNA, 60 bp, Artificial
  Synthetic oligonucleotide
cacgcaagcctgtccaaaggtatcttttgaaccaattccaatacactattgtgctccagc

SEQ ID NO: 125146 - DNA, 60 bp, Artificial
  Synthetic oligonucleotide
caggattaggttgtacactaaacttccctataagccccatagccccagtgccagtaaaac

SEQ ID NO: 125147 - DNA, 60 bp, Artificial
  Synthetic oligonucleotide
attagaggcaccaagtcattaacagaagtagtacctttaagtagagaggcagagctggaa

SEQ ID NO: 125148 - DNA, 60 bp, Artificial
  Synthetic oligonucleotide
ccagtggtggccaaggaaatcattgctagctgtcctaaatgtcatataaaaggggaagca

SEQ ID NO: 125149 - DNA, 60 bp, Artificial
  Synthetic oligonucleotide
gaagtctgcggacgccgctaaggaagacacaagcgcaaggcaggcgggtcaaaattaccc

SEQ ID NO: 125150 - DNA, 60 bp, Artificial
  Synthetic oligonucleotide
ccacatattggggattgatgccaggggaaagagatgaacatttgggacatggggttagta

SEQ ID NO: 125151 - DNA, 60 bp, Artificial
  Synthetic oligonucleotide
agaaagggtttgggaatctcctatggcaggaagaagcgaggacgaccagctgctgcaagc

SEQ ID NO: 125152 - DNA, 60 bp, Artificial
  Synthetic oligonucleotide
cgggtctattacagagacagcagagaccctatctggaaaggaccggcacagctcctgtgg

SEQ ID NO: 125153 - DNA, 60 bp, Artificial
  Synthetic oligonucleotide
aagcactgaaaagcataatatttgggcatcacaagcctgtgttcctacagaccccactcc

SEQ ID NO: 125154 - DNA, 60 bp, Artificial
  Synthetic oligonucleotide
ctgagacaggtggtaaggtcatggataaggggacagtcgggactctatgcacctcccatc

SEQ ID NO: 125155 - DNA, 60 bp, Artificial
  Synthetic oligonucleotide
ggccaggagctaccttagaagagatgatggtagcctgtcagggagtaggaggaccaactc

SEQ ID NO: 125156 - DNA, 60 bp, Artificial
  Synthetic oligonucleotide
acatcaaggagctttacaagtgctaaaggaagtaatcaatgaggaagcagtagagtggga

SEQ ID NO: 125157 - DNA, 60 bp, Artificial
  Synthetic oligonucleotide
ggggtatcagacaactccgagctcgcctgctagccttagaaaccttactacagaatcagc

SEQ ID NO: 125158 - DNA, 60 bp, Artificial
  Synthetic oligonucleotide
ttaagctgccagtcactagagaaacttgggaaacatggtgggcggactattggcaagcca

SEQ ID NO: 125159 - DNA, 60 bp, Artificial
  Synthetic oligonucleotide
tttgggacaccttaacatggcaggaatgggatcggcagataagcaacataagctccacca

SEQ ID NO: 125160 - DNA, 60 bp, Artificial
  Synthetic oligonucleotide
ggttgtttaaactagtaccagtgtcagaagaagaggcagaaagactaggagatacatgtg

SEQ ID NO: 125161 - DNA, 60 bp, Artificial
  Synthetic oligonucleotide
ctgaaccatgcgcacctggagtaggacagatctccagggaattagcagctagaggaggga

SEQ ID NO: 125162 - DNA, 60 bp, Artificial
  Synthetic oligonucleotide
cccaggtggataccctcgccgcaagggttcttgccactgttgtacacggacctcagaaca

SEQ ID NO: 125163 - DNA, 60 bp, Artificial
  Synthetic oligonucleotide
gaagggcgaagtctctaggggaggaagatgggtgcgagtgcgtctgtgttgacaggaagc

SEQ ID NO: 125164 - DNA, 60 bp, Artificial
  Synthetic oligonucleotide
cagaaagactaggaaatacatgtgagagggctaatctcctgcatccagcatgtgcccatg

SEQ ID NO: 125165 - DNA, 59 bp, Artificial
  Synthetic oligonucleotide
atggaaaccaaaaatgatagggggaattggaggttttatcaaagtaagacagtatgatc

SEQ ID NO: 125166 - DNA, 60 bp, Artificial
  Synthetic oligonucleotide
ctagtacccttcaggaacaaataggatggatgacaaacaatccacctatcccagtaggag

SEQ ID NO: 125167 - DNA, 60 bp, Artificial
  Synthetic oligonucleotide
atcattagggattatggaaaacagatggcaggtaatgattgtgtggcaggtagacaggat

SEQ ID NO: 125168 - DNA, 60 bp, Artificial
  Synthetic oligonucleotide
aaatagtaaggatgtatagccctaccagcattctggacataagacaaggaccaaaggaac

SEQ ID NO: 125169 - DNA, 60 bp, Artificial
  Synthetic oligonucleotide
gggattatggaaaacagatggcaggtgatgattgtgtggcaagtagacaggatgaggatt

SEQ ID NO: 125170 - DNA, 60 bp, Artificial
  Synthetic oligonucleotide
gggactatggaaaacagatggcaggtgatgattgtgtggcaagtagacaggatgaggatt

SEQ ID NO: 125171 - DNA, 60 bp, Artificial
  Synthetic oligonucleotide
gaaaacagatggcaggtgatgattgtgtggcaagtagacaggatgaggattagagcatgg

SEQ ID NO: 125172 - DNA, 60 bp, Artificial
  Synthetic oligonucleotide
ggcattatggaaaacagatggcaggtgatgattgtgtggcaggtagacaggatgaggatt

SEQ ID NO: 125173 - DNA, 60 bp, Artificial
  Synthetic oligonucleotide
cccttagcttccctcagatcactctttggcaacgacccctcgtcacaataaaagtagggg

SEQ ID NO: 125174 - DNA, 60 bp, Artificial
  Synthetic oligonucleotide
tcccttagcttccctcagatcactctttggcaacgacccctcgtcacaataaagataggg

SEQ ID NO: 125175 - DNA, 52 bp, Artificial
  Synthetic oligonucleotide
ctaggggaagggcgaagtctctaggggaggaagatgggtgcgagagcgtctg

SEQ ID NO: 125176 - DNA, 60 bp, Artificial
  Synthetic oligonucleotide
gttctacaaaacattaagagctgagcaagcaactcaagaagtaaaaaattggatgacaga

SEQ ID NO: 125177 - DNA, 58 bp, Artificial
  Synthetic oligonucleotide
aggggcagatgatacagtactaaacaacatacaattggaaggaaaatggacaccaaaa

SEQ ID NO: 125178 - DNA, 60 bp, Artificial
  Synthetic oligonucleotide
gaggaactcacaagagggtgagtaattttgctggcggtggccagacctaggggaagggcg

SEQ ID NO: 125179 - DNA, 60 bp, Artificial
  Synthetic oligonucleotide
agcttatgggaacagagtttaaaaccttgtgttcaaatgactttcctgtgtgtgcaaatg

SEQ ID NO: 125180 - DNA, 60 bp, Artificial
  Synthetic oligonucleotide
ctggagttagatgaatgggcttcgctttggaattggcttgacataactaaatggttgtgg

SEQ ID NO: 125181 - DNA, 60 bp, Artificial
  Synthetic oligonucleotide
gaagggtgagtaaatttgctggcggtggccagacctaggggaagggcgaagtctctaggg

SEQ ID NO: 125182 - DNA, 59 bp, Artificial
  Synthetic oligonucleotide
ctttctgcttgtaaagggtctcggttagagaaccaggtctgagcccgggagctccctgg

SEQ ID NO: 125183 - DNA, 57 bp, Artificial
  Synthetic oligonucleotide
gggactttccacggtgggagggatatgggcggttcggggagtggctaaccctcagat

SEQ ID NO: 125184 - DNA, 60 bp, Artificial
  Synthetic oligonucleotide
gcggggactttccagggtgggagggatatgggcggttcggggagtggctaaccctcagat

SEQ ID NO: 125185 - DNA, 60 bp, Artificial
  Synthetic oligonucleotide
cccactgacatttgggtggttatttaagctagtaccagtgtcagaagctgaggcagaaga

SEQ ID NO: 125186 - DNA, 60 bp, Artificial
  Synthetic oligonucleotide
acatcacactcagggattcttccctgattggcagaactacacaccaggaccaggaactag

SEQ ID NO: 125187 - DNA, 60 bp, Artificial
  Synthetic oligonucleotide
gaaaagggaggactggatgggttaatttactcccctgcgagagcagagatcctggatctt

SEQ ID NO: 125188 - DNA, 60 bp, Artificial
  Synthetic oligonucleotide
aagaaaagggaggactggatgggttaatttactcccataaaagagcagagatcttagacc

SEQ ID NO: 125189 - DNA, 60 bp, Artificial
  Synthetic oligonucleotide
tcagcttctttttaaaagaaaagggaggactggatgggttaatttactcccataaaagag

SEQ ID NO: 125190 - DNA, 60 bp, Artificial
  Synthetic oligonucleotide
ggcttcttccctgattggcagaactacacaccagggccagggattagatatccactgtgt

SEQ ID NO: 125191 - DNA, 60 bp, Artificial
  Synthetic oligonucleotide
tagtgccaagaagaaaagcaaagatcattagggattatggaaaacagatggcaggtgatg

SEQ ID NO: 125192 - DNA, 60 bp, Artificial
  Synthetic oligonucleotide
ccaccccacaagatttaaacaccatgctaaacacagtggggggacatcaagcagccatgc

SEQ ID NO: 125193 - DNA, 60 bp, Artificial
  Synthetic oligonucleotide
agccaccccacaagatttaaacaccatgctaaacacagtggggggacatcaagcagccat

SEQ ID NO: 125194 - DNA, 60 bp, Artificial
  Synthetic oligonucleotide
tcagaaggagccaccccacaagatttatacaccatgctaaacacagtggggggacatcaa

SEQ ID NO: 125195 - DNA, 60 bp, Artificial
  Synthetic oligonucleotide
aattttcgggtttattacagggacagcagagatccactttggaaaggaccagcaaagctt

SEQ ID NO: 125196 - DNA, 60 bp, Artificial
  Synthetic oligonucleotide
gtcagctaaaaggggaagccatgcatggacaagtagactgtagtccaggaatatggcaat

SEQ ID NO: 125197 - DNA, 60 bp, Artificial
  Synthetic oligonucleotide
gtcaactaaaaggggaagccatgcatggacaagtagactgtagtccaggaatatggcaat

SEQ ID NO: 125198 - DNA, 60 bp, Artificial
  Synthetic oligonucleotide
ctgtggatctaccacacacaaggctacttccctgattggcagaactacacaccagggcca

SEQ ID NO: 125199 - DNA, 60 bp, Artificial
  Synthetic oligonucleotide
tagtgccaagaagaaaagcaaagatcattagggattatggaaaacagatggcaggcgatg

SEQ ID NO: 125200 - DNA, 60 bp, Artificial
  Synthetic oligonucleotide
gcagagaccctatttggaaaggaccggcacagctcctgtggaaaggtgagggagcagtag

SEQ ID NO: 125201 - DNA, 60 bp, Artificial
  Synthetic oligonucleotide
cagcagagaccctatttggaaaggaccggcacagctcctgtggaaaggtgagggagcagt

SEQ ID NO: 125202 - DNA, 60 bp, Artificial
  Synthetic oligonucleotide
gctgaacccgctgcttaacgctcaataaagcttgccttaaataagaagcagtgtgtactc

SEQ ID NO: 125203 - DNA, 51 bp, Artificial
  Synthetic oligonucleotide
acagcaggacaacctgctaagagcaatacaggcccagcagcaattgctgag

SEQ ID NO: 125204 - DNA, 60 bp, Artificial
  Synthetic oligonucleotide
ggctatttaagctagtaccagtgtcagaagctgaggcagaagcactgggcaataagtgtg

SEQ ID NO: 125205 - DNA, 60 bp, Artificial
  Synthetic oligonucleotide
cagataataaagatcctgtaccagagcagtaagtaacgctgatgcatcatcagggcctgc

SEQ ID NO: 125206 - DNA, 60 bp, Artificial
  Synthetic oligonucleotide
gtgggaccagagtttaaaaccttgtgttcaaatgactttcttgtgtgtacaaatgaattg

SEQ ID NO: 125207 - DNA, 60 bp, Artificial
  Synthetic oligonucleotide
gctccctggcctctagctgaacccgctgcttaacgctcaataaagcttgccttgagtgag

SEQ ID NO: 125208 - DNA, 60 bp, Artificial
  Synthetic oligonucleotide
gctccctagcctctagctgaacccgctgcttaacgctcaataaagcttgccttaaataag

SEQ ID NO: 125209 - DNA, 60 bp, Artificial
  Synthetic oligonucleotide
gaaccaagtctgagcccaaaagctccctagcctctagctgaacccgctgcttaacgctca

SEQ ID NO: 125210 - DNA, 56 bp, Artificial
  Synthetic oligonucleotide
cccgggagctccctggcctctagctgaacccgctgcttaacgctcaataaagcttg

SEQ ID NO: 125211 - DNA, 60 bp, Artificial
  Synthetic oligonucleotide
gcattatcagaaggagccaccccacaagatttaaacaccatgctaaacacagtgggggga

SEQ ID NO: 125212 - DNA, 57 bp, Artificial
  Synthetic oligonucleotide
gcattatcagaaggagccaccccacaagatttaaacaccatgctaaacacagtgggg

SEQ ID NO: 125213 - DNA, 60 bp, Artificial
  Synthetic oligonucleotide
agcattatcagaaggagccaccccacaagatttaaacaccatgctaaacacagtgggggg

SEQ ID NO: 125214 - DNA, 58 bp, Artificial
  Synthetic oligonucleotide
agcattatcagaaggagccaccccacaagatttaaacaccatgctaaacacagtgggg

SEQ ID NO: 125215 - DNA, 60 bp, Artificial
  Synthetic oligonucleotide
acagcattatcagaaggagccaccccacaagatttaaacaccatgctaaacacagtgggg

SEQ ID NO: 125216 - DNA, 51 bp, Artificial
  Synthetic oligonucleotide
ggggtatagtgcaggggaaagaataatagacataatagcaacagacataca

SEQ ID NO: 125217 - DNA, 57 bp, Artificial
  Synthetic oligonucleotide
ggggatacagtgcaggggaaagaataatagacataatagcaacagacatacaaacta

SEQ ID NO: 125218 - DNA, 60 bp, Artificial
  Synthetic oligonucleotide
gggattcttccctgattggcagaactacacaccaggaccaggaactagattcccactgac

SEQ ID NO: 125219 - DNA, 60 bp, Artificial
  Synthetic oligonucleotide
tcagcattatcagaaggagccaccccacaagatttaaataccatgctaaacacagtgggg

SEQ ID NO: 125220 - DNA, 60 bp, Artificial
  Synthetic oligonucleotide
tcagcattatcagaaggagccaccccacaagatttaaacaccatgctaaacacagtgggg

SEQ ID NO: 125221 - DNA, 60 bp, Artificial
  Synthetic oligonucleotide
ctagcggaggctagaaggagagagatgggtgcgagagcgtcagtattaagcgggggaaaa

SEQ ID NO: 125222 - DNA, 60 bp, Artificial
  Synthetic oligonucleotide
agaaggctttcagcccagaagtaatacccatgttttcagcattatcagaaggagccaccc

SEQ ID NO: 125223 - DNA, 60 bp, Artificial
  Synthetic oligonucleotide
ggctacttccctgattggcagaactacacaccagggccagggactagatttccactgacc

SEQ ID NO: 125224 - DNA, 60 bp, Artificial
  Synthetic oligonucleotide
ggctacttccctgattggcagaactacacaccagggccagggactagatggccactgacc

SEQ ID NO: 125225 - DNA, 60 bp, Artificial
  Synthetic oligonucleotide
ttttgactagcggaggctagaaggagagagatgggtgcgagagcgtcagtattaagcggg

SEQ ID NO: 125226 - DNA, 60 bp, Artificial
  Synthetic oligonucleotide
ggaccagcaaaactactctggaaaggtgaaggggcagtagtaatacaagacaatagtgat

SEQ ID NO: 125227 - DNA, 60 bp, Artificial
  Synthetic oligonucleotide
aattttgtctagcggaggctagaaggagagagatgggtgcgagagcgtcagtattaagcg

SEQ ID NO: 125228 - DNA, 60 bp, Artificial
  Synthetic oligonucleotide
acaaggtttcttccctgattggcagaactacacaccagggccagggatcagatatccact

SEQ ID NO: 125229 - DNA, 60 bp, Artificial
  Synthetic oligonucleotide
tcctgggattaaataaaatagtaagaatgtatagccctgttagcattttggatataaaac

SEQ ID NO: 125230 - DNA, 60 bp, Artificial
  Synthetic oligonucleotide
aaaggctttcagcccagaagtaatacccatgttttcagcattatcagaaggagccacccc

SEQ ID NO: 125231 - DNA, 60 bp, Artificial
  Synthetic oligonucleotide
ggggattgaggggtacagtgcaggggaaagaataatagacataatagcaacagacataca

SEQ ID NO: 125232 - DNA, 57 bp, Artificial
  Synthetic oligonucleotide
ccttcaggaacaaataggatggatgacaaataatccacctatcccagtaggagaaat

SEQ ID NO: 125233 - DNA, 60 bp, Artificial
  Synthetic oligonucleotide
tagaggagaaggctttcagcccagaagtaatacccatgtttacagcattatcagaaggag

SEQ ID NO: 125234 - DNA, 60 bp, Artificial
  Synthetic oligonucleotide
agaagagaaggctttcagcccagaagtaatacccatgtttacagcattatcagaaggagc

SEQ ID NO: 125235 - DNA, 60 bp, Artificial
  Synthetic oligonucleotide
aaaggtagtaccaagaagaaaagcaaagatcattagggattatggaaaacagatggcagg

SEQ ID NO: 125236 - DNA, 60 bp, Artificial
  Synthetic oligonucleotide
ggtagtaccaagaagaaaagcaaagatcattagggattatggaaaacagatggcaggtga

SEQ ID NO: 125237 - DNA, 60 bp, Artificial
  Synthetic oligonucleotide
agaaggagccaccccacaagatttaaacaccatgctaaacacagtgggaggatatcaagc

SEQ ID NO: 125238 - DNA, 60 bp, Artificial
  Synthetic oligonucleotide
aggagaagccatgcatggacaagtagactgtagtccaggaatatggcaactagattgtac

SEQ ID NO: 125239 - DNA, 60 bp, Artificial
  Synthetic oligonucleotide
aaatagtaagaatgtatagccctaccagcattctggacataagacaaggaccaaaggaac

SEQ ID NO: 125240 - DNA, 60 bp, Artificial
  Synthetic oligonucleotide
ggggtacagtgcaggggaaagaatagtagacataatagcaacagacatacaaactaaaga

SEQ ID NO: 125241 - DNA, 60 bp, Artificial
  Synthetic oligonucleotide
ggcagtttgatagctcactaggccgcacccacgttgctatgataacccacccagatctct

SEQ ID NO: 125242 - DNA, 60 bp, Artificial
  Synthetic oligonucleotide
gacgacgtccaaccgctgctgcacgccatccggataataaagatcctgtaccagagcagt

SEQ ID NO: 125243 - DNA, 60 bp, Artificial
  Synthetic oligonucleotide
gagggtccgaccgagctctacccgtttgcctccctcaaatccctctttgggacagaccaa

SEQ ID NO: 125244 - DNA, 60 bp, Artificial
  Synthetic oligonucleotide
tgcactgggcatcatctcctcccaacctacacagagtgaatcccctatagttcagcagat

SEQ ID NO: 125245 - DNA, 60 bp, Artificial
  Synthetic oligonucleotide
ggggaagggcgaagtctctaggggaggaagatgggtgcgagtgcgtctgtgttaaaaggg

SEQ ID NO: 125246 - DNA, 60 bp, Artificial
  Synthetic oligonucleotide
gaggtaatacccatgttttcagcattatcagaaggagccaccccacaagatttaaacacc

SEQ ID NO: 125247 - DNA, 60 bp, Artificial
  Synthetic oligonucleotide
tatggaaaacagatggcaggtgatgattgtgtggcaagtagacaggatgaggattaacac

SEQ ID NO: 125248 - DNA, 60 bp, Artificial
  Synthetic oligonucleotide
cagttcatgtagccagtggatatatagaagcagaagttattccagcagaaacagggcagg

SEQ ID NO: 125249 - DNA, 60 bp, Artificial
  Synthetic oligonucleotide
acagcattatcagaaggagccaccccacaagatttaaacaccatgctgaacacagtgggg

SEQ ID NO: 125250 - DNA, 60 bp, Artificial
  Synthetic oligonucleotide
ggctacttccctgattggcagaactacacaccagggccaggggtcagatttccactgacc

SEQ ID NO: 125251 - DNA, 60 bp, Artificial
  Synthetic oligonucleotide
ccaaggggaagtgacatagctggaactactagtacccttcaggaacaaataggatggatg

SEQ ID NO: 125252 - DNA, 60 bp, Artificial
  Synthetic oligonucleotide
gaagagaaggctttcagcccagaagtaatacccatgtttacagcattatcagaaggagcc

SEQ ID NO: 125253 - DNA, 60 bp, Artificial
  Synthetic oligonucleotide
gaagatggaaaccaaaaatgatagggggaattggaggttttatcaaagtaagacagtatg

SEQ ID NO: 125254 - DNA, 60 bp, Artificial
  Synthetic oligonucleotide
aaaattcaaaattttcgggtttattacagggacagcagagatccactttggaaaggacca

SEQ ID NO: 125255 - DNA, 60 bp, Artificial
  Synthetic oligonucleotide
gggactatggaaaacagatggcaggtgatgattgtgtggcaggtagacaggatgaggatt

SEQ ID NO: 125256 - DNA, 60 bp, Artificial
  Synthetic oligonucleotide
aaatagtaagaatgtatagccctaccagcattctggacataaaacaaggaccaaaggaac

SEQ ID NO: 125257 - DNA, 60 bp, Artificial
  Synthetic oligonucleotide
ggctttcagcccagaagtaatacccatgtttgctgcattatcagaaggagccaccccaca

SEQ ID NO: 125258 - DNA, 58 bp, Artificial
  Synthetic oligonucleotide
ggggatatagtgcaggggaaagaatagtagacataatagcaacagacatacaaactaa

SEQ ID NO: 125259 - DNA, 60 bp, Artificial
  Synthetic oligonucleotide
cagtattagtaggacctacacctgtcaacataattggaagaaatctgttgactcagattg

SEQ ID NO: 125260 - DNA, 60 bp, Artificial
  Synthetic oligonucleotide
aaaatttttgactagcggaggctagaaggagagagatgggtgcgagagcgtcagtattaa

SEQ ID NO: 125261 - DNA, 60 bp, Artificial
  Synthetic oligonucleotide
aaattttttgactagcggaggctagaaggagagagatgggtgcgagagcgtcagtattaa

SEQ ID NO: 125262 - DNA, 60 bp, Artificial
  Synthetic oligonucleotide
ggaaaacagatggcaggtgatgattgtgtggcaggtagacaggatgaggattagaacatg

SEQ ID NO: 125263 - DNA, 60 bp, Artificial
  Synthetic oligonucleotide
aggaactactagtacccttcaggaacaaataggatggatgacaaacaatccacctatccc

SEQ ID NO: 125264 - DNA, 60 bp, Artificial
  Synthetic oligonucleotide
gccaggaagatggaaaccaaaaatgatagggggaattggaggttttatcaaagtaggcca

SEQ ID NO: 125265 - DNA, 60 bp, Artificial
  Synthetic oligonucleotide
aaaagtagtgccaagaagaaaagcaaagatcattagggattatggaaaacagatggcagg

SEQ ID NO: 125266 - DNA, 60 bp, Artificial
  Synthetic oligonucleotide
aagtagtgccaagaagaaaagcaaagatcattagggattatggaaaacagatggcaggtg

SEQ ID NO: 125267 - DNA, 60 bp, Artificial
  Synthetic oligonucleotide
gactagcggaggctagaaggagagagatgggtgcgagagcgtcaatattaacaggggaaa

SEQ ID NO: 125268 - DNA, 60 bp, Artificial
  Synthetic oligonucleotide
gatacaggagcagatgatacagtattagaagaaatgaatttgccaggaagatggaaacca

SEQ ID NO: 125269 - DNA, 60 bp, Artificial
  Synthetic oligonucleotide
agatacaggagcagatgatacagtattagaagaaatgaatttgccaggaagatggaaacc

SEQ ID NO: 125270 - DNA, 60 bp, Artificial
  Synthetic oligonucleotide
cctcagatcacgtagactgaggcagaaaatctctagcagtggcgcccgaacagggacttg

SEQ ID NO: 125271 - DNA, 60 bp, Artificial
  Synthetic oligonucleotide
accagcaaaactactctggaaaggtgaaggggcagtagtaatacaagacaatagtgatat

SEQ ID NO: 125272 - DNA, 53 bp, Artificial
  Synthetic oligonucleotide
tgcggaggctagaaggagagagatgggtgcgagagcgtcagtattaagtgggg

SEQ ID NO: 125273 - DNA, 60 bp, Artificial
  Synthetic oligonucleotide
cagatggcaggtgatgattgtgtggcaagtagacaggatgaggattagaacatggaaaag

SEQ ID NO: 125274 - DNA, 60 bp, Artificial
  Synthetic oligonucleotide
aattttgactagcggaggctagaaggagagagatgggtgcgagagcgtcagtattgagcg

SEQ ID NO: 125275 - DNA, 60 bp, Artificial
  Synthetic oligonucleotide
ggataatcctgggattaaataaaatagtaagaatgtatagccctaccagcattctggaca

SEQ ID NO: 125276 - DNA, 57 bp, Artificial
  Synthetic oligonucleotide
ggggtacagtgcaggggaaagaataatagacataatagcatcagacatacaaaccaa

SEQ ID NO: 125277 - DNA, 60 bp, Artificial
  Synthetic oligonucleotide
ccttcaggaacaaataggatggatgacaaataatccacctatcccagtaggagaaatcta

SEQ ID NO: 125278 - DNA, 60 bp, Artificial
  Synthetic oligonucleotide
ggggattggggagtacagtgcaggggaaagaataatagacataatagcaacagacataca

SEQ ID NO: 125279 - DNA, 54 bp, Artificial
  Synthetic oligonucleotide
ctatgggcgcagcgtcaataacgctgacggtacaggccagactattattgtctg

SEQ ID NO: 125280 - DNA, 57 bp, Artificial
  Synthetic oligonucleotide
ctagcggaggctagaaggagagagatgggtgcgagagcgtcagtattaagtgcgggg

SEQ ID NO: 125281 - DNA, 60 bp, Artificial
  Synthetic oligonucleotide
gatcattagggattatggaaaacagatggcaggtgatgattgtgtggcaagtagacagga

SEQ ID NO: 125282 - DNA, 60 bp, Artificial
  Synthetic oligonucleotide
gggggattggggagtacagtgcaggggaaagaataatagacataatagcaacagacatac

SEQ ID NO: 125283 - DNA, 60 bp, Artificial
  Synthetic oligonucleotide
tttgactagcggaggctagaaggagagagatgggtgcgagagcgtcagtgttaagtgggg

SEQ ID NO: 125284 - DNA, 60 bp, Artificial
  Synthetic oligonucleotide
ggggtacagtgcaggcgaaagaataatagacataatagcaacagacatacaaactaaaga

SEQ ID NO: 125285 - DNA, 50 bp, Artificial
  Synthetic oligonucleotide
ggaggctagaaggagagagatgggtgcgagagcgtcaatattaagcgggg

SEQ ID NO: 125286 - DNA, 54 bp, Artificial
  Synthetic oligonucleotide
tatggaaaacagatggcaggtgatgattgtgtggcaggtagacaggatgaggat

SEQ ID NO: 125287 - DNA, 60 bp, Artificial
  Synthetic oligonucleotide
cagatggcaggtgatgattgtgtggcaagtagacaggatgaggattagaacatggaagag

SEQ ID NO: 125288 - DNA, 60 bp, Artificial
  Synthetic oligonucleotide
ggctacttccctgattggcagaactacacaccaggaccagggatcagatatccactgacc

SEQ ID NO: 125289 - DNA, 60 bp, Artificial
  Synthetic oligonucleotide
ggctacttccctgattggcagaactacacaccagggccagggatcagatatccactgacc

SEQ ID NO: 125290 - DNA, 57 bp, Artificial
  Synthetic oligonucleotide
ggggtacagtgcaggggaaagaatagtagacataatagcaacagacatacaaactag

SEQ ID NO: 125291 - DNA, 56 bp, Artificial
  Synthetic oligonucleotide
ggggtacagtgcaggggaaagaatagtagacataatagcaacagacatacaaacta

SEQ ID NO: 125292 - DNA, 57 bp, Artificial
  Synthetic oligonucleotide
ggggtacagtgcaggggaaagaatagtagacataatagcaacagacatacaaactaa

SEQ ID NO: 125293 - DNA, 58 bp, Artificial
  Synthetic oligonucleotide
ggggatacagtgcaggggaaagaatagtagacataatagcaacagacatacaaactaa

SEQ ID NO: 125294 - DNA, 60 bp, Artificial
  Synthetic oligonucleotide
ggggatacagtgcaggggaaagaatagtagacataatagcaacagacatacaaactaaag

SEQ ID NO: 125295 - DNA, 57 bp, Artificial
  Synthetic oligonucleotide
ggggatacagtgcaggggaaagaatagtagacataatagcaacagacatacaaacta

SEQ ID NO: 125296 - DNA, 60 bp, Artificial
  Synthetic oligonucleotide
gcccagaagtaatacccatgttctcagcattatcagaaggagccaccccacaagatttaa

SEQ ID NO: 125297 - DNA, 60 bp, Artificial
  Synthetic oligonucleotide
tcattagggattatggaaaacagatggcaggtgatgattgtgtggcaagtagacaggatg

SEQ ID NO: 125298 - DNA, 60 bp, Artificial
  Synthetic oligonucleotide
gaaggagcagtagtcatacaagataaaggagacattaaggtagtaccaagaaggaaagca

SEQ ID NO: 125299 - DNA, 59 bp, Artificial
  Synthetic oligonucleotide
aaaggtgagggagcagtagtcatacaagataaaggagacattaaagtagtaccaagaag

SEQ ID NO: 125300 - DNA, 60 bp, Artificial
  Synthetic oligonucleotide
cctgtggaaaggtgagggagcagtagtcatacaagataaaggagacattaaagtagtacc

SEQ ID NO: 125301 - DNA, 60 bp, Artificial
  Synthetic oligonucleotide
gcagagatcctatttggaaaggaccggcacagctcctgtggaaaggtgaaggagcagtag

SEQ ID NO: 125302 - DNA, 58 bp, Artificial
  Synthetic oligonucleotide
gagatccctcagaccactctaaatagtgtaaaatctctagcagtggcgcccgaacagg

SEQ ID NO: 125303 - DNA, 60 bp, Artificial
  Synthetic oligonucleotide
gtttacagcattatcagaaggagccaccccacaagatttaaacaccatgctaaacacagt

SEQ ID NO: 125304 - DNA, 60 bp, Artificial
  Synthetic oligonucleotide
gggggattggggagtatagtgcaggggaaagaataatagacataatagcaacagacatac

SEQ ID NO: 125305 - DNA, 60 bp, Artificial
  Synthetic oligonucleotide
aatgtgcttccacagggatggaaaggatcaccagcaatattccaaagtagcatgacaaaa

SEQ ID NO: 125306 - DNA, 60 bp, Artificial
  Synthetic oligonucleotide
acaaggctacttccctgattggcagaactacacaccagggccagggcctagatttccact

SEQ ID NO: 125307 - DNA, 60 bp, Artificial
  Synthetic oligonucleotide
ctgtgataaatgtcagctaaaaggggaagccatgcatggacaagtagactgtagtccagg

SEQ ID NO: 125308 - DNA, 60 bp, Artificial
  Synthetic oligonucleotide
ggccttcagcccagaagtaatacccatgttttcagcattatcagaaggagccaccccaca

SEQ ID NO: 125309 - DNA, 60 bp, Artificial
  Synthetic oligonucleotide
gcccagagataatacccatgtttacagcattatcagaaggagccaccccacaagatttaa

SEQ ID NO: 125310 - DNA, 60 bp, Artificial
  Synthetic oligonucleotide
caaaattttcgggtttattacagggacagcagagatccagtttggaaaggaccagcaaag

SEQ ID NO: 125311 - DNA, 60 bp, Artificial
  Synthetic oligonucleotide
caaaattttcgggtttattacagggacagcagagatccactttggaaaggaccagcaaag

SEQ ID NO: 125312 - DNA, 60 bp, Artificial
  Synthetic oligonucleotide
gaaggctttcagcccagaagtaatacccatgtttacagcattatcagaaggagccacccc

SEQ ID NO: 125313 - DNA, 60 bp, Artificial
  Synthetic oligonucleotide
aaatagtaagaatgtatagccctaccagcattctggacataagacaaggaccaaaagaac

SEQ ID NO: 125314 - DNA, 55 bp, Artificial
  Synthetic oligonucleotide
tatggaaaacagatggcaggtgatgattgtgtggcaagtagacaggatgaggatt

SEQ ID NO: 125315 - DNA, 60 bp, Artificial
  Synthetic oligonucleotide
ctagtacccttcaggaacaaataggatggatgacaaataatccacctatcccagtaggag

SEQ ID NO: 125316 - DNA, 60 bp, Artificial
  Synthetic oligonucleotide
agtattagtaggacctacacctgtcaacataattggaagaaatctgttgactcagattgg

SEQ ID NO: 125317 - DNA, 60 bp, Artificial
  Synthetic oligonucleotide
agtcttagtaggacctacacctgtcaacataattggaagaaatctgttgactcagattgg

SEQ ID NO: 125318 - DNA, 60 bp, Artificial
  Synthetic oligonucleotide
tatggaaaacagatggcaggtgatgattgtgtggcaagtagacaggatgaggattagaac

SEQ ID NO: 125319 - DNA, 50 bp, Artificial
  Synthetic oligonucleotide
tagtacccttcaggaacaaataggatggatgacaaataatccacctatcc

SEQ ID NO: 125320 - DNA, 60 bp, Artificial
  Synthetic oligonucleotide
gtcaactaaaaggagaagccatgcatggacaagtagactgtagtccaggaatatggcaat

SEQ ID NO: 125321 - DNA, 60 bp, Artificial
  Synthetic oligonucleotide
gtcagttaaaaggagaagccatgcatggacaagtagactgtagtccaggaatatggcaat

SEQ ID NO: 125322 - DNA, 56 bp, Artificial
  Synthetic oligonucleotide
ttttgactagcggaggctagaaggagagagatgggtgcgagagcgtcagtattaag

SEQ ID NO: 125323 - DNA, 60 bp, Artificial
  Synthetic oligonucleotide
aaattttgactagcggaggctagaaggagagagatgggtgcgagagcgtcagtattaagt

SEQ ID NO: 125324 - DNA, 60 bp, Artificial
  Synthetic oligonucleotide
ggggattggggagtatagtgcaggggaaagaataatagacataatagcaacagacataca

SEQ ID NO: 125325 - DNA, 55 bp, Artificial
  Synthetic oligonucleotide
cagcattatcagaaggagccaccccacaagatttaaacatgatgctaaatatagt

SEQ ID NO: 125326 - DNA, 60 bp, Artificial
  Synthetic oligonucleotide
tcagcattatcagaaggagccaccccacaagatttaaacaccttgctaaacacagtgggg

SEQ ID NO: 125327 - DNA, 60 bp, Artificial
  Synthetic oligonucleotide
ggctttcagcccagaagtaatacccatgttttcagcattatcagaaggagccaccccaca

SEQ ID NO: 125328 - DNA, 60 bp, Artificial
  Synthetic oligonucleotide
ccaaggggaagtgacatagcaggaaccactagtacccttcaggaacaaataggatggatg

SEQ ID NO: 125329 - DNA, 56 bp, Artificial
  Synthetic oligonucleotide
ggggtacagtgcaggggaaagaataatagacataatagcaacagtcatacaaacta

SEQ ID NO: 125330 - DNA, 60 bp, Artificial
  Synthetic oligonucleotide
tcctgggattaaataaaatagtaagaatgtatagccctgccagcattctggatataaaac

SEQ ID NO: 125331 - DNA, 60 bp, Artificial
  Synthetic oligonucleotide
tagggactatggaaaacagatggcaggtgatgattgtgtggcaagtagacaggatgagga

SEQ ID NO: 125332 - DNA, 60 bp, Artificial
  Synthetic oligonucleotide
ctatgggcgcagcgtcaataacgctgacggtacaggccagacaattattgtctggaatag

SEQ ID NO: 125333 - DNA, 60 bp, Artificial
  Synthetic oligonucleotide
gaagaaaagcaaagatcattagggattatggaaaacagatggcaggtgatgattgtgtgg

SEQ ID NO: 125334 - DNA, 60 bp, Artificial
  Synthetic oligonucleotide
gccaagaagaaaagcaaagatcattagggattatggaaaacagatggcaggtgatgattg

SEQ ID NO: 125335 - DNA, 60 bp, Artificial
  Synthetic oligonucleotide
gagaaaagcaaagatcattagggattatggaaaacagatggcaggtgatgattgtgtggc

SEQ ID NO: 125336 - DNA, 60 bp, Artificial
  Synthetic oligonucleotide
cagggattatggaaaacagatggcaggtgatgattgtgtggcaggtagacaggatgagga

SEQ ID NO: 125337 - DNA, 60 bp, Artificial
  Synthetic oligonucleotide
tgaatttgccaggaagatggaaaccaaaaatgatagggggaattggaggttttatcaaag

SEQ ID NO: 125338 - DNA, 60 bp, Artificial
  Synthetic oligonucleotide
ggtacagtattagtaggacctacacctgtcaacataattggaagaaatctgttgactcag

SEQ ID NO: 125339 - DNA, 60 bp, Artificial
  Synthetic oligonucleotide
aaggattatggaaaacagatggcaggtgatgattgtgtggcaggtagacagaatgaggat

SEQ ID NO: 125340 - DNA, 60 bp, Artificial
  Synthetic oligonucleotide
gattattagggattatggaaaacagatggcaggtgatgattgtgtggcaggtagacagga

SEQ ID NO: 125341 - DNA, 60 bp, Artificial
  Synthetic oligonucleotide
gatcattagggattatggaaaacagatggcaggtgatgattgtgtggcaggtagacagga

SEQ ID NO: 125342 - DNA, 60 bp, Artificial
  Synthetic oligonucleotide
ccagtaagaccccaagtgcctctaaggccgataacctataaaagagcatttgacctcagc

SEQ ID NO: 125343 - DNA, 60 bp, Artificial
  Synthetic oligonucleotide
gccacagtctattctggggtacctgtatgggaagatgcaaaaccaacattgttctgtgct

SEQ ID NO: 125344 - DNA, 60 bp, Artificial
  Synthetic oligonucleotide
caagcctgtgttcccacagaccccagtccaaatgaatataagctaaaaaatgtgacagat

SEQ ID NO: 125345 - DNA, 60 bp, Artificial
  Synthetic oligonucleotide
ttatagatttgtaagaccagagtttaaaaccttgtgttcaaatgactttcttgtgtgtac

SEQ ID NO: 125346 - DNA, 60 bp, Artificial
  Synthetic oligonucleotide
caacagttagagccagctctcaagacagggtcagaaagcctgcagtcactctagaacgct

SEQ ID NO: 125347 - DNA, 60 bp, Artificial
  Synthetic oligonucleotide
ccagtaaaactaaaaccaggaataaatagaccaaaagtaaaacaatggcccctatccaga

SEQ ID NO: 125348 - DNA, 60 bp, Artificial
  Synthetic oligonucleotide
cagattcacaatatgtactaagcatcatatcttcccaacctacacagagtgactccccta

SEQ ID NO: 125349 - DNA, 54 bp, Artificial
  Synthetic oligonucleotide
tttaatataggcaagcaaagagctggacagatttgcatgtaatcctgagctact

SEQ ID NO: 125350 - DNA, 60 bp, Artificial
  Synthetic oligonucleotide
ggtgaaagcgtggaacagcctagtgaaataccataaatacaggtctagaaaggccacgga

SEQ ID NO: 125351 - DNA, 60 bp, Artificial
  Synthetic oligonucleotide
ccagtagtagccaaagaaatcattgcaagttgtcctaagtgtcatataagaagggaagca

SEQ ID NO: 125352 - DNA, 60 bp, Artificial
  Synthetic oligonucleotide
agatggcaggtgctgatagtgtggcaagtggacagacagaaggtgaaagcgtggaacagc

SEQ ID NO: 125353 - DNA, 60 bp, Artificial
  Synthetic oligonucleotide
cagataataaagatcctgtaccagagcagtaagtaacgctgatgcatcatcaaggcctgc

SEQ ID NO: 125354 - DNA, 60 bp, Artificial
  Synthetic oligonucleotide
cattcccatacactattgtgctccagcaagatatgccatctttaagtgtaatgaaacaag

SEQ ID NO: 125355 - DNA, 60 bp, Artificial
  Synthetic oligonucleotide
catggcatcaaaccaacagtaagtacccaactaatactaaatggggcactctctaagggg

SEQ ID NO: 125356 - DNA, 60 bp, Artificial
  Synthetic oligonucleotide
agctaatacatctgcattactttacctgttttacagagtcagcaattaggagagccactc

SEQ ID NO: 125357 - DNA, 60 bp, Artificial
  Synthetic oligonucleotide
gacattgctagaacaacaagcaccctgcaagagcaaattcactagactaccaaggctaac

SEQ ID NO: 125358 - DNA, 60 bp, Artificial
  Synthetic oligonucleotide
ttaatagatcactagccaacacccatgtagctctaataactcacccaaagctcttctcca

SEQ ID NO: 125359 - DNA, 60 bp, Artificial
  Synthetic oligonucleotide
gggaggaccaactcataaggctagagtcctagcagaagcaatggcttcagcccagcaaga

SEQ ID NO: 125360 - DNA, 60 bp, Artificial
  Synthetic oligonucleotide
tagatagtaataagactaaacaaaatggtgaaaatgtacagtccagtgagcatcttagat

SEQ ID NO: 125361 - DNA, 60 bp, Artificial
  Synthetic oligonucleotide
catttagatagctatttaagctagtaccagtgtcagaagctaaggcagaagcactaggca

SEQ ID NO: 125362 - DNA, 60 bp, Artificial
  Synthetic oligonucleotide
ggataacctgctaagagcaatacaggcccagcaacacttgctgaggctatctgtatgggg

SEQ ID NO: 125363 - DNA, 60 bp, Artificial
  Synthetic oligonucleotide
caattgttcaaatataaagtagtaagagtaaaaccttttagtgtagcaccaacaaaaatt

SEQ ID NO: 125364 - DNA, 60 bp, Artificial
  Synthetic oligonucleotide
gtacacagacctcaagacaataatcttgtagatttaccacctcttgagcaacttagcctc

SEQ ID NO: 125365 - DNA, 59 bp, Artificial
  Synthetic oligonucleotide
aacaatgctgctatcattgctatctttgtttcacaaagaagggtttggggatctcccat

SEQ ID NO: 125366 - DNA, 60 bp, Artificial
  Synthetic oligonucleotide
gcctgcagtcactctagaacgctatagcagtgctctggtgtgttcataacagatataaag

SEQ ID NO: 125367 - DNA, 60 bp, Artificial
  Synthetic oligonucleotide
ggaaaacacaagctcaaagcagacaggtcaaaattaccctgtagtggcaaatgcacaggg

SEQ ID NO: 125368 - DNA, 60 bp, Artificial
  Synthetic oligonucleotide
tttcctagaaactggctgcaagccttgggacaatacatttatgagacttatggagacact

SEQ ID NO: 125369 - DNA, 60 bp, Artificial
  Synthetic oligonucleotide
cacccagagctcttctccaaagactaaaactgtcaacaggaagactgctgacgctacggg

SEQ ID NO: 125370 - DNA, 60 bp, Artificial
  Synthetic oligonucleotide
ccctgagatcattcctatgtttatggcattgtcagaaggagctactccctatgatgtcaa

SEQ ID NO: 125371 - DNA, 60 bp, Artificial
  Synthetic oligonucleotide
ggcagtgcaggaagtatataacacagattgaccctgaaacagcagacaagctaatacatc

SEQ ID NO: 125372 - DNA, 60 bp, Artificial
  Synthetic oligonucleotide
ctccctatgatgtcaatactatgctaaatgccataagaggacaccaagaggctttacaag

SEQ ID NO: 125373 - DNA, 54 bp, Artificial
  Synthetic oligonucleotide
ctatgggcgcagcgtcaataacgctgacggtacaggccagacaattgttgtctg

SEQ ID NO: 125374 - DNA, 55 bp, Artificial
  Synthetic oligonucleotide
actatgggcgcagcgtcaataacgctgacggtacaggccagacaattgttgtctg

SEQ ID NO: 125375 - DNA, 56 bp, Artificial
  Synthetic oligonucleotide
ggggtacagtgcaggggaaagaataatagacataatagcatcagatatacaaacta

SEQ ID NO: 125376 - DNA, 60 bp, Artificial
  Synthetic oligonucleotide
gtcagctaaaaggagaagccatgcatggacaagtagactgtagtccaggaatatggcagc

SEQ ID NO: 125377 - DNA, 60 bp, Artificial
  Synthetic oligonucleotide
gtcagctaaaaggagaagccatgcatggacaagtagactgtagtccaggaatatggcaat

SEQ ID NO: 125378 - DNA, 60 bp, Artificial
  Synthetic oligonucleotide
gtcagctaaaaggagaagccatgcatggacaagtagactgtagtccaggaatatggcaac

SEQ ID NO: 125379 - DNA, 60 bp, Artificial
  Synthetic oligonucleotide
gatggataatcctgggattaaataaaatagtaagaatgtatagccctaccagcattctgg

SEQ ID NO: 125380 - DNA, 57 bp, Artificial
  Synthetic oligonucleotide
ggggtacagtgcaggggagagaataatagacataatagcaacagacatacaaactaa

SEQ ID NO: 125381 - DNA, 56 bp, Artificial
  Synthetic oligonucleotide
ggggtacagtgcaggggaaagaataatagacataatagcatcagacatacaaacta

SEQ ID NO: 125382 - DNA, 60 bp, Artificial
  Synthetic oligonucleotide
ggggtacagtgcaggggaaagaataatagacataatagcatcagacatacaaactaaaga

SEQ ID NO: 125383 - DNA, 57 bp, Artificial
  Synthetic oligonucleotide
gtaagaatgtatagccctaccagcattctggacataagacaaggaccaaaggaaccc

SEQ ID NO: 125384 - DNA, 60 bp, Artificial
  Synthetic oligonucleotide
aaaggctttcagcccagaagtaatacccatgttttcagcattatcagagggagccacccc

SEQ ID NO: 125385 - DNA, 60 bp, Artificial
  Synthetic oligonucleotide
tatggaaaacagatggcaggtgatgattgtgtggcaggtagacaggatgaggattaacac

SEQ ID NO: 125386 - DNA, 60 bp, Artificial
  Synthetic oligonucleotide
gcagagaccctatttggaaaggaccggcacaactcctgtggaaaggtgagggagcagtag

SEQ ID NO: 125387 - DNA, 60 bp, Artificial
  Synthetic oligonucleotide
aagcctttaaccctgagatcattcctatgtttatggcattgtcagaaggagctactccct

SEQ ID NO: 125388 - DNA, 60 bp, Artificial
  Synthetic oligonucleotide
cctttaacttccctcagatcactctttggcaacgacccctcgtcacaataaagatagggg

SEQ ID NO: 125389 - DNA, 60 bp, Artificial
  Synthetic oligonucleotide
ttacagcattatcagaaggagccaccccacaagatttaaacaccatgttaaataccgtgg

SEQ ID NO: 125390 - DNA, 60 bp, Artificial
  Synthetic oligonucleotide
gaaaacagatggcaggtgatgattgtgtggcaagtagacaggatgaggattagaacatgg

SEQ ID NO: 125391 - DNA, 60 bp, Artificial
  Synthetic oligonucleotide
ggaaaacagatggcaggtgatgattgtgtggcaagtagacaggatgaggattagaacatg

SEQ ID NO: 125392 - DNA, 60 bp, Artificial
  Synthetic oligonucleotide
atcctttagcttccctcagatcactctttggcaacgacccctcgtcacaataaagatagg

SEQ ID NO: 125393 - DNA, 60 bp, Artificial
  Synthetic oligonucleotide
ggctacttccctgattggcagaactacacaccagggccagggcctagatttccactgaca

SEQ ID NO: 125394 - DNA, 60 bp, Artificial
  Synthetic oligonucleotide
ggctacttccctgattggcagaactacacaccagggccagggaccagatttccactgacc

SEQ ID NO: 125395 - DNA, 60 bp, Artificial
  Synthetic oligonucleotide
atacccatgttctcagcattatcagaaggagccaccccacaagatttaaatatgatgctg

SEQ ID NO: 125396 - DNA, 55 bp, Artificial
  Synthetic oligonucleotide
tatggaaaacagatggcaggtgatgattgtgtggcaggtagacagaatgaggatt

SEQ ID NO: 125397 - DNA, 60 bp, Artificial
  Synthetic oligonucleotide
tagtaccaagaagaaaagcaaagatcattagggattatggaaaacagatggcaggtgatg

SEQ ID NO: 125398 - DNA, 60 bp, Artificial
  Synthetic oligonucleotide
ggtacagtattagtaggacctacacctgtcaacataattggaagaaatctgttgactcaa

SEQ ID NO: 125399 - DNA, 60 bp, Artificial
  Synthetic oligonucleotide
cctttagcttccctcagatcactctttggcaacgacccctcgtcacaataaagatagggg

SEQ ID NO: 125400 - DNA, 60 bp, Artificial
  Synthetic oligonucleotide
tgtcagctaaaaggagaagccatgcatggacaagtagactgtagtccaggaatatggcaa

SEQ ID NO: 125401 - DNA, 60 bp, Artificial
  Synthetic oligonucleotide
aatgagtttgccaggaaaatggaaaccaaaaatgatagggggaattggaggttttatcaa

SEQ ID NO: 125402 - DNA, 60 bp, Artificial
  Synthetic oligonucleotide
ccgaggggaagtgacatagcaggaactactagtacccttcaggaacaaataggatggatg

SEQ ID NO: 125403 - DNA, 60 bp, Artificial
  Synthetic oligonucleotide
ccaaggggaagtgatatagcaggaactactagtacccttcaggaacaaataggatggatg

SEQ ID NO: 125404 - DNA, 60 bp, Artificial
  Synthetic oligonucleotide
gggggattgggggatacagtgcaggggaaagaataatagacataatagcaacagacatac

SEQ ID NO: 125405 - DNA, 60 bp, Artificial
  Synthetic oligonucleotide
ggaggctagaaggagagagatgggtgcgagagcgtcagtattaagcgggggagatttaga

SEQ ID NO: 125406 - DNA, 53 bp, Artificial
  Synthetic oligonucleotide
tagcggaggctagaaggagagagatgggtgcgagagcgtcagtaataagcggg

SEQ ID NO: 125407 - DNA, 53 bp, Artificial
  Synthetic oligonucleotide
agcggaggctagaaggagagagatgggtgcgagagcgtcagtattaagcgggg

SEQ ID NO: 125408 - DNA, 60 bp, Artificial
  Synthetic oligonucleotide
aggagaagccatgcatggacaagtagactgtagtccaggaatatggcaattagactgtac

SEQ ID NO: 125409 - DNA, 60 bp, Artificial
  Synthetic oligonucleotide
gggggattggggggtacactgcaggggaaagaataatagacataatagcaacagacatac

SEQ ID NO: 125410 - DNA, 60 bp, Artificial
  Synthetic oligonucleotide
caaaattttcgggtttattacagggacagcagagatccaatttggaaaggaccagcaaaa

SEQ ID NO: 125411 - DNA, 60 bp, Artificial
  Synthetic oligonucleotide
ggggtacagtgcaggggaaagaatagtagacataatagcaacagacatacaaactagaga

SEQ ID NO: 125412 - DNA, 59 bp, Artificial
  Synthetic oligonucleotide
ggggtacagtgcaggggaaagaatagtagacataatagcaacagacatacaaactaaag

SEQ ID NO: 125413 - DNA, 60 bp, Artificial
  Synthetic oligonucleotide
cagatggcaggtgatgattgtgtggcaagtagacaggatgaggattagaacatggaatag

SEQ ID NO: 125414 - DNA, 60 bp, Artificial
  Synthetic oligonucleotide
ccctgtaagcattttggatataaaacaagggccaaaagaaccctttagagattatgtaga

SEQ ID NO: 125415 - DNA, 60 bp, Artificial
  Synthetic oligonucleotide
ttatggaaaacagatggcaggtgatgattgtgtggcaggtagacaggatgaggattaaca

SEQ ID NO: 125416 - DNA, 58 bp, Artificial
  Synthetic oligonucleotide
acagcattatcagaaggagccaccccacaagatttaaacaccatgttaaatacggtgg

SEQ ID NO: 125417 - DNA, 60 bp, Artificial
  Synthetic oligonucleotide
cctcagacccttttagttagcgtagaaaatctctagcagtggcgcccgaacagggactcg

SEQ ID NO: 125418 - DNA, 58 bp, Artificial
  Synthetic oligonucleotide
ttttgactagcggaggctagaaggagagagatgggtgcgagagcgtcaatattaagcg

SEQ ID NO: 125419 - DNA, 58 bp, Artificial
  Synthetic oligonucleotide
ttttgactagcggaggctagaaggagagagatgggtgcgagagcgtctatattttgcg

SEQ ID NO: 125420 - DNA, 58 bp, Artificial
  Synthetic oligonucleotide
aaaattttgactagcggaggctagaaggagagagatgggtgcgagagcgtcagtatta

SEQ ID NO: 125421 - DNA, 60 bp, Artificial
  Synthetic oligonucleotide
aattttgactagcggaggctagaaggagagagatgggtgcgagagcgtcaatattaagcg

SEQ ID NO: 125422 - DNA, 60 bp, Artificial
  Synthetic oligonucleotide
aattttgactagcggaggctagaaggagagagatgggtgcgagagcgtcggtattaagcg

SEQ ID NO: 125423 - DNA, 58 bp, Artificial
  Synthetic oligonucleotide
ttttgactagcggaggctagaaggagagagatgggtgcgagagcgtcggtattaagcg

SEQ ID NO: 125424 - DNA, 60 bp, Artificial
  Synthetic oligonucleotide
aattttgactagcggaggctagaaggagagagatgggtgcgagagcgtccgtattaagcg

SEQ ID NO: 125425 - DNA, 57 bp, Artificial
  Synthetic oligonucleotide
ttttgactagcggaggctagaaggagagagatgggtgcgagagcgtcaatattgagc

SEQ ID NO: 125426 - DNA, 60 bp, Artificial
  Synthetic oligonucleotide
gggcgcagcgtcaataacgctgacggtacaggccagacaattgttgtttggtatagtgca

SEQ ID NO: 125427 - DNA, 60 bp, Artificial
  Synthetic oligonucleotide
gaaaacagatggcaggtgatgattgtgtggcaagtagagaggatgaggattaacacatgg

SEQ ID NO: 125428 - DNA, 60 bp, Artificial
  Synthetic oligonucleotide
aaagcaaagatcattagagattatggaaaacagatggcaggtgatgattgtgtggcaagt

SEQ ID NO: 125429 - DNA, 60 bp, Artificial
  Synthetic oligonucleotide
tcagaaggagccaccccacaagatttaaacaccatgctaaacacagtggggggacatcaa

SEQ ID NO: 125430 - DNA, 60 bp, Artificial
  Synthetic oligonucleotide
aaaccaaaaatgatagggggaattggaggttttatcaaagtaaaacagtatgagaacata

SEQ ID NO: 125431 - DNA, 60 bp, Artificial
  Synthetic oligonucleotide
cctcagaccatcttagtcagtgtggaaaatctctagcagtggcgcccgaacagggacttg

SEQ ID NO: 125432 - DNA, 60 bp, Artificial
  Synthetic oligonucleotide
cctagtacaaataatgagacaccagggattagatatcagtacaatgtgcttccacagggc

SEQ ID NO: 125433 - DNA, 54 bp, Artificial
  Synthetic oligonucleotide
ctatgggcgcagcgtcaataacgctgacggtacaggccggacaattattgtctg

SEQ ID NO: 125434 - DNA, 57 bp, Artificial
  Synthetic oligonucleotide
aaaataattagagattatggaaaacagatggcaggtgatggttgtgtggcaagtgga

SEQ ID NO: 125435 - DNA, 60 bp, Artificial
  Synthetic oligonucleotide
gataaagcccaagaagagcatgaaagatatcacaacaattggagggcaatggcgagtgat

SEQ ID NO: 125436 - DNA, 57 bp, Artificial
  Synthetic oligonucleotide
gcaggaatttggaattccctacaatccccaaagtcaaggagtggtagaatctatgaa

SEQ ID NO: 125437 - DNA, 60 bp, Artificial
  Synthetic oligonucleotide
ggggggattggggggtacagtgcaggggaaagaatagtagacataatagcaacagacata

SEQ ID NO: 125438 - DNA, 60 bp, Artificial
  Synthetic oligonucleotide
ccaccccacaagatttaaataccatgctaaacacagtggggggacatcaagcagccatgc

SEQ ID NO: 125439 - DNA, 60 bp, Artificial
  Synthetic oligonucleotide
agatggaaaccaaaaatgatagggggaattggaggttttatcaaagtaagacagtatgat

SEQ ID NO: 125440 - DNA, 53 bp, Artificial
  Synthetic oligonucleotide
gtaaaattaaagccaggaatggatggcccaaaagttaaacagtggccattgac

SEQ ID NO: 125441 - DNA, 53 bp, Artificial
  Synthetic oligonucleotide
gtaaaattaaagccaggaatggatggcccaaaagttaaacagtggccattaac

SEQ ID NO: 125442 - DNA, 60 bp, Artificial
  Synthetic oligonucleotide
ataatgagacaccagggattagatatcagtacaatgtgcttccacagggatggaaaggat

SEQ ID NO: 125443 - DNA, 60 bp, Artificial
  Synthetic oligonucleotide
gggattatggaaaacagatggcaggtgatgattgtgtggcaagtacacgggatgaggatt

SEQ ID NO: 125444 - DNA, 60 bp, Artificial
  Synthetic oligonucleotide
ggaaaacagatggcaggtgatgattgtgtggcaagtacacaggatgaggattaacacatg

SEQ ID NO: 125445 - DNA, 60 bp, Artificial
  Synthetic oligonucleotide
atagcaggaactactagtacccttcaggaacaaatagcatggatgacaagcaacccacct

SEQ ID NO: 125446 - DNA, 60 bp, Artificial
  Synthetic oligonucleotide
gatttcagagaacttaataagagaactcaagacttctgggaagttcaattaggaatacca

SEQ ID NO: 125447 - DNA, 60 bp, Artificial
  Synthetic oligonucleotide
aaaaggagaagccatacatggacaagtagactgtagtccaggaatatggcaattagactg

SEQ ID NO: 125448 - DNA, 60 bp, Artificial
  Synthetic oligonucleotide
gccagataaaaggagaagccatacatggacaagtagactgtagtccaggaatatggcaat

SEQ ID NO: 125449 - DNA, 60 bp, Artificial
  Synthetic oligonucleotide
gggggattggggggtacagtgcaggggagagaataatagacataatagcaacagacatac

SEQ ID NO: 125450 - DNA, 54 bp, Artificial
  Synthetic oligonucleotide
gacaaggaccaaaagaaccctttagagattatgtagaccggttctataaaactc

SEQ ID NO: 125451 - DNA, 60 bp, Artificial
  Synthetic oligonucleotide
aacaatgagacaccagggattagatatcagtacaatgtgcttccacagggatggaaagga

SEQ ID NO: 125452 - DNA, 55 bp, Artificial
  Synthetic oligonucleotide
ggggtacagtgcaggggagagaataatagacataatagcaacagacatacaaact

SEQ ID NO: 125453 - DNA, 60 bp, Artificial
  Synthetic oligonucleotide
gggtctaccacacacaaggctacttccctgattggcagaactacacaccagggccaggga

SEQ ID NO: 125454 - DNA, 60 bp, Artificial
  Synthetic oligonucleotide
ggaaaacagatggcaggtgatgattgtgtggcaggtagacaggatgaggattaatacatg

SEQ ID NO: 125455 - DNA, 60 bp, Artificial
  Synthetic oligonucleotide
cttttagcccagaggtaatacccatgttcacagcattatcagaaggagccaccccacaag

SEQ ID NO: 125456 - DNA, 60 bp, Artificial
  Synthetic oligonucleotide
ccctgtaagcattttggatatcaaacaagggccaaaagaaccctttagagattatgtaga

SEQ ID NO: 125457 - DNA, 60 bp, Artificial
  Synthetic oligonucleotide
gatacaggagcagatgatacagtattagaagaaatgtgtttgccaggaagatggaaacca

SEQ ID NO: 125458 - DNA, 60 bp, Artificial
  Synthetic oligonucleotide
gtcaactaaaaggagaagccatgcatggacaagtagactgtagtccaggaatatggcaac

SEQ ID NO: 125459 - DNA, 59 bp, Artificial
  Synthetic oligonucleotide
gtaccagtaaaattaaagccaggaatggatggcccaaaagtgaaacaatggccattgac

SEQ ID NO: 125460 - DNA, 60 bp, Artificial
  Synthetic oligonucleotide
gggtctacaacacacaaggctacttccctgactggcagaactacacaccagggccagggg

SEQ ID NO: 125461 - DNA, 60 bp, Artificial
  Synthetic oligonucleotide
gaaaacagatggcaggtgatgattgtgtggcaagtagacaggatgaggattagtacatgg

SEQ ID NO: 125462 - DNA, 60 bp, Artificial
  Synthetic oligonucleotide
gatcagtttatgggatcaaagcctaaagccatgtgtaaaattaaccccactctgtgttac

SEQ ID NO: 125463 - DNA, 60 bp, Artificial
  Synthetic oligonucleotide
gatacaggagcagatgatacagtattagaagaaatgaatttgccaggaagatggaagcca

SEQ ID NO: 125464 - DNA, 60 bp, Artificial
  Synthetic oligonucleotide
gagatccctcagacccttttagttagcgtagaaaatctctagcagtggcgcccgaacaga

SEQ ID NO: 125465 - DNA, 60 bp, Artificial
  Synthetic oligonucleotide
tgagataccagggattagatatcagtacaatgtgcttccacagggatggaaaggatcacc

SEQ ID NO: 125466 - DNA, 60 bp, Artificial
  Synthetic oligonucleotide
tggagaaaattagtagatttcagagaacttaataagagaactcaagacttctgggaagtc

SEQ ID NO: 125467 - DNA, 60 bp, Artificial
  Synthetic oligonucleotide
tcattagagattatggaaaacagatggcaggtgatgattgtgtggcaagtagacaggatg

SEQ ID NO: 125468 - DNA, 60 bp, Artificial
  Synthetic oligonucleotide
gggggattggggggtacagtgcaggggaaagaatagtagacataatagcaacaggcatac

SEQ ID NO: 125469 - DNA, 60 bp, Artificial
  Synthetic oligonucleotide
tagggattatggaaaacagatggcaggtgatgattgtgtggcaagtagacaggatgagga

SEQ ID NO: 125470 - DNA, 60 bp, Artificial
  Synthetic oligonucleotide
tgtgactagcggaggctagaaggagagagatgggtgcgagagcgtcagtattaagcgggg

SEQ ID NO: 125471 - DNA, 60 bp, Artificial
  Synthetic oligonucleotide
gctttagtccagaagtaatacccatgtttacagcattatcagaaggagccaccccacaag

SEQ ID NO: 125472 - DNA, 60 bp, Artificial
  Synthetic oligonucleotide
ccaaagggaagtgacatagcaggaactactagtacccttcaggaacaaataagatagatg

SEQ ID NO: 125473 - DNA, 60 bp, Artificial
  Synthetic oligonucleotide
ggcatagataaagcccaagaagagcatgaaagatatcacagcaattggagagcaatggct

SEQ ID NO: 125474 - DNA, 53 bp, Artificial
  Synthetic oligonucleotide
agcagaggctagaaggagagagatgggtgcgagagcgtcagtattaagcgggg

SEQ ID NO: 125475 - DNA, 55 bp, Artificial
  Synthetic oligonucleotide
ttttgactagcagaggctagaaggagagagatgggtgcgagagcgtcagtattaa

SEQ ID NO: 125476 - DNA, 60 bp, Artificial
  Synthetic oligonucleotide
ggtgagtacgccaaaatttttgactagcggaggctagaaggagagagatgggtgcgagag

SEQ ID NO: 125477 - DNA, 60 bp, Artificial
  Synthetic oligonucleotide
tagagatccctcagacccttttagttagcgtagaaaatctctagcagtggcgcccgaaca

SEQ ID NO: 125478 - DNA, 60 bp, Artificial
  Synthetic oligonucleotide
cagcactatcagaaggagccaccccacaagatttaaacaccatgttaaatacagtagggg

SEQ ID NO: 125479 - DNA, 60 bp, Artificial
  Synthetic oligonucleotide
tggaaaccaaaaatgatagggggaattggaggttttatcaaagtaagacagtatgatcag

SEQ ID NO: 125480 - DNA, 54 bp, Artificial
  Synthetic oligonucleotide
ttatcagaaggagccaccccacaagatttaaataccatgctaaacaccgtgggg

SEQ ID NO: 125481 - DNA, 60 bp, Artificial
  Synthetic oligonucleotide
aagcaaaaataattagagattatggaaaacagatggcaggtgatggttgtgtggcaagtg

SEQ ID NO: 125482 - DNA, 60 bp, Artificial
  Synthetic oligonucleotide
gtcccacgtaggaaagcaaaaataattagagattatggaaaacagatggcaggtgatggt

SEQ ID NO: 125483 - DNA, 60 bp, Artificial
  Synthetic oligonucleotide
cgcctaaaattttgactagcggaggctagaaggagagagatgggtgcgagagcgtcagta

SEQ ID NO: 125484 - DNA, 60 bp, Artificial
  Synthetic oligonucleotide
accaaaaatgatagggggaattggaggttttatcaaagtaagacagtatgatcagatacc

SEQ ID NO: 125485 - DNA, 60 bp, Artificial
  Synthetic oligonucleotide
cagctccaggcaagagtcctggctgtggaaagatacctaaaggatcaacagctcctgggg

SEQ ID NO: 125486 - DNA, 60 bp, Artificial
  Synthetic oligonucleotide
cagctccaggcaagagtcctggctgtggaaagatacctaaaggatcaacagctcctagga

SEQ ID NO: 125487 - DNA, 60 bp, Artificial
  Synthetic oligonucleotide
acagctccaggcaagagtcctggctgtggaaagatacctaaaggatcaacagctcctagg

SEQ ID NO: 125488 - DNA, 55 bp, Artificial
  Synthetic oligonucleotide
gcaggtggaagccaaaaatgatagggggaattggaggttttatcaaagtaagaca

SEQ ID NO: 125489 - DNA, 60 bp, Artificial
  Synthetic oligonucleotide
ccaaggggaagtgatatagcaggaactactagtacccttcaggaacaaatagcatggatg

SEQ ID NO: 125490 - DNA, 60 bp, Artificial
  Synthetic oligonucleotide
agaaatgaatttgccaggaagatggaaaccaaaaatgatagggggaattggaggttttat

SEQ ID NO: 125491 - DNA, 55 bp, Artificial
  Synthetic oligonucleotide
aagcccaagaagagcatgaaagatatcacagcaattggagagcaatggctagtga

SEQ ID NO: 125492 - DNA, 57 bp, Artificial
  Synthetic oligonucleotide
gactagcggaggctagaaggagagagatgggtgcgagagcgtcagtattacgcgggg

SEQ ID NO: 125493 - DNA, 57 bp, Artificial
  Synthetic oligonucleotide
acaggaatttggaattccctacaatccccaaagtcaaggagtagtagaatctatgaa

SEQ ID NO: 125494 - DNA, 60 bp, Artificial
  Synthetic oligonucleotide
cagcagggagcactatgggcgcagcgtcaataacgctgacggtacaggcccggacattat

SEQ ID NO: 125495 - DNA, 60 bp, Artificial
  Synthetic oligonucleotide
cagcagggagcactatgggcgcagcgtcaataacgctgacggtacaggcccggaacttat

SEQ ID NO: 125496 - DNA, 60 bp, Artificial
  Synthetic oligonucleotide
agatacaggagcagatgatacagtattagaagaaatagagttgccaggaagatggaaacc

SEQ ID NO: 125497 - DNA, 60 bp, Artificial
  Synthetic oligonucleotide
tgtcagcacagtacaatgtacacatggaattaggccagtagtgtcaactcaactgctgtt

SEQ ID NO: 125498 - DNA, 60 bp, Artificial
  Synthetic oligonucleotide
gtcagcacagtacaatgtacacatggaattaggccagtagtgtcaactcaactgctgtta

SEQ ID NO: 125499 - DNA, 60 bp, Artificial
  Synthetic oligonucleotide
tcttgggattaaataaaatagtaagaatgtatagccctaccagcattctggacataaaac

SEQ ID NO: 125500 - DNA, 55 bp, Artificial
  Synthetic oligonucleotide
tggcatagataaagcccaagaagagcatgaaagatatcacagcaattggaaagca

SEQ ID NO: 125501 - DNA, 60 bp, Artificial
  Synthetic oligonucleotide
agatcattagggattatggaaaacagatggcaggtgatgattgtgtggcaagtagacagg

SEQ ID NO: 125502 - DNA, 57 bp, Artificial
  Synthetic oligonucleotide
aggaactactagtacccttcaggaacaaatagcatggatgacaggtaatccacctat

SEQ ID NO: 125503 - DNA, 60 bp, Artificial
  Synthetic oligonucleotide
ttctgggattaaataaaatagtaagaatgtatagccctaccagcattctggacataagac

SEQ ID NO: 125504 - DNA, 59 bp, Artificial
  Synthetic oligonucleotide
ggaagcactatgggcgcagcgtcaataacgctgacggtacaggccagacaattattgtc

SEQ ID NO: 125505 - DNA, 60 bp, Artificial
  Synthetic oligonucleotide
gataccagggattagatatcagtacaatgtgcttccacagggatggaaaggatcaccagc

SEQ ID NO: 125506 - DNA, 60 bp, Artificial
  Synthetic oligonucleotide
ggagcagcaggaagcactatgggcgcagcgtcaataacgctgacggtacaggccagacaa

SEQ ID NO: 125507 - DNA, 60 bp, Artificial
  Synthetic oligonucleotide
tcagcgttatcagaaggagccaccccacaagatttaaataccatgctaaacacagtgggg

SEQ ID NO: 125508 - DNA, 60 bp, Artificial
  Synthetic oligonucleotide
gagatccctcaggcgcttttagtcagtgtggaaaatctctagcagtggcgcccgaacagg

SEQ ID NO: 125509 - DNA, 60 bp, Artificial
  Synthetic oligonucleotide
catgaaagatatcacagtaactggagagcaatggctagtgattttaacctgccacctgtg

SEQ ID NO: 125510 - DNA, 60 bp, Artificial
  Synthetic oligonucleotide
aggaagatggaaaccaaaaatgatagggggaattggaggttttatcaaagtaagacagta

SEQ ID NO: 125511 - DNA, 60 bp, Artificial
  Synthetic oligonucleotide
gatccctcagaccacttgggctgagtagaaaatctctagcagtggcgcccgaacagggac

SEQ ID NO: 125512 - DNA, 60 bp, Artificial
  Synthetic oligonucleotide
cccatgttttcagcattatcagaaggagccaccccacaagatttaaacaccatgctaaac

SEQ ID NO: 125513 - DNA, 60 bp, Artificial
  Synthetic oligonucleotide
gaagagaaggctttcagcccagaagtaatacccatgttttcagcattatcagaaggagcc

SEQ ID NO: 125514 - DNA, 60 bp, Artificial
  Synthetic oligonucleotide
tcagcattatcagaaggagccaccccacaagatttaaatacaatgttaaacacagtgggg

SEQ ID NO: 125515 - DNA, 60 bp, Artificial
  Synthetic oligonucleotide
gacataagacaaggaccaaaagaaccctttagagattatgtagaccggttctataaaact

SEQ ID NO: 125516 - DNA, 57 bp, Artificial
  Synthetic oligonucleotide
tgtcagcattctagagatcgagcaaggaccaaaagaaccctttagagattatgtaga

SEQ ID NO: 125517 - DNA, 60 bp, Artificial
  Synthetic oligonucleotide
ggcatagacaaagcccaagaagagcatgaaagatatcacagcaattggagagcaatggct

SEQ ID NO: 125518 - DNA, 60 bp, Artificial
  Synthetic oligonucleotide
ggtctaccacacacaaggctacttccctgattggcagaactacacaccagggccagggac

SEQ ID NO: 125519 - DNA, 60 bp, Artificial
  Synthetic oligonucleotide
ttacagcattatcagaaggagccaccccacaagatttaaacaccatgttaaatacagtgg

SEQ ID NO: 125520 - DNA, 60 bp, Artificial
  Synthetic oligonucleotide
gggcgcagcgtcaataacgctgacggtacaggtcaggcaattactgtctggcatagtgca

SEQ ID NO: 125521 - DNA, 60 bp, Artificial
  Synthetic oligonucleotide
gcaggaatttggaattccctacaatccccaaagtcaaggagtagtagaatctatgaataa

SEQ ID NO: 125522 - DNA, 60 bp, Artificial
  Synthetic oligonucleotide
ccaaggggaagtgacatagcaggaactactagtacccttcaggaacaaataggatgggtg

SEQ ID NO: 125523 - DNA, 60 bp, Artificial
  Synthetic oligonucleotide
ccaaagggaagtgacatagcaggaactactagtacccttcaggaacaaatagcatagatg

SEQ ID NO: 125524 - DNA, 60 bp, Artificial
  Synthetic oligonucleotide
ccaaggggaagtgacatagcaggaactactagtacccttcaggaacaaatagggtggatg

SEQ ID NO: 125525 - DNA, 51 bp, Artificial
  Synthetic oligonucleotide
gtaaaattaaagccaggaatggatggcccaaaggttaaacaatggccattg

SEQ ID NO: 125526 - DNA, 53 bp, Artificial
  Synthetic oligonucleotide
gtaaaattaaagccaggaatggatggcccaaaggttaaacagtggccattgac

SEQ ID NO: 125527 - DNA, 54 bp, Artificial
  Synthetic oligonucleotide
ctatgggcgcagcgtcaataacgctgacggtacaagccagactattattgtctg

SEQ ID NO: 125528 - DNA, 60 bp, Artificial
  Synthetic oligonucleotide
tttcagcattatcagaaggagccaccccacaagatttaaacaccatgttaaatacagtgg

SEQ ID NO: 125529 - DNA, 60 bp, Artificial
  Synthetic oligonucleotide
gccagctaaaaggggaagccatgcatggacaagtagactgtagtccagggatatggcaaa

SEQ ID NO: 125530 - DNA, 60 bp, Artificial
  Synthetic oligonucleotide
ctaaatggagaaaattagtagatttcagagagctcaataaaagaactcaagacttctggg

SEQ ID NO: 125531 - DNA, 60 bp, Artificial
  Synthetic oligonucleotide
tagtgccaagaagaaaagcaaagatcattagagattatggaaaacagatggcaggtgatg

SEQ ID NO: 125532 - DNA, 60 bp, Artificial
  Synthetic oligonucleotide
gactggtgagtacgctaaaaattttgactagcggaggctagaaggagagagatgggtgcg

SEQ ID NO: 125533 - DNA, 60 bp, Artificial
  Synthetic oligonucleotide
aattttgactagcggaggctagaaggagagagataggtgcgagagcgtcagtattaagcg

SEQ ID NO: 125534 - DNA, 60 bp, Artificial
  Synthetic oligonucleotide
ggggaagtgacatagcaggaactactagtacccttcaggaacaaatagggtggatgacac

SEQ ID NO: 125535 - DNA, 53 bp, Artificial
  Synthetic oligonucleotide
gtaaaattaaagccaggaatggatggcccaagagttaaacaatggccattgac

SEQ ID NO: 125536 - DNA, 60 bp, Artificial
  Synthetic oligonucleotide
gagccaaggggaagtgatatagcaggaactactagtacccttcaggaacaaataggatgg

SEQ ID NO: 125537 - DNA, 60 bp, Artificial
  Synthetic oligonucleotide
ccaaggggaagtgatatagcaggaactactagtacccttcaggaacaaataggatgggtg

SEQ ID NO: 125538 - DNA, 60 bp, Artificial
  Synthetic oligonucleotide
ctttcagcccagaagtaatacccatgttttcagcattatcagaaggagccaccccacagg

SEQ ID NO: 125539 - DNA, 60 bp, Artificial
  Synthetic oligonucleotide
cagggccagggatcagatatccactgacctttggatggtgcttcaagctagtaccagttg

SEQ ID NO: 125540 - DNA, 60 bp, Artificial
  Synthetic oligonucleotide
ggagaaaattagtagatttcagagaacttaataagagaactcaagacttctgggaagttc

SEQ ID NO: 125541 - DNA, 60 bp, Artificial
  Synthetic oligonucleotide
gggtctacaatacacaaggctacttccctgattggcagaactacacaccagggccagggg

SEQ ID NO: 125542 - DNA, 60 bp, Artificial
  Synthetic oligonucleotide
gcattctggacataagacaaggaccaaaagaaccctttagagattatgtagaccggttct

SEQ ID NO: 125543 - DNA, 53 bp, Artificial
  Synthetic oligonucleotide
gtaaaattaaagccaggaatggatggcccaaaagtgaaacagtggccattgac

SEQ ID NO: 125544 - DNA, 53 bp, Artificial
  Synthetic oligonucleotide
gtaaaattaaagccaggaatggatggcccaagagttaaacaatggccgttgac

SEQ ID NO: 125545 - DNA, 60 bp, Artificial
  Synthetic oligonucleotide
ggtctaccatacacaaggctacttccctgattggcagaactacacaccagggccagggac

SEQ ID NO: 125546 - DNA, 60 bp, Artificial
  Synthetic oligonucleotide
ggaaaacagatggcaggtgatgattgtgtggcaagtagacaggatgaggattaacacatg

SEQ ID NO: 125547 - DNA, 60 bp, Artificial
  Synthetic oligonucleotide
cctagtataaataatgagacaccagggattagatatcagtacaatgtgcttccacaggga

SEQ ID NO: 125548 - DNA, 60 bp, Artificial
  Synthetic oligonucleotide
tttcagcactatcagaaggagccaccccacaagatttaaataccatgttaaattcagtgg

SEQ ID NO: 125549 - DNA, 63 bp, Artificial
  Synthetic oligonucleotide
gcaccaaatggagaaaattagtagatttcagagaattaaataaaaggacccaagacttttggg

SEQ ID NO: 125550 - DNA, 54 bp, Artificial
  Synthetic oligonucleotide
tagcggaggctagaaggagagagatgggtgcgagagcgtcaattttaagagggg

SEQ ID NO: 125551 - DNA, 60 bp, Artificial
  Synthetic oligonucleotide
ggctagtgattttaacctgccacctatagtagcaaaagaaatagtagccagctgtgacaa

SEQ ID NO: 125552 - DNA, 55 bp, Artificial
  Synthetic oligonucleotide
ttttgactagcggaggctagaaggagagagatgggtgcgagagcgtcagtattaa

SEQ ID NO: 125553 - DNA, 51 bp, Artificial
  Synthetic oligonucleotide
ttttgactagcggaggctagaaggagagagatgggtgcgagagcgtcagta

SEQ ID NO: 125554 - DNA, 58 bp, Artificial
  Synthetic oligonucleotide
ttttgactagcggaggctagaaggagagagatgggtgcgagagcgtcggtaataagcg

SEQ ID NO: 125555 - DNA, 60 bp, Artificial
  Synthetic oligonucleotide
tttgactagcggaggctagaaggagagagatgggtgcgagagcgtcagtgttaagcgggg

SEQ ID NO: 125556 - DNA, 60 bp, Artificial
  Synthetic oligonucleotide
tttgactagcggaggctagaaggagagagatgggtgcgagagcgtcaatattaagcgggg

SEQ ID NO: 125557 - DNA, 60 bp, Artificial
  Synthetic oligonucleotide
ttcagcatattcagaaggagccaccccacaagatttaaacaccatgctaaacacagtggg

SEQ ID NO: 125558 - DNA, 60 bp, Artificial
  Synthetic oligonucleotide
aattttcgggtttattacagggacagcagagacccactttggaaaggaccagcaaagctt

SEQ ID NO: 125559 - DNA, 60 bp, Artificial
  Synthetic oligonucleotide
atcctttaacttccctcagatcactctttggcaacgacccctcgtcacaataaagatagg

SEQ ID NO: 125560 - DNA, 60 bp, Artificial
  Synthetic oligonucleotide
gatccctcagaccatctggactgagtagaaaatctctagcagtggcgcccgaacagggac

SEQ ID NO: 125561 - DNA, 55 bp, Artificial
  Synthetic oligonucleotide
cggaggctagaaggagagagatgggtgcgagagcgtcagtattacgaggcgaaaa

SEQ ID NO: 125562 - DNA, 60 bp, Artificial
  Synthetic oligonucleotide
gaacccatagcaggagcagaaactttctatgtagatggagcagctaatagggagactaag

SEQ ID NO: 125563 - DNA, 60 bp, Artificial
  Synthetic oligonucleotide
gggcctattccaccaggccagatgagggaaccaaggggaagtgacatagcaggaactact

SEQ ID NO: 125564 - DNA, 60 bp, Artificial
  Synthetic oligonucleotide
gggattcttccctgattggcagaactacacaccagggccaggaactagattcccactgac

SEQ ID NO: 125565 - DNA, 60 bp, Artificial
  Synthetic oligonucleotide
ctatgggcgcggcgtcaataacgctgacggtacaggccagacaactgttgtttggtatag

SEQ ID NO: 125566 - DNA, 60 bp, Artificial
  Synthetic oligonucleotide
ttgttgtctggtatagtgcaacagcaaagcaatttgctgagagctatagaggcgcaacag

SEQ ID NO: 125567 - DNA, 60 bp, Artificial
  Synthetic oligonucleotide
acaggccagacaattgttgtctggtatagtgcaacagcaaagcaatttgctgagggctat

SEQ ID NO: 125568 - DNA, 60 bp, Artificial
  Synthetic oligonucleotide
ttctgggattaaataaaatagtaagaatgtatagccctgtcagcattttggacataaaac

SEQ ID NO: 125569 - DNA, 60 bp, Artificial
  Synthetic oligonucleotide
cagctcctaggactttggggctgctctggaaaactcatctgcaccactgctgtgccttgg

SEQ ID NO: 125570 - DNA, 60 bp, Artificial
  Synthetic oligonucleotide
cagctcctaggactttggggctgctctggaaaactcatctgcaccactactgtgccctgg

SEQ ID NO: 125571 - DNA, 60 bp, Artificial
  Synthetic oligonucleotide
ttattgtctggtatagtgcaacagcaaagcaatttgctgagggctatagaggcgcagcag

SEQ ID NO: 125572 - DNA, 60 bp, Artificial
  Synthetic oligonucleotide
ttgccttgagtgagaagcagtgtgtgctcatctgttcaaccctggtaactagagatccct

SEQ ID NO: 125573 - DNA, 60 bp, Artificial
  Synthetic oligonucleotide
aaaacaatggcccctatctaaagaaaaaatagaagccttaacagcaatatgtcaggaaat

SEQ ID NO: 125574 - DNA, 52 bp, Artificial
  Synthetic oligonucleotide
gagaccaccaatcaaaaggctgaattaatggcagtactaatagcattacagg

SEQ ID NO: 125575 - DNA, 51 bp, Artificial
  Synthetic oligonucleotide
atctgtatggggtatcagacaactccgagctcgcctgctagccttagaaac

SEQ ID NO: 125576 - DNA, 60 bp, Artificial
  Synthetic oligonucleotide
gaacattaggcagggatatcaacccctctcgttgcagatccccaaccaccaccaagggga

SEQ ID NO: 125577 - DNA, 60 bp, Artificial
  Synthetic oligonucleotide
ggtatagtgcaacagcaaagcaatttgctgagagctatagaggcgcaacagcacatgttg

SEQ ID NO: 125578 - DNA, 60 bp, Artificial
  Synthetic oligonucleotide
ctatgggcgcagcgtcaataacgctgacggtacaggccagacaattgttgtctggtatag

SEQ ID NO: 125579 - DNA, 60 bp, Artificial
  Synthetic oligonucleotide
ggcttcttccctgattggcagaactacacaccagggccagggaccagattcccacttaca

SEQ ID NO: 125580 - DNA, 60 bp, Artificial
  Synthetic oligonucleotide
caggactaggttgtacactaaatttccctataagccccatagccccagtgccagtaagac

SEQ ID NO: 125581 - DNA, 60 bp, Artificial
  Synthetic oligonucleotide
caggattaggttgtacactaaatttccctataagccccatagccccagtgccagtaaaac

SEQ ID NO: 125582 - DNA, 60 bp, Artificial
  Synthetic oligonucleotide
tagagaaatttgggaagcatggtgggcggactattggcaagccacctggattccagaatg

SEQ ID NO: 125583 - DNA, 60 bp, Artificial
  Synthetic oligonucleotide
gaggagaccaccaatcaaaaggctgaattaatggcagtattattagccctacaggattcc

SEQ ID NO: 125584 - DNA, 60 bp, Artificial
  Synthetic oligonucleotide
gcaaagaatgctgctatcattgctatgtttgtttcacaagcaagggtttgggaatctcct

SEQ ID NO: 125585 - DNA, 58 bp, Artificial
  Synthetic oligonucleotide
aaaatgctgctatcattgctatgtttgtttcacaagcaagggtttgggaatctcctat

SEQ ID NO: 125586 - DNA, 60 bp, Artificial
  Synthetic oligonucleotide
atgctgctatcattgctatgtttgtttcacaagcaagggtttgggaatctcctatggcag

SEQ ID NO: 125587 - DNA, 60 bp, Artificial
  Synthetic oligonucleotide
agggtatagcgcaacagcaggacaacctgctaagagcaatacaggcccagcagcaattgc

SEQ ID NO: 125588 - DNA, 60 bp, Artificial
  Synthetic oligonucleotide
agtgcaacagcaggacaacctgctaagagcaatacaggcccagcagcaattgctgaggct

SEQ ID NO: 125589 - DNA, 60 bp, Artificial
  Synthetic oligonucleotide
gcgcaacagcaggacaacctgctaagagcaatacaggcccagcagcaattgctgaggcta

SEQ ID NO: 125590 - DNA, 60 bp, Artificial
  Synthetic oligonucleotide
gcaacagcaggacaacctgctaagagcaatacaggcccagcagcacttgctgaggctatc

SEQ ID NO: 125591 - DNA, 60 bp, Artificial
  Synthetic oligonucleotide
cagcaattgctgaggctatctgtatggggtatcagacaactccgagctcgcctgctagcc

SEQ ID NO: 125592 - DNA, 60 bp, Artificial
  Synthetic oligonucleotide
ggacaacctgctaagagcaatacaggcccagcagcacttgctgaggttatctgtatgggg

SEQ ID NO: 125593 - DNA, 60 bp, Artificial
  Synthetic oligonucleotide
cccagcagcaattgctgaggctatctgtatggggtatcagacaactccgagctcgcctgc

SEQ ID NO: 125594 - DNA, 60 bp, Artificial
  Synthetic oligonucleotide
cccagcagcacttgctgaggctatctgtatggggtatcagacaactccgagctcgcctgc

SEQ ID NO: 125595 - DNA, 60 bp, Artificial
  Synthetic oligonucleotide
ggagttaccacctcttgagcaacttagcatcagggatccagaaggtgatcagccatctga

SEQ ID NO: 125596 - DNA, 50 bp, Artificial
  Synthetic oligonucleotide
acctcttgagcaacttagcatcagggatccagacggtgatcagccatctg

SEQ ID NO: 125597 - DNA, 60 bp, Artificial
  Synthetic oligonucleotide
aggcccagcagcaattgctgaggctatctgtatggggtatcagacaactccgagctcgcc

SEQ ID NO: 125598 - DNA, 60 bp, Artificial
  Synthetic oligonucleotide
aaatagtaagaatgtatagccctgtcagcattttggacataagacaagggccaaaggaac

SEQ ID NO: 125599 - DNA, 52 bp, Artificial
  Synthetic oligonucleotide
aaaatataggctaaaacatttagtatgggcaagcagggagctggacagattc

SEQ ID NO: 125600 - DNA, 60 bp, Artificial
  Synthetic oligonucleotide
cagggccaggggtcagatatccactgacctttggatggtgcttcaagctagtaccagttg

SEQ ID NO: 125601 - DNA, 60 bp, Artificial
  Synthetic oligonucleotide
agcaaaggttgggggccatctatgtgaggttttgctggatacaggggcagatgatacagt

SEQ ID NO: 125602 - DNA, 58 bp, Artificial
  Synthetic oligonucleotide
gacaattattgtctggtatagtgcaacagcaaagcaatttgctgagggctatagaggc

SEQ ID NO: 125603 - DNA, 60 bp, Artificial
  Synthetic oligonucleotide
gctttgcaagattcaggatcagaagtaaacatagtaacagactcacaatatgcattagga

SEQ ID NO: 125604 - DNA, 60 bp, Artificial
  Synthetic oligonucleotide
aattttcgggtttattacagggacagcagagacccaatttggaaaggaccagctaaacta

SEQ ID NO: 125605 - DNA, 60 bp, Artificial
  Synthetic oligonucleotide
aattttcgggtttattacagggacagcagagacccaatttggaaaggaccagcaaagcta

SEQ ID NO: 125606 - DNA, 54 bp, Artificial
  Synthetic oligonucleotide
gttatctgtatggggtatcagacaactccgagctcgcctgcaagccttagaaac

SEQ ID NO: 125607 - DNA, 60 bp, Artificial
  Synthetic oligonucleotide
acctagtaaagaacattaggcagggatatcaacccctctcgttacagatccccaaccatc

SEQ ID NO: 125608 - DNA, 60 bp, Artificial
  Synthetic oligonucleotide
ttcttaggggttctaagtgcagcaggtagcactatgggcgcagcggcagtgacgctgacg

SEQ ID NO: 125609 - DNA, 60 bp, Artificial
  Synthetic oligonucleotide
ttaggggttctaagtgcagcaggtagcactatgggcgcagcggcagtgacgctgacggta

SEQ ID NO: 125610 - DNA, 51 bp, Artificial
  Synthetic oligonucleotide
ggggttctaagtgcagcaggtagcactatgggcgcagcggcaacagcgctg

SEQ ID NO: 125611 - DNA, 53 bp, Artificial
  Synthetic oligonucleotide
ggggttctaagtgcagcaggtagcactatgggcgcagcgggaataacgctgtc

SEQ ID NO: 125612 - DNA, 60 bp, Artificial
  Synthetic oligonucleotide
gtgagaagcagtgtgtgctcatctgttcaaccctggtatctagagatccctcagatcacg

SEQ ID NO: 125613 - DNA, 60 bp, Artificial
  Synthetic oligonucleotide
gggggattggggattatagtgcaggggaaagaataatagacataatagcaacagacatac

SEQ ID NO: 125614 - DNA, 60 bp, Artificial
  Synthetic oligonucleotide
gtaccagttagaaagtgaacctattataggggcagaaacctattatgtagatggagcagc

SEQ ID NO: 125615 - DNA, 55 bp, Artificial
  Synthetic oligonucleotide
ctagcgaaggctagaaggagagagatgggtgcgagagcgtcagtattaagcgggg

SEQ ID NO: 125616 - DNA, 56 bp, Artificial
  Synthetic oligonucleotide
tctggtatagtgcaacagcaaagcaatttgctgagagctatagaggcgcaacagca

SEQ ID NO: 125617 - DNA, 60 bp, Artificial
  Synthetic oligonucleotide
ggaccagccaaactactctggaaaggtgaaggggcagtagtaatacaagataatagtgac

SEQ ID NO: 125618 - DNA, 60 bp, Artificial
  Synthetic oligonucleotide
gaagtaatcaatgaggaagcagcagattgggatagaactcacccaccaccgataggaccg

SEQ ID NO: 125619 - DNA, 60 bp, Artificial
  Synthetic oligonucleotide
gaagcagcagattgggatagaactcacccaccggtggtagggccgttaccaccagggcaa

SEQ ID NO: 125620 - DNA, 60 bp, Artificial
  Synthetic oligonucleotide
ccaaggggaagtgacatagcaggaactactagtacccttcaagaacaaatagcatggatg

SEQ ID NO: 125621 - DNA, 52 bp, Artificial
  Synthetic oligonucleotide
ctatgggcgcggcgtcaataacgctgacggtacaggccagacaactgttgtc

SEQ ID NO: 125622 - DNA, 54 bp, Artificial
  Synthetic oligonucleotide
ctatgggcgcggcgtcaataacgctgacggtacaggccagacaactgttgtttg

SEQ ID NO: 125623 - DNA, 60 bp, Artificial
  Synthetic oligonucleotide
taagtgcagcaggtagcactatgggcgcagcggcaacggcgctgacggtacagacccatt

SEQ ID NO: 125624 - DNA, 60 bp, Artificial
  Synthetic oligonucleotide
gctaaaacatctagtatgggcaagcagggagctggaaagatttgcacttaaccctggcct

SEQ ID NO: 125625 - DNA, 60 bp, Artificial
  Synthetic oligonucleotide
tacacaaggctacttccctgattggcagaactacacaccagggccagggactagatatcc

SEQ ID NO: 125626 - DNA, 60 bp, Artificial
  Synthetic oligonucleotide
ctggaaaggtgaaggggcagtagtaatacaagacaatagtgatataaaagtagtgccaag

SEQ ID NO: 125627 - DNA, 60 bp, Artificial
  Synthetic oligonucleotide
ggggtacagtgcaggggaaagaataatagacataatatcaacagacatacaaactaaaga

SEQ ID NO: 125628 - DNA, 60 bp, Artificial
  Synthetic oligonucleotide
gacacaggagcagatgatacagtattagaagaaataaatttgccaggaaaatggaaacca

SEQ ID NO: 125629 - DNA, 60 bp, Artificial
  Synthetic oligonucleotide
gagggaaccaaggggaagtgacatagcaggaactactagtacccttcaagaacaaatagg

SEQ ID NO: 125630 - DNA, 60 bp, Artificial
  Synthetic oligonucleotide
cggaggctagaaggagagagatgggtgcgagagcgtcagtattaagaggcgaaaaattag

SEQ ID NO: 125631 - DNA, 58 bp, Artificial
  Synthetic oligonucleotide
tagcggaggctagaaggagagagatgggtgcgagagcgtcaatattaagaggcgaaaa

SEQ ID NO: 125632 - DNA, 55 bp, Artificial
  Synthetic oligonucleotide
cggaggctagaaggagagagatgggtgcgagagcgtcaatattaagaggcgaaaa

SEQ ID NO: 125633 - DNA, 60 bp, Artificial
  Synthetic oligonucleotide
attagggattatggaaaacagatggcaggtgatgattgtgtggcaagtagacaggatgag

SEQ ID NO: 125634 - DNA, 60 bp, Artificial
  Synthetic oligonucleotide
attcaaaattttcgggtttatttcagagacagcagagaccctatttggaaaggaccagcc

SEQ ID NO: 125635 - DNA, 60 bp, Artificial
  Synthetic oligonucleotide
cttcaaaattttcgggtttatttcagagacagcagagaccctatttggaaaggaccagcc

SEQ ID NO: 125636 - DNA, 60 bp, Artificial
  Synthetic oligonucleotide
gagggcaaaatccaggaaggaaaggacctataaaatgtttcaattgtggaaaagagggac

SEQ ID NO: 125637 - DNA, 51 bp, Artificial
  Synthetic oligonucleotide
ggggaggactcgaacgaactctatccgtttgcctccctcaaatccctcttt

SEQ ID NO: 125638 - DNA, 60 bp, Artificial
  Synthetic oligonucleotide
gaaggagcagtagtcatacaagataaaggagacattaaggtagtaccaagaaggaaggca

SEQ ID NO: 125639 - DNA, 60 bp, Artificial
  Synthetic oligonucleotide
gttgctgttcatgtggcaagtgggtttatagaagcagaagtgataccagcagaaacagga

SEQ ID NO: 125640 - DNA, 60 bp, Artificial
  Synthetic oligonucleotide
gcaaaggataggaagaggaattcttaacatcccaaggagaattagacagggtgcagaaag

SEQ ID NO: 125641 - DNA, 60 bp, Artificial
  Synthetic oligonucleotide
agcaagcctgtccaaaggtaacttttgagcccattcccatacactattgtgctccagcag

SEQ ID NO: 125642 - DNA, 60 bp, Artificial
  Synthetic oligonucleotide
tccctcagagcacgtagcctgaagcagaaaatctctagcagtggcgcccgaacagggact

SEQ ID NO: 125643 - DNA, 60 bp, Artificial
  Synthetic oligonucleotide
ggggtatagtgcaggggaaagaataatagacataatagcaacagacatacaaactaagga

SEQ ID NO: 125644 - DNA, 60 bp, Artificial
  Synthetic oligonucleotide
aaatggttgtggtatataaaaatagcaataatcatagtaggagcactaataggtgtaaga

SEQ ID NO: 125645 - DNA, 60 bp, Artificial
  Synthetic oligonucleotide
agcaagcctgtccaaaggtaacttttgagccaattccaatacactattgtgctccaggag

SEQ ID NO: 125646 - DNA, 60 bp, Artificial
  Synthetic oligonucleotide
gctcgcctgcaagccttagaaaccttaatacagaatcagcaactcctaaacctatggggt

SEQ ID NO: 125647 - DNA, 60 bp, Artificial
  Synthetic oligonucleotide
ccagcaaagcttctctggaaaggtgaaggggcagtagtaatacaagataacagtgacata

SEQ ID NO: 125648 - DNA, 58 bp, Artificial
  Synthetic oligonucleotide
ggggctatagtgcaggggaaagaataatagacataatagcaacagacatacaaactag

SEQ ID NO: 125649 - DNA, 60 bp, Artificial
  Synthetic oligonucleotide
gagaccccatttggaaaggaccggcccagctcctgtggaaaggtgagggagcagtagtca

SEQ ID NO: 125650 - DNA, 60 bp, Artificial
  Synthetic oligonucleotide
gggactatggaaaacagatggcaggtgatgattgtgtggcaggtagacaggatgagaatt

SEQ ID NO: 125651 - DNA, 60 bp, Artificial
  Synthetic oligonucleotide
tggaaaacagatggcaggtactgatagtatggcaagtggacagacagaaagtgaaacagt

SEQ ID NO: 125652 - DNA, 60 bp, Artificial
  Synthetic oligonucleotide
agttacttgtacacatggcatcaagccaacagtaagtactcagctaatattaaatggaac

SEQ ID NO: 125653 - DNA, 60 bp, Artificial
  Synthetic oligonucleotide
taacaagcactgagcagcataatatttgggcatcacaagcctgcgttcccacagatccca

SEQ ID NO: 125654 - DNA, 60 bp, Artificial
  Synthetic oligonucleotide
gcagtgtgtgctcatctgttcaaccctggtgtctagaaatccctcagagcacgtagcctg

SEQ ID NO: 125655 - DNA, 60 bp, Artificial
  Synthetic oligonucleotide
gagattatgtggataggttctacaaaacattaagagctgaacaagcaacccaggaagtaa

SEQ ID NO: 125656 - DNA, 60 bp, Artificial
  Synthetic oligonucleotide
gaggttatctgtatggggtattagacaactccgagctcgcctgcaagccttagaaaccct

SEQ ID NO: 125657 - DNA, 60 bp, Artificial
  Synthetic oligonucleotide
aggaaaatggacaccaaaaatgatagggggtataggaggttttataaaagtaaaagaata

SEQ ID NO: 125658 - DNA, 60 bp, Artificial
  Synthetic oligonucleotide
ctgtccatgtggcaagtggattcatagaggcagaagtgataccagcagaaacaggacaag

SEQ ID NO: 125659 - DNA, 50 bp, Artificial
  Synthetic oligonucleotide
cggaggctagaaggagagagatgggtgcgagagcgtcagtattgagcggg

SEQ ID NO: 125660 - DNA, 60 bp, Artificial
  Synthetic oligonucleotide
ggattcttagcacttgtctgggacgatctacggagcctgtgcctcttcagctaccaccgc

SEQ ID NO: 125661 - DNA, 60 bp, Artificial
  Synthetic oligonucleotide
tttgctggcggtggccagacctaggggaagggcgaagtccctagaggaagaagataggtg

SEQ ID NO: 125662 - DNA, 60 bp, Artificial
  Synthetic oligonucleotide
acaggggtgagtaaatttgctggcggtggccagacctaggggaagggcgaagtctctagg

SEQ ID NO: 125663 - DNA, 60 bp, Artificial
  Synthetic oligonucleotide
gcgagaggaactcacaggggtgagtaaatttgctggcggtggccagacctaggggaaggg

SEQ ID NO: 125664 - DNA, 60 bp, Artificial
  Synthetic oligonucleotide
gcgagaggactcacagaagggtgagtaaatttgctggcggtggccagacctaggggaagg

SEQ ID NO: 125665 - DNA, 60 bp, Artificial
  Synthetic oligonucleotide
gcgagaggaactcacagagggtgagtaattttgctggcggtggccagacctaggggaagg

SEQ ID NO: 125666 - DNA, 60 bp, Artificial
  Synthetic oligonucleotide
ctggaaaggtgaaggggcagtagtaatacaagataatagtgacataaaagtagtgccaag

SEQ ID NO: 125667 - DNA, 60 bp, Artificial
  Synthetic oligonucleotide
gtgcatggagtatattatgacccatcaaaagacttaatagcagaaatacagaaacaaggg

SEQ ID NO: 125668 - DNA, 60 bp, Artificial
  Synthetic oligonucleotide
aatttggaaaggaccagctaaactactttggaaaggtgaaggggcagtagtaatacagga

SEQ ID NO: 125669 - DNA, 60 bp, Artificial
  Synthetic oligonucleotide
gggacgatctgcggagcctgtgcctcttcagctaccaccgcttgagagacttactcttga

SEQ ID NO: 125670 - DNA, 60 bp, Artificial
  Synthetic oligonucleotide
gttgtctggtatagtgcaacagcaaagcaatttgctgagggctatagaggcgcaacagca

SEQ ID NO: 125671 - DNA, 56 bp, Artificial
  Synthetic oligonucleotide
tctggtatagtgcaacagcaaagcaatttgctgagggctatagaggcgcaacagca

SEQ ID NO: 125672 - DNA, 60 bp, Artificial
  Synthetic oligonucleotide
agatccctcagaccattttagtcagtgtggaaaatctctagcagtggcgcccgaacaggg

SEQ ID NO: 125673 - DNA, 60 bp, Artificial
  Synthetic oligonucleotide
gagacagcagagaccctatttggaaaggaccagccaaactcctctggaaaggtgaagggg

SEQ ID NO: 125674 - DNA, 60 bp, Artificial
  Synthetic oligonucleotide
gggaatatggaaaacagatggcaggtgctgattgtgtggcaggtagacaggatgaggact

SEQ ID NO: 125675 - DNA, 60 bp, Artificial
  Synthetic oligonucleotide
gaccagccaaactactctggaaaggtgaaggggcagtagtaatacaagataacagtgaca

SEQ ID NO: 125676 - DNA, 56 bp, Artificial
  Synthetic oligonucleotide
gtaagagagcaagctgaacaccttaagacagcagtacaaatggcagtattcattca

SEQ ID NO: 125677 - DNA, 60 bp, Artificial
  Synthetic oligonucleotide
gacccaaggggaagtgacatagcaggaactactagtacccttcaggaacaaatagcatgg

SEQ ID NO: 125678 - DNA, 60 bp, Artificial
  Synthetic oligonucleotide
ggggtatagtgcaggggaaagaataatagacataatagcaacagacatacaaactagaga

SEQ ID NO: 125679 - DNA, 60 bp, Artificial
  Synthetic oligonucleotide
cccatgttcacagcattatcagaaggagccaccccacaagatttaaatatgatgctaaat

SEQ ID NO: 125680 - DNA, 60 bp, Artificial
  Synthetic oligonucleotide
ccaaggggaggtgacatagcaggaactactagtacccttcaggaacaaataggatggatg

SEQ ID NO: 125681 - DNA, 60 bp, Artificial
  Synthetic oligonucleotide
gggaagcaatgcatggacaagtagactgtagtccagggatatggcaattagattgcacac

SEQ ID NO: 125682 - DNA, 60 bp, Artificial
  Synthetic oligonucleotide
ccagcaaagctactctggaaaggtgaaggggcagtagtaatacaagataatagtgaaata

SEQ ID NO: 125683 - DNA, 60 bp, Artificial
  Synthetic oligonucleotide
ctgcggagcctgtgcctcttcagctaccaccgcttgagagacttactcttgattgtaacg

SEQ ID NO: 125684 - DNA, 60 bp, Artificial
  Synthetic oligonucleotide
aggactatggaaaacagatggcaggtgctgattgtgtggcaggtagacaggatgaggatc

SEQ ID NO: 125685 - DNA, 60 bp, Artificial
  Synthetic oligonucleotide
tttttgactagcggaggctagaaggagagagatgggtgcgagagcgtcagtattaagcgg

SEQ ID NO: 125686 - DNA, 58 bp, Artificial
  Synthetic oligonucleotide
ggattatggaaaacagatggcaggtgatgattgtgtggcaagtagacaggatgaggat

SEQ ID NO: 125687 - DNA, 60 bp, Artificial
  Synthetic oligonucleotide
agggattatggaaaacagatggcaggtgatgattgtgtggcaagtagacaggatgaggat

SEQ ID NO: 125688 - DNA, 60 bp, Artificial
  Synthetic oligonucleotide
ctatgggcgcagcgtcaataacgctgacggtacaggccagacaactgttgtctggtatag

SEQ ID NO: 125689 - DNA, 60 bp, Artificial
  Synthetic oligonucleotide
ctatgggcgcggcgtcaataacgctgacggtacaggccagacaattgttgtctggtatag

SEQ ID NO: 125690 - DNA, 60 bp, Artificial
  Synthetic oligonucleotide
tagcggaggctagaaggagagagatgggtgcgagagcgtcagtattaagcgggggaaaat

SEQ ID NO: 125691 - DNA, 56 bp, Artificial
  Synthetic oligonucleotide
tctggtatagtgcaacagcaaagcaatttgctgagggctatagaggcgcagcagca

SEQ ID NO: 125692 - DNA, 60 bp, Artificial
  Synthetic oligonucleotide
ttctggggttaaataaaatagtaagaatgtatagccctgtcagcattttggacataagac

SEQ ID NO: 125693 - DNA, 52 bp, Artificial
  Synthetic oligonucleotide
ctatgggcgcagcgtcaataacgctgacggtacaggccagacaactgttgtc

SEQ ID NO: 125694 - DNA, 60 bp, Artificial
  Synthetic oligonucleotide
gctaaaacacttagtatgggcaagcagggagctggaaagatttgcacttaaccctggcct

SEQ ID NO: 125695 - DNA, 60 bp, Artificial
  Synthetic oligonucleotide
gacaactgttgtctggtatagtgcaacagcaaagcaatttgctgagagctatagaggcgc

SEQ ID NO: 125696 - DNA, 60 bp, Artificial
  Synthetic oligonucleotide
gagattatggaaaacagatggcaggtgatgattgtgtggcaggtagacaggatgaagatt

SEQ ID NO: 125697 - DNA, 60 bp, Artificial
  Synthetic oligonucleotide
ggggattggggattatagtgcaggggaaagaataatagacataatagcaacagacataca

SEQ ID NO: 125698 - DNA, 57 bp, Artificial
  Synthetic oligonucleotide
gactagcggaggctagaaggagagagatgggtgcgagagcgtcagtattaagcgggg

SEQ ID NO: 125699 - DNA, 58 bp, Artificial
  Synthetic oligonucleotide
tagcggaggctagaaggagagagatgggtgcgagagcgtcaattttaagaggggaaaa

SEQ ID NO: 125700 - DNA, 60 bp, Artificial
  Synthetic oligonucleotide
gggggattggggggtacagtgcaggggaaagaataatagacataatagcatcagacatac

SEQ ID NO: 125701 - DNA, 60 bp, Artificial
  Synthetic oligonucleotide
ggcttcttccctgattggcagaactacacaccagggccagggatcagattcccactgtgt

SEQ ID NO: 125702 - DNA, 60 bp, Artificial
  Synthetic oligonucleotide
ggggagtggtcaaccctcagatgctgcatataagcagctgcttttcgcctgtactgggtc

SEQ ID NO: 125703 - DNA, 60 bp, Artificial
  Synthetic oligonucleotide
ccagcaaagcttctctggaaaggtgaaggggcagtagtaatacaagataacagcgacata

SEQ ID NO: 125704 - DNA, 51 bp, Artificial
  Synthetic oligonucleotide
ccagagaagttctctcgacgcaggactcggcttgctgaagtgcactcggca

SEQ ID NO: 125705 - DNA, 60 bp, Artificial
  Synthetic oligonucleotide
gggcctattgcaccaggccaaatgagggaaccaaggggaagtgacatagcaggaactacc

SEQ ID NO: 125706 - DNA, 60 bp, Artificial
  Synthetic oligonucleotide
ggaccggcacaactcctgtggaaaggtgagggagcagtagtcatacaagataaaggagat

SEQ ID NO: 125707 - DNA, 60 bp, Artificial
  Synthetic oligonucleotide
ggctaaaacatttagtatgggcaagcaaggagctggaaagattcgcatgtaatcctgagc

SEQ ID NO: 125708 - DNA, 60 bp, Artificial
  Synthetic oligonucleotide
ggagggatatgggcggttcggggagtggctaaccctcagatgctgcatataagcagctgc

SEQ ID NO: 125709 - DNA, 60 bp, Artificial
  Synthetic oligonucleotide
ggggctgctctggaaaactcatctgcaccactgctgtgccctggaactccagttggagta

SEQ ID NO: 125710 - DNA, 54 bp, Artificial
  Synthetic oligonucleotide
ttatcagaaggagccaccccacaagatttaaatatgatgctaaacatagtgggg

SEQ ID NO: 125711 - DNA, 60 bp, Artificial
  Synthetic oligonucleotide
acaattattgtctggtatagtgcaacagcaaagcaatttgctgagagctatagaggcgca

SEQ ID NO: 125712 - DNA, 54 bp, Artificial
  Synthetic oligonucleotide
tagcggaggctagaaggagagagatgggtgcgagagtgtcagtattaagagggg

SEQ ID NO: 125713 - DNA, 59 bp, Artificial
  Synthetic oligonucleotide
ctagcggaggctagaaggagagagatgggtgcgagagcgtcaatattaagaggggaaaa

SEQ ID NO: 125714 - DNA, 60 bp, Artificial
  Synthetic oligonucleotide
gggcgcagcatcaataacgctgacggtacaggccagacaattgctgtctggaatagtgca

SEQ ID NO: 125715 - DNA, 56 bp, Artificial
  Synthetic oligonucleotide
cactatgggcgcagcgtcaataacgctgacggtacaggccagacaattattgtccg

SEQ ID NO: 125716 - DNA, 54 bp, Artificial
  Synthetic oligonucleotide
cactatgggcgcagcgtcaataacgctgacggtacaggccagacaattattgtc

SEQ ID NO: 125717 - DNA, 60 bp, Artificial
  Synthetic oligonucleotide
atagttgctgtccatgtagcaagtggattcatagaagcagaagtgataccagcagaaaca

SEQ ID NO: 125718 - DNA, 60 bp, Artificial
  Synthetic oligonucleotide
gggtgaaggagcagtagtcatacaagataaaggagacattaaggtagtaccaagaaggaa

SEQ ID NO: 125719 - DNA, 59 bp, Artificial
  Synthetic oligonucleotide
aaaggtgagggagcagtagtcatacaagataaaggagaaattaaggtagtaccaagaag

SEQ ID NO: 125720 - DNA, 60 bp, Artificial
  Synthetic oligonucleotide
ccctatttggaaaggaccagccaagctactctggaaaggtgaaggggcagtagtaataca

SEQ ID NO: 125721 - DNA, 60 bp, Artificial
  Synthetic oligonucleotide
caccaggccagatgagggaaccaaggggaagtgacatagcaggaactactagtacccttc

SEQ ID NO: 125722 - DNA, 60 bp, Artificial
  Synthetic oligonucleotide
ggaccagcaaagcttctctggaaaggtgaaggggcagtagtaatacaagataacagtgac

SEQ ID NO: 125723 - DNA, 60 bp, Artificial
  Synthetic oligonucleotide
catttggaaaggaccagcaaaactactctggaaaggtgaaggggcagtagtaatacaaga

SEQ ID NO: 125724 - DNA, 60 bp, Artificial
  Synthetic oligonucleotide
atataagctaaaacatttagtatgggcaagcagggagctggacagattcgcatgtaatcc

SEQ ID NO: 125725 - DNA, 60 bp, Artificial
  Synthetic oligonucleotide
aaatagtgagaatgtatagccctgtcagcattttggacataagacaagggccaaaagaac

SEQ ID NO: 125726 - DNA, 60 bp, Artificial
  Synthetic oligonucleotide
aaatagtgagaatgtatagccctgtcagcattttggacataagacaagggccaaaggaac

SEQ ID NO: 125727 - DNA, 60 bp, Artificial
  Synthetic oligonucleotide
aaatttcgggtttattacagggacagcagagaccccatttggaaaggaccagcaaaacta

SEQ ID NO: 125728 - DNA, 60 bp, Artificial
  Synthetic oligonucleotide
aattttcgggtttattacagggacagcagagaccccatttggaaaggaccagcaaaacta

SEQ ID NO: 125729 - DNA, 55 bp, Artificial
  Synthetic oligonucleotide
cggaggctagaaggagagagatgggtgcgagagcgtcagtattaagaggcgaaaa

SEQ ID NO: 125730 - DNA, 55 bp, Artificial
  Synthetic oligonucleotide
ctagcagaggctagaaggagagagatgggtgcgagagcgtcagtattaagtgggg

SEQ ID NO: 125731 - DNA, 60 bp, Artificial
  Synthetic oligonucleotide
cagtctggggcattaaacagctccaggcaagagtcctggctgtggaaagatacctaaagg

SEQ ID NO: 125732 - DNA, 50 bp, Artificial
  Synthetic oligonucleotide
ggggtacagtgcaggggaaagaataatagacataatagcaacagacatac

SEQ ID NO: 125733 - DNA, 60 bp, Artificial
  Synthetic oligonucleotide
gagaacagggaaattctaaaagaaccagtacatggagtatattatgacccatcaaaagac

SEQ ID NO: 125734 - DNA, 60 bp, Artificial
  Synthetic oligonucleotide
taggtttcccagtaagacctcaagtgcctctaaggccaatgacctttaaaggagcatttg

SEQ ID NO: 125735 - DNA, 60 bp, Artificial
  Synthetic oligonucleotide
cataatagttgctgtccatgtggcaagtggattcatagaagcagaagtgataccagcaga

SEQ ID NO: 125736 - DNA, 60 bp, Artificial
  Synthetic oligonucleotide
catttagagattatgtagataggttctacaaaacattaagagctgagcaagcatctcagg

SEQ ID NO: 125737 - DNA, 60 bp, Artificial
  Synthetic oligonucleotide
catttagagactatgtagataggttctacaaaacattaagagctgagcaagcatctcaag

SEQ ID NO: 125738 - DNA, 60 bp, Artificial
  Synthetic oligonucleotide
agagaccctatttggaaaggaccagccaaactactctggaaaggtgaaggggcagtagtc

SEQ ID NO: 125739 - DNA, 60 bp, Artificial
  Synthetic oligonucleotide
gagaccctatttggaaaggaccagccaaactactctggaaaggtgaaggggcagtagtaa

SEQ ID NO: 125740 - DNA, 60 bp, Artificial
  Synthetic oligonucleotide
ccagcaaaactgctctggaaaggtgaaggggcagtagtaatacaagacaatagtgatata

SEQ ID NO: 125741 - DNA, 51 bp, Artificial
  Synthetic oligonucleotide
ttgctgaagtgcactcggcaagaggcgagagcggcgactggtgagtacgcc

SEQ ID NO: 125742 - DNA, 57 bp, Artificial
  Synthetic oligonucleotide
ggtaagagaccaagctgaacaccttaagacagcagtacaaatggcagtattcattca

SEQ ID NO: 125743 - DNA, 60 bp, Artificial
  Synthetic oligonucleotide
tatggaaaacagatggcaggtgatgattgtgtggcaggtagacaggatgaggatcagaac

SEQ ID NO: 125744 - DNA, 60 bp, Artificial
  Synthetic oligonucleotide
ctatttggaaaggaccagccaaactactctggaaaggtgaaggggcagtagtaatacaag

SEQ ID NO: 125745 - DNA, 60 bp, Artificial
  Synthetic oligonucleotide
ggctaaaacatttagtatgggcaagcagggagctggaaagattcgcatgtaatcctgagc

SEQ ID NO: 125746 - DNA, 60 bp, Artificial
  Synthetic oligonucleotide
gcactgagcagcataatatttgggcatcacaagcctgtgttcccacagaccccactccac

SEQ ID NO: 125747 - DNA, 60 bp, Artificial
  Synthetic oligonucleotide
gcctgggacgatctgcggagcctgtgcctcttcagctaccaccgcttgagagacttcata

SEQ ID NO: 125748 - DNA, 60 bp, Artificial
  Synthetic oligonucleotide
gacctgcggagcctgtgcctcttcagctaccaccgcttgagagactttgtctggattgcc

SEQ ID NO: 125749 - DNA, 57 bp, Artificial
  Synthetic oligonucleotide
agcggaggctagaaggagagagatgggtgcgagagcgtcagtattaaaaggcgaaaa

SEQ ID NO: 125750 - DNA, 60 bp, Artificial
  Synthetic oligonucleotide
gggggattggggggtacagtgcaggggaaagaataatagacataatagcaacagatatac

SEQ ID NO: 125751 - DNA, 54 bp, Artificial
  Synthetic oligonucleotide
gggggattggggggtacagtgcaggggaaagaataatagacataatagcaacag

SEQ ID NO: 125752 - DNA, 60 bp, Artificial
  Synthetic oligonucleotide
gagtggtctgggcgggactgagagtggccaaccctcagatgctgcatataagcagctgct

SEQ ID NO: 125753 - DNA, 60 bp, Artificial
  Synthetic oligonucleotide
agggcaggtaagagatcaagctgaacaccttaagacagcagtacaaatggcagtattcat

SEQ ID NO: 125754 - DNA, 60 bp, Artificial
  Synthetic oligonucleotide
ggaaccaaggggaagtgacatagcaggaactactagtacccttcaggaacaaatagcatg

SEQ ID NO: 125755 - DNA, 60 bp, Artificial
  Synthetic oligonucleotide
ttctttggaaaggtgaaggggcagtagtaatacaagacaatagtgaaataaaggtagtac

SEQ ID NO: 125756 - DNA, 60 bp, Artificial
  Synthetic oligonucleotide
ctatgggcgcggcgtcaataacgctgacggtacaggccagacaactattgtctggtatag

SEQ ID NO: 125757 - DNA, 54 bp, Artificial
  Synthetic oligonucleotide
ctatgggcgcggcgtcaataacgctgacggtacaggccagacaactgctgtctg

SEQ ID NO: 125758 - DNA, 54 bp, Artificial
  Synthetic oligonucleotide
ctatgggcgcggcgtcaataacgctgacggtacaggccagacaactattgtctg

SEQ ID NO: 125759 - DNA, 60 bp, Artificial
  Synthetic oligonucleotide
ggagtggttaaccctcagatgctgcatataagcagctgcttttcgcctgtactgggtctc

SEQ ID NO: 125760 - DNA, 63 bp, Artificial
  Synthetic oligonucleotide
cctgggattaaataaaatagtaagaatgtatagccctgttagcattttggacataagacaagg

SEQ ID NO: 125761 - DNA, 60 bp, Artificial
  Synthetic oligonucleotide
ggaaaacagatggcaggtgatgattgtgtggcaggtagacaggatgaggattaacacatg

SEQ ID NO: 125762 - DNA, 57 bp, Artificial
  Synthetic oligonucleotide
ggggtacagtgcaggggaaagaataatagacataatagcatcagacatacaaactaa

SEQ ID NO: 125763 - DNA, 60 bp, Artificial
  Synthetic oligonucleotide
tactctggaaaggtgaaggggcagtagtaatacaggacaatagtgatataaaagtagtac

SEQ ID NO: 125764 - DNA, 60 bp, Artificial
  Synthetic oligonucleotide
gggcctatcccaccaggccagatgagggaaccaaggggaagtgacatagcaggaactact

SEQ ID NO: 125765 - DNA, 54 bp, Artificial
  Synthetic oligonucleotide
ggggtacagtgcaggggaaagaataatagacataatagcatcagacatacaaac

SEQ ID NO: 125766 - DNA, 60 bp, Artificial
  Synthetic oligonucleotide
ctatgggcgcagcgtcaataacgctgacggtacaggccagacaattattatctggtatag

SEQ ID NO: 125767 - DNA, 54 bp, Artificial
  Synthetic oligonucleotide
ctatgggcgcagcgtcaataacgctgacggtacaggccagacaattattatctg

SEQ ID NO: 125768 - DNA, 59 bp, Artificial
  Synthetic oligonucleotide
tgctgtctggtatagtgcaacagcaaagcaatttgctgagagctatagaggcgcaacag

SEQ ID NO: 125769 - DNA, 60 bp, Artificial
  Synthetic oligonucleotide
gggaagtgacatagcaggaactactagtacccttcaggaacaaataacatggatgacagg

SEQ ID NO: 125770 - DNA, 60 bp, Artificial
  Synthetic oligonucleotide
aacaaaatggtaaaaatgtacagtccagtgagcatcttagacattagacagggaccaaaa

SEQ ID NO: 125771 - DNA, 60 bp, Artificial
  Synthetic oligonucleotide
gctaaaacacttagtatgggcaagcagggagctggacagatttgcacttaaccctggcct

SEQ ID NO: 125772 - DNA, 57 bp, Artificial
  Synthetic oligonucleotide
ttgctgaagtgcactcggcaagaggcgagagcggcgactggtgagtacgccaatttt

SEQ ID NO: 125773 - DNA, 60 bp, Artificial
  Synthetic oligonucleotide
ccttgagtgagaagcagtgtgtgctcatctgttcaaccctggtgtctagagatccctcag

SEQ ID NO: 125774 - DNA, 60 bp, Artificial
  Synthetic oligonucleotide
gaagggcgaagtctctaggggaggaagatgggtgcgagtgcgtctgtgttaaggggaagc

SEQ ID NO: 125775 - DNA, 60 bp, Artificial
  Synthetic oligonucleotide
aagcctttaaccctgaaatcattcctatgtttatggcattgtcagaaggagctattccct

SEQ ID NO: 125776 - DNA, 54 bp, Artificial
  Synthetic oligonucleotide
ctatgggcgcggcgtcaataacgctgacggtacaggccagacaattgttgtctg

SEQ ID NO: 125777 - DNA, 60 bp, Artificial
  Synthetic oligonucleotide
ggcttcttccctgattggcagaactacacaccaggaccaggggtcagatatccactgacc

SEQ ID NO: 125778 - DNA, 60 bp, Artificial
  Synthetic oligonucleotide
tctggtatagtgcaacagcaaagcaatttgctgagagctatagaggcgcagcagcatctg

SEQ ID NO: 125779 - DNA, 60 bp, Artificial
  Synthetic oligonucleotide
ggttaaaacatttagtatgggcaagcagggagctggaaagattcgcacttaaccctggcc

SEQ ID NO: 125780 - DNA, 57 bp, Artificial
  Synthetic oligonucleotide
ggggtacagtgcaggggaaagaataatagacataatagcaacagatatacaaaccaa

SEQ ID NO: 125781 - DNA, 57 bp, Artificial
  Synthetic oligonucleotide
ggggtacagtgcaggggaaagaataatagacataatagcaacagatatacaaactaa

SEQ ID NO: 125782 - DNA, 60 bp, Artificial
  Synthetic oligonucleotide
agtatgggcaagcagggagctggaaagattcgcatgtaatcctgagctactagaaactgc

SEQ ID NO: 125783 - DNA, 60 bp, Artificial
  Synthetic oligonucleotide
ggggtacagtgcaggggaaagaataatagacataatagcaacagacatacaaactaaagt

SEQ ID NO: 125784 - DNA, 60 bp, Artificial
  Synthetic oligonucleotide
ccagcaaaactactctggaaaggtgaaggggcagtagtaattcaagacaatagtgagata

SEQ ID NO: 125785 - DNA, 60 bp, Artificial
  Synthetic oligonucleotide
gagaccctatttggaaaggaccagccaaactactctggaaaggtgaaggggcagtggtaa

SEQ ID NO: 125786 - DNA, 60 bp, Artificial
  Synthetic oligonucleotide
gagaccccatttggaaaggaccagcaaaactactctggaaaggtgaaggggcagtagtaa

SEQ ID NO: 125787 - DNA, 60 bp, Artificial
  Synthetic oligonucleotide
ccaaggggaagtgacatagcaggaactactagtacccttcaagaacaaataggacggatg

SEQ ID NO: 125788 - DNA, 56 bp, Artificial
  Synthetic oligonucleotide
accagcaaaactactctggaaaggtgaaggggcagtagtcatacaagacaatagtg

SEQ ID NO: 125789 - DNA, 51 bp, Artificial
  Synthetic oligonucleotide
cagaccattttagtcagtgtggaaaatctctagcagtggcgcccgaacagg

SEQ ID NO: 125790 - DNA, 60 bp, Artificial
  Synthetic oligonucleotide
gcctgttgcaccaggccagatgagggaacctaggggaagtgacatagcaggaactactag

SEQ ID NO: 125791 - DNA, 60 bp, Artificial
  Synthetic oligonucleotide
gggattcttccctgattggcagaattacacaccaggaccaggaacaagattcccactgac

SEQ ID NO: 125792 - DNA, 60 bp, Artificial
  Synthetic oligonucleotide
gggtctgggcgggaccggggagtggccagccctcagatgctgcatataagcagctgcttt

SEQ ID NO: 125793 - DNA, 60 bp, Artificial
  Synthetic oligonucleotide
gactagcggaggctagaaggagagagatgggtgcgagagcgtcaatattaaaaggcggaa

SEQ ID NO: 125794 - DNA, 57 bp, Artificial
  Synthetic oligonucleotide
ggggtacagtgcaggggaaagaataatagacataatagcaacagacatacaaaccaa

SEQ ID NO: 125795 - DNA, 60 bp, Artificial
  Synthetic oligonucleotide
gttgctggagttagatgaatgggcttctatttggaactggctggacataactaaatggtt

SEQ ID NO: 125796 - DNA, 60 bp, Artificial
  Synthetic oligonucleotide
gggattgatgccaggggaaagagatgaacatttgggacatggggttagcatagactggag

SEQ ID NO: 125797 - DNA, 60 bp, Artificial
  Synthetic oligonucleotide
aggtggtaaggtcatggatacagggagggtcgggactttatgcacctcccaggccaggtt

SEQ ID NO: 125798 - DNA, 60 bp, Artificial
  Synthetic oligonucleotide
gaccaggtgtgaatactctgcaggacatagtcaggtagggacactgcaactactagctct

SEQ ID NO: 125799 - DNA, 60 bp, Artificial
  Synthetic oligonucleotide
ctgaggctatctgtatggggtatcagacaactccgagctcgcctgctagccttagaaacc

SEQ ID NO: 125800 - DNA, 60 bp, Artificial
  Synthetic oligonucleotide
gatggaaaagaggaacaggaagttagggatcttgtgcatggttatggctttgataacccc

SEQ ID NO: 125801 - DNA, 60 bp, Artificial
  Synthetic oligonucleotide
ctagaccttggctacaggccttgggacaatacatttatgacacttatggggacacttggg

SEQ ID NO: 125802 - DNA, 60 bp, Artificial
  Synthetic oligonucleotide
ccctggaagtcagccccagaccccttgtaataagtgctattgcaaagcgtgctgctacca

SEQ ID NO: 125803 - DNA, 60 bp, Artificial
  Synthetic oligonucleotide
ggctttgaagatccacacaaggagatgctgaaatggcagtttgatagatcactaggcagc

SEQ ID NO: 125804 - DNA, 60 bp, Artificial
  Synthetic oligonucleotide
ggtatatcacactcagggattcttccctgattggcagggctacacaccaggaccagggcc

SEQ ID NO: 125805 - DNA, 60 bp, Artificial
  Synthetic oligonucleotide
gaagtaggcttcccagtaagacctcaagtgcctctaaggccaatgacctataaaggagca

SEQ ID NO: 125806 - DNA, 60 bp, Artificial
  Synthetic oligonucleotide
gagctccatccagacaaatggacagtgcagcccatccaattgcctaacaaggaggaatgg

SEQ ID NO: 125807 - DNA, 60 bp, Artificial
  Synthetic oligonucleotide
cctcagatcacgtagactgaggcagaaaatctctagcagtggcgcccgaacagggaccgg

SEQ ID NO: 125808 - DNA, 60 bp, Artificial
  Synthetic oligonucleotide
ctatcaacctgacaaagacttatgggttaatattcagaagcagggaaaaggacaatggac

SEQ ID NO: 125809 - DNA, 60 bp, Artificial
  Synthetic oligonucleotide
tattcttaggggttctaagtgcagcaggaagcactatgggcgcagcggcaacagcgctgg

SEQ ID NO: 125810 - DNA, 60 bp, Artificial
  Synthetic oligonucleotide
tctttgggacagaccaatagttccagcaagggttgggggccatctatgtgaagttttact

SEQ ID NO: 125811 - DNA, 60 bp, Artificial
  Synthetic oligonucleotide
acgaggccaggcaattatgcgcagagacaagtgtccccatcagccccaccgatgacggag

SEQ ID NO: 125812 - DNA, 60 bp, Artificial
  Synthetic oligonucleotide
ggcaggtactgatagtatggcaagtggacagacagagagtgaaaacgtggaacagcctgg

SEQ ID NO: 125813 - DNA, 60 bp, Artificial
  Synthetic oligonucleotide
cccaagtaggaaagggcctataaaatgtttcaattgtggaaaagagggacatctggcaag

SEQ ID NO: 125814 - DNA, 60 bp, Artificial
  Synthetic oligonucleotide
gcagagatcctatttggaaaggaccggcacagctcctgtggaaaggtgagggagcagtag

SEQ ID NO: 125815 - DNA, 60 bp, Artificial
  Synthetic oligonucleotide
gcatcatctcctcacagcctacacagagtgaatcctctctagttcagcagataatagagg

SEQ ID NO: 125816 - DNA, 60 bp, Artificial
  Synthetic oligonucleotide
gactgacggtataattttagggctacaaaggataggaagaggaattcttaacatcccaag

SEQ ID NO: 125817 - DNA, 60 bp, Artificial
  Synthetic oligonucleotide
ggcatgcccacgttgataccctggccgcaaggattcttgccactgttgtacacggacctc

SEQ ID NO: 125818 - DNA, 60 bp, Artificial
  Synthetic oligonucleotide
cagaaacaggacaagaaactgcctacttcctgttaaaattagctgcaagatggcctgtta

SEQ ID NO: 125819 - DNA, 60 bp, Artificial
  Synthetic oligonucleotide
gcaagcctgtccaaaggtatcgtttgagccaattccaatacactattgtgctccagcggg

SEQ ID NO: 125820 - DNA, 60 bp, Artificial
  Synthetic oligonucleotide
ttaacttaacgagcactgagcagcataatatttgggcatcacaagcctgtgttccaacag

SEQ ID NO: 125821 - DNA, 60 bp, Artificial
  Synthetic oligonucleotide
tgcgggactttccagcagaggctgctgacacggcggggactttccagtgtgggagggaca

SEQ ID NO: 125822 - DNA, 60 bp, Artificial
  Synthetic oligonucleotide
acaagtgctaaaagaagtaatcaatgaggaagcagcagaatgggatagaactcacccacc

SEQ ID NO: 125823 - DNA, 60 bp, Artificial
  Synthetic oligonucleotide
caactagcacccagcaagagcaagttcactggattaccaggcccaaccaacctatcccag

SEQ ID NO: 125824 - DNA, 60 bp, Artificial
  Synthetic oligonucleotide
ggtgccgctaaggaagacacaagcgcaaggcagacgggtcaaaactaccctgtagtagca

SEQ ID NO: 125825 - DNA, 60 bp, Artificial
  Synthetic oligonucleotide
ttaagctgccaatcactagagaaacttgggaaacatggtgggcggactattggcaagcca

SEQ ID NO: 125826 - DNA, 60 bp, Artificial
  Synthetic oligonucleotide
caggattgggttgcacactaaatttccctataagtcccatagccccagtaccagtaaaac

SEQ ID NO: 125827 - DNA, 60 bp, Artificial
  Synthetic oligonucleotide
gagcagctaacagagatacaaaactaggaaaagccggatatgttacagaaaaggggagac

SEQ ID NO: 125828 - DNA, 55 bp, Artificial
  Synthetic oligonucleotide
aaaattttgactagcggaggctagaaggagagagatgggtgcgagagcgtcagta

SEQ ID NO: 125829 - DNA, 52 bp, Artificial
  Synthetic oligonucleotide
ttgctgaagtgcactcggcaagaggcgagagcggcgactggtgagtacgcca

SEQ ID NO: 125830 - DNA, 60 bp, Artificial
  Synthetic oligonucleotide
ggggagtggctaaccctcagatgctgcatataagcagctgcttttcgcctgtactgggtc

SEQ ID NO: 125831 - DNA, 50 bp, Artificial
  Synthetic oligonucleotide
cggaggctagaaggagagagatgggtgcgagagcgtcaatgctaaagggg

SEQ ID NO: 125832 - DNA, 60 bp, Artificial
  Synthetic oligonucleotide
actactctggaaaggtgaaggggcagtagtaatacaagataatagtgacataaaggtagt

SEQ ID NO: 125833 - DNA, 60 bp, Artificial
  Synthetic oligonucleotide
ccaaattttgactagcggaggctagaaggagagagatgggtgcgagagcgtcagtattaa

SEQ ID NO: 125834 - DNA, 60 bp, Artificial
  Synthetic oligonucleotide
gagatccctcagaccattttagtcagtgtggaaaatctctagcagtggcgcccgaacagg

SEQ ID NO: 125835 - DNA, 60 bp, Artificial
  Synthetic oligonucleotide
atacagactaaaacatttagtatgggcaagcagggagctggacagatccgcatgtaatcc

SEQ ID NO: 125836 - DNA, 60 bp, Artificial
  Synthetic oligonucleotide
caggccaaatgagagaaccaaggggaagtgacatagcaggaactactagtacccttcagg

SEQ ID NO: 125837 - DNA, 60 bp, Artificial
  Synthetic oligonucleotide
aatttgccaggaaaatggaaaccaaaaatgatagggggaattggaggttttatcaaagta

SEQ ID NO: 125838 - DNA, 60 bp, Artificial
  Synthetic oligonucleotide
gggggattggggggtacagtgcaggggaaagaataatagatataatagcaacagacatac

SEQ ID NO: 125839 - DNA, 60 bp, Artificial
  Synthetic oligonucleotide
ctagcggaggctagaaggagagagatgggtgcgagagcgtcaatattaagaggcgaaaac

SEQ ID NO: 125840 - DNA, 60 bp, Artificial
  Synthetic oligonucleotide
catagatttgccaggaaaatggaaaccaaaaatgatagggggaattggaggttttatcaa

SEQ ID NO: 125841 - DNA, 60 bp, Artificial
  Synthetic oligonucleotide
ccagcaaagctactctggaaaggtgaaggggcagtagtcatacaagacaatagtgaaatc

SEQ ID NO: 125842 - DNA, 60 bp, Artificial
  Synthetic oligonucleotide
ctagcggaggctagaaggagagagatgggtgcgagagcgtcaatattaagaggcgacaaa

SEQ ID NO: 125843 - DNA, 60 bp, Artificial
  Synthetic oligonucleotide
gactagcggaggctagaaggagagagatgggtgcgagagcgtcagtattaagaggcgaaa

SEQ ID NO: 125844 - DNA, 60 bp, Artificial
  Synthetic oligonucleotide
accagcaaaactactctggaaaggtgaaggggcagtagtaatacaagacaatactgatat

SEQ ID NO: 125845 - DNA, 60 bp, Artificial
  Synthetic oligonucleotide
ccagcaaaactactctggaaaggtgaaggggcagtagtaatacaagacaattgtgatata

SEQ ID NO: 125846 - DNA, 60 bp, Artificial
  Synthetic oligonucleotide
ccagcaaaactactctggaaaggtgaaggggcagtagtaatacaagacaatactgatata

SEQ ID NO: 125847 - DNA, 60 bp, Artificial
  Synthetic oligonucleotide
tctgtgggtctacaacacacaaggctacttccctgattggcagaattacacaccagggcc

SEQ ID NO: 125848 - DNA, 56 bp, Artificial
  Synthetic oligonucleotide
actagcggaggctagaaggagagagatgggtgcgagagcgtcagtattaactgggg

SEQ ID NO: 125849 - DNA, 60 bp, Artificial
  Synthetic oligonucleotide
acacctagtatgggcaagcagggagctggaaagatttgcacttaaccctggcctgctaga

SEQ ID NO: 125850 - DNA, 60 bp, Artificial
  Synthetic oligonucleotide
ggggattggggactacagtgcaggggaaagaataatagacataatagcaacagacataca

SEQ ID NO: 125851 - DNA, 60 bp, Artificial
  Synthetic oligonucleotide
ggagtggtcaaccctcagatgctgcatataagcagctgcttttcgcctgtactgggtctc

SEQ ID NO: 125852 - DNA, 60 bp, Artificial
  Synthetic oligonucleotide
gccaaatgagagagccaaggggaagtgacatagcaggaactactagtacccttcaggaac

SEQ ID NO: 125853 - DNA, 60 bp, Artificial
  Synthetic oligonucleotide
agagaccctatttggaaagggccagccaaactactctggaaaggtgaaggggcagtagta

SEQ ID NO: 125854 - DNA, 60 bp, Artificial
  Synthetic oligonucleotide
ttctggggttaaataaaatagtaagaatgtatagccctgtcagcattttggacataaaac

SEQ ID NO: 125855 - DNA, 60 bp, Artificial
  Synthetic oligonucleotide
cagtttggaaaggaccagcaaagcttctctggaaaggtgaaggggcagtagtaatacaag

SEQ ID NO: 125856 - DNA, 60 bp, Artificial
  Synthetic oligonucleotide
agggacaggggcggttcggggagtggctaaccctcagatgctgcatataagcagctgctt

SEQ ID NO: 125857 - DNA, 60 bp, Artificial
  Synthetic oligonucleotide
ggggattgggagtacagtgcaggggaaagaataatagacataatagcaacagacatacaa

SEQ ID NO: 125858 - DNA, 60 bp, Artificial
  Synthetic oligonucleotide
gagaccctatttggaaaggaccagccaaactactctggaaaggtgaaggggcagtagtga

SEQ ID NO: 125859 - DNA, 60 bp, Artificial
  Synthetic oligonucleotide
caatttggaaaggaccagcaaaactactctggaaaggtgaaggggcagtagtaatacagg

SEQ ID NO: 125860 - DNA, 52 bp, Artificial
  Synthetic oligonucleotide
gcggaggctagaaggagagagatgggtgcgagagcgtcaatattaagagggg

SEQ ID NO: 125861 - DNA, 60 bp, Artificial
  Synthetic oligonucleotide
ttctggggttgaataaaatagtaagaatgtatagccctgtcagcattttggacataaaac

SEQ ID NO: 125862 - DNA, 60 bp, Artificial
  Synthetic oligonucleotide
gagaccctatttggaaaggaccagccaagctactctggaaaggtgaaggggcagtagtga

SEQ ID NO: 125863 - DNA, 60 bp, Artificial
  Synthetic oligonucleotide
agagaccctatttggaaaggaccagccaagctactctggaaaggtgaaggggcagtagta

SEQ ID NO: 125864 - DNA, 60 bp, Artificial
  Synthetic oligonucleotide
gagaccctatttggaaaggaccagccaagctactctggaaaggtgaaggggcagtagtaa

SEQ ID NO: 125865 - DNA, 60 bp, Artificial
  Synthetic oligonucleotide
ggagtggctaaccctcagatgctgcatataagcagctgcttttcgcctgtactgggtctc

SEQ ID NO: 125866 - DNA, 60 bp, Artificial
  Synthetic oligonucleotide
ccaggaaaatggaaaccaaaaatgatagggggaattggaggttttatcaaagtaagacag

SEQ ID NO: 125867 - DNA, 60 bp, Artificial
  Synthetic oligonucleotide
tcctgggattaaataaaatagtaagaatgtatagccctgttagcattttggacataaaac

SEQ ID NO: 125868 - DNA, 57 bp, Artificial
  Synthetic oligonucleotide
ggggtacagtgcaggggaaagaataatagacataatagcaacagacatacagactaa

SEQ ID NO: 125869 - DNA, 60 bp, Artificial
  Synthetic oligonucleotide
gggattcttccctgattggcagggctacacaccaggaccagggccaagattcccactgac

SEQ ID NO: 125870 - DNA, 60 bp, Artificial
  Synthetic oligonucleotide
ctaccacacacaaggattcttccctgattggcagggctacacaccagggccagggactag

SEQ ID NO: 125871 - DNA, 60 bp, Artificial
  Synthetic oligonucleotide
ccaaggggaagtgacatagcaggaactactagtacccttcaggaacaaataacatggatg

SEQ ID NO: 125872 - DNA, 60 bp, Artificial
  Synthetic oligonucleotide
tagcggaggctagaaggagagagatgggtgcgagagcgtcagtattaaaaggcgaaaaat

SEQ ID NO: 125873 - DNA, 60 bp, Artificial
  Synthetic oligonucleotide
tctagtatgggcaagcagggagctggaaagattcgcacttaaccctggccttttagaaac

SEQ ID NO: 125874 - DNA, 60 bp, Artificial
  Synthetic oligonucleotide
agagaccctatctggaaaggaccagccaaactactctggaaaggtgaaggggcagtagta

SEQ ID NO: 125875 - DNA, 60 bp, Artificial
  Synthetic oligonucleotide
gagaccccagttggaaaggaccagccaaactactctggaaaggtgaaggggcagtagtaa

SEQ ID NO: 125876 - DNA, 60 bp, Artificial
  Synthetic oligonucleotide
gagaccctatctggaaaggaccagccaaactactctggaaaggtgaaggggcagtagtaa

SEQ ID NO: 125877 - DNA, 60 bp, Artificial
  Synthetic oligonucleotide
gagatccaagttggaaaggaccagccaaactactctggaaaggtgaaggggcagtagtaa

SEQ ID NO: 125878 - DNA, 60 bp, Artificial
  Synthetic oligonucleotide
gagactatggaaaacagatggcaggtgctgattgtgtggcaggtagacaggatgaggatt

SEQ ID NO: 125879 - DNA, 56 bp, Artificial
  Synthetic oligonucleotide
gcggaggctagaaggagagagatgggtgcgagagcgtcagtattaagaggcgaaaa

SEQ ID NO: 125880 - DNA, 60 bp, Artificial
  Synthetic oligonucleotide
cagctcctaggactttggggctgctctggaaaactcatctgcaccactaatgtgccttgg

SEQ ID NO: 125881 - DNA, 60 bp, Artificial
  Synthetic oligonucleotide
cagctcctaggactttggggctgctctggaaaactcatctgcaccactgatgtgccctgg

SEQ ID NO: 125882 - DNA, 56 bp, Artificial
  Synthetic oligonucleotide
aaaatcattagggattatggaaaacagatggcaggtgctgattgtgtggcaggtag

SEQ ID NO: 125883 - DNA, 57 bp, Artificial
  Synthetic oligonucleotide
agcggaggctagaaggagagagatgggtgcgagagcgtcagtattaagaggcgaaaa

SEQ ID NO: 125884 - DNA, 60 bp, Artificial
  Synthetic oligonucleotide
tcattagggattatggaaaacagatggcaggtgctgattgtgtggcaggtagacaggatg

SEQ ID NO: 125885 - DNA, 60 bp, Artificial
  Synthetic oligonucleotide
ctagcggaggctagaaggagagagatgggtgcgagagcgtcaatattaagagggggaaaa

SEQ ID NO: 125886 - DNA, 56 bp, Artificial
  Synthetic oligonucleotide
tggtgggcggactattggcaagccacctggattccagaatgggaatttgtcagtac

SEQ ID NO: 125887 - DNA, 60 bp, Artificial
  Synthetic oligonucleotide
cctgaaccatgtgcacctggagtaggacaaatctccagggaattagcagctagaggaggg

SEQ ID NO: 125888 - DNA, 60 bp, Artificial
  Synthetic oligonucleotide
tggcctgttaaggtaatacatacagacaatgggcctaattttacaagtgcagccatgaag

SEQ ID NO: 125889 - DNA, 60 bp, Artificial
  Synthetic oligonucleotide
acaaacaatagctccataaataatgataccagcagtccagagaaccttgtgaaacagtgt

SEQ ID NO: 125890 - DNA, 60 bp, Artificial
  Synthetic oligonucleotide
caagatattgtaccagagcagtaagtaacgctaatgcatcatagggacctgctagcatta

SEQ ID NO: 125891 - DNA, 60 bp, Artificial
  Synthetic oligonucleotide
gccccaccgatgacggaggaaatgaagggacaagagaatcaggaacagaaggaggaccag

SEQ ID NO: 125892 - DNA, 52 bp, Artificial
  Synthetic oligonucleotide
caacccctctcatttaagactcacatacatcaccaaccggaagcagaagcgc

SEQ ID NO: 125893 - DNA, 60 bp, Artificial
  Synthetic oligonucleotide
caggaaagccatcctagggcagagagtactgaccaggtgtgaataccctgcaggacatag

SEQ ID NO: 125894 - DNA, 60 bp, Artificial
  Synthetic oligonucleotide
ggcccatgcaacaacattacagcagttacttgtacacatggcatcaaaccaacagtaagt

SEQ ID NO: 125895 - DNA, 60 bp, Artificial
  Synthetic oligonucleotide
tacagttaacataacattcgagcgcagcattggtggagattcagaggtaacccatttgca

SEQ ID NO: 125896 - DNA, 60 bp, Artificial
  Synthetic oligonucleotide
ggcgaagtctctaggggaggaggatgggtgcgagagcgtctgtgttgacagggagcaaat

SEQ ID NO: 125897 - DNA, 60 bp, Artificial
  Synthetic oligonucleotide
gcctcctgcatccagcttgcaaccatggctttgaagacaaccacgggcaaatactgaaat

SEQ ID NO: 125898 - DNA, 60 bp, Artificial
  Synthetic oligonucleotide
gggcgcagcggcaacagcgctggcggtacagacccaatctttgatgaagggtatagtgca

SEQ ID NO: 125899 - DNA, 60 bp, Artificial
  Synthetic oligonucleotide
taaaacatttagtatgggcaagcagggagctggaaagattcgcacttaaccctggccttt

SEQ ID NO: 125900 - DNA, 60 bp, Artificial
  Synthetic oligonucleotide
cacacaaggcttcttccctgattggcagaattacacaccagggccagggactaggttccc

SEQ ID NO: 125901 - DNA, 60 bp, Artificial
  Synthetic oligonucleotide
cggaggctagaaggagagagatgggtgcgagagcgtcagtattaagaggggagaaattag

SEQ ID NO: 125902 - DNA, 60 bp, Artificial
  Synthetic oligonucleotide
cggaggctagaaggagagagatgggtgcgagagcgtcagtattaaaaggcgaaaaattag

SEQ ID NO: 125903 - DNA, 60 bp, Artificial
  Synthetic oligonucleotide
gcttctctggaaaggtgaaggggcagtagtaatacaagataatagtgacataaaagtagt

SEQ ID NO: 125904 - DNA, 60 bp, Artificial
  Synthetic oligonucleotide
tccctcagaccatttgagtcagtgtggaaaatctctagcagtggcgcccgaacagggact

SEQ ID NO: 125905 - DNA, 60 bp, Artificial
  Synthetic oligonucleotide
gaatgtatagccctgtcagcattttggacataagacaagggccaaaagaaccctttagag

SEQ ID NO: 125906 - DNA, 55 bp, Artificial
  Synthetic oligonucleotide
ctagcggaggctagaaggagagagatgggtgcgagagcgtcaatattaagagggg

SEQ ID NO: 125907 - DNA, 60 bp, Artificial
  Synthetic oligonucleotide
ccagcggaggctagaaggagagagatgggtgcgagagcgtcagtattaagaggcgaaaaa

SEQ ID NO: 125908 - DNA, 60 bp, Artificial
  Synthetic oligonucleotide
aggggaagtgacatagcaggaactactagtacccttcaggaacaagtagcatggatgaca

SEQ ID NO: 125909 - DNA, 60 bp, Artificial
  Synthetic oligonucleotide
aaatagtaagaatgtatagccctgtcagcattttggacataagacaagggccaaaagaac

SEQ ID NO: 125910 - DNA, 60 bp, Artificial
  Synthetic oligonucleotide
agagaccctatttggaaaggaccagccaaactactctggaaaggtgaaggggcagtagta

SEQ ID NO: 125911 - DNA, 60 bp, Artificial
  Synthetic oligonucleotide
ccagcaaaactactctggaaaggtgaaggggcagtagtaatacaggacaatagtgatata

SEQ ID NO: 125912 - DNA, 60 bp, Artificial
  Synthetic oligonucleotide
gagggagccaaggggaagtgacatagcaggaactactagtacccttcaagaacaaatagg

SEQ ID NO: 125913 - DNA, 60 bp, Artificial
  Synthetic oligonucleotide
gactaaaacatatagtatgggcaagcagggagctggaaagattcgcacttaaccctagcc

SEQ ID NO: 125914 - DNA, 60 bp, Artificial
  Synthetic oligonucleotide
acatctagtatgggcaagcagggagctggaaagatttgcacttaaccctggccttttaga

SEQ ID NO: 125915 - DNA, 60 bp, Artificial
  Synthetic oligonucleotide
gagaccccatttggaaaggaccagccaaactactctggaaaggtgaaggggcagtagtga

SEQ ID NO: 125916 - DNA, 60 bp, Artificial
  Synthetic oligonucleotide
tttagtatgggcaagcagggagctggaaagattcgcatgtaatcctgagctactagaaac

SEQ ID NO: 125917 - DNA, 60 bp, Artificial
  Synthetic oligonucleotide
caccaggccaaatgagggaaccaaggggaagtgacatagcaggaactactagtacccttc

SEQ ID NO: 125918 - DNA, 60 bp, Artificial
  Synthetic oligonucleotide
gccagctgagagaaccaaggggaagtgacatagcaggaactactagtacccttcaggaac

SEQ ID NO: 125919 - DNA, 60 bp, Artificial
  Synthetic oligonucleotide
acacatagtatgggcaagcagggagctggaaagatttgcacttaaccctggccttctaga

SEQ ID NO: 125920 - DNA, 60 bp, Artificial
  Synthetic oligonucleotide
gagaccccatttggaaaggaccagccaaactactctggaaaggtgaaggggcagtagtaa

SEQ ID NO: 125921 - DNA, 60 bp, Artificial
  Synthetic oligonucleotide
caggccaattgagagaaccaaggggaagtgacatagcaggaactactagtacccttcagg

SEQ ID NO: 125922 - DNA, 60 bp, Artificial
  Synthetic oligonucleotide
caggtcaaatgagagaaccaaggggaagtgacatagcaggaactactagtacccttcagg

SEQ ID NO: 125923 - DNA, 60 bp, Artificial
  Synthetic oligonucleotide
caggccaagtaagagaaccaaggggaagtgacatagcaggaactactagtacccttcagg

SEQ ID NO: 125924 - DNA, 60 bp, Artificial
  Synthetic oligonucleotide
gaccagcaaaactactctggaaaggtgaaggggcagtagtcatacaagacaatagtgaaa

SEQ ID NO: 125925 - DNA, 60 bp, Artificial
  Synthetic oligonucleotide
ggggctatggaaaacagatggcaggtgctgattgtgtggcaggtagacaggatgaggatt

SEQ ID NO: 125926 - DNA, 60 bp, Artificial
  Synthetic oligonucleotide
gactagcggaggctagaaggagagagatgggtgcgagagcgtcaatattaagagggaaaa

SEQ ID NO: 125927 - DNA, 60 bp, Artificial
  Synthetic oligonucleotide
aggattatggacaacagatggcaggtgctgattgtgtggcaggtagacaggatgaggatt

SEQ ID NO: 125928 - DNA, 57 bp, Artificial
  Synthetic oligonucleotide
ggggtacactgcaggggaaagaataatagacataatagcaacagacatacaaactag

SEQ ID NO: 125929 - DNA, 56 bp, Artificial
  Synthetic oligonucleotide
ggggtacagtgcaggggaaagaataatagacataatagcaacagacttacaaacta

SEQ ID NO: 125930 - DNA, 55 bp, Artificial
  Synthetic oligonucleotide
ggggtacagtgcaggggaaagaataatagacataatagcaacaaacatacaaact

SEQ ID NO: 125931 - DNA, 58 bp, Artificial
  Synthetic oligonucleotide
tagcggaggctagaaggagagagatgggtgcgagagcgtcagtattacgaggcgaaaa

SEQ ID NO: 125932 - DNA, 60 bp, Artificial
  Synthetic oligonucleotide
cggaggctagaaggagagagatgggtgcgagagcgtcaatactaagaggcggaaaattag

SEQ ID NO: 125933 - DNA, 60 bp, Artificial
  Synthetic oligonucleotide
cggaggctagaaggagagagatgggtgcgagagcgtcaatattaagcggaggaaaattag

SEQ ID NO: 125934 - DNA, 60 bp, Artificial
  Synthetic oligonucleotide
cggaggctagaaggagagagatgggtgcgagagcgtcaatattaagaggcgaaaagttag

SEQ ID NO: 125935 - DNA, 60 bp, Artificial
  Synthetic oligonucleotide
cggaggctagaaggagagagatgggtgcgagagcgtcaatattaagaggagggaaattag

SEQ ID NO: 125936 - DNA, 54 bp, Artificial
  Synthetic oligonucleotide
cggaggctagaaggagagagatgggtgcgagagcgtcagtattgaaagggaaaa

SEQ ID NO: 125937 - DNA, 60 bp, Artificial
  Synthetic oligonucleotide
gagatcctatttggaaaggaccagccaaactactctggaaaggtgaaggggcagtagtaa

SEQ ID NO: 125938 - DNA, 60 bp, Artificial
  Synthetic oligonucleotide
gagaccctatttggaaaggaccagccaaactactctggaaaggtgaaggggcagtagtta

SEQ ID NO: 125939 - DNA, 60 bp, Artificial
  Synthetic oligonucleotide
gagaccctatttggaaaggaccagccaaactactctggaaaggtgaaggggcagtagtca

SEQ ID NO: 125940 - DNA, 60 bp, Artificial
  Synthetic oligonucleotide
agagatcctatttggaaaggaccagccaaactactctggaaaggtgaaggggcagtagta

SEQ ID NO: 125941 - DNA, 60 bp, Artificial
  Synthetic oligonucleotide
gctttgcaggattcaggatcagaagtaaacatagtaacagactcacagtatgcattaggg

SEQ ID NO: 125942 - DNA, 55 bp, Artificial
  Synthetic oligonucleotide
cggaggctagaaggagagagatgggtgcgagcgcgtcagtattaaaaggggaaaa

SEQ ID NO: 125943 - DNA, 60 bp, Artificial
  Synthetic oligonucleotide
ctatgggcgcggcgtcaataacgctgacggtacaggccagacaattattgtctggtatag

SEQ ID NO: 125944 - DNA, 60 bp, Artificial
  Synthetic oligonucleotide
gggattatggaaaacagatggcaggtgctgattgtgtggcaggtagacaggatgaggatt

SEQ ID NO: 125945 - DNA, 60 bp, Artificial
  Synthetic oligonucleotide
agggactatggacaacagatggcaggtgctgattgtgtggcaggtagacaggatgaggat

SEQ ID NO: 125946 - DNA, 60 bp, Artificial
  Synthetic oligonucleotide
gggaagccatgcatggacaagtagactgtagtccagggatatggcaattagattgcacac

SEQ ID NO: 125947 - DNA, 60 bp, Artificial
  Synthetic oligonucleotide
tatgggcaagcagggagctggaaagatttgcacttaaccctggccttttagaaacagcag

SEQ ID NO: 125948 - DNA, 59 bp, Artificial
  Synthetic oligonucleotide
ctagcggaggctagaaggagagagatgggtgcgagtgcgtcaatattaagaggcgaaaa

SEQ ID NO: 125949 - DNA, 60 bp, Artificial
  Synthetic oligonucleotide
attgcaccaggccaaatgagagaaccaaggggaagtgacatagcaggaactactagtacc

SEQ ID NO: 125950 - DNA, 53 bp, Artificial
  Synthetic oligonucleotide
accagaggagatctctcgacgcaggactcggcttgctgaagtgcactcggcaa

SEQ ID NO: 125951 - DNA, 52 bp, Artificial
  Synthetic oligonucleotide
ccagaggaaatctctcgacgcaggactcggcttgctgaagtgcactcggcaa

SEQ ID NO: 125952 - DNA, 60 bp, Artificial
  Synthetic oligonucleotide
agagaccctatttggaaaggaccagccaaactactctggaaaggtgaaggggcagtggta

SEQ ID NO: 125953 - DNA, 60 bp, Artificial
  Synthetic oligonucleotide
cctaaaggatcaacagctcctagggctttggggctgctctggaaaactcatctgcaccac

SEQ ID NO: 125954 - DNA, 60 bp, Artificial
  Synthetic oligonucleotide
gggggattgggggatacagtgcaggggaaagaataatagacataatatcaacagacatac

SEQ ID NO: 125955 - DNA, 53 bp, Artificial
  Synthetic oligonucleotide
ggggaagccatgcatggacaagtagactgtagtccagggatatggcaattaga

SEQ ID NO: 125956 - DNA, 56 bp, Artificial
  Synthetic oligonucleotide
tccctcagaccattttagtcagtgtggaaaatctctagcagtggcgcccgaacagg

SEQ ID NO: 125957 - DNA, 60 bp, Artificial
  Synthetic oligonucleotide
tttgcaagattcaggatcagaagtaaacatagtaacagactcacagtatgcattaggaat

SEQ ID NO: 125958 - DNA, 60 bp, Artificial
  Synthetic oligonucleotide
ttgcaagattcaggatcagaagtaaacatagtaacagactcacagtatgcattaggaatc

SEQ ID NO: 125959 - DNA, 60 bp, Artificial
  Synthetic oligonucleotide
aagtaaaaatcattagggattatggaaaacagatggcaggtgctgattgtgtggcaggta

SEQ ID NO: 125960 - DNA, 60 bp, Artificial
  Synthetic oligonucleotide
accagaggagatctctcgacgcaggactcggcttgctgaagtgcactcggcaagaggcga

SEQ ID NO: 125961 - DNA, 60 bp, Artificial
  Synthetic oligonucleotide
catgggagacatggtggacagactattggcaagccacctggattcctgagtgggagtttg

SEQ ID NO: 125962 - DNA, 60 bp, Artificial
  Synthetic oligonucleotide
gagatccctcagaccaactttggtagtgtggaaaatctctagcagtggcgcccgaacagg

SEQ ID NO: 125963 - DNA, 60 bp, Artificial
  Synthetic oligonucleotide
gagaccctatttggaaagggccagccaaactactctggaaaggtgaaggggcagtagtaa

SEQ ID NO: 125964 - DNA, 60 bp, Artificial
  Synthetic oligonucleotide
gccaggaaaatggaaaccaagaatgataggaggaattggaggttttatcaaagtaagaca

SEQ ID NO: 125965 - DNA, 60 bp, Artificial
  Synthetic oligonucleotide
gggtctatcacacacaaggcttcttccctgattggcaaaactacacaccgggaccagggg

SEQ ID NO: 125966 - DNA, 59 bp, Artificial
  Synthetic oligonucleotide
ctagcggaggctagaaggagagagatgggtgcgagagcgtcagtattaaggggcgaaaa

SEQ ID NO: 125967 - DNA, 60 bp, Artificial
  Synthetic oligonucleotide
gcaagcagggagctggaaagatttgcacttaaccctggccttttagaaacatcagaaggc

SEQ ID NO: 125968 - DNA, 60 bp, Artificial
  Synthetic oligonucleotide
gatacaggagcagatgatacagtattagaagacataaatttgccaggaaaatggaaacca

SEQ ID NO: 125969 - DNA, 60 bp, Artificial
  Synthetic oligonucleotide
aaagatagactggttagttaaaagaattagggaaagagcagaagacagtggcaatgagag

SEQ ID NO: 125970 - DNA, 60 bp, Artificial
  Synthetic oligonucleotide
aaggatagctggactgtcaatgatatacagaagttagtgggaaaattaaactgggcaagt

SEQ ID NO: 125971 - DNA, 60 bp, Artificial
  Synthetic oligonucleotide
aaagaaagctggactgtcaatgatatacagaagttagtgggaaaattaaactgggcaagt

SEQ ID NO: 125972 - DNA, 60 bp, Artificial
  Synthetic oligonucleotide
aaagatagctggactgtcaatgatatacagaagttagtgggaaaattaaactgggcaagt

SEQ ID NO: 125973 - DNA, 52 bp, Artificial
  Synthetic oligonucleotide
ctatgggcgtggcgtcaataacgctgacggtacaggccagacaactgttgtc

SEQ ID NO: 125974 - DNA, 60 bp, Artificial
  Synthetic oligonucleotide
gaaaatagattggttaattaaaagaattagggaaagagcagaagacagtggcaatgagag

SEQ ID NO: 125975 - DNA, 60 bp, Artificial
  Synthetic oligonucleotide
gagaccctatttggaaaggaccagccagactactctggaaaggtgaaggggcagtagtaa

SEQ ID NO: 125976 - DNA, 60 bp, Artificial
  Synthetic oligonucleotide
gaccagcaaagctactctggaaaggtgaaggggcagtagtcatacaagacaatagtgaaa

SEQ ID NO: 125977 - DNA, 60 bp, Artificial
  Synthetic oligonucleotide
agagaccctatttggaaaggaccagccaagctactctggaaaggtgaaggggcagtagtg

SEQ ID NO: 125978 - DNA, 60 bp, Artificial
  Synthetic oligonucleotide
agagaccctatttggaaaggaccagccagactactctggaaaggtgaaggggcagtagta

SEQ ID NO: 125979 - DNA, 60 bp, Artificial
  Synthetic oligonucleotide
ccagccaaactactctggaaaggtgaaggggcagtagtaatacaagataacagtgacata

SEQ ID NO: 125980 - DNA, 60 bp, Artificial
  Synthetic oligonucleotide
gtcagataaaaggggaagccatgcatggacaagtagactgtagtccagggatatggcaat

SEQ ID NO: 125981 - DNA, 60 bp, Artificial
  Synthetic oligonucleotide
gcctgttgcaccaggccaattgagagaaccaaggggaagtgacatagcaggaactactag

SEQ ID NO: 125982 - DNA, 60 bp, Artificial
  Synthetic oligonucleotide
gaatagattggttgattgaaagaattagggaaagagcagaagacagtggcaatgagagtg

SEQ ID NO: 125983 - DNA, 57 bp, Artificial
  Synthetic oligonucleotide
ggtaagggatcaagctgagcaccttaagacagcagtacaaatggcagtattcattca

SEQ ID NO: 125984 - DNA, 51 bp, Artificial
  Synthetic oligonucleotide
caaaaatgataggaggaattggaggttttatcaaagtaagacagtatgatc

SEQ ID NO: 125985 - DNA, 60 bp, Artificial
  Synthetic oligonucleotide
ccgaggggaagtgacatagcaggaactactagtacccttgcggaacaaatagcatggatg

SEQ ID NO: 125986 - DNA, 60 bp, Artificial
  Synthetic oligonucleotide
ggaggctagaaggagagagatgggtgcgagagcgtcaatactaagaggggggaaattaga

SEQ ID NO: 125987 - DNA, 60 bp, Artificial
  Synthetic oligonucleotide
cagcagagaccctatttggaaaggaccagccaaactactctggaaaggtgaaggggcagt

SEQ ID NO: 125988 - DNA, 55 bp, Artificial
  Synthetic oligonucleotide
ctagcggaggctagaaggagagagatgggtgcgagagcgtcaattttaagagggg

SEQ ID NO: 125989 - DNA, 60 bp, Artificial
  Synthetic oligonucleotide
gactagcggaggctagaaggagagagatgggtgcgagagcgtcaatattaagaggggaaa

SEQ ID NO: 125990 - DNA, 58 bp, Artificial
  Synthetic oligonucleotide
tagcggaggctagaaggagagagatgggtgcgagagcgtcaatattacgaggggaaaa

SEQ ID NO: 125991 - DNA, 60 bp, Artificial
  Synthetic oligonucleotide
ccagccaagctactctggaaaggtgaaggggcagtagtaatacaagataacagtgacata

SEQ ID NO: 125992 - DNA, 50 bp, Artificial
  Synthetic oligonucleotide
ggaggctagaaggagagagatgggtgcgagagcgtcaatactaagagggg

SEQ ID NO: 125993 - DNA, 52 bp, Artificial
  Synthetic oligonucleotide
tagcggaggttagaaggagagagatgggtgcgagagcgtcaatattaagggg

SEQ ID NO: 125994 - DNA, 60 bp, Artificial
  Synthetic oligonucleotide
ctatgggcgcggcgtcaataacgctgacggtacaggccagacaactgttgtctggtatag

SEQ ID NO: 125995 - DNA, 60 bp, Artificial
  Synthetic oligonucleotide
gagttctctcgacgcaggactcggcttgctgaagtgcactcggcaagaggcgagagcggc

SEQ ID NO: 125996 - DNA, 60 bp, Artificial
  Synthetic oligonucleotide
gaaaatagactgtttaattaaaagaattagggaaagagcagaagacagtggcaatgagag

SEQ ID NO: 125997 - DNA, 55 bp, Artificial
  Synthetic oligonucleotide
ggagctggaaagatttgcacttaaccctggccttttagagacagcagaaggctgt

SEQ ID NO: 125998 - DNA, 60 bp, Artificial
  Synthetic oligonucleotide
gggcctattccaccaagccagatgagggaaccaaggggaagtgacatagcaggaactact

SEQ ID NO: 125999 - DNA, 60 bp, Artificial
  Synthetic oligonucleotide
agccctgtcagcattttggacataagacaagggccaaaggaaccctttagagactatgta

SEQ ID NO: 126000 - DNA, 60 bp, Artificial
  Synthetic oligonucleotide
actagcggaggctagaaggagagagatgggtgcgagagcgtcagtattacgaggcgaaaa

SEQ ID NO: 126001 - DNA, 60 bp, Artificial
  Synthetic oligonucleotide
ggggatacagtgcaggggaaagaataatagacataatatcaacagacatacaaactagag

SEQ ID NO: 126002 - DNA, 58 bp, Artificial
  Synthetic oligonucleotide
ggggatacagtgcaggggaaagaataatagacataatatcaacagacatacaaactag

SEQ ID NO: 126003 - DNA, 60 bp, Artificial
  Synthetic oligonucleotide
ggggtacagtgcaggggaaagaataatagacataatagcaacagatatacaaactaaaga

SEQ ID NO: 126004 - DNA, 60 bp, Artificial
  Synthetic oligonucleotide
cgggccaaatgagagaaccaaggggaagtgacatagcaggaactactagtacccttcagg

SEQ ID NO: 126005 - DNA, 60 bp, Artificial
  Synthetic oligonucleotide
cggaggctagaaggagagagatgggtgcgagagcgtcaatattaagaggcgaaaatttag

SEQ ID NO: 126006 - DNA, 60 bp, Artificial
  Synthetic oligonucleotide
tagcggaggctagaaggagagagatgggtgcgagagcgtcaatattacgaggggaaaaat

SEQ ID NO: 126007 - DNA, 55 bp, Artificial
  Synthetic oligonucleotide
cggaggctagaaggagagagatgggtgcgagagcgtcaatattacgaggcgaaaa

SEQ ID NO: 126008 - DNA, 60 bp, Artificial
  Synthetic oligonucleotide
cggaggctagaaggagagagatgggtgcgagagcgtcaatattaaaaggcggaaaattag

SEQ ID NO: 126009 - DNA, 58 bp, Artificial
  Synthetic oligonucleotide
tagcggaggctagaaggagagagatgggtgcgagagcgtcagtattaagaggcgaaaa

SEQ ID NO: 126010 - DNA, 60 bp, Artificial
  Synthetic oligonucleotide
tagcggaggctagaaggagagagatgggtgcgagagcgtcagtattaagaggcgaaaaat

SEQ ID NO: 126011 - DNA, 60 bp, Artificial
  Synthetic oligonucleotide
ggagacatggtggacagactattggcaagccacctggattcctgagtgggagtttgttaa

SEQ ID NO: 126012 - DNA, 60 bp, Artificial
  Synthetic oligonucleotide
ggtaagagatcaagctgagcaccttaagacagcagtacaaatggcagtattcattcacaa

SEQ ID NO: 126013 - DNA, 60 bp, Artificial
  Synthetic oligonucleotide
gcaggtaagagatcaagctgagcaccttaagacagcagtacaaatggcagtattcattca

SEQ ID NO: 126014 - DNA, 60 bp, Artificial
  Synthetic oligonucleotide
ggccaaatgagggagcctaggggaagtgacatagcaggaactactagtacccttcaggag

SEQ ID NO: 126015 - DNA, 58 bp, Artificial
  Synthetic oligonucleotide
gaagccatgcatggacaagtagactgtagtccagggatatggcaattagattgcacac

SEQ ID NO: 126016 - DNA, 60 bp, Artificial
  Synthetic oligonucleotide
gaaccaaggggaagtgacatagcaggaactactagtacccttcaggaacaaatatcatgg

SEQ ID NO: 126017 - DNA, 60 bp, Artificial
  Synthetic oligonucleotide
ggccaaatgagagaaccaaggggaagtgacatagcaggaactactagtacccttcaggaa

SEQ ID NO: 126018 - DNA, 60 bp, Artificial
  Synthetic oligonucleotide
attagggaaagagcagaagacagtggcaatgagagtgaaggggatacagaggaattggcc

SEQ ID NO: 126019 - DNA, 60 bp, Artificial
  Synthetic oligonucleotide
aaaatagtgagaatgtatagccctgtcagcattttggacataagacaagggccaaaggaa

SEQ ID NO: 126020 - DNA, 60 bp, Artificial
  Synthetic oligonucleotide
tgcccagggaccaccgacccaccaccgggaggtaagctggccagcaacttatctgtgtct

SEQ ID NO: 126021 - DNA, 60 bp, Artificial
  Synthetic oligonucleotide
agcccagggaccaccgacccaccaccgggaggtaagctggccagcaactgatctgtgtct

SEQ ID NO: 126022 - DNA, 60 bp, Artificial
  Synthetic oligonucleotide
gaccaccgacccaccaccgggaggtaagctggccagcaactgatctgtgtctgtccgatt

SEQ ID NO: 126023 - DNA, 60 bp, Artificial
  Synthetic oligonucleotide
tgcccagggaccaccgacccaccaccgggaggtaagctggccagcaattgatcggtgtct

SEQ ID NO: 126024 - DNA, 60 bp, Artificial
  Synthetic oligonucleotide
tgcccagggaccaccgacccaccaccgggaggtaagctggccagcaattgttctgtgtct

SEQ ID NO: 126025 - DNA, 60 bp, Artificial
  Synthetic oligonucleotide
ggaccaccgacccaccaccgggaggtaagctggccagcaactgatctgtgtctgtccgat

SEQ ID NO: 126026 - DNA, 60 bp, Artificial
  Synthetic oligonucleotide
ggcagcccccttgtaccctctcaccaaaacggggactctgtttaattggggcccagacca

SEQ ID NO: 126027 - DNA, 60 bp, Artificial
  Synthetic oligonucleotide
gaaggcaaggtaatcatagtagcagtccatgtagccagtggattcatagaagcagaagtt

SEQ ID NO: 126028 - DNA, 60 bp, Artificial
  Synthetic oligonucleotide
tctttgggtgtatcacactcagggattcttccctgattggcagaactacacaccaggacc

SEQ ID NO: 126029 - DNA, 60 bp, Artificial
  Synthetic oligonucleotide
gaaacagtaccagtaaaattaaagccaggaatggatggcccaaaagttaaacagtggcca

SEQ ID NO: 126030 - DNA, 60 bp, Artificial
  Synthetic oligonucleotide
ctgggtgttccctgctagactctcaccagcacttggccggtgctgggcagagtggctcca

SEQ ID NO: 126031 - DNA, 50 bp, Artificial
  Synthetic oligonucleotide
ctgggttttccctgctagactctcaccagcacttggccggtgctgggcag

SEQ ID NO: 126032 - DNA, 57 bp, Artificial
  Synthetic oligonucleotide
tagcaggtagagcctgagtgttccctgctagactctcaccagcacttggccagtgct

SEQ ID NO: 126033 - DNA, 60 bp, Artificial
  Synthetic oligonucleotide
gtagcagtccatgtggccagtggatatctagaagcagaagtgataccagcagaaacagga

SEQ ID NO: 126034 - DNA, 58 bp, Artificial
  Synthetic oligonucleotide
tccgatagactgagtcgcccgggtacccgtgtatccaataaatcctcttgctgttgca

SEQ ID NO: 126035 - DNA, 60 bp, Artificial
  Synthetic oligonucleotide
aagacataaatttgccaggaaaatggaaaccaaaaatgatagggggaattggaggtttta

SEQ ID NO: 126036 - DNA, 60 bp, Artificial
  Synthetic oligonucleotide
gctcttcactactcgctgcgtcgagagtgtacgagactctccaggtttggtaagaattat

SEQ ID NO: 126037 - DNA, 60 bp, Artificial
  Synthetic oligonucleotide
gagctcttcactactcgctgcgtcgagagtgtacgagactctccaggtttggtaagaaat

SEQ ID NO: 126038 - DNA, 60 bp, Artificial
  Synthetic oligonucleotide
ggctcttcactactcgctgcgtcgagagtgtacgagactctccaggtttggtaagaaata

SEQ ID NO: 126039 - DNA, 60 bp, Artificial
  Synthetic oligonucleotide
aaaaggaattgtatattagccttgctaagggagacatctagtgatataagtgtgaactac

SEQ ID NO: 126040 - DNA, 60 bp, Artificial
  Synthetic oligonucleotide
ggatttgtatattagccttgctaagggagacatctagtgatataagtgtgaactacactt

SEQ ID NO: 126041 - DNA, 60 bp, Artificial
  Synthetic oligonucleotide
gctcttcactactcgctgcgtcgagagtgtacgagactctccaggtttggtaagaaatat

SEQ ID NO: 126042 - DNA, 60 bp, Artificial
  Synthetic oligonucleotide
ggaagaggcaatcaaaaccgaaaccaacgatcatccggtgctggtgactcacgcgcagtt

SEQ ID NO: 126043 - DNA, 60 bp, Artificial
  Synthetic oligonucleotide
aggaagaggtaaccacaaccgaaaccaacgatcatccggtgctggtgactcacgcgctgt

SEQ ID NO: 126044 - DNA, 60 bp, Artificial
  Synthetic oligonucleotide
ggaattgtatattagccttgctaagggagacatctagtgatataagtgtgaactacactt

SEQ ID NO: 126045 - DNA, 60 bp, Artificial
  Synthetic oligonucleotide
actgtaataggacacaacacctctaaagttgcccgtgggaaggtgaagtgagatcgaatc

SEQ ID NO: 126046 - DNA, 52 bp, Artificial
  Synthetic oligonucleotide
cccgtgggaaggtgaagtgagatcgaatctttccttaacgcagacagctttt

SEQ ID NO: 126047 - DNA, 60 bp, Artificial
  Synthetic oligonucleotide
gtgacaagaaaatctactgtaataggacacaacacctctaaagttgcccgtgggaaggtg

SEQ ID NO: 126048 - DNA, 60 bp, Artificial
  Synthetic oligonucleotide
atctactgtaataggacacaacacctctaaagttgcccgtgggaaggtgaagtgagatcg

SEQ ID NO: 126049 - DNA, 60 bp, Artificial
  Synthetic oligonucleotide
gtgaccctttcattgactcaggaagtgactcagatggacccctttcaaaaccacagacag

SEQ ID NO: 126050 - DNA, 60 bp, Artificial
  Synthetic oligonucleotide
gtgaccccttcattgactcaggaagtgactcagatggacccttctaaaagccacagacag

SEQ ID NO: 126051 - DNA, 60 bp, Artificial
  Synthetic oligonucleotide
ctgtaacacaaagtgccacgtcctccacagatgaatcctcttcaactactacagccgctc

SEQ ID NO: 126052 - DNA, 60 bp, Artificial
  Synthetic oligonucleotide
gtggatattgtgaccccttcattgactcaggaagtgactcagatggacccttctaaaagc

SEQ ID NO: 126053 - DNA, 60 bp, Artificial
  Synthetic oligonucleotide
ccacaaccgaaaccaacgatcatccggtgctggtgactcacgcgctgtcaataccgtgac

SEQ ID NO: 126054 - DNA, 60 bp, Artificial
  Synthetic oligonucleotide
ccgtgacacagagtgccacgtcctccacagatgaatcctcttcagctgttacagccgctt

SEQ ID NO: 126055 - DNA, 60 bp, Artificial
  Synthetic oligonucleotide
tctagtgaagaacattaggcagggatatcaacccctctcgttacagatccctacccaacg

SEQ ID NO: 126056 - DNA, 58 bp, Artificial
  Synthetic oligonucleotide
cggtctctccctgggaggctaccagattgagcctgggtgttctctggtgagtctgctg

SEQ ID NO: 126057 - DNA, 60 bp, Artificial
  Synthetic oligonucleotide
ttctcatgccctctggatccggactttagaaagtacactgcattcaccattccatcggtg

SEQ ID NO: 126058 - DNA, 60 bp, Artificial
  Synthetic oligonucleotide
gaggactttagaaagtacactgcattcaccattccatcggtgaataatcagggcccagga

SEQ ID NO: 126059 - DNA, 60 bp, Artificial
  Synthetic oligonucleotide
atcctctagaactctgcccgggactttccagtcaccatgactacggggcccggttgctgc

SEQ ID NO: 126060 - DNA, 60 bp, Artificial
  Synthetic oligonucleotide
acggggcccggttgctgaggcaaccggggcggactcgtgggtgggactgggaggtactgg

SEQ ID NO: 126061 - DNA, 60 bp, Artificial
  Synthetic oligonucleotide
gagattatggaaaacagatggcaggtgatgattgtgtggcaggtagacaggatgaggatt

SEQ ID NO: 126062 - DNA, 60 bp, Artificial
  Synthetic oligonucleotide
gtgaactattgtggaaaggggaaggagcagtcatcataaaggtagggacagaaatcaaag

SEQ ID NO: 126063 - DNA, 60 bp, Artificial
  Synthetic oligonucleotide
ggggtacattgggtacctggacacaaaggaattcctcaaaatgaagaaatagataaatat

SEQ ID NO: 126064 - DNA, 60 bp, Artificial
  Synthetic oligonucleotide
agaaagggaagaatggacagtgaatgatattcaaaaattagtaggaaagttaaattgggc

SEQ ID NO: 126065 - DNA, 58 bp, Artificial
  Synthetic oligonucleotide
acagagacagcagagaccctatttggaaaggaccggcacagctcctgtggaaaggtga

SEQ ID NO: 126066 - DNA, 51 bp, Artificial
  Synthetic oligonucleotide
agttagctaactagctctgtatctggcggacccgtggtggaactgacgagt

SEQ ID NO: 126067 - DNA, 55 bp, Artificial
  Synthetic oligonucleotide
agttagctaactagctctgtatctggcggacccgtggtggaactgacgagttcgg

SEQ ID NO: 126068 - DNA, 60 bp, Artificial
  Synthetic oligonucleotide
ggccagtagccacaactgaggactctgagcctggggatgatgaatatctgctgacccacc

SEQ ID NO: 126069 - DNA, 60 bp, Artificial
  Synthetic oligonucleotide
acccaaggattgcccctggccgagtggtccgggctccacgaaatttgctgcgcagcccct

SEQ ID NO: 126070 - DNA, 60 bp, Artificial
  Synthetic oligonucleotide
cctcacaaacacatccacaagcgaaccaacaacaactccaaggccaccaaatgtctccac

SEQ ID NO: 126071 - DNA, 60 bp, Artificial
  Synthetic oligonucleotide
ccaggtccggagtgcatcgagaaaccagcaacggagcggcgaatcgacaagggagaaaca

SEQ ID NO: 126072 - DNA, 54 bp, Artificial
  Synthetic oligonucleotide
ccaggtccggagtgcatcgagaaaccagcaacggagcggcgaatcgacaagggg

SEQ ID NO: 126073 - DNA, 50 bp, Artificial
  Synthetic oligonucleotide
ccccaggtccggaatgcatcgagaaaccagcaacggagcggcgaatcgac

SEQ ID NO: 126074 - DNA, 60 bp, Artificial
  Synthetic oligonucleotide
tactccgaagacccctcgacagctaagggagttcctagggacggcaggcttctgtcgcct

SEQ ID NO: 126075 - DNA, 60 bp, Artificial
  Synthetic oligonucleotide
gaaccaaggggaagtgacatagcaggaactactagtacccttcaggaacaagtagcatgg

SEQ ID NO: 126076 - DNA, 56 bp, Artificial
  Synthetic oligonucleotide
ggggcaaccagtcaccttcctggtggatactggggcccaacactccgtgctgaccc

SEQ ID NO: 126077 - DNA, 59 bp, Artificial
  Synthetic oligonucleotide
tgttagacgtggtcaagagacaacaagaattgttgcgactgaccgtctggggaacaaaa

SEQ ID NO: 126078 - DNA, 60 bp, Artificial
  Synthetic oligonucleotide
tgttagacgtggtcaagagacaacaagaattgttgcgactgaccgtctggggaacaaaaa

SEQ ID NO: 126079 - DNA, 60 bp, Artificial
  Synthetic oligonucleotide
gcagagaccctatttggaaaggaccggcacagctcctgtggaaaggtgaaggagcagtag

SEQ ID NO: 126080 - DNA, 59 bp, Artificial
  Synthetic oligonucleotide
ttgtacgcggttaggagtcccctcaggatatagtagttgcgcttctgcatagggagggg

SEQ ID NO: 126081 - DNA, 60 bp, Artificial
  Synthetic oligonucleotide
ttgtacgcggttaggagtcccctcaggatatagtagttgcgcttctgcatagggaggggg

SEQ ID NO: 126082 - DNA, 60 bp, Artificial
  Synthetic oligonucleotide
ccctgagtgagaagcagtgtgtgctcatctgttcaaccctggtgtctagagatccctcag

SEQ ID NO: 126083 - DNA, 57 bp, Artificial
  Synthetic oligonucleotide
agtgcttgtattctgacaattgggcactcagattctgcggtctgagtcccttctcta

SEQ ID NO: 126084 - DNA, 60 bp, Artificial
  Synthetic oligonucleotide
cctggctgatcgtaggatccccgggacagcagaggagaacttacagaagtcttctggagg

SEQ ID NO: 126085 - DNA, 60 bp, Artificial
  Synthetic oligonucleotide
gaaggcttcatttggtgaccccgacgtgatcgttagggaatagtggtcggccacagacgg

SEQ ID NO: 126086 - DNA, 60 bp, Artificial
  Synthetic oligonucleotide
atttggtgaccccgacgtgatcgttagggaatagtggtcggccacagacggcgtggcgat

SEQ ID NO: 126087 - DNA, 60 bp, Artificial
  Synthetic oligonucleotide
accccgacgtgatcgttagggaatagtggtcggccacagacggcgtggcgatcctgccct

SEQ ID NO: 126088 - DNA, 60 bp, Artificial
  Synthetic oligonucleotide
tagaactttgcccgggactttccagtcaccatgactacggggcccggttgctgaggcaac

SEQ ID NO: 126089 - DNA, 50 bp, Artificial
  Synthetic oligonucleotide
cgggactttccagtcaccatgactacggggcccggttgctgaggcaaccg

SEQ ID NO: 126090 - DNA, 57 bp, Artificial
  Synthetic oligonucleotide
ataagccccatagccccagtgccagtaaaactaaaaccaggaatggatggaccaaaa

SEQ ID NO: 126091 - DNA, 60 bp, Artificial
  Synthetic oligonucleotide
gcccctatcctctgctaggaagagacttgctgactaaactaaaagcccaaatccacttcg

SEQ ID NO: 126092 - DNA, 60 bp, Artificial
  Synthetic oligonucleotide
ggcagagatcaactatggaagggacccggtgagctattgtggaaaggggaaggagcagtc

SEQ ID NO: 126093 - DNA, 60 bp, Artificial
  Synthetic oligonucleotide
ggcagagaccagctgtggaaaggacccggtgagctattgtggaaaggggaaggagcagtc

SEQ ID NO: 126094 - DNA, 60 bp, Artificial
  Synthetic oligonucleotide
gcagagatcaactgtggaagggacccggtgagctattgtggaaaggggaaggagcagtcg

SEQ ID NO: 126095 - DNA, 60 bp, Artificial
  Synthetic oligonucleotide
aggcagagatcaactgtggaagggacccggtgagctattgtggaaaggggaaggagcagt

SEQ ID NO: 126096 - DNA, 60 bp, Artificial
  Synthetic oligonucleotide
ggcagagatcaactgtggaagggacccggtgagctattgtggaaaggggaaggagcagtc

SEQ ID NO: 126097 - DNA, 60 bp, Artificial
  Synthetic oligonucleotide
atcgcaggtacactccttatgaccctgaggacccagggcaagaaaccaatgtgtccatgt

SEQ ID NO: 126098 - DNA, 60 bp, Artificial
  Synthetic oligonucleotide
atcgcaggtacactccttatgaccctgaggacccagggcaagaaaccaatgtgtctatgt

SEQ ID NO: 126099 - DNA, 60 bp, Artificial
  Synthetic oligonucleotide
cgcaggtacactccttatgaccctgaggacccagggcaagaaaccaatgtgtctatgtca

SEQ ID NO: 126100 - DNA, 60 bp, Artificial
  Synthetic oligonucleotide
gcggaggctagaaggagagagatgggtgcgagagcgtcaatattaagaggcgaaaaatta

SEQ ID NO: 126101 - DNA, 60 bp, Artificial
  Synthetic oligonucleotide
gggtacttccctgattggcagaactacacaccagggccagggaccagattcccactgacc

SEQ ID NO: 126102 - DNA, 60 bp, Artificial
  Synthetic oligonucleotide
gacatttctcaaaacaatgtagaaatgctccaaaaaacgggaaacaaggggctcagggga

SEQ ID NO: 126103 - DNA, 60 bp, Artificial
  Synthetic oligonucleotide
agtgctactatgtcttatatcgctttgacagaagtcaacaaattagatagtgtgcaaaat

SEQ ID NO: 126104 - DNA, 60 bp, Artificial
  Synthetic oligonucleotide
gcatccctggaatgaatcatggggtcagctaaatgattctacacagtgggatgactgggt

SEQ ID NO: 126105 - DNA, 60 bp, Artificial
  Synthetic oligonucleotide
ggtactaattttgtggcagagtcagtagcaaatctgttgaaattcctgaaggtgacacat

SEQ ID NO: 126106 - DNA, 60 bp, Artificial
  Synthetic oligonucleotide
acttgaagcagcattacaacttgctctcattacttgtaacaaagggagggaaagtatggg

SEQ ID NO: 126107 - DNA, 60 bp, Artificial
  Synthetic oligonucleotide
gctatcattgtcaactgtgtttcctgagatcattgggaattgactaccttgacagctcgc

SEQ ID NO: 126108 - DNA, 60 bp, Artificial
  Synthetic oligonucleotide
gagcccatggaagaatacccaataatgattgatggggctggaaacagaaactttcggcca

SEQ ID NO: 126109 - DNA, 60 bp, Artificial
  Synthetic oligonucleotide
ggcacagtagggcctaaggttccccaatggccacttactaaggagaagttattaggtgct

SEQ ID NO: 126110 - DNA, 65 bp, Artificial
  Synthetic oligonucleotide
catgtccaaaatttaaagtaccttttactaaagaacaagtcaaatgggaaatggaaaagggatgg

SEQ ID NO: 126111 - DNA, 53 bp, Artificial
  Synthetic oligonucleotide
tgtgggcaggaaagaaaattatgagggctaataaaggatggtccgcagcaaaa

SEQ ID NO: 126112 - DNA, 60 bp, Artificial
  Synthetic oligonucleotide
gaggatctcaatctggacagtttgtgggagtaacttataatttagaaaagagaccaacta

SEQ ID NO: 126113 - DNA, 60 bp, Artificial
  Synthetic oligonucleotide
ttctgacatttaaacgctcagattctgcggtctgagtcccttctctgctgggctagactc

SEQ ID NO: 126114 - DNA, 60 bp, Artificial
  Synthetic oligonucleotide
gtagcagatatcccagttactattttggggcgagatatccttcaagaattaggcgcacaa

SEQ ID NO: 126115 - DNA, 60 bp, Artificial
  Synthetic oligonucleotide
cctggccacaacacaggaagacaggtaagatgggagactctttgacatggagcaaagcgc

SEQ ID NO: 126116 - DNA, 60 bp, Artificial
  Synthetic oligonucleotide
ttgtcaggacaagagagaggcatttgaaaaaacttggtgggcaatagctgccgttaagat

SEQ ID NO: 126117 - DNA, 60 bp, Artificial
  Synthetic oligonucleotide
taactggtggaagataggtatgttcctattgtgtctgttggggaccactggaggattcct

SEQ ID NO: 126118 - DNA, 60 bp, Artificial
  Synthetic oligonucleotide
cctggagattcaaagcgaaggaggaaacatctatgactgttgcattaaggctcaagaagg

SEQ ID NO: 126119 - DNA, 60 bp, Artificial
  Synthetic oligonucleotide
ccgccgccgagaagaagaacgttggggtgaatcctcaccaagggtccttaaacctggaga

SEQ ID NO: 126120 - DNA, 60 bp, Artificial
  Synthetic oligonucleotide
gctttggggacttataatcatattaggacgcttgttgggatatgggcttcggggaattgc

SEQ ID NO: 126121 - DNA, 60 bp, Artificial
  Synthetic oligonucleotide
ggtgcaggatcctccgccagtcgctacctgaggaaaagataccatcacagacatgcatcg

SEQ ID NO: 126122 - DNA, 60 bp, Artificial
  Synthetic oligonucleotide
cgaagacaacatggggactatgggtcgttttgtgactaccgccgccgagaagaagaacgt

SEQ ID NO: 126123 - DNA, 60 bp, Artificial
  Synthetic oligonucleotide
ctggcagacgagactcatggctcaggggacaagtccaacatgcggaagctctccaggaac

SEQ ID NO: 126124 - DNA, 60 bp, Artificial
  Synthetic oligonucleotide
gaatattggaggacaacaaggcagcaatacagaatgggagttgcactcttcacaggacaa

SEQ ID NO: 126125 - DNA, 60 bp, Artificial
  Synthetic oligonucleotide
ggttacaataggaggtagactaaatggttcaggaatgactagtgccatagaatgttgggg

SEQ ID NO: 126126 - DNA, 65 bp, Artificial
  Synthetic oligonucleotide
ggaaggacaaaagtttgcacaattaatcatattacagcatcgatcaaatgataaacaaatctggg

SEQ ID NO: 126127 - DNA, 60 bp, Artificial
  Synthetic oligonucleotide
ctgtgccatccattaatcatcaggaaccagataaaagatatatatggaattgcttgccac

SEQ ID NO: 126128 - DNA, 60 bp, Artificial
  Synthetic oligonucleotide
ggggagataaagggtttggaagcacaggtgtattttgggtagagaatatccaagaggcac

SEQ ID NO: 126129 - DNA, 60 bp, Artificial
  Synthetic oligonucleotide
caaactgctgagaggatagcaatacaaatggcattagaagatactgaagagacactggta

SEQ ID NO: 126130 - DNA, 60 bp, Artificial
  Synthetic oligonucleotide
gggctttgagacgcctgaggataaattgcaggaagaggcaccctataattggctgggata

SEQ ID NO: 126131 - DNA, 60 bp, Artificial
  Synthetic oligonucleotide
caggaagctcagggattgcaatattataacccagaagaagaagtaatctgtgagattgaa

SEQ ID NO: 126132 - DNA, 60 bp, Artificial
  Synthetic oligonucleotide
gcgcaaaatattaggcaaggacccaaagaaccctatccagagtttgtagacagattgctg

SEQ ID NO: 126133 - DNA, 60 bp, Artificial
  Synthetic oligonucleotide
gggcctattcccatgacagcaaggttcattaggggattgggagttcctagagaaagacag

SEQ ID NO: 126134 - DNA, 60 bp, Artificial
  Synthetic oligonucleotide
gtgcagctaaaagaaggaatggatggaccaaaagtaaaacaatggcctctatccaaagag

SEQ ID NO: 126135 - DNA, 60 bp, Artificial
  Synthetic oligonucleotide
ccctgacgactacgagcacctgcatgaagcagaaggcttcatttggtgaccccgacgtga

SEQ ID NO: 126136 - DNA, 60 bp, Artificial
  Synthetic oligonucleotide
ccctgacgactacgagcacatgcatgaagcagaaggcttcatttggtgaccccgacgtga

SEQ ID NO: 126137 - DNA, 60 bp, Artificial
  Synthetic oligonucleotide
ctaacgattacgcgaacctgaatgaagcagaaggcttcatttggtgaccccgacgtgatc

SEQ ID NO: 126138 - DNA, 60 bp, Artificial
  Synthetic oligonucleotide
ccctaacggttgcgaacacctggatgaagcagaaggcttcatttggtgaccccgacgtga

SEQ ID NO: 126139 - DNA, 60 bp, Artificial
  Synthetic oligonucleotide
cagtactaagtggagaaaattagtagatttcagagaacttaataaaagaactcaagactt

SEQ ID NO: 126140 - DNA, 60 bp, Artificial
  Synthetic oligonucleotide
ccagttgctcttagcgggtctccaaaacgcgggcagaagccccaccaatttggccaaggt

SEQ ID NO: 126141 - DNA, 60 bp, Artificial
  Synthetic oligonucleotide
ctcctagcgggtctccaaaacgcgggcagaagccccaccaatttggccaaggtaaaaggg

SEQ ID NO: 126142 - DNA, 60 bp, Artificial
  Synthetic oligonucleotide
agcctgggagctctctggctagtgagggaacccactgcttaagcctcaataaagcttgcc

SEQ ID NO: 126143 - DNA, 60 bp, Artificial
  Synthetic oligonucleotide
agcctgggagctctctggctaactggggaacccactgcttaagcctcaataaagcttgcc

SEQ ID NO: 126144 - DNA, 60 bp, Artificial
  Synthetic oligonucleotide
agcctgggagctctctggctaactaaggaacccactgcttaagcctcaataaagcttgcc

SEQ ID NO: 126145 - DNA, 60 bp, Artificial
  Synthetic oligonucleotide
gcctgggagctctctggctaactggggaacccactgcttaagcctcaataaagcttgcct

SEQ ID NO: 126146 - DNA, 60 bp, Artificial
  Synthetic oligonucleotide
gcccgggagctctctggctagctggggaacccactgcttaagcctcaataaagcttgcct

SEQ ID NO: 126147 - DNA, 60 bp, Artificial
  Synthetic oligonucleotide
gcctgggagctctctggctagtgagggaacccactgcttaagcctcaataaagcttgcct

SEQ ID NO: 126148 - DNA, 60 bp, Artificial
  Synthetic oligonucleotide
gcctgggagctctctggctagctggggaacccactgcttaagcctcaataaagcttgcct

SEQ ID NO: 126149 - DNA, 60 bp, Artificial
  Synthetic oligonucleotide
gcctgggagctctctggctaacaagggaacccactgcttaagcctcaataaagcttgcct

SEQ ID NO: 126150 - DNA, 60 bp, Artificial
  Synthetic oligonucleotide
gcccgggagctctctggctaactggggaacccactgcttaagcctcaataaagcttgcct

SEQ ID NO: 126151 - DNA, 60 bp, Artificial
  Synthetic oligonucleotide
aaggagcaccgcgaggaggtaggggcagaggcagaggcccaccccgctgcttcaaatgtg

SEQ ID NO: 126152 - DNA, 60 bp, Artificial
  Synthetic oligonucleotide
ggactacgtagacagattttatcaagcccttagagcagaacaaacaccccaagatgtaaa

SEQ ID NO: 126153 - DNA, 60 bp, Artificial
  Synthetic oligonucleotide
cagctaagggacccaagaggttcagacatagcgggaacaaccagctctgttgctgagcaa

SEQ ID NO: 126154 - DNA, 60 bp, Artificial
  Synthetic oligonucleotide
gcaggaccaaacaaatgcctaaaatgtgggaagccaggacacttagcaaaagattgccgc

SEQ ID NO: 126155 - DNA, 60 bp, Artificial
  Synthetic oligonucleotide
gatgcctgcgcacggattccccacaggttcgccagctgcgggagcatacgacccagccag

SEQ ID NO: 126156 - DNA, 60 bp, Artificial
  Synthetic oligonucleotide
cgccagtcgtacgctatggaatgcttgcagatccgcttatcgggcaatcctcgaacatcc

SEQ ID NO: 126157 - DNA, 60 bp, Artificial
  Synthetic oligonucleotide
cagatcctccgcaggagcctcacgactcttcttcaactgcttagacaggagtgccaatac

SEQ ID NO: 126158 - DNA, 60 bp, Artificial
  Synthetic oligonucleotide
cccaacagaggagggatccaagcggaggagagagcttggcggcagcatttgaccaattgg

SEQ ID NO: 126159 - DNA, 60 bp, Artificial
  Synthetic oligonucleotide
cctggggagggaacagccagacaacgcaggaggagaagacaaagattccagcagcagcag

SEQ ID NO: 126160 - DNA, 60 bp, Artificial
  Synthetic oligonucleotide
taggacttatattgtttaggatggcttggcttatttggggatgcatagctagggttaggc

SEQ ID NO: 126161 - DNA, 60 bp, Artificial
  Synthetic oligonucleotide
ggattcacagtatgtcatgggaatcctgacagcacaacctacacaaagtgactccgtgct

SEQ ID NO: 126162 - DNA, 60 bp, Artificial
  Synthetic oligonucleotide
ccgcccctacatcaagtacccctacatcaagcagcactacggatccctgtccaaataccg

SEQ ID NO: 126163 - DNA, 60 bp, Artificial
  Synthetic oligonucleotide
gccactacttcccttgctttacagatagagccatccaacaggccatcagaggggaaagct

SEQ ID NO: 126164 - DNA, 60 bp, Artificial
  Synthetic oligonucleotide
atcttatgcactaccaatgtggatgggcttggtacacatgtagtagattcctcatcccct

SEQ ID NO: 126165 - DNA, 60 bp, Artificial
  Synthetic oligonucleotide
acagctgtagtgcaatggacggagcaggcagaggtagagttcagacaaaatcaagagatc

SEQ ID NO: 126166 - DNA, 60 bp, Artificial
  Synthetic oligonucleotide
gagacatggtagcagaactcaatcaggaagcacaacgccattttgggagagaactcctct

SEQ ID NO: 126167 - DNA, 60 bp, Artificial
  Synthetic oligonucleotide
gagagccactattaccaagctggatgatgggcaatggggatatcaattcaaacaggaggg

SEQ ID NO: 126168 - DNA, 60 bp, Artificial
  Synthetic oligonucleotide
cgatggggcatgcaatagaaattccaaattaggaaaggcaggcttcctaactaacacagg

SEQ ID NO: 126169 - DNA, 60 bp, Artificial
  Synthetic oligonucleotide
ctgtgggtgacaagactaacatggagggttagtggagagcatatagacaaatggaagggc

SEQ ID NO: 126170 - DNA, 60 bp, Artificial
  Synthetic oligonucleotide
ctttgtcaccacgtaccctaaatgcatgggttaaaacagttgaggaaaaaaggttcgggg

SEQ ID NO: 126171 - DNA, 60 bp, Artificial
  Synthetic oligonucleotide
gctgcgtcatttggtgtattcacgcagaacagaaagtgaaagatacagaggaagcagtgg

SEQ ID NO: 126172 - DNA, 57 bp, Artificial
  Synthetic oligonucleotide
ggcaggggtggtgcaggtagatctaggtgggcgacagatcagcacctgggtgagcaa

SEQ ID NO: 126173 - DNA, 60 bp, Artificial
  Synthetic oligonucleotide
catcaccagtcgagttccccggacgcggtaagtcgggacgcggggaggcgaagaggatcc

SEQ ID NO: 126174 - DNA, 60 bp, Artificial
  Synthetic oligonucleotide
ggaggactggagggcatatattggtcaccaaagagagagcaaatcctgaatctctatgcc

SEQ ID NO: 126175 - DNA, 60 bp, Artificial
  Synthetic oligonucleotide
cattcaaacaggtgtgtcacactacggtgccgtggactttcaacaatacaccagactggg

SEQ ID NO: 126176 - DNA, 60 bp, Artificial
  Synthetic oligonucleotide
ggggaaagagcacccctgaaggaagaaaattggcagctgatgacacatgggatgactggg

SEQ ID NO: 126177 - DNA, 60 bp, Artificial
  Synthetic oligonucleotide
gcttttgcaaaagatgctgctatcactgtcaagtttgctttctgcagaagggcttaggca

SEQ ID NO: 126178 - DNA, 60 bp, Artificial
  Synthetic oligonucleotide
ggcataaatggcagtcaggcagaaaacagaacagaaatatggcaaaagcatggagtgagc

SEQ ID NO: 126179 - DNA, 59 bp, Artificial
  Synthetic oligonucleotide
gacaagcatggtgccatttccagggtgattggaaaggagcctggagggaagtgagaaaa

SEQ ID NO: 126180 - DNA, 60 bp, Artificial
  Synthetic oligonucleotide
cgctcagtaagaaaacctatgcaccaccaagggaaggacacttagaatgcacatcaacag

SEQ ID NO: 126181 - DNA, 60 bp, Artificial
  Synthetic oligonucleotide
gggaagatataagctcatagaaattgaaccaatcggtttcgcgccaacagagataagaag

SEQ ID NO: 126182 - DNA, 57 bp, Artificial
  Synthetic oligonucleotide
gcaatgggtgcaacagcgacagcgttgacggtccagtcccagcaattacttgcaggg

SEQ ID NO: 126183 - DNA, 60 bp, Artificial
  Synthetic oligonucleotide
ggcttcgagacgccagataagaaggtgcagaaaagacctccatatgattggatgggatac

SEQ ID NO: 126184 - DNA, 60 bp, Artificial
  Synthetic oligonucleotide
gtcaggaggtacaaactatttgttggtggggacaagtagagcacacaacagggatcccct

SEQ ID NO: 126185 - DNA, 60 bp, Artificial
  Synthetic oligonucleotide
aaggaagagagccagtgtggaaaggaccagccactctcctctggaagggagaaggagcgg

SEQ ID NO: 126186 - DNA, 60 bp, Artificial
  Synthetic oligonucleotide
gtagcagtccatgtggccagtggcttcttagaagcagaagtcatagctagggaaacagga

SEQ ID NO: 126187 - DNA, 60 bp, Artificial
  Synthetic oligonucleotide
gatctacatacagggccagccagtacaagttctgttagatacaggagctgatgataccat

SEQ ID NO: 126188 - DNA, 60 bp, Artificial
  Synthetic oligonucleotide
ggaggatgttaatagattttagagctctcaataaagcaacacaggacttctttgaggtac

SEQ ID NO: 126189 - DNA, 60 bp, Artificial
  Synthetic oligonucleotide
taaagaagtgctgatcagcagggactttccagggtggtgcgagggcggtacttgggagtg

SEQ ID NO: 126190 - DNA, 60 bp, Artificial
  Synthetic oligonucleotide
ggccaggcaccaggaagccccgatgcttcggcttttgctttgagttagtgccggtagatg

SEQ ID NO: 126191 - DNA, 60 bp, Artificial
  Synthetic oligonucleotide
gctggtgagcctaacctggtctggccatccaggggtaagagcctccttgcttagaaggct

SEQ ID NO: 126192 - DNA, 60 bp, Artificial
  Synthetic oligonucleotide
ggtgtgcaaggaagcgatcaccttttggggaaaattacccatcatggaagtaccagtaga

SEQ ID NO: 126193 - DNA, 60 bp, Artificial
  Synthetic oligonucleotide
aggctggcagattgagccctgggaggttctctccagcactagcaggtagagcctgagtgt

SEQ ID NO: 126194 - DNA, 60 bp, Artificial
  Synthetic oligonucleotide
gctggcagatcgagccctgggaggttctctccagcactagcaggtagagcctgggtgttc

SEQ ID NO: 126195 - DNA, 60 bp, Artificial
  Synthetic oligonucleotide
ggttgagccctgggaggttctctccagcactagcaggtagagcctgggtgttccctgcta

SEQ ID NO: 126196 - DNA, 60 bp, Artificial
  Synthetic oligonucleotide
gatcgagccctgggaggttctctccagcactagcaggtagagcctgggtgttccctgcta

SEQ ID NO: 126197 - DNA, 60 bp, Artificial
  Synthetic oligonucleotide
gattgagccctgggaggttctctccagcactagcaggtagagcctgggtgttccctgcta

SEQ ID NO: 126198 - DNA, 60 bp, Artificial
  Synthetic oligonucleotide
agattgagccctgggaggttctctccagcactagcaggtagagcctgggtgttccctgct

SEQ ID NO: 126199 - DNA, 60 bp, Artificial
  Synthetic oligonucleotide
cagattgagccctgggaggttctctccagcactagcaggtagagcctgggtgttccctgc

SEQ ID NO: 126200 - DNA, 60 bp, Artificial
  Synthetic oligonucleotide
gctggcagattgagccctgggaggttctctccagcactagcaggtagagcctgggtgttc

SEQ ID NO: 126201 - DNA, 60 bp, Artificial
  Synthetic oligonucleotide
cagattgagccctgggaggttctctccagcactagcaggtagagcctgggttttccctgc

SEQ ID NO: 126202 - DNA, 60 bp, Artificial
  Synthetic oligonucleotide
tatccctcgactcccctccttccccacccagagaactacccgcaccctcaaagttctcac

SEQ ID NO: 126203 - DNA, 60 bp, Artificial
  Synthetic oligonucleotide
ggcggggttggggagtggctaaccctcagatgctgcatataagcagctgcttttcgcctg

SEQ ID NO: 126204 - DNA, 60 bp, Artificial
  Synthetic oligonucleotide
tcctcttcagctgttacagccgcttccgggcggatcaaagggactaaattgttagcccac

SEQ ID NO: 126205 - DNA, 56 bp, Artificial
  Synthetic oligonucleotide
gcagataagctttgtggtggaatgccactagaaactagggaaaactaggaggagag

SEQ ID NO: 126206 - DNA, 60 bp, Artificial
  Synthetic oligonucleotide
gtggaaaatctctagcagtggcgcccgaacagggacacgaaagcgaaagagaaaccagag

SEQ ID NO: 126207 - DNA, 60 bp, Artificial
  Synthetic oligonucleotide
gcagggcctgttgcacccggccaaatgagagaaccaaggggaagtgacatagcaggaact

SEQ ID NO: 126208 - DNA, 60 bp, Artificial
  Synthetic oligonucleotide
cagttgctcctagcgggtctccaaaacgcgggcagaagccccaccaatttggccaaggta

SEQ ID NO: 126209 - DNA, 60 bp, Artificial
  Synthetic oligonucleotide
gttgctcctagcgggtctccaaaacgcgggcagaagccccaccaatttggccaaggtaaa

SEQ ID NO: 126210 - DNA, 60 bp, Artificial
  Synthetic oligonucleotide
ccagttgctcatagcgggtctccaaaacgcgggcagaagccccaccaatttggccaaggt

SEQ ID NO: 126211 - DNA, 60 bp, Artificial
  Synthetic oligonucleotide
ctgccagctggaacgtcagcccagcgagccgaactgatcgcactcacccaagccctaaaa

SEQ ID NO: 126212 - DNA, 60 bp, Artificial
  Synthetic oligonucleotide
cagctggaacgtcagcccagcgagccgaactgatcgcactcacccaagccctgaaaatgg

SEQ ID NO: 126213 - DNA, 60 bp, Artificial
  Synthetic oligonucleotide
ggagtggccaaccctcagatgctgcatataagcagctgcttttcgcctgtactaagtctc

SEQ ID NO: 126214 - DNA, 60 bp, Artificial
  Synthetic oligonucleotide
gttctttctgacagtggggggccgctcatcgacctacttacagaagaccccccgccttat

SEQ ID NO: 126215 - DNA, 66 bp, Artificial
  Synthetic oligonucleotide
ctagatggagaaaattagtagatttcagagaacttaataaaagaactcaagatttctgggaggttc

SEQ ID NO: 126216 - DNA, 60 bp, Artificial
  Synthetic oligonucleotide
ctacgggacatgctagaaaaggtcaacttggaagccaggttacactttcatccagagttc

SEQ ID NO: 126217 - DNA, 60 bp, Artificial
  Synthetic oligonucleotide
aggactcatgctcatgtgctagtgggaccaacaccagtgaatattatagggagaaatgtt

SEQ ID NO: 126218 - DNA, 60 bp, Artificial
  Synthetic oligonucleotide
gtgtgtgccttccaagggggacatagagatcaggtagggactctgcaatttttggcaata

SEQ ID NO: 126219 - DNA, 60 bp, Artificial
  Synthetic oligonucleotide
tggtgctgggttttctaggtttcctctcagcagcaggtactgcaatgggcgcagcggcga

SEQ ID NO: 126220 - DNA, 60 bp, Artificial
  Synthetic oligonucleotide
gcagcaaaagagtgggagtatgtgcctcactttaaagtaccatggggatggtggtcgcat

SEQ ID NO: 126221 - DNA, 60 bp, Artificial
  Synthetic oligonucleotide
gacggatgcatggaaagaagtaaaagagagagtgaaaacaacaaaagggtatcgaggtac

SEQ ID NO: 126222 - DNA, 60 bp, Artificial
  Synthetic oligonucleotide
gcccctagaaggaagggatgctggaaatgtggatccccagaccatctcttgaaagactgc

SEQ ID NO: 126223 - DNA, 60 bp, Artificial
  Synthetic oligonucleotide
cagtatcgaggaaggtatacacgccaccgaggccagatgcgttaaagtgcagtgcacagg

SEQ ID NO: 126224 - DNA, 60 bp, Artificial
  Synthetic oligonucleotide
gacacaggagcagatgacacagtaattgaaggaatagaattaggaaatgattggacccca

SEQ ID NO: 126225 - DNA, 60 bp, Artificial
  Synthetic oligonucleotide
tacctgtgttaatgttactgccacttcatgcacacatatgattaatactactgtggcctc

SEQ ID NO: 126226 - DNA, 60 bp, Artificial
  Synthetic oligonucleotide
atctgaggagggcaggggaacaaaagagacaacagaggcaggaagagagcaagaagagag

SEQ ID NO: 126227 - DNA, 60 bp, Artificial
  Synthetic oligonucleotide
cgctctttggaagcgaccaactacaatagctcaaatagaagggcagaaagtggaggtcct

SEQ ID NO: 126228 - DNA, 60 bp, Artificial
  Synthetic oligonucleotide
agaaattagtaggaaagttaaactgggcaagtcaaatttacagtgggctaaggactaagg

SEQ ID NO: 126229 - DNA, 60 bp, Artificial
  Synthetic oligonucleotide
cagaagttagaaggtggacagtggtcctatcaaatagaacaggagtcaggaaaaccactg

SEQ ID NO: 126230 - DNA, 60 bp, Artificial
  Synthetic oligonucleotide
ggaaggctgccaacattcagactgccaatagagagagaggtatgggactaatggcggtcc

SEQ ID NO: 126231 - DNA, 60 bp, Artificial
  Synthetic oligonucleotide
ttagcacaccacctcttattagactcgggtacaacctagttaaggatcccataccaggag

SEQ ID NO: 126232 - DNA, 60 bp, Artificial
  Synthetic oligonucleotide
aaaaagcagaattagaagcagtattactggcattaaaagattcagggcctaaagtaaaca

SEQ ID NO: 126233 - DNA, 60 bp, Artificial
  Synthetic oligonucleotide
gatgatagggaaagaagcagtgtacctttcctgggtgcccgcacataagggcatcggagg

SEQ ID NO: 126234 - DNA, 60 bp, Artificial
  Synthetic oligonucleotide
tagtagcacagtgtccaaaatgtcaagtaaaaggggaagcaatccatgggcaagtggatg

SEQ ID NO: 126235 - DNA, 60 bp, Artificial
  Synthetic oligonucleotide
cttccagagcctccggtggattttagctaagatacaatatgggtggcaagagttcaaaga

SEQ ID NO: 126236 - DNA, 60 bp, Artificial
  Synthetic oligonucleotide
ttggctgagagaatattgctggattcaactgatccacccgttgagcaggatttggacgca

SEQ ID NO: 126237 - DNA, 60 bp, Artificial
  Synthetic oligonucleotide
cctgagcataatcctatatcaccaaggactctaaatgcctgggtcaaggtggtagaggag

SEQ ID NO: 126238 - DNA, 60 bp, Artificial
  Synthetic oligonucleotide
cttggtaggatttccagtgaaacctcaagtaccacttagaccaatgagttacaagctagc

SEQ ID NO: 126239 - DNA, 60 bp, Artificial
  Synthetic oligonucleotide
acacctggagagggttatgtgcggtggcacgagactttgctggatggccagccatggtgt

SEQ ID NO: 126240 - DNA, 60 bp, Artificial
  Synthetic oligonucleotide
aacagggacttgagagtggctgagagacctccgaggctaaggttcggcgcggcaggtcac

SEQ ID NO: 126241 - DNA, 60 bp, Artificial
  Synthetic oligonucleotide
atctgatgaagcaagagaagatgaagagcatagtttgctacatccagcagaaacaagtgg

SEQ ID NO: 126242 - DNA, 60 bp, Artificial
  Synthetic oligonucleotide
ctgcgtactctggtgcgtacacaaggaagtgaaagtgaaagacacagaggaagctgtagc

SEQ ID NO: 126243 - DNA, 60 bp, Artificial
  Synthetic oligonucleotide
gagcgaagtcctagagaagggaggaaaatgggtgcgagagcctcattgttgtcagggaag

SEQ ID NO: 126244 - DNA, 60 bp, Artificial
  Synthetic oligonucleotide
ggagaaattaagtaattggggagatgcattcagttggctgaatcttgactggtggatgca

SEQ ID NO: 126245 - DNA, 60 bp, Artificial
  Synthetic oligonucleotide
atgtaatgatggccctctctttacagagatggagctgccccctgaggatgaaggtccgca

SEQ ID NO: 126246 - DNA, 59 bp, Artificial
  Synthetic oligonucleotide
aatcctctacgatccattccgcaaacgagaaacatcatgtaacacttgttattgtaaaa

SEQ ID NO: 126247 - DNA, 60 bp, Artificial
  Synthetic oligonucleotide
atatgagcaacatggggatagcatagagggagtgcaggcaatgattcggctgcttcaaag

SEQ ID NO: 126248 - DNA, 60 bp, Artificial
  Synthetic oligonucleotide
gggtataggcctctctccccaccctcttatgttcagcagatccatatccacaacacgggg

SEQ ID NO: 126249 - DNA, 60 bp, Artificial
  Synthetic oligonucleotide
ctccagaggtttcaataaatgtgtcagaacgatttgatgcttggaataatagcttatatg

SEQ ID NO: 126250 - DNA, 60 bp, Artificial
  Synthetic oligonucleotide
ggtgtgcctggagacaagtctgccatacagtggtgccgtggacattcaacaaaacgcctg

SEQ ID NO: 126251 - DNA, 60 bp, Artificial
  Synthetic oligonucleotide
ttacagccatttagggaagagaatccagatgtcatcatttaccagtacatggatgatctc

SEQ ID NO: 126252 - DNA, 60 bp, Artificial
  Synthetic oligonucleotide
ttttcgggtttattacagagaaggaagggatcaactgtggagaggtccagctaagctgat

SEQ ID NO: 126253 - DNA, 60 bp, Artificial
  Synthetic oligonucleotide
gaggtgcagctgggaataccacatccaggaggattaaagcaatgtgagagaataacggta

SEQ ID NO: 126254 - DNA, 60 bp, Artificial
  Synthetic oligonucleotide
gaatatggcagaaaagatgtggatagtgaggccaatttggcgggtagacaggaggaaaat

SEQ ID NO: 126255 - DNA, 60 bp, Artificial
  Synthetic oligonucleotide
gatgcaaaaggctttgtttatccactgtcagacagggtgtagtcagagacatggacccaa

SEQ ID NO: 126256 - DNA, 60 bp, Artificial
  Synthetic oligonucleotide
gcagttaacgactctggggtagggatccctcagattcttgtggcagaagagccttgggct

SEQ ID NO: 126257 - DNA, 60 bp, Artificial
  Synthetic oligonucleotide
atgccataggggaacaccagggtgcgctgcagatagtaaaggaagtgatcaatgaggaag

SEQ ID NO: 126258 - DNA, 60 bp, Artificial
  Synthetic oligonucleotide
ccaggcccgataccagcagggcaacttagagaaccaacaggaagtgacatagcagggaca

SEQ ID NO: 126259 - DNA, 60 bp, Artificial
  Synthetic oligonucleotide
aggcttgctggggtgcctctcgctcttcgggtagaccgccagttgaggctcggccggcct

SEQ ID NO: 126260 - DNA, 60 bp, Artificial
  Synthetic oligonucleotide
ggggaaaggaagaacaagacccagtaaccacatcctctggggttgccttggtaaccaggc

SEQ ID NO: 126261 - DNA, 60 bp, Artificial
  Synthetic oligonucleotide
gcaaggaccaaaagagtcattcaaggattatgtggatagattttataaagccttgagagc

SEQ ID NO: 126262 - DNA, 60 bp, Artificial
  Synthetic oligonucleotide
gccctctcctgctgcatataagcagctgctctgcgcttgtaaaacgggtctctccctggg

SEQ ID NO: 126263 - DNA, 60 bp, Artificial
  Synthetic oligonucleotide
cgggtactagcagaggccatgcaaatgatgcaaagtaatatcatggctcagcaatcagca

SEQ ID NO: 126264 - DNA, 60 bp, Artificial
  Synthetic oligonucleotide
gcaaatttcacaagtgcagcagtacaggcggtctgctggtgggctcagatagagcacgcc

SEQ ID NO: 126265 - DNA, 60 bp, Artificial
  Synthetic oligonucleotide
ccggcctcaacgggagagatcaccgcttgcttatagccttgaagctcaataaagcatgcc

SEQ ID NO: 126266 - DNA, 60 bp, Artificial
  Synthetic oligonucleotide
ctcctggccacctgtccagagcaccaactcacctgggaccccatcgatggacgcgttgtc

SEQ ID NO: 126267 - DNA, 60 bp, Artificial
  Synthetic oligonucleotide
ggctacttccctgattggcagaactacacaccagggccaggggtcagattcccactgacc

SEQ ID NO: 126268 - DNA, 60 bp, Artificial
  Synthetic oligonucleotide
ccctggaggctaaacatatagaaccttatcaaggaccaggcaataaccctatctttccag

SEQ ID NO: 126269 - DNA, 60 bp, Artificial
  Synthetic oligonucleotide
tcagctgcccatcttggcccttataatgctccggcctacaggcaccacggcagtcctctt

SEQ ID NO: 126270 - DNA, 60 bp, Artificial
  Synthetic oligonucleotide
agttgccagccatgtccttccccgaccctgggctccgaccccaaaacatctacaccatgt

SEQ ID NO: 126271 - DNA, 60 bp, Artificial
  Synthetic oligonucleotide
gagagcagctgccagccatgtccttccccgaccctgggctccggccccaaaacgtctaca

SEQ ID NO: 126272 - DNA, 60 bp, Artificial
  Synthetic oligonucleotide
ggagagcagctgccagccatgtccttccccgaccctgggctccggccccaaaacgtctac

SEQ ID NO: 126273 - DNA, 60 bp, Artificial
  Synthetic oligonucleotide
cccatcgatggacgcgttgtcagctcagctctacaataccttatccctcggctcccctcc

SEQ ID NO: 126274 - DNA, 60 bp, Artificial
  Synthetic oligonucleotide
accccatcgatggacgcgttgtcagctcagctctacggtaccttatccctcgactcccct

SEQ ID NO: 126275 - DNA, 58 bp, Artificial
  Synthetic oligonucleotide
cttaacgaagccacagatgccctcatgcttgcccctctgttgcccctcaaccctacaa

SEQ ID NO: 126276 - DNA, 58 bp, Artificial
  Synthetic oligonucleotide
cttaatgaagccacagatgccctcatgcttgcccctctgctgcccctcaaccctacaa

SEQ ID NO: 126277 - DNA, 60 bp, Artificial
  Synthetic oligonucleotide
cccttataatactccggcctacaggcaccacggcagtccttttccaaacgaaacaaaagt

SEQ ID NO: 126278 - DNA, 53 bp, Artificial
  Synthetic oligonucleotide
tcgaaagtagcacttctgctgcctgcagcgaggcttggcccagggccagcgcc

SEQ ID NO: 126279 - DNA, 60 bp, Artificial
  Synthetic oligonucleotide
tcggcgactgtgtacaggccgattggtgccccatttctggggggctttgttccgctcggc

SEQ ID NO: 126280 - DNA, 60 bp, Artificial
  Synthetic oligonucleotide
actgtgtacaggccgattggtgccccatttctggagggctttgttccgctcggctacacc

SEQ ID NO: 126281 - DNA, 60 bp, Artificial
  Synthetic oligonucleotide
gccccgaacatcagattacctgggaccccatcgatggacgcgttgtcagctcagctctac

SEQ ID NO: 126282 - DNA, 60 bp, Artificial
  Synthetic oligonucleotide
ccgggcttgtttggactttcactgatggcagccccatgatttccggtccttgccccaagg

SEQ ID NO: 126283 - DNA, 60 bp, Artificial
  Synthetic oligonucleotide
cgggcttatttggactttcactgatggcagccccatgatttccggcccgtgccccaagga

SEQ ID NO: 126284 - DNA, 60 bp, Artificial
  Synthetic oligonucleotide
gactttcactgatggcagccccatgatttccggcccttgccccaaagaaggacagccatc

SEQ ID NO: 126285 - DNA, 60 bp, Artificial
  Synthetic oligonucleotide
atttcccaggtttcggacagagccttctctacgggtaccctgtctacgttttcggcgact

SEQ ID NO: 126286 - DNA, 60 bp, Artificial
  Synthetic oligonucleotide
ttcgggcagagccttctctacgggtaccctgtctacgttttcggcgactgtgtacaggcc

SEQ ID NO: 126287 - DNA, 60 bp, Artificial
  Synthetic oligonucleotide
gttttcggcgactgtgtacaggccgattggtgccccatttctggagggctttgttccgct

SEQ ID NO: 126288 - DNA, 60 bp, Artificial
  Synthetic oligonucleotide
cggacagagccttctctacgggtaccctgtctacgttttcggcgactgtgtacaggccga

SEQ ID NO: 126289 - DNA, 60 bp, Artificial
  Synthetic oligonucleotide
tcggacagagccttctctacgggtaccctgtctacgttttcggcgactgtgtacaggccg

SEQ ID NO: 126290 - DNA, 54 bp, Artificial
  Synthetic oligonucleotide
atcgaaagtagcacttctgctgcctgcagcgaggcttggcccagggccagcgcc

SEQ ID NO: 126291 - DNA, 60 bp, Artificial
  Synthetic oligonucleotide
cccacttcccaggtttcgggcagagccttctctacgggtaccctgtctacgttttcggcg

SEQ ID NO: 126292 - DNA, 60 bp, Artificial
  Synthetic oligonucleotide
gttttcggcgactgtgtacaggccgattggtgccccatttctggggggctttgttccgct

SEQ ID NO: 126293 - DNA, 60 bp, Artificial
  Synthetic oligonucleotide
gcaggacctattgcaccaggccaaatgagagaaccaaggggaagtgacatagcaggaact

SEQ ID NO: 126294 - DNA, 60 bp, Artificial
  Synthetic oligonucleotide
ggaccagcaaagcttctctggaaaggtgaaggggcagtagtaatacaagataatagtgaa

SEQ ID NO: 126295 - DNA, 60 bp, Artificial
  Synthetic oligonucleotide
cagtggtacaggccctggttctgacccaacagtatcaccaactcaaatcaatagatccag

SEQ ID NO: 126296 - DNA, 60 bp, Artificial
  Synthetic oligonucleotide
ggttacagcttaatggcacatatttagaaggaaataatacagcagtaatgatgaatgggg

SEQ ID NO: 126297 - DNA, 60 bp, Artificial
  Synthetic oligonucleotide
ggttccagaaacacctcgcagtggcgcccgaacagggacttgattagcccgcgagggggt

SEQ ID NO: 126298 - DNA, 60 bp, Artificial
  Synthetic oligonucleotide
gctaggcattgcacgcatggcatattacccttggttgctacttggctacagcttaatgga

SEQ ID NO: 126299 - DNA, 60 bp, Artificial
  Synthetic oligonucleotide
gctacgcattgcacgcatggcatattacccttggttgctacctggttacagcttaatggc

SEQ ID NO: 126300 - DNA, 60 bp, Artificial
  Synthetic oligonucleotide
acaataccccatgtcacgagaagccagactggggatcaagccccacatacagagactgct

SEQ ID NO: 126301 - DNA, 60 bp, Artificial
  Synthetic oligonucleotide
gtgtccataaaacaataccccatgtcacgagaagccagactggggatcaagccccacata

SEQ ID NO: 126302 - DNA, 60 bp, Artificial
  Synthetic oligonucleotide
taccccatgtcacacgaagccagactggggatcaagccccacatacagagactgttggac

SEQ ID NO: 126303 - DNA, 60 bp, Artificial
  Synthetic oligonucleotide
ataccccatatcacaagaagccagactggggatcaagccccacatacagagactattgga

SEQ ID NO: 126304 - DNA, 60 bp, Artificial
  Synthetic oligonucleotide
ataccccatgtcgcaagaagccagactggggatcaagccccacatacagaggctgttgga

SEQ ID NO: 126305 - DNA, 60 bp, Artificial
  Synthetic oligonucleotide
ggggaaagaaacagtataagttaaaacacatagtatgggcaagcagggagctggaaagat

SEQ ID NO: 126306 - DNA, 60 bp, Artificial
  Synthetic oligonucleotide
gatagtatagctcaatttggaaaagacctttggagtcatattgcaaattggattcctgga

SEQ ID NO: 126307 - DNA, 60 bp, Artificial
  Synthetic oligonucleotide
cctgggaggttctctccagcactggcaggtagagcctgggtgttccctgctagactctca

SEQ ID NO: 126308 - DNA, 57 bp, Artificial
  Synthetic oligonucleotide
tagcaggcagagcctgggtgttccctgctagactctcaccagcacttggccggtgct

SEQ ID NO: 126309 - DNA, 55 bp, Artificial
  Synthetic oligonucleotide
agagcctgggtgttccctgctagactctcaccagcacttggccggtgctgggcag

SEQ ID NO: 126310 - DNA, 60 bp, Artificial
  Synthetic oligonucleotide
ctgaggctatctgtatggggtattagacaactccgagctcgcctgctagccttagaaacc

SEQ ID NO: 126311 - DNA, 54 bp, Artificial
  Synthetic oligonucleotide
gttatctgtatggggtattagacaactccgagctcgcctgctagccttagaaac

SEQ ID NO: 126312 - DNA, 60 bp, Artificial
  Synthetic oligonucleotide
tagggacgccagagatccaatttggaagggaccagcgcggctgctgtggaaaggtgaagg

SEQ ID NO: 126313 - DNA, 60 bp, Artificial
  Synthetic oligonucleotide
aatctctagcagtggcgcccgaacagggacgctgaaagtgaaagagaaaccagaggagct

SEQ ID NO: 126314 - DNA, 60 bp, Artificial
  Synthetic oligonucleotide
gatgaaacatctagtatgggcaagcagggagctggaaagatttgcacttaaccctggcct

SEQ ID NO: 126315 - DNA, 60 bp, Artificial
  Synthetic oligonucleotide
ctattagaagcaagacaagtgtgtgttcccatctctcctagtcgccgcctggtcattcgg

SEQ ID NO: 126316 - DNA, 60 bp, Artificial
  Synthetic oligonucleotide
atatcagacagaactatggaaacttttggctgcttttggtcatggcaatagtctatattt

SEQ ID NO: 126317 - DNA, 60 bp, Artificial
  Synthetic oligonucleotide
aataccgctccaatataccaaacggaactatggaaacttttggctgcttttggtcatggc

SEQ ID NO: 126318 - DNA, 60 bp, Artificial
  Synthetic oligonucleotide
cagaactatggaaacttttggctgcttttggtcatggcaatagtctatatttacagccca

SEQ ID NO: 126319 - DNA, 54 bp, Artificial
  Synthetic oligonucleotide
accagcaaagcttctctggaaaggtgaaggggcagtagtaatacaagataatag

SEQ ID NO: 126320 - DNA, 60 bp, Artificial
  Synthetic oligonucleotide
ccctcagatcacgtagactgaagcgaaaatctctagcagtggcgcccgaacagggaccgg

SEQ ID NO: 126321 - DNA, 57 bp, Artificial
  Synthetic oligonucleotide
atccctcagaccattttagtccgtgtggaaaatctctagcagtggcgcccgaacagg

SEQ ID NO: 126322 - DNA, 60 bp, Artificial
  Synthetic oligonucleotide
gcctgggagctctctggctagcaagggaacccactgcttaagcctcaataaagcttgcct

SEQ ID NO: 126323 - DNA, 60 bp, Artificial
  Synthetic oligonucleotide
gctctggaaaggtgaaggggcagtagtaatacaggacaatagtgatataaaggtagtacc

SEQ ID NO: 126324 - DNA, 55 bp, Artificial
  Synthetic oligonucleotide
acctgaatgaagcagaaggcttcatttggtgaccccgacgtgatagttagggaat

SEQ ID NO: 126325 - DNA, 56 bp, Artificial
  Synthetic oligonucleotide
acctgaatgaagcagaaggcttcatttggtgaccccgacgtgatagttagggaata

SEQ ID NO: 126326 - DNA, 60 bp, Artificial
  Synthetic oligonucleotide
tgttggacgtggtcaagagacaacaagaattgttgcgactgaccgtctggggaacaaaga

SEQ ID NO: 126327 - DNA, 60 bp, Artificial
  Synthetic oligonucleotide
agagacaacaagaattgttgcgactgaccgtctggggaacaaagaacctccagactaggg

SEQ ID NO: 126328 - DNA, 60 bp, Artificial
  Synthetic oligonucleotide
cagtccatgtagccagtggatatttagaagcagaagttattccagcagaaacagggcaag

SEQ ID NO: 126329 - DNA, 60 bp, Artificial
  Synthetic oligonucleotide
cgccatgccttgctggccacgtgccccgaacatcagattacctgggaccccatcgatgga

SEQ ID NO: 126330 - DNA, 60 bp, Artificial
  Synthetic oligonucleotide
tcgatctaaatcgaaagtagcacttctgctgcctgcagcgaggcttggcccggggccagc

SEQ ID NO: 126331 - DNA, 53 bp, Artificial
  Synthetic oligonucleotide
ctaaatcgaaagtagcacttctgctgcctgcagcgaggcttggcccggggcca

SEQ ID NO: 126332 - DNA, 60 bp, Artificial
  Synthetic oligonucleotide
ccggagtagactagttagtcagctgcccattttggcccttataatactccggcctacagg

SEQ ID NO: 126333 - DNA, 60 bp, Artificial
  Synthetic oligonucleotide
gctgcccattttggcccttataatactccggcctacaggcaccacggcagtccttttcca

SEQ ID NO: 126334 - DNA, 60 bp, Artificial
  Synthetic oligonucleotide
ttgttccgctcggctacaccgccatgccttgctggccacgtgccccgaacatcagattac

SEQ ID NO: 126335 - DNA, 60 bp, Artificial
  Synthetic oligonucleotide
ttgttccgctcggctacaccgccatgccctgctggccacgtgccccgaacatcagattac

SEQ ID NO: 126336 - DNA, 60 bp, Artificial
  Synthetic oligonucleotide
accgccatgccttgctggccacgtgccccgaacatcagattacctgggaccccatcgatg

SEQ ID NO: 126337 - DNA, 52 bp, Artificial
  Synthetic oligonucleotide
taatagtagcagtccatgtagccagtgggtttatagaagcagaggtaatacc

SEQ ID NO: 126338 - DNA, 60 bp, Artificial
  Synthetic oligonucleotide
aagggcagcaccattggcacttgggttcctgggattactctcggctgcgggcactgcaat

SEQ ID NO: 126339 - DNA, 60 bp, Artificial
  Synthetic oligonucleotide
cagaaaagagcagcaccattggcacttgggttcctgggattactctcggcagcgggtact

SEQ ID NO: 126340 - DNA, 60 bp, Artificial
  Synthetic oligonucleotide
ggctccgaccgaaagggaagaagcgctacctagttcgacatttagtttgggcaaagaagg

SEQ ID NO: 126341 - DNA, 60 bp, Artificial
  Synthetic oligonucleotide
ggccgaaggggaagaagcgctacctagttcgacatttagtttgggcaggaaaggagctgg

SEQ ID NO: 126342 - DNA, 60 bp, Artificial
  Synthetic oligonucleotide
gagctgcataaaagcagatgctcgctggcttgtaactcagtctcttactaggagaccagc

SEQ ID NO: 126343 - DNA, 60 bp, Artificial
  Synthetic oligonucleotide
gcttgtaactcagtctcttactaggagaccagcttgagcctgggagttcgctggtgagcc

SEQ ID NO: 126344 - DNA, 60 bp, Artificial
  Synthetic oligonucleotide
gcagatgctcgctggcttgtaactcagtctcttactaggagaccagcttgagcctgggtg

SEQ ID NO: 126345 - DNA, 58 bp, Artificial
  Synthetic oligonucleotide
taaaagcagatgctcgctggcttgtaactcagtctcttactaggagaccagctagagc

SEQ ID NO: 126346 - DNA, 60 bp, Artificial
  Synthetic oligonucleotide
agagtgattgactacccgtctcgggggtctttcatttgggggctcgtccgggatccggag

SEQ ID NO: 126347 - DNA, 59 bp, Artificial
  Synthetic oligonucleotide
cctaacaaggatcctgggaacaaatacaaattggacaactatgtggggaatatacaaaa

SEQ ID NO: 126348 - DNA, 60 bp, Artificial
  Synthetic oligonucleotide
ttttgactagcggaggctagaaggagagagatgggtgcgagagcgtcagtattaagtggc

SEQ ID NO: 126349 - DNA, 60 bp, Artificial
  Synthetic oligonucleotide
agaaatagtatatagggatagtttctagattgtacgggagctcttcactactcgctgcgt

SEQ ID NO: 126350 - DNA, 60 bp, Artificial
  Synthetic oligonucleotide
atagtatataaggatagtttctagattgtacgggagctcttcactactcgctgcgtcgag

SEQ ID NO: 126351 - DNA, 60 bp, Artificial
  Synthetic oligonucleotide
cccctctgggtcaggtgaacattcagttttataagaattatcagattctaacttgctgtc

SEQ ID NO: 126352 - DNA, 60 bp, Artificial
  Synthetic oligonucleotide
ttgctcagaaggtccaaaaccaagacctaggcacgatcctgtccttcgatgtgacatgtt

SEQ ID NO: 126353 - DNA, 50 bp, Artificial
  Synthetic oligonucleotide
ttaaataatacttatagccctgtattaaaatatactccacatcaactctt

SEQ ID NO: 126354 - DNA, 60 bp, Artificial
  Synthetic oligonucleotide
acgttcctggtctcctgttgtaggccaattggtccaggagagggtggctaggcctgcatc

SEQ ID NO: 126355 - DNA, 60 bp, Artificial
  Synthetic oligonucleotide
cgttcctggtctcctgttgttggccaattggtccaggagagggtggctaggcctgcttct

SEQ ID NO: 126356 - DNA, 60 bp, Artificial
  Synthetic oligonucleotide
ttgtcaatataggtcatttggttcaatcagctggacaattgactcatgtaactatagctc

SEQ ID NO: 126357 - DNA, 60 bp, Artificial
  Synthetic oligonucleotide
aaggtgattcactctgatcaaggtgcagcattcacttcttcaacctttgctgaatgggca

SEQ ID NO: 126358 - DNA, 60 bp, Artificial
  Synthetic oligonucleotide
aaggtgattcactctgatcaaggtgcagcattcacttcttcaacctttgcggaatgggca

SEQ ID NO: 126359 - DNA, 60 bp, Artificial
  Synthetic oligonucleotide
gacctgcagactcttagtgagcttgttggccctgaaaatgccggagagggagatctggtc

SEQ ID NO: 126360 - DNA, 60 bp, Artificial
  Synthetic oligonucleotide
gtcccccctctgggtcaggtgaacattcagttttataagaattatcagattctaacttgc

SEQ ID NO: 126361 - DNA, 60 bp, Artificial
  Synthetic oligonucleotide
gctcagaaggtccaaaaccaagacctaggcacgatcctgtccttcgatgtgacatgtttg

SEQ ID NO: 126362 - DNA, 60 bp, Artificial
  Synthetic oligonucleotide
cgtaggcacgatcctgtccttcgatgtgacatgtttgaaaagcatcacaagcctcggccg

SEQ ID NO: 126363 - DNA, 60 bp, Artificial
  Synthetic oligonucleotide
tttgcggaatgggcaaaggaaagaggtatacatttggaattcagtactccttaccacccc

SEQ ID NO: 126364 - DNA, 60 bp, Artificial
  Synthetic oligonucleotide
ctttgctgaatgggcaaaggaaagaggtatacatttggaattcagtactccttatcaccc

SEQ ID NO: 126365 - DNA, 60 bp, Artificial
  Synthetic oligonucleotide
ctttgagccacgactgccaaatctacaactaagattaccacatttggttggaattattgc

SEQ ID NO: 126366 - DNA, 60 bp, Artificial
  Synthetic oligonucleotide
aatagtatataggaataacaatagattgtacgggagctcttcactactcgctgcgtcgag

SEQ ID NO: 126367 - DNA, 60 bp, Artificial
  Synthetic oligonucleotide
ggacctgcagactctgagtgagcttgttggccctgaaaatgccggagagggagagctgac

SEQ ID NO: 126368 - DNA, 60 bp, Artificial
  Synthetic oligonucleotide
agagatccctcagatcacgtagactgaagcagaaaatctctagcagtggcgcccgaacag

SEQ ID NO: 126369 - DNA, 60 bp, Artificial
  Synthetic oligonucleotide
ggggagtggctaaccctcagatgctgcatataagcagctgcttctcgcttgtactgggtc

SEQ ID NO: 126370 - DNA, 60 bp, Artificial
  Synthetic oligonucleotide
cattcgatctcagcttctttttaaaagaaaaggggggactggaagggttaatttactcta

SEQ ID NO: 126371 - DNA, 60 bp, Artificial
  Synthetic oligonucleotide
tatgcagacattttactgcatagcacttatttcccttgctttacagcgggagaagtgaga

SEQ ID NO: 126372 - DNA, 60 bp, Artificial
  Synthetic oligonucleotide
gtaacactaaaaccaggaatggatggaccaaagataaaacaatggcccctctccaaggag

SEQ ID NO: 126373 - DNA, 59 bp, Artificial
  Synthetic oligonucleotide
aaaagtactcatgcttcagtgctagtgggccctacccctgtaaatattataggtagaaa

SEQ ID NO: 126374 - DNA, 60 bp, Artificial
  Synthetic oligonucleotide
gaacaattaaagagaccttgaccaaattagccttagagaccggtggaaaagactgggtga

SEQ ID NO: 126375 - DNA, 60 bp, Artificial
  Synthetic oligonucleotide
gaaaccccacccagggaccaccgacccaccaacgggaggtaagctggccagcgaccgttg

SEQ ID NO: 126376 - DNA, 60 bp, Artificial
  Synthetic oligonucleotide
accggagggaacttttaatctctctgtcatttttgcagttaaaaagattgtctttcagga

SEQ ID NO: 126377 - DNA, 60 bp, Artificial
  Synthetic oligonucleotide
gctcaggtaagtcagggactggccactcaactggggataaattggaagttacattgtgcg

SEQ ID NO: 126378 - DNA, 60 bp, Artificial
  Synthetic oligonucleotide
tgcatccggagccgtggtctcgttgttccttgggagggtttctcctaactattgaccgcc

SEQ ID NO: 126379 - DNA, 60 bp, Artificial
  Synthetic oligonucleotide
gcccacttgggacgattgccaacagctcctacagattcttttcaccactgaggaacggga

SEQ ID NO: 126380 - DNA, 60 bp, Artificial
  Synthetic oligonucleotide
tcccatcagcccacttgggacgattgccaacagctcctacagattcttttcaccactgag

SEQ ID NO: 126381 - DNA, 60 bp, Artificial
  Synthetic oligonucleotide
tgggccggcccagggccaaagacagatggttcccagaaatagatgagtcaacagcagttt

SEQ ID NO: 126382 - DNA, 60 bp, Artificial
  Synthetic oligonucleotide
gccttcaccggacagtcagccccagatatcaagaaaaagttacagaggctagaggggctc

SEQ ID NO: 126383 - DNA, 60 bp, Artificial
  Synthetic oligonucleotide
agtccggcagacgactcgggtcctgactccactgtgattttgcccctccgagccatagga

SEQ ID NO: 126384 - DNA, 60 bp, Artificial
  Synthetic oligonucleotide
atagttccgatcctgagggaccagccgcggggaccaggagtcgccgtgcccgcagtccgg

SEQ ID NO: 126385 - DNA, 60 bp, Artificial
  Synthetic oligonucleotide
gcccctccgagccataggacccccggccgagcccaatggcctggtccctctacaatattg

SEQ ID NO: 126386 - DNA, 60 bp, Artificial
  Synthetic oligonucleotide
tccagcagacaactcgggtcctgactccactgtgattttgcccctccgagccataggacc

SEQ ID NO: 126387 - DNA, 60 bp, Artificial
  Synthetic oligonucleotide
tagaaagaatgaacagaacaattaaagagaccttgaccaaattagccttagagaccggtg

SEQ ID NO: 126388 - DNA, 60 bp, Artificial
  Synthetic oligonucleotide
ccaaggggaagtgacatagcaggaactactagtacccttcaggaacaaataagatggatg

SEQ ID NO: 126389 - DNA, 53 bp, Artificial
  Synthetic oligonucleotide
gggatgtgcgtttagacaagtctgccacactactgtaccatggccaaatgcaa

SEQ ID NO: 126390 - DNA, 59 bp, Artificial
  Synthetic oligonucleotide
tggcagatagaatatattcatttcctgatccgccaactgatacgcctcttgacttggct

SEQ ID NO: 126391 - DNA, 60 bp, Artificial
  Synthetic oligonucleotide
ggcagatagaatatattcatttcctgatccgccaactgatacgcctcttgacttggctat

SEQ ID NO: 126392 - DNA, 60 bp, Artificial
  Synthetic oligonucleotide
ggcagatagaatatattcatttcctgatccgccaactgatacgcctcttgacttggctgt

SEQ ID NO: 126393 - DNA, 60 bp, Artificial
  Synthetic oligonucleotide
ggagtctttgtgctagggttcttgggttttctcgcgacggcaggttctgcaatgggcgca

SEQ ID NO: 126394 - DNA, 60 bp, Artificial
  Synthetic oligonucleotide
caggacttgagagccataaatgaagcaacagtcacattacacccatccgtccctaaccca

SEQ ID NO: 126395 - DNA, 60 bp, Artificial
  Synthetic oligonucleotide
gacgacctcttactagctggcaccatggaggctcagtgcctagagggaacaagagctctc

SEQ ID NO: 126396 - DNA, 60 bp, Artificial
  Synthetic oligonucleotide
atctgggcttcaacatcatgcagggccaatgaatgctggggactgaaagaaagcaggcag

SEQ ID NO: 126397 - DNA, 60 bp, Artificial
  Synthetic oligonucleotide
gaaagcaggcagtttgtgccattcctgtccctaccatctgccggaatgttcgtgagttcc

SEQ ID NO: 126398 - DNA, 60 bp, Artificial
  Synthetic oligonucleotide
cccctatactgtaattctaaccacccccaccactcttaaagtaacaggaatagatgcttg

SEQ ID NO: 126399 - DNA, 60 bp, Artificial
  Synthetic oligonucleotide
aggactggggctcactatttcttggatatataaatgggtcacagacagaatacctgtgtc

SEQ ID NO: 126400 - DNA, 60 bp, Artificial
  Synthetic oligonucleotide
gggaccaagccaggagacagcgtttcagacaatcaaaactaaactcactgaggctccagc

SEQ ID NO: 126401 - DNA, 60 bp, Artificial
  Synthetic oligonucleotide
gacgatgatctcaaagccctgctctgaccacataagcattcgcattgatggaagaggcct

SEQ ID NO: 126402 - DNA, 60 bp, Artificial
  Synthetic oligonucleotide
gagtgggagactgccctcgatccagagacctctttgcctgacaatacagagaaggagacg

SEQ ID NO: 126403 - DNA, 60 bp, Artificial
  Synthetic oligonucleotide
tataatctgactgcccaaaagactcaatggtggtcatcctccaatcgctcaaagcccaag

SEQ ID NO: 126404 - DNA, 60 bp, Artificial
  Synthetic oligonucleotide
accctactgggctggtactatctcattgctcatcttcctgcactctgctcctctgtctcc

SEQ ID NO: 126405 - DNA, 60 bp, Artificial
  Synthetic oligonucleotide
ttacctaactgactgcccagttcccctgatgggaaaagacctgctggctaaaatggggac

SEQ ID NO: 126406 - DNA, 60 bp, Artificial
  Synthetic oligonucleotide
gagcccatgctccaccatctttggactacggagtcagagtgagtcctaacctgcagttcc

SEQ ID NO: 126407 - DNA, 60 bp, Artificial
  Synthetic oligonucleotide
gggtatggctcctcagaactgctattatagggagaaattgtcttgcgaggtggggaggac

SEQ ID NO: 126408 - DNA, 60 bp, Artificial
  Synthetic oligonucleotide
gggaacaaacacaggagaccactggccttggcaagccagagagctggacccattagagcc

SEQ ID NO: 126409 - DNA, 60 bp, Artificial
  Synthetic oligonucleotide
taagaaacaccccacctcccgttccggccacaactaagaatttgttcttagccctggcag

SEQ ID NO: 126410 - DNA, 60 bp, Artificial
  Synthetic oligonucleotide
ccataggttcggttctgcactacagaccagggacagtgtaaggtgctagtagcccagtcc

SEQ ID NO: 126411 - DNA, 59 bp, Artificial
  Synthetic oligonucleotide
gccggccccacctccaggagccaaaggtccccagatgccagatagcccaccaccttctg

SEQ ID NO: 126412 - DNA, 60 bp, Artificial
  Synthetic oligonucleotide
cactatgccacccttcttgtaataacataacaactgtgtgctctctgtccaagccagcag

SEQ ID NO: 126413 - DNA, 56 bp, Artificial
  Synthetic oligonucleotide
ccccttggctaagaaggcagctgcaagcctttccaactgtgctaatcactatgcca

SEQ ID NO: 126414 - DNA, 60 bp, Artificial
  Synthetic oligonucleotide
cggggaaagaaaccaccattgttggggccacaggtaaccaaacccacaggcccttctgcg

SEQ ID NO: 126415 - DNA, 60 bp, Artificial
  Synthetic oligonucleotide
ccaggggccaccattggctcacacatgcacgaatgactcaatatcaagggttactatgtg

SEQ ID NO: 126416 - DNA, 60 bp, Artificial
  Synthetic oligonucleotide
ctatggtcagaattcaagtagggggccaccccatagactttatggttgacacaggtgccg

SEQ ID NO: 126417 - DNA, 60 bp, Artificial
  Synthetic oligonucleotide
ggatcagcccaactcaaattgacagaaccgccctctcctttaatcatggctcttgctgta

SEQ ID NO: 126418 - DNA, 60 bp, Artificial
  Synthetic oligonucleotide
cagtgcaatctaccaaaatcgcttggccttggattatttacttgcttctgaaggagggct

SEQ ID NO: 126419 - DNA, 60 bp, Artificial
  Synthetic oligonucleotide
cctctgagagctggcagctaccaccttgttggtgagagaggttgacaagttgaccctggg

SEQ ID NO: 126420 - DNA, 60 bp, Artificial
  Synthetic oligonucleotide
gccacgctcctgtcttaattgatctaaaacccagagctcaactggtaaagctatggcaat

SEQ ID NO: 126421 - DNA, 60 bp, Artificial
  Synthetic oligonucleotide
cctggataggctgcttcagcacggactgttaataaaatgtcagtacccttggaacacccc

SEQ ID NO: 126422 - DNA, 60 bp, Artificial
  Synthetic oligonucleotide
cagaccataactgcctggaggtactagatgaggtgttttccagcaggcctgacttgactg

SEQ ID NO: 126423 - DNA, 60 bp, Artificial
  Synthetic oligonucleotide
ccagtttctccagaacctatgagcaggcgtctccattcagctcaggcagcagccactcca

SEQ ID NO: 126424 - DNA, 60 bp, Artificial
  Synthetic oligonucleotide
ggactggcattcatggctgaaacagtacaacaggtggcaaaagctttacagatccgatgg

SEQ ID NO: 126425 - DNA, 60 bp, Artificial
  Synthetic oligonucleotide
gaggccatccctacctgaactgaaaaggcaaggaaagtaatcaaggcactcctgagaaac

SEQ ID NO: 126426 - DNA, 60 bp, Artificial
  Synthetic oligonucleotide
ataatgcctgccaggggccccacagaccagctggggcacagcactgcagactgtccccat

SEQ ID NO: 126427 - DNA, 60 bp, Artificial
  Synthetic oligonucleotide
ggaagccgacaaccgagctggcctcttgtgccaccgttgtctgggaactgggggaggcca

SEQ ID NO: 126428 - DNA, 60 bp, Artificial
  Synthetic oligonucleotide
cctcatttggtgatggttggcctccagaagggaccttagatgtgttcacagttgcagcag

SEQ ID NO: 126429 - DNA, 60 bp, Artificial
  Synthetic oligonucleotide
cttgccctggatagacatgttgctggtggccctcttaaaagtgagatgctcaccccgagc

SEQ ID NO: 126430 - DNA, 60 bp, Artificial
  Synthetic oligonucleotide
ttggcgggcaccaaagggattatattggatttgtggaaaaaaatggcctattccatactc

SEQ ID NO: 126431 - DNA, 60 bp, Artificial
  Synthetic oligonucleotide
gagcaactgggagttcctatatacagcacagggtgcccagagagaccggagggctgtcca

SEQ ID NO: 126432 - DNA, 60 bp, Artificial
  Synthetic oligonucleotide
actccttttgatcccgaggcccctgagaaccaaagggtgataaatcagatatccataaaa

SEQ ID NO: 126433 - DNA, 60 bp, Artificial
  Synthetic oligonucleotide
ctcttggagatatcacacccctatctatatgctgaaccgcatcatcagactacaggcagt

SEQ ID NO: 126434 - DNA, 60 bp, Artificial
  Synthetic oligonucleotide
tagccggtaccgatctgagccactcagcaccaacctgatcggcctagcggagtctgactg

SEQ ID NO: 126435 - DNA, 60 bp, Artificial
  Synthetic oligonucleotide
ccagcccttttccaccgctgatctcctcaactggaaacaccgcactccctcatattctga

SEQ ID NO: 126436 - DNA, 60 bp, Artificial
  Synthetic oligonucleotide
agccactccagcattacaaatgcccttacgggagacacggggaccacagcaagtcacccc

SEQ ID NO: 126437 - DNA, 60 bp, Artificial
  Synthetic oligonucleotide
ggccttaatcagagcactggagctcagccaagaccagcaagttaatatctataccgactc

SEQ ID NO: 126438 - DNA, 60 bp, Artificial
  Synthetic oligonucleotide
aacttggaaaggatgggatgcagacagtctctttggtaaatggttctcttggttgggaga

SEQ ID NO: 126439 - DNA, 60 bp, Artificial
  Synthetic oligonucleotide
gactcagaaggagagtggaaacaggttcctggacaggacgtcagactggtgagtgccccg

SEQ ID NO: 126440 - DNA, 60 bp, Artificial
  Synthetic oligonucleotide
ctgaataaaccttgcttttccatatctctgagtgctgtttgtctccttctgttgccacag

SEQ ID NO: 126441 - DNA, 60 bp, Artificial
  Synthetic oligonucleotide
gctggcccacaaactagtctgccaagaacatgagctaacccacatggacaaaactgcctt

SEQ ID NO: 126442 - DNA, 60 bp, Artificial
  Synthetic oligonucleotide
caccaaaagggggatgacccagtaacaaaaggaaaccatagtgctgatgcagcttccaga

SEQ ID NO: 126443 - DNA, 60 bp, Artificial
  Synthetic oligonucleotide
cattggaaaaatgaatgccccaaccgtcctgagaaaaagaccaaagccccacctagccgg

SEQ ID NO: 126444 - DNA, 60 bp, Artificial
  Synthetic oligonucleotide
aacagggaccagagggcgcagaccctgcctgctgaacctggctgatcgtaggatccctag

SEQ ID NO: 126445 - DNA, 60 bp, Artificial
  Synthetic oligonucleotide
agaggcgacagaggacttgctgcacctcaattctctctttggaaaagaccagtagtcaca

SEQ ID NO: 126446 - DNA, 60 bp, Artificial
  Synthetic oligonucleotide
ggcgacagaggacttgctgcacctcaattctctctttggaaaagaccagtagtcacagca

SEQ ID NO: 126447 - DNA, 51 bp, Artificial
  Synthetic oligonucleotide
gctctctggctagtagaggaacccactgcttaagcctcaataaagcttgcc

SEQ ID NO: 126448 - DNA, 60 bp, Artificial
  Synthetic oligonucleotide
ccccagtaccagtaaaactaaaaccaggaatggatggaccaaaagtaaaacaatggcccc

SEQ ID NO: 126449 - DNA, 60 bp, Artificial
  Synthetic oligonucleotide
ccccagtgccagtaaaactaaaaccaggaatggatggaccaaaagtaaaacaatggcccc

SEQ ID NO: 126450 - DNA, 60 bp, Artificial
  Synthetic oligonucleotide
cgcagatacactccttatgaccctgaggacccagggcaagaaaccaatgtgtccatgtca

SEQ ID NO: 126451 - DNA, 54 bp, Artificial
  Synthetic oligonucleotide
tagcggaggctagaaggagagagatgggtgcgagagcgtcagtattaagtgggg

SEQ ID NO: 126452 - DNA, 60 bp, Artificial
  Synthetic oligonucleotide
caagttaagtgtgtgttcccatctctcctagtcgccgcctggtcattcggtgttcatctg

SEQ ID NO: 126453 - DNA, 56 bp, Artificial
  Synthetic oligonucleotide
acctgaatgaagcagaaggcttcatttggtgaccccgacgtgatcgttagggaata

SEQ ID NO: 126454 - DNA, 60 bp, Artificial
  Synthetic oligonucleotide
gtccctaacgattgcgaacacctgaatgaagcagaaggcttcatttggtgaccccgacgt

SEQ ID NO: 126455 - DNA, 60 bp, Artificial
  Synthetic oligonucleotide
gagaccctatttggaaaggaccagccaaactactgtggaaaggtgaaggggcagtagtaa

SEQ ID NO: 126456 - DNA, 60 bp, Artificial
  Synthetic oligonucleotide
ctcgcgtggctcttaaggttgctctccctcagcaaggggcccaggactttctctacttcc

SEQ ID NO: 126457 - DNA, 56 bp, Artificial
  Synthetic oligonucleotide
ggcttttaaggttgctctccctcagcaaggggcccaggactttctctacttccttg

SEQ ID NO: 126458 - DNA, 60 bp, Artificial
  Synthetic oligonucleotide
ggtggttcgcctgactttcatgggttcagaaatatgtctggtaatgtacattttgagggg

SEQ ID NO: 126459 - DNA, 59 bp, Artificial
  Synthetic oligonucleotide
aaaaggaaggtggttaagaagaaacctcaggcactcagaaggaaacccctgcctccggt

SEQ ID NO: 126460 - DNA, 60 bp, Artificial
  Synthetic oligonucleotide
ggccatacagcggccgaaagacattggggtccaatctcagccgatccaaaacctatggtc

SEQ ID NO: 126461 - DNA, 60 bp, Artificial
  Synthetic oligonucleotide
gcctttgaggaagtgagtcaaccctttaatttgtatactgattctaaatatgtgacaggg

SEQ ID NO: 126462 - DNA, 60 bp, Artificial
  Synthetic oligonucleotide
gtcacggggatcccctacaatccccaaggacaggccattgttgaacgaacgcaccaaaat

SEQ ID NO: 126463 - DNA, 60 bp, Artificial
  Synthetic oligonucleotide
taaagaccctgattatattgttgtgccctacaccaaagttcaatttgatctcctattaca

SEQ ID NO: 126464 - DNA, 60 bp, Artificial
  Synthetic oligonucleotide
cgcgccgcaattaggggtaaaccccaggggccttaagccccgagttctatggcaaatgga

SEQ ID NO: 126465 - DNA, 60 bp, Artificial
  Synthetic oligonucleotide
gcggttcgtgctcgcagggctctcacccttgactcttttaatagctcttctgtgcaagat

SEQ ID NO: 126466 - DNA, 60 bp, Artificial
  Synthetic oligonucleotide
cttatgggactaggggaacagcatatgcagaaatagatacagaggtagacaagctgtctg

SEQ ID NO: 126467 - DNA, 60 bp, Artificial
  Synthetic oligonucleotide
gatgacattcttttggcacacccatcaagatccattgtcgatgaaatacttacttccatg

SEQ ID NO: 126468 - DNA, 60 bp, Artificial
  Synthetic oligonucleotide
cccgtctgcgcacaaacggatgagcccatcagacaaagacatactcattctctgctgcaa

SEQ ID NO: 126469 - DNA, 60 bp, Artificial
  Synthetic oligonucleotide
ggagattctaatccgatctcaacaagaaaacttactcctgaggcatgcaaagctcttcaa

SEQ ID NO: 126470 - DNA, 60 bp, Artificial
  Synthetic oligonucleotide
agaggtacgcagcagaacatgggacggatagtataccaaagcaggcttaccccatttggc

SEQ ID NO: 126471 - DNA, 60 bp, Artificial
  Synthetic oligonucleotide
gaggagtgcgcttgtcaaaataggagacaggtggtggcaaccagggacttataggggacc

SEQ ID NO: 126472 - DNA, 60 bp, Artificial
  Synthetic oligonucleotide
agagagcagtgcaatagagttttatcagttcctaataaaggtctctccttggtttcccga

SEQ ID NO: 126473 - DNA, 60 bp, Artificial
  Synthetic oligonucleotide
ctgaggcaaggaccacagccaacttcctcttacaagccgcatcaaccttgtccttcagaa

SEQ ID NO: 126474 - DNA, 59 bp, Artificial
  Synthetic oligonucleotide
ttgggatttctcccttccctcgcctagtgtagatcagtcagatcagattaaaagcaaaa

SEQ ID NO: 126475 - DNA, 60 bp, Artificial
  Synthetic oligonucleotide
cccatacagaattgtttcgcttagtcgcagcctcaagacatcttattctcaaaaggccag

SEQ ID NO: 126476 - DNA, 60 bp, Artificial
  Synthetic oligonucleotide
tagactcttctgcctacgactatgcagcgatcatagtcaagaggccgccatatgtgctgc

SEQ ID NO: 126477 - DNA, 52 bp, Artificial
  Synthetic oligonucleotide
ttttatgggagagagtgatgaagatgacacgcctgtttgggaaccgctgcca

SEQ ID NO: 126478 - DNA, 60 bp, Artificial
  Synthetic oligonucleotide
cctgaagccccacctttcacaatacatgatttgcctcgaggcacccctggaagtgcaggt

SEQ ID NO: 126479 - DNA, 58 bp, Artificial
  Synthetic oligonucleotide
aaaagggcccctcctgggctctgccccagatgtaagaaaggctatcactggaagagtg

SEQ ID NO: 126480 - DNA, 60 bp, Artificial
  Synthetic oligonucleotide
tttgttatctgcagaagccaagtccgtgactgaagaggaattagaggaaggtttaaccgg

SEQ ID NO: 126481 - DNA, 60 bp, Artificial
  Synthetic oligonucleotide
cggactcaccacagggaactgcagtctcgcctacagagaagaggtaggttacggtgagcc

SEQ ID NO: 126482 - DNA, 60 bp, Artificial
  Synthetic oligonucleotide
caggatgccgaaacaccaatctgggtccccgaccgattcatccgaccttttactgagcgg

SEQ ID NO: 126483 - DNA, 60 bp, Artificial
  Synthetic oligonucleotide
aggtcggccgactgcggcagctggcgcccgaacagggaccctcggataagtgacccttgt

SEQ ID NO: 126484 - DNA, 60 bp, Artificial
  Synthetic oligonucleotide
tcacaaactccccaaacctctttgaccttatttcttgctttgttgtctgtcctcggcccc

SEQ ID NO: 126485 - DNA, 60 bp, Artificial
  Synthetic oligonucleotide
gtgtctgttcgccatcccgtctccgctcgtcacttatccttcactttccagagggtcccc

SEQ ID NO: 126486 - DNA, 60 bp, Artificial
  Synthetic oligonucleotide
gtcctaacattcacctctcgtgtgtttgtgtctgttcgccatcccgtctccgctcgtcac

SEQ ID NO: 126487 - DNA, 60 bp, Artificial
  Synthetic oligonucleotide
ttacattggtcatatcagaggacacactggacttcccggtcctttggcacagggaaatgc

SEQ ID NO: 126488 - DNA, 54 bp, Artificial
  Synthetic oligonucleotide
ggggaaagggtgataaaaggcgtatgtgggaactttggttgactaccttgggga

SEQ ID NO: 126489 - DNA, 60 bp, Artificial
  Synthetic oligonucleotide
cttaaaagatgtcaccacaaatgctgtgttagcatggagggccattccgcctcctggagt

SEQ ID NO: 126490 - DNA, 60 bp, Artificial
  Synthetic oligonucleotide
atgagactttcatttcaaggctcgaggaagctgtttaccgaatgatgcccagaggggaag

SEQ ID NO: 126491 - DNA, 60 bp, Artificial
  Synthetic oligonucleotide
gacctctaccacaccactagagaaaggaattgtgatttttacagacgggtcagcaaatgg

SEQ ID NO: 126492 - DNA, 60 bp, Artificial
  Synthetic oligonucleotide
caatggctcaccccgagtgactggcaccaaacagccagagctaccttgtctcctggagac

SEQ ID NO: 126493 - DNA, 57 bp, Artificial
  Synthetic oligonucleotide
ccccgcagaccccggtgaccctcaggtcggccgactgcggcacgtcagctcgagcag

SEQ ID NO: 126494 - DNA, 60 bp, Artificial
  Synthetic oligonucleotide
tgccattcaaacctttaggtatgccacagatttaattcgagctaagcgattcgtcgcagc

SEQ ID NO: 126495 - DNA, 60 bp, Artificial
  Synthetic oligonucleotide
gcccgaacgggcgaagcaaccaaggatgtgttacaacacttggctcaaagctttgcatac

SEQ ID NO: 126496 - DNA, 60 bp, Artificial
  Synthetic oligonucleotide
caaggagaggacagtggctgcactaatagagcactattctgcaaagacttatggcatgag

SEQ ID NO: 126497 - DNA, 60 bp, Artificial
  Synthetic oligonucleotide
aaacttgcaacagtcctaacattcacctctcgtgtgtttgtgtctgttcgccatcccgtc

SEQ ID NO: 126498 - DNA, 60 bp, Artificial
  Synthetic oligonucleotide
ggagccctgcttttagtcattgtacttatgattttccccattgttttccagtgccttgcg

SEQ ID NO: 126499 - DNA, 60 bp, Artificial
  Synthetic oligonucleotide
cacctttaccctataatgctactgagaactgggaaagaaccagggctcatttattgggca

SEQ ID NO: 126500 - DNA, 60 bp, Artificial
  Synthetic oligonucleotide
tacaggtccctctcctttcgtgaaaggctcgccagggctagacctccttggtgtatgttg

SEQ ID NO: 126501 - DNA, 60 bp, Artificial
  Synthetic oligonucleotide
gattcctcggtctcttggataccggggcagataaaacttgcatagcaggcagagactggc

SEQ ID NO: 126502 - DNA, 60 bp, Artificial
  Synthetic oligonucleotide
caaggaagaacgaggctcagaaggcttcggatcaacaagtcatgtgcattgggtgcagga

SEQ ID NO: 126503 - DNA, 60 bp, Artificial
  Synthetic oligonucleotide
gatgacagactcaccagatgattcacaggatttatgataggggccattgagagcaatctc

SEQ ID NO: 126504 - DNA, 60 bp, Artificial
  Synthetic oligonucleotide
aggtttaggcatggcctgtggggtggcgcgtagtagtcagccactccgttggcaacatga

SEQ ID NO: 126505 - DNA, 60 bp, Artificial
  Synthetic oligonucleotide
tacaggattatattcgtgcttgtctggacgcttctcccgcagttgttcagggtatggcat

SEQ ID NO: 126506 - DNA, 60 bp, Artificial
  Synthetic oligonucleotide
gtgacagaacaattacaactgggccacttagaagagagcaatagcccttggaatacgcct

SEQ ID NO: 126507 - DNA, 60 bp, Artificial
  Synthetic oligonucleotide
ggcgtgggagaatgcaaattcattgtgtcaggatctcatccgcccaatacgtaaaacagg

SEQ ID NO: 126508 - DNA, 60 bp, Artificial
  Synthetic oligonucleotide
gttcggggcagaagtagtgccaggatttcaggcactctcagaaggctgcacgccctatga

SEQ ID NO: 126509 - DNA, 60 bp, Artificial
  Synthetic oligonucleotide
gagaccctatttggaaaggaccagccaaactactctggaaaggtgaaggggcagtagcaa

SEQ ID NO: 126510 - DNA, 51 bp, Artificial
  Synthetic oligonucleotide
ctggtccactagggacgtttgtgcaagtaggcacgtcagggtaagatgggg

SEQ ID NO: 126511 - DNA, 60 bp, Artificial
  Synthetic oligonucleotide
gggactctttatggaattggtttgacctgtccagatggttctggtggattagattagtag

SEQ ID NO: 126512 - DNA, 60 bp, Artificial
  Synthetic oligonucleotide
gcaacagcaagagctgttgaaggctgtggaggctcacgggcatctgttgtcactaacagc

SEQ ID NO: 126513 - DNA, 60 bp, Artificial
  Synthetic oligonucleotide
aggcggagtgtggagtctggaaaccctgagccgatctcttcccgtcgagtgagctgcgca

SEQ ID NO: 126514 - DNA, 60 bp, Artificial
  Synthetic oligonucleotide
tggagtgaatattggaagtaagttgtgtcgaggatattcccctttgcagacccttacccc

SEQ ID NO: 126515 - DNA, 60 bp, Artificial
  Synthetic oligonucleotide
gcgctgacggtacagtcccgctctttgctgagtgggatagtgcagcaacagcaagagctg

SEQ ID NO: 126516 - DNA, 60 bp, Artificial
  Synthetic oligonucleotide
gtcaacagcgctgacggtacagtcccgctctttgctgagtgggatagtgcagcaacagca

SEQ ID NO: 126517 - DNA, 60 bp, Artificial
  Synthetic oligonucleotide
agcaacagcaagagctgttgaaggctgtggaggctcacgggcagctgttaacattaacag

SEQ ID NO: 126518 - DNA, 60 bp, Artificial
  Synthetic oligonucleotide
gcgctgacggtacagtctcgctctttgctgagtgggatagtgcagcaacagcaagagctg

SEQ ID NO: 126519 - DNA, 60 bp, Artificial
  Synthetic oligonucleotide
cgaactctatccgtttgcctccctcaaatccctctttgggacagaccagtagtcacagcg

SEQ ID NO: 126520 - DNA, 59 bp, Artificial
  Synthetic oligonucleotide
cgtttgcctccctcaaatccctctttgggacagaccagtagtcacagcaaaggtcgggg

SEQ ID NO: 126521 - DNA, 60 bp, Artificial
  Synthetic oligonucleotide
taacctagtgagaaacattaggcagggatatcaacccctctcgtttcagatccccatcca

SEQ ID NO: 126522 - DNA, 60 bp, Artificial
  Synthetic oligonucleotide
gcaacagcaggacaacctgctaagagcaatacaggctcagcatcaactgctgaagctatc

SEQ ID NO: 126523 - DNA, 60 bp, Artificial
  Synthetic oligonucleotide
tccctcagatcacttagactgaagcagaaaatctctagcagtggcgcccgaacagggact

SEQ ID NO: 126524 - DNA, 52 bp, Artificial
  Synthetic oligonucleotide
tgcggaggctagaaggagagagatgggtgcgagagcgtcagtattaagcggg

SEQ ID NO: 126525 - DNA, 60 bp, Artificial
  Synthetic oligonucleotide
ctgttataaggtttggtgcatgggattatttggtaaaggggtaacatggtcagcattgca

SEQ ID NO: 126526 - DNA, 51 bp, Artificial
  Synthetic oligonucleotide
ggggcaagataacctaccgagaactcagagagtcgttggaagacgggaagg

SEQ ID NO: 126527 - DNA, 51 bp, Artificial
  Synthetic oligonucleotide
ggggccaagataccctaccgagaactcagagagtcgttggaagacgggaag

SEQ ID NO: 126528 - DNA, 60 bp, Artificial
  Synthetic oligonucleotide
gctccacggccgggggccaagataacctaccgagaactcagagagtcgttggaagacggg

SEQ ID NO: 126529 - DNA, 60 bp, Artificial
  Synthetic oligonucleotide
gctctactgcagggagcccagataccctaccgagaactcagagagtcgttggaagacggg

SEQ ID NO: 126530 - DNA, 60 bp, Artificial
  Synthetic oligonucleotide
ctggtcgcccggtggatcaagcatggaagccgtcataaaggtgatttcgtccgcgtgtaa

SEQ ID NO: 126531 - DNA, 60 bp, Artificial
  Synthetic oligonucleotide
ggtcgcccggtggatcaagcatggaagccgtcataaaggtgatttcgtccgcgtgtaaaa

SEQ ID NO: 126532 - DNA, 60 bp, Artificial
  Synthetic oligonucleotide
tctggtcgcccggtggatcaagcatggaagccgtcataaaggtgatttcgtccgcgtgta

SEQ ID NO: 126533 - DNA, 54 bp, Artificial
  Synthetic oligonucleotide
caattggcttggggagacaaagctatagaatatatagtgtatcaggagaaaggg

SEQ ID NO: 126534 - DNA, 60 bp, Artificial
  Synthetic oligonucleotide
actctattaagtcctaataatctaggaccatgtaaaagatactattggaaagtgctgcca

SEQ ID NO: 126535 - DNA, 54 bp, Artificial
  Synthetic oligonucleotide
cagacagaagatttaacagaagcgcagttaggactaccacatccgggaggacta

SEQ ID NO: 126536 - DNA, 60 bp, Artificial
  Synthetic oligonucleotide
tagtgttaccacaaagtccagtagaagtattaggacgagataacatggcccgatttggcg

SEQ ID NO: 126537 - DNA, 60 bp, Artificial
  Synthetic oligonucleotide
gaaagggaacaatagtagtgttaccacaaagtccagtagaagtattaggacgagataaca

SEQ ID NO: 126538 - DNA, 60 bp, Artificial
  Synthetic oligonucleotide
gcaactgctgcacagcaggatgtgttagaggcaacctatgccatggtacagcatgtggct

SEQ ID NO: 126539 - DNA, 52 bp, Artificial
  Synthetic oligonucleotide
ctagaattgcaattagggaacatcacatggatgccaaaattttggtccggtt

SEQ ID NO: 126540 - DNA, 58 bp, Artificial
  Synthetic oligonucleotide
aaaagcagcatggctgccaaaggcgtattcacacaaggaggaatcatagactcaggat

SEQ ID NO: 126541 - DNA, 53 bp, Artificial
  Synthetic oligonucleotide
agtcttacaccaaggcagctgtccagacccttgctaatgcaactgctgcacag

SEQ ID NO: 126542 - DNA, 60 bp, Artificial
  Synthetic oligonucleotide
agtgattgccttactgccgagtggagagtgattactgagcggccggtgtatcgggagtcg

SEQ ID NO: 126543 - DNA, 60 bp, Artificial
  Synthetic oligonucleotide
aaggagtgattgccttactgccgagtggagagtgattacttgagcggccggtgtatcggg

SEQ ID NO: 126544 - DNA, 60 bp, Artificial
  Synthetic oligonucleotide
cagacgtcgcaggagaaaatcaggattttggcgatggcttagaggaatcagacaacagcg

SEQ ID NO: 126545 - DNA, 60 bp, Artificial
  Synthetic oligonucleotide
gatgtggatacatcccaaggcgcctgtgattaggccatgtggatgcagactatgtaaccc

SEQ ID NO: 126546 - DNA, 60 bp, Artificial
  Synthetic oligonucleotide
agatttcccatggtgcagggacacaacgggatacacgcatgcgtggtctgtccaggagtg

SEQ ID NO: 126547 - DNA, 60 bp, Artificial
  Synthetic oligonucleotide
gagtggaaaggaccaacccaggtactgtggaaaggggaaggagccaattgtggtaaagga

SEQ ID NO: 126548 - DNA, 60 bp, Artificial
  Synthetic oligonucleotide
gcatgcgtggtctgtccaggagtgctggttgatggaatatctcttagaggatgagtgaag

SEQ ID NO: 126549 - DNA, 60 bp, Artificial
  Synthetic oligonucleotide
gtctgtccaggagtgctggttgatggaatatctcttagaagatgagtgaaagactgcctc

SEQ ID NO: 126550 - DNA, 60 bp, Artificial
  Synthetic oligonucleotide
tctgttattacagaataaggaaaagaggacatcaggagagtggaaaggaccaacccaggt

SEQ ID NO: 126551 - DNA, 60 bp, Artificial
  Synthetic oligonucleotide
agagctgtgatatgtgtatgtcaacctcttgtgcagatatacagaactctaagtaccccg

SEQ ID NO: 126552 - DNA, 60 bp, Artificial
  Synthetic oligonucleotide
cagcaggatgcgttagaggcaacctatgccatggtacagcatgtggctaaaggcgtacgc

SEQ ID NO: 126553 - DNA, 60 bp, Artificial
  Synthetic oligonucleotide
gagaggaagacatagatgggatttgtgcaaatcctgtgctcaaggagaagtagtaaagca

SEQ ID NO: 126554 - DNA, 60 bp, Artificial
  Synthetic oligonucleotide
catggtgcagggacacaacgggatacacgcatgcgtggtctgtccaggagtgctggttga

SEQ ID NO: 126555 - DNA, 60 bp, Artificial
  Synthetic oligonucleotide
ttgagcggccggtgtatcgggagtcgtcccttaatctgtgcaataccagagcggctctcg

SEQ ID NO: 126556 - DNA, 60 bp, Artificial
  Synthetic oligonucleotide
ggtctttgactggtcaggatggttctcatggctaaagtatattcctattatagtagtagg

SEQ ID NO: 126557 - DNA, 54 bp, Artificial
  Synthetic oligonucleotide
ttgctatagcaacaagagagaagaagtagagcaaaggtccagtggctcggaaaa

SEQ ID NO: 126558 - DNA, 50 bp, Artificial
  Synthetic oligonucleotide
atccgccatggtgagtctagatagagacatggcgaggcaagtctccgggg

SEQ ID NO: 126559 - DNA, 60 bp, Artificial
  Synthetic oligonucleotide
cgactcagaggggagcacttgacagaaggaaattgtttatggtgccttaaaacattagat

SEQ ID NO: 126560 - DNA, 60 bp, Artificial
  Synthetic oligonucleotide
gtgtcttcccaatagtagtgcaagcagcaggagggagaagctggaaagcagtagattctg

SEQ ID NO: 126561 - DNA, 56 bp, Artificial
  Synthetic oligonucleotide
agcatggcctcgtgtctgaggactttgaaaggcagttggcatattatgctactacc

SEQ ID NO: 126562 - DNA, 60 bp, Artificial
  Synthetic oligonucleotide
ggagctaattcaagggaaattaaatgaagaagcagaaaggtggagaagaaataatccacc

SEQ ID NO: 126563 - DNA, 60 bp, Artificial
  Synthetic oligonucleotide
cgcgattcagcagtcttacactaaggcagctgtccagacccttgctaatgcaactgctgc

SEQ ID NO: 126564 - DNA, 60 bp, Artificial
  Synthetic oligonucleotide
caagtaattaaggtaagagcttatacatatggggtgatagaaatgccagaaaactatgca

SEQ ID NO: 126565 - DNA, 60 bp, Artificial
  Synthetic oligonucleotide
gccggtgtatcgggagtcgtcccttaatctgtgcaataccagagcggctctcgcagctgg

SEQ ID NO: 126566 - DNA, 60 bp, Artificial
  Synthetic oligonucleotide
ggattagtaggatgcattctgataagagctgtgatatgtgtatgtcaacctcttgtgcag

SEQ ID NO: 126567 - DNA, 60 bp, Artificial
  Synthetic oligonucleotide
agcttggagccgtgcctgggagctttggcagaactcaccctggaaggagccatggaaaag

SEQ ID NO: 126568 - DNA, 60 bp, Artificial
  Synthetic oligonucleotide
tacagaaagcttggagccgtgcctgggagctttggcagaactcaccctggaaggagccgt

SEQ ID NO: 126569 - DNA, 60 bp, Artificial
  Synthetic oligonucleotide
caggggcttctctgggagtcgcaaacgcgattcagcagtcttacaccaaggcagctgtcc

SEQ ID NO: 126570 - DNA, 60 bp, Artificial
  Synthetic oligonucleotide
tatcatggcaatagtagctgccgcaggggcttctctgggagtcgcaaacgcgattcagca

SEQ ID NO: 126571 - DNA, 60 bp, Artificial
  Synthetic oligonucleotide
gggctatgattgctacaaaaagcagcatggctgccaaaggcgtattcacacaaggaggaa

SEQ ID NO: 126572 - DNA, 60 bp, Artificial
  Synthetic oligonucleotide
ccctcctagtctctcctctccgaggaggtaccgagacctcaaaataaaggagtgattgcc

SEQ ID NO: 126573 - DNA, 60 bp, Artificial
  Synthetic oligonucleotide
ccttggaatccacagtctcaggctatagtagaaagggcacatcaactattgaaaagcact

SEQ ID NO: 126574 - DNA, 60 bp, Artificial
  Synthetic oligonucleotide
ccagagtcattgcagtcagacaatggacctgcatttacagcagagcccacacagctgctg

SEQ ID NO: 126575 - DNA, 60 bp, Artificial
  Synthetic oligonucleotide
gattctgtgtaccatacccatttgccttgttaaaatgcacaaagtggtgctggtatacag

SEQ ID NO: 126576 - DNA, 52 bp, Artificial
  Synthetic oligonucleotide
cggatccaaaggaataaatgggacgctctggggacagcttagcgggatgcat

SEQ ID NO: 126577 - DNA, 60 bp, Artificial
  Synthetic oligonucleotide
ggattggcaagacagaattaacggatccaaaggaataaatgggacgctctggggagagct

SEQ ID NO: 126578 - DNA, 60 bp, Artificial
  Synthetic oligonucleotide
tggtggaacatatgacaggagaatgtgtgcagagacctcaaagacacaacataacagtag

SEQ ID NO: 126579 - DNA, 60 bp, Artificial
  Synthetic oligonucleotide
ggtaagagcttatacatatggggtgatagaaatgccagaaaactatgctaaaacaagaat

SEQ ID NO: 126580 - DNA, 60 bp, Artificial
  Synthetic oligonucleotide
acccttgctaatgcaactgctgcacagcaggatgtgttagaggcaacctatgccatggta

SEQ ID NO: 126581 - DNA, 60 bp, Artificial
  Synthetic oligonucleotide
gggcctcctgcaccaggccaaatgagagaaccaaggggaagtgacatagcaggaactact

SEQ ID NO: 126582 - DNA, 60 bp, Artificial
  Synthetic oligonucleotide
ggccctacaaggaggtgacagaggacttgctgcacctcaattctctctttggagaagacc

SEQ ID NO: 126583 - DNA, 60 bp, Artificial
  Synthetic oligonucleotide
agattacctgggaccccatcgatggacgcgttgtcagctcagctctacaataccttatcc

SEQ ID NO: 126584 - DNA, 59 bp, Artificial
  Synthetic oligonucleotide
ctcaccagtgcttggccggcactgggcagacggctccacgcttgcttgcttaaagacct

SEQ ID NO: 126585 - DNA, 60 bp, Artificial
  Synthetic oligonucleotide
gatggcttgccatattcacaattttaaaagaaagggaggaatagggggacagacttcagc

SEQ ID NO: 126586 - DNA, 60 bp, Artificial
  Synthetic oligonucleotide
tggaaacggcagtcctcatggcctgccacattcacaattttaaaagaaagggaggaatag

SEQ ID NO: 126587 - DNA, 60 bp, Artificial
  Synthetic oligonucleotide
gggatccagcaggaatttggaattccctacaatccccaaagtcagggagtagtagaatcc

SEQ ID NO: 126588 - DNA, 60 bp, Artificial
  Synthetic oligonucleotide
ctgtgggtctaccacacacaaggctatttccctgattggcagaactacacaccagggcca

SEQ ID NO: 126589 - DNA, 60 bp, Artificial
  Synthetic oligonucleotide
aaaggtctgggcatgaatcccaccctagaagagatgttaacagcatgtcaaggggttggg

SEQ ID NO: 126590 - DNA, 60 bp, Artificial
  Synthetic oligonucleotide
gtcactgctatcgagaaatacctaaaggatcaggcacagctaaattcttggggatgtgcg

SEQ ID NO: 126591 - DNA, 60 bp, Artificial
  Synthetic oligonucleotide
gtgccaggatttcaggcactatcagaaggctgtacaccctatgacattaatcagatgctt

SEQ ID NO: 126592 - DNA, 60 bp, Artificial
  Synthetic oligonucleotide
gatcattagggattatggaaaacagatggcaggtgatggttgtgtggcaggtagacagaa

SEQ ID NO: 126593 - DNA, 60 bp, Artificial
  Synthetic oligonucleotide
gatctgccctttaccctgcccttaccccctctataaaacccagaccttctaaacctcagg

SEQ ID NO: 126594 - DNA, 60 bp, Artificial
  Synthetic oligonucleotide
cagggacagcagagaccctatttggaaaggaccagccaaactactctggaaaggtgaagg

SEQ ID NO: 126595 - DNA, 50 bp, Artificial
  Synthetic oligonucleotide
ccccaggtccggagtgcatcgagaaaccagcaacggagcggcgaatcgac

SEQ ID NO: 126596 - DNA, 59 bp, Artificial
  Synthetic oligonucleotide
ccccaggtccggagtgcatcgagaaaccagcaacggagcggcgaatcgacaaaggggag

SEQ ID NO: 126597 - DNA, 60 bp, Artificial
  Synthetic oligonucleotide
gagggtctctcccccaggtccggagtgcatcgagaaaccagcaacggagcggcgaatcga

SEQ ID NO: 126598 - DNA, 56 bp, Artificial
  Synthetic oligonucleotide
ccccaggtccggagtgcatcgagaaaccagcaacggagcggcgaatcgacaagggg

SEQ ID NO: 126599 - DNA, 60 bp, Artificial
  Synthetic oligonucleotide
aaccagggactaacgattacaggcctgtccaggatctgagagaagtcaacaagcgggtgg

SEQ ID NO: 126600 - DNA, 60 bp, Artificial
  Synthetic oligonucleotide
cgccagtcctctgatagactgagtcgcccgggtacccgtgtatccaataaagccttttgc

SEQ ID NO: 126601 - DNA, 60 bp, Artificial
  Synthetic oligonucleotide
cgttaaggactatggaaaacagatggcaggtgctgattgtgtggcaggtagacaggatga

SEQ ID NO: 126602 - DNA, 60 bp, Artificial
  Synthetic oligonucleotide
gctatatgctaaaacacatagtatgggcaagcagagagctggaaagattcgcacttaacc

SEQ ID NO: 126603 - DNA, 60 bp, Artificial
  Synthetic oligonucleotide
cggggagtggctaaccctcagatgctgcatataagcagctgcttctgcttgtactgggtc

SEQ ID NO: 126604 - DNA, 60 bp, Artificial
  Synthetic oligonucleotide
ggcgccgaacagggacttgactaggccagggacccgagaggaggtgacgccagtcaaagg

SEQ ID NO: 126605 - DNA, 60 bp, Artificial
  Synthetic oligonucleotide
tcacgttctatcacaatttggccccagaaagaggatggttacatatgcagggaattagga

SEQ ID NO: 126606 - DNA, 60 bp, Artificial
  Synthetic oligonucleotide
caagagcggtcaaccaggcagtcagaggggaactattgacatcacactgctggaccccac

SEQ ID NO: 126607 - DNA, 60 bp, Artificial
  Synthetic oligonucleotide
ccacagcagtcggggaaataggggaccatgggagcagcggggtcggcaatattaacaggt

SEQ ID NO: 126608 - DNA, 60 bp, Artificial
  Synthetic oligonucleotide
ggcatagaacacactacaggtattccatacaacccacaaagccagggaatagtagagtcc

SEQ ID NO: 126609 - DNA, 60 bp, Artificial
  Synthetic oligonucleotide
gaaggagttggacagattcggcctttcggaccaactcatggagtctaaagaaggctgtga

SEQ ID NO: 126610 - DNA, 60 bp, Artificial
  Synthetic oligonucleotide
cacctcagggccaggaacccggtacccgttaatctttggatggttatgggaactagttcc

SEQ ID NO: 126611 - DNA, 60 bp, Artificial
  Synthetic oligonucleotide
gtgcatgatctaacaaagttacaggaatgggactcgttgtggagctggtttgacttgtcg

SEQ ID NO: 126612 - DNA, 60 bp, Artificial
  Synthetic oligonucleotide
aagaatttgttgggaggctatgttcctattttgcagaaccctacccagggccggaaggac

SEQ ID NO: 126613 - DNA, 60 bp, Artificial
  Synthetic oligonucleotide
gtgtacctaaaagatggcggaggctttcttcaatccctcccagcatgtgcaaggaacacc

SEQ ID NO: 126614 - DNA, 60 bp, Artificial
  Synthetic oligonucleotide
caggaacaacaagctcaattgctgagcaaatagaatggattactaggcagaacaacccag

SEQ ID NO: 126615 - DNA, 60 bp, Artificial
  Synthetic oligonucleotide
cttggagatctaccttaactgagcccattgacccacacgggccggacagagactggggac

SEQ ID NO: 126616 - DNA, 60 bp, Artificial
  Synthetic oligonucleotide
gacatgccccactaacacagaacacccaatagtggagcagataatacaagaggccataaa

SEQ ID NO: 126617 - DNA, 60 bp, Artificial
  Synthetic oligonucleotide
tcttaggcaggagtttcatctaccccgacaggtagcaaaagcaattatacaacaatgtcc

SEQ ID NO: 126618 - DNA, 60 bp, Artificial
  Synthetic oligonucleotide
atagggatccaatcactatggtattggggaaaggtaccaacattccatctcccagtaaaa

SEQ ID NO: 126619 - DNA, 60 bp, Artificial
  Synthetic oligonucleotide
gacaggaaatgcaggatatgtagcaagtgatgggacacagagagtacagtatctggagca

SEQ ID NO: 126620 - DNA, 60 bp, Artificial
  Synthetic oligonucleotide
gccaggggaagaacgagtggaagggaccagctcgtctactttggaaaggtgaaggtgcag

SEQ ID NO: 126621 - DNA, 60 bp, Artificial
  Synthetic oligonucleotide
ggggatgcgcattcaagcagatctgccatacagcagtgacgtgggagaaagcatgtggaa

SEQ ID NO: 126622 - DNA, 60 bp, Artificial
  Synthetic oligonucleotide
ggctgcaggctatttcctcccagtaatacaagggaaattgaaaaccgggagggacgcaaa

SEQ ID NO: 126623 - DNA, 60 bp, Artificial
  Synthetic oligonucleotide
tatgccagtaaccttcgtctgtcatgtgccattcgccaaataattaatgattggagatat

SEQ ID NO: 126624 - DNA, 60 bp, Artificial
  Synthetic oligonucleotide
cccaggatctacgttgaactttactccaacagcaaatgtggaggatgtttggagagcaga

SEQ ID NO: 126625 - DNA, 60 bp, Artificial
  Synthetic oligonucleotide
gccgcccggtcttcggcagctctccgttgcttgctttgcttacgctgatcagcccaaata

SEQ ID NO: 126626 - DNA, 60 bp, Artificial
  Synthetic oligonucleotide
agccctgagagactggtagagcggcccgggagcccttgccagtaaaggctagtgaggtcc

SEQ ID NO: 126627 - DNA, 60 bp, Artificial
  Synthetic oligonucleotide
gctttgtttccttcaaaagggattgggaatcacttatgccagaccaaggaagcgagcagc

SEQ ID NO: 126628 - DNA, 60 bp, Artificial
  Synthetic oligonucleotide
tagcagtcaaaacatggctagtgagacatctagtggccaaaaggtagtacagcaggaaaa

SEQ ID NO: 126629 - DNA, 60 bp, Artificial
  Synthetic oligonucleotide
aaagtgtggtaaacgcaagtaacgtctgctctcatctgttctgctgggtcacctcccgaa

SEQ ID NO: 126630 - DNA, 60 bp, Artificial
  Synthetic oligonucleotide
ccccaaacgtgatcaatgtcactgtaaaggcagaactggtagtgacagaagcatccaagc

SEQ ID NO: 126631 - DNA, 60 bp, Artificial
  Synthetic oligonucleotide
cttagtaagaacatctcctaggagactccatggtgacaagctcggcccaggggaggagcc

SEQ ID NO: 126632 - DNA, 59 bp, Artificial
  Synthetic oligonucleotide
gctcggaagggaaatacgcgattgggtggcggctatttggcaagcaatatacgccgcta

SEQ ID NO: 126633 - DNA, 60 bp, Artificial
  Synthetic oligonucleotide
cactcttcatccagacaagtggcagttgcagaaaatagaactccctaatatagatgacga

SEQ ID NO: 126634 - DNA, 60 bp, Artificial
  Synthetic oligonucleotide
cagtgttaccacagggatggaaaggatctcccactatcttccaaagcacaataaatcaga

SEQ ID NO: 126635 - DNA, 60 bp, Artificial
  Synthetic oligonucleotide
gcacctctcttttgtaccacctcccataaaggaggatgggctactaagaattgtgtgccg

SEQ ID NO: 126636 - DNA, 60 bp, Artificial
  Synthetic oligonucleotide
gcagctgaggcagaattagaagagaatagacaaatcttaaaggaagaacaggcagggtct

SEQ ID NO: 126637 - DNA, 60 bp, Artificial
  Synthetic oligonucleotide
tcaaagggagtccggatccaagagggatcggctgtccgtcctaggccgaccggtgctggt

SEQ ID NO: 126638 - DNA, 60 bp, Artificial
  Synthetic oligonucleotide
gggaaggctcaccctgctgcataaaagccgatgctctgtagctatccgcggagttgcaac

SEQ ID NO: 126639 - DNA, 60 bp, Artificial
  Synthetic oligonucleotide
ggcaatagtagaagacatgctcaaggcaggacaattggagaaagctagtcctaccaatcc

SEQ ID NO: 126640 - DNA, 60 bp, Artificial
  Synthetic oligonucleotide
gaaagcaagtagaggggactcttttagtgggtcctacgccagtaaatatattaggaagga

SEQ ID NO: 126641 - DNA, 60 bp, Artificial
  Synthetic oligonucleotide
cggtacccgttaatctttggatggttatgggaactagttccaaatgagatagagggatgc

SEQ ID NO: 126642 - DNA, 60 bp, Artificial
  Synthetic oligonucleotide
ggaattcaatacattggctagcacatggttccaactgaatgggacctacaaagcaaaaga

SEQ ID NO: 126643 - DNA, 60 bp, Artificial
  Synthetic oligonucleotide
gagaaacagacctttcaaccctttccgattcaatactgtgctccaccgggttactcattg

SEQ ID NO: 126644 - DNA, 60 bp, Artificial
  Synthetic oligonucleotide
cctcaaggcaatggtcaaacctaccttggaggaaatgctgcaagcttgtcaaggagtcgg

SEQ ID NO: 126645 - DNA, 60 bp, Artificial
  Synthetic oligonucleotide
gcttaagagcagagcaggcggacccatcagtcaaagggtggctaactcaaacactgttga

SEQ ID NO: 126646 - DNA, 60 bp, Artificial
  Synthetic oligonucleotide
ctctctctttggagaagaccaatgatagaagtagatgtagaaggtgacctggtgcaaatg

SEQ ID NO: 126647 - DNA, 60 bp, Artificial
  Synthetic oligonucleotide
ggacatgtcagctttattcttgcaagccaatagaccctgtgtgaagctagcacccatgtg

SEQ ID NO: 126648 - DNA, 60 bp, Artificial
  Synthetic oligonucleotide
caggacacctagcaagggcctgtaggcaacccaagagaaatcaaggccctccagttgcac

SEQ ID NO: 126649 - DNA, 60 bp, Artificial
  Synthetic oligonucleotide
ggccatcaaaagggagatcaatgattaaatgctacaattgtgggcaaattgggcacatgc

SEQ ID NO: 126650 - DNA, 57 bp, Artificial
  Synthetic oligonucleotide
aaaatgtcagcacagtacaatgtacacatggaattaggccagtagtatcaactcaat

SEQ ID NO: 126651 - DNA, 60 bp, Artificial
  Synthetic oligonucleotide
ctagttggccgactagctctgtatctggcggacccgtggtggaactgacgagttcgagac

SEQ ID NO: 126652 - DNA, 60 bp, Artificial
  Synthetic oligonucleotide
tagttggccgactagctctgtatctggcggacccgtggtggagctgacgagttcggaaca

SEQ ID NO: 126653 - DNA, 60 bp, Artificial
  Synthetic oligonucleotide
tatccaacaggaatttggaattccctacaatccccaaagtcagggagtagtagaatccat

SEQ ID NO: 126654 - DNA, 60 bp, Artificial
  Synthetic oligonucleotide
tgtagcttaaccgcaaaccgcatcctcttgcatcgcctaggcaacggggctagcgcatgc

SEQ ID NO: 126655 - DNA, 60 bp, Artificial
  Synthetic oligonucleotide
atgtctacaggggacgacagcatcaatcaatatctaaggataagcaagaggctgtacgaa

SEQ ID NO: 126656 - DNA, 60 bp, Artificial
  Synthetic oligonucleotide
ggaggcttacccacttactgcatataagcagctgctcttcgcctgttcgggagtctctgc

SEQ ID NO: 126657 - DNA, 60 bp, Artificial
  Synthetic oligonucleotide
agtggatcaggaaatgtcaacccaaggccaccaacaagaccaagaccagggcaaggggac

SEQ ID NO: 126658 - DNA, 60 bp, Artificial
  Synthetic oligonucleotide
ctgcaagcaagtgttcccgtgttctctctttctccttctaaaccctgttcgactgctctt

SEQ ID NO: 126659 - DNA, 60 bp, Artificial
  Synthetic oligonucleotide
ctagcagtggcgcccgaacagggacatgagggagagagagtgacgaagagacgtggagtg

SEQ ID NO: 126660 - DNA, 60 bp, Artificial
  Synthetic oligonucleotide
gggccgctggaccaaaagtgaaacaatggcccctgtcaagggagaaaatagaaggcctac

SEQ ID NO: 126661 - DNA, 60 bp, Artificial
  Synthetic oligonucleotide
gttgtagccttccagccacctaccaacaccttaaatcaatttgtgagcacaggagcacat

SEQ ID NO: 126662 - DNA, 60 bp, Artificial
  Synthetic oligonucleotide
atttgtaggacaatggggaagagcctttgccaccttagggaaactattgaggcaggtgga

SEQ ID NO: 126663 - DNA, 60 bp, Artificial
  Synthetic oligonucleotide
ctaccacagggctggaaaggaagtccttgcatctttcagggaacggtagcgagcctctta

SEQ ID NO: 126664 - DNA, 60 bp, Artificial
  Synthetic oligonucleotide
gtgggtgactacttcatgcttgccagatttacaaacttatgcagaagtgcccataacagg

SEQ ID NO: 126665 - DNA, 60 bp, Artificial
  Synthetic oligonucleotide
gcaggagatgtttgacatacccctagtggtagcaaagcagatagtcaatgaatgtgcaca

SEQ ID NO: 126666 - DNA, 60 bp, Artificial
  Synthetic oligonucleotide
gtagcggtgcatgtggcttcagggtatatggtagcagaagtactacccaatgagcaaggg

SEQ ID NO: 126667 - DNA, 60 bp, Artificial
  Synthetic oligonucleotide
cagcatacaacagggataccttacaaccctcagagtcaaggagtagtggaagcaaagaac

SEQ ID NO: 126668 - DNA, 60 bp, Artificial
  Synthetic oligonucleotide
tagagctggcttgtcgctcctgagtgagcacttgctgagcacctcacccgagcctgatca

SEQ ID NO: 126669 - DNA, 60 bp, Artificial
  Synthetic oligonucleotide
cgtctcagaaggcaagaagtagaacctttagtctcggcagaaaatggaggcccaaatgga

SEQ ID NO: 126670 - DNA, 60 bp, Artificial
  Synthetic oligonucleotide
gagcaggatcaggaacgcgtgcagaaccagcagggagagagtatcatcgtctcagaaggc

SEQ ID NO: 126671 - DNA, 60 bp, Artificial
  Synthetic oligonucleotide
accctcagaggttggctgggttcgcaccttattcaggctacgagcaggatcaggaacgcg

SEQ ID NO: 126672 - DNA, 60 bp, Artificial
  Synthetic oligonucleotide
tgtggcacctacttacgacttccttccatcatgggcaacgcctttggcagaccctcagag

SEQ ID NO: 126673 - DNA, 60 bp, Artificial
  Synthetic oligonucleotide
cttgtcgctcctgagtgagcacttgctaagcacctcacccgagcctgatcagcttgggga

SEQ ID NO: 126674 - DNA, 60 bp, Artificial
  Synthetic oligonucleotide
gggccatacaaaagcaccctgaagagttcaagcatgttactagtctgcagtgggaggtgt

SEQ ID NO: 126675 - DNA, 60 bp, Artificial
  Synthetic oligonucleotide
gagcagaatcaggctcagaggaagtaaaagagtggatgaaagagaaaatgctagtgcaaa

SEQ ID NO: 126676 - DNA, 60 bp, Artificial
  Synthetic oligonucleotide
ggagcaacaagagttgcagtacaagacatctataaaggctgggtcatagagggcatggaa

SEQ ID NO: 126677 - DNA, 60 bp, Artificial
  Synthetic oligonucleotide
cagcagcaatagttgcccaagtcttgcaatactgtgcggactctacagggtcagaaaagg

SEQ ID NO: 126678 - DNA, 60 bp, Artificial
  Synthetic oligonucleotide
gcagcaagtaggaagacaagctatggtgcagcaaaacttaccacccagaaacagccaggg

SEQ ID NO: 126679 - DNA, 60 bp, Artificial
  Synthetic oligonucleotide
cttagagcagtccaagaaagaatctttgccaccaccttggacagtagactgggacgagcc

SEQ ID NO: 126680 - DNA, 60 bp, Artificial
  Synthetic oligonucleotide
gacgaccaccacggctaagactacaactcagactacaagtagtaccagctccactgctag

SEQ ID NO: 126681 - DNA, 60 bp, Artificial
  Synthetic oligonucleotide
cggaagagtgtctcaaacatgggagcgggaaactccacagtggatagggaagttgtgagg

SEQ ID NO: 126682 - DNA, 60 bp, Artificial
  Synthetic oligonucleotide
gggccatacagaagcaccctgaagagttcaagcatgttactagtctgcagtgggaggtgt

SEQ ID NO: 126683 - DNA, 60 bp, Artificial
  Synthetic oligonucleotide
gcaaaatgcttacttcaggctttgtgcacctgcggggtatatgttattaagatgtgatga

SEQ ID NO: 126684 - DNA, 60 bp, Artificial
  Synthetic oligonucleotide
aggggctgagggagaatatgtatggaaagtagcagctaagtgggggttagtaattcagtg

SEQ ID NO: 126685 - DNA, 60 bp, Artificial
  Synthetic oligonucleotide
gcagaaaatgagtggggcttcataactggctggcaagattacaccaaagggcctggagtg

SEQ ID NO: 126686 - DNA, 60 bp, Artificial
  Synthetic oligonucleotide
gtcaagccctactgcattccagccagcaaggggttaatgaagacccttggggagagagac

SEQ ID NO: 126687 - DNA, 60 bp, Artificial
  Synthetic oligonucleotide
gagtgaagaatctccaagcacgcctgacagccctagaggagtatgtgcaagaccaaagcc

SEQ ID NO: 126688 - DNA, 60 bp, Artificial
  Synthetic oligonucleotide
cctggaattataatatcacgcccaattggactaaggacacctggatggaatgggataggc

SEQ ID NO: 126689 - DNA, 60 bp, Artificial
  Synthetic oligonucleotide
gccctaggagctttggcacttctcagtgctgcgggtactgcaatgggcttagtatcgacg

SEQ ID NO: 126690 - DNA, 60 bp, Artificial
  Synthetic oligonucleotide
aggaaagtgcagaatgggacagaatgcaccctcagcagcagcctgcacagccaggaggag

SEQ ID NO: 126691 - DNA, 60 bp, Artificial
  Synthetic oligonucleotide
gaggagaatcctcctcagtggagatggtgggatgaaagagaatgggaagatagaagacag

SEQ ID NO: 126692 - DNA, 60 bp, Artificial
  Synthetic oligonucleotide
gtaaggatctatggacacctcacaccagcaaaagggttgattaaccagtggggatgtagt

SEQ ID NO: 126693 - DNA, 60 bp, Artificial
  Synthetic oligonucleotide
tcacagtatgccttaagactgctcagtaagagacccacagaaacagattcagagctagta

SEQ ID NO: 126694 - DNA, 60 bp, Artificial
  Synthetic oligonucleotide
gcccatgacttgttttaattgtggtaaaccaggacatctagcaaatcagtgcagagagcc

SEQ ID NO: 126695 - DNA, 59 bp, Artificial
  Synthetic oligonucleotide
aaaatatcagggagagccaccctataagtggatggggtacatattacacccagacagat

SEQ ID NO: 126696 - DNA, 59 bp, Artificial
  Synthetic oligonucleotide
agggaaaacaagtattaagggtaggaagatatcaaaagagaggggcagcacatgagaat

SEQ ID NO: 126697 - DNA, 60 bp, Artificial
  Synthetic oligonucleotide
gggcagactactggcagtgtacatggatccctgagttagaatttgtcagcactcctaagt

SEQ ID NO: 126698 - DNA, 60 bp, Artificial
  Synthetic oligonucleotide
tgagagttctccatggccagcaggagagagccagtagaacagccaccagaagacgagggg

SEQ ID NO: 126699 - DNA, 60 bp, Artificial
  Synthetic oligonucleotide
ggtaccggcacacaaaggaataggaggaaatcaagaaatagatcaactagttagccaggg

SEQ ID NO: 126700 - DNA, 60 bp, Artificial
  Synthetic oligonucleotide
ggagacacctactatgtggatggagcagctgaaaagctagaaaagagagggaaagcagga

SEQ ID NO: 126701 - DNA, 57 bp, Artificial
  Synthetic oligonucleotide
ggggccgccagggaactttccagtcatgccttctgctccgcctctagaggatctgac

SEQ ID NO: 126702 - DNA, 60 bp, Artificial
  Synthetic oligonucleotide
atagtgtctgaagattctgtgtccatagaaggtcactggaagcccagggtagtgggtggt

SEQ ID NO: 126703 - DNA, 60 bp, Artificial
  Synthetic oligonucleotide
ggggaaagaaacattatatgttaaaacacctagtatgggcaagcagggagctggaaagat

SEQ ID NO: 126704 - DNA, 60 bp, Artificial
  Synthetic oligonucleotide
gcgccagtcctccgatagactgagtcgcccgggtacccgtgtatccaataaagccttttg

SEQ ID NO: 126705 - DNA, 60 bp, Artificial
  Synthetic oligonucleotide
gcgccagtcctccgatagactgagtcgcccgggtacccgtgtatccaataaatcctcttg

SEQ ID NO: 126706 - DNA, 60 bp, Artificial
  Synthetic oligonucleotide
cgccagtcctccgatagactgagtcgcccgggtacccgtgtatccaataaaccctcttgc

SEQ ID NO: 126707 - DNA, 60 bp, Artificial
  Synthetic oligonucleotide
cgccagtcctccgatagactgagtcgcccgggtacccgtgtatccaataaagccttttgc

SEQ ID NO: 126708 - DNA, 60 bp, Artificial
  Synthetic oligonucleotide
cgccagtcctccgatagactgagtcgcccgggtacccgtgtatccaataaatcctcttgc

SEQ ID NO: 126709 - DNA, 60 bp, Artificial
  Synthetic oligonucleotide
caagtcaagtgtgtgttcccatctctcctagtcgccgcctggtcactcggtgttcagctg

SEQ ID NO: 126710 - DNA, 60 bp, Artificial
  Synthetic oligonucleotide
gcatcaggcacagctaaattcatggggatgtgcgtttagacaggtctgccacactactgt

SEQ ID NO: 126711 - DNA, 60 bp, Artificial
  Synthetic oligonucleotide
cgcatacggctcaataaaataagaggagtctataaaagcgtggagacagttcaggagggg

SEQ ID NO: 126712 - DNA, 60 bp, Artificial
  Synthetic oligonucleotide
cgcatatggctcaataaactagcaggagtctataaaagcgtggagacagttcaggagggg

SEQ ID NO: 126713 - DNA, 60 bp, Artificial
  Synthetic oligonucleotide
cgcatatggctaaataaactaacaggagtctataaaagcgtggagacagttcaggagggg

SEQ ID NO: 126714 - DNA, 60 bp, Artificial
  Synthetic oligonucleotide
cgcatatggctcaataaactaacaggagtctataaaagcgtggagacagttcaggagggg

SEQ ID NO: 126715 - DNA, 60 bp, Artificial
  Synthetic oligonucleotide
taataaaacaccaggagtctataaaagcgtggagacagttcaggagggggctcgcaactt

SEQ ID NO: 126716 - DNA, 60 bp, Artificial
  Synthetic oligonucleotide
atcattagggattatggaaaacagatggcaggtgatgattgtgtggcaggtagacaggat

SEQ ID NO: 126717 - DNA, 60 bp, Artificial
  Synthetic oligonucleotide
gcaatgtcagcacagtacaatgtacacatggaattaggccagtagtatcaactcaactgc

SEQ ID NO: 126718 - DNA, 59 bp, Artificial
  Synthetic oligonucleotide
aaaatgtcagcacagtacaatgtacacatggaattaggccagtagtatcaactcaactg

SEQ ID NO: 126719 - DNA, 60 bp, Artificial
  Synthetic oligonucleotide
ttttgtcctggtccccacggacacccggatcaggtcccatatatcgtcacctgggaggca

SEQ ID NO: 126720 - DNA, 60 bp, Artificial
  Synthetic oligonucleotide
ctaaggtgttctctcctggtccccacggacacccggatcaggtcccatacattgtcacct

SEQ ID NO: 126721 - DNA, 60 bp, Artificial
  Synthetic oligonucleotide
ctacaggttaaatctaaggtgttctctcctggtccccacggacacccggatcaggtccca

SEQ ID NO: 126722 - DNA, 60 bp, Artificial
  Synthetic oligonucleotide
ggtagaccagatctgagcctgggagctctctggctatttagggaacccactgcttaagcc

SEQ ID NO: 126723 - DNA, 60 bp, Artificial
  Synthetic oligonucleotide
aatgcttggggatgtgcgtttagacaagtctgccacactactgtaccatggccaaatgca

SEQ ID NO: 126724 - DNA, 60 bp, Artificial
  Synthetic oligonucleotide
gggagctctctggctatctagggaacccactgcttaagcctcaataaagcttgccttgag

SEQ ID NO: 126725 - DNA, 60 bp, Artificial
  Synthetic oligonucleotide
gagtcagagttaaatgctagcagctgcttaaccgcaaaaccacatcctatgtaaagcttg

SEQ ID NO: 126726 - DNA, 59 bp, Artificial
  Synthetic oligonucleotide
aggcatatcctattcaaacagtaaatggagcaccacaatatgtagcacttgacccaaaa

SEQ ID NO: 126727 - DNA, 60 bp, Artificial
  Synthetic oligonucleotide
aaaatctctagcagtggcgcccgaacagggacttgaaagcgaaagagaaaccagaggagc

SEQ ID NO: 126728 - DNA, 58 bp, Artificial
  Synthetic oligonucleotide
ccccttgcctacggatggtagcagccattgccgttctgacaaaagatgcaggcaagct

SEQ ID NO: 126729 - DNA, 60 bp, Artificial
  Synthetic oligonucleotide
caataaagctgccgcttagaagtaagcaagtgtgtgttcccatctctcctagtcgccgcc

SEQ ID NO: 126730 - DNA, 60 bp, Artificial
  Synthetic oligonucleotide
ctacagcaacatggggaatggacaggggcgagactggaaaatggccattaagagatgtaa

SEQ ID NO: 126731 - DNA, 60 bp, Artificial
  Synthetic oligonucleotide
ggctacttccctgattggcagaactacacaccagggccagggaccagattcccactgacc

SEQ ID NO: 126732 - DNA, 60 bp, Artificial
  Synthetic oligonucleotide
gagaccccagcccagggaccaccgacccaccaccgggaggtaagctggccagcaactgat

SEQ ID NO: 126733 - DNA, 60 bp, Artificial
  Synthetic oligonucleotide
atttggagacccctgcccagggaccaccgacccaccaccgggaggtaagctggccagcaa

SEQ ID NO: 126734 - DNA, 60 bp, Artificial
  Synthetic oligonucleotide
aaaatctctagcagtggcgcccgaacagggacctgaaagcgaaagtaagaccagaggagc

SEQ ID NO: 126735 - DNA, 60 bp, Artificial
  Synthetic oligonucleotide
ggatcaggcacagctaaattcatggggatgtgcatttaggcaagtctgccacactactgt

SEQ ID NO: 126736 - DNA, 60 bp, Artificial
  Synthetic oligonucleotide
ccactgtaacacttctgttatccaagagtcttgtgacaaacattattgggatgctattag

SEQ ID NO: 126737 - DNA, 60 bp, Artificial
  Synthetic oligonucleotide
ccaagtggagaaaattagtagatttcagagaacttaataagagaactcaagacttttggg

SEQ ID NO: 126738 - DNA, 60 bp, Artificial
  Synthetic oligonucleotide
aagactcctcgacaactaagggagttcctagggacggcaggcttctgccgcctctggatc

SEQ ID NO: 126739 - DNA, 59 bp, Artificial
  Synthetic oligonucleotide
acaggacttctttgaggtgcagttggggataccacacccgggaggcttaaaagcatgcg

SEQ ID NO: 126740 - DNA, 60 bp, Artificial
  Synthetic oligonucleotide
atcaatccttattgtgtgaaaatggaatgtagtgatctcaaaatagtaaatgcagccagc

SEQ ID NO: 126741 - DNA, 60 bp, Artificial
  Synthetic oligonucleotide
gtaaggaagagatcacagaaaactttaggtatgatgatgtagtttgtaaatgtggcaatg

SEQ ID NO: 126742 - DNA, 60 bp, Artificial
  Synthetic oligonucleotide
ttggcttcaatggcacaaagcatggtcaggatgagttaatagaaacaaggggaaaaccag

SEQ ID NO: 126743 - DNA, 60 bp, Artificial
  Synthetic oligonucleotide
tgtgtcttacagatggaaaggccaccggaggatgaaggaccgccaagggaaccctatgat

SEQ ID NO: 126744 - DNA, 60 bp, Artificial
  Synthetic oligonucleotide
ggtaccagcacataaaggaataggaggtaatgaggaggaggacaaactagttagtagagg

SEQ ID NO: 126745 - DNA, 60 bp, Artificial
  Synthetic oligonucleotide
accaggaggctcgattacacttccacccagagttcctcttccgtctttggaacacctgca

SEQ ID NO: 126746 - DNA, 60 bp, Artificial
  Synthetic oligonucleotide
aagtacatggagcagggagctcagcagaagagacaacagagacaacaacagcagaagagg

SEQ ID NO: 126747 - DNA, 60 bp, Artificial
  Synthetic oligonucleotide
tgggtgaaggtaattgaggaaaagaagttcagtgcagaagtggtgcctatgttcttggcc

SEQ ID NO: 126748 - DNA, 60 bp, Artificial
  Synthetic oligonucleotide
cagcgggaaacccaggaattttcctcaggcctcgctgaccccatcagctcctccattgcc

SEQ ID NO: 126749 - DNA, 60 bp, Artificial
  Synthetic oligonucleotide
ccagaggagtttggacatgttaaaagtataaagtcagtagaagagccaggttgttgcaag

SEQ ID NO: 126750 - DNA, 60 bp, Artificial
  Synthetic oligonucleotide
aacagggacttgaagacagtcgaccccacctgtgagggacgaaggcggcagccatccgga

SEQ ID NO: 126751 - DNA, 60 bp, Artificial
  Synthetic oligonucleotide
atccggaccgacccacccggaaaagagagtgctaagaagccccgacgcgagacccgcctc

SEQ ID NO: 126752 - DNA, 60 bp, Artificial
  Synthetic oligonucleotide
ggaggcttctggaggtagatcactaggggctgctctggtcttggtctggtagaccttcgc

SEQ ID NO: 126753 - DNA, 60 bp, Artificial
  Synthetic oligonucleotide
gctgataagtgaggcaaaagaagcctaggggtaagaaaagatgggagcgagcgcgtcagg

SEQ ID NO: 126754 - DNA, 60 bp, Artificial
  Synthetic oligonucleotide
gcttcggtgttggtaggccctacccctgtaaatattataggtagaaatgtactctgtaaa

SEQ ID NO: 126755 - DNA, 60 bp, Artificial
  Synthetic oligonucleotide
agcgaaggaactagatcgattcggcctgcatgagagattattagaaagtcaggaagggtg

SEQ ID NO: 126756 - DNA, 60 bp, Artificial
  Synthetic oligonucleotide
gtagcaacagtatgctggtgggctaagatagagcataccacaggagttccctataacccc

SEQ ID NO: 126757 - DNA, 56 bp, Artificial
  Synthetic oligonucleotide
ggggataggggagtacagtgcagcagaaagaatagtagacattatagcctctgacc

SEQ ID NO: 126758 - DNA, 60 bp, Artificial
  Synthetic oligonucleotide
ctagcggcaggtcaagaaactaccccattcaggttgttaatcaacaggcagtacaccagg

SEQ ID NO: 126759 - DNA, 60 bp, Artificial
  Synthetic oligonucleotide
gtatgtcctcaacgccctttaagagagccaacctacaaagatctagtagacttttcccac

SEQ ID NO: 126760 - DNA, 60 bp, Artificial
  Synthetic oligonucleotide
gggatagtggcaaaagaaatagtggcacagtgtcctaaatgtcaaatacatggagagcca

SEQ ID NO: 126761 - DNA, 60 bp, Artificial
  Synthetic oligonucleotide
cttccaatgctcaggttggtggactcatagtcagtggaccatccccttcaaagacaaaag

SEQ ID NO: 126762 - DNA, 60 bp, Artificial
  Synthetic oligonucleotide
ccaggacagaaacgtgacagggtgcatgttaaagcagcttaaggtggataattacaccac

SEQ ID NO: 126763 - DNA, 60 bp, Artificial
  Synthetic oligonucleotide
ccccagtctggaagaaatgctgttagcttgccagggtgtaggaggaccaggccataaggc

SEQ ID NO: 126764 - DNA, 60 bp, Artificial
  Synthetic oligonucleotide
atacaacctgccgggacacaggcagaagagaggtgcagtcgtgcttgggatccttggcct

SEQ ID NO: 126765 - DNA, 60 bp, Artificial
  Synthetic oligonucleotide
gaaaacattgggtaacggtgttctatggaacccccaaatggagaccagcatccacacatc

SEQ ID NO: 126766 - DNA, 60 bp, Artificial
  Synthetic oligonucleotide
ggcttagggatacgttataatgtcagcaggcccagaaagagaaccgccaccgtggtttca

SEQ ID NO: 126767 - DNA, 60 bp, Artificial
  Synthetic oligonucleotide
gcttgctatttccctagagggcacaagggtcaggtagggagtcttcagtatcttgccttg

SEQ ID NO: 126768 - DNA, 60 bp, Artificial
  Synthetic oligonucleotide
acaaaaattaggggatttaacatcatgggctaactggtttgatttcacttggtggtctaa

SEQ ID NO: 126769 - DNA, 60 bp, Artificial
  Synthetic oligonucleotide
ggcccgcctcacagctcttgaggaatacataggagaccaagcaatgttgagcctctgggg

SEQ ID NO: 126770 - DNA, 60 bp, Artificial
  Synthetic oligonucleotide
gctgagtgacccaataccaggggaagaagtttattatgtggatggagcagctaacagagt

SEQ ID NO: 126771 - DNA, 60 bp, Artificial
  Synthetic oligonucleotide
gcttggagcgaagaaacagtagggacctggttgaaggaatcgagaggatacatctggctg

SEQ ID NO: 126772 - DNA, 60 bp, Artificial
  Synthetic oligonucleotide
gtcataccaacatggagagttgagaggtacatggtagaaaggtggaactccctgtgcaaa

SEQ ID NO: 126773 - DNA, 60 bp, Artificial
  Synthetic oligonucleotide
ggaccagcagaacttgtctggaaaggggaaggagcggtggtcatcaaggaaggtactgac

SEQ ID NO: 126774 - DNA, 60 bp, Artificial
  Synthetic oligonucleotide
gattccatcaatgtgggagcaatttatagacaatgggtggtcttggggttacaaagatgt

SEQ ID NO: 126775 - DNA, 60 bp, Artificial
  Synthetic oligonucleotide
caccaatgatatgagaatgttagcaggactagtacaaaagatagcaaaagaggcactggt

SEQ ID NO: 126776 - DNA, 60 bp, Artificial
  Synthetic oligonucleotide
cgcgaagggaggcaacttggactatcatcagctagagccctccgagcccttgctcaggaa

SEQ ID NO: 126777 - DNA, 60 bp, Artificial
  Synthetic oligonucleotide
atgaatggatggggtaccagctgcatccaaagaagtggacagtgcaagaaattcgcttgc

SEQ ID NO: 126778 - DNA, 60 bp, Artificial
  Synthetic oligonucleotide
gcagaaagacagtcagtggagagagctccagcggagccaatgggagcaggagaggtagag

SEQ ID NO: 126779 - DNA, 60 bp, Artificial
  Synthetic oligonucleotide
actgtgaggcgaagggtctagtgggccgtgtgagcagcggctaggcaaaggcaactccgt

SEQ ID NO: 126780 - DNA, 60 bp, Artificial
  Synthetic oligonucleotide
gccctcttccttatatctttaaggacgcataccgcccagagacgaccaactaccacagac

SEQ ID NO: 126781 - DNA, 60 bp, Artificial
  Synthetic oligonucleotide
ggaagcagctgattgggataggagacatcctcaagtaggacctctcccacaaggggtgct

SEQ ID NO: 126782 - DNA, 60 bp, Artificial
  Synthetic oligonucleotide
cagctccaggcaagagtcctggctgtggaaagatacctaaaggatcaacagctcctaggg

SEQ ID NO: 126783 - DNA, 54 bp, Artificial
  Synthetic oligonucleotide
ctgggggaagaaatcctctctcagctataccgccctctagaagcatgctataac

SEQ ID NO: 126784 - DNA, 60 bp, Artificial
  Synthetic oligonucleotide
ctaagtgacaagtctgcctgggtccaaggggctactggaggaaagcggtatcgctggacc

SEQ ID NO: 126785 - DNA, 60 bp, Artificial
  Synthetic oligonucleotide
aatctgccaggaaaatggaaaccaaaaatgatagggggaattggaggttttatcaaagta

SEQ ID NO: 126786 - DNA, 56 bp, Artificial
  Synthetic oligonucleotide
gcggaggctagaaggagagagatgggtgcgagagcgtcaatattaagaggggaaaa

SEQ ID NO: 126787 - DNA, 60 bp, Artificial
  Synthetic oligonucleotide
gcctgggagctctctggttagctggagaacccactgcttaagcctcaataaagcttgcct

SEQ ID NO: 126788 - DNA, 60 bp, Artificial
  Synthetic oligonucleotide
gcctgggagctctctggctaactaggggacccactgcttaagcctcaataaagcttgcct

SEQ ID NO: 126789 - DNA, 60 bp, Artificial
  Synthetic oligonucleotide
gcctgggagctctcggtctagctggggaacccactgcttaagcctcaataaagcttgcct

SEQ ID NO: 126790 - DNA, 60 bp, Artificial
  Synthetic oligonucleotide
gcctgggagctctctgactagcaggggaacccactgcttaagcctcaataaagcttgcct

SEQ ID NO: 126791 - DNA, 60 bp, Artificial
  Synthetic oligonucleotide
atacatcaggccctctcccccaggactttaaatgcatgggtaaaggcagtagaagaaaag

SEQ ID NO: 126792 - DNA, 60 bp, Artificial
  Synthetic oligonucleotide
catcagcccatctcccctaggactttaaatgcatgggtaaaggcagtagaagaaaaggcc

SEQ ID NO: 126793 - DNA, 60 bp, Artificial
  Synthetic oligonucleotide
gccattttggtctgatcctctcaaccccatcttttgcctctcttattttcttagcgggga

SEQ ID NO: 126794 - DNA, 60 bp, Artificial
  Synthetic oligonucleotide
taagtatcagcataggaatagacactccttggactttatgtcgagcacgaatcgcatcag

SEQ ID NO: 126795 - DNA, 60 bp, Artificial
  Synthetic oligonucleotide
catttaagcatcggcataggaatagacactccttggactttatgtcgagcacgaattgca

SEQ ID NO: 126796 - DNA, 60 bp, Artificial
  Synthetic oligonucleotide
ccaattgcattagaggtgttgccaaaggagaacaagttataatagtaaaacaacctgctt

SEQ ID NO: 126797 - DNA, 60 bp, Artificial
  Synthetic oligonucleotide
aagtatcagcataggaatagacactccttggactttatgtcgagcacgaatcgcatcagt

SEQ ID NO: 126798 - DNA, 60 bp, Artificial
  Synthetic oligonucleotide
gggttgatcagtggccattaaccaatgacaaacttgctgctgcccaacagttagtgcaag

SEQ ID NO: 126799 - DNA, 60 bp, Artificial
  Synthetic oligonucleotide
cccttatagcaactgctgttaccgcttctgtatctttagcacaatccattcaagctgctc

SEQ ID NO: 126800 - DNA, 60 bp, Artificial
  Synthetic oligonucleotide
aagaggggggattggggggtacagtgcaggggaaagaatagtagacataatagcaacaga

SEQ ID NO: 126801 - DNA, 60 bp, Artificial
  Synthetic oligonucleotide
ggaccagccaaactactctggaaaggtgaaggggcagtagtaatacaagataacagtgac

SEQ ID NO: 126802 - DNA, 60 bp, Artificial
  Synthetic oligonucleotide
gagaccctatttggaaaggaccagccaaactactctggaaaggtgaaggggcagtagtac

SEQ ID NO: 126803 - DNA, 60 bp, Artificial
  Synthetic oligonucleotide
catgcagggcctattgcaccaggccaaatgagagaaccaaggggaagtgacatagcagga

SEQ ID NO: 126804 - DNA, 60 bp, Artificial
  Synthetic oligonucleotide
gcatgcagggcctattgcaccaggccaaatgagagaaccaaggggaagtgacatagcagg

SEQ ID NO: 126805 - DNA, 60 bp, Artificial
  Synthetic oligonucleotide
accttatccctcggctcccctccttccccacccaaagaactacccgcaccctcaaggttc

SEQ ID NO: 126806 - DNA, 56 bp, Artificial
  Synthetic oligonucleotide
cctgagagctctctggctgtctagggaacccactgcttaagcctcaataaagcttg

SEQ ID NO: 126807 - DNA, 60 bp, Artificial
  Synthetic oligonucleotide
tatacaacccctgaaggtaggaaccacctagttctctatcgccagttgctcttagcgggt

SEQ ID NO: 126808 - DNA, 60 bp, Artificial
  Synthetic oligonucleotide
gcggggcctattgcaccaggccaaatgagagaaccaaggggaagtgacatagcaggaact

SEQ ID NO: 126809 - DNA, 60 bp, Artificial
  Synthetic oligonucleotide
ggcgcggcgtcaataacgctgacggtacaggccagacaattattgtctggcatagtgcaa

SEQ ID NO: 126810 - DNA, 60 bp, Artificial
  Synthetic oligonucleotide
ggtggcaacagatcttggccttggcagatagaatatattcatttcctgatccgccagctg

SEQ ID NO: 126811 - DNA, 50 bp, Artificial
  Synthetic oligonucleotide
actgagtcgcccgggtacccgtgtatccaataaatcctcttgctgttgca

SEQ ID NO: 126812 - DNA, 55 bp, Artificial
  Synthetic oligonucleotide
gatagactgagtcgcccgggtacccgtgtatccaataaaccctcttgctgttgca

SEQ ID NO: 126813 - DNA, 56 bp, Artificial
  Synthetic oligonucleotide
cgacagactgagtcgcccgggtacccgtgtatccaataaatcctcttgctgttgca

SEQ ID NO: 126814 - DNA, 56 bp, Artificial
  Synthetic oligonucleotide
cgattgactgagtcgcccgggtacccgtgtatccaataaaccctcttgcagttgca

SEQ ID NO: 126815 - DNA, 58 bp, Artificial
  Synthetic oligonucleotide
tccgacagactgagtcgcccgggtacccgtgtatccaataaatcctcttgctgttgca

SEQ ID NO: 126816 - DNA, 60 bp, Artificial
  Synthetic oligonucleotide
ccgactgggactacaccacccttagaggtaggaaccacctagttctctatcgccagctgc

SEQ ID NO: 126817 - DNA, 60 bp, Artificial
  Synthetic oligonucleotide
gccacaggtattgggttccgataatgggcctgccttcgtctcccaggtaagtcagtcggt

SEQ ID NO: 126818 - DNA, 60 bp, Artificial
  Synthetic oligonucleotide
ggtattgggttccgataatgggcctgccttcgtctcccaggtaagtcagtcggtggccga

SEQ ID NO: 126819 - DNA, 60 bp, Artificial
  Synthetic oligonucleotide
gttggggactgataatgggcctgccttcgtctcccaggtaagtcagtcggtggccaagct

SEQ ID NO: 126820 - DNA, 60 bp, Artificial
  Synthetic oligonucleotide
cttcccaacacaggctgaccctgtctgaggtgaccgggcagggactctgcgtaggagcag

SEQ ID NO: 126821 - DNA, 60 bp, Artificial
  Synthetic oligonucleotide
gagaccagctgtggagaggacccggtgagctattgtggaaaggggaaggagcagtcatcc

SEQ ID NO: 126822 - DNA, 60 bp, Artificial
  Synthetic oligonucleotide
ggacctggtgagctattgtggaaaggggaaggagcagtcatcataaaggtagggacagaa

SEQ ID NO: 126823 - DNA, 60 bp, Artificial
  Synthetic oligonucleotide
agagtgattgactgcccagcctgggggtctttcatttgggggctcgtccgggatccggag

SEQ ID NO: 126824 - DNA, 60 bp, Artificial
  Synthetic oligonucleotide
agattgattgaccaccgatcctgggggtctttcatttgggggctcgtccgggatctggag

SEQ ID NO: 126825 - DNA, 60 bp, Artificial
  Synthetic oligonucleotide
gggggattggggggtacagtgcaggggaaagaataatagacataatagcaacagacttac

SEQ ID NO: 126826 - DNA, 60 bp, Artificial
  Synthetic oligonucleotide
tgttaggacccttcttgctttgggaaaccgaggcaggaaaatccctagcaggttggcgcc

SEQ ID NO: 126827 - DNA, 60 bp, Artificial
  Synthetic oligonucleotide
ggggaaagaaacactatatgctaaaacacctagtatgggcaagcagggagctggaaagat

SEQ ID NO: 126828 - DNA, 60 bp, Artificial
  Synthetic oligonucleotide
cactcagggattcttccctgattggcagaactacacaccaggaccaggaactagataccc

SEQ ID NO: 126829 - DNA, 60 bp, Artificial
  Synthetic oligonucleotide
gtgttccctgttacaacaccggatctaagatgcagaataattaatgctatactaggagga

SEQ ID NO: 126830 - DNA, 60 bp, Artificial
  Synthetic oligonucleotide
ttgggctatcattaacccctggagactgtttaacatgggactcagcagtagccaccttat

SEQ ID NO: 126831 - DNA, 60 bp, Artificial
  Synthetic oligonucleotide
gcatcagcttggaaatgtaataaaaggcatagttgatcaagaaggagtggcaacagcata

SEQ ID NO: 126832 - DNA, 60 bp, Artificial
  Synthetic oligonucleotide
gaccaagaaatagataatcaaacaagagcagagacttttattcaacatctaaatgctgta

SEQ ID NO: 126833 - DNA, 60 bp, Artificial
  Synthetic oligonucleotide
ataaaactattccattaacagctgcccaaaaccaacactctgctggtattttagctacta

SEQ ID NO: 126834 - DNA, 60 bp, Artificial
  Synthetic oligonucleotide
tgactcctcaaccccgaccatccagaggtagaggtcgaggtcaaaatacttctagaccct

SEQ ID NO: 126835 - DNA, 60 bp, Artificial
  Synthetic oligonucleotide
ggggtgttaacgcctcaaaatagtacaatgaatacaccagtgtatcctgttcctaaacca

SEQ ID NO: 126836 - DNA, 60 bp, Artificial
  Synthetic oligonucleotide
cctagggacctccgagcatagcgggaggcatataaaagccaatagacaatggcttcagga

SEQ ID NO: 126837 - DNA, 60 bp, Artificial
  Synthetic oligonucleotide
tacaacgagctgtaaaccctcatacaatgtttatgatatcaggaccattagctgaacttc

SEQ ID NO: 126838 - DNA, 60 bp, Artificial
  Synthetic oligonucleotide
accaagaaatcctttacatggagaagttataggtcttcgccttactgaaggatggtgggg

SEQ ID NO: 126839 - DNA, 60 bp, Artificial
  Synthetic oligonucleotide
aaattgtcctcattcgctactccctctgacatccaacgctgggctactaaagcattgcct

SEQ ID NO: 126840 - DNA, 60 bp, Artificial
  Synthetic oligonucleotide
gcctacaaataccagtattcatactgaaaggcaatgccctagcagataagcttgccaccc

SEQ ID NO: 126841 - DNA, 52 bp, Artificial
  Synthetic oligonucleotide
gaagaacctcgtgacccaaatactcctgctcctcatagacgtacctgggatg

SEQ ID NO: 126842 - DNA, 60 bp, Artificial
  Synthetic oligonucleotide
ggcatgggaatagtacatgccacatacaaacctgaatatcaagttttgaatcaatggtca

SEQ ID NO: 126843 - DNA, 60 bp, Artificial
  Synthetic oligonucleotide
acagccgcttccgggcggatcaaagggactaaattgttagcccactgggattcaggggca

SEQ ID NO: 126844 - DNA, 60 bp, Artificial
  Synthetic oligonucleotide
agcagaagtgatagcttctccttatgagtatattttgctgtcgccaacagatgttccttg

SEQ ID NO: 126845 - DNA, 60 bp, Artificial
  Synthetic oligonucleotide
ccatcagatcaaggttctcaaactcctaggccaaatcaagcaggctctggggtgcgtggc

SEQ ID NO: 126846 - DNA, 60 bp, Artificial
  Synthetic oligonucleotide
aagatccaagaatccaatttcattatgataaaaccttaccagaacttaagcatattccag

SEQ ID NO: 126847 - DNA, 60 bp, Artificial
  Synthetic oligonucleotide
tctagaccctctcaaggaccagctaatagcgggcggggacgacagcgccctgcttctggt

SEQ ID NO: 126848 - DNA, 60 bp, Artificial
  Synthetic oligonucleotide
gctaatggattttgggctcatcctattacaccagaatcttattggttaacagcatttacc

SEQ ID NO: 126849 - DNA, 60 bp, Artificial
  Synthetic oligonucleotide
gtatgacaatctatggcaacattgggaaaatcaagtcgggcatagaaaaattaggccaca

SEQ ID NO: 126850 - DNA, 64 bp, Artificial
  Synthetic oligonucleotide
cgtggcctaacagacacttttaaaacaaaactgttaaatattactcctccaaaagacttaaagc

SEQ ID NO: 126851 - DNA, 60 bp, Artificial
  Synthetic oligonucleotide
ttagctgagagatctagtacagggcaaggaggaatatccccaggagctcctcgttctcga

SEQ ID NO: 126852 - DNA, 60 bp, Artificial
  Synthetic oligonucleotide
ccaggagctcctcgttctcgaccaccagtaagcagcttctcagggttaccaagtttgccc

SEQ ID NO: 126853 - DNA, 60 bp, Artificial
  Synthetic oligonucleotide
ccaagggcaacttctactcccggaaatattccttggagtttaggagatgatagcccacct

SEQ ID NO: 126854 - DNA, 60 bp, Artificial
  Synthetic oligonucleotide
cccagtctagagaaaggagaagagaaattcttcctgctcctgtaccgtcagcacctccta

SEQ ID NO: 126855 - DNA, 60 bp, Artificial
  Synthetic oligonucleotide
ccaccgattggcacggttatacctattcagcatatcagatctgtaactggagagcctcct

SEQ ID NO: 126856 - DNA, 60 bp, Artificial
  Synthetic oligonucleotide
gcattgccttatggctggaaagtggtcaccgaaagcggaaatgattatactagccgcaga

SEQ ID NO: 126857 - DNA, 60 bp, Artificial
  Synthetic oligonucleotide
aggataaggtataaggattaaggtatgaggtgtgtggctcaacacgtagggtgacaagaa

SEQ ID NO: 126858 - DNA, 60 bp, Artificial
  Synthetic oligonucleotide
tataggctaaaacatctagtatgggcaagcagggagctggacagatttgcacttaaccct

SEQ ID NO: 126859 - DNA, 60 bp, Artificial
  Synthetic oligonucleotide
catggaacttagagacaccagaaaagaagttccaagcagagccaccctatcattggatgg

SEQ ID NO: 126860 - DNA, 60 bp, Artificial
  Synthetic oligonucleotide
taataaggggagtaaaacccttggaagaaatcataaactggacagaggaagccttggaag

SEQ ID NO: 126861 - DNA, 60 bp, Artificial
  Synthetic oligonucleotide
gaaggtgctgtagtggtaaaagaaggggagaacatcttctcagtccccagaagaaaagca

SEQ ID NO: 126862 - DNA, 60 bp, Artificial
  Synthetic oligonucleotide
ggtatctttaaaacctgggtgtgatggaccaagagtaaagcagtggcctctatcaaaaga

SEQ ID NO: 126863 - DNA, 60 bp, Artificial
  Synthetic oligonucleotide
catctgctgctgtcacctaggagtaagaatatcagacactcaggaagccatcagtaaagt

SEQ ID NO: 126864 - DNA, 60 bp, Artificial
  Synthetic oligonucleotide
cagagagagcactggagacttacaggactttaggacaacagctgaaaaggcagcagcagc

SEQ ID NO: 126865 - DNA, 60 bp, Artificial
  Synthetic oligonucleotide
cagcccagacaggaaggttgttggaactgtggcagtaaagagcatagatttgcacagtgc

SEQ ID NO: 126866 - DNA, 60 bp, Artificial
  Synthetic oligonucleotide
gtgtgtaattctgatctagtgtaactgggacactagtggtagcttcactatgggatcggg

SEQ ID NO: 126867 - DNA, 60 bp, Artificial
  Synthetic oligonucleotide
aggacttgactgctagaaggcggcagaaggtaaggagagtaagacctcaccgggagagtg

SEQ ID NO: 126868 - DNA, 60 bp, Artificial
  Synthetic oligonucleotide
gcaacgaaagaattagacagatttggattgggatcacaactcttggaaacagcagaaggg

SEQ ID NO: 126869 - DNA, 60 bp, Artificial
  Synthetic oligonucleotide
agtcgctcctgggtgagcacactggtcagctaagcagtcagccctgggaggctacactta

SEQ ID NO: 126870 - DNA, 60 bp, Artificial
  Synthetic oligonucleotide
atataagcagctgctctccgcttgttcgggagtccttgctctggggaccagcagtcgctc

SEQ ID NO: 126871 - DNA, 60 bp, Artificial
  Synthetic oligonucleotide
gactttcatgagctacaattaggtattccacacccagcaggtatcaagaaatgcaaacag

SEQ ID NO: 126872 - DNA, 60 bp, Artificial
  Synthetic oligonucleotide
cctcgatacttgagactcagcaggatcctgtggacaggtaaggaggatggcatgtccagg

SEQ ID NO: 126873 - DNA, 60 bp, Artificial
  Synthetic oligonucleotide
tgcccttgatttgtgcttcagccaatactagcctctgggtcacgacatcttgcttgccag

SEQ ID NO: 126874 - DNA, 60 bp, Artificial
  Synthetic oligonucleotide
tttgctcctacagatgagcacaggtacgcacccaggggaaggcaaaccagagcagcgcct

SEQ ID NO: 126875 - DNA, 60 bp, Artificial
  Synthetic oligonucleotide
ggtagcaatttatgacaagaacattacttctctgttacaagaagcatacaccacagagct

SEQ ID NO: 126876 - DNA, 60 bp, Artificial
  Synthetic oligonucleotide
caccagaggactttggaccaccaagggagccatggggtcagtggttagcagacaccatgg

SEQ ID NO: 126877 - DNA, 60 bp, Artificial
  Synthetic oligonucleotide
gcccatccaacagaagcagcaccaagacctaatgaaggagacatacaacgaggcagtgac

SEQ ID NO: 126878 - DNA, 60 bp, Artificial
  Synthetic oligonucleotide
ggaacgtggactggaacgagcctttacaagactcgctgttagtgactctcctgaagtggc

SEQ ID NO: 126879 - DNA, 60 bp, Artificial
  Synthetic oligonucleotide
ccagtaaaagacaatcaggttatacagcaagcctggtctgctatgaatgctatggtagac

SEQ ID NO: 126880 - DNA, 60 bp, Artificial
  Synthetic oligonucleotide
ctactacacagatgccttgttttatcaacgaacaggtaacagttaagaacccggggaatg

SEQ ID NO: 126881 - DNA, 60 bp, Artificial
  Synthetic oligonucleotide
gtcaaaagaaaggagaagccataacaggacaagtggatgtctcagtgggtatttggcagc

SEQ ID NO: 126882 - DNA, 60 bp, Artificial
  Synthetic oligonucleotide
gaggtaatcaagaggtagaccacctagtaagtaaaggtataagacagaaacaggtcatgt

SEQ ID NO: 126883 - DNA, 60 bp, Artificial
  Synthetic oligonucleotide
gggaggtatcaaagacagaaggcagcacacacaaatcccctacagaaattagtagaagct

SEQ ID NO: 126884 - DNA, 60 bp, Artificial
  Synthetic oligonucleotide
ttcaagtcccagtgactagagaagtctgggagcactggtggagcgaccactggcaggtta

SEQ ID NO: 126885 - DNA, 60 bp, Artificial
  Synthetic oligonucleotide
ccgcaattagaacaagagtggtacatttgggaggcagaacccataataggggtagacacc

SEQ ID NO: 126886 - DNA, 60 bp, Artificial
  Synthetic oligonucleotide
gcagcaggaaggggatggatctcacaatgggcagtttccatagaatgggtctatagagac

SEQ ID NO: 126887 - DNA, 60 bp, Artificial
  Synthetic oligonucleotide
gaccaacagaaacagaacaccccatagtaaaagacatcatagaacaatgcaagcagaaag

SEQ ID NO: 126888 - DNA, 60 bp, Artificial
  Synthetic oligonucleotide
tcagtaagaatagaaggaccctatactccaagagtagtagggggcataggggggcaaatt

SEQ ID NO: 126889 - DNA, 56 bp, Artificial
  Synthetic oligonucleotide
agaaagtacaagctagtgtctcatagtagtctctttctccttcgccctggttcagt

SEQ ID NO: 126890 - DNA, 60 bp, Artificial
  Synthetic oligonucleotide
aaaccagaaacagtagcaatgttttcagccttaacagaaaaagctttgcctgatgattta

SEQ ID NO: 126891 - DNA, 60 bp, Artificial
  Synthetic oligonucleotide
tggaggaaggtgcagagtgggatagacagcacccgcaacaacagccagctcaaccaggag

SEQ ID NO: 126892 - DNA, 60 bp, Artificial
  Synthetic oligonucleotide
gggtggactggaagggctatattggtcccagagaagacaggacatcttaattctctactg

SEQ ID NO: 126893 - DNA, 60 bp, Artificial
  Synthetic oligonucleotide
gtgtcatggacatcaaacaaggacccaaagagccttttaaagaatatgcagataggttct

SEQ ID NO: 126894 - DNA, 60 bp, Artificial
  Synthetic oligonucleotide
tgatgaaagcttgtcagggagtaggaggacctgctcataaaggaaaaatattggcagaag

SEQ ID NO: 126895 - DNA, 60 bp, Artificial
  Synthetic oligonucleotide
aatgggcaacgcctttggcagaccagcagcagatggatggtggaaaacgctcagaagatt

SEQ ID NO: 126896 - DNA, 60 bp, Artificial
  Synthetic oligonucleotide
tgctgacgagcagggactttccaggacgggcgggggaggtttgcccacttgctgcatata

SEQ ID NO: 126897 - DNA, 60 bp, Artificial
  Synthetic oligonucleotide
cccctcacttgcttcaattgtggaaagccaggtcacacagcaagaatgtgcagacagccc

SEQ ID NO: 126898 - DNA, 59 bp, Artificial
  Synthetic oligonucleotide
aaaagcagcctgcgaagatacaaaatactgctttcgcttttgactgcaagaggaagtag

SEQ ID NO: 126899 - DNA, 59 bp, Artificial
  Synthetic oligonucleotide
gtgggatttccagtgaagccacagagaccgctttgtagccctacctataagactcttat

SEQ ID NO: 126900 - DNA, 60 bp, Artificial
  Synthetic oligonucleotide
ggaccaggaacaagataccctctgacatttggatggttgtggcagttagaaccagtggct

SEQ ID NO: 126901 - DNA, 60 bp, Artificial
  Synthetic oligonucleotide
ggaatgcagaatgccagtataatgtaacagggttatgcagagactgcaggacggaaataa

SEQ ID NO: 126902 - DNA, 60 bp, Artificial
  Synthetic oligonucleotide
cctggtggatagggatagaacatacaactgggataccttataaccctcagagtcaagggg

SEQ ID NO: 126903 - DNA, 60 bp, Artificial
  Synthetic oligonucleotide
ggggtaatgcaaaatgcttattttaggctttgtgctccagcaggctatatgctattgaga

SEQ ID NO: 126904 - DNA, 60 bp, Artificial
  Synthetic oligonucleotide
gctacaccatgtactggatatatgcttagtagtgtaagtagtttctttggctttaatgga

SEQ ID NO: 126905 - DNA, 60 bp, Artificial
  Synthetic oligonucleotide
gaagaatgtttaataatctaggcaaaatgctaaaggagttgaatgcagaagccatgaatt

SEQ ID NO: 126906 - DNA, 60 bp, Artificial
  Synthetic oligonucleotide
gatggaagatctaaatggtgcaaagtttgtgtataaagtagcaggaaaatggggtttaat

SEQ ID NO: 126907 - DNA, 60 bp, Artificial
  Synthetic oligonucleotide
acaacttgtggacggaaattaaaaggcttaccaatagctaatatgactaggcatggagca

SEQ ID NO: 126908 - DNA, 60 bp, Artificial
  Synthetic oligonucleotide
gaacacggctgagtgaaggcagtaagggcggcaggaacaaaccacgacggagtgctccta

SEQ ID NO: 126909 - DNA, 60 bp, Artificial
  Synthetic oligonucleotide
ggccaacctgggggaggaaatcctctctcagctataccgccctctagaagcatgctataa

SEQ ID NO: 126910 - DNA, 60 bp, Artificial
  Synthetic oligonucleotide
gtatagcgataaaagcttttagttgtggcgaaagaaagattgaggctactcctgtaatga

SEQ ID NO: 126911 - DNA, 60 bp, Artificial
  Synthetic oligonucleotide
aaagcttttagttgtggcgaaagaaagattgaggctactcctgtaatgattataagagga

SEQ ID NO: 126912 - DNA, 60 bp, Artificial
  Synthetic oligonucleotide
catgggtgtgaaacataagtttggtatcccagggaacccacagtcacaagcattagttga

SEQ ID NO: 126913 - DNA, 60 bp, Artificial
  Synthetic oligonucleotide
ggataggagggatggccccttatgaattattagcacaacaagaatccttaagaatacaag

SEQ ID NO: 126914 - DNA, 60 bp, Artificial
  Synthetic oligonucleotide
ggtatacatgtggaatcaggatatatatgggcacaaataatttctcaagaaactgctgac

SEQ ID NO: 126915 - DNA, 60 bp, Artificial
  Synthetic oligonucleotide
caaaagatggaaggagtactcaattatatgggtgtgaaacataagtttggtatcccagga

SEQ ID NO: 126916 - DNA, 60 bp, Artificial
  Synthetic oligonucleotide
aacaggagtattctcctcttgggttgacagaattgaggaagcagaaacaaatcatgaaaa

SEQ ID NO: 126917 - DNA, 60 bp, Artificial
  Synthetic oligonucleotide
ggctatacatgtggaatcaggatatatatgggcacaaataatctctcaagaaactgctga

SEQ ID NO: 126918 - DNA, 60 bp, Artificial
  Synthetic oligonucleotide
gatgagtattggaaccctgaagaaatagaaagaatgcttatggactagggactgtttacg

SEQ ID NO: 126919 - DNA, 60 bp, Artificial
  Synthetic oligonucleotide
tgggatgagtattggaaccctgaagaaatagaaagaatgcttatggactagggactgttt

SEQ ID NO: 126920 - DNA, 60 bp, Artificial
  Synthetic oligonucleotide
tcaagaagtaaaactagaagaaggaaatgcaggtaagtttagaagagcaagattcttgag

SEQ ID NO: 126921 - DNA, 60 bp, Artificial
  Synthetic oligonucleotide
ggtacaaccaatgctcagatagtatggagacttccaccattagtagtcccagtagaagaa

SEQ ID NO: 126922 - DNA, 60 bp, Artificial
  Synthetic oligonucleotide
aggggaattttaggtgggccataagaatggctaatgtatctacaggacgagaacctggtg

SEQ ID NO: 126923 - DNA, 60 bp, Artificial
  Synthetic oligonucleotide
atatgtagcacttgacccaaaaatggtgtccatttttatggaaaaggcaagagaaggact

SEQ ID NO: 126924 - DNA, 55 bp, Artificial
  Synthetic oligonucleotide
ttttatggaaaaggcaagagagggattaggaggtgaggaagttcaactatggttt

SEQ ID NO: 126925 - DNA, 60 bp, Artificial
  Synthetic oligonucleotide
ggaggtgaggaagttcaactatggtttactgccttctctgcaaatttaacacctactgac

SEQ ID NO: 126926 - DNA, 60 bp, Artificial
  Synthetic oligonucleotide
ggaagttcaactatggtttacagccttctctgcaaatttaacacctactgacatggccac

SEQ ID NO: 126927 - DNA, 60 bp, Artificial
  Synthetic oligonucleotide
ctcaagaacaacaagcagaagcaagatttgcaccagctaggatgcaatgtagagcatggt

SEQ ID NO: 126928 - DNA, 60 bp, Artificial
  Synthetic oligonucleotide
gaacaacaagcagaagcaagatttgcaccagctaggatgcagtgtagagcatggtatctc

SEQ ID NO: 126929 - DNA, 60 bp, Artificial
  Synthetic oligonucleotide
taaaagctaagtctcctcgagctgtgcagttaagacaaggagctaaggaagattattcat

SEQ ID NO: 126930 - DNA, 60 bp, Artificial
  Synthetic oligonucleotide
gctaagtctcctcgagctgtgcagttaagacaaggagctaaggaagattattcatccttt

SEQ ID NO: 126931 - DNA, 60 bp, Artificial
  Synthetic oligonucleotide
cgatagggagtaaaggattggatgtattaggaggggtaatagatgaaggatatcgaggtg

SEQ ID NO: 126932 - DNA, 54 bp, Artificial
  Synthetic oligonucleotide
agtcatcttaagccagaaagtaccctagaagaaaagttgagagcttgtcaagag

SEQ ID NO: 126933 - DNA, 60 bp, Artificial
  Synthetic oligonucleotide
gtgggaccacatcaaataagttatcaagtatatcagaaggatccagaaaagatactatgg

SEQ ID NO: 126934 - DNA, 60 bp, Artificial
  Synthetic oligonucleotide
ggggatgcatatttcaccattcctcttgatccagattatgctccttatacagcatttact

SEQ ID NO: 126935 - DNA, 60 bp, Artificial
  Synthetic oligonucleotide
ccattataagaataggaaaagaaccaagatatgaaatacctacttctagagaagcctggg

SEQ ID NO: 126936 - DNA, 60 bp, Artificial
  Synthetic oligonucleotide
tagattgggtcccaggacataaaggtattccaggaaatgaggaagtagataagctttgtc

SEQ ID NO: 126937 - DNA, 60 bp, Artificial
  Synthetic oligonucleotide
ggtggactgggatgagtattggaaccctgaagaaatagaaagaatgcttatggactaggg

SEQ ID NO: 126938 - DNA, 61 bp, Artificial
  Synthetic oligonucleotide
caaaacgggtttactatgaaggtagatgaccttattatgcatttcaatatgacaaaagcag

SEQ ID NO: 126939 - DNA, 50 bp, Artificial
  Synthetic oligonucleotide
taaagttacaaaacaattaagctattgtacagacccattacaaatcccac

SEQ ID NO: 126940 - DNA, 60 bp, Artificial
  Synthetic oligonucleotide
acaaatataagtatacaagaaggacctaccttggggaattgggctagagaaatatgggga

SEQ ID NO: 126941 - DNA, 60 bp, Artificial
  Synthetic oligonucleotide
gcaccagaggagcccgcctgtcaagactttcttggggcaatgatacatctaaaagctagt

SEQ ID NO: 126942 - DNA, 60 bp, Artificial
  Synthetic oligonucleotide
gtagaagaatcagaaataattttttgggattgttgggcaccagaagaacccgcctgtcag

SEQ ID NO: 126943 - DNA, 60 bp, Artificial
  Synthetic oligonucleotide
caaccaacgctcaggtagtatggagacttccaccattagtagtcccagtagaagaatcag

SEQ ID NO: 126944 - DNA, 60 bp, Artificial
  Synthetic oligonucleotide
ctgtttaaaggcccagataaattacatttggtgactcttcgcggaccttcaagccaggag

SEQ ID NO: 126945 - DNA, 60 bp, Artificial
  Synthetic oligonucleotide
ccgggccgagaacttcgcagttggcgcccgaacagggacttgattgagagtgattgagga

SEQ ID NO: 126946 - DNA, 60 bp, Artificial
  Synthetic oligonucleotide
aaccctgtcaagtatctgtgtagtcttttctacctgtgaggtctcggaatccgggccgag

SEQ ID NO: 126947 - DNA, 60 bp, Artificial
  Synthetic oligonucleotide
ccgagggacagctaacaaggtaggagagactctacagcaacatggggaatggacaggggc

SEQ ID NO: 126948 - DNA, 60 bp, Artificial
  Synthetic oligonucleotide
ccagataaattacatttggtgactcttcgcggaccttcaagccaggagattcgccgaggg

SEQ ID NO: 126949 - DNA, 60 bp, Artificial
  Synthetic oligonucleotide
ggggaatggacaggggcgagattggaaaatggccattaagagatgtagtaatgttgctgt

SEQ ID NO: 126950 - DNA, 60 bp, Artificial
  Synthetic oligonucleotide
cgagggacagtcaacaaggtaggagagattctacagcaacatggggaatggacaggggcg

SEQ ID NO: 126951 - DNA, 60 bp, Artificial
  Synthetic oligonucleotide
gtaaaagtacagttaaaagaaggaatggatggaccaaaagtaaaacaatggcctctatcc

SEQ ID NO: 126952 - DNA, 60 bp, Artificial
  Synthetic oligonucleotide
gaagacccagctcgaacgagaagactccggacaggtgagtagttgcgtgttttccccggg

SEQ ID NO: 126953 - DNA, 60 bp, Artificial
  Synthetic oligonucleotide
ggcactggctcggttgggtagccagcctttcgggtaataaaggcttgttggcattcggca

SEQ ID NO: 126954 - DNA, 60 bp, Artificial
  Synthetic oligonucleotide
acccgtgcctcctgtcttgtcttactcgagcgaacccacaactccgtcctgctgagctca

SEQ ID NO: 126955 - DNA, 60 bp, Artificial
  Synthetic oligonucleotide
gtaagagagaaagaaaatgcccacagaacgtggaaacagcatcatccagaagccccaaaa

SEQ ID NO: 126956 - DNA, 60 bp, Artificial
  Synthetic oligonucleotide
ctgacctcatgaagcagcttaagatctggtcagacgccactgaaagaaatggggttgacc

SEQ ID NO: 126957 - DNA, 60 bp, Artificial
  Synthetic oligonucleotide
ggttcctcggggcatagtatttgatctgttgcaagatggaaatcccatatggggaggagt

SEQ ID NO: 126958 - DNA, 60 bp, Artificial
  Synthetic oligonucleotide
cccttccctaacacagaacacacagaataagaagcagacatcgaatcagacaaacactca

SEQ ID NO: 126959 - DNA, 60 bp, Artificial
  Synthetic oligonucleotide
agactccagatgaaaaggtccaggaagagagagtgaaatggatcggttttgagctcacac

SEQ ID NO: 126960 - DNA, 60 bp, Artificial
  Synthetic oligonucleotide
ccctcagccactgaagatcatgagagatggcatacctcaccagacattttggttaggcag

SEQ ID NO: 126961 - DNA, 60 bp, Artificial
  Synthetic oligonucleotide
gcttcctcccaagagcagacttaccagtagccatcacaggaaccatggtagattcagagc

SEQ ID NO: 126962 - DNA, 60 bp, Artificial
  Synthetic oligonucleotide
cagcactacaagtagctctctgcattttacagctaatccagagatatacagttcttcact

SEQ ID NO: 126963 - DNA, 60 bp, Artificial
  Synthetic oligonucleotide
ggtaaggggaccagggcctaaggtaccccagtggcccttgacaaaagaaaagtatcaggc

SEQ ID NO: 126964 - DNA, 60 bp, Artificial
  Synthetic oligonucleotide
gtgctgcaggcagctatggaggtggcacaggcaaaacatgctaccccaggtcccatcaac

SEQ ID NO: 126965 - DNA, 60 bp, Artificial
  Synthetic oligonucleotide
atgccaagaatgtaaaaggacaaccactagcccagtcagaggaacaaaccccagaggtcg

SEQ ID NO: 126966 - DNA, 60 bp, Artificial
  Synthetic oligonucleotide
tggcagctacaacgctcgtgaaccagcacacgacggctaaggttgtggagagggttgtgc

SEQ ID NO: 126967 - DNA, 60 bp, Artificial
  Synthetic oligonucleotide
tactatgccaagacaaccccatcggcaacgacaccttttatagcctaagtcattccttct

SEQ ID NO: 126968 - DNA, 60 bp, Artificial
  Synthetic oligonucleotide
ccctttacatgaggactttagaccctttacagccttctctgtagtccctgtaaatcgaga

SEQ ID NO: 126969 - DNA, 60 bp, Artificial
  Synthetic oligonucleotide
agaaataggtcacttagatctcttttggcttaggtactgttcatgtccgcatgagatgcc

SEQ ID NO: 126970 - DNA, 60 bp, Artificial
  Synthetic oligonucleotide
cgcaatgatgtagctgcttacgcttgcttactccgccctgaaacgcctaccttaacacgc

SEQ ID NO: 126971 - DNA, 60 bp, Artificial
  Synthetic oligonucleotide
gacggagacggggcagcagtaatagaggaagagggaaaaacagccttatatccacaccgt

SEQ ID NO: 126972 - DNA, 60 bp, Artificial
  Synthetic oligonucleotide
gggagttcgtgaggcagacagaatacagcatgaccgcgtgcgtaagaaaagggaaattag

SEQ ID NO: 126973 - DNA, 60 bp, Artificial
  Synthetic oligonucleotide
gagcccacagagatctaaaagacagattggcagcttatcagggagattgtgaaaccgtag

SEQ ID NO: 126974 - DNA, 60 bp, Artificial
  Synthetic oligonucleotide
ctgcacgtagacaggaaatgtttatcttctcagctgattgtggttaggccgattactgga

SEQ ID NO: 126975 - DNA, 60 bp, Artificial
  Synthetic oligonucleotide
tgttctaccacaaggatgggtatgtagccctgccatttatcagactaccacccagaagat

SEQ ID NO: 126976 - DNA, 60 bp, Artificial
  Synthetic oligonucleotide
gcacccctagacactccctccaacgcttagctgcacttcagctgtgcactaacgcatgtc

SEQ ID NO: 126977 - DNA, 60 bp, Artificial
  Synthetic oligonucleotide
ggggccatacaccatatgaaatatacctagaatcagaacataccaaataccaagaccaac

SEQ ID NO: 126978 - DNA, 60 bp, Artificial
  Synthetic oligonucleotide
gaggcagatgaaggagttaagaaagccttagaacagatggccccgtgtagccctcctgag

SEQ ID NO: 126979 - DNA, 60 bp, Artificial
  Synthetic oligonucleotide
agtcttgcctcacacaccagaagcatatgcctcccaaacctcagggcccgaggatggtag

SEQ ID NO: 126980 - DNA, 60 bp, Artificial
  Synthetic oligonucleotide
actctgaaggttttctggtccctgctggcggggtacaaaccagagagtacagaaacggcc

SEQ ID NO: 126981 - DNA, 60 bp, Artificial
  Synthetic oligonucleotide
ggagtaaatgtggccaaaaggaagacccacgtagagtggagatttaaggataagactggg

SEQ ID NO: 126982 - DNA, 60 bp, Artificial
  Synthetic oligonucleotide
ccagagcaacatgagttctgtgaccccatctgcaccccctcttatattagattagacaaa

SEQ ID NO: 126983 - DNA, 60 bp, Artificial
  Synthetic oligonucleotide
cttctgaagattgggaagcggcactccagaaggaagaaagtctaacacaaatattcccag

SEQ ID NO: 126984 - DNA, 60 bp, Artificial
  Synthetic oligonucleotide
tatgtgggccagtaagagaaaatctaaccacctactatactgacggagggaagaaaggga

SEQ ID NO: 126985 - DNA, 60 bp, Artificial
  Synthetic oligonucleotide
ggaaccaatcaacaggcggaattgaaggccatatgcatggctctcttggatggaccacca

SEQ ID NO: 126986 - DNA, 60 bp, Artificial
  Synthetic oligonucleotide
acttggatagggaattcctccctccagttttgtgtccagtggccatatgtcttggtaggt

SEQ ID NO: 126987 - DNA, 60 bp, Artificial
  Synthetic oligonucleotide
gtgtgtgacgaggagtgctcggcagcagaggtagcccttatcataacccaattttcagct

SEQ ID NO: 126988 - DNA, 60 bp, Artificial
  Synthetic oligonucleotide
gcctgagcagcatgtggggaatgcttttggaagaaattggcaggtggctcgcacgtaggg

SEQ ID NO: 126989 - DNA, 60 bp, Artificial
  Synthetic oligonucleotide
ccatggtcaccagccctccagggtaccgcatagtgaatgataccagccaggcaccttggt

SEQ ID NO: 126990 - DNA, 60 bp, Artificial
  Synthetic oligonucleotide
cgagacactggtcaaacaggtgtatgaacaggccgcgaaacattcgagagccacatggat

SEQ ID NO: 126991 - DNA, 60 bp, Artificial
  Synthetic oligonucleotide
gtacagacgtatgtagctcacagaactcgagcacaaacaaaggccacccaatgacgcttc

SEQ ID NO: 126992 - DNA, 60 bp, Artificial
  Synthetic oligonucleotide
gcactaacgcatgtctctgttggtacccgttaggacgcatcaacgacaccaccccgttgt

SEQ ID NO: 126993 - DNA, 60 bp, Artificial
  Synthetic oligonucleotide
gctccccggcgagaggagacccggcttctggaagtctctacgagaattggttgaacaaaa

SEQ ID NO: 126994 - DNA, 57 bp, Artificial
  Synthetic oligonucleotide
ctgagtggccacccctaactcgtcgtaacattcatagattgtggcaatatgcccgga

SEQ ID NO: 126995 - DNA, 60 bp, Artificial
  Synthetic oligonucleotide
cacgtgcaaaggacctaggcgggactgtccacattgttgttgtcccatatgtagttggca

SEQ ID NO: 126996 - DNA, 60 bp, Artificial
  Synthetic oligonucleotide
attatgcctttattggggtttgggtgaaacatctagagaattagacaaggatagttggca

SEQ ID NO: 126997 - DNA, 60 bp, Artificial
  Synthetic oligonucleotide
ctcggaggatatattggcagccagagataccatagattggtggctctcagctaatcagga

SEQ ID NO: 126998 - DNA, 60 bp, Artificial
  Synthetic oligonucleotide
ggtattgccactttgactttggaccagaggaagttggatggaacaatagttggaatagca

SEQ ID NO: 126999 - DNA, 60 bp, Artificial
  Synthetic oligonucleotide
ccgagactaacatttcttgacggacaactgtcccagttgaagaacacactgtgcggacat

SEQ ID NO: 127000 - DNA, 60 bp, Artificial
  Synthetic oligonucleotide
ttttaaacttaaaagggtggactgtggggcagggtgggacctcaggacaacagcagcccc

SEQ ID NO: 127001 - DNA, 60 bp, Artificial
  Synthetic oligonucleotide
cgccacatgtcgctgggatctcctgacccctcaactccttcagcttccgttctttctgtt

SEQ ID NO: 127002 - DNA, 60 bp, Artificial
  Synthetic oligonucleotide
agaagaggggggattggggggtacagtgcaggggaaagaataatagacataatagcaaca

SEQ ID NO: 127003 - DNA, 57 bp, Artificial
  Synthetic oligonucleotide
gaaagatgtcgagcggatcgctcacaaccagtcggtagatgtcaagaagagacgttg

SEQ ID NO: 127004 - DNA, 52 bp, Artificial
  Synthetic oligonucleotide
atgtcgagcggatcgctcacaaccagtcggtagatgtcaagaagagacgttg

SEQ ID NO: 127005 - DNA, 60 bp, Artificial
  Synthetic oligonucleotide
ttataatcccatggccggacccctaaggatgcaggccaacaaccccgcccaggaaggact

SEQ ID NO: 127006 - DNA, 56 bp, Artificial
  Synthetic oligonucleotide
cccctaggggacatgctccgagcctgccaagcatggacacccaaggacaaagcccg

SEQ ID NO: 127007 - DNA, 60 bp, Artificial
  Synthetic oligonucleotide
ggagtccccagttcatgcaaacagtccggctcgcaattcagcaattcgaccccacggcca

SEQ ID NO: 127008 - DNA, 60 bp, Artificial
  Synthetic oligonucleotide
ctattccagtggctgtatggctcgtctcagccctagcggccgggactggtattgcagggg

SEQ ID NO: 127009 - DNA, 60 bp, Artificial
  Synthetic oligonucleotide
ggggaataaccggatccctgtccctagcatcaagccgcagcctgcttttcgaagttgaca

SEQ ID NO: 127010 - DNA, 60 bp, Artificial
  Synthetic oligonucleotide
acgcagcccctgttccgctgtggaaaggcagggcattggagccgagactgcaccctccca

SEQ ID NO: 127011 - DNA, 60 bp, Artificial
  Synthetic oligonucleotide
gcccctgtatccttcgccaactccaatcacttccccaccggctacagaacaggcacaacc

SEQ ID NO: 127012 - DNA, 60 bp, Artificial
  Synthetic oligonucleotide
gggcgagtcatcagcttaaaggtcacgctgtctcacacaaacaatcccgggaacaggctc

SEQ ID NO: 127013 - DNA, 60 bp, Artificial
  Synthetic oligonucleotide
gggggtcaccttctttccacctgcccgctgtgcctaccttggagatccattccgcccggg

SEQ ID NO: 127014 - DNA, 57 bp, Artificial
  Synthetic oligonucleotide
ctgtcgcattatgggacaaacctacggcctctcgcctagcccaatccccaaggcccc

SEQ ID NO: 127015 - DNA, 60 bp, Artificial
  Synthetic oligonucleotide
attctctctcactccggtgccttcccctgggacaagaagccgccgggccattccagtggc

SEQ ID NO: 127016 - DNA, 60 bp, Artificial
  Synthetic oligonucleotide
gagcagccttactctcgatagacggctcccctcagtggatcccgtggcggctcctgaaaa

SEQ ID NO: 127017 - DNA, 60 bp, Artificial
  Synthetic oligonucleotide
aaaagactgtatgcccaaggccagacggcagcgaactcgtcgcacacgcagcaacagacc

SEQ ID NO: 127018 - DNA, 60 bp, Artificial
  Synthetic oligonucleotide
ggagatttattcatgacctgagggccaccaatgccatcacgaccaccttggcctccccgt

SEQ ID NO: 127019 - DNA, 60 bp, Artificial
  Synthetic oligonucleotide
cctcgtatcactctagtccctgcagtcttgcccaacctgtctgtgcctgggaccttgacc

SEQ ID NO: 127020 - DNA, 56 bp, Artificial
  Synthetic oligonucleotide
tcttccaaattccccttccaaaacagttccagccatacttcgccttcactatcccc

SEQ ID NO: 127021 - DNA, 60 bp, Artificial
  Synthetic oligonucleotide
gggcagccatctttggtggtacaatcctccctgttaatctttgaaaaattccagaccaaa

SEQ ID NO: 127022 - DNA, 60 bp, Artificial
  Synthetic oligonucleotide
tattctgccatcccaagcagttaggaaccttcctgaccaacgtacctctaaaacgcctgg

SEQ ID NO: 127023 - DNA, 59 bp, Artificial
  Synthetic oligonucleotide
ccccacagatagatcagttccctttaaacctgagcgcctccaggccttgactgacctgg

SEQ ID NO: 127024 - DNA, 50 bp, Artificial
  Synthetic oligonucleotide
cccctcgacctacccaggcactcttagacacaggggctgatctcaccgtc

SEQ ID NO: 127025 - DNA, 60 bp, Artificial
  Synthetic oligonucleotide
cccagtctacgtgtttggcgattgtgttcaagccgattggtgtcccgtttcaggtgggct

SEQ ID NO: 127026 - DNA, 60 bp, Artificial
  Synthetic oligonucleotide
tttctcttccttctcccgcaaccgctcccttctgcgctgctccttctcctcgcgctgttt

SEQ ID NO: 127027 - DNA, 60 bp, Artificial
  Synthetic oligonucleotide
ccccagcaaccctatacactctaactgttgatgtctcttttcgcgctctcgacgcttttc

SEQ ID NO: 127028 - DNA, 60 bp, Artificial
  Synthetic oligonucleotide
ccgaccccaaaacatctacaccacctggggaagaactgtagtttgcttgtacctctacca

SEQ ID NO: 127029 - DNA, 60 bp, Artificial
  Synthetic oligonucleotide
cgtttcaggtgggctttgttccacccgcctgcaccggcatgcccttctcgccacctgccc

SEQ ID NO: 127030 - DNA, 60 bp, Artificial
  Synthetic oligonucleotide
acaactctccaagatgaccctccaagcgctagtcacccacggccttccagtctcccaggc

SEQ ID NO: 127031 - DNA, 60 bp, Artificial
  Synthetic oligonucleotide
attactccctcctggccagcctcatccccaagggttaccccgggcggacaagcgagatta

SEQ ID NO: 127032 - DNA, 60 bp, Artificial
  Synthetic oligonucleotide
gctacaacctgggccctccgactttgattttcagcaactacggcgtttcctgaagctggc

SEQ ID NO: 127033 - DNA, 60 bp, Artificial
  Synthetic oligonucleotide
aatcattaatgtgttaattaaaaatcaaacgtcccccaccccgcctcctgccccgtctct

SEQ ID NO: 127034 - DNA, 60 bp, Artificial
  Synthetic oligonucleotide
accaacgtctgtaccctccatgccccaatctagtttcttactctaacttccacaagtcct

SEQ ID NO: 127035 - DNA, 60 bp, Artificial
  Synthetic oligonucleotide
ccttcctatctcaagaattccaggccttttgcgcctcatggcacatcaaacattccaccc

SEQ ID NO: 127036 - DNA, 56 bp, Artificial
  Synthetic oligonucleotide
cccctagacaatgccatcagtaaagccctatggaccctaaaccaactcaatgtcat

SEQ ID NO: 127037 - DNA, 60 bp, Artificial
  Synthetic oligonucleotide
gctctgagactgtcagcgccctcttgcacgctatcactatcttaggcaagcccctttcta

SEQ ID NO: 127038 - DNA, 60 bp, Artificial
  Synthetic oligonucleotide
gttatctacctccaccacattcgtagccacaccaatctccccgaccccatctccactctc

SEQ ID NO: 127039 - DNA, 60 bp, Artificial
  Synthetic oligonucleotide
cggaaccgatattgcctgcacgtctgggttgataccttctccaacgcagtctccattacc

SEQ ID NO: 127040 - DNA, 60 bp, Artificial
  Synthetic oligonucleotide
gccctccatgccatccaacaggccttacaacacaattgccgcagccgtctcaatcctgct

SEQ ID NO: 127041 - DNA, 60 bp, Artificial
  Synthetic oligonucleotide
cacgctatctcccgtggtcttaacaacgcaccctgtctcttctccgacgggtcttcccaa

SEQ ID NO: 127042 - DNA, 60 bp, Artificial
  Synthetic oligonucleotide
gcagcagtaaagaattggatgactcaaacactgctgattcaaaatgctaacccagattgc

SEQ ID NO: 127043 - DNA, 60 bp, Artificial
  Synthetic oligonucleotide
gctctctggctagctaaggaacccactgcttaagcctcaataaagcttgccttgagtgac

SEQ ID NO: 127044 - DNA, 60 bp, Artificial
  Synthetic oligonucleotide
agctaactagctctgtatctggcggacccgtggtggaactgacgagttcggaacacccgg

SEQ ID NO: 127045 - DNA, 60 bp, Artificial
  Synthetic oligonucleotide
ctaaaaggagaagccatgcatggacaagtagactgtagtccagggatatggcaattagat

SEQ ID NO: 127046 - DNA, 51 bp, Artificial
  Synthetic oligonucleotide
ggggaggaaatcctctctcagctataccgccctctagaagcatgctataac

SEQ ID NO: 127047 - DNA, 51 bp, Artificial
  Synthetic oligonucleotide
ggggaagaaatcctctctcagctataccgccctctagaagcatgctataac

SEQ ID NO: 127048 - DNA, 60 bp, Artificial
  Synthetic oligonucleotide
gagatccctcagaccattctagtcagtgtggaaaatctctagcagtggcgcccgaacagg

SEQ ID NO: 127049 - DNA, 60 bp, Artificial
  Synthetic oligonucleotide
ccctgagatcatgcaaaccacaatcctgagattatgctgacatgtgtaacagctgatgcc

SEQ ID NO: 127050 - DNA, 60 bp, Artificial
  Synthetic oligonucleotide
agacagcgtggtaagaaatccgccgtggtgagtctagatagagacatggtgaggcaggcc

SEQ ID NO: 127051 - DNA, 60 bp, Artificial
  Synthetic oligonucleotide
cctaggagcgagatagaaacttataggcctctcttcccggaaagctaactcactgtgaga

SEQ ID NO: 127052 - DNA, 60 bp, Artificial
  Synthetic oligonucleotide
cagaagataagagacaagagggctatccagcaaaatggctaggattcgagctacatccag

SEQ ID NO: 127053 - DNA, 60 bp, Artificial
  Synthetic oligonucleotide
ctgcacaagtgaaatgcccttagcatccctacagagggtatattgggaaaaggaggaacg

SEQ ID NO: 127054 - DNA, 60 bp, Artificial
  Synthetic oligonucleotide
caggcatgcagggacatcgggggaacagcatatcagatgcagttgcttgcacaagccctc

SEQ ID NO: 127055 - DNA, 60 bp, Artificial
  Synthetic oligonucleotide
ggaaagttaaatgaggaagcagagagatggagaaggcagaatccacaacctgcgggcggg

SEQ ID NO: 127056 - DNA, 60 bp, Artificial
  Synthetic oligonucleotide
cgaatcaggcagcggcacaggctaatatggatcaagcaagacaaatatgcctacaatggg

SEQ ID NO: 127057 - DNA, 60 bp, Artificial
  Synthetic oligonucleotide
catgctgtgtcaggtgtcttgcaggaatggcggagataagaaaagaagcaaaggagccac

SEQ ID NO: 127058 - DNA, 60 bp, Artificial
  Synthetic oligonucleotide
ccgcaaggttgttagaagcagtggatgcagaacccgttacccaacctataaaagaatatt

SEQ ID NO: 127059 - DNA, 60 bp, Artificial
  Synthetic oligonucleotide
aaaagcaaccttggcggggatagtctgtgtgcaaatgggaatgcagcccgagacactgca

SEQ ID NO: 127060 - DNA, 60 bp, Artificial
  Synthetic oligonucleotide
aaggcaaaatttacaggataaccgcaaggaaaaaagggacctggcagacctattagcagg

SEQ ID NO: 127061 - DNA, 60 bp, Artificial
  Synthetic oligonucleotide
tggaaggagatcgcgcattacaaagtgaaaggaaaatagaaagaatacatgtacaagaat

SEQ ID NO: 127062 - DNA, 60 bp, Artificial
  Synthetic oligonucleotide
gtgcttgcttcaacagaactgagctggtcgtggttattatcggggaccgaagtcccgtgc

SEQ ID NO: 127063 - DNA, 60 bp, Artificial
  Synthetic oligonucleotide
gggacagccttcacagctgaggctacgcagcatctaatgaagtatttagggattcagcac

SEQ ID NO: 127064 - DNA, 60 bp, Artificial
  Synthetic oligonucleotide
gaaccacaatttgtggccctacagtctgccatcgcagccactctagttgcgctcaatata

SEQ ID NO: 127065 - DNA, 60 bp, Artificial
  Synthetic oligonucleotide
aaagaggccatccaggagagtggaacggcccaactgaggtactgtgggaaggggaaggag

SEQ ID NO: 127066 - DNA, 60 bp, Artificial
  Synthetic oligonucleotide
cttatacagcatacagcataaataaagatcccgcatggtatacaaccctaagactgcagc

SEQ ID NO: 127067 - DNA, 57 bp, Artificial
  Synthetic oligonucleotide
tcccacggcgcgggtgattcggccgtgtggatgtcggctatgtaaccccggctgggg

SEQ ID NO: 127068 - DNA, 60 bp, Artificial
  Synthetic oligonucleotide
caggggtatatgagagtcagctaaagtggaatgagagtcttaaagacggagactatgggc

SEQ ID NO: 127069 - DNA, 60 bp, Artificial
  Synthetic oligonucleotide
gcatggactagtatcagaagaatttgaaaggcagctagcatactatgccaccacatggac

SEQ ID NO: 127070 - DNA, 60 bp, Artificial
  Synthetic oligonucleotide
gccactgcaatgagacagggataaacacaacatggagaataaatggcacaaagggagctt

SEQ ID NO: 127071 - DNA, 60 bp, Artificial
  Synthetic oligonucleotide
ccatgacatataagggagaaacatcctgcccaagcttggttgtgctaagagatagcccag

SEQ ID NO: 127072 - DNA, 60 bp, Artificial
  Synthetic oligonucleotide
cgcgattcagcagtcctacaccagggacgctgtccagactcttgctaacgcgactgctgt

SEQ ID NO: 127073 - DNA, 60 bp, Artificial
  Synthetic oligonucleotide
ttggacaaggtttaaagataattgcacatggcaagagtgggaaagggagataagtgcgca

SEQ ID NO: 127074 - DNA, 60 bp, Artificial
  Synthetic oligonucleotide
tattatgcccgcatgaggtaatacttaaaccccaagaagtaaaacggatcccaatagacc

SEQ ID NO: 127075 - DNA, 60 bp, Artificial
  Synthetic oligonucleotide
ccagatgtgtggacagcactaagggagtcactaggatggacacaatggctggcttggata

SEQ ID NO: 127076 - DNA, 60 bp, Artificial
  Synthetic oligonucleotide
tggctcagagagatgcagcgatcccgacaacaaaggaattatgaacgcctggaggagagc

SEQ ID NO: 127077 - DNA, 60 bp, Artificial
  Synthetic oligonucleotide
gtggcgccgttggtgattccgctgacaatcagaatttggctccttggagagaatggagag

SEQ ID NO: 127078 - DNA, 60 bp, Artificial
  Synthetic oligonucleotide
gacacaggggcagataaaacgatagtaagaatgcatgatggaacagggattccaaacgga

SEQ ID NO: 127079 - DNA, 60 bp, Artificial
  Synthetic oligonucleotide
gattcctggagccgtggacaacgcaagagtgttggcaaatagagtatcccttggaggatg

SEQ ID NO: 127080 - DNA, 60 bp, Artificial
  Synthetic oligonucleotide
tcccacaataccagtagaattgaaagaaggatgtaaagggccacatgtgccccagtggcc

SEQ ID NO: 127081 - DNA, 60 bp, Artificial
  Synthetic oligonucleotide
caaacagcagatttagcagaagcgcagctaggactgccacacccaggagggttgcaaagg

SEQ ID NO: 127082 - DNA, 60 bp, Artificial
  Synthetic oligonucleotide
ggaagagaagcgctgttctgggaggtcttggcgaccgagaatcttgttaaataagccagg

SEQ ID NO: 127083 - DNA, 60 bp, Artificial
  Synthetic oligonucleotide
gggtctacaggagcattttggatagagaatattccccaagcagaggaagaacattacaaa

SEQ ID NO: 127084 - DNA, 60 bp, Artificial
  Synthetic oligonucleotide
gggctcgagtagcttgagaagctcgactgagatctgaatccaagagcgacatcagacagc

SEQ ID NO: 127085 - DNA, 60 bp, Artificial
  Synthetic oligonucleotide
gcgggttgccgaggcaactgctcagaagaaccaggggaaagggcttccagcaacctcaaa

SEQ ID NO: 127086 - DNA, 60 bp, Artificial
  Synthetic oligonucleotide
gggatttgtgtaagtcgtgttgccagggtgaagtagtaaagagaacacaaccctacacct

SEQ ID NO: 127087 - DNA, 60 bp, Artificial
  Synthetic oligonucleotide
cccacagcaagtgataaaagcagcacagaaattaacccaggaagtaatcataagaacagg

SEQ ID NO: 127088 - DNA, 60 bp, Artificial
  Synthetic oligonucleotide
ctgcaggtagggaacatcacgtggatgccatcattttggtcatgttatcgaggagcaccc

SEQ ID NO: 127089 - DNA, 60 bp, Artificial
  Synthetic oligonucleotide
gggaacgtggttcctacagccaggggactatagaaaggcggatcagcagttctggttcgc

SEQ ID NO: 127090 - DNA, 60 bp, Artificial
  Synthetic oligonucleotide
gaattcatgctccgaaactgggatgaacaggtcataagaaaccccattcaggcaagaatc

SEQ ID NO: 127091 - DNA, 60 bp, Artificial
  Synthetic oligonucleotide
gggccatgataagtgggaaaagtagcgttgcagcaaaaggaatatttgtacaaggaggca

SEQ ID NO: 127092 - DNA, 60 bp, Artificial
  Synthetic oligonucleotide
gcagaggaaatatttgagcaagaagcagaaagttggaagagaacaagcgtgcgagtccca

SEQ ID NO: 127093 - DNA, 60 bp, Artificial
  Synthetic oligonucleotide
cccgagcgcctgagaacaggagttgtaatttcacaggggaaatacgaatagggcaacatc

SEQ ID NO: 127094 - DNA, 60 bp, Artificial
  Synthetic oligonucleotide
ccaaaagggtacgcatatggggcacttagagggaacagcaaatttccacaaagagtgtcg

SEQ ID NO: 127095 - DNA, 60 bp, Artificial
  Synthetic oligonucleotide
gagaagtggaaagagtaccccatgtggcatgtctggaggcatttagatcaaaatgagcac

SEQ ID NO: 127096 - DNA, 60 bp, Artificial
  Synthetic oligonucleotide
ccagggatggaaattgagcccagctgtatatcaattcaccatgcaaaggttgttaaaagg

SEQ ID NO: 127097 - DNA, 60 bp, Artificial
  Synthetic oligonucleotide
ccagccaaactactctggaaaggtgaaggggcagtagtaatacaagacaatagtgatata

SEQ ID NO: 127098 - DNA, 60 bp, Artificial
  Synthetic oligonucleotide
gttgcagcgccagtcctccgattgactgagtcgcccgggtacccgtgtatccaataaacc

SEQ ID NO: 127099 - DNA, 60 bp, Artificial
  Synthetic oligonucleotide
tcatgggtaccagctcacaaaggaataggaggaaatgaagaagtagatcgcctagtgggc

SEQ ID NO: 127100 - DNA, 60 bp, Artificial
  Synthetic oligonucleotide
aaccgggcggtccaaaggacttggtgggtggacccggggagtggcttgccctctcgtttc

SEQ ID NO: 127101 - DNA, 60 bp, Artificial
  Synthetic oligonucleotide
aacagggacttgagtaacgacccagcgactcgagcccgcaggcgaacagatccgcgagaa

SEQ ID NO: 127102 - DNA, 60 bp, Artificial
  Synthetic oligonucleotide
aaggagagatcgggcggtcccctagggtggcagactagcgtgggacgggaacctatccaa

SEQ ID NO: 127103 - DNA, 60 bp, Artificial
  Synthetic oligonucleotide
aggtacccgactatgcccgggttcctgtggtgcttgcgcccggtagccaccacggaggat

SEQ ID NO: 127104 - DNA, 60 bp, Artificial
  Synthetic oligonucleotide
aggaggaaatgttacaattgtggccaaccgggacacctcgccaaagactgcccgcagccc

SEQ ID NO: 127105 - DNA, 60 bp, Artificial
  Synthetic oligonucleotide
aagaaggggccaaggaacttccctctcacctctgtgcagcccagcgcaccgactctgcca

SEQ ID NO: 127106 - DNA, 60 bp, Artificial
  Synthetic oligonucleotide
cctctacagccgacaggatccgagtctatcaaatctctctttggtatcgcttcggtattg

SEQ ID NO: 127107 - DNA, 60 bp, Artificial
  Synthetic oligonucleotide
ccaacccagattgcaaactcatcctaaaggccatgccaggtgctagcttggaggacatgc

SEQ ID NO: 127108 - DNA, 60 bp, Artificial
  Synthetic oligonucleotide
gggccaaatttcaccagccaagaattcgaagcagctgcatggtgggcaaatattcatcac

SEQ ID NO: 127109 - DNA, 60 bp, Artificial
  Synthetic oligonucleotide
gtcacaaatgtcaaaaccatggagaacccaaatcaggacaggtaaacgcagaagtaggag

SEQ ID NO: 127110 - DNA, 60 bp, Artificial
  Synthetic oligonucleotide
gatttgcttcctcacaaaaggcctcgggatttcatatggcaggaaacggaagagacgaag

SEQ ID NO: 127111 - DNA, 60 bp, Artificial
  Synthetic oligonucleotide
taggttagggcagggatactctcttctttcttctcagatccctatcccatcccacgcggg

SEQ ID NO: 127112 - DNA, 60 bp, Artificial
  Synthetic oligonucleotide
ttgggacagtgtcaacatctagcaacacactacccgaaggtagggaccccgttgacctta

SEQ ID NO: 127113 - DNA, 60 bp, Artificial
  Synthetic oligonucleotide
acctgtgcaaaagtatcagaggggcacggagcctgacagatacagtggtcctctcagatt

SEQ ID NO: 127114 - DNA, 60 bp, Artificial
  Synthetic oligonucleotide
ggatgcaaaaggtggaacgggtccctttagatcccgtgtggaatccaaacccaagagata

SEQ ID NO: 127115 - DNA, 60 bp, Artificial
  Synthetic oligonucleotide
cgtcttcctgcctcccgacagaccctaccccgcaatctctatatttgaacatcactgagg

SEQ ID NO: 127116 - DNA, 60 bp, Artificial
  Synthetic oligonucleotide
gaacctgctgagggccgtaacagcccaacagagcttactacagcttactgtttggggagt

SEQ ID NO: 127117 - DNA, 60 bp, Artificial
  Synthetic oligonucleotide
aaacaacgtgacccttgttccctcggcacaggtgagtgactcatggagatcagagctcag

SEQ ID NO: 127118 - DNA, 60 bp, Artificial
  Synthetic oligonucleotide
ggaagcaatggcagtcactattacatcctgaattgcaacacatcatacataacccaagct

SEQ ID NO: 127119 - DNA, 60 bp, Artificial
  Synthetic oligonucleotide
ggctggaaagggtccccaactgtgtttcaacatacagcggcagagctaccacaggagatc

SEQ ID NO: 127120 - DNA, 60 bp, Artificial
  Synthetic oligonucleotide
tgacatggcaacagtggagtgagttagtagataatgacacaatgaccattcagcagctct

SEQ ID NO: 127121 - DNA, 60 bp, Artificial
  Synthetic oligonucleotide
aattgggacttagtgcacccacagccgccacaaccgcaacccaatgcagggctgggagac

SEQ ID NO: 127122 - DNA, 60 bp, Artificial
  Synthetic oligonucleotide
gcggccgctccaccaacaggcggcgtacccagtggaaactaccctgtcgtgagaacacag

SEQ ID NO: 127123 - DNA, 60 bp, Artificial
  Synthetic oligonucleotide
gagaaatttcaggatgactacccggtgcaatggttagggtatgagctacacccatcccat

SEQ ID NO: 127124 - DNA, 60 bp, Artificial
  Synthetic oligonucleotide
cccatctttagaggtcactttaaaagcaggaaaagagggaccaaagttgaaacagtggcc

SEQ ID NO: 127125 - DNA, 60 bp, Artificial
  Synthetic oligonucleotide
caaaacggacgggatatctccattcgacgtgaataacaagcccaacaccacgtatcatgg

SEQ ID NO: 127126 - DNA, 60 bp, Artificial
  Synthetic oligonucleotide
acagaaaatgggtcatcttgggcctgcagcgatgcgtcaaaatgtacaaccctgtcaaca

SEQ ID NO: 127127 - DNA, 60 bp, Artificial
  Synthetic oligonucleotide
cctgggagcccttgcctagagagttggtgaagctgaccccggctcgcttgctttagtaag

SEQ ID NO: 127128 - DNA, 60 bp, Artificial
  Synthetic oligonucleotide
ttcaggacaggtgccgaccctcagtggaaaggaccagcgcgcctactctggaaaggtgaa

SEQ ID NO: 127129 - DNA, 60 bp, Artificial
  Synthetic oligonucleotide
ggcacatactcacaggaagtgcaccctttgtctatgtacatcactaccagctgcacaatc

SEQ ID NO: 127130 - DNA, 60 bp, Artificial
  Synthetic oligonucleotide
ggccgccatttgggagctaaacgaagaagccctaaaacacttctcaagggaagagctccg

SEQ ID NO: 127131 - DNA, 60 bp, Artificial
  Synthetic oligonucleotide
cagtaaggccccgagttccgcttcgcgaccctacttggaagctcatgatggacctctctc

SEQ ID NO: 127132 - DNA, 60 bp, Artificial
  Synthetic oligonucleotide
ttcttggtcttctcattctgctccaagctggcagtcaagagcggcagacagctagcacag

SEQ ID NO: 127133 - DNA, 60 bp, Artificial
  Synthetic oligonucleotide
ggccaatgagagggactgctcccggcccaaccagttctgttccacaggccgatccagaca

SEQ ID NO: 127134 - DNA, 60 bp, Artificial
  Synthetic oligonucleotide
aacttacagcctgatcctcatagccctccccgtagcagcttgggcttggtggcgatatta

SEQ ID NO: 127135 - DNA, 60 bp, Artificial
  Synthetic oligonucleotide
gggacgcatggtgggcagataattggcaaatcaattgggtaccagacatagaggcggtgt

SEQ ID NO: 127136 - DNA, 60 bp, Artificial
  Synthetic oligonucleotide
ctgccacccctcctgcacatacgcctgctccaactgtgggaaagccttagacgcttgcta

SEQ ID NO: 127137 - DNA, 60 bp, Artificial
  Synthetic oligonucleotide
gccgtgttactagccctcagagatggaccacctcagatgaacataattacagattctcag

SEQ ID NO: 127138 - DNA, 60 bp, Artificial
  Synthetic oligonucleotide
ggagcaggcatgacattctattcgcaacttatagtgggaggtaatactcgtaaagcctac

SEQ ID NO: 127139 - DNA, 60 bp, Artificial
  Synthetic oligonucleotide
tggacggatgcgctacttcatgctggaggacgactatggagagcaatcgtggctatcccc

SEQ ID NO: 127140 - DNA, 60 bp, Artificial
  Synthetic oligonucleotide
ggcgccaaggaaaatgtgggtagtaagtccaatacaggagaccacagaaaggaagatgga

SEQ ID NO: 127141 - DNA, 60 bp, Artificial
  Synthetic oligonucleotide
cccacagcctcagcagccgcagcccaatgcaggcctgcggagcccatcaggatcagacat

SEQ ID NO: 127142 - DNA, 60 bp, Artificial
  Synthetic oligonucleotide
gccttgttgaacctttggggatgtgcgaacaggcagatctgtcacactagggtgccatgg

SEQ ID NO: 127143 - DNA, 60 bp, Artificial
  Synthetic oligonucleotide
acacatggggagccaaaaacaggacaggtcaatgcagaattgggagtgtggcaaatggat

SEQ ID NO: 127144 - DNA, 60 bp, Artificial
  Synthetic oligonucleotide
agcggcctgggagccctcggaactaggtaaagcggcctgagagcccttgcctaggagaac

SEQ ID NO: 127145 - DNA, 60 bp, Artificial
  Synthetic oligonucleotide
ttgctgaggcaaccggggcggactcgtgggtgggactgggaggtactgggagtggcttgc

SEQ ID NO: 127146 - DNA, 60 bp, Artificial
  Synthetic oligonucleotide
gacaggctctgacccatcttggaagggacctgctgccttgttgtggaagggtgaaggagc

SEQ ID NO: 127147 - DNA, 60 bp, Artificial
  Synthetic oligonucleotide
aggcatgccaaggggtaggagggccagcacataagtccaggctaatggcagaggctatgg

SEQ ID NO: 127148 - DNA, 60 bp, Artificial
  Synthetic oligonucleotide
aggccacccaagagttcacagaggtacagctagggatcccacatccagcaggattagcgg

SEQ ID NO: 127149 - DNA, 60 bp, Artificial
  Synthetic oligonucleotide
cttgaaactggggatacaaaccccggaagataagtaccagaaagactacccagtccagtg

SEQ ID NO: 127150 - DNA, 60 bp, Artificial
  Synthetic oligonucleotide
gcagttcttggtcttctcattctgctctcgcctcgccatgaagtcaggcaggcaattaga

SEQ ID NO: 127151 - DNA, 60 bp, Artificial
  Synthetic oligonucleotide
ccgaccacgccttgcagctcctgctattgtaaacggtgtgcttttcattgcatgttgtgc

SEQ ID NO: 127152 - DNA, 60 bp, Artificial
  Synthetic oligonucleotide
ggccctaaaaccctgtgtcaaattgacccctatgtgtgtcaaaatgaaatgcagtagaat

SEQ ID NO: 127153 - DNA, 60 bp, Artificial
  Synthetic oligonucleotide
cacagattcccaatatgtgctggggatagtggcttctcaaccccaagaatccacctcgcc

SEQ ID NO: 127154 - DNA, 60 bp, Artificial
  Synthetic oligonucleotide
acagatccatacccaacctccagaggcagcagagccgccagaaggaacagaaggaggcgt

SEQ ID NO: 127155 - DNA, 60 bp, Artificial
  Synthetic oligonucleotide
gctagcatatcagaggtggtgcagaccaaaggtagaagtgagcgtcatcaggctcctcga

SEQ ID NO: 127156 - DNA, 60 bp, Artificial
  Synthetic oligonucleotide
cttgagagggacacaagctcctccttctaattcaatgcctaatgctgatcctactcctcc

SEQ ID NO: 127157 - DNA, 60 bp, Artificial
  Synthetic oligonucleotide
ctgtaacacctcatacataactcagcaatgtgaaaagagcagcttccaaccggttccgat

SEQ ID NO: 127158 - DNA, 60 bp, Artificial
  Synthetic oligonucleotide
accggaggacaagtgctgcgcagccaagaggtaggtggcttggacgggtctgggaagggt

SEQ ID NO: 127159 - DNA, 60 bp, Artificial
  Synthetic oligonucleotide
aagcaatgagcggccactcatcgaagaacatgagcgttcatgcccagtgcggccgcgagt

SEQ ID NO: 127160 - DNA, 60 bp, Artificial
  Synthetic oligonucleotide
ggaaccagggaatgtgtggatcaccacagcatgtcttcccacagatcccgcaccccagga

SEQ ID NO: 127161 - DNA, 60 bp, Artificial
  Synthetic oligonucleotide
ggaagcaaatcaggataaggtgtcatctggcggacaagcaaggggaagaaaagacagcac

SEQ ID NO: 127162 - DNA, 60 bp, Artificial
  Synthetic oligonucleotide
tcagtacgactgtggatcgtgattagggaacaagcccgccgctgcagtgaactcttagcg

SEQ ID NO: 127163 - DNA, 60 bp, Artificial
  Synthetic oligonucleotide
ataggggcaggcatgactttctattcacagcttatagtaggaggggacacacgaagagca

SEQ ID NO: 127164 - DNA, 60 bp, Artificial
  Synthetic oligonucleotide
agacctggtcaatctctccccgccagtgggtcccaaggatggagcgagcgacaggaagag

SEQ ID NO: 127165 - DNA, 60 bp, Artificial
  Synthetic oligonucleotide
agaaaaccaggaaattcttaagcaggcagtccagggggcatactttgatccagaacaacc

SEQ ID NO: 127166 - DNA, 60 bp, Artificial
  Synthetic oligonucleotide
cccgagggtcatcagaggacaaccacccttaggggattgtgaacacccaggagcacatac

SEQ ID NO: 127167 - DNA, 60 bp, Artificial
  Synthetic oligonucleotide
agtaccacccagccacagacctccatggcactccagagtggtcccaactaccatgcagca

SEQ ID NO: 127168 - DNA, 60 bp, Artificial
  Synthetic oligonucleotide
gagataacagtcctatgggatgtgactaatgtaggaccagcaagcctatccaaaagtacc

SEQ ID NO: 127169 - DNA, 60 bp, Artificial
  Synthetic oligonucleotide
caaggtagtggaaatagacccgctttccatggctcccacagaggtgcagaggaggcctgt

SEQ ID NO: 127170 - DNA, 60 bp, Artificial
  Synthetic oligonucleotide
atattgggatcagttgaggttaaggtattgtgctccagcaggttatgctttgctaaaatg

SEQ ID NO: 127171 - DNA, 60 bp, Artificial
  Synthetic oligonucleotide
ttattagggactatggaaaacagatggcaggtgctgattgtgtggcaggtagacaggatg

SEQ ID NO: 127172 - DNA, 60 bp, Artificial
  Synthetic oligonucleotide
caaggactatggaaaacagatggcaggtgctgattgtgtggcaggtagacaggatgagga

SEQ ID NO: 127173 - DNA, 60 bp, Artificial
  Synthetic oligonucleotide
tagtgttgggactaaacaaaatggtaaaaatgtacagtccagtgagcatcttagatatta

SEQ ID NO: 127174 - DNA, 60 bp, Artificial
  Synthetic oligonucleotide
tcatggtagtgcttaatctagtgagaaacattaggcagggatatcaacccctctcgttac

SEQ ID NO: 127175 - DNA, 60 bp, Artificial
  Synthetic oligonucleotide
tatcatgatagtacttaacctagtgagaaacattaggcagggatatcaacccctctcgtt

SEQ ID NO: 127176 - DNA, 60 bp, Artificial
  Synthetic oligonucleotide
aaatagtaagaatgtatagccctgtcagcattttggacataaaacaagggccaaaagaac

SEQ ID NO: 127177 - DNA, 60 bp, Artificial
  Synthetic oligonucleotide
caatagaaacaatagtactgatggcagttcattgcatgaattttaaaagaaggggaggaa

SEQ ID NO: 127178 - DNA, 60 bp, Artificial
  Synthetic oligonucleotide
caatagaaaccatagtactaatggcagttcattgcatgaattttaaaagaaggggaggaa

SEQ ID NO: 127179 - DNA, 60 bp, Artificial
  Synthetic oligonucleotide
aaatagtgagaatgtatagccctgttagcattttggacataaaacaagggccaaaagaac

SEQ ID NO: 127180 - DNA, 60 bp, Artificial
  Synthetic oligonucleotide
agagagttcctagggacggcaggcttctgtcgcctctggatccctgggtttgcggaaatg

SEQ ID NO: 127181 - DNA, 60 bp, Artificial
  Synthetic oligonucleotide
cacctagctaccggtaaggtcactcactctttcctccatgtgccagactgcccctatccc

SEQ ID NO: 127182 - DNA, 60 bp, Artificial
  Synthetic oligonucleotide
cacctagctaccggtaaggtcactcactctttcctccatgtgccagactgcccctacccc

SEQ ID NO: 127183 - DNA, 60 bp, Artificial
  Synthetic oligonucleotide
cacctggctaccggtaaggtcactcactctttcctccatgtgccagactgcccctatccc

SEQ ID NO: 127184 - DNA, 60 bp, Artificial
  Synthetic oligonucleotide
tcggccttagctccattagtgccaacaggctcagaaaatttaaagagcctttataatact

SEQ ID NO: 127185 - DNA, 60 bp, Artificial
  Synthetic oligonucleotide
ccagaccgcgggcagaagccccaccaatttggccaaggtaaaaggaataacccagggacc

SEQ ID NO: 127186 - DNA, 60 bp, Artificial
  Synthetic oligonucleotide
ggctgtgctgcaagtctgcttattggcgcttgcaatctacattatccataaatactgcct

SEQ ID NO: 127187 - DNA, 60 bp, Artificial
  Synthetic oligonucleotide
cagaaagacccacattgaatgaactacagaaattagcagggaagataaactgggccagtc

SEQ ID NO: 127188 - DNA, 60 bp, Artificial
  Synthetic oligonucleotide
aacaaaactacgagaattaaagaatgaagtcaaagaggtaaaaattgaagaaggaaatgc

SEQ ID NO: 127189 - DNA, 60 bp, Artificial
  Synthetic oligonucleotide
gcaggaattctaaatatgactgtatctactgccacagcagctgaaaatatgtatgctcag

SEQ ID NO: 127190 - DNA, 60 bp, Artificial
  Synthetic oligonucleotide
gacctccacaggcttatcctattcaaacagtaaatggagcaccacagtatgtagcccttg

SEQ ID NO: 127191 - DNA, 60 bp, Artificial
  Synthetic oligonucleotide
gctgttgtaatcagcgttttgtttctcctttcagaacaccatgtgatctagaggtcgtcc

SEQ ID NO: 127192 - DNA, 60 bp, Artificial
  Synthetic oligonucleotide
ggcctgggacctcgcagttggcgcccgaacagggacctgaaaaggagtgattagggaagt

SEQ ID NO: 127193 - DNA, 60 bp, Artificial
  Synthetic oligonucleotide
attgctggaaaggaggtaggaagatctcgggaaacgagaaggtggggcgagctgcagccc

SEQ ID NO: 127194 - DNA, 60 bp, Artificial
  Synthetic oligonucleotide
cctagataaagattatctggtgattcttcgcggatcgtcaagccaggagattcgtcgggg

SEQ ID NO: 127195 - DNA, 60 bp, Artificial
  Synthetic oligonucleotide
ggagtttaggatctttgagacatgatatagacatagaaacacctcaagaggaacattaca

SEQ ID NO: 127196 - DNA, 60 bp, Artificial
  Synthetic oligonucleotide
tgcatttacattacccagaaagaataatgcagggccagggaggagatatgtatggtgcag

SEQ ID NO: 127197 - DNA, 57 bp, Artificial
  Synthetic oligonucleotide
actccattgtgaaagtatataaccagtgttttgtaaagcttcggggagtctctctgt

SEQ ID NO: 127198 - DNA, 60 bp, Artificial
  Synthetic oligonucleotide
ttggacagatacaggtaaatggcagataatggagatagaaggaagtaatcaaaaagcaga

SEQ ID NO: 127199 - DNA, 60 bp, Artificial
  Synthetic oligonucleotide
gtgggaccacatcaaatatgttatcaagtgtatcaaaagaacccagaacacattttatgg

SEQ ID NO: 127200 - DNA, 60 bp, Artificial
  Synthetic oligonucleotide
ggattaggacaatctcctcatggagacaaagaaatagatgggaatggaggccagactttg

SEQ ID NO: 127201 - DNA, 60 bp, Artificial
  Synthetic oligonucleotide
gtgaggggatattagataaaagatcagaggatgcaggatatgacttactagctgcacagg

SEQ ID NO: 127202 - DNA, 60 bp, Artificial
  Synthetic oligonucleotide
ccagatttgatggaaggactatggcaagaggtcttagaagaaatggaaaagaaaatagca

SEQ ID NO: 127203 - DNA, 60 bp, Artificial
  Synthetic oligonucleotide
gggctgacccgaataatccttggaataccccagtattcgctattaagaagaagagtggta

SEQ ID NO: 127204 - DNA, 60 bp, Artificial
  Synthetic oligonucleotide
gtatacaagaaggacctactttgggaaattgggcaagagaaatttggtccacattattta

SEQ ID NO: 127205 - DNA, 60 bp, Artificial
  Synthetic oligonucleotide
agatacatggttgcaagggaaagttaatatttcactatgtttgacaggaggaaagatgct

SEQ ID NO: 127206 - DNA, 60 bp, Artificial
  Synthetic oligonucleotide
ggatggtggaaccaagcagcttattacaatgcgtgtaaatgggaagaagctaatgtgaca

SEQ ID NO: 127207 - DNA, 60 bp, Artificial
  Synthetic oligonucleotide
caatccattgtggcaccagtcataccgtcctggcctgacaaattttaatacagaatggcc

SEQ ID NO: 127208 - DNA, 60 bp, Artificial
  Synthetic oligonucleotide
aacaggattcatatttagattaagaaaagctgaaggaataaggtggagcttccataccag

SEQ ID NO: 127209 - DNA, 60 bp, Artificial
  Synthetic oligonucleotide
gggatattttcttgtacctaggagacacataagaagagtcccagaaccctgcactcttcc

SEQ ID NO: 127210 - DNA, 60 bp, Artificial
  Synthetic oligonucleotide
gctttggccctagccctgcattgtctcaactttaaacaaaggggtagactagggaagatg

SEQ ID NO: 127211 - DNA, 60 bp, Artificial
  Synthetic oligonucleotide
caagagaagggctaggaggtgaggaggtccaactgtggttcacagccttttcagctaatt

SEQ ID NO: 127212 - DNA, 60 bp, Artificial
  Synthetic oligonucleotide
ggcctagaccgctgccctatttcactgccgcagagattatggggataggattaactcaag

SEQ ID NO: 127213 - DNA, 60 bp, Artificial
  Synthetic oligonucleotide
ggtaccttgaagcattaggaaagctggcggccataaaagccaaatctccccgagcagtac

SEQ ID NO: 127214 - DNA, 60 bp, Artificial
  Synthetic oligonucleotide
acaacaagcagagcccagatttgcaccagccagaatgcagtgtagagcatggtaccttga

SEQ ID NO: 127215 - DNA, 60 bp, Artificial
  Synthetic oligonucleotide
gctaatccagattgtaagagagcaatgagtcatcttaaaccagaaagtactttagaggaa

SEQ ID NO: 127216 - DNA, 60 bp, Artificial
  Synthetic oligonucleotide
gatattgaaagccagaatatttgcaaaggaggagagatctcacatggatggggacctgga

SEQ ID NO: 127217 - DNA, 60 bp, Artificial
  Synthetic oligonucleotide
agcagaagaaataaagagaaaatgtcccctatgcagaattagaggcgaacaagtaggggg

SEQ ID NO: 127218 - DNA, 60 bp, Artificial
  Synthetic oligonucleotide
gggcacagataattccacaggagaccgcggagtgtacagtcaaggctcttttgcaactta

SEQ ID NO: 127219 - DNA, 60 bp, Artificial
  Synthetic oligonucleotide
accaggtaacccacaatcacaggcattagtggaaaatgctaataacacattgaaagcttg

SEQ ID NO: 127220 - DNA, 60 bp, Artificial
  Synthetic oligonucleotide
gagaggagatcagaagttagactcaataagagaatggactgtagaggccaagagagaagt

SEQ ID NO: 127221 - DNA, 60 bp, Artificial
  Synthetic oligonucleotide
ggccttcaaacatatgatggcagctctagaggatcgctttaagatgctgtttggcgcacc

SEQ ID NO: 127222 - DNA, 58 bp, Artificial
  Synthetic oligonucleotide
aaggacttcttggtagtgtgttgggaataggtctaggaatcttgctactacttatatg

SEQ ID NO: 127223 - DNA, 61 bp, Artificial
  Synthetic oligonucleotide
ggagtatgtataacatgactttgaatcaaacaatctggaatcatggaaatatctctttggg

SEQ ID NO: 127224 - DNA, 60 bp, Artificial
  Synthetic oligonucleotide
cccttgcgacagtgttatctatggctggagcaggaacgggtgccactgctattggaatgg

SEQ ID NO: 127225 - DNA, 60 bp, Artificial
  Synthetic oligonucleotide
atacatgtgggacaaatccaaatgtcacaggagccaacccggtagattgtactatgaagg

SEQ ID NO: 127226 - DNA, 54 bp, Artificial
  Synthetic oligonucleotide
tcgatctcagcttctttttaaaagaaaaggggggactggaagggttaatttggt

SEQ ID NO: 127227 - DNA, 60 bp, Artificial
  Synthetic oligonucleotide
ctgtgggtctaccacacacaaggctacttccctgattggcagaactacacaccagggcca

SEQ ID NO: 127228 - DNA, 60 bp, Artificial
  Synthetic oligonucleotide
gtggcgatcctgccctcatccgtctcgcttattcggggagcggacgatgaccctagtaga

SEQ ID NO: 127229 - DNA, 60 bp, Artificial
  Synthetic oligonucleotide
ggtagaccagatctgagcctgggagctctctggctatctagggaacccactgcttaagcc

SEQ ID NO: 127230 - DNA, 60 bp, Artificial
  Synthetic oligonucleotide
ctttttaaaagaaaaggggggactggatgggctaatttactctaagaaaagacaagacat

SEQ ID NO: 127231 - DNA, 60 bp, Artificial
  Synthetic oligonucleotide
gcgggcagaagccccaccaatttggccaaggtaaaagggataacccagggacctaatgag

SEQ ID NO: 127232 - DNA, 60 bp, Artificial
  Synthetic oligonucleotide
cctagcgggtctccagaccgcgggcagaagccccaccaatttggccaaggtaaaaggaat

SEQ ID NO: 127233 - DNA, 60 bp, Artificial
  Synthetic oligonucleotide
gctcctagcgggtctccaaaacgcgggcagaagccccaccaatttggccaaggtaaaagg

SEQ ID NO: 127234 - DNA, 60 bp, Artificial
  Synthetic oligonucleotide
gcgcgggcagaagccccaccaatttggccaaggtaaaagggataacccagggacctaatg

SEQ ID NO: 127235 - DNA, 60 bp, Artificial
  Synthetic oligonucleotide
gctcttggcgggtctccaaaacgcgggcagaagccccaccaatttggccaaggtaaaagg

SEQ ID NO: 127236 - DNA, 60 bp, Artificial
  Synthetic oligonucleotide
ccctgccccgcttgctatcgcgtaaggtcgtctatttgcaccacgttcgcagccatacca

SEQ ID NO: 127237 - DNA, 60 bp, Artificial
  Synthetic oligonucleotide
aatcacccctgtcctgcagctctctcctgcagacctacacagtttcacccattgcggaca

SEQ ID NO: 127238 - DNA, 60 bp, Artificial
  Synthetic oligonucleotide
tggagtctcctcataccactctaaaccctgcaatcctgcccagccagtttgttcgtggac

SEQ ID NO: 127239 - DNA, 60 bp, Artificial
  Synthetic oligonucleotide
ccaaggcctaccacccctcatttctactctcacacggcctcatacagtactcttcctttc

SEQ ID NO: 127240 - DNA, 60 bp, Artificial
  Synthetic oligonucleotide
ccaccaacaccatgggtaagtttctcaccactttgattttattcttccagttctgccccc

SEQ ID NO: 127241 - DNA, 60 bp, Artificial
  Synthetic oligonucleotide
tatcagcccacttcccagggtttggacagagtcttcttttcggatacccagtctacgtgt

SEQ ID NO: 127242 - DNA, 60 bp, Artificial
  Synthetic oligonucleotide
cccacgtgattttttgccaccccggccagctcggggccttcctcaccaatgttccgtaca

SEQ ID NO: 127243 - DNA, 60 bp, Artificial
  Synthetic oligonucleotide
ccggagcatcagatcacctgggatcccatcgatggacgcgttatcggctcagctctacag

SEQ ID NO: 127244 - DNA, 60 bp, Artificial
  Synthetic oligonucleotide
agaacctctaagaccctcaaggtccttaccccgccaatcactcatacaacccccaacatt

SEQ ID NO: 127245 - DNA, 60 bp, Artificial
  Synthetic oligonucleotide
tattcagcctcttattcagacccttgttccttaaagtgcccatacctggggtgccaatca

SEQ ID NO: 127246 - DNA, 60 bp, Artificial
  Synthetic oligonucleotide
cccccacccacgaccccccggattctgatccacaaatcccccctccctatgttgagccta

SEQ ID NO: 127247 - DNA, 60 bp, Artificial
  Synthetic oligonucleotide
cctccatcaccagcagctagatagccttatatcagaggccgaaacccgaggtattacagg

SEQ ID NO: 127248 - DNA, 60 bp, Artificial
  Synthetic oligonucleotide
cgctcatcactggcttaacttcctccaagcggcatatcgcctagaacccggtccctccag

SEQ ID NO: 127249 - DNA, 60 bp, Artificial
  Synthetic oligonucleotide
gactccaagtatctttatcattaccttcggacccttgccctaggcaccttccaaggcagg

SEQ ID NO: 127250 - DNA, 60 bp, Artificial
  Synthetic oligonucleotide
tctgcgccgctacagatcgaaagttccacccctttccctttcattcacgactgactgccg

SEQ ID NO: 127251 - DNA, 60 bp, Artificial
  Synthetic oligonucleotide
gatcactttaagctcacctcccttcctgtgctaatacgcctccctttccggacaacgcct

SEQ ID NO: 127252 - DNA, 60 bp, Artificial
  Synthetic oligonucleotide
acaatgccaaggcgtcctgtacctccctgaggcaaaagggccgccagtaatcctgcctat

SEQ ID NO: 127253 - DNA, 60 bp, Artificial
  Synthetic oligonucleotide
actggagaactttggaacacttttcttaaaacagctgccccattggctcccgtgaaagcc

SEQ ID NO: 127254 - DNA, 60 bp, Artificial
  Synthetic oligonucleotide
tccaaatccccttacctaaacagttccagccctactttgctttcactgtcccacagcagt

SEQ ID NO: 127255 - DNA, 60 bp, Artificial
  Synthetic oligonucleotide
cctatgggctcctctgccaaaccatacatcataacatctccacccaaaccttcgaccaat

SEQ ID NO: 127256 - DNA, 60 bp, Artificial
  Synthetic oligonucleotide
tcccagttaaaaaggccaatggaacctggcgattcatccacgacctgcgggccactaact

SEQ ID NO: 127257 - DNA, 56 bp, Artificial
  Synthetic oligonucleotide
cccctgacttgtccagcctgccaactacactagcccacttgcaaactatagacctt

SEQ ID NO: 127258 - DNA, 60 bp, Artificial
  Synthetic oligonucleotide
cctcccttgctattcgccatactacccatgtcccctacaatccaaccagctcaggacttg

SEQ ID NO: 127259 - DNA, 60 bp, Artificial
  Synthetic oligonucleotide
tcttgccaatacaggcgccagccgtccttgggctagaacacctcccaaggccccccgaaa

SEQ ID NO: 127260 - DNA, 60 bp, Artificial
  Synthetic oligonucleotide
ccacagcagtgtaactacggccccggcactagatacgcctggaaagtactaccccaaggg

SEQ ID NO: 127261 - DNA, 56 bp, Artificial
  Synthetic oligonucleotide
ccgatggcagcttcaccactccccccgactccagccgatcccagagacacattccc

SEQ ID NO: 127262 - DNA, 60 bp, Artificial
  Synthetic oligonucleotide
ccgttccactcaaccctcaccactccaggccttatttggacatttaccgatggcacgcct

SEQ ID NO: 127263 - DNA, 60 bp, Artificial
  Synthetic oligonucleotide
tatgaccccatctggttccttaataccgaacccagccaactgcctcccaccgcccctcct

SEQ ID NO: 127264 - DNA, 60 bp, Artificial
  Synthetic oligonucleotide
acccactgctttgacccccagattcaagctatagtctcctccccctgtcataactccctc

SEQ ID NO: 127265 - DNA, 60 bp, Artificial
  Synthetic oligonucleotide
tagcgcttccagccccccacctgacgttaccatttaactggacacactgcttcaaccccc

SEQ ID NO: 127266 - DNA, 60 bp, Artificial
  Synthetic oligonucleotide
tatccttgcagggccatgcatcctccgtcagctacgacacctcccctcgcgcgtcagaca

SEQ ID NO: 127267 - DNA, 60 bp, Artificial
  Synthetic oligonucleotide
acccgtcacgctaacagcctggcaaaacgcctccttccgttccactcaaccctcaccact

SEQ ID NO: 127268 - DNA, 60 bp, Artificial
  Synthetic oligonucleotide
ccaagacccagcatctattctgccagttataccgttagatcccgcccgtcggcccgtaat

SEQ ID NO: 127269 - DNA, 60 bp, Artificial
  Synthetic oligonucleotide
gaagatgccctcctattagacctccccgctgacatcccacacccaaaaaactccataggg

SEQ ID NO: 127270 - DNA, 55 bp, Artificial
  Synthetic oligonucleotide
atgtcaagacccaactcactggaagcgagactgcccccgcctaaagcccactatc

SEQ ID NO: 127271 - DNA, 60 bp, Artificial
  Synthetic oligonucleotide
agcctaaaaaaccccccccaaatcagccgtgcttccggtgcgggaaagcaggtcactgga

SEQ ID NO: 127272 - DNA, 60 bp, Artificial
  Synthetic oligonucleotide
ccgaggacacactaatagccctctaggagatatgttgcgggcttgtcagacctggacccc

SEQ ID NO: 127273 - DNA, 60 bp, Artificial
  Synthetic oligonucleotide
gtacctatacggtcccgctgggcgctacctgaacttcaagccctacttggcgagattcag

SEQ ID NO: 127274 - DNA, 60 bp, Artificial
  Synthetic oligonucleotide
tccttcacgcgcccgccgccttacctgaggccgccatccacgccggttgagtcgcgttct

SEQ ID NO: 127275 - DNA, 60 bp, Artificial
  Synthetic oligonucleotide
aaatccttctcaagttcaatcattagtgcagctgcggcaggccctgtcacagaactgccg

SEQ ID NO: 127276 - DNA, 60 bp, Artificial
  Synthetic oligonucleotide
ccccccgaaatcagccagttccctttaaaccagaacgcctccaggccttgcaacacttgg

SEQ ID NO: 127277 - DNA, 60 bp, Artificial
  Synthetic oligonucleotide
aggacaaatccaaatggagaatgctaatagacttcagaaagctcaatgaggccacacaag

SEQ ID NO: 127278 - DNA, 60 bp, Artificial
  Synthetic oligonucleotide
acccgcagagcctattgcaaaatcaacaagacccagtgggaccccgcattaagacaagct

SEQ ID NO: 127279 - DNA, 60 bp, Artificial
  Synthetic oligonucleotide
ccacaccagcagaacaaatagagtggatgaccaggcaacaagacccagtgaatgtaggag

SEQ ID NO: 127280 - DNA, 60 bp, Artificial
  Synthetic oligonucleotide
ggctcttaaaccctgtgtaaaactaactcccatgtgtgtgagaatgaaatgtaccaagct

SEQ ID NO: 127281 - DNA, 60 bp, Artificial
  Synthetic oligonucleotide
ccgatagcggtatctttgaggacgcggaagatggcagtgatgaccagcgccatggttttc

SEQ ID NO: 127282 - DNA, 60 bp, Artificial
  Synthetic oligonucleotide
aatgttgacccctttcctccacgaagaccctccaggtaccgcatggatgagtaatggatc

SEQ ID NO: 127283 - DNA, 60 bp, Artificial
  Synthetic oligonucleotide
cagggaaagcaccattctcatacatccatcattaccaagtgcagcatcagagattcactc

SEQ ID NO: 127284 - DNA, 60 bp, Artificial
  Synthetic oligonucleotide
ggcgacactgtgaatcgattgaccccatcagccaatgtgcttgacgcttggcgcatggaa

SEQ ID NO: 127285 - DNA, 60 bp, Artificial
  Synthetic oligonucleotide
ggcctgccaaacaatcaagatcctatacaactcaagtaagtgatatgaattggtggtggt

SEQ ID NO: 127286 - DNA, 60 bp, Artificial
  Synthetic oligonucleotide
cacaggacaaggcaaatgtaggaatgtaaccgctacgcattgcacgcatggcatattgcc

SEQ ID NO: 127287 - DNA, 60 bp, Artificial
  Synthetic oligonucleotide
ctgggaggagcgggaagtggcttaccctcagaattcgcataaaagcagctgctctgtgct

SEQ ID NO: 127288 - DNA, 60 bp, Artificial
  Synthetic oligonucleotide
gggccgctaatagaaactccaaattaggtagggcagggtatgtcacagatagaggacagg

SEQ ID NO: 127289 - DNA, 60 bp, Artificial
  Synthetic oligonucleotide
ggtggtcaaggagcagtgggaccactggtgggcagaatcatggcagactacatgggttcc

SEQ ID NO: 127290 - DNA, 60 bp, Artificial
  Synthetic oligonucleotide
gagagaggagaaacgcgagaggaagcggactcccaccagtggatagggcgagatgggggc

SEQ ID NO: 127291 - DNA, 60 bp, Artificial
  Synthetic oligonucleotide
aagggtgccagcgcatcctagaagtgatactaccattggagccgaccgggtccgagtctc

SEQ ID NO: 127292 - DNA, 60 bp, Artificial
  Synthetic oligonucleotide
ttgccaaggaaatagtaaacagatgctcagcatgccaaacacatggagaaccaaaacatg

SEQ ID NO: 127293 - DNA, 60 bp, Artificial
  Synthetic oligonucleotide
cagccatcaggagcaggggcaagcagccaaaactacccagtgattaggacagctcaaggg

SEQ ID NO: 127294 - DNA, 60 bp, Artificial
  Synthetic oligonucleotide
ggcccgcctgacagcactggagaaattcataaaggatcaagccttgttaaatctgtgggg

SEQ ID NO: 127295 - DNA, 60 bp, Artificial
  Synthetic oligonucleotide
ggaagaaactgcttatcaaaattgggtattaccttgaacatggtaggaggccaactggaa

SEQ ID NO: 127296 - DNA, 60 bp, Artificial
  Synthetic oligonucleotide
acagggagccagggaatgtgtggataacaacagcatgcttacccacagacccagcccctc

SEQ ID NO: 127297 - DNA, 60 bp, Artificial
  Synthetic oligonucleotide
tggcaccaacggaagtgcagagaaggcctgtgccgcatgtccaagctagggcaataaccc

SEQ ID NO: 127298 - DNA, 60 bp, Artificial
  Synthetic oligonucleotide
ccccagatacagcagagatagtcaacttctccccagaggtgggtccacggaaggagaacc

SEQ ID NO: 127299 - DNA, 60 bp, Artificial
  Synthetic oligonucleotide
ccaacagtgtgagaaaagcagcttccaaccggttcccatacattactgtgccccagcagg

SEQ ID NO: 127300 - DNA, 60 bp, Artificial
  Synthetic oligonucleotide
cacaatgggcgcagcggcgacagcgctgacggtacagtcccggtctttgttggctgggat

SEQ ID NO: 127301 - DNA, 60 bp, Artificial
  Synthetic oligonucleotide
ggcagcagtcatatatattggagtgggtttatgttagggctgccccacaagatagggagg

SEQ ID NO: 127302 - DNA, 60 bp, Artificial
  Synthetic oligonucleotide
aggaaaaccagcataagctgcaaaagctcttggaatgggatgccctctgggaatggtttg

SEQ ID NO: 127303 - DNA, 60 bp, Artificial
  Synthetic oligonucleotide
gccttcttcgcatatatcaaacagggagatggagcaacaccctccaagtcaccctctccc

SEQ ID NO: 127304 - DNA, 60 bp, Artificial
  Synthetic oligonucleotide
acgccatgtgggatctaaacgaagaggcagaaaagcacttctccagggacgagctccgtg

SEQ ID NO: 127305 - DNA, 60 bp, Artificial
  Synthetic oligonucleotide
agaacaccattgagaccatcaacatggttcaggggcaaggtcccagaggaggggccggag

SEQ ID NO: 127306 - DNA, 60 bp, Artificial
  Synthetic oligonucleotide
cccaagagaagaacatgttaaagacaggaaaatttgccaaagttagaacagcccatatca

SEQ ID NO: 127307 - DNA, 60 bp, Artificial
  Synthetic oligonucleotide
gcgccagaggcagtgtcagatccgtgcgctatctgaacggattcttgtctcttatctggg

SEQ ID NO: 127308 - DNA, 60 bp, Artificial
  Synthetic oligonucleotide
ggtgaaggagcaatagtaatcaaaacagaccaaggtgagattataacagtaccaaggagg

SEQ ID NO: 127309 - DNA, 60 bp, Artificial
  Synthetic oligonucleotide
tcttctcctgtctccgcagcggcctgggagccctcggagctgagtagagcggcctgggag

SEQ ID NO: 127310 - DNA, 60 bp, Artificial
  Synthetic oligonucleotide
taacctagggcccgcgaagaggtatcaattcaaggtcctgccccaagggtggaaggggtc

SEQ ID NO: 127311 - DNA, 60 bp, Artificial
  Synthetic oligonucleotide
agaaactagtaggaaaattgaattgggcagcacagatatactcaggaatcaagaccaaac

SEQ ID NO: 127312 - DNA, 60 bp, Artificial
  Synthetic oligonucleotide
aggggaacataggaggctggtcaaaagagttagagacctcctaacaagcaaagggataca

SEQ ID NO: 127313 - DNA, 60 bp, Artificial
  Synthetic oligonucleotide
cggcgcttagccgcaaaccgcatcctctcgcagtctccataactacgggactataaggcc

SEQ ID NO: 127314 - DNA, 60 bp, Artificial
  Synthetic oligonucleotide
aaggcgacaggcgccgagagaacgccccagccgagtgagcaccgacacgaggaaatcgct

SEQ ID NO: 127315 - DNA, 60 bp, Artificial
  Synthetic oligonucleotide
tgcgagtctagccctcatcattggcggcgcctagaagtgtaccgatccagggctacatac

SEQ ID NO: 127316 - DNA, 60 bp, Artificial
  Synthetic oligonucleotide
aagtggagcatctctctgtggctcagggcgagagcaaccagcacccaccttctggaagtc

SEQ ID NO: 127317 - DNA, 60 bp, Artificial
  Synthetic oligonucleotide
cgtgtccagtacgcccgcaacacccaatccagaaccccacctataagttaataataaacc

SEQ ID NO: 127318 - DNA, 60 bp, Artificial
  Synthetic oligonucleotide
ggccctggtgttcgctacccgcttatgccaggtgtcttgttctgcttaaggcctgtgcac

SEQ ID NO: 127319 - DNA, 53 bp, Artificial
  Synthetic oligonucleotide
ctagcggaggctagaaggagagagatgggtgcgagagcgtcaatattaagggg

SEQ ID NO: 127320 - DNA, 60 bp, Artificial
  Synthetic oligonucleotide
gcttatacacttcacaagagacgaggtcattggagtctggaatcattgtgtagaattgcc

SEQ ID NO: 127321 - DNA, 60 bp, Artificial
  Synthetic oligonucleotide
gttcgctatcagaaagaaggacaaaactcaatggagaatgctcatagacttccgcgccct

SEQ ID NO: 127322 - DNA, 60 bp, Artificial
  Synthetic oligonucleotide
aagtgcaaagttatagtgccatagaaatacagtgggaaaacaaaagagcaagggacacag

SEQ ID NO: 127323 - DNA, 60 bp, Artificial
  Synthetic oligonucleotide
gaggggactaccacgtggaccccaccagccaagaagccccaagaaacaaccacaacaagg

SEQ ID NO: 127324 - DNA, 60 bp, Artificial
  Synthetic oligonucleotide
tggtgcaaccatcggcaccgccaatagagcctctcacagcatcatggcaggaggggacta

SEQ ID NO: 127325 - DNA, 60 bp, Artificial
  Synthetic oligonucleotide
aaaggttgccacccagtcatcctctaccgctgacctccagactcattccaacaccaaggc

SEQ ID NO: 127326 - DNA, 60 bp, Artificial
  Synthetic oligonucleotide
gacggtgcagcccaccgagagtcaaaagaaggcaaggcaggatacgtgactgcaacagga

SEQ ID NO: 127327 - DNA, 60 bp, Artificial
  Synthetic oligonucleotide
ccgagacgaaaaggtgtacgccactgaagtaaccccaaatgtggcagatcacttgattca

SEQ ID NO: 127328 - DNA, 60 bp, Artificial
  Synthetic oligonucleotide
accccataataagaaatgcacagcagcagtatcaacatcaggcactgtcacctaggctgc

SEQ ID NO: 127329 - DNA, 60 bp, Artificial
  Synthetic oligonucleotide
tactcctacatttccagcaagggtgctatcatgagcagcaaagaagaactccgcactacc

SEQ ID NO: 127330 - DNA, 59 bp, Artificial
  Synthetic oligonucleotide
ccccggagcgaagatggccgagtgggacaggttggagagagagaagcggatgctgctag

SEQ ID NO: 127331 - DNA, 59 bp, Artificial
  Synthetic oligonucleotide
gaaccaggcaatggatccttctattatgccacaggatgcaatgtgtcagttatagcaca

SEQ ID NO: 127332 - DNA, 60 bp, Artificial
  Synthetic oligonucleotide
gtgtcacaacatctcagcagtacactgtacagaccctatcaccacaatagcagctacgtg

SEQ ID NO: 127333 - DNA, 60 bp, Artificial
  Synthetic oligonucleotide
ccggtagaaaggagactgctcaggaggagcacagggacctgcgggtggtgttaagtgcac

SEQ ID NO: 127334 - DNA, 60 bp, Artificial
  Synthetic oligonucleotide
ggcagtctacttggcttggctgccggcccacaaaggcataggaggaaatgaacaggtgga

SEQ ID NO: 127335 - DNA, 60 bp, Artificial
  Synthetic oligonucleotide
ccaaagagatggagaggtttggcctgagtgacgccctgttagagaccaaagaagggtgcg

SEQ ID NO: 127336 - DNA, 60 bp, Artificial
  Synthetic oligonucleotide
ctatcaacagttaataggagctatgcagaaaataggcaaggagtccatagtcttttgggg

SEQ ID NO: 127337 - DNA, 60 bp, Artificial
  Synthetic oligonucleotide
ggaaaggaacacaacctcacaatcacatgcataagaccaggaaataggacaataaaggac

SEQ ID NO: 127338 - DNA, 60 bp, Artificial
  Synthetic oligonucleotide
ctgcttggcgagacggcatcacagcgcttgcaaggttcacatggtggtggacgaatggtg

SEQ ID NO: 127339 - DNA, 60 bp, Artificial
  Synthetic oligonucleotide
tggtggacgaatggtgtattggcggctgcgcgatgggcaggtgaagcgatcgcagctatc

SEQ ID NO: 127340 - DNA, 60 bp, Artificial
  Synthetic oligonucleotide
gaatggcaagcaacaggagcggactacatgggcaaggcattaacacaaggagaggtttgg

SEQ ID NO: 127341 - DNA, 60 bp, Artificial
  Synthetic oligonucleotide
gcgagtagccgccgtgagcgagtgcggtgctaggaagagtggcagagaggcctagcttaa

SEQ ID NO: 127342 - DNA, 60 bp, Artificial
  Synthetic oligonucleotide
gtccctgacaggaggttccggaagaggagaagatccactcctagcagcaatcaggaggat

SEQ ID NO: 127343 - DNA, 60 bp, Artificial
  Synthetic oligonucleotide
ggcagaactacacagagggaccaggaacaagatacccattgtgctttggtatcctgtgga

SEQ ID NO: 127344 - DNA, 60 bp, Artificial
  Synthetic oligonucleotide
aaaacaaaacacccaacaagtcatagccatggtacaacaggggcaaggaggcccaagggg

SEQ ID NO: 127345 - DNA, 60 bp, Artificial
  Synthetic oligonucleotide
cctcaacagggcctattgtaagctagagggcaattggactaaagccatggaatcggccaa

SEQ ID NO: 127346 - DNA, 60 bp, Artificial
  Synthetic oligonucleotide
cacagcgtcctgggagaccttggccaccggtaaagcgtcctgggagaccttgccggtaaa

SEQ ID NO: 127347 - DNA, 59 bp, Artificial
  Synthetic oligonucleotide
ccatctgttggagccgcggcgggtgctggtcccgcgccctcgggtcgagggaacttggt

SEQ ID NO: 127348 - DNA, 60 bp, Artificial
  Synthetic oligonucleotide
gcagaagaaactcacggtacatattaccaggaaggagagcccctggaggcagaactgacc

SEQ ID NO: 127349 - DNA, 60 bp, Artificial
  Synthetic oligonucleotide
caggggatacctcacccctcaggcctgcctcagatgaagcaaataacggtcctagacatg

SEQ ID NO: 127350 - DNA, 60 bp, Artificial
  Synthetic oligonucleotide
ggccaggaagaagatatcaattcaaggtgctaccccaaggatggaagggttcgcccacca

SEQ ID NO: 127351 - DNA, 60 bp, Artificial
  Synthetic oligonucleotide
gtagggatccagaccccagaggctaaataccaagacaaaccgcccattaaatggctaggg

SEQ ID NO: 127352 - DNA, 60 bp, Artificial
  Synthetic oligonucleotide
tgatttgggttcatcactttcaattgagacacgcctcctatacacaagcaaagtggatac

SEQ ID NO: 127353 - DNA, 60 bp, Artificial
  Synthetic oligonucleotide
gctacacctcggtaccgtggaacaaaacatggtcgaattacacagatcctcaatggcaga

SEQ ID NO: 127354 - DNA, 60 bp, Artificial
  Synthetic oligonucleotide
gctcaagaagacaatcacacaaattagggatgaagtacaatacctgtccacagcagtggc

SEQ ID NO: 127355 - DNA, 60 bp, Artificial
  Synthetic oligonucleotide
agaagcatgccccaaatgtcaagtacaaggagaacctaagacaggacagaacaatgcagc

SEQ ID NO: 127356 - DNA, 60 bp, Artificial
  Synthetic oligonucleotide
gtccagaatgctaacccagagtgcaaggccatcttaaaagccatgggcccaggagccacc

SEQ ID NO: 127357 - DNA, 60 bp, Artificial
  Synthetic oligonucleotide
actgcattcatgctggtatagacattgaggatacagagcaggccaaggcagaagtaagga

SEQ ID NO: 127358 - DNA, 60 bp, Artificial
  Synthetic oligonucleotide
ccccgacggccatgagcaatagcaatatgccgtggtggggagacaatacaacagaaccag

SEQ ID NO: 127359 - DNA, 57 bp, Artificial
  Synthetic oligonucleotide
ggcatcaagaatctcaatgcccgcctgaccgcgcttgagaaatacttagaggaccag

SEQ ID NO: 127360 - DNA, 60 bp, Artificial
  Synthetic oligonucleotide
cccattgttttgtgccaccatggcaagggaccaatggtcaacatcccaatgcgtcccatc

SEQ ID NO: 127361 - DNA, 60 bp, Artificial
  Synthetic oligonucleotide
ggaaagaagccgaggtcgagtgataggaccaagttctacatgtcatgccaactgaggcaa

SEQ ID NO: 127362 - DNA, 60 bp, Artificial
  Synthetic oligonucleotide
aaactccgaggggtcgtgagaggacgacagttccggagtcgagccccggatcggcgaaga

SEQ ID NO: 127363 - DNA, 60 bp, Artificial
  Synthetic oligonucleotide
ccccagataggtccactaccagcaggacagttaagggaaccagcagggagtgacatagca

SEQ ID NO: 127364 - DNA, 60 bp, Artificial
  Synthetic oligonucleotide
gcaacagggatccagaagcgccaggaggagacgctacagaaggtggaaagcaaggcagct

SEQ ID NO: 127365 - DNA, 60 bp, Artificial
  Synthetic oligonucleotide
cccctgaaacagtggcgctcttctcggcactagcggaagggtgcatcccctatgacatca

SEQ ID NO: 127366 - DNA, 60 bp, Artificial
  Synthetic oligonucleotide
ctggagctggttcaatttgtctgcctggtttagatggcttaggatagcagtaatagtagt

SEQ ID NO: 127367 - DNA, 60 bp, Artificial
  Synthetic oligonucleotide
cgtgccttttgggtatgcgccgacaaatatcagaaggtacgatgggcccgctaacaagca

SEQ ID NO: 127368 - DNA, 60 bp, Artificial
  Synthetic oligonucleotide
gggagcgggaggagttgggagtggcttgccctcagaaccagcatataagcagatgctctg

SEQ ID NO: 127369 - DNA, 60 bp, Artificial
  Synthetic oligonucleotide
gggaccttgcgaaagctgcgaaagccaagagccaacaggtagcgcaagccacatacgcct

SEQ ID NO: 127370 - DNA, 60 bp, Artificial
  Synthetic oligonucleotide
aaaactgtaccagtaaaattaaagccaggaatggatggcccaaaagttaaacaatggccc

SEQ ID NO: 127371 - DNA, 60 bp, Artificial
  Synthetic oligonucleotide
cccacctggaaacagtggagaagaaacaataggagaggcattcgaatggctaaacagaac

SEQ ID NO: 127372 - DNA, 60 bp, Artificial
  Synthetic oligonucleotide
ccaaactactctggaaaggtgaaggggcagtagtaatacaagataatagtgacataaagg

SEQ ID NO: 127373 - DNA, 59 bp, Artificial
  Synthetic oligonucleotide
ctccacactcggcgcgccagtcctccgatagactgagtcgcccgggtacccgtgttccc

SEQ ID NO: 127374 - DNA, 51 bp, Artificial
  Synthetic oligonucleotide
gggaccggggagtggcgaaccctcagatgctgcatataagcagctgctttt

SEQ ID NO: 127375 - DNA, 60 bp, Artificial
  Synthetic oligonucleotide
gggagatggaaaccaaaaatgatagggggaattggaggttttatcaaagtaagacagtat

SEQ ID NO: 127376 - DNA, 60 bp, Artificial
  Synthetic oligonucleotide
actaatggcagttcattgcatgaattttaaaagaaggggaggaataggggatatgactcc

SEQ ID NO: 127377 - DNA, 60 bp, Artificial
  Synthetic oligonucleotide
ggatggctaatgtaactacaggacgagaacctggtgatataccagagactttagatcagt

SEQ ID NO: 127378 - DNA, 60 bp, Artificial
  Synthetic oligonucleotide
aggatggctaatgtaactacaggacgagaacctggtgatataccagagactttagatcag

SEQ ID NO: 127379 - DNA, 60 bp, Artificial
  Synthetic oligonucleotide
cgaagcaggaaaatccctagcagattggcgcccgaacagggacttgaaggagagtgagag

SEQ ID NO: 127380 - DNA, 60 bp, Artificial
  Synthetic oligonucleotide
cctggggattggttttgggagcattgaaggcggctcgagaggaacaggttacatctgagc

SEQ ID NO: 127381 - DNA, 60 bp, Artificial
  Synthetic oligonucleotide
agaaggaaataggggccatgctgtccctgttacaaaaggaagggttgcttatgtctccct

SEQ ID NO: 127382 - DNA, 60 bp, Artificial
  Synthetic oligonucleotide
acctggggattggttttgggagcattgaaggcggctcgagaggaacaggttacatctgag

SEQ ID NO: 127383 - DNA, 60 bp, Artificial
  Synthetic oligonucleotide
agaaggaaataggggccatgttgtccctgttacaaaaggaagggttgcttatgtctccct

SEQ ID NO: 127384 - DNA, 60 bp, Artificial
  Synthetic oligonucleotide
agaaggaaataggggctatgttgtccctgttacaaaaggaagggttgcttatgtctccct

SEQ ID NO: 127385 - DNA, 60 bp, Artificial
  Synthetic oligonucleotide
ccccatatgccttatggatggacgcttggggagtccaactccagacagttatagcggcag

SEQ ID NO: 127386 - DNA, 60 bp, Artificial
  Synthetic oligonucleotide
ctgccccatatgccttatggatggacgcttggggagtccaactacagacggttatagcgg

SEQ ID NO: 127387 - DNA, 60 bp, Artificial
  Synthetic oligonucleotide
gacctgccccatatgccttatggatggacgcttggggagtccaactccagacggttatag

SEQ ID NO: 127388 - DNA, 60 bp, Artificial
  Synthetic oligonucleotide
ttatggatggacgcttggggagtccaactccagacggttatagcggcagccactcgcgac

SEQ ID NO: 127389 - DNA, 60 bp, Artificial
  Synthetic oligonucleotide
gcgcgggctccggtgatcattgactgctttaggcagaagtcgcagccagacattcagcag

SEQ ID NO: 127390 - DNA, 60 bp, Artificial
  Synthetic oligonucleotide
atgccttatggatggacgcttggggagtccaactccagacggttatagcggcggccactc

SEQ ID NO: 127391 - DNA, 60 bp, Artificial
  Synthetic oligonucleotide
tgccttatggatggacgcttggggagtccaactccagacggttatagcggcagccactcg

SEQ ID NO: 127392 - DNA, 60 bp, Artificial
  Synthetic oligonucleotide
ccccatatgccttatggatggacgcttggggagtccaactccagacggttatagcggcgg

SEQ ID NO: 127393 - DNA, 60 bp, Artificial
  Synthetic oligonucleotide
ccccatatgccttatggatggacgcttggggagtccaactccagacggttatagcggcag

SEQ ID NO: 127394 - DNA, 60 bp, Artificial
  Synthetic oligonucleotide
ctccagaatcggccaacctgggggaggaaatcctctctcaactataccgccctcttgagg

SEQ ID NO: 127395 - DNA, 60 bp, Artificial
  Synthetic oligonucleotide
cgcaggtacactccttatgaccctgaggacccagggcaagaaaccaatgtgtccatgtca

SEQ ID NO: 127396 - DNA, 51 bp, Artificial
  Synthetic oligonucleotide
aggataaaacatttagtatgggcaagcagagagttagaaagattcgcgctt

SEQ ID NO: 127397 - DNA, 60 bp, Artificial
  Synthetic oligonucleotide
tctgtggatctaccacacacaaggctacttccctgattggcagaactacacaccagggcc

SEQ ID NO: 127398 - DNA, 60 bp, Artificial
  Synthetic oligonucleotide
atataggctaaaacatttagtatgggcaagcagagagctggaaagattcgcatgtaatcc

SEQ ID NO: 127399 - DNA, 52 bp, Artificial
  Synthetic oligonucleotide
agctctctggctaactagggaacccactgcttaagcctcaataaagcttgcc

SEQ ID NO: 127400 - DNA, 60 bp, Artificial
  Synthetic oligonucleotide
ggaccaggcgcagctgaatgcttggggatgtgcgtttagacaagtctgccacactactgt

SEQ ID NO: 127401 - DNA, 60 bp, Artificial
  Synthetic oligonucleotide
ccaggcgcagctgaatgcttggggatgtgcgtttagacaagtctgccacactactgtgcc

SEQ ID NO: 127402 - DNA, 60 bp, Artificial
  Synthetic oligonucleotide
tgcctcaagaaataagagaggggtctttgtgctagggttcttgggttttctcgcgacagc

SEQ ID NO: 127403 - DNA, 60 bp, Artificial
  Synthetic oligonucleotide
ggaccagcaaaactgctctggaaaggtgaaggggcagtagtaatacaagacaatagtgat

SEQ ID NO: 127404 - DNA, 60 bp, Artificial
  Synthetic oligonucleotide
acatctggctaccggtagggtctctcactctttcctccatgtgccagactgcccctaccc

SEQ ID NO: 127405 - DNA, 60 bp, Artificial
  Synthetic oligonucleotide
tatggaaaacagatggcaggtgatgattgtgtggcaggtagacaggatgaggattaatac

SEQ ID NO: 127406 - DNA, 52 bp, Artificial
  Synthetic oligonucleotide
gaaaatccctagcagattggcgcccgaacagggacttgaaggagagtgagag

SEQ ID NO: 127407 - DNA, 51 bp, Artificial
  Synthetic oligonucleotide
aaatccctagcagattggcgcccgaacagggacttgaaggagagtgagaga

SEQ ID NO: 127408 - DNA, 60 bp, Artificial
  Synthetic oligonucleotide
agaggagatctctcgacgcaggactcggcttgctgaagtgcacacggcaagaggcgagag

SEQ ID NO: 127409 - DNA, 60 bp, Artificial
  Synthetic oligonucleotide
cttgctgctgcccaacagttagtgcaagaacaattgcaggcagggcatattatagaaagt

SEQ ID NO: 127410 - DNA, 60 bp, Artificial
  Synthetic oligonucleotide
gacccaaaatcctggacccctaagtgacaagtctgcctgggtccaaggggctactggagg

SEQ ID NO: 127411 - DNA, 55 bp, Artificial
  Synthetic oligonucleotide
ggggcaacccgtcaccttcctagtggatactggggcccaacactccgtgctgacc

SEQ ID NO: 127412 - DNA, 56 bp, Artificial
  Synthetic oligonucleotide
ggggcaacccgtcaccttcctagtggatactggggcccaacactccgtgctgaccc

SEQ ID NO: 127413 - DNA, 60 bp, Artificial
  Synthetic oligonucleotide
tcttcggcgagcgacctaaatcgaaagtagcacttctgctgcctgcagcgaggcttggcc

SEQ ID NO: 127414 - DNA, 60 bp, Artificial
  Synthetic oligonucleotide
cctcccaacacaagctgaccctgtccgaagtgaccgggcagggactctgcgtaggagcag

SEQ ID NO: 127415 - DNA, 60 bp, Artificial
  Synthetic oligonucleotide
cgccagtcctccgattgactgagtcgcccgggtacccgtgtatccaataaaccctcttgc

SEQ ID NO: 127416 - DNA, 60 bp, Artificial
  Synthetic oligonucleotide
cgattgactgagtcgcccgggtacccgtgtatccaataaaccctcttgcagttgcagcgc

SEQ ID NO: 127417 - DNA, 60 bp, Artificial
  Synthetic oligonucleotide
ccagtcctccgagtgactgagtcgcccgggtacccgtgtatccaataaaccctcttgcag

SEQ ID NO: 127418 - DNA, 59 bp, Artificial
  Synthetic oligonucleotide
tccgattgactgagtcgcccgggtacccgtgtatccaataaaccctcttgctgtttgca

SEQ ID NO: 127419 - DNA, 60 bp, Artificial
  Synthetic oligonucleotide
cgccagtcctccgacagactgagtcgcccgggtacccgtgtatccaataaatcctcttgc

SEQ ID NO: 127420 - DNA, 60 bp, Artificial
  Synthetic oligonucleotide
cgccagtcctccaaccgactgagtcgcccgggtacccgtgtatccaataaagccttttgc

SEQ ID NO: 127421 - DNA, 60 bp, Artificial
  Synthetic oligonucleotide
tagaagatcaatttgtacattttgccactgaagcaaattacactcccctttcagcccagg

SEQ ID NO: 127422 - DNA, 60 bp, Artificial
  Synthetic oligonucleotide
atggttccagatggaggatgtagatgatagagcaagagaaccactagatggcagtgaaac

SEQ ID NO: 127423 - DNA, 60 bp, Artificial
  Synthetic oligonucleotide
gcataaaggccagctggcatgtgaaggtactcccagaattggacaagctgggattcctga

SEQ ID NO: 127424 - DNA, 60 bp, Artificial
  Synthetic oligonucleotide
gggacatagaagaattactccacataagattgctactggcactctcaatcccaagcctca

SEQ ID NO: 127425 - DNA, 60 bp, Artificial
  Synthetic oligonucleotide
tgattatgtcctcacacacagactgtgcaattccaccatatgaacctgtactagtaacag

SEQ ID NO: 127426 - DNA, 60 bp, Artificial
  Synthetic oligonucleotide
atggttcccgatggaggatgtagatgatagagcaagagaaccactagatggcagtgaaac

SEQ ID NO: 127427 - DNA, 60 bp, Artificial
  Synthetic oligonucleotide
caacaaaccacacatcgaggaatgtaatacctgtcctctctcagatcagtggacggacag

SEQ ID NO: 127428 - DNA, 60 bp, Artificial
  Synthetic oligonucleotide
cccagacccagccaaccgcaaagatacggttcgaatcaagggcctgacaaccccaatcct

SEQ ID NO: 127429 - DNA, 57 bp, Artificial
  Synthetic oligonucleotide
caggaaacagctggtggtaatcaaccgcaaactcagccccaacaacagaacactttt

SEQ ID NO: 127430 - DNA, 60 bp, Artificial
  Synthetic oligonucleotide
atccgagaagtctatgaagtactggggcttgatcctcttggtcgacccctgaacttccca

SEQ ID NO: 127431 - DNA, 60 bp, Artificial
  Synthetic oligonucleotide
gctgaggtaatagggacacaattggactatgtaattatagcaccctcagatattccttgg

SEQ ID NO: 127432 - DNA, 60 bp, Artificial
  Synthetic oligonucleotide
gtgtccttgaggcggcgcttcctcaccctggcgaagattcctctgatgacgatcctcttt

SEQ ID NO: 127433 - DNA, 60 bp, Artificial
  Synthetic oligonucleotide
ccttagctcctaagattctaaagacacatcctagcatatgtccaaaacaccctcgccacc

SEQ ID NO: 127434 - DNA, 60 bp, Artificial
  Synthetic oligonucleotide
gcaacctggtaggcgtgtctggcctacttcagagattatacaagaccaatgtccattacc

SEQ ID NO: 127435 - DNA, 60 bp, Artificial
  Synthetic oligonucleotide
gatcagattgtgagggccactcactcacatattcggctgcgtccggagtgagtcgagcag

SEQ ID NO: 127436 - DNA, 53 bp, Artificial
  Synthetic oligonucleotide
ttttaaggagataccgcgacaattggcgcccaacgtggggctcgataaagccg

SEQ ID NO: 127437 - DNA, 60 bp, Artificial
  Synthetic oligonucleotide
gcagagagaaatgataaaggggatcagagatctgtttcccagtgttggagacacctaaga

SEQ ID NO: 127438 - DNA, 60 bp, Artificial
  Synthetic oligonucleotide
ggacaaaggagaataaccagaaaagaactctgggaagtggacttatcccgaggggatgag

SEQ ID NO: 127439 - DNA, 60 bp, Artificial
  Synthetic oligonucleotide
gttggtggatatgattaatgaagagatggttgcattaagtaatgtggtgcttccttttga

SEQ ID NO: 127440 - DNA, 60 bp, Artificial
  Synthetic oligonucleotide
ggtcgcctgggccaaagacaagggtatacaaatggaatacagttctccttatcatcccca

SEQ ID NO: 127441 - DNA, 60 bp, Artificial
  Synthetic oligonucleotide
attgcagtaagatatcaacctcaaatgaacattatacaagaatggtctatacccctgggg

SEQ ID NO: 127442 - DNA, 60 bp, Artificial
  Synthetic oligonucleotide
ccttatgccatgggcaacaatgctgctgataaattggcagtcaaggccagttacactgtc

SEQ ID NO: 127443 - DNA, 60 bp, Artificial
  Synthetic oligonucleotide
tagtcccagcagttcagacgatgaggaggaggctcgccagaacttggctcgtgtccttga

SEQ ID NO: 127444 - DNA, 60 bp, Artificial
  Synthetic oligonucleotide
gactgtgagcaactgacttatctagaactcaagggatgtcaagaattggattatctggta

SEQ ID NO: 127445 - DNA, 60 bp, Artificial
  Synthetic oligonucleotide
gctcagctcgctaatgcataatagcattcaactgacagcaaccccatagtctggtgctca

SEQ ID NO: 127446 - DNA, 60 bp, Artificial
  Synthetic oligonucleotide
ccttgctcccggtggttcgatccctgtttagcctgatacgatagccgctaacctgggacg

SEQ ID NO: 127447 - DNA, 60 bp, Artificial
  Synthetic oligonucleotide
tagatttgggtaaagtaccagcctcacgagcatttactcctttctataaccaaatgcctg

SEQ ID NO: 127448 - DNA, 60 bp, Artificial
  Synthetic oligonucleotide
caacaaaacacacatcgaggaatgtaatacctgtcctctctcagatcagtggacggacag

SEQ ID NO: 127449 - DNA, 60 bp, Artificial
  Synthetic oligonucleotide
caatttgaattagctaacgattttgggttcttggcatatcaaaaaatgtttccttcgcca

SEQ ID NO: 127450 - DNA, 60 bp, Artificial
  Synthetic oligonucleotide
cagagtggactggaatttaatagactccacatggatacaacaacaattacaggctgacga

SEQ ID NO: 127451 - DNA, 60 bp, Artificial
  Synthetic oligonucleotide
tttgttcccatagaggaaaacttgataccacaagaaatagtgaatctaggagcagcaagg

SEQ ID NO: 127452 - DNA, 60 bp, Artificial
  Synthetic oligonucleotide
gaatcctccggttccaccagttcaacctatacaccatttacctattactcatattagagc

SEQ ID NO: 127453 - DNA, 60 bp, Artificial
  Synthetic oligonucleotide
ctcgggacaatggggtataggagatcgatggctacaggtacgattacgtttggttgatcc

SEQ ID NO: 127454 - DNA, 60 bp, Artificial
  Synthetic oligonucleotide
gggatttcaaataacacaaacaggacgagggttaacggattcatataagtcaaagctgtt

SEQ ID NO: 127455 - DNA, 60 bp, Artificial
  Synthetic oligonucleotide
gcgatgtgttaaaaggcatagcccaaaggaacggtgttgtcatggcattagaaatgggtc

SEQ ID NO: 127456 - DNA, 60 bp, Artificial
  Synthetic oligonucleotide
tagagctgtaaataaagtgactcctgcaatagctacccaaaattgtcattcagctagttt

SEQ ID NO: 127457 - DNA, 60 bp, Artificial
  Synthetic oligonucleotide
ggtgtatatcccgctatggacgctggaactttaactcgcttggttaatgccatcactgct

SEQ ID NO: 127458 - DNA, 60 bp, Artificial
  Synthetic oligonucleotide
actccttatcttttcagagctcagcctcatcataggccactacaaacccctgctccttgg

SEQ ID NO: 127459 - DNA, 60 bp, Artificial
  Synthetic oligonucleotide
tcgaggacgagactcaaccaatcagagtggtcaagagagacaacttccccagcaacaaca

SEQ ID NO: 127460 - DNA, 60 bp, Artificial
  Synthetic oligonucleotide
caaaggaaaccagatgtcgaattaatagtaaaagtacatgtttctcccactgctggatat

SEQ ID NO: 127461 - DNA, 60 bp, Artificial
  Synthetic oligonucleotide
ccaccatacataaggcgttattgaaggcatttgatttagccatgggccaacctatatggg

SEQ ID NO: 127462 - DNA, 60 bp, Artificial
  Synthetic oligonucleotide
ggatgtatttgttatgtgctacctcaccgcgtgtaatggcttggttactgtttgtttgtg

SEQ ID NO: 127463 - DNA, 60 bp, Artificial
  Synthetic oligonucleotide
cccgaatggatgcagtggaggtaccgacagaatgtcaacaagatcagagaggccatacct

SEQ ID NO: 127464 - DNA, 60 bp, Artificial
  Synthetic oligonucleotide
cccaagtggactccttgtcctggccttctggtccaggagagggtaaatagacctgcacag

SEQ ID NO: 127465 - DNA, 60 bp, Artificial
  Synthetic oligonucleotide
ggacaactttacctcaaggattccttaattcacctgccttatttactgcagatgttgtag

SEQ ID NO: 127466 - DNA, 60 bp, Artificial
  Synthetic oligonucleotide
ctcccggtcatcagcctattcccaatcaacagccggagccccagagcagcttgtcaacag

SEQ ID NO: 127467 - DNA, 59 bp, Artificial
  Synthetic oligonucleotide
tttagaatgcagtggaaagcagctattgatgtgcctggccctgtgttgttttggaatca

SEQ ID NO: 127468 - DNA, 60 bp, Artificial
  Synthetic oligonucleotide
atgttcctcctgttggtccccacgttactagattaaggcgagctgtgcatttagctgata

SEQ ID NO: 127469 - DNA, 60 bp, Artificial
  Synthetic oligonucleotide
tggtttacaaaacgttaacctgacctccttatatggaattgcacgtatcggggcatacag

SEQ ID NO: 127470 - DNA, 60 bp, Artificial
  Synthetic oligonucleotide
gatgaggaacccgggactgggttgcctaacatggactggacagttgaatgggatggggag

SEQ ID NO: 127471 - DNA, 60 bp, Artificial
  Synthetic oligonucleotide
cccaacagaaacagcctattctacatgtccaggtgtccttttccaacacctccccggtca

SEQ ID NO: 127472 - DNA, 60 bp, Artificial
  Synthetic oligonucleotide
ccgggccacaaactccctcaccagagacctagcgtcaccatctcccggtcctccagacct

SEQ ID NO: 127473 - DNA, 60 bp, Artificial
  Synthetic oligonucleotide
ccctggaggctaaacatatagaaccttatcaaggaccaggcaataaccccatcttccccg

SEQ ID NO: 127474 - DNA, 51 bp, Artificial
  Synthetic oligonucleotide
ccccagaagtttctcagttcccgttaaaccggagcgcctccaggccctgac

SEQ ID NO: 127475 - DNA, 60 bp, Artificial
  Synthetic oligonucleotide
gactagtgactcagctgcctattttggcccttataatactccggcctacaggcaccacgg

SEQ ID NO: 127476 - DNA, 53 bp, Artificial
  Synthetic oligonucleotide
ccgggccacaaactccctcaccagagacctagcttctccatctcccggtcccc

SEQ ID NO: 127477 - DNA, 60 bp, Artificial
  Synthetic oligonucleotide
ctggaccataaaccatcttaatgttcttccctcgtgccaaaagactcgatggcagctaca

SEQ ID NO: 127478 - DNA, 60 bp, Artificial
  Synthetic oligonucleotide
ccgggccacaaactccctcaccagagacctagcttctccatctcccggtcccccagacct

SEQ ID NO: 127479 - DNA, 60 bp, Artificial
  Synthetic oligonucleotide
tactcccatgtcagaaggaaattgtcacccccgggcttatttggactttcactgatggca

SEQ ID NO: 127480 - DNA, 60 bp, Artificial
  Synthetic oligonucleotide
gggttgccagatttgactaagccctttgaactctttgtcgacgagaagcagggctacgcc

SEQ ID NO: 127481 - DNA, 60 bp, Artificial
  Synthetic oligonucleotide
ccctggggctgccagatttgactaagccctttgaactctttgtcgacgagaagcagggct

SEQ ID NO: 127482 - DNA, 60 bp, Artificial
  Synthetic oligonucleotide
ttcggaacacccggccgcaaccctgggagacgtcccggggactccaggggccgttttcgt

SEQ ID NO: 127483 - DNA, 60 bp, Artificial
  Synthetic oligonucleotide
ggtcaagagacaacaagaattgttgcgactgaccgtctggggagctaagaacctccagac

SEQ ID NO: 127484 - DNA, 51 bp, Artificial
  Synthetic oligonucleotide
gctctctgactagcaggggaacccactgcttaagcctcaataaagcttgcc

SEQ ID NO: 127485 - DNA, 59 bp, Artificial
  Synthetic oligonucleotide
gcgcgccagtcatccgatagactgagtcgcccgggtacccgtgttcccaataaagcctt

SEQ ID NO: 127486 - DNA, 60 bp, Artificial
  Synthetic oligonucleotide
gcgcgccagtcatccgatagactgagtcgcccgggtacccgtgttcccaataaagccttt

SEQ ID NO: 127487 - DNA, 60 bp, Artificial
  Synthetic oligonucleotide
gggcgaagtccctaggggaggaagatgggtgcgagagcgtctgtattgacagggagcaaa

SEQ ID NO: 127488 - DNA, 57 bp, Artificial
  Synthetic oligonucleotide
caagccttatttaaactaaccaatcagctcgcttctcgcttctgtacccgcgctttt

SEQ ID NO: 127489 - DNA, 60 bp, Artificial
  Synthetic oligonucleotide
acattaggcagggatatcaacccctctcgttccagatccccatccatcaccaatcggaag

SEQ ID NO: 127490 - DNA, 60 bp, Artificial
  Synthetic oligonucleotide
ggccaggagctaccttagaagaaatgatggtagcctgtcagggagtaggaggaccaacac

SEQ ID NO: 127491 - DNA, 60 bp, Artificial
  Synthetic oligonucleotide
gggccaggagctaccttagaagaaatgatggtagcctgtcagggagtaggaggaccaact

SEQ ID NO: 127492 - DNA, 60 bp, Artificial
  Synthetic oligonucleotide
gcgcggcgtcaataacgctgacggtacaggccagacaattattgtctggtatagtgcaac

SEQ ID NO: 127493 - DNA, 60 bp, Artificial
  Synthetic oligonucleotide
cccttagaaccagcagggtccgagtccctcaaatcactctttggaatcgtgtcagtgctc

SEQ ID NO: 127494 - DNA, 60 bp, Artificial
  Synthetic oligonucleotide
taggctaaaacatttagtatgggcaagcagggagctggacagattcgcatgtaatcctga

SEQ ID NO: 127495 - DNA, 60 bp, Artificial
  Synthetic oligonucleotide
gggcgggactgggagtggctaaccctcagatgctgcatataagcagctgcttttcgcctg

SEQ ID NO: 127496 - DNA, 60 bp, Artificial
  Synthetic oligonucleotide
ctgataaatcctatatcattgttatagatttaaaagattgtttttacactattcctcttg

SEQ ID NO: 127497 - DNA, 52 bp, Artificial
  Synthetic oligonucleotide
agtatcagccattttggtctgatcctctcaaccccatcttttgtctctctct

SEQ ID NO: 127498 - DNA, 58 bp, Artificial
  Synthetic oligonucleotide
aaaatgtcagcacagtacaatgtacacatggaattaggccagtagtatcaactcagct

SEQ ID NO: 127499 - DNA, 60 bp, Artificial
  Synthetic oligonucleotide
tatttcccttgctttacagcgggagaagtgagaagggccatcaggggagaacaactgctg

SEQ ID NO: 127500 - DNA, 60 bp, Artificial
  Synthetic oligonucleotide
aaagattatggaggaggaaaagaggtggatagcagttcccacatggaggataccggagag

SEQ ID NO: 127501 - DNA, 54 bp, Artificial
  Synthetic oligonucleotide
ctcaccagtgcttggccggcactgggcagacggctccacgcttgcttgcttaaa

SEQ ID NO: 127502 - DNA, 60 bp, Artificial
  Synthetic oligonucleotide
aggcggcaggaacaaaccacgacggagtgctcctagaaaagcgcgggccgaggtaccaaa

SEQ ID NO: 127503 - DNA, 60 bp, Artificial
  Synthetic oligonucleotide
agactcctcgacaactaagagagttcctagggacggcaggcttctgccgcctctggatcc

SEQ ID NO: 127504 - DNA, 52 bp, Artificial
  Synthetic oligonucleotide
accaatcagctcgcttctcgcttctgtacccgcgcttattgctgcccagctc

SEQ ID NO: 127505 - DNA, 50 bp, Artificial
  Synthetic oligonucleotide
ccaatcagctcgcttctcgcttctgtacccgcgcttattgctgcccagct

SEQ ID NO: 127506 - DNA, 51 bp, Artificial
  Synthetic oligonucleotide
ttttccctgattggcagaactacacaccaggaccagggactagatacccac

SEQ ID NO: 127507 - DNA, 60 bp, Artificial
  Synthetic oligonucleotide
aaaatctctagcagtggcgcccgaacagggaccggaaagcgaaagagaaaccagaggagc

SEQ ID NO: 127508 - DNA, 60 bp, Artificial
  Synthetic oligonucleotide
gataaaacatatagtatgggcaagcagggagctggaaagatttgcacttaaccctggtct

SEQ ID NO: 127509 - DNA, 60 bp, Artificial
  Synthetic oligonucleotide
cctactggcctcttctggcaaaataatcctgtcatgtgggttcatttgcctgcgtcgcca

SEQ ID NO: 127510 - DNA, 60 bp, Artificial
  Synthetic oligonucleotide
cctgcgcttcctatgcaggcaacattgataaccattatccacccaataaacttattcaat

SEQ ID NO: 127511 - DNA, 60 bp, Artificial
  Synthetic oligonucleotide
cgggtaccagtgaagaaactgtatcactccaacctaagacaggcgcagtttccgagggga

SEQ ID NO: 127512 - DNA, 60 bp, Artificial
  Synthetic oligonucleotide
ccaggacctttatctcaaggtaatcacataactgatttggcaaccaaagttgtcgccacc

SEQ ID NO: 127513 - DNA, 51 bp, Artificial
  Synthetic oligonucleotide
tactagagaacaggctagacaaattgttaaacagtgtcccacatgtgtaac

SEQ ID NO: 127514 - DNA, 60 bp, Artificial
  Synthetic oligonucleotide
gccttctgttccaaattacacatcaaacacacctttggtattccttacaatcctcagggt

SEQ ID NO: 127515 - DNA, 60 bp, Artificial
  Synthetic oligonucleotide
cccaggagttattgataatgattatacaggggaattcaaaataatggccagggctatctc

SEQ ID NO: 127516 - DNA, 60 bp, Artificial
  Synthetic oligonucleotide
gtgcaggactggacctctgttccaccacccacacagtattaacccctgaaatggggcccc

SEQ ID NO: 127517 - DNA, 60 bp, Artificial
  Synthetic oligonucleotide
gttccagccagcagcaacaatccatttcaaaacttaatagagcctccccaggaagtgcag

SEQ ID NO: 127518 - DNA, 60 bp, Artificial
  Synthetic oligonucleotide
ggcaataaaggtaagcgttgcgttcgaatatgggacaagaattaagccaacatgaacttt

SEQ ID NO: 127519 - DNA, 60 bp, Artificial
  Synthetic oligonucleotide
ctttgattttgtaaaggatacctgcccttggtttccacaagagggaacaatagacataaa

SEQ ID NO: 127520 - DNA, 60 bp, Artificial
  Synthetic oligonucleotide
acaaatcacaaaataaggaaacggatctcatctctcttgaaagtgatgatgaggaagcca

SEQ ID NO: 127521 - DNA, 53 bp, Artificial
  Synthetic oligonucleotide
aattcccaccccctcatccaggttctacgttgctgatcccgcgggtcgggaca

SEQ ID NO: 127522 - DNA, 60 bp, Artificial
  Synthetic oligonucleotide
gctggatacgagggaatcctgtgaggaagagagcgcgtaacacggccggcagtcaaagtg

SEQ ID NO: 127523 - DNA, 60 bp, Artificial
  Synthetic oligonucleotide
aaaaccttccagctgccgcgggaacctgccgcgtcggcaataaaggtaagcgttgcgttc

SEQ ID NO: 127524 - DNA, 55 bp, Artificial
  Synthetic oligonucleotide
aaataaatcagccgctgaccgattttggcatactaactctaaaagagaatatgcc

SEQ ID NO: 127525 - DNA, 60 bp, Artificial
  Synthetic oligonucleotide
ccaaggatattttcccagtaacggagactatggatggacaaggtcaggcctggagacatc

SEQ ID NO: 127526 - DNA, 60 bp, Artificial
  Synthetic oligonucleotide
ctccttactgctacatatagtttgcttaataaatccaatcctaatttggccaacgagtgc

SEQ ID NO: 127527 - DNA, 60 bp, Artificial
  Synthetic oligonucleotide
ctctcacactgcatatcagccaagtgactcccttaaatggcggtgtgtctccaacccgac

SEQ ID NO: 127528 - DNA, 60 bp, Artificial
  Synthetic oligonucleotide
ctgattttccaaactgctcgagtttatgccggtttcggtgacccgcgcgaggctattact

SEQ ID NO: 127529 - DNA, 56 bp, Artificial
  Synthetic oligonucleotide
gttacccttactccgaacagctcataaaatacaacacccttatagaggaaacaaaa

SEQ ID NO: 127530 - DNA, 60 bp, Artificial
  Synthetic oligonucleotide
ggaactagcaatgtccccacagttttgggaaacacccacaatctactgtcagctggatgc

SEQ ID NO: 127531 - DNA, 60 bp, Artificial
  Synthetic oligonucleotide
aagacttactacaccgccattttggccagtaatagagcccctactataggaactagcaat

SEQ ID NO: 127532 - DNA, 60 bp, Artificial
  Synthetic oligonucleotide
cccaggtgcttcactcaccggggtcaaacaaggacctgacgagccattcgcagattttgt

SEQ ID NO: 127533 - DNA, 60 bp, Artificial
  Synthetic oligonucleotide
tactccaacggactggaacacgctcgttagagcagtcctctcagggggagaccacttaat

SEQ ID NO: 127534 - DNA, 60 bp, Artificial
  Synthetic oligonucleotide
gccagatggctaccagaacggttggtaaggcaagtgtctaatgttactcaatccagggag

SEQ ID NO: 127535 - DNA, 60 bp, Artificial
  Synthetic oligonucleotide
tggaaagtgttgcctcaaggcatggccaatagtcctaccttgtgtcaaaaatatgtagct

SEQ ID NO: 127536 - DNA, 60 bp, Artificial
  Synthetic oligonucleotide
tctggggcagaggttcagtctgcgtatactctcaaactcatgatgcagccagatggctac

SEQ ID NO: 127537 - DNA, 60 bp, Artificial
  Synthetic oligonucleotide
caagccatttgtcatccctaacttaccggttaatctttggggccgagatttgctttccca

SEQ ID NO: 127538 - DNA, 60 bp, Artificial
  Synthetic oligonucleotide
caaaactgatagtcaaggaaatcccttaccaccccatcagggaaacgggatgaggggcca

SEQ ID NO: 127539 - DNA, 60 bp, Artificial
  Synthetic oligonucleotide
gcccaacagttagtgcaagaacaattacaggcagggcatattatagaaagtaattctccc

SEQ ID NO: 127540 - DNA, 60 bp, Artificial
  Synthetic oligonucleotide
ctgtttcccaatacggagctactgctccatatactttggccatagtagaatccattgctg

SEQ ID NO: 127541 - DNA, 60 bp, Artificial
  Synthetic oligonucleotide
cctccttagtactgtggctagacggtaaagcatttacagggttaatagatactggagcgg

SEQ ID NO: 127542 - DNA, 60 bp, Artificial
  Synthetic oligonucleotide
cgcagattttgtacatagactcataacaacagctggcagaattttcggaaacgccgaggc

SEQ ID NO: 127543 - DNA, 60 bp, Artificial
  Synthetic oligonucleotide
gatgactctcaaggacatcccgttttggagagtactgctgattttccaaactgctcgagt

SEQ ID NO: 127544 - DNA, 60 bp, Artificial
  Synthetic oligonucleotide
caccgaaaccttaactaatttgagaggaataggacaaagtaataaccccaggcaaagttc

SEQ ID NO: 127545 - DNA, 60 bp, Artificial
  Synthetic oligonucleotide
gccgtgcagcccggacgacgttctggcttctggcgattgcactccatagtagtggatgca

SEQ ID NO: 127546 - DNA, 60 bp, Artificial
  Synthetic oligonucleotide
tcaccctgttttcccgccggcgccaatatttcccgccttagactacgtggcatttcctga

SEQ ID NO: 127547 - DNA, 60 bp, Artificial
  Synthetic oligonucleotide
ggatgcaagatggcacacttcctggttcttgttcaccctgttttcccgccggcgccaata

SEQ ID NO: 127548 - DNA, 60 bp, Artificial
  Synthetic oligonucleotide
cgccgcctgtctatatattgcctcgcatcaccgccattaaacgagacttgatcagagccc

SEQ ID NO: 127549 - DNA, 60 bp, Artificial
  Synthetic oligonucleotide
gcctcgcatcaccgccattaaacgagacttgatcagagccctgtcttgtctccatttctt

SEQ ID NO: 127550 - DNA, 60 bp, Artificial
  Synthetic oligonucleotide
cctgttccagctatagatcattatctacatagagccaggagagcagtacaatttatcccc

SEQ ID NO: 127551 - DNA, 60 bp, Artificial
  Synthetic oligonucleotide
ctgccgtctcaactgggactgctggtctagggtattctattacccagtacaccaaactat

SEQ ID NO: 127552 - DNA, 60 bp, Artificial
  Synthetic oligonucleotide
cgtagaccaccgcccctgtgcgctaaactggtcagccaatgacgggtaagagagtgtcgt

SEQ ID NO: 127553 - DNA, 59 bp, Artificial
  Synthetic oligonucleotide
tctctagcagaagtggtgcttcaaaatagaagaggattagatctacttaccgcagagca

SEQ ID NO: 127554 - DNA, 60 bp, Artificial
  Synthetic oligonucleotide
tggtcagccaatgacgggtaagagagtgtcgtttctcactaacctaagacaggagggtcg

SEQ ID NO: 127555 - DNA, 60 bp, Artificial
  Synthetic oligonucleotide
gccaacgagtgctggctatgcttaccatctggaaatcccgtcccgcttgccatacctagc

SEQ ID NO: 127556 - DNA, 60 bp, Artificial
  Synthetic oligonucleotide
gctacccttctgccagatatagatattgtccctggtgatgcacctgtgcctgttccagct

SEQ ID NO: 127557 - DNA, 60 bp, Artificial
  Synthetic oligonucleotide
agagaccctatttggaaaggaccagccaaactactctggaaaggtgaaggggcggtagta

SEQ ID NO: 127558 - DNA, 60 bp, Artificial
  Synthetic oligonucleotide
gagaccctatttggaaaggaccagccaaactactctggaaaggtgaaggggcggtagtaa

SEQ ID NO: 127559 - DNA, 60 bp, Artificial
  Synthetic oligonucleotide
gataaaacacatagtatgggcaagcagggagctggaaagatttgcacttaaccctggcct

SEQ ID NO: 127560 - DNA, 54 bp, Artificial
  Synthetic oligonucleotide
aaaatgtcagcacagtacaatgtacacatggaattaggccagtagtatcaactc

SEQ ID NO: 127561 - DNA, 60 bp, Artificial
  Synthetic oligonucleotide
tgtatccttccctggcgggggtgggagagcagcagggccaggggggtgacacacctcggg

SEQ ID NO: 127562 - DNA, 60 bp, Artificial
  Synthetic oligonucleotide
tcagctctacaataccttatccctcgactcccctccttccccacccagagaactacccgc

SEQ ID NO: 127563 - DNA, 60 bp, Artificial
  Synthetic oligonucleotide
tcattaaggactatggaaaacagatggcaggtgctgattgtgtggcaggtagacaggatg

SEQ ID NO: 127564 - DNA, 60 bp, Artificial
  Synthetic oligonucleotide
actaaattaacgcttgcaactggcactagagactgggtactcctactccccttagccctc

SEQ ID NO: 127565 - DNA, 59 bp, Artificial
  Synthetic oligonucleotide
ggggaaagaaacactatatgctaaaacatctagtatgggcaagcagggagctggaaaga

SEQ ID NO: 127566 - DNA, 60 bp, Artificial
  Synthetic oligonucleotide
agaccagagaagttctctcgacgcaggactcggcttgctgaagtgcacacggcaagaggc

SEQ ID NO: 127567 - DNA, 60 bp, Artificial
  Synthetic oligonucleotide
ctaagtggagaaaattagtagatttcagagaacttaataagagaacccaagacttctggg

SEQ ID NO: 127568 - DNA, 60 bp, Artificial
  Synthetic oligonucleotide
tggaaccagagaagctctctcgacgcaggactcggcttgctgaagtgcacacggcaagag

SEQ ID NO: 127569 - DNA, 60 bp, Artificial
  Synthetic oligonucleotide
ggaccagcaaaactactctggaaaggtgaaggggcagtagtaatacaagacaataacgaa

SEQ ID NO: 127570 - DNA, 60 bp, Artificial
  Synthetic oligonucleotide
agatcattagggattatggaaaacagatggcaggtgatgattgtgtggcaggtagacagg

SEQ ID NO: 127571 - DNA, 58 bp, Artificial
  Synthetic oligonucleotide
ggggcgaggcactcggcgatgctgacaggtacaaagttggacaaatatgagaaggtcc

SEQ ID NO: 127572 - DNA, 60 bp, Artificial
  Synthetic oligonucleotide
tgttggatgtggtcaagagacaacatgaattgttgcgactgaccgtctggggaactaaga

SEQ ID NO: 127573 - DNA, 60 bp, Artificial
  Synthetic oligonucleotide
gagcctgggagctctctggctaactagggaacccactgcttaagcctcaataaagcttgc

SEQ ID NO: 127574 - DNA, 58 bp, Artificial
  Synthetic oligonucleotide
ccaagccttatttaaactaaccaatcagctcgcttctcgcttctgttaacgcgctttt

SEQ ID NO: 127575 - DNA, 60 bp, Artificial
  Synthetic oligonucleotide
gagataccccaagccttatttaaactaaccaatcagctcgcttctcgcttctgtacccgc

SEQ ID NO: 127576 - DNA, 60 bp, Artificial
  Synthetic oligonucleotide
tttaaactaaccaatcagctcgcttctcgcttctgtacccgcgcttattgctgcccagct

SEQ ID NO: 127577 - DNA, 57 bp, Artificial
  Synthetic oligonucleotide
aactaaccaatcagctcgcttctcgcttctgtacccgcgcttattgctgcccagctc

SEQ ID NO: 127578 - DNA, 56 bp, Artificial
  Synthetic oligonucleotide
actaaccaatcagctcgcttctcgcttctgtacccgcgcttattgctgcccagctc

SEQ ID NO: 127579 - DNA, 60 bp, Artificial
  Synthetic oligonucleotide
gagtatttgtacaaggagggatcatagattcagggtatcaaggacaggtacaggtagtaa

SEQ ID NO: 127580 - DNA, 60 bp, Artificial
  Synthetic oligonucleotide
ccagggaaagaagaggattggatactggaattacaagcgggaaatataacctggatgcca

SEQ ID NO: 127581 - DNA, 60 bp, Artificial
  Synthetic oligonucleotide
ggacaagaatttaggatgcaagtaatgaaatggtatgctctgtttgccccaagttcattg

SEQ ID NO: 127582 - DNA, 60 bp, Artificial
  Synthetic oligonucleotide
gacatggctggtttaaatggctacggaaacttaaagcaagagagaagaccatcccggcgg

SEQ ID NO: 127583 - DNA, 60 bp, Artificial
  Synthetic oligonucleotide
caaggaagacagaaagagggaaagaaggatttggatcaacaggagcatattgggtcgaaa

SEQ ID NO: 127584 - DNA, 60 bp, Artificial
  Synthetic oligonucleotide
gggatggatgtaactgcactctatcagggaattatctatacaatagtacaacaggaggat

SEQ ID NO: 127585 - DNA, 60 bp, Artificial
  Synthetic oligonucleotide
cagaagtaaaattaaaggaaggatgtaaaggacctcatatagcgcaatggccattgactc

SEQ ID NO: 127586 - DNA, 60 bp, Artificial
  Synthetic oligonucleotide
cccaatatgggtttatgctgcctgaagaaaagagacaagaaggatacccagcaacatggc

SEQ ID NO: 127587 - DNA, 60 bp, Artificial
  Synthetic oligonucleotide
gagcatttaacagaatggcaagtggaagaaaacctgacagaatgacgtggaaagaaatgg

SEQ ID NO: 127588 - DNA, 60 bp, Artificial
  Synthetic oligonucleotide
taatcctaactgcagtttaccacacataaacgagagtaggcaatggacatgtagcgcaag

SEQ ID NO: 127589 - DNA, 60 bp, Artificial
  Synthetic oligonucleotide
ggggattagatgggatgatgcatcaacaaatgctactgcagagataccaagttataaggg

SEQ ID NO: 127590 - DNA, 60 bp, Artificial
  Synthetic oligonucleotide
cagaaagacagcggcaagaagacatgagaggcctaataacaggtaagaagaagcactggg

SEQ ID NO: 127591 - DNA, 60 bp, Artificial
  Synthetic oligonucleotide
cagcaatcctacacaaggacggctgtccagtcacttgctaacgcaactgcggcgcagcag

SEQ ID NO: 127592 - DNA, 60 bp, Artificial
  Synthetic oligonucleotide
gaccctgcaccagatattattggaaggtgctacctcaggggtggaagttaagtcccgcag

SEQ ID NO: 127593 - DNA, 60 bp, Artificial
  Synthetic oligonucleotide
gggaaccaacacgaattggacaacaatgtggagaagatatgagaattgctcgtgcaggaa

SEQ ID NO: 127594 - DNA, 60 bp, Artificial
  Synthetic oligonucleotide
gctgagagctcaataaaggagttgactacaagagactgagcttgcctggttattatcggg

SEQ ID NO: 127595 - DNA, 60 bp, Artificial
  Synthetic oligonucleotide
gaggaagagaaatatagtagcagaggtagtagcgggaccaacatattatactgatggagg

SEQ ID NO: 127596 - DNA, 60 bp, Artificial
  Synthetic oligonucleotide
cgtccttctgggccgaggggacacaaaaggcagcaccagtaagacaaccgctgtggtgaa

SEQ ID NO: 127597 - DNA, 60 bp, Artificial
  Synthetic oligonucleotide
cggggacgcctgaagtaaggtaagagagacacctactggagagagtagggaagggcaccc

SEQ ID NO: 127598 - DNA, 60 bp, Artificial
  Synthetic oligonucleotide
acgatggcatgtttgatgtgtagtcaaatggggatgaagcccgagacagtgcaggcagct

SEQ ID NO: 127599 - DNA, 60 bp, Artificial
  Synthetic oligonucleotide
gtgccaaggagaagacctggaggaagcagggaagtagaagggatatttcaattctatgag

SEQ ID NO: 127600 - DNA, 60 bp, Artificial
  Synthetic oligonucleotide
agtaaaatgtcgagtactatcagaggaggtaacaaaagagggatagatcattggcaggta

SEQ ID NO: 127601 - DNA, 60 bp, Artificial
  Synthetic oligonucleotide
gctgcaaagtcatgtaccagctgatgcttagatcataaccacacatgtaaacaactggcc

SEQ ID NO: 127602 - DNA, 60 bp, Artificial
  Synthetic oligonucleotide
tcccgataatagtggtccagcaatggatggaagacaatggttggattggcgagagcaacc

SEQ ID NO: 127603 - DNA, 60 bp, Artificial
  Synthetic oligonucleotide
caccgtacaggaataccatggaaccctcaatcacaagcattagtagagagagcccatcaa

SEQ ID NO: 127604 - DNA, 60 bp, Artificial
  Synthetic oligonucleotide
gctagagttgaggctatagtagacagaatgatgctatatcacgaattagattgctggcat

SEQ ID NO: 127605 - DNA, 60 bp, Artificial
  Synthetic oligonucleotide
ccataagattgcagggattgatgtggaacaaacgagggcataaacttgtatttaagcatg

SEQ ID NO: 127606 - DNA, 60 bp, Artificial
  Synthetic oligonucleotide
gagtagccctttgtagttgcaggaaaacaaaatgggatatacgggaatttatgataggga

SEQ ID NO: 127607 - DNA, 60 bp, Artificial
  Synthetic oligonucleotide
aaagaggacacccaggtgactggcagggaccaacacaggtactgtgggaaggggaaggag

SEQ ID NO: 127608 - DNA, 60 bp, Artificial
  Synthetic oligonucleotide
gcagaacatatgacaagtacgtgtgtacaaaggccagaaagacataatataacagtgggg

SEQ ID NO: 127609 - DNA, 56 bp, Artificial
  Synthetic oligonucleotide
aaggaaagagaaataggaccacagttaccactttgggcatggaaagaaactgcgtt

SEQ ID NO: 127610 - DNA, 60 bp, Artificial
  Synthetic oligonucleotide
gtcacaatgggtaaatgggacaccaccgtattggagtgcaagaatcaatgggagcacagg

SEQ ID NO: 127611 - DNA, 60 bp, Artificial
  Synthetic oligonucleotide
gcgttacaagtacacatagcgcagcgagatgcaagcagaataccggatgtgtggcaggca

SEQ ID NO: 127612 - DNA, 60 bp, Artificial
  Synthetic oligonucleotide
tcaagtaatgccattgtggagagcgaggagagtaacagtgcaaaggtttccctggtgtag

SEQ ID NO: 127613 - DNA, 60 bp, Artificial
  Synthetic oligonucleotide
cagtgtcatgcacagagaagatgcctttggcggcagtacaaagagtatattgggagaaag

SEQ ID NO: 127614 - DNA, 60 bp, Artificial
  Synthetic oligonucleotide
ccttgctgaagtgtgaagaatggtgttggtacccagatgaaataaatgaagaaacagggc

SEQ ID NO: 127615 - DNA, 60 bp, Artificial
  Synthetic oligonucleotide
gccctattagcaggaaacatacgaggaagattttgtgtcccatatccttttgccttgctg

SEQ ID NO: 127616 - DNA, 60 bp, Artificial
  Synthetic oligonucleotide
gaatacagagagttatgaggactttgtagcgagactgttagaagcaattgatgcagaacc

SEQ ID NO: 127617 - DNA, 58 bp, Artificial
  Synthetic oligonucleotide
gccaggacatctggcgaggcaatgtaggcagggaattatatgtcaccactgtggaaaa

SEQ ID NO: 127618 - DNA, 60 bp, Artificial
  Synthetic oligonucleotide
gccactacttggacaagtaaagatatattagaagtactggccatgatgcctggaaataga

SEQ ID NO: 127619 - DNA, 60 bp, Artificial
  Synthetic oligonucleotide
gggataccccattcctgtaggagcgcaaataataccagagagtatgaagtatctgagggg

SEQ ID NO: 127620 - DNA, 60 bp, Artificial
  Synthetic oligonucleotide
ggatacaggggcagatagaacaatagtaagaaatcatgataacacaggtagacctagggg

SEQ ID NO: 127621 - DNA, 60 bp, Artificial
  Synthetic oligonucleotide
gaagagatcagctgtggaaaggacctggtatccttttgtggaaaggagaaggggcagtag

SEQ ID NO: 127622 - DNA, 60 bp, Artificial
  Synthetic oligonucleotide
ttaaattcttgcctcccagtgaaacctccaatcaatttgttgcttatggagctcattata

SEQ ID NO: 127623 - DNA, 60 bp, Artificial
  Synthetic oligonucleotide
gaccgccaccctttgagaaagagtggtgtacagagataactccagaggtagcagatcatc

SEQ ID NO: 127624 - DNA, 60 bp, Artificial
  Synthetic oligonucleotide
agccatcaggggagaagaagtgttaaaagtttgtagatttccagctggccataaagcaca

SEQ ID NO: 127625 - DNA, 60 bp, Artificial
  Synthetic oligonucleotide
ggccattatatgaccaaggatcagataatctaaaagctttggtagggacagtctgtgttg

SEQ ID NO: 127626 - DNA, 60 bp, Artificial
  Synthetic oligonucleotide
ggtagagaggaatcatgtatgtaggtataacataacaggactatgcagggattcgaagga

SEQ ID NO: 127627 - DNA, 60 bp, Artificial
  Synthetic oligonucleotide
gggcatggaatgatcctaatgagaagaagtggtatccttatgcctcatgtcaaattaggc

SEQ ID NO: 127628 - DNA, 60 bp, Artificial
  Synthetic oligonucleotide
gggcccagaggaatttcatcaaaggaagtttgtctataaggtgccaggaaaatatggctt

SEQ ID NO: 127629 - DNA, 60 bp, Artificial
  Synthetic oligonucleotide
gtctagtcagagaatagaaaagtggcactggttagtaagaagacagatggcatgggccac

SEQ ID NO: 127630 - DNA, 60 bp, Artificial
  Synthetic oligonucleotide
caatacatggatgatttgtttgtagggtcagactatacagcagaagagcatgagaaagct

SEQ ID NO: 127631 - DNA, 60 bp, Artificial
  Synthetic oligonucleotide
ctccctttcattggatggggtatgagttacacccagataagtggaagatagaaaaggttc

SEQ ID NO: 127632 - DNA, 60 bp, Artificial
  Synthetic oligonucleotide
cttcctcaagggtggaagggaagtccatgtatctttcaagggacagtagcatcactgctg

SEQ ID NO: 127633 - DNA, 60 bp, Artificial
  Synthetic oligonucleotide
cctgggatcaaaacaaaacaactgtgcaagctaataagaggaggactaaacataacagag

SEQ ID NO: 127634 - DNA, 60 bp, Artificial
  Synthetic oligonucleotide
gtaccctagtgtaaggggcagcatagtcagagcaatgggtaatgggaactctgccttgtt

SEQ ID NO: 127635 - DNA, 60 bp, Artificial
  Synthetic oligonucleotide
cctctgttggtgtaaaggtgaattagatagatttggcttatcggataaactccttgaaac

SEQ ID NO: 127636 - DNA, 60 bp, Artificial
  Synthetic oligonucleotide
ttcgcttgttcgggagtctctactacagaggctaagggttgtatctctgagcagatcccc

SEQ ID NO: 127637 - DNA, 60 bp, Artificial
  Synthetic oligonucleotide
gaattagagcaagtgagtaagtgttatccattgtgcgcctctcttctaaacctgttgtgt

SEQ ID NO: 127638 - DNA, 60 bp, Artificial
  Synthetic oligonucleotide
gcctttcagtggcgcccgaacaggacttgaagagaggcactgacacttgaggcagagcac

SEQ ID NO: 127639 - DNA, 60 bp, Artificial
  Synthetic oligonucleotide
tcagtggctagcagatactatggaggaaataaaggaagaagcaagaaagcacttccctct

SEQ ID NO: 127640 - DNA, 60 bp, Artificial
  Synthetic oligonucleotide
gtgagcagagctataggagatgagtatgcagctaacaatcatctgttacactcctcccag

SEQ ID NO: 127641 - DNA, 60 bp, Artificial
  Synthetic oligonucleotide
gcagagaatgagtggggatttgaacctggatggcaacagtatacgacaggtccaggaacc

SEQ ID NO: 127642 - DNA, 60 bp, Artificial
  Synthetic oligonucleotide
agtggaaaccggaggtcatccctctattctcagcattgacagaaggagcaatcagtcatg

SEQ ID NO: 127643 - DNA, 60 bp, Artificial
  Synthetic oligonucleotide
ccctcatgtggtctgggaccctcatcttgcctatgactttgcagcattaacatatcaccc

SEQ ID NO: 127644 - DNA, 60 bp, Artificial
  Synthetic oligonucleotide
ggaaaggagcaactttagaggaaatgttggaagcatgtcagggagtaggtgggccacaac

SEQ ID NO: 127645 - DNA, 60 bp, Artificial
  Synthetic oligonucleotide
ataccatacttaagccatgtgtaaagattaacccatattgtgttaagatgcaatgtcagg

SEQ ID NO: 127646 - DNA, 60 bp, Artificial
  Synthetic oligonucleotide
ctctgggtaaccactaattgcataccttcattgccagattatgatgaggtagaaattcct

SEQ ID NO: 127647 - DNA, 60 bp, Artificial
  Synthetic oligonucleotide
ggtaccatgtctacaggaaacgtgtaccaggaactaataagaagatacctggtagtggtg

SEQ ID NO: 127648 - DNA, 60 bp, Artificial
  Synthetic oligonucleotide
atacttggtatccttggtctgctctcgctggcaggatccgcgatgggctcagtgtcggtg

SEQ ID NO: 127649 - DNA, 60 bp, Artificial
  Synthetic oligonucleotide
taagcaactgctagaagagtattatcagcctttgcaagcttgtgagaataaatgctggtg

SEQ ID NO: 127650 - DNA, 60 bp, Artificial
  Synthetic oligonucleotide
gagccatttgggtccacctagctcaagggtgtgatggaaccttcagggaaagaagaccac

SEQ ID NO: 127651 - DNA, 60 bp, Artificial
  Synthetic oligonucleotide
tgttggtggttagggatagaacacacatttggaataccctataacccacaaagtcagggg

SEQ ID NO: 127652 - DNA, 60 bp, Artificial
  Synthetic oligonucleotide
gaagcaaggaaataaggttttaagagcagggaaatatgggaaacagaaaacagcacatag

SEQ ID NO: 127653 - DNA, 60 bp, Artificial
  Synthetic oligonucleotide
ggcacaggtgtgtcatacttctgtagagtggactaatacaagcatcactccaaattggac

SEQ ID NO: 127654 - DNA, 60 bp, Artificial
  Synthetic oligonucleotide
gctaccagcacacaaagggataggagggaatgagcaaatagataagctagtaagttcagg

SEQ ID NO: 127655 - DNA, 60 bp, Artificial
  Synthetic oligonucleotide
gggacagacagatgcttcacttggagtctggcagatagattgcacacatctggaaaatca

SEQ ID NO: 127656 - DNA, 60 bp, Artificial
  Synthetic oligonucleotide
acagaagactgtcagaagggacttttgataagatgtattttaggttgtgtgcctccagga

SEQ ID NO: 127657 - DNA, 60 bp, Artificial
  Synthetic oligonucleotide
gcagatccccttagagcaaggaccagagtcctgagtgactgggtctgagcacctcactcg

SEQ ID NO: 127658 - DNA, 60 bp, Artificial
  Synthetic oligonucleotide
gtctgagcacctcactcggggctgatcacctcgaggtagtggaactccttgcttgcttgc

SEQ ID NO: 127659 - DNA, 60 bp, Artificial
  Synthetic oligonucleotide
aggcagagcactccgcctggaagaagcaggttgaaggagagtggactggtctgaagacgc

SEQ ID NO: 127660 - DNA, 60 bp, Artificial
  Synthetic oligonucleotide
gaagtagcctaaccgcaaaaccacatcctactgcagaactgtagttgcttggcaacctgc

SEQ ID NO: 127661 - DNA, 60 bp, Artificial
  Synthetic oligonucleotide
gaggagaaacctctgcagaaaactctgagcacttatcagaaattagggagagggctcagg

SEQ ID NO: 127662 - DNA, 60 bp, Artificial
  Synthetic oligonucleotide
tctgcttcaactgtaataaagaagggcatgtagcaaggttcttcaaggcccctagaagga

SEQ ID NO: 127663 - DNA, 60 bp, Artificial
  Synthetic oligonucleotide
cctgtgtgtcgccaagtttccttaagagtgccatcatacaaagatctgatagacttctct

SEQ ID NO: 127664 - DNA, 60 bp, Artificial
  Synthetic oligonucleotide
ccccttcaggctctgatatagcaggaactacttctacagtggaagaacaattggcatgga

SEQ ID NO: 127665 - DNA, 60 bp, Artificial
  Synthetic oligonucleotide
gctactcgtcagctttgcggcaattagttggagggccggttacaccggatggctacaagc

SEQ ID NO: 127666 - DNA, 60 bp, Artificial
  Synthetic oligonucleotide
ctgcggggacgtgcatatggcacatactcagaaggattagacaaagtgcagaacgacccc

SEQ ID NO: 127667 - DNA, 60 bp, Artificial
  Synthetic oligonucleotide
aggtttaggcagggctatcgacctgtcttttcacaggactgccagcagaacctataccgc

SEQ ID NO: 127668 - DNA, 60 bp, Artificial
  Synthetic oligonucleotide
ccttacatcttgggcaagttggtttgactttacttggtgggttcaatacttaaaatgggg

SEQ ID NO: 127669 - DNA, 60 bp, Artificial
  Synthetic oligonucleotide
gtgaaattaaaaccaggagtagatggacccagaataaaacaatggcctttaagtaaagag

SEQ ID NO: 127670 - DNA, 60 bp, Artificial
  Synthetic oligonucleotide
tgtagaaataagagggaagggaacatttgggacagtattgataggacctactccaataga

SEQ ID NO: 127671 - DNA, 60 bp, Artificial
  Synthetic oligonucleotide
ccccgaaacaatgttatggggcaacactacaggttccaaaagaaccattgcagacctctg

SEQ ID NO: 127672 - DNA, 60 bp, Artificial
  Synthetic oligonucleotide
gagcctgggagctctctggctagctgagaacccactgcttaagcctcaataaagcttgcc

SEQ ID NO: 127673 - DNA, 60 bp, Artificial
  Synthetic oligonucleotide
caacacgccacggcacaagtagtggggagactgagcacgaatctaacttatatcactaag

SEQ ID NO: 127674 - DNA, 60 bp, Artificial
  Synthetic oligonucleotide
gcaggcaaatacacaatggatattggtgcaggtcccaaactacgggtttgtgccagtccc

SEQ ID NO: 127675 - DNA, 60 bp, Artificial
  Synthetic oligonucleotide
tcttctcatttgtctcctcgacccgaacaagaaccacccaacagctggcgcccaacgtgg

SEQ ID NO: 127676 - DNA, 60 bp, Artificial
  Synthetic oligonucleotide
cgctgggtagcccggccgaggtgaataaaggtcgtttggctttcggcaagtacctgtgtc

SEQ ID NO: 127677 - DNA, 60 bp, Artificial
  Synthetic oligonucleotide
tggcgcccaacgtggggctcgaggagcaacaaccaagtgaggtgagtacttgcgagacat

SEQ ID NO: 127678 - DNA, 60 bp, Artificial
  Synthetic oligonucleotide
aaaggtaagggtgacgccccagagagatgatacttatacaataggaaacgtcctgtgggc

SEQ ID NO: 127679 - DNA, 60 bp, Artificial
  Synthetic oligonucleotide
ggccaggaggatggttcaccaacactactgtatggttctgtgtccattggccatttggat

SEQ ID NO: 127680 - DNA, 60 bp, Artificial
  Synthetic oligonucleotide
gctaagaaggaaagagtatgtaggagtcagttgggttcccggacataaggggatcggagg

SEQ ID NO: 127681 - DNA, 60 bp, Artificial
  Synthetic oligonucleotide
ggcgttagaggtagcacaaggaaaacatgaccggcccggacctattaatatccaccaggg

SEQ ID NO: 127682 - DNA, 60 bp, Artificial
  Synthetic oligonucleotide
ggaggcaagaaagggtctaaggcagcagcagcctactggagggagggaaaaataaggagg

SEQ ID NO: 127683 - DNA, 60 bp, Artificial
  Synthetic oligonucleotide
cggagaaggggcagcagtggtagaagaaaacgcaatgccaacattatatccccaccggca

SEQ ID NO: 127684 - DNA, 60 bp, Artificial
  Synthetic oligonucleotide
ggaggaggaaggagaaattaccagcatctacccacaacttagaaagaacttccccgctgt

SEQ ID NO: 127685 - DNA, 60 bp, Artificial
  Synthetic oligonucleotide
cccaagaatgcagagacacttataggcagtgggttttagaggcggcgttagaggtagcac

SEQ ID NO: 127686 - DNA, 60 bp, Artificial
  Synthetic oligonucleotide
agaacacacagagacatcaaagataaaatagcagcatttagggaagattgtgagacagta

SEQ ID NO: 127687 - DNA, 60 bp, Artificial
  Synthetic oligonucleotide
ttggaaaggggctaaccgcagcagagcaagccaccttaaccacccaagaatgcagagaca

SEQ ID NO: 127688 - DNA, 60 bp, Artificial
  Synthetic oligonucleotide
gagcacgcccatagggtctggaaagagtcccacccggaggccccaaagacagatgagata

SEQ ID NO: 127689 - DNA, 60 bp, Artificial
  Synthetic oligonucleotide
ctgcacacaccaaacagattcaaccacttccggtcaagctacatgggccaggtccacggg

SEQ ID NO: 127690 - DNA, 60 bp, Artificial
  Synthetic oligonucleotide
aagatgcctactttaccatccctttagatgagaattttagacaatacactgctttctcgg

SEQ ID NO: 127691 - DNA, 60 bp, Artificial
  Synthetic oligonucleotide
ttggaatgtgttacctcaagggtgggtgtgtagccctgccatatatcaaacaaccactca

SEQ ID NO: 127692 - DNA, 60 bp, Artificial
  Synthetic oligonucleotide
caggtgcaatggttggggtatgaacttaccccgaaaaggtggcggttccagcctaggcag

SEQ ID NO: 127693 - DNA, 60 bp, Artificial
  Synthetic oligonucleotide
gacagaccagaccataaaagggtggtgagtgaaattagggaagaattaggggcttatggt

SEQ ID NO: 127694 - DNA, 60 bp, Artificial
  Synthetic oligonucleotide
cctaggggaaagagagccgtggggatggtcatattccttctcgtgttagctatcatggcg

SEQ ID NO: 127695 - DNA, 60 bp, Artificial
  Synthetic oligonucleotide
ggggaataggggaagctgcaagaaacattgatagcttagattggaagtggatacggaagg

SEQ ID NO: 127696 - DNA, 60 bp, Artificial
  Synthetic oligonucleotide
caggtaagaaattgcctcgacccaataaatgtgaccgagccaagagtagctaattattcc

SEQ ID NO: 127697 - DNA, 60 bp, Artificial
  Synthetic oligonucleotide
aaggaggaagatatccccgaggagggaatacgcccagttgagatgtgacacgtagcttgg

SEQ ID NO: 127698 - DNA, 60 bp, Artificial
  Synthetic oligonucleotide
cagacctatttgacagagtgtacctagaattggcccgcttagatgcaaacagtactgggg

SEQ ID NO: 127699 - DNA, 59 bp, Artificial
  Synthetic oligonucleotide
cagctcccgctcagtctgttagtcctcctagttcgaatccttttgcatattctctctcc

SEQ ID NO: 127700 - DNA, 60 bp, Artificial
  Synthetic oligonucleotide
ggatgtctgatcttgagaacagaatggcagaattggaggaacgatttgaggaccttgcgc

SEQ ID NO: 127701 - DNA, 60 bp, Artificial
  Synthetic oligonucleotide
gggttgaagtgtgtaggaggaagggtagacttgagtagtaacccggagcaacatacagac

SEQ ID NO: 127702 - DNA, 60 bp, Artificial
  Synthetic oligonucleotide
gagaaagggaacaggtggggacgaccgggagctttccccggagctggaatatctgagttg

SEQ ID NO: 127703 - DNA, 60 bp, Artificial
  Synthetic oligonucleotide
caaactgggctagggtgtgtgccgagaggaagatattgccattttgactggcgcccagag

SEQ ID NO: 127704 - DNA, 60 bp, Artificial
  Synthetic oligonucleotide
ggcagacctatcctccagttttacatggggtagttgggtggataagcttgtatggctagc

SEQ ID NO: 127705 - DNA, 60 bp, Artificial
  Synthetic oligonucleotide
atcaattgctgaatgcgcaagaggataccgaccctgcaggggacggagaccagccagacg

SEQ ID NO: 127706 - DNA, 60 bp, Artificial
  Synthetic oligonucleotide
gggatcttctgggaagggctgaggccatgtaagctcaggcccgaagaaggcctgaagctt

SEQ ID NO: 127707 - DNA, 60 bp, Artificial
  Synthetic oligonucleotide
ggctcgagagttccaactacccaggagagtagctagagaaattgtacacaggtgtcaagc

SEQ ID NO: 127708 - DNA, 60 bp, Artificial
  Synthetic oligonucleotide
tagaagggaaaattatatgggtagctgtggaaacaaattcagggttgattgaggcgcggg

SEQ ID NO: 127709 - DNA, 60 bp, Artificial
  Synthetic oligonucleotide
tggacaaagggcacctaactgcgcgtgaggcactagatcgttggaccctggaagatcacg

SEQ ID NO: 127710 - DNA, 60 bp, Artificial
  Synthetic oligonucleotide
ggaacacgtgtgccggacctaggcgagtctgcccaaaatgttcctgccctatctgtgtat

SEQ ID NO: 127711 - DNA, 60 bp, Artificial
  Synthetic oligonucleotide
aaggaggggatcaaccggctagccagatatgcctggtccctgggccacgactctaacctt

SEQ ID NO: 127712 - DNA, 60 bp, Artificial
  Synthetic oligonucleotide
gactctaaccttccccgggcacaatggaggatttggcggagggcccaagtgctggctttt

SEQ ID NO: 127713 - DNA, 60 bp, Artificial
  Synthetic oligonucleotide
gacgcaccgcccaggcagcagtggtgagccacacaaaacctcataccctccaaagattgg

SEQ ID NO: 127714 - DNA, 60 bp, Artificial
  Synthetic oligonucleotide
aggagccaacgattcagcagttgagtggccacccctaaccaaggaggggatcaaccggct

SEQ ID NO: 127715 - DNA, 60 bp, Artificial
  Synthetic oligonucleotide
cttctgggcagaggagcggataccatcaggagaagacttctgtgaccccgtctgctcccc

SEQ ID NO: 127716 - DNA, 60 bp, Artificial
  Synthetic oligonucleotide
gcagatgaggtagtgctgaaagacattcattgggatagaatcaagggtgtgcccgctgcc

SEQ ID NO: 127717 - DNA, 60 bp, Artificial
  Synthetic oligonucleotide
ttgctacctttagggccctcagccccgatggagaggaagttagaggcatgcagggcggta

SEQ ID NO: 127718 - DNA, 60 bp, Artificial
  Synthetic oligonucleotide
atacccggagattcagaagactgggaatctgccttacagaggatcaatacactaacagag

SEQ ID NO: 127719 - DNA, 60 bp, Artificial
  Synthetic oligonucleotide
gagattaaaagaccctgaatggaaggaaaggataaaggaaggaactgagctggtagttaa

SEQ ID NO: 127720 - DNA, 60 bp, Artificial
  Synthetic oligonucleotide
gggtgatggagaagtacaaaggtgttatggatgtgggaagcctggccatataagaaggga

SEQ ID NO: 127721 - DNA, 60 bp, Artificial
  Synthetic oligonucleotide
ggtgtgcccgctgcctcagtagtgcaggttggagtaacaggcagaaatatagcaaggagg

SEQ ID NO: 127722 - DNA, 60 bp, Artificial
  Synthetic oligonucleotide
ggtttcttagatctaggttatttgatgacacccgcaggaacacatacaacaggagaatta

SEQ ID NO: 127723 - DNA, 60 bp, Artificial
  Synthetic oligonucleotide
atcagcccatttcccagggtttggacaaagcctcctctatggatacccagtctacgtgtt

SEQ ID NO: 127724 - DNA, 60 bp, Artificial
  Synthetic oligonucleotide
cccactttccaggttttggacagagcctcctctatggatacccagtctacgtgtttggcg

SEQ ID NO: 127725 - DNA, 60 bp, Artificial
  Synthetic oligonucleotide
cccactttccaggtttcggacagagcctcctctatggatacccagtctacgtgtttggcg

SEQ ID NO: 127726 - DNA, 60 bp, Artificial
  Synthetic oligonucleotide
taccttatccctcgactcccctccttccccacccagagaactacccgcaccctcaaggtt

SEQ ID NO: 127727 - DNA, 52 bp, Artificial
  Synthetic oligonucleotide
ggggccaacataccctaccgagaactcagagagtcgttggaagacgggaagg

SEQ ID NO: 127728 - DNA, 59 bp, Artificial
  Synthetic oligonucleotide
acggccggggggcaagataacctaccgagaactcagagagtcgttggaagacgggaagg

SEQ ID NO: 127729 - DNA, 52 bp, Artificial
  Synthetic oligonucleotide
ggggccaagataacctaccgagaactcagagagtcgttggaagacgggaagg

SEQ ID NO: 127730 - DNA, 60 bp, Artificial
  Synthetic oligonucleotide
tctcttactgggttctcctgtacccaggtgggagaaactccagcagtggcgcccgaacag

SEQ ID NO: 127731 - DNA, 55 bp, Artificial
  Synthetic oligonucleotide
ctagcggaggctagaaggagagagatgggtgcgagagcgtcagtattaagtgggg

SEQ ID NO: 127732 - DNA, 60 bp, Artificial
  Synthetic oligonucleotide
ggggagtggccaaccctcagatgctgcatataagcagctgcttctcgcctgtactgggtc

SEQ ID NO: 127733 - DNA, 60 bp, Artificial
  Synthetic oligonucleotide
gctcagctctacagttccttatccctcgactcccctccttccccacccagagaacctcta

SEQ ID NO: 127734 - DNA, 60 bp, Artificial
  Synthetic oligonucleotide
ggaccagcaagactactctggaaaggtgaaggggcagtagtaatacaagacaatagtgat

SEQ ID NO: 127735 - DNA, 60 bp, Artificial
  Synthetic oligonucleotide
cctcagatcacatagactgaagcagaaaatctctagcagtggcgcccgaacagggacttg

SEQ ID NO: 127736 - DNA, 60 bp, Artificial
  Synthetic oligonucleotide
tcaattggtaaacacatggttcaaggtaggacaacatgtatatttgcctccaaaggaagg

SEQ ID NO: 127737 - DNA, 60 bp, Artificial
  Synthetic oligonucleotide
tgggcagggcaagaaatctgggagtggctccaagggattgctcaggtggcgatacaagga

SEQ ID NO: 127738 - DNA, 60 bp, Artificial
  Synthetic oligonucleotide
ccgaacagggacttgaagcatcccagtgtttgagcccgaaggcggagtgtggagtctgga

SEQ ID NO: 127739 - DNA, 56 bp, Artificial
  Synthetic oligonucleotide
ccccacagagagataaaatgcactcagagagcccaggagtgttatgatgaggaaca

SEQ ID NO: 127740 - DNA, 60 bp, Artificial
  Synthetic oligonucleotide
ccgcacccctcggggttgccacaaatggaacagataacagtcctagacttggcagatgcc

SEQ ID NO: 127741 - DNA, 60 bp, Artificial
  Synthetic oligonucleotide
caccagtaaagttgaaggagggagctgatggcccaaggattaaacagtggcccctttcaa

SEQ ID NO: 127742 - DNA, 60 bp, Artificial
  Synthetic oligonucleotide
cctcggccttaaaagaagcaggctccctggggatggtgcagcaaagaggaggacaaggag

SEQ ID NO: 127743 - DNA, 60 bp, Artificial
  Synthetic oligonucleotide
atgcatgccagggagtaggaggtccccaacagaaagcccgtctgatggcggaggctatgg

SEQ ID NO: 127744 - DNA, 60 bp, Artificial
  Synthetic oligonucleotide
ggaatgctccccaggaggacacaacgaccaggagagggaagtacccagatttaatggggc

SEQ ID NO: 127745 - DNA, 55 bp, Artificial
  Synthetic oligonucleotide
gtcagccagtcaaggcagcatgttggtggttgggaatagatcatactacaggggt

SEQ ID NO: 127746 - DNA, 60 bp, Artificial
  Synthetic oligonucleotide
gcttcaaatgtggtaaggagggccacatagcaaagaactgtggacaagtaccaagggcaa

SEQ ID NO: 127747 - DNA, 60 bp, Artificial
  Synthetic oligonucleotide
cagagcaagttaaatgaatggggatgtgcctttaaacaaatctgtcacactacggtccct

SEQ ID NO: 127748 - DNA, 60 bp, Artificial
  Synthetic oligonucleotide
aacccatcgggatggcccctacaagtataagaaggtacgagggaccggagtctgcaagac

SEQ ID NO: 127749 - DNA, 60 bp, Artificial
  Synthetic oligonucleotide
caggcagagcaggaggaagagttagagatggcattaattcagaagaaagcagaaaaggag

SEQ ID NO: 127750 - DNA, 65 bp, Artificial
  Synthetic oligonucleotide
ctcattataatgactttcatcaactagctaaggcaatgtataaaataggcacagagagtatagtc

SEQ ID NO: 127751 - DNA, 60 bp, Artificial
  Synthetic oligonucleotide
gtatgagcttgtatcagagccaataccagatgctgacacctattatgtagatggagcagc

SEQ ID NO: 127752 - DNA, 60 bp, Artificial
  Synthetic oligonucleotide
taatagcaagtctgaccctggtaggggcagcaccaacaaagcaacaatgggtgacagtat

SEQ ID NO: 127753 - DNA, 60 bp, Artificial
  Synthetic oligonucleotide
gagagcacattgtaggatgagaggtaattggacaggagcagttaaggagataaggagcag

SEQ ID NO: 127754 - DNA, 60 bp, Artificial
  Synthetic oligonucleotide
tctggaaaccctgagccgatctcttcccgtcgagtgagctgcgcagcataggtaagcgga

SEQ ID NO: 127755 - DNA, 59 bp, Artificial
  Synthetic oligonucleotide
taccccaatattagacccctaacaggaagaaacagggaggtcagggatggagaataacc

SEQ ID NO: 127756 - DNA, 60 bp, Artificial
  Synthetic oligonucleotide
gcgcagtgtccaaagtgccagataaagggagagcctatgcatggtcaagtagatgcctcc

SEQ ID NO: 127757 - DNA, 60 bp, Artificial
  Synthetic oligonucleotide
tcaagaacagtaccaatgacaaggctagcactacaacaagccatgcaggatctaaacgag

SEQ ID NO: 127758 - DNA, 60 bp, Artificial
  Synthetic oligonucleotide
ctcgtctgggcaagtagggaactagacagatttggccttgcaggagcattattggaaacc

SEQ ID NO: 127759 - DNA, 60 bp, Artificial
  Synthetic oligonucleotide
aaggtatattacagagaaggagctgacccaacttggaagggacccgctaccttactgtgg

SEQ ID NO: 127760 - DNA, 60 bp, Artificial
  Synthetic oligonucleotide
agtagtcaaggagactccatggttacaggggagggactgggcggtacggggagtggtttg

SEQ ID NO: 127761 - DNA, 60 bp, Artificial
  Synthetic oligonucleotide
aaatccatgcccaccatgaatggggaataataccaggttggttgaagtacacagaaggcc

SEQ ID NO: 127762 - DNA, 60 bp, Artificial
  Synthetic oligonucleotide
ggctagtatggaagtttgattcctcccttgcctattgctataaagcaggacatgaagccc

SEQ ID NO: 127763 - DNA, 60 bp, Artificial
  Synthetic oligonucleotide
tgtggtaactgcaagtgtgtctgccctcatcattgactccaggggtcgggagctcaagcg

SEQ ID NO: 127764 - DNA, 60 bp, Artificial
  Synthetic oligonucleotide
ggtgaacaatacacaaccaggagagagatatgagttcagagtactacctcaaggctggag

SEQ ID NO: 127765 - DNA, 60 bp, Artificial
  Synthetic oligonucleotide
ctcaggaataaagaccaaacacttgtgcaaggcaatcagaggggttccagggctaacaga

SEQ ID NO: 127766 - DNA, 60 bp, Artificial
  Synthetic oligonucleotide
ggcagtgaaggccttaagtccctatacggcatagtatgtgtcgtttgggcatgccacgcc

SEQ ID NO: 127767 - DNA, 60 bp, Artificial
  Synthetic oligonucleotide
cagcatgcttgccacatgcaatggttagagaacaagtccctatgcctaatgtgtcccagt

SEQ ID NO: 127768 - DNA, 60 bp, Artificial
  Synthetic oligonucleotide
ggaactgcgcctggctgattagaagaggctttgagctcctgcaagaaacaatatatagac

SEQ ID NO: 127769 - DNA, 60 bp, Artificial
  Synthetic oligonucleotide
cagtcctgtgaaaccagtcgctttaagccttttaagataagatactgtgcaccagctgga

SEQ ID NO: 127770 - DNA, 60 bp, Artificial
  Synthetic oligonucleotide
ggaatctcttgggagcagacagggtggcagacagaattaacacctgacctagctgatcat

SEQ ID NO: 127771 - DNA, 60 bp, Artificial
  Synthetic oligonucleotide
ggagccttacagagagcacaggaacaacaagagagaaatgtgcatgccttacagtcactg

SEQ ID NO: 127772 - DNA, 60 bp, Artificial
  Synthetic oligonucleotide
agcgagtcctggtaggtagagcggcctgggagcccttgcctgctagtgactacctagctc

SEQ ID NO: 127773 - DNA, 60 bp, Artificial
  Synthetic oligonucleotide
agtgcccctatttcaagtattggcagaagggtgtactccctatgatattaatgggctgct

SEQ ID NO: 127774 - DNA, 60 bp, Artificial
  Synthetic oligonucleotide
aaagatgtgattaatgaggaagcagcagagtgggacttacaacacccacagcaacagcca

SEQ ID NO: 127775 - DNA, 60 bp, Artificial
  Synthetic oligonucleotide
actcggaggagaaggagacaaaagtggagaaggcgtcaagagcaggtggacgacatcgcc

SEQ ID NO: 127776 - DNA, 60 bp, Artificial
  Synthetic oligonucleotide
caggaacaaacagcacagtggaagagcagatagcttggatgaccaggccagcaggacaag

SEQ ID NO: 127777 - DNA, 60 bp, Artificial
  Synthetic oligonucleotide
catctctccttcacgcgcccgccgccttacctgaggccgccatccacgccggttgagtcg

SEQ ID NO: 127778 - DNA, 58 bp, Artificial
  Synthetic oligonucleotide
agagagtccagggatccgcttgagcaggcgagatcgcgaaggcaaccccagtaggcaa

SEQ ID NO: 127779 - DNA, 60 bp, Artificial
  Synthetic oligonucleotide
gctctgcgggcggagcgcacagatccacaggtcaaaacttggatgacgcagacattactc

SEQ ID NO: 127780 - DNA, 58 bp, Artificial
  Synthetic oligonucleotide
cccctgtgggacctatgccccaaggagtgctaagaaacccaacaggaaatgacattgc

SEQ ID NO: 127781 - DNA, 60 bp, Artificial
  Synthetic oligonucleotide
cccctttaaggatggttcaaagattatcatcaccgtcttgtggaacttgaccccagaaaa

SEQ ID NO: 127782 - DNA, 60 bp, Artificial
  Synthetic oligonucleotide
ggactggagcaatggctggaaacgtcactggagagaatcaaccgggaggcccggttacac

SEQ ID NO: 127783 - DNA, 60 bp, Artificial
  Synthetic oligonucleotide
ggaagggaccaacagtggaaaggaccagcagagctcatttggaaaggagaaggcgctgtg

SEQ ID NO: 127784 - DNA, 60 bp, Artificial
  Synthetic oligonucleotide
gactatctccggccccacaacctcaaacggccagacagagaaggaggagaagagccagac

SEQ ID NO: 127785 - DNA, 60 bp, Artificial
  Synthetic oligonucleotide
ggaaagtatgccaggacaaagaatgcccacacaaatgaattgagggtacttgcagggttg

SEQ ID NO: 127786 - DNA, 60 bp, Artificial
  Synthetic oligonucleotide
cgacgctttacatttggctgaagaacctccaagcagtaattgaatatgggtggcaagagc

SEQ ID NO: 127787 - DNA, 60 bp, Artificial
  Synthetic oligonucleotide
atccctcgccgcatcagacaaggtgctgaggccctactcaactgagcgggatctaaggca

SEQ ID NO: 127788 - DNA, 60 bp, Artificial
  Synthetic oligonucleotide
taaggtatccgaagactttcgggttcttgttcaagctggtcccggtggcagtgtcgcccc

SEQ ID NO: 127789 - DNA, 60 bp, Artificial
  Synthetic oligonucleotide
gggcaagtgtcagttagaagggaaatggggacaggctttacatagtctatcattagagct

SEQ ID NO: 127790 - DNA, 60 bp, Artificial
  Synthetic oligonucleotide
catgacttcatgtaacgcaacagtaataacacaggaccgtaacaaagcttccacagatag

SEQ ID NO: 127791 - DNA, 60 bp, Artificial
  Synthetic oligonucleotide
ccctggcttgtggctctgggtagctcgtcaggtgttctggaaaggcttacgggaggacac

SEQ ID NO: 127792 - DNA, 60 bp, Artificial
  Synthetic oligonucleotide
agtctgagctatgaagcctacaagaaggaggaaaagcctgactgctgcaagaggaagtgg

SEQ ID NO: 127793 - DNA, 60 bp, Artificial
  Synthetic oligonucleotide
caaatagagcacaccacaggagtaccttacaacccacagagtcaaggagtagtagaagca

SEQ ID NO: 127794 - DNA, 60 bp, Artificial
  Synthetic oligonucleotide
agatttatctctcatgggtcccagcccacaagggtataggaggtaatgaacagatagata

SEQ ID NO: 127795 - DNA, 60 bp, Artificial
  Synthetic oligonucleotide
gaggtgcagttaggaatcacacatccaggaggcctaaagcaatgtgagcaaattacagta

SEQ ID NO: 127796 - DNA, 60 bp, Artificial
  Synthetic oligonucleotide
ctgggtgaccacaagctgtgtccccagtctgttgcactatgaagaacagcatatccccaa

SEQ ID NO: 127797 - DNA, 60 bp, Artificial
  Synthetic oligonucleotide
ccctagatgccccaattgcggaaagtttggacatgtactgagggattgcagagccccaag

SEQ ID NO: 127798 - DNA, 60 bp, Artificial
  Synthetic oligonucleotide
gcagcaggagcccagaaagaggaaaagaagggtccctacgaggcagcttacaactccctc

SEQ ID NO: 127799 - DNA, 60 bp, Artificial
  Synthetic oligonucleotide
ccacttcgatcctttccgagcccgaacaaccccttgtaataagtgcttctgtaaagtttg

SEQ ID NO: 127800 - DNA, 60 bp, Artificial
  Synthetic oligonucleotide
ccttggaggaatacgtagcggaccaatcaaggctctcggtatggggatgttcattctccc

SEQ ID NO: 127801 - DNA, 60 bp, Artificial
  Synthetic oligonucleotide
accagcaaagctactctggaaaggtgaaggggcagtagtaatacaagataatagtgacat

SEQ ID NO: 127802 - DNA, 60 bp, Artificial
  Synthetic oligonucleotide
tactgcagggagccaacacaccctaccgagcactcagagagtcgttggaagacgggaagg

SEQ ID NO: 127803 - DNA, 60 bp, Artificial
  Synthetic oligonucleotide
tgaaggcagcaagggcggcaggaacaaaccacgacggagtgctcctataaaggcgcgggc

SEQ ID NO: 127804 - DNA, 60 bp, Artificial
  Synthetic oligonucleotide
tgaaggcagtaagggcggcaggaacaaaccacgacggagtgctcctataaaggcgcgggc

SEQ ID NO: 127805 - DNA, 60 bp, Artificial
  Synthetic oligonucleotide
gacactgtaccagtaaaattaaagccaggaatggatggcccaaaagttaaacaatggcca

SEQ ID NO: 127806 - DNA, 60 bp, Artificial
  Synthetic oligonucleotide
gaaactgtaccagtaaaattaaagccaggaatggatggcccaaaagttaaacaatggcca

SEQ ID NO: 127807 - DNA, 60 bp, Artificial
  Synthetic oligonucleotide
gagactgtaccagtaaaattaaagccaggaatggatggcccaaaagttaaacaatggcca

SEQ ID NO: 127808 - DNA, 60 bp, Artificial
  Synthetic oligonucleotide
gatactgtaccagtaaaattaaagccaggaatggatggcccaaaagttaaacaatggcca

SEQ ID NO: 127809 - DNA, 56 bp, Artificial
  Synthetic oligonucleotide
ggggcaacccgtcaccttcctggtagatactggggcccaacactccgtgctgaccc

SEQ ID NO: 127810 - DNA, 54 bp, Artificial
  Synthetic oligonucleotide
ggcaaccagtcaccttcctggtagatactggggcccaacactccgtgctgaccc

SEQ ID NO: 127811 - DNA, 57 bp, Artificial
  Synthetic oligonucleotide
gaattttaaaagaaggggaggaataggggatatgaccccagcagaaagactaatcaa

SEQ ID NO: 127812 - DNA, 60 bp, Artificial
  Synthetic oligonucleotide
gaattttaaaagaaggggaggaataggggatatgaccccagcagaaagactaatcaatat

SEQ ID NO: 127813 - DNA, 54 bp, Artificial
  Synthetic oligonucleotide
ccccgacaattgagagagttcctagggacggcaggcttctgccgcctctggatc

SEQ ID NO: 127814 - DNA, 60 bp, Artificial
  Synthetic oligonucleotide
gacagggccagaatgggagcgaggcactcggcgatgctgacaggtaacaagttggatagg

SEQ ID NO: 127815 - DNA, 60 bp, Artificial
  Synthetic oligonucleotide
cagaggatagggccaaaatgggagcgaggcactcggcgatgctgacaggtaccaagttgg

SEQ ID NO: 127816 - DNA, 60 bp, Artificial
  Synthetic oligonucleotide
gtactcgcctccccttatgactatatcttactaaatccatcagatgtcccttggctcatg

SEQ ID NO: 127817 - DNA, 60 bp, Artificial
  Synthetic oligonucleotide
ggagaattaaaccacataacattgcaactggtacattggctcctaggccacaaaaacaat

SEQ ID NO: 127818 - DNA, 60 bp, Artificial
  Synthetic oligonucleotide
gggctcatcctataactccagaatcttactggttaacagcctttacttggcaagggaaac

SEQ ID NO: 127819 - DNA, 60 bp, Artificial
  Synthetic oligonucleotide
gtacgagggctcttcactactcgctgcgccgagagtgtttgagactctccaggcttggta

SEQ ID NO: 127820 - DNA, 60 bp, Artificial
  Synthetic oligonucleotide
ccgtgcttccgatggagaacctagggacgaggctgtgagttcaatatcatcctcatctcg

SEQ ID NO: 127821 - DNA, 60 bp, Artificial
  Synthetic oligonucleotide
gtctttgctcaagaacccagagagcagtgttgtgtgttcaaatctcaataatgcatcctg

SEQ ID NO: 127822 - DNA, 60 bp, Artificial
  Synthetic oligonucleotide
cgactgaatcttccttacgctgcgttgccaccacctccaggaatgcagtgggtgtggagc

SEQ ID NO: 127823 - DNA, 60 bp, Artificial
  Synthetic oligonucleotide
ggaagcccaagaagaattgagagaacttctacatcatctaccagaggacgatccaccagc

SEQ ID NO: 127824 - DNA, 60 bp, Artificial
  Synthetic oligonucleotide
ggtcgggctgctaatccagcagtaatgtttactctagaagctccctggcaagatcttagg

SEQ ID NO: 127825 - DNA, 60 bp, Artificial
  Synthetic oligonucleotide
gtcgcctctgcaaccagggacgtttggcctgctgcagcttcctttatacaaggagtaggt

SEQ ID NO: 127826 - DNA, 60 bp, Artificial
  Synthetic oligonucleotide
ctcctccaatgcatccttctactgtaacctggcattttggatataaacaaaaggaagatc

SEQ ID NO: 127827 - DNA, 60 bp, Artificial
  Synthetic oligonucleotide
ctgaactttgggtaaagccaggacggcttagaggacctttgggatctgctgtttacacac

SEQ ID NO: 127828 - DNA, 60 bp, Artificial
  Synthetic oligonucleotide
ggggccgtagaagtcaacaaggaaccccaggaagacaatcctctgggcaagcaccaccac

SEQ ID NO: 127829 - DNA, 60 bp, Artificial
  Synthetic oligonucleotide
tggggaatggttagacccttactaccagggcaagctgtagttactgcaatgcagcaccga

SEQ ID NO: 127830 - DNA, 60 bp, Artificial
  Synthetic oligonucleotide
ggaaattagatcttctctacaccagccaacctcccctcctgcctcctctcgttcctggtc

SEQ ID NO: 127831 - DNA, 60 bp, Artificial
  Synthetic oligonucleotide
gctcgccctgcttcacttcgaccacgctggcataagcctacagctattttggaggtcgtg

SEQ ID NO: 127832 - DNA, 60 bp, Artificial
  Synthetic oligonucleotide
gacaaattgaaatatctggcctattcatgctgcgctactagcacacgtgtattgtgctgg

SEQ ID NO: 127833 - DNA, 60 bp, Artificial
  Synthetic oligonucleotide
cctgcatatgtacctagtgtggtcacagtcaatgaaacagttaagtgctttggagtagag

SEQ ID NO: 127834 - DNA, 61 bp, Artificial
  Synthetic oligonucleotide
ctcaggtcatgatgataaactctgaaaatattgctaatactgctaaccttactcaagaaac

SEQ ID NO: 127835 - DNA, 60 bp, Artificial
  Synthetic oligonucleotide
gatggcctagttctactgttatagcagatcaatgccctttgcctggtaaccatcctacag

SEQ ID NO: 127836 - DNA, 60 bp, Artificial
  Synthetic oligonucleotide
agttcaaccatgtggaaatgcaacagaattgagtgattgtccagtaacagcattaaaggt

SEQ ID NO: 127837 - DNA, 60 bp, Artificial
  Synthetic oligonucleotide
acgaagaactgcacgaagtctagtctactatgtcacacaaacctccagttctcctacagc

SEQ ID NO: 127838 - DNA, 60 bp, Artificial
  Synthetic oligonucleotide
tcaaagacagttacaaggagggaataatcgaggaggatacaatttgagaccacgcaccta

SEQ ID NO: 127839 - DNA, 64 bp, Artificial
  Synthetic oligonucleotide
cctgaacttcaacaaattcctaatgtaacagaagatgtaatagctaaaactaagcatcctagtg

SEQ ID NO: 127840 - DNA, 60 bp, Artificial
  Synthetic oligonucleotide
gaggccgccgatggaatgatcagaccgcaagagcagataatcaacaacgttcccagtctc

SEQ ID NO: 127841 - DNA, 60 bp, Artificial
  Synthetic oligonucleotide
ccacccaaggaagttatgtggttcattgtaataccactccaagcctggatgcagagctgg

SEQ ID NO: 127842 - DNA, 60 bp, Artificial
  Synthetic oligonucleotide
gccactaaatgtataggaccagaggaggaaaattactggtgtgaatatgatcaccgtgga

SEQ ID NO: 127843 - DNA, 60 bp, Artificial
  Synthetic oligonucleotide
ctcctaagggagtgagttataccagtgatcgaaggctccattatggaaatgaaggaactc

SEQ ID NO: 127844 - DNA, 60 bp, Artificial
  Synthetic oligonucleotide
ggcagcaatagaaggtgatttagatgtccaagctttagccaatctatttaatgatctggg

SEQ ID NO: 127845 - DNA, 60 bp, Artificial
  Synthetic oligonucleotide
gtgcggggcgtgaacaaggaggaagagggaaccaaaaccgaaaccaacgatccgctggtg

SEQ ID NO: 127846 - DNA, 60 bp, Artificial
  Synthetic oligonucleotide
ggagttgtgtgttagccttgcttagggaaccatctagtgggataagtgggtactacactt

SEQ ID NO: 127847 - DNA, 60 bp, Artificial
  Synthetic oligonucleotide
gtagttgcgaggagagggtgtggcagacagccactaaatgtataggaccagaggaggaaa

SEQ ID NO: 127848 - DNA, 60 bp, Artificial
  Synthetic oligonucleotide
gggaccctttggcgccctcatgatcagaaatgttggctaattcgcttaactgaaggacat

SEQ ID NO: 127849 - DNA, 60 bp, Artificial
  Synthetic oligonucleotide
ccgcatttgaagcttcgtttaccccacttgactgggattattgccagcttgcaatcactg

SEQ ID NO: 127850 - DNA, 60 bp, Artificial
  Synthetic oligonucleotide
ttatggaaaatggtataatattgatctcacagcccaggagagggaaaatttattagtccg

SEQ ID NO: 127851 - DNA, 60 bp, Artificial
  Synthetic oligonucleotide
cccagcctcaaaggaactcgactcccaaaacgtcgctgtaatcctagcagacgatatgaa

SEQ ID NO: 127852 - DNA, 60 bp, Artificial
  Synthetic oligonucleotide
gattcccactgaccagcagccctctacttccaatggtgaccccatggcccttctctcagg

SEQ ID NO: 127853 - DNA, 60 bp, Artificial
  Synthetic oligonucleotide
ccccttgggtcaagtgaggatcagctgctatcgcaatttgactagcattgtgatatgtca

SEQ ID NO: 127854 - DNA, 60 bp, Artificial
  Synthetic oligonucleotide
gacttttaactaaactgctaattgggagacctgctaagtggtatgatctactacctgttg

SEQ ID NO: 127855 - DNA, 60 bp, Artificial
  Synthetic oligonucleotide
ggctccctcaactagcgcaactgtaaaagctctcaatatgctcactagtattgcaattcc

SEQ ID NO: 127856 - DNA, 60 bp, Artificial
  Synthetic oligonucleotide
ggagtatatttactccgggatcatgtggtaaccctgatggaagctgcccttcatgatgtt

SEQ ID NO: 127857 - DNA, 60 bp, Artificial
  Synthetic oligonucleotide
attatctctacagcccacaatattgctcataccggacgagacgctacttttctgaaagtc

SEQ ID NO: 127858 - DNA, 60 bp, Artificial
  Synthetic oligonucleotide
ggctcagcctagtgctcctccagtggcttcacccttaccatcactattaccagcccagcc

SEQ ID NO: 127859 - DNA, 60 bp, Artificial
  Synthetic oligonucleotide
attttccctatgggaaggagattgtggttttaccagacagaatgttacacaggctaattc

SEQ ID NO: 127860 - DNA, 60 bp, Artificial
  Synthetic oligonucleotide
tttagacttacagcctgctgctgcctcttcaccttatgtagcaccagcaccctcagcccc

SEQ ID NO: 127861 - DNA, 60 bp, Artificial
  Synthetic oligonucleotide
gagcctttgtaggccttactgaccctaaatttccaccaacatatcccaacattacaaggg

SEQ ID NO: 127862 - DNA, 60 bp, Artificial
  Synthetic oligonucleotide
cttggactaaatttagatccccagcattgtataacctgggcctcagcaatagcaactctc

SEQ ID NO: 127863 - DNA, 60 bp, Artificial
  Synthetic oligonucleotide
cagcccagccaatgcagccagtaattcaatatgtgcatccgcctcctataaatccagccc

SEQ ID NO: 127864 - DNA, 60 bp, Artificial
  Synthetic oligonucleotide
ccaacaggaatttggaattccctacaatccccaaagtcagggagtagtagaatccatgaa

SEQ ID NO: 127865 - DNA, 60 bp, Artificial
  Synthetic oligonucleotide
gtagcagtccatgtagccagtggatatttagaagcagaggtaataccagcagagacagga

SEQ ID NO: 127866 - DNA, 60 bp, Artificial
  Synthetic oligonucleotide
ggatccggagaccccagcccagggaccaccgacccaccaccgggaggtaagctggccagc

SEQ ID NO: 127867 - DNA, 60 bp, Artificial
  Synthetic oligonucleotide
ggatccggagacccttgcccagggaccaccgacccaccaccgggaggtaagctggccagc

SEQ ID NO: 127868 - DNA, 60 bp, Artificial
  Synthetic oligonucleotide
ggatctggagacccttgcccagggaccaccgacccaccaccgggaggtaagctggccagc

SEQ ID NO: 127869 - DNA, 60 bp, Artificial
  Synthetic oligonucleotide
cctacagagatgtgtcaaaatgtacaatccagtaaacatcttggatattaaacaaggccc

SEQ ID NO: 127870 - DNA, 60 bp, Artificial
  Synthetic oligonucleotide
aaatctctagcagtggcgcccgaacagggacgctgaaagcgaaagagaaaccagaggagc

SEQ ID NO: 127871 - DNA, 60 bp, Artificial
  Synthetic oligonucleotide
acccactccagaatcggccaacctgggggaggaaatcctctctcagctataccgccctct

SEQ ID NO: 127872 - DNA, 60 bp, Artificial
  Synthetic oligonucleotide
tccagaattggccaacctgggggaggaaatcctctctcagctataccgccctctagaagc

SEQ ID NO: 127873 - DNA, 60 bp, Artificial
  Synthetic oligonucleotide
cgccagtcatccgatagactgagtcgcccgggtacccgtgttcccaataaagccttttgc

SEQ ID NO: 127874 - DNA, 60 bp, Artificial
  Synthetic oligonucleotide
cgccagtcctccgatagactgagtcgcccgggtacccgtgttcccaataaagccttttgc

SEQ ID NO: 127875 - DNA, 60 bp, Artificial
  Synthetic oligonucleotide
gagcctaggggaagtgacatagcaggaactactagtacccttcaggaacaaatagcatgg

SEQ ID NO: 127876 - DNA, 60 bp, Artificial
  Synthetic oligonucleotide
ccagagcaccaactcacctgggaccccatcgatggacgcgttgtcagctctcctctccaa

SEQ ID NO: 127877 - DNA, 60 bp, Artificial
  Synthetic oligonucleotide
ccagagcatcagatcacctgggaccccatcgatggacgcgttatcggctcagctctacag

SEQ ID NO: 127878 - DNA, 60 bp, Artificial
  Synthetic oligonucleotide
gaaaatggaaaccaaaaatgatagggggaattggaggttttatcaaagtaaaacagtatg

SEQ ID NO: 127879 - DNA, 60 bp, Artificial
  Synthetic oligonucleotide
ggtatccaacaggaatttggaattccctacaatccccaaagtcagggagtagtagagtcc

SEQ ID NO: 127880 - DNA, 60 bp, Artificial
  Synthetic oligonucleotide
atagccccagtaccagtaaaactaaaaccaggaatggatggaccaaaagtaaaacaatgg

SEQ ID NO: 127881 - DNA, 60 bp, Artificial
  Synthetic oligonucleotide
ggacccttcttgctttgggaaaccaaggcaggaaaatccctagcaggttggcgcccgaac

SEQ ID NO: 127882 - DNA, 54 bp, Artificial
  Synthetic oligonucleotide
ctgccttcactattcctagtgtgaacaatgagaccccaggaataagataccagt

SEQ ID NO: 127883 - DNA, 58 bp, Artificial
  Synthetic oligonucleotide
ggggactttccagtgtgggagggataggggcggttcggggagtggctaaccctcagat

SEQ ID NO: 127884 - DNA, 60 bp, Artificial
  Synthetic oligonucleotide
caggcaagagtcactgctatagagaagtacctaaaggatcaggcacagctaaattcatgg

SEQ ID NO: 127885 - DNA, 60 bp, Artificial
  Synthetic oligonucleotide
cagactagagtcaccgccatcgagaaatacctaaaggatcaggcacagctaaattcatgg

SEQ ID NO: 127886 - DNA, 60 bp, Artificial
  Synthetic oligonucleotide
ctcagggattcttccctgattggcagaactacacaccagggccaggaactaggttcccac

SEQ ID NO: 127887 - DNA, 60 bp, Artificial
  Synthetic oligonucleotide
cttgcttaaagacctcttcaataaagctgccagttagaagcaagttaagtgtgtgttccc

SEQ ID NO: 127888 - DNA, 57 bp, Artificial
  Synthetic oligonucleotide
acggctccacgcttgcttgcttaaagacctcttaataaagctgccagttagaagcaa

SEQ ID NO: 127889 - DNA, 60 bp, Artificial
  Synthetic oligonucleotide
agcggaggctagaaggagagagatgggtgcgagagcgtcaatattaagaggggaaaaatt

SEQ ID NO: 127890 - DNA, 60 bp, Artificial
  Synthetic oligonucleotide
gagccctgtcttgtctccatttcttgtgtctcttgtctcccccaattcccaccccctcat

SEQ ID NO: 127891 - DNA, 60 bp, Artificial
  Synthetic oligonucleotide
ggaccaggcgcagctaaatgcttggggatgtgcgtttagacaagtctgccacactactgt

SEQ ID NO: 127892 - DNA, 60 bp, Artificial
  Synthetic oligonucleotide
cagaccagatctgagcctgggagctctctggctaactagggaacccactgcttaagcctc

SEQ ID NO: 127893 - DNA, 60 bp, Artificial
  Synthetic oligonucleotide
aaatagtaagaatgtatagccctgttagcattttggacataaaacaagggccaaaagagc

SEQ ID NO: 127894 - DNA, 60 bp, Artificial
  Synthetic oligonucleotide
ggtgacggaggatttgctgcacctcaattctctctttggaaacgaccaatagtcactgca

SEQ ID NO: 127895 - DNA, 60 bp, Artificial
  Synthetic oligonucleotide
gcctattgcaccaggccaaatgagagaaccaaggggaagtgacatagcaggaactactag

SEQ ID NO: 127896 - DNA, 60 bp, Artificial
  Synthetic oligonucleotide
ccaggcgcgactaaattcatggggatgtgcgtttagacaagtctgccacactactgtacc

SEQ ID NO: 127897 - DNA, 60 bp, Artificial
  Synthetic oligonucleotide
cagctaaattcatggggatgtgcgtttagacaagtctgccacactactgtaccatgggca

SEQ ID NO: 127898 - DNA, 60 bp, Artificial
  Synthetic oligonucleotide
acaaggcatcagccattttggtctgatcctctcaaccccatcttttgtctgtcttttttt

SEQ ID NO: 127899 - DNA, 57 bp, Artificial
  Synthetic oligonucleotide
acaaggcatcagccattttggtctgatcctctcaaccccatcttttgtctgtctttt

SEQ ID NO: 127900 - DNA, 60 bp, Artificial
  Synthetic oligonucleotide
cctccgctcctaacaaaattattgtaatcaatgcaggacaacgtatagctcaacttcttt

SEQ ID NO: 127901 - DNA, 57 bp, Artificial
  Synthetic oligonucleotide
tatgaaatgttgattggtgaaggcccttaccaggctactgatactcaacttaatttt

SEQ ID NO: 127902 - DNA, 60 bp, Artificial
  Synthetic oligonucleotide
agagacccttactaaattgaccttagagactggcttaaaagattggagacgcctcctatc

SEQ ID NO: 127903 - DNA, 60 bp, Artificial
  Synthetic oligonucleotide
ataaaagagacccttactaaattgaccttagagactggcttaaaagattggagacgcctc

SEQ ID NO: 127904 - DNA, 60 bp, Artificial
  Synthetic oligonucleotide
ggccccagagctcaggacaggtagaaagaatgaatagaacaataaaagagacccttacta

SEQ ID NO: 127905 - DNA, 60 bp, Artificial
  Synthetic oligonucleotide
agaacaataaaagagacccttactaaattgaccttagagactggcttaaaagattggaga

SEQ ID NO: 127906 - DNA, 54 bp, Artificial
  Synthetic oligonucleotide
cagacaacgggccggccttcgtttcccaggtaagtcaggggctagccaggatac

SEQ ID NO: 127907 - DNA, 60 bp, Artificial
  Synthetic oligonucleotide
gaccccagagctcaggacaggtagagagaatgaatagaacaataaaagagacccttacta

SEQ ID NO: 127908 - DNA, 60 bp, Artificial
  Synthetic oligonucleotide
attccgccgccccagagccccagagaggtacgtgaattcctgggaactgctgggttctgt

SEQ ID NO: 127909 - DNA, 60 bp, Artificial
  Synthetic oligonucleotide
ccagagaggtgcgtgaattcctgggaactgctgggttctgtcgcttgtggatacccggtt

SEQ ID NO: 127910 - DNA, 60 bp, Artificial
  Synthetic oligonucleotide
cggactgggattatgagacagcaccgggtagggagagtctccgaatctatcgccaggctc

SEQ ID NO: 127911 - DNA, 60 bp, Artificial
  Synthetic oligonucleotide
atgaaacggctccaggtagggagagtctccgaatctatcgccaggctctgttggcgggtc

SEQ ID NO: 127912 - DNA, 60 bp, Artificial
  Synthetic oligonucleotide
gcggggcctaatgcaccaggccaaatgagagaaccaaggggaagtgacatagcaggaact

SEQ ID NO: 127913 - DNA, 56 bp, Artificial
  Synthetic oligonucleotide
cggaggctagaaggagagagatgggtgcgagagcgtcaatattaagagggggaaaa

SEQ ID NO: 127914 - DNA, 60 bp, Artificial
  Synthetic oligonucleotide
actactctggaaaggtgaaggggcagtagtaatacaagacaatagtgatataaaagtagt

SEQ ID NO: 127915 - DNA, 60 bp, Artificial
  Synthetic oligonucleotide
gaactgaaagaagaagctttaaaacattttgatcctcgcttgctaactgcgcttggtaat

SEQ ID NO: 127916 - DNA, 60 bp, Artificial
  Synthetic oligonucleotide
tcctgtttttacagtatataagtgcttgtattctgacaattgggcactcagattctgcgg

SEQ ID NO: 127917 - DNA, 60 bp, Artificial
  Synthetic oligonucleotide
ctgtttttacagtatataagtgcttgtattctgacaattgggcactcagattctgcggtc

SEQ ID NO: 127918 - DNA, 51 bp, Artificial
  Synthetic oligonucleotide
gggcccgggaaggagaccttgacagaagggaactgtctatgggcattaaaa

SEQ ID NO: 127919 - DNA, 60 bp, Artificial
  Synthetic oligonucleotide
tcccaagaaccccaggccctaacctcactgatagaatccatcctcctcacacaccagccc

SEQ ID NO: 127920 - DNA, 60 bp, Artificial
  Synthetic oligonucleotide
ctaggtacccctacccctcttgcgatacccactccctctttaacctactccctagcagac

SEQ ID NO: 127921 - DNA, 60 bp, Artificial
  Synthetic oligonucleotide
gggtggccccgggatgggacttttgacctctctattatattacaggttaagacgaaggta

SEQ ID NO: 127922 - DNA, 60 bp, Artificial
  Synthetic oligonucleotide
cctcaacccaaccttcagccccacccaaaccgcccaaaccagttcttcctgatgagtccc

SEQ ID NO: 127923 - DNA, 60 bp, Artificial
  Synthetic oligonucleotide
tgaccccggtgggccctacgtcccctcctgcctccagttcctcctccctctccccaactt

SEQ ID NO: 127924 - DNA, 54 bp, Artificial
  Synthetic oligonucleotide
gtcctctaccccagccccacccgatctaactccccagaccccacctcagacccc

SEQ ID NO: 127925 - DNA, 60 bp, Artificial
  Synthetic oligonucleotide
ccccccgcctccgtctccggcgattggatgacccaaacggccctcccacttggcaatctt

SEQ ID NO: 127926 - DNA, 60 bp, Artificial
  Synthetic oligonucleotide
gggacgaaattacccacaaccccaaccaccaccgagcagagagcctatcgccagcctgta

SEQ ID NO: 127927 - DNA, 60 bp, Artificial
  Synthetic oligonucleotide
gggcattcagccacacattaccaggtttctagagcttggggtcctgcgaccttgccgctc

SEQ ID NO: 127928 - DNA, 60 bp, Artificial
  Synthetic oligonucleotide
tatacggacgggagcagttacatcgactcaggtacccggagggcgggagcggcggtagta

SEQ ID NO: 127929 - DNA, 60 bp, Artificial
  Synthetic oligonucleotide
cgcatgctttagaggccatagtgcggcaaccaccagaccgatggataaccaacgcacgcc

SEQ ID NO: 127930 - DNA, 60 bp, Artificial
  Synthetic oligonucleotide
tccggttaccttgaaccctgccacgttgctaccggcaccgaaagaccaacagagcgcaca

SEQ ID NO: 127931 - DNA, 60 bp, Artificial
  Synthetic oligonucleotide
cgtacctcctgggtccaaggagcgacaggaaggaaaattcacaaatggactaaccgccgc

SEQ ID NO: 127932 - DNA, 60 bp, Artificial
  Synthetic oligonucleotide
taaaagaggccctcctttccgccccggctctcgggttgccagacacctccaagcccttta

SEQ ID NO: 127933 - DNA, 60 bp, Artificial
  Synthetic oligonucleotide
cccaagtgctaaaccgggatggccagcctatccaagtcttgactgtgtccttacacgacg

SEQ ID NO: 127934 - DNA, 60 bp, Artificial
  Synthetic oligonucleotide
agtgaggggaaaagatggctcacccctgggcgaatagaaactgtggctcgcattccgccg

SEQ ID NO: 127935 - DNA, 60 bp, Artificial
  Synthetic oligonucleotide
ggtagactcgttagctgaagtagttctccaaaataggaggggactggacctactaacggc

SEQ ID NO: 127936 - DNA, 60 bp, Artificial
  Synthetic oligonucleotide
gatagtccttccccgaaaggaagccctagcaatgatccaacaaatgcacgcctggacaca

SEQ ID NO: 127937 - DNA, 60 bp, Artificial
  Synthetic oligonucleotide
ggaggctaggctagcaaaagagcaggaagcacgggaggaacgaagagatcgaaagagaga

SEQ ID NO: 127938 - DNA, 60 bp, Artificial
  Synthetic oligonucleotide
ccggagagtagccataattcattgccccgggcatcagaaaggacaagacccaattgcaac

SEQ ID NO: 127939 - DNA, 60 bp, Artificial
  Synthetic oligonucleotide
cttacgaccaacaaatatgcttacaccccagaagaccaggaagaggcaaaggccataggg

SEQ ID NO: 127940 - DNA, 60 bp, Artificial
  Synthetic oligonucleotide
gtgtggacgcgtggacaggacaggacgacacagccatgggacagacattgactactcctc

SEQ ID NO: 127941 - DNA, 59 bp, Artificial
  Synthetic oligonucleotide
actggccgcggctccttggttattgtctagtctgtgttgtctggtctgtgtcgacattg

SEQ ID NO: 127942 - DNA, 60 bp, Artificial
  Synthetic oligonucleotide
ttggctcctaacatttggtgcattggccgggaaaccgagggaaggcaagagaaccccggc

SEQ ID NO: 127943 - DNA, 60 bp, Artificial
  Synthetic oligonucleotide
gcctattgcaaagagcgcgggcactggatcaaagactgccctaagcgccctagagactca

SEQ ID NO: 127944 - DNA, 60 bp, Artificial
  Synthetic oligonucleotide
cctacctctcctgggacccctactcaccctcctactcatactaaccattgggccatgcgt

SEQ ID NO: 127945 - DNA, 60 bp, Artificial
  Synthetic oligonucleotide
ccaaacatctgcttcgagaattgggagacaaaggataccgggcatccgctaagaaggccc

SEQ ID NO: 127946 - DNA, 60 bp, Artificial
  Synthetic oligonucleotide
ggagggaccctgaaagaggaatctcaggccaattaacctggacccgcttaccccaggggt

SEQ ID NO: 127947 - DNA, 60 bp, Artificial
  Synthetic oligonucleotide
aatgcagcggagggcaggtatccgaggccccaccgaactccatccaacaggtaacttgcc

SEQ ID NO: 127948 - DNA, 58 bp, Artificial
  Synthetic oligonucleotide
tgggaactgctgggttctgtcgcttatggatacctgggttcgctgagctagccgcccc

SEQ ID NO: 127949 - DNA, 60 bp, Artificial
  Synthetic oligonucleotide
ctgcccctgtaacactttccaggactcgatgcacagttcttgttatactgaataccggca

SEQ ID NO: 127950 - DNA, 60 bp, Artificial
  Synthetic oligonucleotide
gttgacgggatcgccgcctggattcacgcatcgcacgccaaggcagccccaaaaacccct

SEQ ID NO: 127951 - DNA, 60 bp, Artificial
  Synthetic oligonucleotide
ccgaagctccagaacataaggctacagtggccatgtcgttcatagatcaggcagcatccg

SEQ ID NO: 127952 - DNA, 60 bp, Artificial
  Synthetic oligonucleotide
aaactggacaggactttgcgtccaagcctccctcctccccgacattgacatcatcccggg

SEQ ID NO: 127953 - DNA, 60 bp, Artificial
  Synthetic oligonucleotide
cctcccctcttggttcaaccgatgcagttctccaactcgtcctgtttatcttcccctttc

SEQ ID NO: 127954 - DNA, 60 bp, Artificial
  Synthetic oligonucleotide
gcatcctgaacttcaataccaccccttagccctgcccaaagtcagagatgaccttagcct

SEQ ID NO: 127955 - DNA, 60 bp, Artificial
  Synthetic oligonucleotide
ccaacccagctccccaatgaaatagatgaggggtttccccttactcgcccggactgggac

SEQ ID NO: 127956 - DNA, 60 bp, Artificial
  Synthetic oligonucleotide
accggccaggacatccacaaactagccacccatttcaggtgggagactccgtgtacgtcc

SEQ ID NO: 127957 - DNA, 60 bp, Artificial
  Synthetic oligonucleotide
tcccaaggtaatcgggtcagataacgggccggccttcgtttcccaggtaagtcaggggct

SEQ ID NO: 127958 - DNA, 60 bp, Artificial
  Synthetic oligonucleotide
ccaccctaaccgctttcatttcgcttctgtaaaaccgcttatgcgccccaccctagccgg

SEQ ID NO: 127959 - DNA, 50 bp, Artificial
  Synthetic oligonucleotide
cgggactttccagttaccatgactacggggcccggttgctgaggcaaccg

SEQ ID NO: 127960 - DNA, 60 bp, Artificial
  Synthetic oligonucleotide
aaacattaggcagggatatcaacccctctcgttacagatccccatccagcaccgggagga

SEQ ID NO: 127961 - DNA, 60 bp, Artificial
  Synthetic oligonucleotide
agacacatgggagacatggtgggcagactattggcaagccacctggattcctgagtggga

SEQ ID NO: 127962 - DNA, 60 bp, Artificial
  Synthetic oligonucleotide
gacacatgggagacatggtgggcagactattggcaagccacctggattcctgagtgggag

SEQ ID NO: 127963 - DNA, 60 bp, Artificial
  Synthetic oligonucleotide
gaaacatgggagacatggtgggcagactattggcaagccacctggattcctgagtgggag

SEQ ID NO: 127964 - DNA, 60 bp, Artificial
  Synthetic oligonucleotide
atcgcagatacactccttatgaccctgaggacccagggcaagaaaccaatgtgtccatgt

SEQ ID NO: 127965 - DNA, 60 bp, Artificial
  Synthetic oligonucleotide
ctcacccagcgggcaatggtacttgggaaatcgggagagttaaaaacctggggattggtt

SEQ ID NO: 127966 - DNA, 60 bp, Artificial
  Synthetic oligonucleotide
ggcattgaaggcggcccgagaggaacaggttacatctgagcaagcaaagttttggttggg

SEQ ID NO: 127967 - DNA, 60 bp, Artificial
  Synthetic oligonucleotide
acagagacagcagagaccctatttggaaaggaccggcccaactcctgtggaaaggtgagg

SEQ ID NO: 127968 - DNA, 60 bp, Artificial
  Synthetic oligonucleotide
acagagacagcagagaccctatttggaaaggaccggcccagctcctgtggaaaggtgagg

SEQ ID NO: 127969 - DNA, 57 bp, Artificial
  Synthetic oligonucleotide
tagcaggtagagcctgggtgttccctgctagactctcaccagtgcttggccggcact

SEQ ID NO: 127970 - DNA, 60 bp, Artificial
  Synthetic oligonucleotide
gaggatttgctgcacctcaattctctctttggaggagaccagtagtcactgctcatattg

SEQ ID NO: 127971 - DNA, 60 bp, Artificial
  Synthetic oligonucleotide
accaataagcaacaacaagacttagatcagacagaagcagtaggcttcccagtacgcccc

SEQ ID NO: 127972 - DNA, 60 bp, Artificial
  Synthetic oligonucleotide
gtgtttgtaataaagaagaaggacaaaagtaagtggcgaatgctaatagacttaagagcc

SEQ ID NO: 127973 - DNA, 60 bp, Artificial
  Synthetic oligonucleotide
accatctgtcaataatatacaaccaggagaaagatatgagttcagagtactgcctcaggg

SEQ ID NO: 127974 - DNA, 60 bp, Artificial
  Synthetic oligonucleotide
atgtcaaatgttacccagggatagaaattgcaatggctaataaggtagcagtatcagatc

SEQ ID NO: 127975 - DNA, 60 bp, Artificial
  Synthetic oligonucleotide
cagtacacatagaaggaagaaaagtccaggtgctaatagatacaggggcagatgatacca

SEQ ID NO: 127976 - DNA, 60 bp, Artificial
  Synthetic oligonucleotide
ggggattgaggacaccacctgagaagtatcaggaagacccaccctttcactggatggggt

SEQ ID NO: 127977 - DNA, 60 bp, Artificial
  Synthetic oligonucleotide
ggggctgcgccttcaaacagatctgtcataccacggtcccttggaataactctctggagg

SEQ ID NO: 127978 - DNA, 60 bp, Artificial
  Synthetic oligonucleotide
gtgcttgaccccagagaaaggatggctacccactatggcagtagcaatagcatgggaaac

SEQ ID NO: 127979 - DNA, 60 bp, Artificial
  Synthetic oligonucleotide
agcaaattatacagatgagtgggaaggagctttacagagagcacaagagcagcaggagag

SEQ ID NO: 127980 - DNA, 60 bp, Artificial
  Synthetic oligonucleotide
aggattcgctccctccgcagtgagaaggtacgagggaccggagtcggtaagacacaagag

SEQ ID NO: 127981 - DNA, 60 bp, Artificial
  Synthetic oligonucleotide
aacaggaacaaagacagcaggagcctcaggcagcaccccagacaacaccatcagttaact

SEQ ID NO: 127982 - DNA, 60 bp, Artificial
  Synthetic oligonucleotide
ggaacaaacagcacagtggaagaacagatagcatggatgaccagaccagcaggtcaagga

SEQ ID NO: 127983 - DNA, 60 bp, Artificial
  Synthetic oligonucleotide
acgccggagaatacagggccgcgaataagggcgggtgtgtggtctctgcaggcagagtac

SEQ ID NO: 127984 - DNA, 60 bp, Artificial
  Synthetic oligonucleotide
ggctgtcaggaaattttgactaggttacagcctttagaagcaacaggcagtgagaatttg

SEQ ID NO: 127985 - DNA, 60 bp, Artificial
  Synthetic oligonucleotide
tgttccctaagaggaagtagctagcttaaccgcaaaccacatcctacagcagcgcccggg

SEQ ID NO: 127986 - DNA, 60 bp, Artificial
  Synthetic oligonucleotide
ggctggctacagtacacaaagggacctggagttaggtatccaatttacttcgggttcctc

SEQ ID NO: 127987 - DNA, 60 bp, Artificial
  Synthetic oligonucleotide
gcatgggtaccagcccacaagggaataggaggaaatgaccaggtagataaattagtcagt

SEQ ID NO: 127988 - DNA, 60 bp, Artificial
  Synthetic oligonucleotide
ctatggcccacgcaggaggaagaggaagtgcagaagagaatacacgccagctgctgaaag

SEQ ID NO: 127989 - DNA, 60 bp, Artificial
  Synthetic oligonucleotide
tgtcagacaagaggggagcccacacatggtcaggtggatgcctcaatgggcatctggcag

SEQ ID NO: 127990 - DNA, 60 bp, Artificial
  Synthetic oligonucleotide
ggcagtccatgtggctagtggatatatagagaccaagatcctaccagcagaaacaggaaa

SEQ ID NO: 127991 - DNA, 60 bp, Artificial
  Synthetic oligonucleotide
gtgagagaagaagtcccaatgccaaatgtgacccaaaactttaatgcttttgataacccc

SEQ ID NO: 127992 - DNA, 58 bp, Artificial
  Synthetic oligonucleotide
gccagtaactcagatacacacagacaatggacccaactttatcagtcaaccagtcaag

SEQ ID NO: 127993 - DNA, 60 bp, Artificial
  Synthetic oligonucleotide
catggatagtaaggttaacacacaaaattccaatgaataaattagataggtggtgcagtg

SEQ ID NO: 127994 - DNA, 60 bp, Artificial
  Synthetic oligonucleotide
cagggtacatgaaacactgtaatgactctgtcatcacccagtcttgtgaaactagccgct

SEQ ID NO: 127995 - DNA, 60 bp, Artificial
  Synthetic oligonucleotide
cactcctcggcacgcttgcttgctacgcttctatagcccagaataaagtgtggtaactgc

SEQ ID NO: 127996 - DNA, 60 bp, Artificial
  Synthetic oligonucleotide
agtgtgtctgccctcatcattgactccagggaattcgggtcgagcgggctaggctcaagc

SEQ ID NO: 127997 - DNA, 60 bp, Artificial
  Synthetic oligonucleotide
ttgcgagtcctggtgagtagagcggcctgggagcccttgctcactgggatagcctagctc

SEQ ID NO: 127998 - DNA, 60 bp, Artificial
  Synthetic oligonucleotide
gggaggatctccaacaactgctgacgtggctctaccagacctttcgcaactgcatttggc

SEQ ID NO: 127999 - DNA, 60 bp, Artificial
  Synthetic oligonucleotide
agataccatcacgtgggcaggtggggagctttggcagtggctccaggggattgctgagat

SEQ ID NO: 128000 - DNA, 60 bp, Artificial
  Synthetic oligonucleotide
ccggagagcacagcagatcaggtatactcgactaccagggtaccagtacaggggcaggag

SEQ ID NO: 128001 - DNA, 60 bp, Artificial
  Synthetic oligonucleotide
gcagaattatccaaattagggaaaggacaatggggatatgtgatcagacaacctaaggga

SEQ ID NO: 128002 - DNA, 60 bp, Artificial
  Synthetic oligonucleotide
ggggaagaataccacagttcaggctcccagtggtaaaagaagaatgggacaattggtggc

SEQ ID NO: 128003 - DNA, 60 bp, Artificial
  Synthetic oligonucleotide
gctacatgcatgccaaggggtgggaggcccacagcaaaaggccagacttatggcggaggc

SEQ ID NO: 128004 - DNA, 60 bp, Artificial
  Synthetic oligonucleotide
gggaggcaatacataccccacatctggtcaagctctggtatgagctggtgtcagaaccca

SEQ ID NO: 128005 - DNA, 60 bp, Artificial
  Synthetic oligonucleotide
cccgctaaatacaacttgacattaacatgtgtaaggccaggaaataagacctaccgagcc

SEQ ID NO: 128006 - DNA, 60 bp, Artificial
  Synthetic oligonucleotide
gacaatacactacccaaaaggagatagggaagtacaaagtgtctggtttcagtgtcatgg

SEQ ID NO: 128007 - DNA, 60 bp, Artificial
  Synthetic oligonucleotide
agagctaatacaccccaccccgcttgtatgtgcaaagcctgcattctacattgccagctg

SEQ ID NO: 128008 - DNA, 60 bp, Artificial
  Synthetic oligonucleotide
agggcctgggtggtacggggagtggccagcccgctgaacctacataaaagccgatgctct

SEQ ID NO: 128009 - DNA, 60 bp, Artificial
  Synthetic oligonucleotide
gtagcagtaaaacatggaaaggtacccaccctcacacccaccacatttcacctcaagaac

SEQ ID NO: 128010 - DNA, 60 bp, Artificial
  Synthetic oligonucleotide
ccatggcatccacatgggtacaatttaatgggtctgatgaggagagggcagaagagcttc

SEQ ID NO: 128011 - DNA, 60 bp, Artificial
  Synthetic oligonucleotide
ggttgcacctgagagaagcttgctttcacagggagagagaggctaccagagggtatccta

SEQ ID NO: 128012 - DNA, 60 bp, Artificial
  Synthetic oligonucleotide
catcactatggcctgcgacacaaatccatacagataatggggctaacttcatcagtgcag

SEQ ID NO: 128013 - DNA, 60 bp, Artificial
  Synthetic oligonucleotide
cagggcaagtcaatgcagagataggggtatggcaaatggattgcacccacctggagggaa

SEQ ID NO: 128014 - DNA, 60 bp, Artificial
  Synthetic oligonucleotide
ggatagcacactggcaggtctcgtggatacctaccatagaagcagtgcataccacccacc

SEQ ID NO: 128015 - DNA, 60 bp, Artificial
  Synthetic oligonucleotide
aaacaggcaggcacactgaacatggtgcaaggagccaagggagccaggggaaggggcaac

SEQ ID NO: 128016 - DNA, 60 bp, Artificial
  Synthetic oligonucleotide
gaggaagcacaggcagaattggcagaaaatcaggagatccttcaacagacagtccagggg

SEQ ID NO: 128017 - DNA, 60 bp, Artificial
  Synthetic oligonucleotide
acgaccagtcagaccagtagagatagaagggcaggtggtgtcaatgctgctcgacaccgg

SEQ ID NO: 128018 - DNA, 60 bp, Artificial
  Synthetic oligonucleotide
gcggcctgggagccctcggaactaggtatagcggcctgggagcccttgcctaggagtact

SEQ ID NO: 128019 - DNA, 60 bp, Artificial
  Synthetic oligonucleotide
tgggaagggtggcagacttcctcagatcgagcaggcatagagagatcctgcgggagggga

SEQ ID NO: 128020 - DNA, 60 bp, Artificial
  Synthetic oligonucleotide
ccgccgtcttactgtggagaggtgaaggagcagtagtcatcaaaacagactcaggagagg

SEQ ID NO: 128021 - DNA, 60 bp, Artificial
  Synthetic oligonucleotide
tttggaatcaagggatgggtgtcaaaagatcatagaggtcatcctccccttagaaccagc

SEQ ID NO: 128022 - DNA, 60 bp, Artificial
  Synthetic oligonucleotide
aaagaatcacaagcgcaggcagctagtgccaactacccagtcataaggaacgcacaaggg

SEQ ID NO: 128023 - DNA, 60 bp, Artificial
  Synthetic oligonucleotide
gctgttccaatttgttaaccacacagagataaatgaaagcaacatccatactgtaacaac

SEQ ID NO: 128024 - DNA, 60 bp, Artificial
  Synthetic oligonucleotide
cccgcttggccctgaagtcaggcttacaactagaccaaatgcagcaggaggagcggaaga

SEQ ID NO: 128025 - DNA, 60 bp, Artificial
  Synthetic oligonucleotide
ccagaagcgccagaaggaacagaaggagacggtggaagcggaagcagagacagatccgtg

SEQ ID NO: 128026 - DNA, 60 bp, Artificial
  Synthetic oligonucleotide
gcaacacatcatacatcacccaggcatgtgagaagagcagcttccaaccggttccgatac

SEQ ID NO: 128027 - DNA, 60 bp, Artificial
  Synthetic oligonucleotide
gcccttctgaatctctggggatgtgcaaacaggcagatttgtcacactagagtgccatgg

SEQ ID NO: 128028 - DNA, 60 bp, Artificial
  Synthetic oligonucleotide
ccaccactcttctgtgcatcagatgccaacatagcaaatagagaaccagggaatgtatgg

SEQ ID NO: 128029 - DNA, 59 bp, Artificial
  Synthetic oligonucleotide
aaaatgaaatgtgcgaaagtaacgaattacaccagatctacgggagggaatagcaccgg

SEQ ID NO: 128030 - DNA, 60 bp, Artificial
  Synthetic oligonucleotide
ggattatgtggacagattctttaaatgtctaagggcagagcagtcagaccaagcggtcaa

SEQ ID NO: 128031 - DNA, 60 bp, Artificial
  Synthetic oligonucleotide
caatgcaggcctcaggaacccaacaggatcagacatagcaggagtatcatctaccccaca

SEQ ID NO: 128032 - DNA, 60 bp, Artificial
  Synthetic oligonucleotide
ccacaggacagggaacaggattacatctggtattctacatacttgagccccacactggcc

SEQ ID NO: 128033 - DNA, 60 bp, Artificial
  Synthetic oligonucleotide
gtaccatcagaggttctcccagagcaaaatcagaataccattgacacaaaatacccggga

SEQ ID NO: 128034 - DNA, 60 bp, Artificial
  Synthetic oligonucleotide
tagcttctcagccacaagaatccacttcaccattagtagagcaaataatacaggagctac

SEQ ID NO: 128035 - DNA, 60 bp, Artificial
  Synthetic oligonucleotide
ggccttggaggacataacccagcagatgctaaaagtaggccaaatagaggaaataggacc

SEQ ID NO: 128036 - DNA, 60 bp, Artificial
  Synthetic oligonucleotide
ggaagtacacagccttttcgctgcctcaggtaaacaacttgggaccagcaagaagatatc

SEQ ID NO: 128037 - DNA, 60 bp, Artificial
  Synthetic oligonucleotide
gcaggcatgactttctattcgcagcttatagtagatggcgatacacgcagagcctattgc

SEQ ID NO: 128038 - DNA, 60 bp, Artificial
  Synthetic oligonucleotide
gaaggagccagtaaaagacctgtgatagaagagcatgagcgtacctgcccggtgcgtccg

SEQ ID NO: 128039 - DNA, 60 bp, Artificial
  Synthetic oligonucleotide
gagccctcgcttgcttacagcatgggatccaagagctccaaacagccagcacagcagtcc

SEQ ID NO: 128040 - DNA, 60 bp, Artificial
  Synthetic oligonucleotide
gagtggggaataataccaggatggctgatgtatacagatggcccagggactcggtatccc

SEQ ID NO: 128041 - DNA, 60 bp, Artificial
  Synthetic oligonucleotide
cgatccactttccatggcacccacggaagtgcaaagaaggcctgtcccacatgtgcatgc

SEQ ID NO: 128042 - DNA, 60 bp, Artificial
  Synthetic oligonucleotide
ggcactccagagtggtcccaaccaccatgcgccaggcacaagaagccatgtgggaagtaa

SEQ ID NO: 128043 - DNA, 60 bp, Artificial
  Synthetic oligonucleotide
gcaggcgtttcagaaaacgatcgagagctgattcgagcctgccgagccattcagatcctg

SEQ ID NO: 128044 - DNA, 60 bp, Artificial
  Synthetic oligonucleotide
atgaataatggatccatcagtagaggagttgccaaaggaacaacgaccgggtgccgcacc

SEQ ID NO: 128045 - DNA, 60 bp, Artificial
  Synthetic oligonucleotide
aatttgccaggaaaatggaaaccaaaaatgatagggggaattggaggttttattaaggta

SEQ ID NO: 128046 - DNA, 60 bp, Artificial
  Synthetic oligonucleotide
cagagaattaaataagcaaacagaagatttggcggaagctcagttaggactcccgcatcc

SEQ ID NO: 128047 - DNA, 60 bp, Artificial
  Synthetic oligonucleotide
cagggttaatatatgcagaaagagtaaaaggggaaacgggacaagaatttaggatgcaag

SEQ ID NO: 128048 - DNA, 60 bp, Artificial
  Synthetic oligonucleotide
aattaaataagcaaacagaagatttggcggaggcacaattaggtttgccgcatccagggg

SEQ ID NO: 128049 - DNA, 60 bp, Artificial
  Synthetic oligonucleotide
aaatctctagcagtggcgcccgaacagggacgcgaaagcgaaagtgagaccagagaagct

SEQ ID NO: 128050 - DNA, 60 bp, Artificial
  Synthetic oligonucleotide
gatcctgcagggcaacccttgcctattcctcaatgggaacccattcctaatcggactgca

SEQ ID NO: 128051 - DNA, 60 bp, Artificial
  Synthetic oligonucleotide
ggccttagatctgagcttggggaaagaaatacatgtatattcggctattgcctcaatgac

SEQ ID NO: 128052 - DNA, 60 bp, Artificial
  Synthetic oligonucleotide
cggctgcgcccgtgagagatctgacttccaggctgtggtaagacctaatttggacttgac

SEQ ID NO: 128053 - DNA, 60 bp, Artificial
  Synthetic oligonucleotide
cgtggggctcgagttttcttctgaccaagataactaagaggggagtgagaaggctcttgc

SEQ ID NO: 128054 - DNA, 60 bp, Artificial
  Synthetic oligonucleotide
ctccgagtgagtgggaacctgtctccaacctgggcttaccttccagatcactaataaggg

SEQ ID NO: 128055 - DNA, 60 bp, Artificial
  Synthetic oligonucleotide
ggagacagtggaattcttggggttttccatttcccaaaatggcagaggactcacagactc

SEQ ID NO: 128056 - DNA, 60 bp, Artificial
  Synthetic oligonucleotide
cagtgagataaagcggctcttaacgaaactgttggcaggacggcccacaaagtggtatcc

SEQ ID NO: 128057 - DNA, 60 bp, Artificial
  Synthetic oligonucleotide
gtccaggtgaattttacttctataccacagggcttgttcctggaacctcacccaaaaccc

SEQ ID NO: 128058 - DNA, 60 bp, Artificial
  Synthetic oligonucleotide
gcagtatttaggttacaatggaagggagctattgagagcccaggtcccattttggtgtgg

SEQ ID NO: 128059 - DNA, 60 bp, Artificial
  Synthetic oligonucleotide
atttcgccctaccttatggatggagccttatggacccgctaggtaatcgtttcaggtccc

SEQ ID NO: 128060 - DNA, 60 bp, Artificial
  Synthetic oligonucleotide
tgggtgctgggagacccagatgcgactgcccggttttggacaggtgatgataaaggccca

SEQ ID NO: 128061 - DNA, 60 bp, Artificial
  Synthetic oligonucleotide
tatcccctcaggcccaatcctcaacagccacaacgatacggacaagaacagaaccgtggg

SEQ ID NO: 128062 - DNA, 60 bp, Artificial
  Synthetic oligonucleotide
ggctgcgccgtgagagatctgacttccaggctgtggtaagacttaatttggacttgactc

SEQ ID NO: 128063 - DNA, 60 bp, Artificial
  Synthetic oligonucleotide
tccaagaggcactggaggaggaacacccggacagcatacactcggtggagaccaggacat

SEQ ID NO: 128064 - DNA, 60 bp, Artificial
  Synthetic oligonucleotide
cctggacgcagtgataacccactggaaatggcagaaccagtacagccctggtggaccgac

SEQ ID NO: 128065 - DNA, 60 bp, Artificial
  Synthetic oligonucleotide
aaggcccaaactgccaacgcaaccgtgaaggccctcacacatctcactggcactgctgtc

SEQ ID NO: 128066 - DNA, 60 bp, Artificial
  Synthetic oligonucleotide
gggtagccaggccagcacagctgcgtccgaaatggaggaagcccacacctattaagaagg

SEQ ID NO: 128067 - DNA, 60 bp, Artificial
  Synthetic oligonucleotide
cagaggaatcgtggcagacagaacgcccagactccacgtcaagagggaaacagattacaa

SEQ ID NO: 128068 - DNA, 60 bp, Artificial
  Synthetic oligonucleotide
gaccttactcgtgaagaacaactcgcagtcctcaaagaggtccgtgatggtcttctggac

SEQ ID NO: 128069 - DNA, 60 bp, Artificial
  Synthetic oligonucleotide
cagtgaatgctcttacagttcgacatcccgggctcgccttggaacccttggaatgtgggt

SEQ ID NO: 128070 - DNA, 60 bp, Artificial
  Synthetic oligonucleotide
gtggagatgaagatcgagaagagaaaagtacaatgtgaagtaatagctactgccctggac

SEQ ID NO: 128071 - DNA, 60 bp, Artificial
  Synthetic oligonucleotide
gcaacaaactcttcccagacgcaacaaccaaccacctagacaacagccgcaacggcgtca

SEQ ID NO: 128072 - DNA, 60 bp, Artificial
  Synthetic oligonucleotide
ctgcaagtatcgcttatgctcagaatcaggaagtagcttgcgtcaccagttatagagaaa

SEQ ID NO: 128073 - DNA, 60 bp, Artificial
  Synthetic oligonucleotide
gcgtctgctgtgagtacaatcgggaccttactggagaaagctgcaggaactctcttcggg

SEQ ID NO: 128074 - DNA, 60 bp, Artificial
  Synthetic oligonucleotide
ccccacaaataccacaactgagagtccgacttcctcatttagttgggatcattgccaaac

SEQ ID NO: 128075 - DNA, 60 bp, Artificial
  Synthetic oligonucleotide
ggtgatggaagtggaaccttgcggcaacctgacaggatctgattgtccagtcttggcaga

SEQ ID NO: 128076 - DNA, 60 bp, Artificial
  Synthetic oligonucleotide
gccaactcgctcatgatgggcccggatctgcccatctgggacgatcggcactcctattaa

SEQ ID NO: 128077 - DNA, 60 bp, Artificial
  Synthetic oligonucleotide
gagtcatagctattttagtaagttagcgcttgggaactgagagaacaaggttcggatccc

SEQ ID NO: 128078 - DNA, 60 bp, Artificial
  Synthetic oligonucleotide
cgcattcggcagggatgggcatcatacaggctaagtttgaaccggactttagaattgtac

SEQ ID NO: 128079 - DNA, 60 bp, Artificial
  Synthetic oligonucleotide
acgtgatacatgagccaggccaccaaccagcagaagcctctccccatgctcagggcaatg

SEQ ID NO: 128080 - DNA, 60 bp, Artificial
  Synthetic oligonucleotide
gccatatccgaggctcagtagaaagacagtacctcgcctgtgtgggttcgaggtcaggcg

SEQ ID NO: 128081 - DNA, 60 bp, Artificial
  Synthetic oligonucleotide
gtgaaatgaacacacctgtataccctgtccccaaggctgatggacgctggaggatggtgt

SEQ ID NO: 128082 - DNA, 60 bp, Artificial
  Synthetic oligonucleotide
ccgttcaggctaggctagacccacttcccgataatgcgacacgaattgtgatgatttcac

SEQ ID NO: 128083 - DNA, 60 bp, Artificial
  Synthetic oligonucleotide
gcgcaggcgccgtcgggttccagctgctcgactttacgcaactacagacagtagtgaaga

SEQ ID NO: 128084 - DNA, 60 bp, Artificial
  Synthetic oligonucleotide
caagctctatggcaatgttgggagaaccaggtcggacatcggcgtattgagccacataag

SEQ ID NO: 128085 - DNA, 60 bp, Artificial
  Synthetic oligonucleotide
agtattgataacttgaaacctgcggcacaccagaaacttgcacaaactccggattcagca

SEQ ID NO: 128086 - DNA, 60 bp, Artificial
  Synthetic oligonucleotide
gcctgttactggggttcggaggatggctcatcaagctaagtaaggagctccctgaagcca

SEQ ID NO: 128087 - DNA, 60 bp, Artificial
  Synthetic oligonucleotide
gagtacacgtctatggttgcaggtattggagaacctattctcaaacagcccataccccag

SEQ ID NO: 128088 - DNA, 60 bp, Artificial
  Synthetic oligonucleotide
cctcttacagatgaaccctaaaatggagagtgtttgcctaccggactttgatccaccggg

SEQ ID NO: 128089 - DNA, 60 bp, Artificial
  Synthetic oligonucleotide
gggcatcgttggaaggagtgcgggaattgtattccacaggatggctcctccgatgacgct

SEQ ID NO: 128090 - DNA, 60 bp, Artificial
  Synthetic oligonucleotide
cgcaagttagaaaccttcctgaatccacagactggctgccttaaccccgaggcactccca

SEQ ID NO: 128091 - DNA, 60 bp, Artificial
  Synthetic oligonucleotide
tccgttgcctgctccgcctattggacctcctccgcctgctgctcctgcacctgctccagg

SEQ ID NO: 128092 - DNA, 60 bp, Artificial
  Synthetic oligonucleotide
taacttgggaccagggatccatgcctatggaccagccatgccctccaggcaggagagggt

SEQ ID NO: 128093 - DNA, 60 bp, Artificial
  Synthetic oligonucleotide
ccagttacacaggctgagattgccctactaaatggacaacatctggaggaagagataact

SEQ ID NO: 128094 - DNA, 60 bp, Artificial
  Synthetic oligonucleotide
agtcgcggacgtgggagaagcagccaaggaacaaacaacacaggaagttctgcggtccac

SEQ ID NO: 128095 - DNA, 60 bp, Artificial
  Synthetic oligonucleotide
gctgctcctgcacctgctccagggcctatgccagctcctcaacaccttccaatcacacat

SEQ ID NO: 128096 - DNA, 60 bp, Artificial
  Synthetic oligonucleotide
cttgaaggacataccaaatgttcaggtatatgtggatgacgtctatgtgagctcagcgac

SEQ ID NO: 128097 - DNA, 60 bp, Artificial
  Synthetic oligonucleotide
gctacgtggtacatattccagggggaaaagaatggccaactcgggagataatacaagacc

SEQ ID NO: 128098 - DNA, 60 bp, Artificial
  Synthetic oligonucleotide
atctagccgcaggaatacatctcctccaggatcatatcgtcaccttaatggaagcaacac

SEQ ID NO: 128099 - DNA, 60 bp, Artificial
  Synthetic oligonucleotide
cgacctacctgcagaccgagccttctccctcctgactgacttctcgcttccagccagtta

SEQ ID NO: 128100 - DNA, 57 bp, Artificial
  Synthetic oligonucleotide
cccctgtggagcggcttgaacggcttccttccatatttgctacccttgttaggcccc

SEQ ID NO: 128101 - DNA, 60 bp, Artificial
  Synthetic oligonucleotide
gtagacgacttacttattgcggctgatacacaagccgcatgcctgagtgccacccgagac

SEQ ID NO: 128102 - DNA, 60 bp, Artificial
  Synthetic oligonucleotide
ccgggatgggacaggcaggatcgaaggggcttttaacccctctagagtgcattctgaaga

SEQ ID NO: 128103 - DNA, 60 bp, Artificial
  Synthetic oligonucleotide
aaactccaagaggaccttatcgcgaggaaacgtgcactgtacgacaaccccctgtggaac

SEQ ID NO: 128104 - DNA, 60 bp, Artificial
  Synthetic oligonucleotide
taagaagcacgacttccagcagttggggccacggtgggacggaccctacactgtagtcct

SEQ ID NO: 128105 - DNA, 60 bp, Artificial
  Synthetic oligonucleotide
gggttagacctattgactgccgaacaaggaggaatatgtctcgcactccaggagaagtgt

SEQ ID NO: 128106 - DNA, 60 bp, Artificial
  Synthetic oligonucleotide
gagtgcgcttcaagcagactgcggccctcaatccggctaccctgttacccgagacagacg

SEQ ID NO: 128107 - DNA, 60 bp, Artificial
  Synthetic oligonucleotide
tatcaggcttatcggacctggtcccccatagatccaagggcacccgagaatcaggctgcc

SEQ ID NO: 128108 - DNA, 60 bp, Artificial
  Synthetic oligonucleotide
agccctccccacacccgaagtggattagagttcggagcacaagggccgtcagggatgtac

SEQ ID NO: 128109 - DNA, 52 bp, Artificial
  Synthetic oligonucleotide
aggctggaccctgtggcggctggctggccccggtgcctccgagccattgcgg

SEQ ID NO: 128110 - DNA, 60 bp, Artificial
  Synthetic oligonucleotide
cctcctccctcaggctttgcttcgggcacggtgtacccccgggagggagggattgtcacc

SEQ ID NO: 128111 - DNA, 60 bp, Artificial
  Synthetic oligonucleotide
cccagttcccagctactcggcccgactgggatcctaacacagggagaggaaacgacaatc

SEQ ID NO: 128112 - DNA, 60 bp, Artificial
  Synthetic oligonucleotide
tcaattcctggatgagagacctctctctccggccccagcccctccacctccatatcctga

SEQ ID NO: 128113 - DNA, 60 bp, Artificial
  Synthetic oligonucleotide
tttgggaggatcggagtggcgggacgctgccgggaagctccacctccgctcagcagggga

SEQ ID NO: 128114 - DNA, 60 bp, Artificial
  Synthetic oligonucleotide
tagaagaaacaggcggggcggccaagggagtgctcacacaggccctcggtccatggaaaa

SEQ ID NO: 128115 - DNA, 60 bp, Artificial
  Synthetic oligonucleotide
agaagcgttccagagcttgaaactagccctcacacagccaccagctttggccctgccctc

SEQ ID NO: 128116 - DNA, 60 bp, Artificial
  Synthetic oligonucleotide
ctaaagttctgttagctagccaaaaagttaatcccaggcggcccgtgctcccctcagccc

SEQ ID NO: 128117 - DNA, 60 bp, Artificial
  Synthetic oligonucleotide
cgacctcaaagctcgggacaggtagaaaggatgaaccgaaccctgaaggagaccatcgcc

SEQ ID NO: 128118 - DNA, 60 bp, Artificial
  Synthetic oligonucleotide
cttgctgaccgcggtctggctacctaaacgggtggctgtgatgcattgcaagggacacca

SEQ ID NO: 128119 - DNA, 60 bp, Artificial
  Synthetic oligonucleotide
ccgatgcaccggatatgccagataccgaaacccctcagtattcgcatgtagaggaggctc

SEQ ID NO: 128120 - DNA, 60 bp, Artificial
  Synthetic oligonucleotide
aagggcgtcttgtggacctagggaggggactagtgactcattcctttctggtgattcctg

SEQ ID NO: 128121 - DNA, 60 bp, Artificial
  Synthetic oligonucleotide
gccgttatgcattcgccactctacacgtccatgggatgatctacaaggaaaggggactgt

SEQ ID NO: 128122 - DNA, 60 bp, Artificial
  Synthetic oligonucleotide
caaaccttgcttaagtccctacaggccctccaagctactaggtctctggctcgggcagcg

SEQ ID NO: 128123 - DNA, 60 bp, Artificial
  Synthetic oligonucleotide
ccctcccaattggaacatcagcccagaaagcagaattgatcgcactaacaaaggccctgg

SEQ ID NO: 128124 - DNA, 60 bp, Artificial
  Synthetic oligonucleotide
cccccaccgcggtaaaggtcgctgggaagaccccgtggatccactactctcgactcaaga

SEQ ID NO: 128125 - DNA, 60 bp, Artificial
  Synthetic oligonucleotide
atcagggcagctaacctggacaaggctacctcagggttttaagaactcacccaccctttt

SEQ ID NO: 128126 - DNA, 60 bp, Artificial
  Synthetic oligonucleotide
gcaacccaccgggtcagtagatgtcaactgctatgcaggggaagcagacaataggactgg

SEQ ID NO: 128127 - DNA, 60 bp, Artificial
  Synthetic oligonucleotide
cctgcgcgaaactattcacaaattcagagcagcgggcatcctgagacccgtccactcccc

SEQ ID NO: 128128 - DNA, 60 bp, Artificial
  Synthetic oligonucleotide
gccgaactcaggctattcttcagataccagtaccgaaaaccaaaaggcaagtgcgcgaat

SEQ ID NO: 128129 - DNA, 60 bp, Artificial
  Synthetic oligonucleotide
tactcgcccaggagagtagagcggagagaggaagtaagaagacgcctccgggtaagggac

SEQ ID NO: 128130 - DNA, 60 bp, Artificial
  Synthetic oligonucleotide
ggctcatattgttcctgaccctcggcccgtgcatcatgaagaccctgactcgcattatcc

SEQ ID NO: 128131 - DNA, 60 bp, Artificial
  Synthetic oligonucleotide
gagatcgaactatcatactgagccaatggttgtaaagggcagatgctatcctccaatgag

SEQ ID NO: 128132 - DNA, 60 bp, Artificial
  Synthetic oligonucleotide
aggttcggcagggggcggacgaaagccctacagcttacctggagagactctatcaggctt

SEQ ID NO: 128133 - DNA, 60 bp, Artificial
  Synthetic oligonucleotide
cccccgaaatacggacagaagggaaactattggtaacggctcccctggaagaggaatacc

SEQ ID NO: 128134 - DNA, 60 bp, Artificial
  Synthetic oligonucleotide
cctccgtacagtatcaccctttagccctgccccgaccaagaggagtagatctggatcccc

SEQ ID NO: 128135 - DNA, 60 bp, Artificial
  Synthetic oligonucleotide
cgaacgaacacgagatcggactatcatactgagccaatggttgtaaagggcagatgctac

SEQ ID NO: 128136 - DNA, 60 bp, Artificial
  Synthetic oligonucleotide
gtcccataacttggagagtttgctgcgatcccctcctgacaagtggttgaccaatgctcg

SEQ ID NO: 128137 - DNA, 60 bp, Artificial
  Synthetic oligonucleotide
aacgcagcagttgtgtgaggccctaaatgtctcttggaaactccactgtgcgtaccgacc

SEQ ID NO: 128138 - DNA, 60 bp, Artificial
  Synthetic oligonucleotide
acactttagattctctgacctccacccgccccgacctgacggatcagcccctggcacaag

SEQ ID NO: 128139 - DNA, 60 bp, Artificial
  Synthetic oligonucleotide
ctccgagttagtagctattgcccagaaggttttcgaccaacgggaagacccagccaaggc

SEQ ID NO: 128140 - DNA, 60 bp, Artificial
  Synthetic oligonucleotide
cccaggtggtggttaagcatctaattcatgatattatccccaggtttgggttaccggtcc

SEQ ID NO: 128141 - DNA, 60 bp, Artificial
  Synthetic oligonucleotide
cgggtaagggacgcccgcctttggggaaaaaccaatgcgcgtactgtaaggaggagggac

SEQ ID NO: 128142 - DNA, 60 bp, Artificial
  Synthetic oligonucleotide
tgggtggtggcaccttcctgacgggcgcctcttgcttcccagagcagtggggagaaaggt

SEQ ID NO: 128143 - DNA, 60 bp, Artificial
  Synthetic oligonucleotide
aaaaacttattttactgccatcctacagaaaacaaagctaggttcgtatgaagacgggcc

SEQ ID NO: 128144 - DNA, 60 bp, Artificial
  Synthetic oligonucleotide
cccccggggttggcatccacacaagcccccattcatgtccagctattaagtaccgcccta

SEQ ID NO: 128145 - DNA, 60 bp, Artificial
  Synthetic oligonucleotide
cctacacggcgctccctaataaatggatagggctgtgcatactggcatcaatcgtacccg

SEQ ID NO: 128146 - DNA, 60 bp, Artificial
  Synthetic oligonucleotide
tccaggctctttcagggaccatcaatgacctacaggaccagattgactccctggctgagg

SEQ ID NO: 128147 - DNA, 60 bp, Artificial
  Synthetic oligonucleotide
tctacacacaccagcctacctgggatgattgccagcaactcctccgtaccctgttcacga

SEQ ID NO: 128148 - DNA, 60 bp, Artificial
  Synthetic oligonucleotide
ctcgactcaagaaagctcctgacaaccaagaagaatggactgtctcaccaacctccgatc

SEQ ID NO: 128149 - DNA, 60 bp, Artificial
  Synthetic oligonucleotide
gagcctatcccactcccatccatcgagtacaccgctaggcgtcataagagggcagtccag

SEQ ID NO: 128150 - DNA, 60 bp, Artificial
  Synthetic oligonucleotide
aacagatgcagcagtaaagaattggatgactcaaacactgctgattcaaaatgctaaccc

SEQ ID NO: 128151 - DNA, 60 bp, Artificial
  Synthetic oligonucleotide
acagatgcagcagtaaagaattggatgactcaaacactgctgattcaaaatgctaaccca

SEQ ID NO: 128152 - DNA, 60 bp, Artificial
  Synthetic oligonucleotide
cagatccagcagtaaagaattggatgactcaaacactgctgattcaaaatgctaacccag

SEQ ID NO: 128153 - DNA, 60 bp, Artificial
  Synthetic oligonucleotide
cagatccagcagtgaagaattggatgactcaaacactgctgattcaaaatgctaacccag

SEQ ID NO: 128154 - DNA, 60 bp, Artificial
  Synthetic oligonucleotide
gacagatgcagcagtaaagaattggatgactcaaacactgctgattcaaaatgctaaccc

SEQ ID NO: 128155 - DNA, 60 bp, Artificial
  Synthetic oligonucleotide
ggaactgtaccagtaaaattaaagccaggaatggatggcccaaaagttaaacaatggcca

SEQ ID NO: 128156 - DNA, 60 bp, Artificial
  Synthetic oligonucleotide
ccggcatctactttttgcgcctgcgtctgaatctgtactagttagctaactagatctgta

SEQ ID NO: 128157 - DNA, 57 bp, Artificial
  Synthetic oligonucleotide
accagcaaagctcctctggaaaggtgaaggggcagtagtaatacaagataatagtga

SEQ ID NO: 128158 - DNA, 60 bp, Artificial
  Synthetic oligonucleotide
cctcagatcacgtagactgaggcgaaaatctctagcagtggcgcccgaacagggaccgga

SEQ ID NO: 128159 - DNA, 60 bp, Artificial
  Synthetic oligonucleotide
gtaggaaaattaaattgggcaagtcaaatctatgcagggattaaggtaaagcaactgtgt

SEQ ID NO: 128160 - DNA, 60 bp, Artificial
  Synthetic oligonucleotide
cggacccgtggtggaactgacgagttctgaacacccggccgcaaccctgggagacgtccc

SEQ ID NO: 128161 - DNA, 60 bp, Artificial
  Synthetic oligonucleotide
catgaatcactgtaacacttctgttatccaagagtcttgtgacaaacattattgggatgc

SEQ ID NO: 128162 - DNA, 60 bp, Artificial
  Synthetic oligonucleotide
ccagatctgagcctgggagctctctggctgactagggaacccactgcttaagcctcaata

SEQ ID NO: 128163 - DNA, 60 bp, Artificial
  Synthetic oligonucleotide
agaggtaggaaccacctagttctctatcgccagttgctcctagcgggtctccagaccgcg

SEQ ID NO: 128164 - DNA, 54 bp, Artificial
  Synthetic oligonucleotide
accagcaaaacttctctggaaaggtgaaggggcagtagtaatacaagacaatag

SEQ ID NO: 128165 - DNA, 60 bp, Artificial
  Synthetic oligonucleotide
caggaaattcgtgcctctttataccaaccatccacccctcctgcctcctcacgttcctgg

SEQ ID NO: 128166 - DNA, 60 bp, Artificial
  Synthetic oligonucleotide
ggcttcttccctgattggcagaactacacaccagggccaggggtcagatacccactgtgt

SEQ ID NO: 128167 - DNA, 60 bp, Artificial
  Synthetic oligonucleotide
ttccaattagtcccattgaaactgtaccagtaaaattaaagccaggaatggatggcccaa

SEQ ID NO: 128168 - DNA, 55 bp, Artificial
  Synthetic oligonucleotide
cggaggctagaaggagagagatgggtgcgagagcgtcagtattaagaggggaaaa

SEQ ID NO: 128169 - DNA, 60 bp, Artificial
  Synthetic oligonucleotide
gagactcccacagaggatagggccaaaatgggagcgaggcactcggcgatgctgacaggt

SEQ ID NO: 128170 - DNA, 60 bp, Artificial
  Synthetic oligonucleotide
tttccagtcaccatgactacggggcccggttgctgaggcaatcggggcggactcgtgggt

SEQ ID NO: 128171 - DNA, 60 bp, Artificial
  Synthetic oligonucleotide
ggatagggcagaatgggagcgaggcactcggcgatgctgacaggtactaagttggatagg

SEQ ID NO: 128172 - DNA, 57 bp, Artificial
  Synthetic oligonucleotide
agcgcaggattggacctctgtgccacctcctatacagtattaactcccgagatgggg

SEQ ID NO: 128173 - DNA, 60 bp, Artificial
  Synthetic oligonucleotide
gcagcgcgggattggacctctgtgccacctcctatacagtattaacccctgagatgggag

SEQ ID NO: 128174 - DNA, 54 bp, Artificial
  Synthetic oligonucleotide
ggacctctgtgccacctcctatacagtattaactcccgaaatgggagttcaaac

SEQ ID NO: 128175 - DNA, 60 bp, Artificial
  Synthetic oligonucleotide
agcgcaggattggacctctgtgccacctcctatacagtattaactcccgagatgggggtt

SEQ ID NO: 128176 - DNA, 60 bp, Artificial
  Synthetic oligonucleotide
ccccaagccttgatttgaactaaccactcagctcgcttctcgcttctgtacccgcgcttt

SEQ ID NO: 128177 - DNA, 60 bp, Artificial
  Synthetic oligonucleotide
ccgaagcaggaaaatccctagcagattggcgcccgaacaggacttgaaggagagtgagag

SEQ ID NO: 128178 - DNA, 60 bp, Artificial
  Synthetic oligonucleotide
acgattacaggcctgtccaggatctgagagaagtcaacaagcgggtggaagacatccacc

SEQ ID NO: 128179 - DNA, 55 bp, Artificial
  Synthetic oligonucleotide
tataggcctgtccaggatctgagagaagtcaacaagcgggtggaagacatccacc

SEQ ID NO: 128180 - DNA, 60 bp, Artificial
  Synthetic oligonucleotide
atgattataggcctgtccaggatctgagagaagtcaacaagcgggtggaagacatccacc

SEQ ID NO: 128181 - DNA, 60 bp, Artificial
  Synthetic oligonucleotide
acgattataggcctgtccaggatctgagagaagtcaacaagcgggtggaagacatccacc

SEQ ID NO: 128182 - DNA, 60 bp, Artificial
  Synthetic oligonucleotide
gggactaatgattataggcctgtccaggatctgagagaagtcaacaagcgggtggaagac

SEQ ID NO: 128183 - DNA, 60 bp, Artificial
  Synthetic oligonucleotide
attgacctggaccagactcccacagggtttcaaaaacagtcccaccctgtttgatgaggc

SEQ ID NO: 128184 - DNA, 60 bp, Artificial
  Synthetic oligonucleotide
agaattggatgactcaaacactgctgattcaaaatgctaacccagattgcaagctggtgc

SEQ ID NO: 128185 - DNA, 60 bp, Artificial
  Synthetic oligonucleotide
gggcttaggtaaacagcatcaaggtatcgtcttgccccttgatttaaaacctaatcaaga

SEQ ID NO: 128186 - DNA, 60 bp, Artificial
  Synthetic oligonucleotide
ggagtgtttgggcctttacctccagggacagttggattacttttgggacgcagcagtgcg

SEQ ID NO: 128187 - DNA, 58 bp, Artificial
  Synthetic oligonucleotide
actgcggacgttcttactaaacaagtgtttttccaatcagctattgatgcagcccgaa

SEQ ID NO: 128188 - DNA, 60 bp, Artificial
  Synthetic oligonucleotide
gcatttgtgctgacattggaccctcctacatgcaaggcattgctatggcagcagcattac

SEQ ID NO: 128189 - DNA, 60 bp, Artificial
  Synthetic oligonucleotide
cgcatttgtgctgatattggaccctcctacatgcaaggcattgctatggcagcagcatta

SEQ ID NO: 128190 - DNA, 60 bp, Artificial
  Synthetic oligonucleotide
acccttgccacaggagtgtttgggcctttacctccagggacagctggattgctcttgggg

SEQ ID NO: 128191 - DNA, 60 bp, Artificial
  Synthetic oligonucleotide
ctgtgccgatatcgggccctcctacatgcaaggcattgctatggcagcagcattacaagg

SEQ ID NO: 128192 - DNA, 57 bp, Artificial
  Synthetic oligonucleotide
aaaaccacttgtacgatggaaggatccacttaccaatctgtggtatggaccagaccc

SEQ ID NO: 128193 - DNA, 57 bp, Artificial
  Synthetic oligonucleotide
aaaaccacttgtgcgatggaaggatccacttaccaatctgtggtatgggccagaccc

SEQ ID NO: 128194 - DNA, 60 bp, Artificial
  Synthetic oligonucleotide
agaacgatcctcatgtaaaaaaccacttgtacgatggaaggatccacttaccaatctgtg

SEQ ID NO: 128195 - DNA, 57 bp, Artificial
  Synthetic oligonucleotide
aaaaccacttgtacgatggaaggatccacttaccaatctgtggtatgggccagaccc

SEQ ID NO: 128196 - DNA, 60 bp, Artificial
  Synthetic oligonucleotide
tccgagcccggacgagggggattgtacatttactggcctttcatttggtgcgttggccgg

SEQ ID NO: 128197 - DNA, 60 bp, Artificial
  Synthetic oligonucleotide
tgttgtaaaccccataaaagctgtcccgattccgcactcggggccgcagtcctctacccc

SEQ ID NO: 128198 - DNA, 60 bp, Artificial
  Synthetic oligonucleotide
gacctggttcactgatgggagcagctatgtagtggaaggtaagaggatggctggggcggc

SEQ ID NO: 128199 - DNA, 60 bp, Artificial
  Synthetic oligonucleotide
cacgtttgctccaccagccgctctcaaccctgccactcttctgcctgaagagactgatga

SEQ ID NO: 128200 - DNA, 60 bp, Artificial
  Synthetic oligonucleotide
ggccggcgtttctgttctgagtgactgttttcggtgctgcgcgctttcggtttgcagctg

SEQ ID NO: 128201 - DNA, 60 bp, Artificial
  Synthetic oligonucleotide
cctcagcagggagggaaataaagaacaaagaggaaattctaagcctattagaagccttac

SEQ ID NO: 128202 - DNA, 59 bp, Artificial
  Synthetic oligonucleotide
aaaatgttcctggggccgacgggcgacccacgcagttgcaaaatgagattgacatggga

SEQ ID NO: 128203 - DNA, 57 bp, Artificial
  Synthetic oligonucleotide
acgggtcgcgtgtgtctggatctgttggtttctgtttcgtgtgtctttgtcttgtgc

SEQ ID NO: 128204 - DNA, 60 bp, Artificial
  Synthetic oligonucleotide
gtggtcaaacattgtgtgccctgccagctggttaatgctaatccttccagaatacctcca

SEQ ID NO: 128205 - DNA, 60 bp, Artificial
  Synthetic oligonucleotide
gtacaccccttttgatcctacctcggaggcccagaaagcctcagtggccctggccttcat

SEQ ID NO: 128206 - DNA, 59 bp, Artificial
  Synthetic oligonucleotide
gttctctgaaactccggagaggacctgctatacctcagatgggaaggaaatcctgcccc

SEQ ID NO: 128207 - DNA, 60 bp, Artificial
  Synthetic oligonucleotide
ttgattggaaactgcattgtgcatacagaccccaaagctcaggacaggtagagaggatga

SEQ ID NO: 128208 - DNA, 60 bp, Artificial
  Synthetic oligonucleotide
ctggttatgacaggtggtgggcatgtaatactggattaaccccttgtgtttccaccttgg

SEQ ID NO: 128209 - DNA, 60 bp, Artificial
  Synthetic oligonucleotide
ttggatagctctcctgccctttgtgccttttagggttaggaacacccctggacagtttgg

SEQ ID NO: 128210 - DNA, 60 bp, Artificial
  Synthetic oligonucleotide
ggctggccaaggatggtttgagggatggttcaacaagtccccatgggtgaccaccctgct

SEQ ID NO: 128211 - DNA, 60 bp, Artificial
  Synthetic oligonucleotide
ctgccctaatcacaggaccacaacagctggagaaaggacttagtaacctacatcgaattg

SEQ ID NO: 128212 - DNA, 60 bp, Artificial
  Synthetic oligonucleotide
taggtcaggccctagacagtcagggaacctgggcaataggaccccactcgacaaggacca

SEQ ID NO: 128213 - DNA, 60 bp, Artificial
  Synthetic oligonucleotide
ccgcagtcctctacccctgcgtggcgtacgactgtgggccccagcgtgctcggaataaaa

SEQ ID NO: 128214 - DNA, 60 bp, Artificial
  Synthetic oligonucleotide
aacttaaaattaattggtccacaaagcgcgggctctcgaagttttgaattgactgactgg

SEQ ID NO: 128215 - DNA, 60 bp, Artificial
  Synthetic oligonucleotide
gccacagggcaacggcagtatccatggactacccgaagaaccgttgacttgggagtggga

SEQ ID NO: 128216 - DNA, 57 bp, Artificial
  Synthetic oligonucleotide
aaaagaggagaagtcaatcgcctaaccgaccccagtaagatcgggcgtgccacaaaa

SEQ ID NO: 128217 - DNA, 60 bp, Artificial
  Synthetic oligonucleotide
cccgtatgcctgaaggctatcgcagctgtggccatactggtcaaggacgctgacaaattg

SEQ ID NO: 128218 - DNA, 60 bp, Artificial
  Synthetic oligonucleotide
gccccccatgcattggaaaacatcgtccggcagcccccagaccgatggatgaccaacgct

SEQ ID NO: 128219 - DNA, 60 bp, Artificial
  Synthetic oligonucleotide
ggagtcccttatgttctctcaccagcctacttgggatgattgtcaacagctgctgcagac

SEQ ID NO: 128220 - DNA, 57 bp, Artificial
  Synthetic oligonucleotide
agcgcacctgctctggccctccctgatgtaactaaaccttttaccctttatgtggat

SEQ ID NO: 128221 - DNA, 60 bp, Artificial
  Synthetic oligonucleotide
ccctgctcgctgccagtaaataggtagaaggtcacacttcctattgttctagggcctgct

SEQ ID NO: 128222 - DNA, 60 bp, Artificial
  Synthetic oligonucleotide
ttttggggacagccggattttgcagactgtggatcccggggtttgcgaccttagcagccc

SEQ ID NO: 128223 - DNA, 60 bp, Artificial
  Synthetic oligonucleotide
aggagagaggtaacatacttggggtacagtttgcgggacgggcagcgatggctgacggag

SEQ ID NO: 128224 - DNA, 60 bp, Artificial
  Synthetic oligonucleotide
ctggacccggctctcatcctgatcaggagccctatattcttacgtggcaaaatttgacag

SEQ ID NO: 128225 - DNA, 60 bp, Artificial
  Synthetic oligonucleotide
ccagggctcataatttgtcagttcaggttaagaagggaccttggcagactttctgtgcct

SEQ ID NO: 128226 - DNA, 60 bp, Artificial
  Synthetic oligonucleotide
actcgaagccggaggggcgtcaccccggagcggacagacgagatcgtgatattaccgctg

SEQ ID NO: 128227 - DNA, 60 bp, Artificial
  Synthetic oligonucleotide
aacacggccgaaggtagggagagcttgaaaatctatcgccaggctctggtggcgggtctc

SEQ ID NO: 128228 - DNA, 60 bp, Artificial
  Synthetic oligonucleotide
gggaggaaagacgtgatagacggcaagagaagaatttgactaagatcttggccgcagtgg

SEQ ID NO: 128229 - DNA, 60 bp, Artificial
  Synthetic oligonucleotide
gagaagaagtggggaatgaaaggatgaaaatgcaacctgactctcccagaacccaggaag

SEQ ID NO: 128230 - DNA, 60 bp, Artificial
  Synthetic oligonucleotide
tgccttgtggacagccggaactcccataaacccttatctctcacctggttacttactggc

SEQ ID NO: 128231 - DNA, 60 bp, Artificial
  Synthetic oligonucleotide
ccctgctaccggttaggaagcctgggaccaatgattatcgaccagtacaggacttgagag

SEQ ID NO: 128232 - DNA, 60 bp, Artificial
  Synthetic oligonucleotide
gctgctttcccagcctttgttctctaggctcaaggcgctcgagtgggtgaggcagcgagc

SEQ ID NO: 128233 - DNA, 60 bp, Artificial
  Synthetic oligonucleotide
tcgaaggaatccccacctggatccatgcatcccacgttaagccggtgccacctcccgatt

SEQ ID NO: 128234 - DNA, 60 bp, Artificial
  Synthetic oligonucleotide
caagttccacatcgcttccaagttggggattcagtctatgttagacgccaccgtgcagga

SEQ ID NO: 128235 - DNA, 60 bp, Artificial
  Synthetic oligonucleotide
ggtatgtcttggggaatagtgtactatggacgctctgggagaaagaaaggatctgttctg

SEQ ID NO: 128236 - DNA, 60 bp, Artificial
  Synthetic oligonucleotide
aaaacaggcccctgagtatgtgcctctatgcttgaaacttcttgaaactgctcctaactg

SEQ ID NO: 128237 - DNA, 60 bp, Artificial
  Synthetic oligonucleotide
ggatttcttttgcaagcaatggagctgcgtaacttctaatgatgggaattggaaatggcc

SEQ ID NO: 128238 - DNA, 60 bp, Artificial
  Synthetic oligonucleotide
gcttctggcgggagccaccaaacaggactgctcagaaggtacgaaggcactactgctgga

SEQ ID NO: 128239 - DNA, 60 bp, Artificial
  Synthetic oligonucleotide
gggcctttcttagttaatcggtttgttgcctttgttagagaacaagtgagtgcagttcgg

SEQ ID NO: 128240 - DNA, 60 bp, Artificial
  Synthetic oligonucleotide
ggtcccgaacccttataacctcttgagcgccctcccgcctgaacggaactggtacacagt

SEQ ID NO: 128241 - DNA, 60 bp, Artificial
  Synthetic oligonucleotide
ggctacctcttcttgttggctttgcttagcttcgggcccaccttactatgagggaatggc

SEQ ID NO: 128242 - DNA, 60 bp, Artificial
  Synthetic oligonucleotide
gtcagacagtaccccttgagtagagaggctcgagaaggaatttggccgcatgttcaaaga

SEQ ID NO: 128243 - DNA, 60 bp, Artificial
  Synthetic oligonucleotide
ccaagtaaagcctgatcaagatatacagtcctggttggagcagtttccccaagcctgggc

SEQ ID NO: 128244 - DNA, 54 bp, Artificial
  Synthetic oligonucleotide
cccctgctaggaagagacttgctgactaaactaaaggcccaaatccacttcgag

SEQ ID NO: 128245 - DNA, 60 bp, Artificial
  Synthetic oligonucleotide
gcccctatcctctgctaggaagagacttgctgactaaactcaaagcccagatccacttcg

SEQ ID NO: 128246 - DNA, 60 bp, Artificial
  Synthetic oligonucleotide
gcctataacacagttacacacagacaatgggcctaactttacctcccaagaagtggcagc

SEQ ID NO: 128247 - DNA, 60 bp, Artificial
  Synthetic oligonucleotide
ccgcgtcacagcccttgagaagtacctagaggatcaggcacgactaaactcctgggggtg

SEQ ID NO: 128248 - DNA, 60 bp, Artificial
  Synthetic oligonucleotide
gtgggcggattactggcaggtaagctggattcccgaatgggattttgtcagcaccccacc

SEQ ID NO: 128249 - DNA, 60 bp, Artificial
  Synthetic oligonucleotide
gctctgctcgcacatcaaaatggcctcagggagagatccaagagaggcaagaccaggaga

SEQ ID NO: 128250 - DNA, 60 bp, Artificial
  Synthetic oligonucleotide
catgaagcttagacaggcttggtgtcacttcgaaggcaattggagaggtgcctggcggga

SEQ ID NO: 128251 - DNA, 60 bp, Artificial
  Synthetic oligonucleotide
aagtggggaagggacggccagacaacgccgacgagccaggagaaggtggagacaacagca

SEQ ID NO: 128252 - DNA, 60 bp, Artificial
  Synthetic oligonucleotide
ttgaaccatacgaggagaggagagatggacaagggggaggcagagcaaatcgtgtcccac

SEQ ID NO: 128253 - DNA, 60 bp, Artificial
  Synthetic oligonucleotide
ttactattcccacagtgaataatcagggacccgggattaggtatcaattcaactgtctcc

SEQ ID NO: 128254 - DNA, 60 bp, Artificial
  Synthetic oligonucleotide
aatacagtacgaccccaatcgggagtactttactgacatgcatgggctggtgaagaggaa

SEQ ID NO: 128255 - DNA, 60 bp, Artificial
  Synthetic oligonucleotide
ggacagctcagggaccctcgcggctcagatatagcagggaccaccagctcagtacaagaa

SEQ ID NO: 128256 - DNA, 60 bp, Artificial
  Synthetic oligonucleotide
gcggcaccaccccatacgacccagcaaagaagctcctgcagcaatatgcagagaaaggga

SEQ ID NO: 128257 - DNA, 60 bp, Artificial
  Synthetic oligonucleotide
taggcacgtacagctgagaaggcgtcggacgcgaaggaagcgcggggtgcgacgcgacca

SEQ ID NO: 128258 - DNA, 60 bp, Artificial
  Synthetic oligonucleotide
aatatgggctcgcagaactcaaaaccggcgcacaagaaatactccaaactctggcaggcg

SEQ ID NO: 128259 - DNA, 60 bp, Artificial
  Synthetic oligonucleotide
actggggcagatagaactatagtaagatatcatgacaattcgggaatacccacagggaga

SEQ ID NO: 128260 - DNA, 60 bp, Artificial
  Synthetic oligonucleotide
gggacaatagtggtactgcccagtagtccagtagaggtattaggaagggataatatggca

SEQ ID NO: 128261 - DNA, 60 bp, Artificial
  Synthetic oligonucleotide
gagaaatgtaataacagaagtagtagaaggcccgacatattatacagatggaggtaagaa

SEQ ID NO: 128262 - DNA, 60 bp, Artificial
  Synthetic oligonucleotide
gtccttactgtggatcagattatgggagtcggacaaacaaatcaacaggcatcgcaagct

SEQ ID NO: 128263 - DNA, 60 bp, Artificial
  Synthetic oligonucleotide
agtgggccatggtagggacgaaaagtagttttgcaagcaagggagtatttgtacaagggg

SEQ ID NO: 128264 - DNA, 60 bp, Artificial
  Synthetic oligonucleotide
gaattaagagcaatagaagaggcgtgcaaacagggaccagagaaaatgaatatagtaaca

SEQ ID NO: 128265 - DNA, 53 bp, Artificial
  Synthetic oligonucleotide
aaaagattgcagacaaaagaaaggtaatccaacatcacagcagggaaacagca

SEQ ID NO: 128266 - DNA, 60 bp, Artificial
  Synthetic oligonucleotide
ttaatgtggaacaaaaggggacacaaacttatctttgtcaaggaggaaaatggatatgag

SEQ ID NO: 128267 - DNA, 60 bp, Artificial
  Synthetic oligonucleotide
cccctagcagaggaagatcacagtaaatggcatcaagatgctgggtcattacacttagac

SEQ ID NO: 128268 - DNA, 60 bp, Artificial
  Synthetic oligonucleotide
gaaatagtggacaagttagaaaaggaaggaaaggtaggtagagcgccgccacattggaca

SEQ ID NO: 128269 - DNA, 60 bp, Artificial
  Synthetic oligonucleotide
cgctctggagagcaaggagagtaacagtgcaaaggttcccatggtccgggaccgaagggt

SEQ ID NO: 128270 - DNA, 60 bp, Artificial
  Synthetic oligonucleotide
ttttggtttcattggagaatagcaatgtgtagctgcaagaaagaaagatgggatatccga

SEQ ID NO: 128271 - DNA, 60 bp, Artificial
  Synthetic oligonucleotide
tactaaagttaatggaaggggatagggcgctccaaagtgaaagaaggatagagctcagac

SEQ ID NO: 128272 - DNA, 60 bp, Artificial
  Synthetic oligonucleotide
gggaaattaaatgaggaagcagaaaggtgggtaaggcagaatcccccagggccaaatgtc

SEQ ID NO: 128273 - DNA, 59 bp, Artificial
  Synthetic oligonucleotide
tattgtaaatttgcaggctggagggagaagttggaaagcggtagagtcagtgacattcc

SEQ ID NO: 128274 - DNA, 60 bp, Artificial
  Synthetic oligonucleotide
aaaattgttcagagtgtaaaaatagtacactagacagaacagacaacgggacattgggaa

SEQ ID NO: 128275 - DNA, 60 bp, Artificial
  Synthetic oligonucleotide
cagcgctagtaagaaaaccgccgtggtgaatctagatagagacatggcgacgcaaggctc

SEQ ID NO: 128276 - DNA, 60 bp, Artificial
  Synthetic oligonucleotide
gtctgtttaggatggcaagcagtaagaacatgccaagcaggataacgcagaagagcatgg

SEQ ID NO: 128277 - DNA, 60 bp, Artificial
  Synthetic oligonucleotide
ggcttgtataatgtgtagtcaaatgggcatgaggcccgagacagtgcaggcagccagggg

SEQ ID NO: 128278 - DNA, 60 bp, Artificial
  Synthetic oligonucleotide
gctgggaccatgtaagccagcgggtgccaaacgaggtattgcagagatggctcgctatgc

SEQ ID NO: 128279 - DNA, 59 bp, Artificial
  Synthetic oligonucleotide
gtggaagctcccaggtctctcctgcctgactgtggagacaataaaggagttactttaca

SEQ ID NO: 128280 - DNA, 60 bp, Artificial
  Synthetic oligonucleotide
gggatggttccagtggctcagaaaacttagagcacgagaaaagaacatcccctcgcagtt

SEQ ID NO: 128281 - DNA, 66 bp, Artificial
  Synthetic oligonucleotide
ggatgatatttatatagggagtgatttggatataatgaaacacagagagatagtagaagaactagc

SEQ ID NO: 128282 - DNA, 60 bp, Artificial
  Synthetic oligonucleotide
gagacaagaagggtatccagcaaagtggcttggatttgaattgcacccagagaaatggag

SEQ ID NO: 128283 - DNA, 60 bp, Artificial
  Synthetic oligonucleotide
taccgcaaccaaaagaaatacaaacagaataaaatcagggaagtaggtccccagttgcca

SEQ ID NO: 128284 - DNA, 57 bp, Artificial
  Synthetic oligonucleotide
gaggacacccaggcgagtggctgggaccaacacaggtactctgggaaggggaaggag

SEQ ID NO: 128285 - DNA, 60 bp, Artificial
  Synthetic oligonucleotide
gagccaacacagctactaatgaaatatttggggataacacacacaacagggataccatgg

SEQ ID NO: 128286 - DNA, 60 bp, Artificial
  Synthetic oligonucleotide
cagaaagagtaaaaggggaaacaggacaagaatttagaatcatgactataaggtggtatg

SEQ ID NO: 128287 - DNA, 60 bp, Artificial
  Synthetic oligonucleotide
caagaaaataaaatgcccagcacaataaggggaagcaataggagaggaatagatcattgg

SEQ ID NO: 128288 - DNA, 60 bp, Artificial
  Synthetic oligonucleotide
ttaggtttgccgcatccagggggattacagaaaaagaagcatgtaacaatacttgacata

SEQ ID NO: 128289 - DNA, 60 bp, Artificial
  Synthetic oligonucleotide
cataactgtaggaaatggaacaataacagggaattgtagtgtcacagattgggagggctg

SEQ ID NO: 128290 - DNA, 58 bp, Artificial
  Synthetic oligonucleotide
aaaatcttgggtaagtattgacctcctggggaccaaacaagaagggaaaaggcagaag

SEQ ID NO: 128291 - DNA, 60 bp, Artificial
  Synthetic oligonucleotide
gacctcggactttgctgttgtaaagagaaaccagcgcgcagcggaagagcggagacacgg

SEQ ID NO: 128292 - DNA, 60 bp, Artificial
  Synthetic oligonucleotide
tgcacatggcagcagtgggaagaagagatagagcaacacgaggcaaatttaagcctattg

SEQ ID NO: 128293 - DNA, 60 bp, Artificial
  Synthetic oligonucleotide
ggttcagcatgtggcaaaaggggtaagaatattagaggcacgagtagctcgagtagaagc

SEQ ID NO: 128294 - DNA, 60 bp, Artificial
  Synthetic oligonucleotide
tgccgtgcagcaatcctacaccaggacggctgttcagtctcttgctaacgcaactgctgc

SEQ ID NO: 128295 - DNA, 60 bp, Artificial
  Synthetic oligonucleotide
gctcccgggtctctcctgcctgactgtggagacaataaaggagttactttacaactgcgc

SEQ ID NO: 128296 - DNA, 60 bp, Artificial
  Synthetic oligonucleotide
gcagaaataatacccgagagtatgaaatatctcagaggaaagaaaagcccatatggaggg

SEQ ID NO: 128297 - DNA, 60 bp, Artificial
  Synthetic oligonucleotide
caaaagcagtatcatgtacagaacaaatgcctttagcagcagtacagcgggtatattggg

SEQ ID NO: 128298 - DNA, 60 bp, Artificial
  Synthetic oligonucleotide
gggacaccaccttattggagtgcaagaataaagggaagcacaggcatcaatgggacgaga

SEQ ID NO: 128299 - DNA, 60 bp, Artificial
  Synthetic oligonucleotide
ggccatggaatacatatcactggcctttatggcaaatggagaatatgaggcagtggatga

SEQ ID NO: 128300 - DNA, 60 bp, Artificial
  Synthetic oligonucleotide
gggatgcctcatatgggaaatgggcaagaaacatagttgtaacgcagaagaggtcatagc

SEQ ID NO: 128301 - DNA, 60 bp, Artificial
  Synthetic oligonucleotide
gatgcacaaagaataccggatgtctggaaggcattacaagaagcatttgactggtcagga

SEQ ID NO: 128302 - DNA, 60 bp, Artificial
  Synthetic oligonucleotide
tacaaggaggtgacggaggatttgctgcacctcaattctctctttggaaacgaccaatag

SEQ ID NO: 128303 - DNA, 58 bp, Artificial
  Synthetic oligonucleotide
aaaatgtcagcacagtacaatgtacacatggaattaggccagtagtgtcaactcaact

SEQ ID NO: 128304 - DNA, 60 bp, Artificial
  Synthetic oligonucleotide
gaggtgtgtttgtgctagggttcttgggttttctcgcgacagcaggttctgcaatgggcg

SEQ ID NO: 128305 - DNA, 60 bp, Artificial
  Synthetic oligonucleotide
gaaaccatagtattaatggcagttcattgcatgaattttaaaagaaggggaggaataggg

SEQ ID NO: 128306 - DNA, 60 bp, Artificial
  Synthetic oligonucleotide
caataccttatccctcgactcccctccttccccacccaaagaactacccgcaccctcaag

SEQ ID NO: 128307 - DNA, 60 bp, Artificial
  Synthetic oligonucleotide
gcaaagatcattagggattatggaaaacagatggcaggtgatgattgtgtggcaggtaga

SEQ ID NO: 128308 - DNA, 60 bp, Artificial
  Synthetic oligonucleotide
tctgtgggtctaccacacacaaggctatttccctgattggcagaactacacaccagggcc

SEQ ID NO: 128309 - DNA, 60 bp, Artificial
  Synthetic oligonucleotide
tcccgttcgtgctagggttcctaggcttcttaggagctgctgggactgcaatgggagcag

SEQ ID NO: 128310 - DNA, 60 bp, Artificial
  Synthetic oligonucleotide
agctcgagcctagttagaggactaggaagggccgtagccataactactctgggcaagtag

SEQ ID NO: 128311 - DNA, 60 bp, Artificial
  Synthetic oligonucleotide
acgtacagctgagaagacgtcggacgcgaaggaaggcgcggggtgcgacgtgaccaagaa

SEQ ID NO: 128312 - DNA, 60 bp, Artificial
  Synthetic oligonucleotide
ttgagtgaaggcacgtacagctgagaagacgtcggacgcgaaggaaccgcggggtgcgac

SEQ ID NO: 128313 - DNA, 60 bp, Artificial
  Synthetic oligonucleotide
tgacattaagaactgctgacgggactttccagcacgggactttccaaggcgggacatggg

SEQ ID NO: 128314 - DNA, 60 bp, Artificial
  Synthetic oligonucleotide
tgacattaagaactgctgacgggactttccagcaagggactttccagggcgggtcatggg

SEQ ID NO: 128315 - DNA, 60 bp, Artificial
  Synthetic oligonucleotide
atgacattaagaactgctgacgggactttccagcaagggactttccagggcgggtcatgg

SEQ ID NO: 128316 - DNA, 60 bp, Artificial
  Synthetic oligonucleotide
ctaggagatgacattaagaactgctgacgggactttccagcacgggactttccaaggcgg

SEQ ID NO: 128317 - DNA, 60 bp, Artificial
  Synthetic oligonucleotide
tagggttcctaggcttcttgggagctgctgggactgcaatgggagcagcggcgacagccc

SEQ ID NO: 128318 - DNA, 60 bp, Artificial
  Synthetic oligonucleotide
gaaggggaaaagtttggagaaaatggaatgaaactataacagggccaaaaggatgtgcaa

SEQ ID NO: 128319 - DNA, 60 bp, Artificial
  Synthetic oligonucleotide
cccaaaaatggtatctatctttatggaaaaggcaagagaagggttaggaggtgaagaagt

SEQ ID NO: 128320 - DNA, 60 bp, Artificial
  Synthetic oligonucleotide
ccgggaacttggcttaggaaaatatcgtcatggaagcaaaagaatagatgggaatggagg

SEQ ID NO: 128321 - DNA, 60 bp, Artificial
  Synthetic oligonucleotide
gggatgagtattgggaccctgaagaaatagagaagatgttaatggactaagagccttgca

SEQ ID NO: 128322 - DNA, 60 bp, Artificial
  Synthetic oligonucleotide
ggcaaaaggaccagggccagtatgtttcaattgtaagagaccaggacatctagcaagaca

SEQ ID NO: 128323 - DNA, 60 bp, Artificial
  Synthetic oligonucleotide
ggggatgagtgaagaagattggcaggtaagtaaaggactctttgcagttctccaaggagg

SEQ ID NO: 128324 - DNA, 60 bp, Artificial
  Synthetic oligonucleotide
ccagaaagtacattagaagagaaattgagggcctgtcaggaagttggatcaccggcatac

SEQ ID NO: 128325 - DNA, 66 bp, Artificial
  Synthetic oligonucleotide
gtatcaataaagtaatgggatatacagtaattgtgatgcctgaaatagatgatgaggaattgtcac

SEQ ID NO: 128326 - DNA, 60 bp, Artificial
  Synthetic oligonucleotide
agcaagacaatgtagagaggtagagaaatgtaacaaatgtggaaagcctggtcacttggc

SEQ ID NO: 128327 - DNA, 60 bp, Artificial
  Synthetic oligonucleotide
gtgtctcagaaactcacctccaggaacgttgcaaagacttgctatgttggcatgtggacg

SEQ ID NO: 128328 - DNA, 60 bp, Artificial
  Synthetic oligonucleotide
gcgtatcgcaggagaggtgctgagctgatttcttccctttgaggaagagatgtcatatga

SEQ ID NO: 128329 - DNA, 60 bp, Artificial
  Synthetic oligonucleotide
cagacctagaagatcgctttaagaaattgtttgggagtcctctgacagatgaagcagcag

SEQ ID NO: 128330 - DNA, 54 bp, Artificial
  Synthetic oligonucleotide
aaaaggggatacaacaattacaatcttgggaatattggacgggatggatgggaa

SEQ ID NO: 128331 - DNA, 58 bp, Artificial
  Synthetic oligonucleotide
caagtcagtgaagaaggaccacttaatccaggaataaacccctttagacaaccaggat

SEQ ID NO: 128332 - DNA, 59 bp, Artificial
  Synthetic oligonucleotide
ttaccattcccctcgatccagattatgctccttacacagcatttactttgcctagaaaa

SEQ ID NO: 128333 - DNA, 60 bp, Artificial
  Synthetic oligonucleotide
ccagggaaactggaagaaggggcgagctgcagccccggtaaatcaagtgcagcaagcaac

SEQ ID NO: 128334 - DNA, 60 bp, Artificial
  Synthetic oligonucleotide
taacataagcatacaagaaggacctacactaggaaaatgggcaaaagagatatgggcaac

SEQ ID NO: 128335 - DNA, 60 bp, Artificial
  Synthetic oligonucleotide
atataatcagtgctttggaaagcttcgaggagtctctcagttgaggactttcgagttctc

SEQ ID NO: 128336 - DNA, 60 bp, Artificial
  Synthetic oligonucleotide
gggccgaagacttcgcagttggcgcccgaacagggacatgatttgagcaggctaggaaag

SEQ ID NO: 128337 - DNA, 58 bp, Artificial
  Synthetic oligonucleotide
aaggggattaggaaaacagagacaagacatagatatagaaagtaagggaactgaggaa

SEQ ID NO: 128338 - DNA, 60 bp, Artificial
  Synthetic oligonucleotide
ctacagacaaattaggacaagaagcagctattagattatttgtgctagcacaccaagtag

SEQ ID NO: 128339 - DNA, 60 bp, Artificial
  Synthetic oligonucleotide
ctacagcaacatgggaaatggacaggggcgagattggaaagtggccataaagagatgtag

SEQ ID NO: 128340 - DNA, 60 bp, Artificial
  Synthetic oligonucleotide
cctcgagcagtgcagttaagacaaggacctaaagaagattatgcatcctttatagacaga

SEQ ID NO: 128341 - DNA, 60 bp, Artificial
  Synthetic oligonucleotide
gcgctctatgtagaattagaggagaacaggtgggaggacaattaaaaattggaccaggaa

SEQ ID NO: 128342 - DNA, 60 bp, Artificial
  Synthetic oligonucleotide
gagcagaggatgcagggtatgacttgttagctgcaaaagaagtacatttactgccaggag

SEQ ID NO: 128343 - DNA, 60 bp, Artificial
  Synthetic oligonucleotide
gccatacttcactgcagctgagataatggggatagggctgactcaggaacaacaggcaga

SEQ ID NO: 128344 - DNA, 60 bp, Artificial
  Synthetic oligonucleotide
caaatcacgaacacatgcagctgcaagatttagaataagatgtaaatggaatgttggctc

SEQ ID NO: 128345 - DNA, 60 bp, Artificial
  Synthetic oligonucleotide
gacaaaggctgtagaaatgtatgaaattgctggaaattggtcatgtaaatctgatttgcc

SEQ ID NO: 128346 - DNA, 60 bp, Artificial
  Synthetic oligonucleotide
gaggaaaggaagaaggacctccacaggcatatcctatccaaatagtaaatggagcaccac

SEQ ID NO: 128347 - DNA, 60 bp, Artificial
  Synthetic oligonucleotide
gtttttgcctgaaacaacatctttagacaatgctttggctctcgctctgcattgccttaa

SEQ ID NO: 128348 - DNA, 60 bp, Artificial
  Synthetic oligonucleotide
aaactatcaatcaagacaaaaaagagcagctatccatattatgttagcccttgctacagt

SEQ ID NO: 128349 - DNA, 60 bp, Artificial
  Synthetic oligonucleotide
gtaggaggagaaatatcaccaggatggggacctggaatggttggcatagcaataaaagcc

SEQ ID NO: 128350 - DNA, 60 bp, Artificial
  Synthetic oligonucleotide
gctccgccacctgaagtagagtttatccactctgccttaaatctaaagagagcactaagt

SEQ ID NO: 128351 - DNA, 60 bp, Artificial
  Synthetic oligonucleotide
ctagaatgatgagaggtgatcagaatttaaattcaataagagaatggactgatgaggcca

SEQ ID NO: 128352 - DNA, 60 bp, Artificial
  Synthetic oligonucleotide
ggagaaagcggggaaaggcagcaaaagcagcttactggacaaatacagggaaatggcagg

SEQ ID NO: 128353 - DNA, 60 bp, Artificial
  Synthetic oligonucleotide
gcagggcctattgcaccaggccagataagagaaccaaggggaagtgacatagcaggaacc

SEQ ID NO: 128354 - DNA, 60 bp, Artificial
  Synthetic oligonucleotide
tagatctgtatctggcggttccgcggaagaactgacgagttcgtattcccggccgcagcc

SEQ ID NO: 128355 - DNA, 54 bp, Artificial
  Synthetic oligonucleotide
tagcggaggctagaaggagagagatgggtgcgagagcgtcagtattaagagggg

SEQ ID NO: 128356 - DNA, 60 bp, Artificial
  Synthetic oligonucleotide
tatgtggggagtggtttgtatccttccctggcgggggtgggagagcagcagggccaggga

SEQ ID NO: 128357 - DNA, 60 bp, Artificial
  Synthetic oligonucleotide
tggcccctgggccggccctgactgactgggcaaggatcagggaggagcttgcgagtacag

SEQ ID NO: 128358 - DNA, 60 bp, Artificial
  Synthetic oligonucleotide
aggctcctgggccggccctgactgactgggcaagggtcagggaggagcttgcgagtactg

SEQ ID NO: 128359 - DNA, 60 bp, Artificial
  Synthetic oligonucleotide
ggctcctgggccggccctgactgactgggcaagggtcggggaggagcttgcgagtactgg

SEQ ID NO: 128360 - DNA, 60 bp, Artificial
  Synthetic oligonucleotide
tatgtggggagtggtttgtatccttccctggcgggggtgggagagcagcagggccagggg

SEQ ID NO: 128361 - DNA, 60 bp, Artificial
  Synthetic oligonucleotide
gggtctggcccctgggccggccctgactgactgggcaaggatcagggaggagcttgcgag

SEQ ID NO: 128362 - DNA, 60 bp, Artificial
  Synthetic oligonucleotide
tcaggcccctgggccggccctgactgactgggcaaggatcagggaggagcttgcgagtac

SEQ ID NO: 128363 - DNA, 60 bp, Artificial
  Synthetic oligonucleotide
tggcccctgggccggccctgactgactgggcaaggattagggaggagcttgcgagtacag

SEQ ID NO: 128364 - DNA, 60 bp, Artificial
  Synthetic oligonucleotide
ccttatgaccctgaggacccagggcaagaaaccaatgtgtccatgtcattcatctggcag

SEQ ID NO: 128365 - DNA, 60 bp, Artificial
  Synthetic oligonucleotide
ccttatgaccctgaggacccagggcaagaaaccaatgtggccatgtcattcatctggcag

SEQ ID NO: 128366 - DNA, 60 bp, Artificial
  Synthetic oligonucleotide
ccccgtatgaccctgaggacccagggcaagaaaccaatgtgtctatgtcatttatctggc

SEQ ID NO: 128367 - DNA, 60 bp, Artificial
  Synthetic oligonucleotide
tgagtaaatttgctggcggtggccagacctaggggaagggcgaagtccctaggggaggaa

SEQ ID NO: 128368 - DNA, 60 bp, Artificial
  Synthetic oligonucleotide
ctgggagctctctggctaactagggaacccactgcttaagcctcaataaagcttgccttg

SEQ ID NO: 128369 - DNA, 60 bp, Artificial
  Synthetic oligonucleotide
gtagcggtccatgtagccagtgggtttatagaagcagaggttatccctagggaaacagga

SEQ ID NO: 128370 - DNA, 60 bp, Artificial
  Synthetic oligonucleotide
tgttggacgtggtcaagagacaacaagaaatgttgcgactgaccgtctggggaactaaaa

SEQ ID NO: 128371 - DNA, 60 bp, Artificial
  Synthetic oligonucleotide
agcgcggcaggaggcacgatgggcgcagcggcgacagccctgacggtacagtctcggtca

SEQ ID NO: 128372 - DNA, 60 bp, Artificial
  Synthetic oligonucleotide
cctgtccaggatctgagagaagtcaacaagcgggtggaagatatccaccccaccgtgccc

SEQ ID NO: 128373 - DNA, 60 bp, Artificial
  Synthetic oligonucleotide
gagtggtctgagcgggacggggagtggtcaaccctcagatgctgcatataagcagctgct

SEQ ID NO: 128374 - DNA, 60 bp, Artificial
  Synthetic oligonucleotide
gcacatgggagccctacaacctgggttgcccactccttctgctatacctgataagtccta

SEQ ID NO: 128375 - DNA, 60 bp, Artificial
  Synthetic oligonucleotide
ccagtttctcttctgctcaagttgtggaattatttgcagtccaccaagcattgctaacag

SEQ ID NO: 128376 - DNA, 60 bp, Artificial
  Synthetic oligonucleotide
accgagaccgtcaagataaaggtttcgggtcctctgacgcctattgggtacaaaatgtta

SEQ ID NO: 128377 - DNA, 60 bp, Artificial
  Synthetic oligonucleotide
tggcctactacatggccaaaacagatggctatttctactctccagggtattggccaaact

SEQ ID NO: 128378 - DNA, 60 bp, Artificial
  Synthetic oligonucleotide
cgatcagtggcccctaacacaggaaaaactttctgccgcacaacagctggtacaggaaca

SEQ ID NO: 128379 - DNA, 59 bp, Artificial
  Synthetic oligonucleotide
aaaacaattaaccgagaccgccaagataaaggtttcgggtcctctgacgcctattgggt

SEQ ID NO: 128380 - DNA, 60 bp, Artificial
  Synthetic oligonucleotide
gagtgaaggcagtaagggcggcaggaacaaaccacgacggagtgctcctagaaaggcgca

SEQ ID NO: 128381 - DNA, 60 bp, Artificial
  Synthetic oligonucleotide
gggcctattccaccaggccaaatgagggaaccaaggggaagtgacatagcaggaactact

SEQ ID NO: 128382 - DNA, 54 bp, Artificial
  Synthetic oligonucleotide
aaaatgtcagcacagtacaatgtacacatggaattaggcctgtagtatcaactc

SEQ ID NO: 128383 - DNA, 60 bp, Artificial
  Synthetic oligonucleotide
tctgtgggtctaccacacacaaggctacttccctgattggcagaactacacaccagggcc

SEQ ID NO: 128384 - DNA, 60 bp, Artificial
  Synthetic oligonucleotide
caaatgtcagcacagtacaatgtacacatggaattaggccagtagtatcaactcaactgc

SEQ ID NO: 128385 - DNA, 60 bp, Artificial
  Synthetic oligonucleotide
gatcattagggattatggaaaacagatggcaggtgatgattgtgtggcaggtggacagga

SEQ ID NO: 128386 - DNA, 60 bp, Artificial
  Synthetic oligonucleotide
ccagcaaaacttctctggaaaggtgaaggggcagtagtaatacaagataatagtgaaata

SEQ ID NO: 128387 - DNA, 58 bp, Artificial
  Synthetic oligonucleotide
gggtacagtgcaggggaaagaataatagacataatagcaacagacatacaaactaaag

SEQ ID NO: 128388 - DNA, 60 bp, Artificial
  Synthetic oligonucleotide
ggggatacagtgcaggggaaagaataatagacataatagcaacagacatacaaactaagg

SEQ ID NO: 128389 - DNA, 60 bp, Artificial
  Synthetic oligonucleotide
cctcagatcacgtagactgaagcagaaaatctctagcagtggcgcccgaacagggaccgg

SEQ ID NO: 128390 - DNA, 56 bp, Artificial
  Synthetic oligonucleotide
atcagcaaaactactctggaaaggtgaaggggcagtagtaatacaagacaatagtg

SEQ ID NO: 128391 - DNA, 60 bp, Artificial
  Synthetic oligonucleotide
caaggggcggttcggggagtggctaaccctcagatgctgcatataagcagctgctttctg

SEQ ID NO: 128392 - DNA, 60 bp, Artificial
  Synthetic oligonucleotide
tagcttgtttatggtctacaataggtaggtttaggcagggttatcgccctcttccttatg

SEQ ID NO: 128393 - DNA, 60 bp, Artificial
  Synthetic oligonucleotide
aggcaaggagctaaggaaccttacccagaatttgtagacagactattatcccaaataaaa

SEQ ID NO: 128394 - DNA, 60 bp, Artificial
  Synthetic oligonucleotide
cctagagaaagacagatggagcctgcttttgatcagtttaggcagacatatagacaatgg

SEQ ID NO: 128395 - DNA, 60 bp, Artificial
  Synthetic oligonucleotide
acatggtgggcaatttctgctgtaaagatgggcctccagattaataatgtagtagatgga

SEQ ID NO: 128396 - DNA, 60 bp, Artificial
  Synthetic oligonucleotide
gataatagacatccattaccgaatgctccactggtggcaccaccacaagggcctattccc

SEQ ID NO: 128397 - DNA, 58 bp, Artificial
  Synthetic oligonucleotide
aggactggcagctgagggatgtcattccattgctggaagatgtaactcagacgctgtc

SEQ ID NO: 128398 - DNA, 60 bp, Artificial
  Synthetic oligonucleotide
ggtgacggtacaagggtctcagaaattaactactggtaactgtaattgggcgctaagtct

SEQ ID NO: 128399 - DNA, 60 bp, Artificial
  Synthetic oligonucleotide
gaccaggcccaacacaacatacacctagcaggcgtgaccggtggatcaggggacaaatac

SEQ ID NO: 128400 - DNA, 60 bp, Artificial
  Synthetic oligonucleotide
tcctttacctatttcttctgaagctaacactggactaattagacataagagagattttgg

SEQ ID NO: 128401 - DNA, 60 bp, Artificial
  Synthetic oligonucleotide
gttttggagttataggacaggcacacttagaactgcctagacctaacaaaagaataagga

SEQ ID NO: 128402 - DNA, 60 bp, Artificial
  Synthetic oligonucleotide
caattgtgggccaacaatatttcttggggttttagaagataataagggagtagtacgggg

SEQ ID NO: 128403 - DNA, 60 bp, Artificial
  Synthetic oligonucleotide
ggttaggacctgtcactcatcaagttgctgaaagaatggcaatacaaatggcattagagg

SEQ ID NO: 128404 - DNA, 60 bp, Artificial
  Synthetic oligonucleotide
cgagttcctcctaatagctttggatgggtcactgggaaatcatcaatggcaaaacagggg

SEQ ID NO: 128405 - DNA, 60 bp, Artificial
  Synthetic oligonucleotide
gagggcacaatggggccaaaaattcctcaatggccactcactaaggagaaactagaaggg

SEQ ID NO: 128406 - DNA, 60 bp, Artificial
  Synthetic oligonucleotide
gggccctctggaaagtgaccagtggtgcagggtcctccggcagtcgttacctgaagaaaa

SEQ ID NO: 128407 - DNA, 60 bp, Artificial
  Synthetic oligonucleotide
gctagtggcagatattccagtgactattttgggacgagatattcttcaggacttaggtgc

SEQ ID NO: 128408 - DNA, 60 bp, Artificial
  Synthetic oligonucleotide
aagccaaattgagtattgttgcaggaagcaagacccaactaccattgtcagctgtgtttc

SEQ ID NO: 128409 - DNA, 60 bp, Artificial
  Synthetic oligonucleotide
caggagcagatacttcagtgttgactactgcacattataataggttaaaatatagaggga

SEQ ID NO: 128410 - DNA, 60 bp, Artificial
  Synthetic oligonucleotide
caagcagaagtgctccaggaacgactggaatggagaatcagaggagtacaacaggcggcc

SEQ ID NO: 128411 - DNA, 60 bp, Artificial
  Synthetic oligonucleotide
cgagatcctacagctggcgcccgaacagggacctgagaggggcgcagaccctacctgttg

SEQ ID NO: 128412 - DNA, 60 bp, Artificial
  Synthetic oligonucleotide
gaagagctttaaatcctggcacatctcatgtatcaatgcctcagtatgtttagaaaaaca

SEQ ID NO: 128413 - DNA, 60 bp, Artificial
  Synthetic oligonucleotide
gattctgcggtctgagtcccttctctgctgggctgaaaggcctttgtaataaatataatt

SEQ ID NO: 128414 - DNA, 60 bp, Artificial
  Synthetic oligonucleotide
cgctggggggaacaatcctcaccaagggtccttagacctggagattcgaagcgaaggagg

SEQ ID NO: 128415 - DNA, 60 bp, Artificial
  Synthetic oligonucleotide
gtttgatatatgggagtatttggtaaaggggtaacatggtcagcatcgcattctatgggg

SEQ ID NO: 128416 - DNA, 60 bp, Artificial
  Synthetic oligonucleotide
gaatgctggggttccttcccggggtgtagaccatttcaaaattacttcagttatgagacc

SEQ ID NO: 128417 - DNA, 60 bp, Artificial
  Synthetic oligonucleotide
caatgatactgatacctggatacctaaggggtgtaatgagacgtgggcaagagtgaaacg

SEQ ID NO: 128418 - DNA, 60 bp, Artificial
  Synthetic oligonucleotide
caaaagcacttcagactggtcttgcgggcccatttaaaggtggagccttgaaaggagggc

SEQ ID NO: 128419 - DNA, 60 bp, Artificial
  Synthetic oligonucleotide
ggcgatcttactggaaaagggttttgagacaccagatgataaattacaagaagtgccacc

SEQ ID NO: 128420 - DNA, 60 bp, Artificial
  Synthetic oligonucleotide
cgggaagcaaggggctcaagggaggccccagaaacaaactttcccgatacaacagaagag

SEQ ID NO: 128421 - DNA, 60 bp, Artificial
  Synthetic oligonucleotide
ccctggaatatgtcatggggacatttaaatgagtcaacacaatgggatgactgggtaagc

SEQ ID NO: 128422 - DNA, 60 bp, Artificial
  Synthetic oligonucleotide
gatcaggacctgcaggttgtgtcatgagatctcctaatcattggcaggcagattgcacac

SEQ ID NO: 128423 - DNA, 60 bp, Artificial
  Synthetic oligonucleotide
tcactatacccttagatccagagtttagaccatatacagctttcactattccctccatta

SEQ ID NO: 128424 - DNA, 60 bp, Artificial
  Synthetic oligonucleotide
aagggcaaataggaccttgaaagagaagattcaaagtcatagagacaacactcaaacact

SEQ ID NO: 128425 - DNA, 60 bp, Artificial
  Synthetic oligonucleotide
agagaattaaacaaaacagtacaagtaggaacggaaatatccagaggattgcctcacccg

SEQ ID NO: 128426 - DNA, 60 bp, Artificial
  Synthetic oligonucleotide
cattggctattttagaatgggcaagattgttttcaccaaagtccttacacacagataacg

SEQ ID NO: 128427 - DNA, 60 bp, Artificial
  Synthetic oligonucleotide
gtccattttgtccttgatagaaactctggttactggagatccctcagatcggtggcagag

SEQ ID NO: 128428 - DNA, 60 bp, Artificial
  Synthetic oligonucleotide
gctgactctggagggactttccactagtgcatgcgcactagactggggacttttccagac

SEQ ID NO: 128429 - DNA, 60 bp, Artificial
  Synthetic oligonucleotide
ataatcaaggcccaggaatcaggtaccagtataatgttcttccacagggatggaaaggct

SEQ ID NO: 128430 - DNA, 60 bp, Artificial
  Synthetic oligonucleotide
ctcgcctattttgtctttggtagaaactctggttactggagatccctcagatcggtggca

SEQ ID NO: 128431 - DNA, 60 bp, Artificial
  Synthetic oligonucleotide
agatccacaagtcaaaacctggatgacacaaacattgctcatccaaaatgccaacccaga

SEQ ID NO: 128432 - DNA, 60 bp, Artificial
  Synthetic oligonucleotide
agaaaatgggcgcgagcgcgtcaggtcttaggggagagaaattggatgaactggaaacaa

SEQ ID NO: 128433 - DNA, 60 bp, Artificial
  Synthetic oligonucleotide
acccgacgaagagagttaatcaaggagccccgacgcgcaggactcaaggtaagcggtgca

SEQ ID NO: 128434 - DNA, 60 bp, Artificial
  Synthetic oligonucleotide
acccggcgaagtgagttaaccaaggagccccgacgcgcaggactcaaggtaagcggtgca

SEQ ID NO: 128435 - DNA, 56 bp, Artificial
  Synthetic oligonucleotide
ctggagatccctcagatcggtggcagagatttgatatctagtggcagtagagaaaa

SEQ ID NO: 128436 - DNA, 60 bp, Artificial
  Synthetic oligonucleotide
ataatcagggcccaggaatcaggtaccagtataatgtcctaccacagggatggaagggct

SEQ ID NO: 128437 - DNA, 60 bp, Artificial
  Synthetic oligonucleotide
actttggaaaggaccagcaaagctcctctggaaaggtgaaggggcagtagtaatacaaga

SEQ ID NO: 128438 - DNA, 60 bp, Artificial
  Synthetic oligonucleotide
gcgcgccagtcctccgatagactgagtcgcccgggtacccgtgtatccaataaagccttt

SEQ ID NO: 128439 - DNA, 60 bp, Artificial
  Synthetic oligonucleotide
gaaggaaaagtagtcatagttgcggtccatgtagccagtggattcatagaagcagaagtc

SEQ ID NO: 128440 - DNA, 60 bp, Artificial
  Synthetic oligonucleotide
gagggaaaggttataatagtggcagttcatgtagccagtggattcatagaagcagaagta

SEQ ID NO: 128441 - DNA, 60 bp, Artificial
  Synthetic oligonucleotide
ggctacttccctgattggcagaactacacaccagggccagggactagattcccactgacc

SEQ ID NO: 128442 - DNA, 60 bp, Artificial
  Synthetic oligonucleotide
ggggaaagaaacactatatgttaaaacacctagtatgggcaagcagggagctggaaagat

SEQ ID NO: 128443 - DNA, 60 bp, Artificial
  Synthetic oligonucleotide
gctctggaaaggtgaaggggcagtagtaatacaagacaataacgaaataaaggtagtacc

SEQ ID NO: 128444 - DNA, 60 bp, Artificial
  Synthetic oligonucleotide
ccaggcgcagctaaatgcttggggatgtgcgtttagacaagtctgccacactactgtacc

SEQ ID NO: 128445 - DNA, 60 bp, Artificial
  Synthetic oligonucleotide
ccaggcgcagctgaatgcttggggatgtgcgtttagacaagtctgccacactactgtacc

SEQ ID NO: 128446 - DNA, 60 bp, Artificial
  Synthetic oligonucleotide
ggcggcgtggcgatcctgtcctcatccgtctcgcttattcggggagcggacgatgaccct

SEQ ID NO: 128447 - DNA, 53 bp, Artificial
  Synthetic oligonucleotide
ggcgtggcgatcctgtcctcatccgtctcgcttattcggggagcggacgatga

SEQ ID NO: 128448 - DNA, 60 bp, Artificial
  Synthetic oligonucleotide
cacagacggcgtggcgatcctgtcctcatccgtctcgcttattcggggagcggacgatga

SEQ ID NO: 128449 - DNA, 56 bp, Artificial
  Synthetic oligonucleotide
ggcggcgtggcgatcctgtcctcatccgtctcgcttattcggggagcggacgatga

SEQ ID NO: 128450 - DNA, 60 bp, Artificial
  Synthetic oligonucleotide
ccacagacggcgtggcgatcctgtcctcatccgtctcgcttattcggggagcggacgatg

SEQ ID NO: 128451 - DNA, 60 bp, Artificial
  Synthetic oligonucleotide
agatgggccataagaatggctaacgtaactacaggacgagaacctggtgatataccagag

SEQ ID NO: 128452 - DNA, 60 bp, Artificial
  Synthetic oligonucleotide
gtgggccataagaatggctaatgtatctacaggacgagaacctggtgatataccagagac

SEQ ID NO: 128453 - DNA, 60 bp, Artificial
  Synthetic oligonucleotide
gggccattagaatggctaatgtatctacaggacgagaacctggtgatataccagagactt

SEQ ID NO: 128454 - DNA, 60 bp, Artificial
  Synthetic oligonucleotide
ccccatatacatggatgggttatgaattacatccattaacatggacaatacaacagaaac

SEQ ID NO: 128455 - DNA, 61 bp, Artificial
  Synthetic oligonucleotide
ggatgggttatgaattacatccattaacatggacaatacaacagaaacagttagaaattcc

SEQ ID NO: 128456 - DNA, 60 bp, Artificial
  Synthetic oligonucleotide
aactacccgcaccctcaaggttctcacccccccaaccactgctgcgacccccaagattcc

SEQ ID NO: 128457 - DNA, 60 bp, Artificial
  Synthetic oligonucleotide
ccctggaggctaaacatatagaaccctatcaaggaccaggcaataaccctatcttccccg

SEQ ID NO: 128458 - DNA, 60 bp, Artificial
  Synthetic oligonucleotide
gcgggccgaagccccaccaatttggccaaggtaaaaggaataacccagggacctaatgag

SEQ ID NO: 128459 - DNA, 60 bp, Artificial
  Synthetic oligonucleotide
cgagggttcaacaagcaacggtagaagaaaagatgcaagcatgtcgagatgtgggatccg

SEQ ID NO: 128460 - DNA, 60 bp, Artificial
  Synthetic oligonucleotide
gaccagcaaagcttctctggaaaggtgaaggggcagtagtaatacaagataatagtgaca

SEQ ID NO: 128461 - DNA, 60 bp, Artificial
  Synthetic oligonucleotide
gatcccatagtaggagcagaaactttctatgtggatggagcagctaatagggagactaaa

SEQ ID NO: 128462 - DNA, 60 bp, Artificial
  Synthetic oligonucleotide
gtggccttggcagatagaatatattcatttcctgatccgccagctgatacggatattgac

SEQ ID NO: 128463 - DNA, 60 bp, Artificial
  Synthetic oligonucleotide
ccttcggtattcttagaacgcctaatggaggcctatagaaggtacactccgtttgatccc

SEQ ID NO: 128464 - DNA, 60 bp, Artificial
  Synthetic oligonucleotide
ctcccctaattgattgaccgcccggactgggggtctctcatttgggggctcgtccgggat

SEQ ID NO: 128465 - DNA, 60 bp, Artificial
  Synthetic oligonucleotide
tctcatttgggggctcgtccgggatcggagacccccacccagggaccaccgacccaccaa

SEQ ID NO: 128466 - DNA, 60 bp, Artificial
  Synthetic oligonucleotide
gttccgggctgatcgctctgtgagcgacgtgtgagtagcgagcagacgtgttcggggggc

SEQ ID NO: 128467 - DNA, 60 bp, Artificial
  Synthetic oligonucleotide
cacccctgactctatttgaactaaccaatcaccttgcttctcgcttctgtacccgcgctt

SEQ ID NO: 128468 - DNA, 60 bp, Artificial
  Synthetic oligonucleotide
gaaagcagaggacacccggatcaagttccctacatcgtggtgtggcaggacctcgcccaa

SEQ ID NO: 128469 - DNA, 60 bp, Artificial
  Synthetic oligonucleotide
cccacttgggacgattgccagcagctcctacagattctcttcaccactgaggagcgggag

SEQ ID NO: 128470 - DNA, 60 bp, Artificial
  Synthetic oligonucleotide
tgcttctcgcttctgtacccgcgctttttgctataaaatgagctcagaaactccactcgg

SEQ ID NO: 128471 - DNA, 60 bp, Artificial
  Synthetic oligonucleotide
attacaacacagccgaaggtagggagcgtctcctggtctaccgccggactctagtggcag

SEQ ID NO: 128472 - DNA, 54 bp, Artificial
  Synthetic oligonucleotide
ccccaccatgggtgccgccctccgccaagatcgctgttgtctctagtccagaga

SEQ ID NO: 128473 - DNA, 55 bp, Artificial
  Synthetic oligonucleotide
gctggaaaagactgatcatcctcttaagctgcgtattcggagacggcaaaacgag

SEQ ID NO: 128474 - DNA, 60 bp, Artificial
  Synthetic oligonucleotide
gtccttagacagaaatatcagaccctagataacgaggaaaacctttaatttcgctctaag

SEQ ID NO: 128475 - DNA, 60 bp, Artificial
  Synthetic oligonucleotide
cagtaaaagtcgacggtatcgctgcctgggtccatgcttctcacctcaagcccgcaccac

SEQ ID NO: 128476 - DNA, 60 bp, Artificial
  Synthetic oligonucleotide
tgttgctgaccaccccgaccgcggtaaaagtcgacggtatcgctgcctgggtccatgctt

SEQ ID NO: 128477 - DNA, 60 bp, Artificial
  Synthetic oligonucleotide
cgcaagaatgtccttggggacaacggggcccctactcaactcgagaacctcattaatgag

SEQ ID NO: 128478 - DNA, 60 bp, Artificial
  Synthetic oligonucleotide
tatcgctgcctgggtccatgcttctcacctcaagcctgcaccaccctcggcaccagatga

SEQ ID NO: 128479 - DNA, 60 bp, Artificial
  Synthetic oligonucleotide
cccgctttggaatccctaaggtacttgggtcagacaatggcccagcctttgttgctcagg

SEQ ID NO: 128480 - DNA, 59 bp, Artificial
  Synthetic oligonucleotide
aagagaaaagaaagaggcagaagagagagagaggcggcgcgataggcgtcaagagaaaa

SEQ ID NO: 128481 - DNA, 60 bp, Artificial
  Synthetic oligonucleotide
ctccctgtcttatttactcatttaaaggctttagaagttgtgaggacccagatctgggac

SEQ ID NO: 128482 - DNA, 56 bp, Artificial
  Synthetic oligonucleotide
agccaagaatacccctagccggtttggtctaactccttatgaaattctctatgggg

SEQ ID NO: 128483 - DNA, 60 bp, Artificial
  Synthetic oligonucleotide
gcggaggctagaaggagagagatgggtgcgagagcgtcaatattaagagggggaaaatta

SEQ ID NO: 128484 - DNA, 60 bp, Artificial
  Synthetic oligonucleotide
atctctagcagtggcgcccgaacagggacgcgaaagcgaaagtaagaccagaggagctct

SEQ ID NO: 128485 - DNA, 60 bp, Artificial
  Synthetic oligonucleotide
cagagaaggcagagatcaactgtggaagggacccggtgagctattgtggaaaggggaagg

SEQ ID NO: 128486 - DNA, 60 bp, Artificial
  Synthetic oligonucleotide
acagagaaggcagagaccagctgtggaaaggacccggtgagctattgtggaaaggggaag

SEQ ID NO: 128487 - DNA, 60 bp, Artificial
  Synthetic oligonucleotide
acagagaaggcagagaccagctgtggagaggacccggtgagctattgtggaaaggggaag

SEQ ID NO: 128488 - DNA, 60 bp, Artificial
  Synthetic oligonucleotide
gagatccctcagaccctttgtggtagtgtggaaaatctctagcagtggcgcccgaacagg

SEQ ID NO: 128489 - DNA, 60 bp, Artificial
  Synthetic oligonucleotide
ggagcgaggcgctcaaatcactctttggaatcgtgtcagtactctggtgtatccatgcag

SEQ ID NO: 128490 - DNA, 60 bp, Artificial
  Synthetic oligonucleotide
caatgggcgcagcgtcgctaacgctgactgctcagtcccggactttattggctgggatag

SEQ ID NO: 128491 - DNA, 57 bp, Artificial
  Synthetic oligonucleotide
ggggtacagtgcaggggaaagaataatagacataatagcaacagacatacaaactca

SEQ ID NO: 128492 - DNA, 60 bp, Artificial
  Synthetic oligonucleotide
aaataagagaggggtctttgtgctagggttcttgggttttctcgcgacagcaggttctgc

SEQ ID NO: 128493 - DNA, 60 bp, Artificial
  Synthetic oligonucleotide
tgttggacgtggtcaagagacaacaagaattgttgcgactgaccgtctggggaactaaaa

SEQ ID NO: 128494 - DNA, 60 bp, Artificial
  Synthetic oligonucleotide
tccctcagacccttttagtcagtgtggaaaatctctagcagtggcgcccgaacagggacc

SEQ ID NO: 128495 - DNA, 60 bp, Artificial
  Synthetic oligonucleotide
cacgcaaagcttctctggaaaggtgaaggggcagtagtaatacaagataatagtgacata

SEQ ID NO: 128496 - DNA, 53 bp, Artificial
  Synthetic oligonucleotide
ggggctgcggcttaggagggcagaagctgagtggcgtcggagggagctctact

SEQ ID NO: 128497 - DNA, 58 bp, Artificial
  Synthetic oligonucleotide
ggggctgcggcttaggagggcagaagctgagtggcgtcggagggagctctactgcagg

SEQ ID NO: 128498 - DNA, 60 bp, Artificial
  Synthetic oligonucleotide
gaccagatctgagcctgggagctctctggctaactagggaacccactgcttaagcctcaa

SEQ ID NO: 128499 - DNA, 60 bp, Artificial
  Synthetic oligonucleotide
caagcccgagggcaaaccaacagcccgctaggggaaatgctcagggcctgccaaacttgg

SEQ ID NO: 128500 - DNA, 60 bp, Artificial
  Synthetic oligonucleotide
tacaggcccgaggacaaaccaacagcccgctaggggaaatgctcagggcctgccaaactt

SEQ ID NO: 128501 - DNA, 60 bp, Artificial
  Synthetic oligonucleotide
tgcctcctctggcaatcccagtcgatgcaccctgttcataggggcctcttcctaccactc

SEQ ID NO: 128502 - DNA, 60 bp, Artificial
  Synthetic oligonucleotide
accaacagcccgctaggggaaatgctcagggcctgccaaacttggacaccccgagacaaa

SEQ ID NO: 128503 - DNA, 60 bp, Artificial
  Synthetic oligonucleotide
agaccccagcccagggaccaccgacccaccaccgggaggtaagctggccagcaactgatc

SEQ ID NO: 128504 - DNA, 60 bp, Artificial
  Synthetic oligonucleotide
acagagggtgagtaaatttgctggcggtggccagacctaggggaagggcgaagtccctag

SEQ ID NO: 128505 - DNA, 60 bp, Artificial
  Synthetic oligonucleotide
ggaaggacgaagtctctaggggaggaagatgggtgcgagagcgtctgtgttgacagggag

SEQ ID NO: 128506 - DNA, 60 bp, Artificial
  Synthetic oligonucleotide
gaaaggaccagccaaactactctggaaaggtgaaggggcagtagtaatacaagacaaggg

SEQ ID NO: 128507 - DNA, 60 bp, Artificial
  Synthetic oligonucleotide
aagatcattagggattatggaaaacagatggcaggtgatgattgtgtggcaagtagacag

SEQ ID NO: 128508 - DNA, 60 bp, Artificial
  Synthetic oligonucleotide
ttaggatttctcagcgcagcaggaggcacaatgggcgcagcggcgacagccctgacggta

SEQ ID NO: 128509 - DNA, 60 bp, Artificial
  Synthetic oligonucleotide
ccagagcaccagctcacctgggaccccatcgatggacgcgttgtcagctctcctctccaa

SEQ ID NO: 128510 - DNA, 60 bp, Artificial
  Synthetic oligonucleotide
cctcagatcacgtagactgaagcagaaaatctctagcagtggcgcccgaacagggacttg

SEQ ID NO: 128511 - DNA, 60 bp, Artificial
  Synthetic oligonucleotide
ggaccatgtacaaatgtcagcacagtacaatgtacacatggaattaggccagtagtgtca

SEQ ID NO: 128512 - DNA, 56 bp, Artificial
  Synthetic oligonucleotide
tttcctcatttgtggggatcgcgcatggcaaggaattcccagtcgtccggtagggg

SEQ ID NO: 128513 - DNA, 51 bp, Artificial
  Synthetic oligonucleotide
ggagatcgcgcatggcaaggaattcccagtcgtccggtagggggcccctgc

SEQ ID NO: 128514 - DNA, 60 bp, Artificial
  Synthetic oligonucleotide
caattttcctcatttgtggggatcgcgcatggcaaggaattcccagtcgtccggtagggg

SEQ ID NO: 128515 - DNA, 60 bp, Artificial
  Synthetic oligonucleotide
gaattttcctcatttgtggggatcgcgcatggcaaggaattcccagtcgtccggtagggg

SEQ ID NO: 128516 - DNA, 60 bp, Artificial
  Synthetic oligonucleotide
accacccgcaattttcctcatttgtggggatcgcgcatggcaaggaattcccagtcgtcc

SEQ ID NO: 128517 - DNA, 60 bp, Artificial
  Synthetic oligonucleotide
cacccgcaattttcctcatttgtggggatcgcgcatggcaaggaattcccagtcgtccgg

SEQ ID NO: 128518 - DNA, 60 bp, Artificial
  Synthetic oligonucleotide
ccccttttcaaacatgtttgataggtatcccgtcccctatttccgaaggtgattttaagg

SEQ ID NO: 128519 - DNA, 60 bp, Artificial
  Synthetic oligonucleotide
ctagagaccgctgcttaacgctcaataaagcctgcctgagagtgttaacagtgtgtgccc

SEQ ID NO: 128520 - DNA, 60 bp, Artificial
  Synthetic oligonucleotide
tgcctaatctgccagatctgagcctgggagctctctggtagtggctggctagagaccgct

SEQ ID NO: 128521 - DNA, 60 bp, Artificial
  Synthetic oligonucleotide
tctgccagatctgagcctgggagctctctggtagtggctggctagagaccgctgcttaac

SEQ ID NO: 128522 - DNA, 60 bp, Artificial
  Synthetic oligonucleotide
gtcagaccagcagtacccatgagacccatgacagagaagctagcaatagatctgtcatgg

SEQ ID NO: 128523 - DNA, 60 bp, Artificial
  Synthetic oligonucleotide
gtgtgcccatttcatatcgcgtttgccctggggtagagatccctcagatttgtagtggct

SEQ ID NO: 128524 - DNA, 60 bp, Artificial
  Synthetic oligonucleotide
gtgtgcccatttcataccgcgtctgccctggggtagagatccctcagatttgtagtggct

SEQ ID NO: 128525 - DNA, 60 bp, Artificial
  Synthetic oligonucleotide
gacttgagaagcagggaacgcggcccctggacgcaggactcggcttgtgacagcgcaatc

SEQ ID NO: 128526 - DNA, 60 bp, Artificial
  Synthetic oligonucleotide
gacttgaggagcagggaacgcgacccctggacgcaggactcggcttgtgacagcgcaatc

SEQ ID NO: 128527 - DNA, 60 bp, Artificial
  Synthetic oligonucleotide
cagcgcaatcacaagaggcgaggcggactccggtggtgagtacaaattttgttgtcggtg

SEQ ID NO: 128528 - DNA, 55 bp, Artificial
  Synthetic oligonucleotide
ttgtgacagcgcaatcacaagaggcgaggcggactccggaggtgagtacaatttt

SEQ ID NO: 128529 - DNA, 60 bp, Artificial
  Synthetic oligonucleotide
ccagactggcagaactacacccctggaccaggaatcagatacccactgtgtaggggatgg

SEQ ID NO: 128530 - DNA, 60 bp, Artificial
  Synthetic oligonucleotide
gtgagtacaaattttgttgtcggtgggcaaccctagaggaagggcgaagtctctaggtaa

SEQ ID NO: 128531 - DNA, 60 bp, Artificial
  Synthetic oligonucleotide
tagtatgggccggaagcgagctgcaacgtttcgcgatgaatcccggtctcatggagaacg

SEQ ID NO: 128532 - DNA, 60 bp, Artificial
  Synthetic oligonucleotide
ccagaaggagagactctgatctggcgctttgacagcagcctagcgagacggcacatagcc

SEQ ID NO: 128533 - DNA, 59 bp, Artificial
  Synthetic oligonucleotide
ggataaatggagcagtctttgggattggtttgatataacacaatggctgtggtatataa

SEQ ID NO: 128534 - DNA, 60 bp, Artificial
  Synthetic oligonucleotide
ggagagactctgatctggcgctttgacagcagcctagcaagaaggcacatagccagagaa

SEQ ID NO: 128535 - DNA, 56 bp, Artificial
  Synthetic oligonucleotide
caaatggagcagtctttgggattggtttgatataacacaatggctgtggtatataa

SEQ ID NO: 128536 - DNA, 60 bp, Artificial
  Synthetic oligonucleotide
taaaaaatgctgctttcattgcccagtttgctttacgaaaaaagcattaggaatctccta

SEQ ID NO: 128537 - DNA, 60 bp, Artificial
  Synthetic oligonucleotide
cgcggctgctgtggaaaggtgaaggggcagtagtaataaaagaaggggaagacattaaag

SEQ ID NO: 128538 - DNA, 60 bp, Artificial
  Synthetic oligonucleotide
cgcgactactgtggaaaggtgaaggggcagtagtaataaaagaaggagaagacattaaag

SEQ ID NO: 128539 - DNA, 60 bp, Artificial
  Synthetic oligonucleotide
agtacaaattttgttgtcggtgggcaaccctagaggaagggcgaagtctctaggtaacag

SEQ ID NO: 128540 - DNA, 57 bp, Artificial
  Synthetic oligonucleotide
tcccagactggcagaactacacccctggaccaggagtcagatacccactggtcaggg

SEQ ID NO: 128541 - DNA, 60 bp, Artificial
  Synthetic oligonucleotide
ggagcagtctttgggattggtttgatataacacaatggctgtggtatataaggttagcta

SEQ ID NO: 128542 - DNA, 60 bp, Artificial
  Synthetic oligonucleotide
aaggagagactctgatctggcgctttgacagcagcctagcaagaaggcacatagccagag

SEQ ID NO: 128543 - DNA, 52 bp, Artificial
  Synthetic oligonucleotide
ttttgttgtcggtgggcaaccctagaggaagggcgaagtctctaggtaacag

SEQ ID NO: 128544 - DNA, 60 bp, Artificial
  Synthetic oligonucleotide
ctggagaccgctgcttaacgctcaataaagcctgcctgagagtgttaacagtgtgtgccc

SEQ ID NO: 128545 - DNA, 60 bp, Artificial
  Synthetic oligonucleotide
gttagacaaatggagcagtctttgggattggtttgatataacacaatggctgtggtatat

SEQ ID NO: 128546 - DNA, 60 bp, Artificial
  Synthetic oligonucleotide
tagggacgccagagatccaatttggaagggaccagcgcgactactgtggaaaggtgaagg

SEQ ID NO: 128547 - DNA, 60 bp, Artificial
  Synthetic oligonucleotide
cgcggctgctgtggaaaggtgaaggggcagtagtaataaaagaaggggaagatattaaag

SEQ ID NO: 128548 - DNA, 60 bp, Artificial
  Synthetic oligonucleotide
gctcttgcctaaactgccagatctgagcctgggagctctctggtagtggtggctggagac

SEQ ID NO: 128549 - DNA, 60 bp, Artificial
  Synthetic oligonucleotide
ttgcctaaactgccagatctgagcctgggagctctctggtagtggtggctggagaccgct

SEQ ID NO: 128550 - DNA, 59 bp, Artificial
  Synthetic oligonucleotide
ggtagtggctggctagagaccgctgcttaacgctcaataaagcctgcctgagagtgtta

SEQ ID NO: 128551 - DNA, 60 bp, Artificial
  Synthetic oligonucleotide
ggctggagaccgctgcttaacgctcaataaagcctgcctgagagtgttaacagtgtgtgc

SEQ ID NO: 128552 - DNA, 60 bp, Artificial
  Synthetic oligonucleotide
aactgccagatctgagcctgggagctctctggtagtggtggctggagaccgctgcttaac

SEQ ID NO: 128553 - DNA, 59 bp, Artificial
  Synthetic oligonucleotide
tggtagtggtggctggagaccgctgcttaacgctcaataaagcctgcctgagagtgtta

SEQ ID NO: 128554 - DNA, 60 bp, Artificial
  Synthetic oligonucleotide
gccggaagcgaactacagcgtttcgcgatgaatcccggtctcatggagaacgtagaaggc

SEQ ID NO: 128555 - DNA, 60 bp, Artificial
  Synthetic oligonucleotide
cggaagcgagctgcagcgcttcgcgatgaatcccggtctcatggagaacgtagaaggttg

SEQ ID NO: 128556 - DNA, 60 bp, Artificial
  Synthetic oligonucleotide
acttggatgacagaaactttactggtacaaaatgcaaacccagattgtaagcatatctta

SEQ ID NO: 128557 - DNA, 60 bp, Artificial
  Synthetic oligonucleotide
ttacaatattccagtacaaattggcaataaagaagttagagccactgttctagtaggaga

SEQ ID NO: 128558 - DNA, 60 bp, Artificial
  Synthetic oligonucleotide
ggatgggctatgagctacatccaaataaatggacagtgcaaaacatcacactgccagaac

SEQ ID NO: 128559 - DNA, 60 bp, Artificial
  Synthetic oligonucleotide
aaaacaggcaaatatgcaaaattaccaggtacccacaccaatgagataagacaattagca

SEQ ID NO: 128560 - DNA, 57 bp, Artificial
  Synthetic oligonucleotide
ggggattggggagtacactgcaggggaaagactattagacatactaactacaaatat

SEQ ID NO: 128561 - DNA, 55 bp, Artificial
  Synthetic oligonucleotide
ggggattggggagtacactgcaggggaaagactattggacatactaactacaaat

SEQ ID NO: 128562 - DNA, 60 bp, Artificial
  Synthetic oligonucleotide
cgattccggtcgccctgtgggtctagcatggaagccgtcataaaggtgatttcgtccgcg

SEQ ID NO: 128563 - DNA, 55 bp, Artificial
  Synthetic oligonucleotide
gcaggtatgcttttgccactgctcatattcatggggcaatatataagcagagggg

SEQ ID NO: 128564 - DNA, 60 bp, Artificial
  Synthetic oligonucleotide
tccttcctggtcatacccgagtgccctgctcctctgttgggcagggacctcctaaccaaa

SEQ ID NO: 128565 - DNA, 60 bp, Artificial
  Synthetic oligonucleotide
aaccaggcaaagaagacacctagggatggaagacctccactagacaaagaccagtgcgca

SEQ ID NO: 128566 - DNA, 60 bp, Artificial
  Synthetic oligonucleotide
ggcaaagaagacacctagggatggaagacctccactagacaaagaccagtgcgcatactg

SEQ ID NO: 128567 - DNA, 60 bp, Artificial
  Synthetic oligonucleotide
ggtaactctaactgtggaggggacccccattgagttcctggttgataccggagccgaaca

SEQ ID NO: 128568 - DNA, 57 bp, Artificial
  Synthetic oligonucleotide
ttttggtcatacctgagtgccccgctcctctgttgggcagggacctcctaaccaaac

SEQ ID NO: 128569 - DNA, 60 bp, Artificial
  Synthetic oligonucleotide
agacagcaggtatgcttttgccactgctcatattcatggggcaatatacaaacagagggg

SEQ ID NO: 128570 - DNA, 60 bp, Artificial
  Synthetic oligonucleotide
ccagccattgcccggggtgccaacctggtatacagacggtagtagtttcatcgcggaagg

SEQ ID NO: 128571 - DNA, 60 bp, Artificial
  Synthetic oligonucleotide
gcccggggtgccaacctggtatacagacggtagcagtttcatcacggaaggtaaacggag

SEQ ID NO: 128572 - DNA, 60 bp, Artificial
  Synthetic oligonucleotide
gccatagggtgcagctaccctcgggctaggactagaatggcaagctctaccttctacgta

SEQ ID NO: 128573 - DNA, 60 bp, Artificial
  Synthetic oligonucleotide
ctatactgccgcttataagcaaatcacctggggagccatagggtgcagctaccctcgggc

SEQ ID NO: 128574 - DNA, 60 bp, Artificial
  Synthetic oligonucleotide
agaggggaagtaaccctgtggccactgggaaccggagggccgacgaggctgcaaagcaag

SEQ ID NO: 128575 - DNA, 52 bp, Artificial
  Synthetic oligonucleotide
ggccactgggaaccggagggccgacgaggctgcaaaacaagccgccctgtcg

SEQ ID NO: 128576 - DNA, 54 bp, Artificial
  Synthetic oligonucleotide
ccaagtgcttgtcagacgccatcgacccagcagccttgagcctcggtggaaagg

SEQ ID NO: 128577 - DNA, 60 bp, Artificial
  Synthetic oligonucleotide
tcaagtgcttgtcagacgccatcgacccagcagccttgagcctcggtggaaaggcccata

SEQ ID NO: 128578 - DNA, 60 bp, Artificial
  Synthetic oligonucleotide
ccggactcagactatactgccgcttataagcaaatcacctggggagccatagggtgcagc

SEQ ID NO: 128579 - DNA, 60 bp, Artificial
  Synthetic oligonucleotide
gactatactgccgcttataagcaaatcacctggggagccatagggtgcagctaccctcgg

SEQ ID NO: 128580 - DNA, 60 bp, Artificial
  Synthetic oligonucleotide
cggttgcagcagtagcactccttctcaaagacgctgataagttaaccttgggacaaaatg

SEQ ID NO: 128581 - DNA, 60 bp, Artificial
  Synthetic oligonucleotide
ccagtggctgttcgacaatatccaatgagcaaagaagctcgggaaggtatcagaccccac

SEQ ID NO: 128582 - DNA, 60 bp, Artificial
  Synthetic oligonucleotide
gcctcaccagtggctgttcgacaatatccaatgagcaaagaagcccgggaaggtatcagg

SEQ ID NO: 128583 - DNA, 60 bp, Artificial
  Synthetic oligonucleotide
acagagggtgagtaaaattgctggcggtggccagacctaggggaagggcgaagtccctag

SEQ ID NO: 128584 - DNA, 60 bp, Artificial
  Synthetic oligonucleotide
gggggattggggggtacagtgcaggggaaagaataatagacataatagcaacagacatgc

SEQ ID NO: 128585 - DNA, 60 bp, Artificial
  Synthetic oligonucleotide
atagactaaaacatctagtatgggcaagcagggagctagaacgatttgcacttaatcctg

SEQ ID NO: 128586 - DNA, 60 bp, Artificial
  Synthetic oligonucleotide
tgatactataccagtaaaattaaagccaggaatggatggcccaaaggttaaacaatggcc

SEQ ID NO: 128587 - DNA, 60 bp, Artificial
  Synthetic oligonucleotide
gaaactgtgccagtaaaattaaagccaggaatggatggcccaaaggttaaacaatggcca

SEQ ID NO: 128588 - DNA, 60 bp, Artificial
  Synthetic oligonucleotide
gagactgtgccagtaaaattaaagccaggaatggatggcccaaaggttaaacaatggcca

SEQ ID NO: 128589 - DNA, 60 bp, Artificial
  Synthetic oligonucleotide
gagatccctcagacccattttggtagtgtggaaaatctctagcagtggcgcccgaacagg

SEQ ID NO: 128590 - DNA, 60 bp, Artificial
  Synthetic oligonucleotide
cctcagtatctgttataaggtttggtgtatgggattatttggtaaaggggtaacatggtc

SEQ ID NO: 128591 - DNA, 51 bp, Artificial
  Synthetic oligonucleotide
atcattagggattatggaaaacagatggcaggtgatgattgtgtggcaagt

SEQ ID NO: 128592 - DNA, 53 bp, Artificial
  Synthetic oligonucleotide
gagctctctggctagctagggaacccactgcttaagcctcaataaagcttgcc

SEQ ID NO: 128593 - DNA, 60 bp, Artificial
  Synthetic oligonucleotide
tgcctggttattatcgggattcgttactaattccgtgcaacaccggagcggatctcgcag

SEQ ID NO: 128594 - DNA, 60 bp, Artificial
  Synthetic oligonucleotide
tagctagagacatggcgaagcaaggctcaaaggagaaaaagggataccccgagctcaagg

SEQ ID NO: 128595 - DNA, 51 bp, Artificial
  Synthetic oligonucleotide
tattatcgggattcgttactaattccgtgcaataccggagcggatctcgca

SEQ ID NO: 128596 - DNA, 56 bp, Artificial
  Synthetic oligonucleotide
aaggagaccttgacagaagggaattgtctatgggcattaaaaactatagactttat

SEQ ID NO: 128597 - DNA, 60 bp, Artificial
  Synthetic oligonucleotide
ggagtggtctgggcggaactgggagtggtcaaccctcagatgctgcatataagcagctgc

SEQ ID NO: 128598 - DNA, 60 bp, Artificial
  Synthetic oligonucleotide
ggctacttccctgattggcagaactacacaccagggccaggggaaagattcccactgacc

SEQ ID NO: 128599 - DNA, 60 bp, Artificial
  Synthetic oligonucleotide
ccgcagcacaagaagcagttgtcgctttggcacgccttgcacaaaacgcgggctaccaga

SEQ ID NO: 128600 - DNA, 60 bp, Artificial
  Synthetic oligonucleotide
tagctctccttgcacaccaaaatggcctcaggcagagatcccagagaagcaagaccgggg

SEQ ID NO: 128601 - DNA, 60 bp, Artificial
  Synthetic oligonucleotide
cgctgcattagagcttctctgagtcaagtgccctcattgacgcctcactcttgaacgggt

SEQ ID NO: 128602 - DNA, 60 bp, Artificial
  Synthetic oligonucleotide
caccgccaagagaagggcacttgcaatgcacatccacggtaacgggtatgtcagtggagc

SEQ ID NO: 128603 - DNA, 59 bp, Artificial
  Synthetic oligonucleotide
ttttagggtatggccggtggatgggagcgaaacccagaaattttcccgccgctactctt

SEQ ID NO: 128604 - DNA, 60 bp, Artificial
  Synthetic oligonucleotide
ccacggcctcaacaaccaatatcacagcctcaacaaccactttgccgtgtgtccagaaca

SEQ ID NO: 128605 - DNA, 60 bp, Artificial
  Synthetic oligonucleotide
caaccgtaccgtggcagtggaataataggacccctgattggaataatatgacttggctgg

SEQ ID NO: 128606 - DNA, 60 bp, Artificial
  Synthetic oligonucleotide
tgcagaaaacaaagagatcttaaaaacggaacaggaagggacctactacaaaccaggaag

SEQ ID NO: 128607 - DNA, 60 bp, Artificial
  Synthetic oligonucleotide
ggcaagtagatgcctcgccaggggtatggcaaatggactgtacacatttagaaggcaagg

SEQ ID NO: 128608 - DNA, 60 bp, Artificial
  Synthetic oligonucleotide
attggaaattacattgtgcatacagaccccaaagctcaggccaggtagaaagaatgaata

SEQ ID NO: 128609 - DNA, 60 bp, Artificial
  Synthetic oligonucleotide
ccagctttccccacccatgacatggccacttataccccatgtcatattctgccaccccag

SEQ ID NO: 128610 - DNA, 60 bp, Artificial
  Synthetic oligonucleotide
taccaacctcgcctacatgcaataacgacagataactgcaacaactccattatcctcccc

SEQ ID NO: 128611 - DNA, 60 bp, Artificial
  Synthetic oligonucleotide
ccccaacaaacctcctcccgaaccatcctctttccttcccttgccctgcccgctcctcca

SEQ ID NO: 128612 - DNA, 60 bp, Artificial
  Synthetic oligonucleotide
ccctcatccaagtgtcggcatcctcattcaccacatgggtcgcttccataaccttggcag

SEQ ID NO: 128613 - DNA, 60 bp, Artificial
  Synthetic oligonucleotide
tccaagaacggccccctcttgaaaaacgtgtcatcaccggttggggactaaactgggatc

SEQ ID NO: 128614 - DNA, 59 bp, Artificial
  Synthetic oligonucleotide
acccagagaacctccaagaccctcaaggtccttacccctcccaccactcctgtctcccc

SEQ ID NO: 128615 - DNA, 60 bp, Artificial
  Synthetic oligonucleotide
ctgtcccagtgggcacgagaagccctccagacaggcataaccattctcaccctactcctc

SEQ ID NO: 128616 - DNA, 60 bp, Artificial
  Synthetic oligonucleotide
cccaccctccgaccagtttatgtccttggggtcacctactggcctgcaccatcttaactc

SEQ ID NO: 128617 - DNA, 60 bp, Artificial
  Synthetic oligonucleotide
cctcccggaggacgacctacccaccacaatgttccaacccgtgagggctccctgtatcca

SEQ ID NO: 128618 - DNA, 60 bp, Artificial
  Synthetic oligonucleotide
ggccagctctgccaatctttccaccacaacatgtcaaaacaggccctttgcgacttccta

SEQ ID NO: 128619 - DNA, 60 bp, Artificial
  Synthetic oligonucleotide
cagctacgacgctttcttaaactagcccttaaaacgcccatttggctaaatcctatcgac

SEQ ID NO: 128620 - DNA, 60 bp, Artificial
  Synthetic oligonucleotide
aggtggtctatgttccacccgcctacatcgacatgccctcctggccacctgtccagagca

SEQ ID NO: 128621 - DNA, 60 bp, Artificial
  Synthetic oligonucleotide
ccccatccttcgcaaacacctacaatccctatattctgcccttcacgggtaccgggaccc

SEQ ID NO: 128622 - DNA, 59 bp, Artificial
  Synthetic oligonucleotide
attctaggggtccggatctccgttatgggacaaacacctcagcctacccaagcgctact

SEQ ID NO: 128623 - DNA, 60 bp, Artificial
  Synthetic oligonucleotide
cggaggcccccccccacacagccctgctttcgttgtggcaaggtaggacactggagtcgg

SEQ ID NO: 128624 - DNA, 60 bp, Artificial
  Synthetic oligonucleotide
caattagcggccgtcctcaaccccatgaggaaaatgtttcccacgtcgaccattgtccaa

SEQ ID NO: 128625 - DNA, 60 bp, Artificial
  Synthetic oligonucleotide
tcctccattctcacattatgggccaaatccacgggctttccccaactccaatacccaagg

SEQ ID NO: 128626 - DNA, 60 bp, Artificial
  Synthetic oligonucleotide
agtaccagaacctttggctggctgctttctccaccctgccaggcaatacccgtgacccct

SEQ ID NO: 128627 - DNA, 60 bp, Artificial
  Synthetic oligonucleotide
taattaccgaagctgagacccgcgggatgacaggctacaaccccatggcagggcccctaa

SEQ ID NO: 128628 - DNA, 60 bp, Artificial
  Synthetic oligonucleotide
gtacctcctccggcgacaagacgccgccgtgccgttccaatagcagtgtggcttgtctcc

SEQ ID NO: 128629 - DNA, 60 bp, Artificial
  Synthetic oligonucleotide
tgctctacacccccaacatctccattccccaacaaacctcctcccgaaccatcctctttc

SEQ ID NO: 128630 - DNA, 60 bp, Artificial
  Synthetic oligonucleotide
aatggcgaccagcctcccgagccagccacccagggcgagtcatcgacccaaaaggtcaga

SEQ ID NO: 128631 - DNA, 60 bp, Artificial
  Synthetic oligonucleotide
tttcacccaagaagtcagccaagtgtcccttcgactacacttctctaagtgcggctcctc

SEQ ID NO: 128632 - DNA, 60 bp, Artificial
  Synthetic oligonucleotide
cccaaaaggtcagaccgtctcacacaaacaatcccaagtaaaggctctgacgtctccccc

SEQ ID NO: 128633 - DNA, 60 bp, Artificial
  Synthetic oligonucleotide
accactccagcccctgtagcccaacccaacccgtctgcacgtggaacctcgaccttaatt

SEQ ID NO: 128634 - DNA, 60 bp, Artificial
  Synthetic oligonucleotide
gacagggcctaggatactactcgccctcctacaatgacccttgctcgctacaatgcccct

SEQ ID NO: 128635 - DNA, 60 bp, Artificial
  Synthetic oligonucleotide
cctcctatctactctctcatcagcttatacaatactcctccttccataaccttcaccttc

SEQ ID NO: 128636 - DNA, 60 bp, Artificial
  Synthetic oligonucleotide
ccttcaatgacggctcaccaatgatttccggcccttgccccaaggcagggcagccatctt

SEQ ID NO: 128637 - DNA, 51 bp, Artificial
  Synthetic oligonucleotide
ctgcctccacgtctgggtagacaccttctccggtgcggtttccgtctcctg

SEQ ID NO: 128638 - DNA, 60 bp, Artificial
  Synthetic oligonucleotide
gcccttccgcagcggttacaaaaccgacataaccagtattcccttatcaacccagaaacc

SEQ ID NO: 128639 - DNA, 60 bp, Artificial
  Synthetic oligonucleotide
ctccaactgctgatgcctttcttccctctcccggcgcttttgatccttttcccgcaggcg

SEQ ID NO: 128640 - DNA, 60 bp, Artificial
  Synthetic oligonucleotide
ccccgtctacgtgtttggcgattgtgtacaggccgattggtgtcccgtctcaggtggtct

SEQ ID NO: 128641 - DNA, 60 bp, Artificial
  Synthetic oligonucleotide
cctgtctcctctcagcccatttcccaggattcggacagagcctcctatatggataccccg

SEQ ID NO: 128642 - DNA, 60 bp, Artificial
  Synthetic oligonucleotide
acacctcccaacccttctccaggaaccacgactcctcaggccaattttcaccctctcccc

SEQ ID NO: 128643 - DNA, 60 bp, Artificial
  Synthetic oligonucleotide
gtgcttgacacggccccctgccttttttccgatggctcccctcaaaaggcagcgtacgtt

SEQ ID NO: 128644 - DNA, 60 bp, Artificial
  Synthetic oligonucleotide
gccacaccaaaggaagccaagtcccttgtacagacttgccatacctgtcagatcatcaac

SEQ ID NO: 128645 - DNA, 60 bp, Artificial
  Synthetic oligonucleotide
cattggggccttcctcggcacttccgcccatcaaaccctccaggcggccttaccacccct

SEQ ID NO: 128646 - DNA, 60 bp, Artificial
  Synthetic oligonucleotide
gagtctataaaagcgcaaggacagttcaggaggtctctcgctccttcaccgaccctccgg

SEQ ID NO: 128647 - DNA, 60 bp, Artificial
  Synthetic oligonucleotide
cgaaggtcccccgttatcctttcctcctgcctcttagacacccacaacaaatggaccatc

SEQ ID NO: 128648 - DNA, 57 bp, Artificial
  Synthetic oligonucleotide
cccctccccaagcagttccagccatacttcgccttcaccattccccagccatgtaat

SEQ ID NO: 128649 - DNA, 60 bp, Artificial
  Synthetic oligonucleotide
cccaccgccaaggacttacaagatctcctccagtacctgtgctcctccctcgtggtttcc

SEQ ID NO: 128650 - DNA, 60 bp, Artificial
  Synthetic oligonucleotide
gccgatgcacactcacgattggtatctcctcctaccactccagcccctgtagcccaaccc

SEQ ID NO: 128651 - DNA, 60 bp, Artificial
  Synthetic oligonucleotide
tgcacgtggaacctcgaccttaattccctaacaacggaccaacgactacaccccccctgc

SEQ ID NO: 128652 - DNA, 60 bp, Artificial
  Synthetic oligonucleotide
ggaccagcgactacatcccccctgccctaacctaattacttactctggcttccacaaaac

SEQ ID NO: 128653 - DNA, 60 bp, Artificial
  Synthetic oligonucleotide
tcttaggtagtcgctccccgagggtctttagagacacccgggttcccgcctgcgcttggc

SEQ ID NO: 128654 - DNA, 54 bp, Artificial
  Synthetic oligonucleotide
aaaagctgcatgcccaagaccagacgccagcgaacccgccgagcacgccgcaac

SEQ ID NO: 128655 - DNA, 60 bp, Artificial
  Synthetic oligonucleotide
gagactcaccttggggatccatcctctccaagcgggctcggtcgagacgccttccgtggg

SEQ ID NO: 128656 - DNA, 60 bp, Artificial
  Synthetic oligonucleotide
aactccccggccttaccaatcagcggtggaaaggtccattacaatccctccaggaagcgg

SEQ ID NO: 128657 - DNA, 60 bp, Artificial
  Synthetic oligonucleotide
tccaccacagtcctccactaccacccattcctgaagcctctacccctcccaaaccacctc

SEQ ID NO: 128658 - DNA, 60 bp, Artificial
  Synthetic oligonucleotide
gcattctacccatataccatacaaccccaccagctcaggcctggtcgagagaaccaatgg

SEQ ID NO: 128659 - DNA, 54 bp, Artificial
  Synthetic oligonucleotide
accagcaaaactactctggaaaggtgaaggggcagtagtaatacaagacaatag

SEQ ID NO: 128660 - DNA, 50 bp, Artificial
  Synthetic oligonucleotide
cagtaaaattaaagccaggaatggatggcccaaaggttaaacaatggcca

SEQ ID NO: 128661 - DNA, 60 bp, Artificial
  Synthetic oligonucleotide
agaagaaatgaatttgccaggaaaatggaaaccaaaaatgatagggggaattggaggttt

SEQ ID NO: 128662 - DNA, 60 bp, Artificial
  Synthetic oligonucleotide
gcccggttacacttccacccagagttccttttccgtctctggaacacatgtgtagaacac

SEQ ID NO: 128663 - DNA, 60 bp, Artificial
  Synthetic oligonucleotide
ggaggcaagattacacttccacccagagttccttttccgtctctggaacgcatgcataga

SEQ ID NO: 128664 - DNA, 60 bp, Artificial
  Synthetic oligonucleotide
ggggaacatcagggagctctccaaatagtgaaggatgtcatcaatgaggaagctgcagac

SEQ ID NO: 128665 - DNA, 60 bp, Artificial
  Synthetic oligonucleotide
gaccatcagggagcgcttcaaatagtgaaggatgtcatcaatgaggaagctgcagactgg

SEQ ID NO: 128666 - DNA, 60 bp, Artificial
  Synthetic oligonucleotide
ctccaaatagtgaaggatgtcatcaatgaggaagctgcagactgggatcttagacacccc

SEQ ID NO: 128667 - DNA, 60 bp, Artificial
  Synthetic oligonucleotide
ggtccatacgaggcagcttacaactccctcagttctctctttggaacagaccaactacag

SEQ ID NO: 128668 - DNA, 60 bp, Artificial
  Synthetic oligonucleotide
caggaaggatgcgagaaaattcttagcgtactctttccactagttcctacagggtcagag

SEQ ID NO: 128669 - DNA, 60 bp, Artificial
  Synthetic oligonucleotide
gctattggagaccatcagggagcgcttcaaatagtgaaggatgtcatcaatgaggaagct

SEQ ID NO: 128670 - DNA, 60 bp, Artificial
  Synthetic oligonucleotide
ggtccctacgaggcagcttacaactccctcagttctctctttggaacagaccaactacag

SEQ ID NO: 128671 - DNA, 60 bp, Artificial
  Synthetic oligonucleotide
ccctcagttctctctttggaacagaccaactacagtagtagaaatagaggggcaaaaggt

SEQ ID NO: 128672 - DNA, 60 bp, Artificial
  Synthetic oligonucleotide
aggattgggaatgctattcttaggggttctaagtgcagcaggtagcactatgggcgcagc

SEQ ID NO: 128673 - DNA, 60 bp, Artificial
  Synthetic oligonucleotide
cttctctggaaaggtgaaggggcagtagtaatacaagataatagtgacataaaagtagtg

SEQ ID NO: 128674 - DNA, 60 bp, Artificial
  Synthetic oligonucleotide
cccttactgcagttgtggcaagtcctaccactgtattatctaacctcgctccgtcactac

SEQ ID NO: 128675 - DNA, 60 bp, Artificial
  Synthetic oligonucleotide
cctttgaaaagggctatgcatggtttcgaggtccatcaacggaagaaacgagacctagga

SEQ ID NO: 128676 - DNA, 60 bp, Artificial
  Synthetic oligonucleotide
caagggccccacctggaaatgtacccagcaatacctgcttcttttgcaaacaaccgggtc

SEQ ID NO: 128677 - DNA, 60 bp, Artificial
  Synthetic oligonucleotide
tataccccaaatcatacccctcatgcagcattacctaaacttgcaaagcagacaggatgc

SEQ ID NO: 128678 - DNA, 60 bp, Artificial
  Synthetic oligonucleotide
cagcctttatacaaagcagcaaacatgggaaacttccaagattggactcccttccctcct

SEQ ID NO: 128679 - DNA, 60 bp, Artificial
  Synthetic oligonucleotide
gcttgttggtaagaacggggtctcactccctcacagttgctgtggtgttgtgattcctct

SEQ ID NO: 128680 - DNA, 60 bp, Artificial
  Synthetic oligonucleotide
aagcggatttattacgacctgaactaacctttgttgcctgctcagcagtctctccggcgc

SEQ ID NO: 128681 - DNA, 60 bp, Artificial
  Synthetic oligonucleotide
ttcaacatatcataccccacttttaaaccctggcataccccatgaactaacacaacggtg

SEQ ID NO: 128682 - DNA, 60 bp, Artificial
  Synthetic oligonucleotide
ggcattggaaactcccatatatacgattacgcttcaattagccgacagtcttacagcagc

SEQ ID NO: 128683 - DNA, 60 bp, Artificial
  Synthetic oligonucleotide
ctccgtataggtcacaaccataccccgcatttatacaacctcctcaaaaccaccaaaacc

SEQ ID NO: 128684 - DNA, 60 bp, Artificial
  Synthetic oligonucleotide
tttctgatggctcttatacaaccggcagaggaggagcggcagtagtgatgcacaggccgg

SEQ ID NO: 128685 - DNA, 60 bp, Artificial
  Synthetic oligonucleotide
ggaaggtagacatgaccgtcacgtatggcttggtatcatcagcatcggtggcaccttgat

SEQ ID NO: 128686 - DNA, 60 bp, Artificial
  Synthetic oligonucleotide
gatgatgtgatggcagtactggaggcagaggttgcaatcacgataaccacagccactgaa

SEQ ID NO: 128687 - DNA, 60 bp, Artificial
  Synthetic oligonucleotide
ccacaggaggagataaataccccgagccacaaatagggtataatacaggaacagggaggc

SEQ ID NO: 128688 - DNA, 60 bp, Artificial
  Synthetic oligonucleotide
ccagtccggcccttcgagcggcagtagttattgctgcggccgtaaaaggtgcagatctgt

SEQ ID NO: 128689 - DNA, 60 bp, Artificial
  Synthetic oligonucleotide
ccgtacaagtagagtttaaagtgactagcctccccggacaaaacatatcatgtcaagcga

SEQ ID NO: 128690 - DNA, 60 bp, Artificial
  Synthetic oligonucleotide
gcgcctgcctgactgcaataggaggggcggccacagtggttcccgacctcaaattaacaa

SEQ ID NO: 128691 - DNA, 60 bp, Artificial
  Synthetic oligonucleotide
gtggtccctgatccagctaaaccttttcaactgtatacgtcacattcagaacatgcatcc

SEQ ID NO: 128692 - DNA, 60 bp, Artificial
  Synthetic oligonucleotide
ccctaatcctatatctcccaacagtacggccctgaatgagcttgagcaaaagactacacc

SEQ ID NO: 128693 - DNA, 60 bp, Artificial
  Synthetic oligonucleotide
cctcgagtatggataatgttcccctttatagcacgggaaggcctatcacaccttactcac

SEQ ID NO: 128694 - DNA, 60 bp, Artificial
  Synthetic oligonucleotide
ggagttgtcactggacacagtttgctgcatatcgcatgccctgctacggcagtacaggcc

SEQ ID NO: 128695 - DNA, 60 bp, Artificial
  Synthetic oligonucleotide
gggttaaccaacatgctgaatacatgggaaagccggtaatcgtgacattggcgggcctag

SEQ ID NO: 128696 - DNA, 60 bp, Artificial
  Synthetic oligonucleotide
gttaaactatgttatgtaaccggttactgccagacgctgtatactgactcatatgtaacc

SEQ ID NO: 128697 - DNA, 60 bp, Artificial
  Synthetic oligonucleotide
gacacagaccatggcaatctataattgcgacgaggcagacgttgaacaattggccagagt

SEQ ID NO: 128698 - DNA, 60 bp, Artificial
  Synthetic oligonucleotide
ttcctctgatgcctcagcacaaaaacctatcagtactgacaacaacccggacctaaaagt

SEQ ID NO: 128699 - DNA, 59 bp, Artificial
  Synthetic oligonucleotide
agaaatgacagttcttttaccaccgacataccacaaacaattgtcatgtcagactaaaa

SEQ ID NO: 128700 - DNA, 60 bp, Artificial
  Synthetic oligonucleotide
ctgcatgctttacaaacttcctatactataatgacgcctattttgtttgcatctccgcta

SEQ ID NO: 128701 - DNA, 60 bp, Artificial
  Synthetic oligonucleotide
agtattagagataaccgaaccagagcccagccctacggagtaactgtgtacatactcccc

SEQ ID NO: 128702 - DNA, 60 bp, Artificial
  Synthetic oligonucleotide
gcttgttcggtaagaacggggtctcactccctcacagttgctgtggtgttgtgattcctc

SEQ ID NO: 128703 - DNA, 60 bp, Artificial
  Synthetic oligonucleotide
caacctggtggtgcttcagcacaaaccgccgaattgttagccctagccgcagcatgccac

SEQ ID NO: 128704 - DNA, 60 bp, Artificial
  Synthetic oligonucleotide
ggggacacgttggagcatacaccctggctgcatgtgactggttgttaggatcgcttccat

SEQ ID NO: 128705 - DNA, 60 bp, Artificial
  Synthetic oligonucleotide
aacacaatcccaaatacaaatcacgactacaaggtcatagacctctaccaagcagaccgt

SEQ ID NO: 128706 - DNA, 60 bp, Artificial
  Synthetic oligonucleotide
ccataggagtggcttggaaactacactgccctggacacccacgatccagtggcatagtgg

SEQ ID NO: 128707 - DNA, 60 bp, Artificial
  Synthetic oligonucleotide
acaacctactacgatccgacagattcgtgcctttctaggtctggtgggctactgcaggca

SEQ ID NO: 128708 - DNA, 60 bp, Artificial
  Synthetic oligonucleotide
gcccacactaaaggtgtaagtatggaggtgaggggtaacgccgctgctgatgaggccgct

SEQ ID NO: 128709 - DNA, 60 bp, Artificial
  Synthetic oligonucleotide
gtggcagccgcatgcctccagatagctgctaaacacacagaggcacattcaaggctggct

SEQ ID NO: 128710 - DNA, 60 bp, Artificial
  Synthetic oligonucleotide
cgcctcatgactgcgttttacttacccacacgatctccaggccccgacctgatttatctg

SEQ ID NO: 128711 - DNA, 60 bp, Artificial
  Synthetic oligonucleotide
ggacagaagtgttgccatatgtcctattggaaatgcgtgcaaccccaaagaaacacggac

SEQ ID NO: 128712 - DNA, 60 bp, Artificial
  Synthetic oligonucleotide
gacaacaattaatagacgaaacaccagaaatatgtgcaaatgcatgggtaataaggttga

SEQ ID NO: 128713 - DNA, 60 bp, Artificial
  Synthetic oligonucleotide
ggaaggaccttttctgatcctcctctctacaccaacggcggtaaaagttgaaggacgacc

SEQ ID NO: 128714 - DNA, 60 bp, Artificial
  Synthetic oligonucleotide
aagcttgtgcttccatacacagaagtcttacgcaggcggactcgtttattttaggcgcgc

SEQ ID NO: 128715 - DNA, 60 bp, Artificial
  Synthetic oligonucleotide
caagaggcatggtataataatttattctcttggtatgacggctctgtatggtcacagcta

SEQ ID NO: 128716 - DNA, 60 bp, Artificial
  Synthetic oligonucleotide
ccacggaggccccatgaatatggcaccgattataagtgcggacagttatgccctgccgac

SEQ ID NO: 128717 - DNA, 60 bp, Artificial
  Synthetic oligonucleotide
ggagtgcagggaaacaaactatagtcccaacccaatacatacaacagaactttgtgccag

SEQ ID NO: 128718 - DNA, 60 bp, Artificial
  Synthetic oligonucleotide
cgaaaaggggaaacagcacgacaaatgacggcacatactattaaaaaactaatagtaggg

SEQ ID NO: 128719 - DNA, 60 bp, Artificial
  Synthetic oligonucleotide
aggctgacctagcggcacagcagcaagtcctccttttacagcgagagcaacagcgagagc

SEQ ID NO: 128720 - DNA, 60 bp, Artificial
  Synthetic oligonucleotide
ggaaagaagtacatcgaccatttatcaaacgtcaccccaggtgtggataacgcctgaagg

SEQ ID NO: 128721 - DNA, 60 bp, Artificial
  Synthetic oligonucleotide
ctcggaaatctgcatttacatggatgacgttctcattgcctcaaaagatagggacactaa

SEQ ID NO: 128722 - DNA, 60 bp, Artificial
  Synthetic oligonucleotide
cacaatattctggctccgtcaaaaccagacgcattaaccaagacataaagaaacagtacc

SEQ ID NO: 128723 - DNA, 60 bp, Artificial
  Synthetic oligonucleotide
tgatagaagcgatatccaaggcaaaaagggactacggagtactaaaacagggccagatag

SEQ ID NO: 128724 - DNA, 60 bp, Artificial
  Synthetic oligonucleotide
taatcattaaccatcaaacctattacgcacaaaccagtttttcttctgctcaagttgtcg

SEQ ID NO: 128725 - DNA, 65 bp, Artificial
  Synthetic oligonucleotide
ggataaacaagtagcctaaattaaggaggagtagtaaggtatatagttgagagtataaatatggg

SEQ ID NO: 128726 - DNA, 60 bp, Artificial
  Synthetic oligonucleotide
attgattcaacaggttctccattgccgccaacacccctgtttctttggacatattcgtgc

SEQ ID NO: 128727 - DNA, 60 bp, Artificial
  Synthetic oligonucleotide
gcgatggatatatctgtctgctactccaactaaacatctgctcccttactatgaacttgt

SEQ ID NO: 128728 - DNA, 60 bp, Artificial
  Synthetic oligonucleotide
cacccattgtgacagatttgatgttagatcagggcttacttccaaatcaaggtttaggta

SEQ ID NO: 128729 - DNA, 60 bp, Artificial
  Synthetic oligonucleotide
cctctgacgcctattgggtgcaaaatgttactgaggcacggccagaactcgagctacgca

SEQ ID NO: 128730 - DNA, 60 bp, Artificial
  Synthetic oligonucleotide
cagcctattcccgaagcgacacttatatttacagatggatcttctaatggaactgcagct

SEQ ID NO: 128731 - DNA, 60 bp, Artificial
  Synthetic oligonucleotide
agcctatgcaacgctatcaatggagagttctcccgcaaggaatgactaatagccctacgc

SEQ ID NO: 128732 - DNA, 60 bp, Artificial
  Synthetic oligonucleotide
caaattgttaaatcttgctctacttgtcctcaattctttgttctccctcaatatggtgtc

SEQ ID NO: 128733 - DNA, 51 bp, Artificial
  Synthetic oligonucleotide
gtcattctttacgcttgcaatttaaaatttctcgtgaagctgcacggcaaa

SEQ ID NO: 128734 - DNA, 60 bp, Artificial
  Synthetic oligonucleotide
cgggtcctctgacgcctattgggtgcaaaatgttaccgaggcacgaccagaacttgagct

SEQ ID NO: 128735 - DNA, 53 bp, Artificial
  Synthetic oligonucleotide
ccccgagcacccacaggggttctctatcaagataaacctttgcgatggatata

SEQ ID NO: 128736 - DNA, 60 bp, Artificial
  Synthetic oligonucleotide
cttgctctacttgtcctcaattctttgttctccctcaatatggtgtcaaccctcgaggtt

SEQ ID NO: 128737 - DNA, 60 bp, Artificial
  Synthetic oligonucleotide
caaccctcgaggtttacgccctaatcacctctggcaaacagatgttactcacattcctca

SEQ ID NO: 128738 - DNA, 60 bp, Artificial
  Synthetic oligonucleotide
cgagccttttaggaggaaaatcagatattcacatttcccctcagcaagcaaatatctctt

SEQ ID NO: 128739 - DNA, 60 bp, Artificial
  Synthetic oligonucleotide
aatgactaatagccctacgctgtgccaaaaatttgttgctacagcaatagctccggttcg

SEQ ID NO: 128740 - DNA, 60 bp, Artificial
  Synthetic oligonucleotide
gactctgatcctgcgtcaccccgaacgctttctttagaaggacgaactgctttacaatca

SEQ ID NO: 128741 - DNA, 60 bp, Artificial
  Synthetic oligonucleotide
gaagaagctattagacaacaacagattacttattgggattaccaacgatcatggggtttg

SEQ ID NO: 128742 - DNA, 60 bp, Artificial
  Synthetic oligonucleotide
cgacacttatatttacagatggatcttctaatggaactgcagctttaatcattaaccatc

SEQ ID NO: 128743 - DNA, 60 bp, Artificial
  Synthetic oligonucleotide
cccgaacactttctttagaaggacgaactgctttacaatcaatagaagaagctattagac

SEQ ID NO: 128744 - DNA, 60 bp, Artificial
  Synthetic oligonucleotide
caagataaacctttgcgatggatatatttgtctgctactccaactaaacatctgctccct

SEQ ID NO: 128745 - DNA, 60 bp, Artificial
  Synthetic oligonucleotide
gtgtgttcgtgctagggttcttgggttttctcgcgacagcaggttctgcaatgggcgcgc

SEQ ID NO: 128746 - DNA, 60 bp, Artificial
  Synthetic oligonucleotide
taacttccctgctgccatcagccccggcggaggaggtggaaccccagcagctcaacctgt

SEQ ID NO: 128747 - DNA, 60 bp, Artificial
  Synthetic oligonucleotide
gcatcgattatgaaccatcatgcccagtgagaccacaggtgccgcttagagaccccacct

SEQ ID NO: 128748 - DNA, 60 bp, Artificial
  Synthetic oligonucleotide
cacacaaagggataggaggaaacacagaggtagacaaattagtcagcagagggatccgcc

SEQ ID NO: 128749 - DNA, 60 bp, Artificial
  Synthetic oligonucleotide
atccaggtacaaggtggtggagatagatccactttcgctggccccaacctcggctcaaag

SEQ ID NO: 128750 - DNA, 60 bp, Artificial
  Synthetic oligonucleotide
gctccgcccggctttgctatgctaaaatgcaatgatgccaatttcacaggagtgggcaag

SEQ ID NO: 128751 - DNA, 60 bp, Artificial
  Synthetic oligonucleotide
gagcagcccagaagaccttcaagataccgcatggatgaatagagacccggcagagtgtct

SEQ ID NO: 128752 - DNA, 60 bp, Artificial
  Synthetic oligonucleotide
aatgaacaggcagcagagtgggatctcttacatccgcagcccgcggcaccccaaccagta

SEQ ID NO: 128753 - DNA, 60 bp, Artificial
  Synthetic oligonucleotide
tcaagctcgcaggcgggacccaaggattgcccctggccgagtggtccggctccacaactt

SEQ ID NO: 128754 - DNA, 60 bp, Artificial
  Synthetic oligonucleotide
ccatcaaggagactctaactaaattaacgcttgcaactggcactagagactgggtactcc

SEQ ID NO: 128755 - DNA, 60 bp, Artificial
  Synthetic oligonucleotide
gaacaggttacatctgagcaagcaaagttttggttgggattagggggagggagggtctct

SEQ ID NO: 128756 - DNA, 60 bp, Artificial
  Synthetic oligonucleotide
ggattagggggagggagggtctctcccccaggtccggagagcattgagaaaccagctacg

SEQ ID NO: 128757 - DNA, 60 bp, Artificial
  Synthetic oligonucleotide
gggattggttttgggggcattgaaggcggctcgagaggaacaggttacatctgagcaagc

SEQ ID NO: 128758 - DNA, 60 bp, Artificial
  Synthetic oligonucleotide
gggattggttttgggggcattgaaggcggcccgagaggaacaggttacatctgagcaagc

SEQ ID NO: 128759 - DNA, 60 bp, Artificial
  Synthetic oligonucleotide
ctgagcaagcaaagttttggttgggattagggggagggagggtctctcccccaggtccgg

SEQ ID NO: 128760 - DNA, 60 bp, Artificial
  Synthetic oligonucleotide
ggcattgaaggcggctcgagaggaacaggttacatctgagcaagcaaagttttggttggg

SEQ ID NO: 128761 - DNA, 60 bp, Artificial
  Synthetic oligonucleotide
aagcggcccgagaggaacaggttacatctgagcaagcaaagttttggttgggattagggg

SEQ ID NO: 128762 - DNA, 60 bp, Artificial
  Synthetic oligonucleotide
aggcggctcgagaggaacaggttacatctgagcaagcaaagttttggttgggattagggg

SEQ ID NO: 128763 - DNA, 60 bp, Artificial
  Synthetic oligonucleotide
ggattagggggagggagggtctctcccccaggtccggaatgcatcgagaaaccagcaacg

SEQ ID NO: 128764 - DNA, 60 bp, Artificial
  Synthetic oligonucleotide
agcactatgggcgcggcgtcaataacgctgacggtacaggccagacaattattgtctggt

SEQ ID NO: 128765 - DNA, 60 bp, Artificial
  Synthetic oligonucleotide
ccccgttagatttaaattgtactggactacctggaatagcatttaatggaacagaagcaa

SEQ ID NO: 128766 - DNA, 66 bp, Artificial
  Synthetic oligonucleotide
ccaaattattcaatgcctgtgatggttcaatgtaaattgcatcaagaatatcatcctaatgatacc

SEQ ID NO: 128767 - DNA, 60 bp, Artificial
  Synthetic oligonucleotide
cttggggatatgaaggtaatggatcagcatggaatgaatctcttaattggttagtgcctt

SEQ ID NO: 128768 - DNA, 60 bp, Artificial
  Synthetic oligonucleotide
aactctagctcttgttactgctacaactgcagggttaataggaacaacaacggggacatc

SEQ ID NO: 128769 - DNA, 60 bp, Artificial
  Synthetic oligonucleotide
caggccaggacacaacccttttagagctcccggaataacggagcaagaaagacaagagtt

SEQ ID NO: 128770 - DNA, 64 bp, Artificial
  Synthetic oligonucleotide
gtgacagctaaattagagcagaggcaagcaatacaattatatatattagctcatagattagagg

SEQ ID NO: 128771 - DNA, 60 bp, Artificial
  Synthetic oligonucleotide
ggctttaaaggcctgtggcaaaccaacagaaagttgggtaggatgttgcaaccacagatt

SEQ ID NO: 128772 - DNA, 60 bp, Artificial
  Synthetic oligonucleotide
caataccacaggtaatacggggagaaaaagatcctcaagaattttgtgctgattgttgga

SEQ ID NO: 128773 - DNA, 60 bp, Artificial
  Synthetic oligonucleotide
ctggtccaggatgggatataggaatggtgggattagtaataaaagcatattcctgcccag

SEQ ID NO: 128774 - DNA, 60 bp, Artificial
  Synthetic oligonucleotide
gccgtgtgtctgagtcttttctttcctgtgaggctccggattccgggacggagaccttgc

SEQ ID NO: 128775 - DNA, 56 bp, Artificial
  Synthetic oligonucleotide
cgggacggagaccttgcagttggcgcccgaacagggacttgaaggagactctttca

SEQ ID NO: 128776 - DNA, 60 bp, Artificial
  Synthetic oligonucleotide
ggcaaagcaggccatattgcaacagattgttgggacatgcagggaaagcagcagggaaac

SEQ ID NO: 128777 - DNA, 54 bp, Artificial
  Synthetic oligonucleotide
catgttaagaacagctgtgtaaccgcaaggcttaaccacaaaccatatccgtgc

SEQ ID NO: 128778 - DNA, 60 bp, Artificial
  Synthetic oligonucleotide
gaagttctgttatggttcacagcattttcagcagacttaacacctacagatatggcaaca

SEQ ID NO: 128779 - DNA, 60 bp, Artificial
  Synthetic oligonucleotide
cacccctcagatgctccaagaccattaccttattttacagcaagggagataatgggattg

SEQ ID NO: 128780 - DNA, 60 bp, Artificial
  Synthetic oligonucleotide
aaccagagagcactctagaagaaaagttgagagcatgtcaggaggtgggatcaacatcct

SEQ ID NO: 128781 - DNA, 60 bp, Artificial
  Synthetic oligonucleotide
gctttacaacagcaaagtcaagtatgtcaagtacagcaaggaagaggaaagccacaagga

SEQ ID NO: 128782 - DNA, 60 bp, Artificial
  Synthetic oligonucleotide
cctctgaagggtcctcaggcacaataaattgctcgtgagatttgaaccctgccgtgtgtc

SEQ ID NO: 128783 - DNA, 60 bp, Artificial
  Synthetic oligonucleotide
tgcaggatacaataatgatttcttgggaccatggggaggattaaagtataggtctattct

SEQ ID NO: 128784 - DNA, 60 bp, Artificial
  Synthetic oligonucleotide
gggcatgaatatgcatttgggatgaatccagattggatcggtccttatgagggagagatg

SEQ ID NO: 128785 - DNA, 55 bp, Artificial
  Synthetic oligonucleotide
atcagttaagaggaatgtgcccatttaaagacatctgtgagataccggggaatgg

SEQ ID NO: 128786 - DNA, 60 bp, Artificial
  Synthetic oligonucleotide
caatgccatcagcttttcaagccaaagagcagaaaggggtaggattaagagatccacaag

SEQ ID NO: 128787 - DNA, 56 bp, Artificial
  Synthetic oligonucleotide
aattggaatgggggtaatattgaaaggatgtatattaaactgttgtaaaatcttaa

SEQ ID NO: 128788 - DNA, 60 bp, Artificial
  Synthetic oligonucleotide
gagaagaggacgcaggatatgatttgcttgcagaacaagacatacatttaatgccaggag

SEQ ID NO: 128789 - DNA, 60 bp, Artificial
  Synthetic oligonucleotide
aagcttgcccaccacaagtagagtatattcatgcagcaataatgatacagaggtctttaa

SEQ ID NO: 128790 - DNA, 60 bp, Artificial
  Synthetic oligonucleotide
gcgacatagccttaagagctatatataagatcagggaagaatcaatagtaaggttaggaa

SEQ ID NO: 128791 - DNA, 60 bp, Artificial
  Synthetic oligonucleotide
tatgatgaaaggaaatcaagctttagattcaaaaagaaggtggacagaagaggctaagaa

SEQ ID NO: 128792 - DNA, 60 bp, Artificial
  Synthetic oligonucleotide
cagcaacaatgtcaattaatacagccttcggctcctccaatggagtcccttatggacatc

SEQ ID NO: 128793 - DNA, 60 bp, Artificial
  Synthetic oligonucleotide
cttagatgacaatagtttaacagaacctctgctagggagagataatatggttagatttgg

SEQ ID NO: 128794 - DNA, 60 bp, Artificial
  Synthetic oligonucleotide
gaaccctgccgtgtgtctgagtcttttctttcctgtgaggctccggattcggacggagac

SEQ ID NO: 128795 - DNA, 60 bp, Artificial
  Synthetic oligonucleotide
cagacggatgatgagaaatctagaaagaagattcgatgcattgttccatgactcaccgcc

SEQ ID NO: 128796 - DNA, 60 bp, Artificial
  Synthetic oligonucleotide
ggggatgaggagttcgcgtgagatacctcctgagaacagaatgaagtaatgggcagtatt

SEQ ID NO: 128797 - DNA, 60 bp, Artificial
  Synthetic oligonucleotide
gcaacctggaagacagattttcaatggaattatagtagaccttttaatgaaaccatagga

SEQ ID NO: 128798 - DNA, 60 bp, Artificial
  Synthetic oligonucleotide
gtctcattagagaaacatcaggagtgatattggcattggatcctccttgggtgattccgg

SEQ ID NO: 128799 - DNA, 60 bp, Artificial
  Synthetic oligonucleotide
gggttcttcaatggagatgcttctacgatagaggtatgaagcaactattaggattacaaa

SEQ ID NO: 128800 - DNA, 60 bp, Artificial
  Synthetic oligonucleotide
cagtattcagacatgcaggtaacgcagagtctggctttattagtctttgatattagtcac

SEQ ID NO: 128801 - DNA, 60 bp, Artificial
  Synthetic oligonucleotide
aggctttgtagtccggagagaagactgcaaagaagactcttcacggatcatcaagccagg

SEQ ID NO: 128802 - DNA, 60 bp, Artificial
  Synthetic oligonucleotide
ttgagaggacacagacagtgaatatccttggtggagtggcgaaagagttaaattcacccc

SEQ ID NO: 128803 - DNA, 60 bp, Artificial
  Synthetic oligonucleotide
gagtgagaccgaaaggttgctcgaaggggagaaaagaggttgagaggacacagacagtga

SEQ ID NO: 128804 - DNA, 60 bp, Artificial
  Synthetic oligonucleotide
gccaaggcaatagaaagctgcttagtgggactccctctactaccttctgagtgagaccga

SEQ ID NO: 128805 - DNA, 60 bp, Artificial
  Synthetic oligonucleotide
cagatgggccataagaatggcaaatgtaactacaggacgagaccctggtaaattgccaga

SEQ ID NO: 128806 - DNA, 60 bp, Artificial
  Synthetic oligonucleotide
gggacctacaggatggggaatgagcagggtaaagaagtgaaggctgcagtcaagagatgt

SEQ ID NO: 128807 - DNA, 60 bp, Artificial
  Synthetic oligonucleotide
tcaagccaggtgattcgccgagggactcgctgacaaggtaagaaaagaagggacctacag

SEQ ID NO: 128808 - DNA, 60 bp, Artificial
  Synthetic oligonucleotide
gggattaaattcaagaccctcagaaaaaggaccaggaggagaggaagaagcaatgccatc

SEQ ID NO: 128809 - DNA, 60 bp, Artificial
  Synthetic oligonucleotide
gggccacttctttggacttgcaactagcttgctaggggcttgctcctctgaagggtcctc

SEQ ID NO: 128810 - DNA, 60 bp, Artificial
  Synthetic oligonucleotide
ccagagcatgggtatatgctcatccctaggagacacataaggagagttccagaaccctgt

SEQ ID NO: 128811 - DNA, 60 bp, Artificial
  Synthetic oligonucleotide
ggttaaggagacaagaagggatcagatggtcttttcatacaagagattatcatctaggat

SEQ ID NO: 128812 - DNA, 60 bp, Artificial
  Synthetic oligonucleotide
caaaggggtagaatagggagaatatccccatatgagttacttatacagcaagaatcagac

SEQ ID NO: 128813 - DNA, 60 bp, Artificial
  Synthetic oligonucleotide
cacagaatcaggatacatttgggcaagaataattcctcaagagacagcagatatgacagt

SEQ ID NO: 128814 - DNA, 60 bp, Artificial
  Synthetic oligonucleotide
gatcaacaggtgcatttgcatcttggatgaataacattgaagaggcagaaatcaaccatg

SEQ ID NO: 128815 - DNA, 52 bp, Artificial
  Synthetic oligonucleotide
aacacaggacttttgggaagtacagttaggaatacctcatccaggagggctc

SEQ ID NO: 128816 - DNA, 50 bp, Artificial
  Synthetic oligonucleotide
ccaggaatggatggaccaaaagtaaaacaatggcccctatctaaagaaaa

SEQ ID NO: 128817 - DNA, 60 bp, Artificial
  Synthetic oligonucleotide
ctaagccctttgaactctttgtcgacgagaagcagggctacgccaaaggcgtcctaacgc

SEQ ID NO: 128818 - DNA, 60 bp, Artificial
  Synthetic oligonucleotide
tctttgtcgacgagaagcagggctacgccaaaggcgtcctaacgcaaaaactgggacctt

SEQ ID NO: 128819 - DNA, 60 bp, Artificial
  Synthetic oligonucleotide
aagcatcagaaggaacctccctttctgtggatggggtatgagctccatccagacaagtgg

SEQ ID NO: 128820 - DNA, 51 bp, Artificial
  Synthetic oligonucleotide
ttcttccctgattggcagaactacacaccaggaccaggaaccagataccca

SEQ ID NO: 128821 - DNA, 55 bp, Artificial
  Synthetic oligonucleotide
gtggaaaatctctagcagtggcgcccgaacagggacttgaaatcgaaagtaagac

SEQ ID NO: 128822 - DNA, 60 bp, Artificial
  Synthetic oligonucleotide
ggaaaccaaaaatgatagggggaattggaggttttatcaaagtaagacagtatggtcaaa

SEQ ID NO: 128823 - DNA, 57 bp, Artificial
  Synthetic oligonucleotide
ccttagcagataagcttgccacccaaggaagttatgtggtaaattgtaataccaaaa

SEQ ID NO: 128824 - DNA, 51 bp, Artificial
  Synthetic oligonucleotide
gcagataagcttgccacccaaggaagttatgtggttaattgtaataccaaa

SEQ ID NO: 128825 - DNA, 60 bp, Artificial
  Synthetic oligonucleotide
ggtcagtcttaggaaagtttaggcagggttatcgccctcttccttatgtcttcaagggag

SEQ ID NO: 128826 - DNA, 60 bp, Artificial
  Synthetic oligonucleotide
gctgagcctgatagatcagcactccgagttattaaaactaactatctggggtgtaaagaa

SEQ ID NO: 128827 - DNA, 60 bp, Artificial
  Synthetic oligonucleotide
cgggtttattacagagaaggaagggaccaacagtggaaaggaccagcagaactcatttgg

SEQ ID NO: 128828 - DNA, 60 bp, Artificial
  Synthetic oligonucleotide
ttttcgggtttattacagagaaggaagggaccaacagtggaaaggaccagcagaactcat

SEQ ID NO: 128829 - DNA, 60 bp, Artificial
  Synthetic oligonucleotide
tgctgagcctgatagatcagcactccgagttattaaaactaactatctggggtgtaaaga

SEQ ID NO: 128830 - DNA, 54 bp, Artificial
  Synthetic oligonucleotide
tgtccagtctcaggctttgttgaatgggattgtggagcagcagaaggttctgct

SEQ ID NO: 128831 - DNA, 54 bp, Artificial
  Synthetic oligonucleotide
tgtccagtcccagactttactgaatgggattgtggagcagcagaaggttctgct

SEQ ID NO: 128832 - DNA, 60 bp, Artificial
  Synthetic oligonucleotide
cttccacccagagttccttttccgtctctggaacgcatgcatagaacactggcatgacag

SEQ ID NO: 128833 - DNA, 60 bp, Artificial
  Synthetic oligonucleotide
ggcagggatatcgccctcttccttatgtcttcaagggagactatctccggccccacaacc

SEQ ID NO: 128834 - DNA, 57 bp, Artificial
  Synthetic oligonucleotide
ttgctctcattacttgtaacaaagggagggaaagtatgggaggacagacaccatggg

SEQ ID NO: 128835 - DNA, 56 bp, Artificial
  Synthetic oligonucleotide
tgacagtattagatattggagatgcatatttcactataccattagatccaaagttt

SEQ ID NO: 128836 - DNA, 60 bp, Artificial
  Synthetic oligonucleotide
caccacaagggcctattcccatgacagcaaggtttattagaggtttaggagtacctagag

SEQ ID NO: 128837 - DNA, 60 bp, Artificial
  Synthetic oligonucleotide
ggcaccaccacaagggcctattcccatgacagcaaggtttattagaggtttaggagtacc

SEQ ID NO: 128838 - DNA, 60 bp, Artificial
  Synthetic oligonucleotide
ggagactctttgacatggagcaaagcgctcaagaagttagagaaggtgacggtacaaggg

SEQ ID NO: 128839 - DNA, 60 bp, Artificial
  Synthetic oligonucleotide
ggagaccctttgacatggagcaaggcgctcaagaagttagagaaggtgacggtacaaggg

SEQ ID NO: 128840 - DNA, 60 bp, Artificial
  Synthetic oligonucleotide
gctcgcattctgacaattgggcactcagattctgcggtctgagtcccttctctgctgggc

SEQ ID NO: 128841 - DNA, 60 bp, Artificial
  Synthetic oligonucleotide
cctggctgatcataggatccctaggacagcagaggagaacttacagaagtcttctggagg

SEQ ID NO: 128842 - DNA, 60 bp, Artificial
  Synthetic oligonucleotide
atataagtgcttgtattctgacaattgggcactcagattctgcggtctgagtcccttctc

SEQ ID NO: 128843 - DNA, 60 bp, Artificial
  Synthetic oligonucleotide
ataagtgcttgtattctgacaattgggcactcagattctgcggtctgagtcccttctctg

SEQ ID NO: 128844 - DNA, 60 bp, Artificial
  Synthetic oligonucleotide
atataagtacttgtattctgacatttggacactcagattctgcggtctgagtcccttctc

SEQ ID NO: 128845 - DNA, 60 bp, Artificial
  Synthetic oligonucleotide
gacatggagcaaagcgctcaagaagttagagaaggtgacggtacaagggtctcaaaagct

SEQ ID NO: 128846 - DNA, 60 bp, Artificial
  Synthetic oligonucleotide
gcacccgatgccaaatcctccattagtggcaccaccacaagggcctattcccatgacagc

SEQ ID NO: 128847 - DNA, 60 bp, Artificial
  Synthetic oligonucleotide
aaatagtgagaatgtatagccctgtcagcattttggacataaaacaagggccaaaagaac

SEQ ID NO: 128848 - DNA, 60 bp, Artificial
  Synthetic oligonucleotide
cggggacttattggatgatgtcacgagtattcgacacgcggtcctgcagaaccgagcggc

SEQ ID NO: 128849 - DNA, 60 bp, Artificial
  Synthetic oligonucleotide
ctcctcggggacttattggatgatgtcacgagtattcgacacgcggtcctgcagaaccga

SEQ ID NO: 128850 - DNA, 60 bp, Artificial
  Synthetic oligonucleotide
ttgagagactagcctgttggtccgttaaacaggctaacttgacaacatcactcctcgggg

SEQ ID NO: 128851 - DNA, 60 bp, Artificial
  Synthetic oligonucleotide
tgctggtccgttaaacaggctaacttgacaacatcactcctcggggacttattggatgat

SEQ ID NO: 128852 - DNA, 60 bp, Artificial
  Synthetic oligonucleotide
cccggcagtaaagaattggatgacccaaacactgctgattcaaaatgctaacccagattg

SEQ ID NO: 128853 - DNA, 60 bp, Artificial
  Synthetic oligonucleotide
ctcaaacactgctgattcaaaatgctaacccagattgcaagctagtgctgaaggggctgg

SEQ ID NO: 128854 - DNA, 58 bp, Artificial
  Synthetic oligonucleotide
aatgggcgcggcgtcgttgacgctgaccgctcagtcccggactttattggctgggata

SEQ ID NO: 128855 - DNA, 60 bp, Artificial
  Synthetic oligonucleotide
ctgtatgtaagtggacgaaattgctccttctctctcaccagtaggcggcgacctgtgtgt

SEQ ID NO: 128856 - DNA, 60 bp, Artificial
  Synthetic oligonucleotide
ttctgtttgctgtaatcttcggatggttatgtggggttaccgtgagactaagggaggtct

SEQ ID NO: 128857 - DNA, 60 bp, Artificial
  Synthetic oligonucleotide
gaggtagcagacttaactagcgccggtaggggagctgatcaggttatagcaggtatggac

SEQ ID NO: 128858 - DNA, 60 bp, Artificial
  Synthetic oligonucleotide
ttagatcgttgcacgtgatggctgattcattgggcatggacagtgatggcatagactggg

SEQ ID NO: 128859 - DNA, 60 bp, Artificial
  Synthetic oligonucleotide
attccacaaaccatagggcgttgcggccctcgccgccccactctgctccttgaagggacg

SEQ ID NO: 128860 - DNA, 60 bp, Artificial
  Synthetic oligonucleotide
cggtgcaaggcttaagatcagcgctggggttgtttaatttctgcagagcatggatacctg

SEQ ID NO: 128861 - DNA, 60 bp, Artificial
  Synthetic oligonucleotide
gggatagcggatcatgtcgataccacagtaggacaagtaaaaggaaaaggctgctggcga

SEQ ID NO: 128862 - DNA, 60 bp, Artificial
  Synthetic oligonucleotide
ggtttatacacccgcatcaagggagaagaatacagctaggcgatgggaccagatttaggg

SEQ ID NO: 128863 - DNA, 60 bp, Artificial
  Synthetic oligonucleotide
gcaacggagttctatggcaggctagtgagggcctaggacccgataattggatggcagcag

SEQ ID NO: 128864 - DNA, 60 bp, Artificial
  Synthetic oligonucleotide
ggaaccccaatcaagaaggactagatgagtacctctttaggggctgggttcagggaggcc

SEQ ID NO: 128865 - DNA, 60 bp, Artificial
  Synthetic oligonucleotide
cctggacatcacattcccaaaagccggcggaagagaattaggcgaggattaggtgaagct

SEQ ID NO: 128866 - DNA, 60 bp, Artificial
  Synthetic oligonucleotide
gacagacttaaaagggccacacatgaaggaaagaactgggttcaagcactaccctccata

SEQ ID NO: 128867 - DNA, 60 bp, Artificial
  Synthetic oligonucleotide
aggatacactgtgccagtctccaccgccacccgtgtccaaatgcagaaaataggaccagg

SEQ ID NO: 128868 - DNA, 60 bp, Artificial
  Synthetic oligonucleotide
gctgtatacgatatgggagtaagacataaccgtacgctatacctcgatcccaacgctaga

SEQ ID NO: 128869 - DNA, 60 bp, Artificial
  Synthetic oligonucleotide
gcctgtgcggttggacaacctcctcagatacccggaacctatgtagccagtagtaaagga

SEQ ID NO: 128870 - DNA, 60 bp, Artificial
  Synthetic oligonucleotide
ataaagttctcagagcaggaccaccaatgggcgtaggacgatcggctgaagggccctgcc

SEQ ID NO: 128871 - DNA, 60 bp, Artificial
  Synthetic oligonucleotide
gtgactcagagtgaacagactgagggtagggctaagctaagcagcacggaaggctacgcc

SEQ ID NO: 128872 - DNA, 60 bp, Artificial
  Synthetic oligonucleotide
ctaaccaggtacatcgaccacaaccgcccagacctacggcccctaacccagataaccaac

SEQ ID NO: 128873 - DNA, 60 bp, Artificial
  Synthetic oligonucleotide
agacaggggaacaagatcgacaggcacccgcctacagggagccacccacatgtcaggaat

SEQ ID NO: 128874 - DNA, 60 bp, Artificial
  Synthetic oligonucleotide
gggctatgcctggacgaatgggaaatagagtgcaccggcttctgtagtggtcctcctcct

SEQ ID NO: 128875 - DNA, 60 bp, Artificial
  Synthetic oligonucleotide
gggacctattgtaatgaagtatcgtgtgtgtgggcacctcgaatcagattataccacgag

SEQ ID NO: 128876 - DNA, 60 bp, Artificial
  Synthetic oligonucleotide
ggagccacttgcctatatattgtagagcacggctgtgctcattgtcttttgctgcaccca

SEQ ID NO: 128877 - DNA, 59 bp, Artificial
  Synthetic oligonucleotide
caccacctggaaacccaaatctggagcaatagccagcgccccacctgctgaaagccctt

SEQ ID NO: 128878 - DNA, 60 bp, Artificial
  Synthetic oligonucleotide
gccgacaaaacaggtgtctcaaaggcccgacctattgtcagaaatgaaggaccaagacca

SEQ ID NO: 128879 - DNA, 60 bp, Artificial
  Synthetic oligonucleotide
agactctcaacccggtgatagagacggtaacaaagatgaccccgcatttctgcagcaggc

SEQ ID NO: 128880 - DNA, 60 bp, Artificial
  Synthetic oligonucleotide
aaatagggtggctactgagaaagaaataaaagcatggttgatgaagcagggacccggagg

SEQ ID NO: 128881 - DNA, 60 bp, Artificial
  Synthetic oligonucleotide
ttacccgcagccgttaccgcagtaggaggagcatgggatcccacgagggaaacaggaagt

SEQ ID NO: 128882 - DNA, 60 bp, Artificial
  Synthetic oligonucleotide
tggtagactaggcagcacgtaaaagaaatggcctccaacaaatggtttgtgtacagcgac

SEQ ID NO: 128883 - DNA, 60 bp, Artificial
  Synthetic oligonucleotide
gtgcctgcaatctggtcagtgggttcggcagaaagatcatagtaacatctcactcacctg

SEQ ID NO: 128884 - DNA, 60 bp, Artificial
  Synthetic oligonucleotide
gaacaaaattcagatgcagcttacgaaacaccaggcaccgcgcctgtacagaaaccactg

SEQ ID NO: 128885 - DNA, 60 bp, Artificial
  Synthetic oligonucleotide
gagcctgagtcgtactttcaccgtttacagtggcgagccagccaggagccttttcttcat

SEQ ID NO: 128886 - DNA, 60 bp, Artificial
  Synthetic oligonucleotide
ccagtgccgacctcatgatgacacaataacatggagagtcagcactagagctatgcccac

SEQ ID NO: 128887 - DNA, 60 bp, Artificial
  Synthetic oligonucleotide
cgttgaagcctttgctactcacagaaatgattgcgggaacttacagggcatgactgccag

SEQ ID NO: 128888 - DNA, 60 bp, Artificial
  Synthetic oligonucleotide
ggctacaaagacctctgaccctatatactgacagtacttacgtgctcggcatttgtacca

SEQ ID NO: 128889 - DNA, 60 bp, Artificial
  Synthetic oligonucleotide
ggcaagccggatggatcatggaggctaaccattgattataggccactcaactcggctgtc

SEQ ID NO: 128890 - DNA, 60 bp, Artificial
  Synthetic oligonucleotide
ggttctgggccaaaccctgtagaggtccaactacgggtgccactatagcggccttagagg

SEQ ID NO: 128891 - DNA, 60 bp, Artificial
  Synthetic oligonucleotide
caccaggcatattccaccaagccctgtacaatggactggcctcctgtaaaacagcgattg

SEQ ID NO: 128892 - DNA, 60 bp, Artificial
  Synthetic oligonucleotide
ccattcctaccccgctaatgtcacccagattaaaacaaacagaacactgcatgacgtaac

SEQ ID NO: 128893 - DNA, 60 bp, Artificial
  Synthetic oligonucleotide
cgacaggaggaagcgcgcctggaacatgaagctggttcttctgttcagcctcagcgttct

SEQ ID NO: 128894 - DNA, 60 bp, Artificial
  Synthetic oligonucleotide
aacgtagcctaaggaaccaacccacagaatggcatctccatatgtgtggaccaccaggtg

SEQ ID NO: 128895 - DNA, 60 bp, Artificial
  Synthetic oligonucleotide
catgatgactcatatcctgcttagtagactattgttagcatgcacatacgctagtccctg

SEQ ID NO: 128896 - DNA, 60 bp, Artificial
  Synthetic oligonucleotide
ctgtagcaccaaaatatagacgacaacgaaggggacttaacccctcaaccacacctgatt

SEQ ID NO: 128897 - DNA, 60 bp, Artificial
  Synthetic oligonucleotide
caccacaagggaccggggtattaatatggggacggaacaaacgcacaggaggaggagccc

SEQ ID NO: 128898 - DNA, 60 bp, Artificial
  Synthetic oligonucleotide
gggaaacactggattaaggtaattcagcggcttttacgggaatatcagaagacaggggtt

SEQ ID NO: 128899 - DNA, 60 bp, Artificial
  Synthetic oligonucleotide
caggcagaaggggaagtgcacgttagcctaggtactcgtgctgggcactgtccacaggaa

SEQ ID NO: 128900 - DNA, 60 bp, Artificial
  Synthetic oligonucleotide
ggtgaaacgaaacctatgactaattcacaaatagaatccagcaccgcctttgtctaggtg

SEQ ID NO: 128901 - DNA, 60 bp, Artificial
  Synthetic oligonucleotide
gcaaccggtgataaggctcgagggttggaaagaactgaaggaggaattgctgacacaccc

SEQ ID NO: 128902 - DNA, 60 bp, Artificial
  Synthetic oligonucleotide
ggcggatcctggaaatcccggaaaccaaccagacgaggactgtacaggtaagaaagggac

SEQ ID NO: 128903 - DNA, 60 bp, Artificial
  Synthetic oligonucleotide
ggaaaatatacaacatcacatcacaaaggttgacctgcccgacttccagaaacaacttgc

SEQ ID NO: 128904 - DNA, 60 bp, Artificial
  Synthetic oligonucleotide
gcagaagcccactcacactggactcagaggagccctaatttagaacctggctgcattgtg

SEQ ID NO: 128905 - DNA, 60 bp, Artificial
  Synthetic oligonucleotide
gtttgatatatgggattatttggtaaaggggtaacatggtcagcatcgcattctatgggg

SEQ ID NO: 128906 - DNA, 60 bp, Artificial
  Synthetic oligonucleotide
gcagggcctattgcaccaggccaaatgagagaaccaaggggaagtgacatagcaggaact

SEQ ID NO: 128907 - DNA, 60 bp, Artificial
  Synthetic oligonucleotide
gccaaacctgaccgtcgaggcctaggttactattctgcttcctactcggacccctgcgct

SEQ ID NO: 128908 - DNA, 60 bp, Artificial
  Synthetic oligonucleotide
ccaagattcctccatccttcttccacgccgttaaaaaacacacccccttccgaaacaatt

SEQ ID NO: 128909 - DNA, 60 bp, Artificial
  Synthetic oligonucleotide
tcaaaacctgtggttatcggccttttccgccctcccgggaaacaccaaggaccccacctg

SEQ ID NO: 128910 - DNA, 60 bp, Artificial
  Synthetic oligonucleotide
atccaatccttaggtccctcgcctattcaaatgctaacaaggagtgccaaaaactcctac

SEQ ID NO: 128911 - DNA, 60 bp, Artificial
  Synthetic oligonucleotide
accgtcgaggcctaggttactattctgcttcctactcagacccctgcgctatacaatgcc

SEQ ID NO: 128912 - DNA, 60 bp, Artificial
  Synthetic oligonucleotide
ccgccttaatgaagccacagatgccctcatgcttgcccctctgttacccctcgaccccac

SEQ ID NO: 128913 - DNA, 60 bp, Artificial
  Synthetic oligonucleotide
caccgcagccaaccctactcccttctcaattatgaaaccaacttataataactccgccac

SEQ ID NO: 128914 - DNA, 54 bp, Artificial
  Synthetic oligonucleotide
ggtctccaaaggcacccctgtccttcgctcctctctacaccagctctatctcgc

SEQ ID NO: 128915 - DNA, 60 bp, Artificial
  Synthetic oligonucleotide
gctcctcgctagttgcctccctgcaccatcagcaacttgagactctcatagcccaggcag

SEQ ID NO: 128916 - DNA, 60 bp, Artificial
  Synthetic oligonucleotide
ccctacacttgcacttttccaaatgtgggtcctcattctcctttctactagacgcaccag

SEQ ID NO: 128917 - DNA, 60 bp, Artificial
  Synthetic oligonucleotide
tatccgtcggggccacgcccctaatgtcatctggcaaggggacgtcactcacctccatta

SEQ ID NO: 128918 - DNA, 58 bp, Artificial
  Synthetic oligonucleotide
aactgggacgaagaagtaataagaaaccctatacaagcgagaatcatggaattagtgc

SEQ ID NO: 128919 - DNA, 60 bp, Artificial
  Synthetic oligonucleotide
tttgggattcccaggacagctgcagaagatatagttcaacaatgtgatgtgtgtcaagaa

SEQ ID NO: 128920 - DNA, 60 bp, Artificial
  Synthetic oligonucleotide
agcccaatgggttacacgataccttggtctctgcaggaatgctgggaaatggaatccatc

SEQ ID NO: 128921 - DNA, 57 bp, Artificial
  Synthetic oligonucleotide
aaaacttatacctatgtttaacgcgtttgaatcagccctcgcagggaccctcattac

SEQ ID NO: 128922 - DNA, 60 bp, Artificial
  Synthetic oligonucleotide
aagccagggagaatggaaaacaataggggtctggtatgaatcaccaggggattacaaggg

SEQ ID NO: 128923 - DNA, 60 bp, Artificial
  Synthetic oligonucleotide
aggagaaagtgttgcttgggcacaggaggagggttcgcgaccccttagaaagacggaggg

SEQ ID NO: 128924 - DNA, 60 bp, Artificial
  Synthetic oligonucleotide
aaaggctcggtgaggtggaaaaagaggaatgtaatagcggaagtagtctcaggaccaaca

SEQ ID NO: 128925 - DNA, 60 bp, Artificial
  Synthetic oligonucleotide
ttcaggactaatctatgcagaaagggtaaaaggagaaacaggacaagaatttagggtgca

SEQ ID NO: 128926 - DNA, 60 bp, Artificial
  Synthetic oligonucleotide
gggatggatgtaactgtacaaggtcaggaaatcatttgtataacagcacaagcggaggac

SEQ ID NO: 128927 - DNA, 60 bp, Artificial
  Synthetic oligonucleotide
gtccacaggagataagcattccggcggggcaagtgaaaaggatagcaattgacttgaaaa

SEQ ID NO: 128928 - DNA, 60 bp, Artificial
  Synthetic oligonucleotide
acgaccttaagtgtagcttaccacacagaaatgagagtaacaagtggacatgtgcggcga

SEQ ID NO: 128929 - DNA, 60 bp, Artificial
  Synthetic oligonucleotide
gcgctaagtcatgtagcagctgatgcttgagtcataaccgcagatgtaaacaagttgcct

SEQ ID NO: 128930 - DNA, 60 bp, Artificial
  Synthetic oligonucleotide
agagaaggaagggaaagtaggaagagcgcccccacactggacttgtaatacccctatatt

SEQ ID NO: 128931 - DNA, 60 bp, Artificial
  Synthetic oligonucleotide
gccccgaaatcattgcagtctgataacggaccagcatttgtagcagaatctactcagctc

SEQ ID NO: 128932 - DNA, 60 bp, Artificial
  Synthetic oligonucleotide
cagaagtaagattaaaagagggatgtaagggaccccacatagcgcaatggcctttgacgc

SEQ ID NO: 128933 - DNA, 60 bp, Artificial
  Synthetic oligonucleotide
gtcaggacagagaacaaatgcctaccctggaaaatgactatgtagagttataggaaggtc

SEQ ID NO: 128934 - DNA, 60 bp, Artificial
  Synthetic oligonucleotide
gtggtgttagctacgagtccggtagaagtattaggaagagataatatgagcgaattggga

SEQ ID NO: 128935 - DNA, 60 bp, Artificial
  Synthetic oligonucleotide
gtaaaataagggtagggcccgggaaggagaccttgacggaagggaattgtctatgggcat

SEQ ID NO: 128936 - DNA, 60 bp, Artificial
  Synthetic oligonucleotide
gggagtaggacaaaccaatcagcaagcatctcaagccaatatggatcaggcaagacagat

SEQ ID NO: 128937 - DNA, 60 bp, Artificial
  Synthetic oligonucleotide
gggcatgaaacccgagacagtgcaggcagcaaagggaataataagtatgaaagaaggact

SEQ ID NO: 128938 - DNA, 60 bp, Artificial
  Synthetic oligonucleotide
gtgctttggagagctcgaaggaaagagtctccgggcctctcctgcctgcctgaaaagctc

SEQ ID NO: 128939 - DNA, 60 bp, Artificial
  Synthetic oligonucleotide
atcgggattcgttactaattccgtgcaacaccggagcggatctcgcagctggcgcccaac

SEQ ID NO: 128940 - DNA, 60 bp, Artificial
  Synthetic oligonucleotide
gcacagactgtcaaaagcagatggataggacattggggacgagggttcaacaagcaacgg

SEQ ID NO: 128941 - DNA, 60 bp, Artificial
  Synthetic oligonucleotide
aaatgagagttacgggaccacggacgctgctcctgtgaggacggcgaggagagtaacgga

SEQ ID NO: 128942 - DNA, 60 bp, Artificial
  Synthetic oligonucleotide
tggtacaaatggctgcgcaagcttagagcgcgagagaagaacatcccatcgcagttttat

SEQ ID NO: 128943 - DNA, 60 bp, Artificial
  Synthetic oligonucleotide
gaagcagcattacaagtacacatagctcaaagagatgctaggagaatcccagatgcttgg

SEQ ID NO: 128944 - DNA, 60 bp, Artificial
  Synthetic oligonucleotide
gcagaagcacagttagggttaccgcatccaggaggattacagagaaagaaacatgtaaca

SEQ ID NO: 128945 - DNA, 60 bp, Artificial
  Synthetic oligonucleotide
taggatggccagcaaagaaagtaagccaagcagaacaacgtggagagacatggagccccc

SEQ ID NO: 128946 - DNA, 60 bp, Artificial
  Synthetic oligonucleotide
aaagcaagggagataggaccccagttgccactatgggcatggaaagaaacagcatttagt

SEQ ID NO: 128947 - DNA, 60 bp, Artificial
  Synthetic oligonucleotide
caggatgggtgaatggaacgcctccttactggagtgcaagggttaatgggagtacaggga

SEQ ID NO: 128948 - DNA, 60 bp, Artificial
  Synthetic oligonucleotide
gcaacgataccaagtaataagagtaagagcttacacatatggtgttgtagaaatgccaca

SEQ ID NO: 128949 - DNA, 60 bp, Artificial
  Synthetic oligonucleotide
gcggcaagaaggatacccggctaaatggcttggatttgaattgcatccggagaaatggaa

SEQ ID NO: 128950 - DNA, 60 bp, Artificial
  Synthetic oligonucleotide
gaattggattgctggcattatcaacactactgtgtaacctcaacaagaagtgaagtagcc

SEQ ID NO: 128951 - DNA, 60 bp, Artificial
  Synthetic oligonucleotide
ttggtgagtgatcctggaggatttcagagggtgcaacacgtagaaacagtgcccgtgacc

SEQ ID NO: 128952 - DNA, 60 bp, Artificial
  Synthetic oligonucleotide
ccctggattttgttgccgggaagggaagaagattggatattagagttacaaatgggaaac

SEQ ID NO: 128953 - DNA, 60 bp, Artificial
  Synthetic oligonucleotide
ataattgtggaaaaccaggacatctcgcaagacagtgtagacaaggaataatatgccatc

SEQ ID NO: 128954 - DNA, 60 bp, Artificial
  Synthetic oligonucleotide
ccagcaactgcaaacagtggcaatgcagcatggacttgtgtccgaggattttgagaggca

SEQ ID NO: 128955 - DNA, 60 bp, Artificial
  Synthetic oligonucleotide
ttgtggggatgtctcatgtgggaagtgagaaaaggaaaccagtgtcaagcagaagaagtg

SEQ ID NO: 128956 - DNA, 60 bp, Artificial
  Synthetic oligonucleotide
ccatattattataagccctcatggaattgttcacaaaattggacaggtcacccagtatgg

SEQ ID NO: 128957 - DNA, 60 bp, Artificial
  Synthetic oligonucleotide
caggagagtggcaaggaccaacacaggtactttggggcggggacggtgcgattgtagtga

SEQ ID NO: 128958 - DNA, 60 bp, Artificial
  Synthetic oligonucleotide
gccgaggggacacaagagcaacactggtaaggaagccgccgtggtgaggctagctagaga

SEQ ID NO: 128959 - DNA, 61 bp, Artificial
  Synthetic oligonucleotide
gggtaaatgtagtacatagtattaagaatttgagtcaagcccaacaaattatcaaagcagc

SEQ ID NO: 128960 - DNA, 60 bp, Artificial
  Synthetic oligonucleotide
gaagaaaatttgcacagttgatcctcatgcctctaatacatgaagagttggagccatggg

SEQ ID NO: 128961 - DNA, 60 bp, Artificial
  Synthetic oligonucleotide
ccgtgcagcaatcctataccaggacggctgtccagtctcttgctaacgcaactgctgccc

SEQ ID NO: 128962 - DNA, 55 bp, Artificial
  Synthetic oligonucleotide
taggctaaaacatctagtatgggcaagcagggagctggacagatttgcatgtaat

SEQ ID NO: 128963 - DNA, 60 bp, Artificial
  Synthetic oligonucleotide
cattaatgaggccttccccctcaatcgacctcagtgggattacaacacggccgcaggtag

SEQ ID NO: 128964 - DNA, 60 bp, Artificial
  Synthetic oligonucleotide
tagggagctgctcctggtctaccgccggactctagtggcaggtctcaaaggggcagctcg

SEQ ID NO: 128965 - DNA, 60 bp, Artificial
  Synthetic oligonucleotide
ggtctaccgccggactctagtggcaggtctcaaaggggcagctcggcgtcctaccaattt

SEQ ID NO: 128966 - DNA, 60 bp, Artificial
  Synthetic oligonucleotide
gcgtcttctggtctaccgccggactctagtggcaggtctcaaaggggcagctcggcgtcc

SEQ ID NO: 128967 - DNA, 59 bp, Artificial
  Synthetic oligonucleotide
ttcatagatactttctccggatgggtagaagcttttcctaccaaaactgaaacggccct

SEQ ID NO: 128968 - DNA, 56 bp, Artificial
  Synthetic oligonucleotide
taccgccggactctagtggcaggtctcaaaggggcagctcggcgccccactaattt

SEQ ID NO: 128969 - DNA, 60 bp, Artificial
  Synthetic oligonucleotide
tactcgggtcagacaatggcccagcctttgttgctcaggtaagtcagggactggccactc

SEQ ID NO: 128970 - DNA, 60 bp, Artificial
  Synthetic oligonucleotide
gatactttctccggatgggtagaagcttttcctaccaaaactgaaacagccctaaccgtc

SEQ ID NO: 128971 - DNA, 60 bp, Artificial
  Synthetic oligonucleotide
ccttcggcaccagatgagtcctgggagctggaaaagactgatcatcctcttaagctgcgt

SEQ ID NO: 128972 - DNA, 60 bp, Artificial
  Synthetic oligonucleotide
cagacaatggcccagcctttgttgctcaggtaagtcagggactggccactcaactgggga

SEQ ID NO: 128973 - DNA, 60 bp, Artificial
  Synthetic oligonucleotide
gttcggggctcaccgcctggtaatccagggagacgtcccaggatcaggggaggaccaggg

SEQ ID NO: 128974 - DNA, 60 bp, Artificial
  Synthetic oligonucleotide
tcaccgcctggtaatccagggagacgtcccaggatcaggggaggaccagggacgcctggt

SEQ ID NO: 128975 - DNA, 50 bp, Artificial
  Synthetic oligonucleotide
cctgggagacgtcccaggatcaggggaggaccagggacgcctggtggacc

SEQ ID NO: 128976 - DNA, 52 bp, Artificial
  Synthetic oligonucleotide
cctgggagacgtcccaggatcaggggaggaccagggacgcctggtggacccc

SEQ ID NO: 128977 - DNA, 60 bp, Artificial
  Synthetic oligonucleotide
ccggagggaacttttaatctctctgtcatttttgcagttaaaaggattgtctttcaggaa

SEQ ID NO: 128978 - DNA, 60 bp, Artificial
  Synthetic oligonucleotide
ctcatcagcccacttgggacgattgccaacagctcctacagattctcttcaccactgagg

SEQ ID NO: 128979 - DNA, 60 bp, Artificial
  Synthetic oligonucleotide
agagggggctgcggcttaggagggcagaagctgagtgacgtcggagggagctccacggcc

SEQ ID NO: 128980 - DNA, 60 bp, Artificial
  Synthetic oligonucleotide
ggggctgcggcttaggagggcagaagctgagtggcgtcggagggagccctactgcagggg

SEQ ID NO: 128981 - DNA, 58 bp, Artificial
  Synthetic oligonucleotide
ggggctgcggcttaggagggcagaagctgagtgacgtcggagggagctccacggccgg

SEQ ID NO: 128982 - DNA, 60 bp, Artificial
  Synthetic oligonucleotide
ggggctgcggcttaggagggcagaagctgagtgacgtcggagggagctccacggccgggg

SEQ ID NO: 128983 - DNA, 60 bp, Artificial
  Synthetic oligonucleotide
cagagggggctgcggcttaggagggcagaagctgagtgacgtcggagggagctccacggc

SEQ ID NO: 128984 - DNA, 60 bp, Artificial
  Synthetic oligonucleotide
cgatgaccctagtagagggggctgcggcttaggagggcagaagctgagtgacgtcggagg

SEQ ID NO: 128985 - DNA, 60 bp, Artificial
  Synthetic oligonucleotide
cagttaaaagaaatcataggacaaattagagatgatgcagaaagattggaaacagcagtc

SEQ ID NO: 128986 - DNA, 60 bp, Artificial
  Synthetic oligonucleotide
gattgaggaaaagaagttcagtgcagaggtagtacccatgtttagcgccctagcagaagg

SEQ ID NO: 128987 - DNA, 60 bp, Artificial
  Synthetic oligonucleotide
gtgccagcagaaatgacagaaagtgccacagcgacatctagtggccaaactaaggaactg

SEQ ID NO: 128988 - DNA, 60 bp, Artificial
  Synthetic oligonucleotide
gtatgaagcttcttacagtactgctttggctaagtgggtgttggagcttagtgtggttag

SEQ ID NO: 128989 - DNA, 60 bp, Artificial
  Synthetic oligonucleotide
actaccaaccagaaagcagagttagaggccattctgttagccttaagagactctggaagc

SEQ ID NO: 128990 - DNA, 60 bp, Artificial
  Synthetic oligonucleotide
ccagctcagggagtgctaagggacccacaagggtcagacatagcgggcactactagcaca

SEQ ID NO: 128991 - DNA, 60 bp, Artificial
  Synthetic oligonucleotide
aggtagatgttgtaagccaaagactcaccctgcgtatggaccaggagcaggaggcccgcc

SEQ ID NO: 128992 - DNA, 60 bp, Artificial
  Synthetic oligonucleotide
gaggagtatgcaacaagaatttggcttacctgctatagtagcaaaagaaatagtagcggc

SEQ ID NO: 128993 - DNA, 60 bp, Artificial
  Synthetic oligonucleotide
cgacgaatggctccgagacatgttacaggacctcaattcagaggcccagtgccacttccc

SEQ ID NO: 128994 - DNA, 60 bp, Artificial
  Synthetic oligonucleotide
ctgccagtagaaagagagctctgggaacaatggtggtctgactattggcaggtcacctgg

SEQ ID NO: 128995 - DNA, 60 bp, Artificial
  Synthetic oligonucleotide
ccaggttgaaacaagcttggtgctggtttggaggtaattggagaggagcctggaaggaag

SEQ ID NO: 128996 - DNA, 60 bp, Artificial
  Synthetic oligonucleotide
gcagatacagattattcaggacataaggcatgtaggaatgtaacagtatcagcttgcact

SEQ ID NO: 128997 - DNA, 60 bp, Artificial
  Synthetic oligonucleotide
cccgaggtagtgagtgtgggctttaatgactcagtgatagaacaagagatggaaaaagaa

SEQ ID NO: 128998 - DNA, 60 bp, Artificial
  Synthetic oligonucleotide
caggcacggttgaacatttggggatgtgctttcaggcaggtgtgtcacacgacggtcctt

SEQ ID NO: 128999 - DNA, 60 bp, Artificial
  Synthetic oligonucleotide
gcaagcacatgaacaggaacaaaagaatttggatagttatcaaaaattggtgtcttggtc

SEQ ID NO: 129000 - DNA, 60 bp, Artificial
  Synthetic oligonucleotide
gccaaaggcagaacatctagtaatggtacagcagttaagagactatctagaaacttgggg

SEQ ID NO: 129001 - DNA, 60 bp, Artificial
  Synthetic oligonucleotide
ggcacgtctaatggcggaagctatgacagcggcctttcagcaacaaacagttgggaacat

SEQ ID NO: 129002 - DNA, 60 bp, Artificial
  Synthetic oligonucleotide
tcacctggctagattttgtaaggcccctaggagacaaggctgctggaaatgtggcagccc

SEQ ID NO: 129003 - DNA, 60 bp, Artificial
  Synthetic oligonucleotide
gagagcagagcagacagaccctgctgtaaagaactggatgacacagtctctgttgatcca

SEQ ID NO: 129004 - DNA, 60 bp, Artificial
  Synthetic oligonucleotide
ggaaggcagagaccctgtgtggaaaggtccggctaagctcatctggaaaggagaaggagc

SEQ ID NO: 129005 - DNA, 60 bp, Artificial
  Synthetic oligonucleotide
agcattggatagtcaggcccctctggaaggtaacgggcggacagcaggagaggtggacta

SEQ ID NO: 129006 - DNA, 60 bp, Artificial
  Synthetic oligonucleotide
aagaggcgcctgcggacccgagacaccctcgggctgtgtgtgtgtgagaagagaggaaaa

SEQ ID NO: 129007 - DNA, 60 bp, Artificial
  Synthetic oligonucleotide
tttgactgagtaagaccggacggaagaaaggcggaccgtgccggagtgcaggtaagaggc

SEQ ID NO: 129008 - DNA, 60 bp, Artificial
  Synthetic oligonucleotide
gggacttgactaaagacgtcccggccgcagagtagaccagcctgaggactcctttgactg

SEQ ID NO: 129009 - DNA, 60 bp, Artificial
  Synthetic oligonucleotide
gtaaacaccaggtgggacatcagccaacagggcaagtaccatcattacagtatttagcac

SEQ ID NO: 129010 - DNA, 60 bp, Artificial
  Synthetic oligonucleotide
caacaggaataggatacagtaaaggggaatggtttacagagcttgatccttggacagcgg

SEQ ID NO: 129011 - DNA, 60 bp, Artificial
  Synthetic oligonucleotide
cagtcaataatagggagccaggcataagatatcagtataaggtgctcccacaggggtgga

SEQ ID NO: 129012 - DNA, 60 bp, Artificial
  Synthetic oligonucleotide
gggctaaggttcttaaactgggagatggccaatggggatatcagatataccagccagaaa

SEQ ID NO: 129013 - DNA, 60 bp, Artificial
  Synthetic oligonucleotide
ggttacggcccaacggaaagaagaagtataagttaagacatctagtatgggcaagcaagg

SEQ ID NO: 129014 - DNA, 60 bp, Artificial
  Synthetic oligonucleotide
cctggacaagggacagccagacaaagaagaagagcaaggcagcggtgggctaaacagcga

SEQ ID NO: 129015 - DNA, 60 bp, Artificial
  Synthetic oligonucleotide
gccagtagcagagactccgcttgcttgcttgattgcctcaataaagtcttgccttagttt

SEQ ID NO: 129016 - DNA, 60 bp, Artificial
  Synthetic oligonucleotide
aagaagatacactggccccgaaagacaaaaaagggtgccattcgtgctagggttcctagg

SEQ ID NO: 129017 - DNA, 60 bp, Artificial
  Synthetic oligonucleotide
cagagaacctatgttccctgccacataaggcaagtagtaaatgattggtacaccttgtct

SEQ ID NO: 129018 - DNA, 60 bp, Artificial
  Synthetic oligonucleotide
ggcctatgaggatgacgcctggaaagagaccctggtgtggaagtttgacccactactagc

SEQ ID NO: 129019 - DNA, 60 bp, Artificial
  Synthetic oligonucleotide
gtgatgacattaagaactgctgactgagagggactttccagggtggagactgggcggtac

SEQ ID NO: 129020 - DNA, 60 bp, Artificial
  Synthetic oligonucleotide
cagcttgagcctgggtgttcgctggggaaggcaagcctaagagcactctggtgaggtctt

SEQ ID NO: 129021 - DNA, 60 bp, Artificial
  Synthetic oligonucleotide
aagagctcaaagcagcagcagcgtcactcactgtggctgtggtccaagctgcgacaagcg

SEQ ID NO: 129022 - DNA, 60 bp, Artificial
  Synthetic oligonucleotide
cgccagtgattcagtacgacatgcttgcagatccattgttagggcagtcatcgcacatcc

SEQ ID NO: 129023 - DNA, 60 bp, Artificial
  Synthetic oligonucleotide
cccacccagcaggcttacagcaaagggagcagattacagtgttggacataggagatgcct

SEQ ID NO: 129024 - DNA, 60 bp, Artificial
  Synthetic oligonucleotide
ggggactggaagggatttattacagtgaaaggagaaagaagatcttggatctctatgctc

SEQ ID NO: 129025 - DNA, 60 bp, Artificial
  Synthetic oligonucleotide
cggcagaaacagcagtggcaaaaccactcgccacaacagagcccctacgaggaggcttac

SEQ ID NO: 129026 - DNA, 60 bp, Artificial
  Synthetic oligonucleotide
ggaggaaaattggtatgcagacagacctccgaccagaggaccagggccagacgatccagc

SEQ ID NO: 129027 - DNA, 60 bp, Artificial
  Synthetic oligonucleotide
ggaaagaatagggccagaaaatccatataacaccccagtctttgcaataaggaagaaaga

SEQ ID NO: 129028 - DNA, 60 bp, Artificial
  Synthetic oligonucleotide
gtccacttaaagccaggacaagatgggccaaggataaggcaatggcctttgtcaaaagaa

SEQ ID NO: 129029 - DNA, 60 bp, Artificial
  Synthetic oligonucleotide
gcctggacaagcctcagtggctatgcttcaaggttatttagatcagtaccagggccaaca

SEQ ID NO: 129030 - DNA, 60 bp, Artificial
  Synthetic oligonucleotide
tctatactacttaatagtgaaacaagaccctaactgagagaaggcaggttagagcaccac

SEQ ID NO: 129031 - DNA, 60 bp, Artificial
  Synthetic oligonucleotide
gctctattaacactgtcagagcaagtgactcacaagtcataccttccgctccgccggctg

SEQ ID NO: 129032 - DNA, 60 bp, Artificial
  Synthetic oligonucleotide
taaattgtacgagagcttcctcctcacccatctagctgcgtctagagtgagacggaactc

SEQ ID NO: 129033 - DNA, 60 bp, Artificial
  Synthetic oligonucleotide
caaccctctccagcagggcgtggttcctctagttcatcagcacctcctcagaggtcaggt

SEQ ID NO: 129034 - DNA, 60 bp, Artificial
  Synthetic oligonucleotide
cgtctaagggactatctgatgtgatgtggcgctgcaccagtctagggagacgctagctga

SEQ ID NO: 129035 - DNA, 60 bp, Artificial
  Synthetic oligonucleotide
aaagttgtatggaaaatttaatgcttcccaagtagtgcaatctgtaaagcaggagagcac

SEQ ID NO: 129036 - DNA, 58 bp, Artificial
  Synthetic oligonucleotide
ggggtatgaccttgtctccaaatgaatgcggcacatggtccctagctgcagctgctct

SEQ ID NO: 129037 - DNA, 60 bp, Artificial
  Synthetic oligonucleotide
aagttcctttggggtcttccacaacaattggcgcccaacgtggggctcgattataagcgg

SEQ ID NO: 129038 - DNA, 60 bp, Artificial
  Synthetic oligonucleotide
ggcggaagtggctagaagagaaggtattttagtcgctttcaatatgggtatgacctttac

SEQ ID NO: 129039 - DNA, 60 bp, Artificial
  Synthetic oligonucleotide
gagggtagcacggccttctcagctaagacctaaatggaagaaacctgtgattatttgtga

SEQ ID NO: 129040 - DNA, 60 bp, Artificial
  Synthetic oligonucleotide
agaagttcttttctgccttccgcctcccctcctgcctcctctcgttcctggcgtccttct

SEQ ID NO: 129041 - DNA, 60 bp, Artificial
  Synthetic oligonucleotide
caacagcgtctgggaacttcatacaatggaccgcagaacatactttgaggttaaatgagt

SEQ ID NO: 129042 - DNA, 60 bp, Artificial
  Synthetic oligonucleotide
gatcaatgacagaactgtggtaattgtggacaaggcaggcaacaaaagaactgtgagtat

SEQ ID NO: 129043 - DNA, 60 bp, Artificial
  Synthetic oligonucleotide
gccgaggcctaacctcagagtttagagagagactacaggaaattaccccgccaaccacgt

SEQ ID NO: 129044 - DNA, 53 bp, Artificial
  Synthetic oligonucleotide
attcacttgggaaggtaaacagcatgtctggacacgactgcctcaaggatttt

SEQ ID NO: 129045 - DNA, 60 bp, Artificial
  Synthetic oligonucleotide
gctgaatttccaattgccgaacaacccttggaagatgacgtctttcaggcggaagggcag

SEQ ID NO: 129046 - DNA, 60 bp, Artificial
  Synthetic oligonucleotide
ggctcgaatgcagtggaagcaagctattattactcatggtgctgtcattgattggaatca

SEQ ID NO: 129047 - DNA, 59 bp, Artificial
  Synthetic oligonucleotide
gaattcaagtgaagatcacttccacatgggaaactataaaagaccaaattgacagagca

SEQ ID NO: 129048 - DNA, 60 bp, Artificial
  Synthetic oligonucleotide
tgaatgctacaatcaagtgtctaggaaggaacttaaaaccacctctcagtcagacagagg

SEQ ID NO: 129049 - DNA, 60 bp, Artificial
  Synthetic oligonucleotide
ggacccttctgtgcttatgtttctaagagcttggtggaaaacacctcatacatctagtcc

SEQ ID NO: 129050 - DNA, 60 bp, Artificial
  Synthetic oligonucleotide
ttacaaaaaacacccatacctgaaagaaaagctctgtctacaagatgggttacctggcta

SEQ ID NO: 129051 - DNA, 60 bp, Artificial
  Synthetic oligonucleotide
ggtaccttcctctcggcgagctgagacttcagaaacaaaccggccaaatcaagcaagggg

SEQ ID NO: 129052 - DNA, 60 bp, Artificial
  Synthetic oligonucleotide
ctgaggcccagcagttgttagttcaaagggagctagcgtatgcttgaggagctgacaccc

SEQ ID NO: 129053 - DNA, 60 bp, Artificial
  Synthetic oligonucleotide
ggccggaacctaagagaattcatcttggggatttagagactgtatgcccggcactaccag

SEQ ID NO: 129054 - DNA, 60 bp, Artificial
  Synthetic oligonucleotide
gagccgcagtaccagcagggttcctggacttttgatcagtgagactgtacctgttcctag

SEQ ID NO: 129055 - DNA, 60 bp, Artificial
  Synthetic oligonucleotide
caagctctactgcctcctgtatatggagaaccaggtatttgctgtttgcaggaatataga

SEQ ID NO: 129056 - DNA, 60 bp, Artificial
  Synthetic oligonucleotide
aaagacacacgtccttgggtacaatccttaagaaagtatcatgagcttgatagcagatcc

SEQ ID NO: 129057 - DNA, 60 bp, Artificial
  Synthetic oligonucleotide
ggtggcctaatatgagaaaagacattataactgttttaagacaatgtaagccatgcctgc

SEQ ID NO: 129058 - DNA, 60 bp, Artificial
  Synthetic oligonucleotide
ggaaatccacaggacagcatagaggagagggtgttatgggaaaatcagcacaagaactat

SEQ ID NO: 129059 - DNA, 60 bp, Artificial
  Synthetic oligonucleotide
gacaggtccagtgccaagagttacaaaatgtatgactcccacaggattgcagtggtgggc

SEQ ID NO: 129060 - DNA, 60 bp, Artificial
  Synthetic oligonucleotide
ctgactcagaatcagaggattagatgactcaaactgaaacttataacccacaggtatact

SEQ ID NO: 129061 - DNA, 60 bp, Artificial
  Synthetic oligonucleotide
ccaaggacgaggaagaggtcaaccgagatctagaccaccgaatagagcctctaataggtc

SEQ ID NO: 129062 - DNA, 60 bp, Artificial
  Synthetic oligonucleotide
atggatatactgcagtaggacctgtgccagttttacccattgctcaaataaaagctgtaa

SEQ ID NO: 129063 - DNA, 60 bp, Artificial
  Synthetic oligonucleotide
aatggcttacccaccaatcctcctcatgggacagagtatgctgtccgaatgactgaagga

SEQ ID NO: 129064 - DNA, 60 bp, Artificial
  Synthetic oligonucleotide
agcaggcccctctgcgtcagtagcaggaccccatatgccggctatgccatcagtacctta

SEQ ID NO: 129065 - DNA, 60 bp, Artificial
  Synthetic oligonucleotide
ctgcagctcctcctttgggacctttgccatcggctccagctccacctgttctgcctgtta

SEQ ID NO: 129066 - DNA, 60 bp, Artificial
  Synthetic oligonucleotide
caccagaacctaatattacgcaacaatggtccattcctttaggagaccatactgctcaat

SEQ ID NO: 129067 - DNA, 60 bp, Artificial
  Synthetic oligonucleotide
ccttgtggcaaccagacaggaagtgattgtcctgtattagctgaaccagtaccagatgga

SEQ ID NO: 129068 - DNA, 60 bp, Artificial
  Synthetic oligonucleotide
ctccgccggctgaaacaaacccagctgctacagctgtgaccccaaatggcccaaaccaac

SEQ ID NO: 129069 - DNA, 55 bp, Artificial
  Synthetic oligonucleotide
ccacttcccatgggccagatgaacctcctacaggacgagagccccgcctaagatg

SEQ ID NO: 129070 - DNA, 60 bp, Artificial
  Synthetic oligonucleotide
tacttggtactgcaattcctaaggtgttgcattccgatcaaggatcagcattcacctctg

SEQ ID NO: 129071 - DNA, 60 bp, Artificial
  Synthetic oligonucleotide
ccggccaaatcaagcaaggggcggacagcaaggaagttcaaatcgaaaccaaacacgctc

SEQ ID NO: 129072 - DNA, 60 bp, Artificial
  Synthetic oligonucleotide
ggcggatagacttccgctggttaaaacagctcatgaattggcacatacaggaagagaagc

SEQ ID NO: 129073 - DNA, 61 bp, Artificial
  Synthetic oligonucleotide
gaacttcctcttgatgatcctaaaactcaaaaggaatacattcaacaaagatgttttcagg

SEQ ID NO: 129074 - DNA, 58 bp, Artificial
  Synthetic oligonucleotide
attcataccctgggtaattctcttgctgataagttggcagtccaaggtagttattcag

SEQ ID NO: 129075 - DNA, 60 bp, Artificial
  Synthetic oligonucleotide
tacctgtagacattggaggttaaaagaacaagaacaaaccaagtgtttaggagaacaaac

SEQ ID NO: 129076 - DNA, 60 bp, Artificial
  Synthetic oligonucleotide
ggcctatgttatattagctccaattgatattccctggtataaacctacaccattagaatt

SEQ ID NO: 129077 - DNA, 59 bp, Artificial
  Synthetic oligonucleotide
taatcaagtaggaaacaggaaaattactcctcataatatagcaactggaacttatcccc

SEQ ID NO: 129078 - DNA, 66 bp, Artificial
  Synthetic oligonucleotide
gaactgcaagagcattggtgtataatatagatcatattgaagatactaagacttcaacaatatggg

SEQ ID NO: 129079 - DNA, 60 bp, Artificial
  Synthetic oligonucleotide
gctagaaactggctctaaggattgggtgctcctcctgcccctggttttataccgggtacg

SEQ ID NO: 129080 - DNA, 60 bp, Artificial
  Synthetic oligonucleotide
gctgcaggaccaaccaccaatcaagacctctcggacagccccagctcagacgatccatca

SEQ ID NO: 129081 - DNA, 60 bp, Artificial
  Synthetic oligonucleotide
actcgtggtctcggtgttctgtgggcgcggggtctcatcgccgaggaagacctagttcag

SEQ ID NO: 129082 - DNA, 60 bp, Artificial
  Synthetic oligonucleotide
ggggggaatgaaagaccccctaccccaaaatttagccagctactgcagtggtgccatttc

SEQ ID NO: 129083 - DNA, 57 bp, Artificial
  Synthetic oligonucleotide
ttactgccggctgtggattcccggttttgccgagctcgcagccccgctataccctct

SEQ ID NO: 129084 - DNA, 60 bp, Artificial
  Synthetic oligonucleotide
cacagacatccaggccctagaagagtcaattagtgccttagaaaagtccctgacctccct

SEQ ID NO: 129085 - DNA, 60 bp, Artificial
  Synthetic oligonucleotide
tagaaaaaaacagcaacaaacataccccttttacgtctgccccggacatgccccctcgct

SEQ ID NO: 129086 - DNA, 60 bp, Artificial
  Synthetic oligonucleotide
tcaaggatgcagggaagctaaccctaggacagccgctaactatcctgacctcccacccag

SEQ ID NO: 129087 - DNA, 60 bp, Artificial
  Synthetic oligonucleotide
ccgggaccgtatggacaccccgaccaggttccttacattaccacatggagatccttagcc

SEQ ID NO: 129088 - DNA, 60 bp, Artificial
  Synthetic oligonucleotide
gctgatgatacagcaaagaaagccgccacagagactcattcatcactaaccgtcttaccc

SEQ ID NO: 129089 - DNA, 60 bp, Artificial
  Synthetic oligonucleotide
tgtttggggtctcacctgaatacagggtgttgatcggagacgagggagccggaccctcaa

SEQ ID NO: 129090 - DNA, 60 bp, Artificial
  Synthetic oligonucleotide
catctgactcgtggtctcggtgttctgtgggcgcggggtctcatcgccgaggaagaccta

SEQ ID NO: 129091 - DNA, 60 bp, Artificial
  Synthetic oligonucleotide
gagacttacacctccggcaagtaacagagagctgccgggcatgtgctcaaatcaacgccg

SEQ ID NO: 129092 - DNA, 60 bp, Artificial
  Synthetic oligonucleotide
ccaaacatgaaacagcaaaagttgttgccaagaaactcttagaagaaatttttccccgct

SEQ ID NO: 129093 - DNA, 60 bp, Artificial
  Synthetic oligonucleotide
acgcccctccctcaacctctctcgccgcagccctccgcccctcttacctcttccctctac

SEQ ID NO: 129094 - DNA, 60 bp, Artificial
  Synthetic oligonucleotide
cctcttacctcttccctctaccccgtcctccccaagtcagaccctcccaaaccgcctgtg

SEQ ID NO: 129095 - DNA, 60 bp, Artificial
  Synthetic oligonucleotide
atgctagatcaaggcatcctcaagccctgccagtccccatggaatacacccttattacct

SEQ ID NO: 129096 - DNA, 60 bp, Artificial
  Synthetic oligonucleotide
aaactttccccaggcgtgggcagaaacaggaggtatgggaacggctcattgtcaagcccc

SEQ ID NO: 129097 - DNA, 60 bp, Artificial
  Synthetic oligonucleotide
gcgattgccccaaacgaccccggaagaaacccgccaactccactctcctcaacttaggag

SEQ ID NO: 129098 - DNA, 59 bp, Artificial
  Synthetic oligonucleotide
gggcaaccggtgactttcctggtggacacgggagcccagcactcagtactaactcgacc

SEQ ID NO: 129099 - DNA, 60 bp, Artificial
  Synthetic oligonucleotide
ctgaatgtccctacccgttattagggagagacctattaactaaacttaaggcccaaatcc

SEQ ID NO: 129100 - DNA, 60 bp, Artificial
  Synthetic oligonucleotide
ctctcgtggaacttagcgtttctggtggggatcttattcacaatagacataggaatggcc

SEQ ID NO: 129101 - DNA, 60 bp, Artificial
  Synthetic oligonucleotide
cccctaccccaaaatttagccagctactgcagtggtgccatttcacaaggcatggaaaat

SEQ ID NO: 129102 - DNA, 60 bp, Artificial
  Synthetic oligonucleotide
ctccgtctgggttcggagacatcaaaccaagaacctcgagccacggtggaaaggaccaca

SEQ ID NO: 129103 - DNA, 60 bp, Artificial
  Synthetic oligonucleotide
atgcaaactaacacccaagctaatgccacctctatgttaggaaccttaaccgatgcctac

SEQ ID NO: 129104 - DNA, 60 bp, Artificial
  Synthetic oligonucleotide
cagcggcaacaactgtttgactcccaacagggatggtttgaaggatggttcaacaagtcc

SEQ ID NO: 129105 - DNA, 60 bp, Artificial
  Synthetic oligonucleotide
ccgcctcatttaaactaaccaatccccacgcctctcgcttctgtgcgcgcgctttctgct

SEQ ID NO: 129106 - DNA, 60 bp, Artificial
  Synthetic oligonucleotide
ccctgcagctggtccaagaagagatccagagacctctagcggcggcctaccgagaaaaac

SEQ ID NO: 129107 - DNA, 60 bp, Artificial
  Synthetic oligonucleotide
ccggcaggtgtcagccattacgccgcctcaggcaatgggaccaaacctagtcttacctga

SEQ ID NO: 129108 - DNA, 60 bp, Artificial
  Synthetic oligonucleotide
tccgaagagaaccaatatcactaactgttgccctcatgttgggaggactcactgtagggg

SEQ ID NO: 129109 - DNA, 54 bp, Artificial
  Synthetic oligonucleotide
agtggcgacccagaggctccaaacgactgaaagcgccccaaggtctgttgcccc

SEQ ID NO: 129110 - DNA, 60 bp, Artificial
  Synthetic oligonucleotide
cttaaatgccaccgaccccaacaaaactaaagactgttggctctgcctggtttctcgacc

SEQ ID NO: 129111 - DNA, 60 bp, Artificial
  Synthetic oligonucleotide
gaggccaagaacagttaaaccccggatatagctgaaacagcagaagtttcaaggccgcta

SEQ ID NO: 129112 - DNA, 60 bp, Artificial
  Synthetic oligonucleotide
cgctaccagcagtctccaggctccccagttgaccagggttcgaccttccgcctcatttaa

SEQ ID NO: 129113 - DNA, 60 bp, Artificial
  Synthetic oligonucleotide
tcgatgcagagcgagtccatttcgggccgacagtctcccttaaccctgctaccttgctcc

SEQ ID NO: 129114 - DNA, 60 bp, Artificial
  Synthetic oligonucleotide
ctcaagggttcaagaatagccccaccctatttgatgaggccctgcactcagacctggccg

SEQ ID NO: 129115 - DNA, 60 bp, Artificial
  Synthetic oligonucleotide
catccatcctactgtgccaaatccatataacctccttagcaccctcccgccgtctcaccc

SEQ ID NO: 129116 - DNA, 58 bp, Artificial
  Synthetic oligonucleotide
ccaatggcgcctattgggcctgtaacactggactcaccccatgcatttccatggcggt

SEQ ID NO: 129117 - DNA, 60 bp, Artificial
  Synthetic oligonucleotide
cccagcgagccgaactgattgccctgacccaggcactaaagatggcagaaggtaagaagc

SEQ ID NO: 129118 - DNA, 60 bp, Artificial
  Synthetic oligonucleotide
cctcgccctactagaggcgttattcttacccaaaagactgagcatcatccattgcccggg

SEQ ID NO: 129119 - DNA, 60 bp, Artificial
  Synthetic oligonucleotide
agcctctgcaaagaaggcccaaatttgcctgcaagaagtcacatacctggggtactcttt

SEQ ID NO: 129120 - DNA, 60 bp, Artificial
  Synthetic oligonucleotide
ccaacctgggacgactgccagcagctcttgcaggcactcctgacaggcgaagaaaggcaa

SEQ ID NO: 129121 - DNA, 60 bp, Artificial
  Synthetic oligonucleotide
cttgagggagggccccaacaaccgaccccagtattggccattctcagcctcagacctgta

SEQ ID NO: 129122 - DNA, 60 bp, Artificial
  Synthetic oligonucleotide
tcacgggccaccgccgtcaggtcctaggaccccaaccgcttccccgattgcaagccggct

SEQ ID NO: 129123 - DNA, 60 bp, Artificial
  Synthetic oligonucleotide
agggagcacctacgcctttatcgccagttgctattagcgggtctccgcggggctgcaaga

SEQ ID NO: 129124 - DNA, 60 bp, Artificial
  Synthetic oligonucleotide
atggcaccagacccgacttaactgaccagccgttgccggatgcagacctgacctggtaca

SEQ ID NO: 129125 - DNA, 60 bp, Artificial
  Synthetic oligonucleotide
tcacccttgatcactggtctgaagtccgggcacgagcccataaccaaggtgtcgaggtcc

SEQ ID NO: 129126 - DNA, 50 bp, Artificial
  Synthetic oligonucleotide
ttttgaaagaaaagggaggactggaagggatgttttacagtgaggaaaga

SEQ ID NO: 129127 - DNA, 52 bp, Artificial
  Synthetic oligonucleotide
ttatttaaaagaaaagggaggactggaagggatgttttattgtgaggaaaga

SEQ ID NO: 129128 - DNA, 60 bp, Artificial
  Synthetic oligonucleotide
atcattagggattatggaaaacagatggcaggtgatgattgtgtggcaagtagacaggat

SEQ ID NO: 129129 - DNA, 60 bp, Artificial
  Synthetic oligonucleotide
atccctcagaccttttagtcagtgtggaaaatctctagcagtggcgcccgaacagggacc

SEQ ID NO: 129130 - DNA, 59 bp, Artificial
  Synthetic oligonucleotide
gggattatggaaaacagatggcaggtgatgattgtgtggcaggtagacaggatgaggat

SEQ ID NO: 129131 - DNA, 60 bp, Artificial
  Synthetic oligonucleotide
gaccagatctgagcctgggagctctctggctagcaggagaacccactgcttaagcctcaa

SEQ ID NO: 129132 - DNA, 60 bp, Artificial
  Synthetic oligonucleotide
ggagtaattgactacccgtcacgggggtctttcatttgggggctcgtccgggatttggag

SEQ ID NO: 129133 - DNA, 60 bp, Artificial
  Synthetic oligonucleotide
gagtgattgactacccacgtcgggggtctttcatttgggggctcgtccgggatttggaga

SEQ ID NO: 129134 - DNA, 60 bp, Artificial
  Synthetic oligonucleotide
agattgattgactgcccacctcgggggtctttcatttgggggctcgtccgggatttggag

SEQ ID NO: 129135 - DNA, 60 bp, Artificial
  Synthetic oligonucleotide
tcaggagggggctcgcttttttctcctacgcgcccgccgccctacctgaggccgccatcc

SEQ ID NO: 129136 - DNA, 60 bp, Artificial
  Synthetic oligonucleotide
cctgagaggttctctccagcactagcaggtagagcctgggtgttccctgctggactctca

SEQ ID NO: 129137 - DNA, 60 bp, Artificial
  Synthetic oligonucleotide
aagacccctcgacaactaagggagttcctagggacggcaggcttctgtcgcctctggatc

SEQ ID NO: 129138 - DNA, 60 bp, Artificial
  Synthetic oligonucleotide
cactccgaagacccctcgacaactaagggagttcctagggacggcaggcttctgtcgcct

SEQ ID NO: 129139 - DNA, 60 bp, Artificial
  Synthetic oligonucleotide
ctactccaaagacccctcgacaactaagggagttcctagggacggcaggcttctgtcgcc

SEQ ID NO: 129140 - DNA, 60 bp, Artificial
  Synthetic oligonucleotide
ctactccgaagacccctcgacaactaagggagttcctagggacggcaggcttctgtcgcc

SEQ ID NO: 129141 - DNA, 60 bp, Artificial
  Synthetic oligonucleotide
gggcagcctactccgaagacccctcgacaactaagggagttcctagggacggcaggcttc

SEQ ID NO: 129142 - DNA, 60 bp, Artificial
  Synthetic oligonucleotide
ccaatgagagtagaatactggggacagggatcagtattattaaaggatgaagagaaggga

SEQ ID NO: 129143 - DNA, 60 bp, Artificial
  Synthetic oligonucleotide
ccaatgagagtggaatattggggacaaggatcagtattattaaaggatgaagagaaggga

SEQ ID NO: 129144 - DNA, 60 bp, Artificial
  Synthetic oligonucleotide
gtgattgaggaagtgaagctagagcaatagaaagctgttaagcagaactcctgctgacct

SEQ ID NO: 129145 - DNA, 52 bp, Artificial
  Synthetic oligonucleotide
gctgcagttctggtgggccctacccctgtaaatattataggtagaaatgtac

SEQ ID NO: 129146 - DNA, 60 bp, Artificial
  Synthetic oligonucleotide
caaggaggtgacagaggatttgctgcacctcaattctctctttggagaagaccagtagtc

SEQ ID NO: 129147 - DNA, 60 bp, Artificial
  Synthetic oligonucleotide
ccctacaaggaggtgacagaggatttgctgcacctcaattctctctttggagaagaccag

SEQ ID NO: 129148 - DNA, 60 bp, Artificial
  Synthetic oligonucleotide
acctctgttatccaagagtcttgtgacaaacattattgggatgccataagatttaggtat

SEQ ID NO: 129149 - DNA, 60 bp, Artificial
  Synthetic oligonucleotide
catgaaccactgtaacacttctgttatccaagagtcttgtgacaaacattattgggatgc

SEQ ID NO: 129150 - DNA, 60 bp, Artificial
  Synthetic oligonucleotide
acatgaaccactgtaacacttctgttatccaagagtcttgtgacaaacattattgggatg

SEQ ID NO: 129151 - DNA, 60 bp, Artificial
  Synthetic oligonucleotide
gttacatgaaccactgtaacacttctgttatccaagagtcttgtgacaaacattattggg

SEQ ID NO: 129152 - DNA, 60 bp, Artificial
  Synthetic oligonucleotide
tacatgaaccactgtaacacttctgttatccaagagtcttgtgacaaacattattgggat

SEQ ID NO: 129153 - DNA, 60 bp, Artificial
  Synthetic oligonucleotide
tcattagggattatggaaaacagatggcaggtgatgattgtgtggcaggtagacaggatg

SEQ ID NO: 129154 - DNA, 60 bp, Artificial
  Synthetic oligonucleotide
atctagtgagaaacattaggcagggatatcaacccctctcgttacagatccccacccgtc

SEQ ID NO: 129155 - DNA, 60 bp, Artificial
  Synthetic oligonucleotide
aaaacctccgacgcaacgggctcggcttagcggagtgcacccgctaagaggcgagaggaa

SEQ ID NO: 129156 - DNA, 60 bp, Artificial
  Synthetic oligonucleotide
ggagtggtcaaccctcagatgctgcatataagcagctgcttttcgcctgtactaggtctc

SEQ ID NO: 129157 - DNA, 60 bp, Artificial
  Synthetic oligonucleotide
cctgagtaacaagaccctggtctgttaggaccctttctgctttgggaaacggaggcagga

SEQ ID NO: 129158 - DNA, 60 bp, Artificial
  Synthetic oligonucleotide
ctgaggctatctgtatggggtatcagacaactccgagctcgcctgcaagccttagaaacc

SEQ ID NO: 129159 - DNA, 60 bp, Artificial
  Synthetic oligonucleotide
ggttacttccctgattggcagaactacacaccagggccaggggtcagatatccactgacc

SEQ ID NO: 129160 - DNA, 60 bp, Artificial
  Synthetic oligonucleotide
gataggagcaggcatgaccttctattctcagctgatagtggatggagacacccgcagggc

SEQ ID NO: 129161 - DNA, 60 bp, Artificial
  Synthetic oligonucleotide
ccaccaccagtggccagaattacccagtcataagaacagcacagggacagtatcagcatc

SEQ ID NO: 129162 - DNA, 60 bp, Artificial
  Synthetic oligonucleotide
gaagctggtagggaagttaaactgggcagcccaagtctattcagggatcaaaactaaaca

SEQ ID NO: 129163 - DNA, 60 bp, Artificial
  Synthetic oligonucleotide
ccagagagcttgagcggttcggtctctcagatacgctcctagagagcaaggacggatgcc

SEQ ID NO: 129164 - DNA, 60 bp, Artificial
  Synthetic oligonucleotide
cctctcaagtaaggggatacagaccccagaagacaaacaccagccagactacccggtaga

SEQ ID NO: 129165 - DNA, 60 bp, Artificial
  Synthetic oligonucleotide
ccgcgctttcgctaaccctagctttgagccttagtctaatattgagaaaacatgccaagc

SEQ ID NO: 129166 - DNA, 60 bp, Artificial
  Synthetic oligonucleotide
gaaattcgtgaaggaccaagccatactaaatctgtgggggtgcgccaataggcaaatctg

SEQ ID NO: 129167 - DNA, 60 bp, Artificial
  Synthetic oligonucleotide
ggcaccaggcaaaatgtggatagtgagcccgattcagtacatgtcagaaaggaagatgga

SEQ ID NO: 129168 - DNA, 60 bp, Artificial
  Synthetic oligonucleotide
gcataggagggaatgaggaagtagaccacctagttagcaggggaatccgccaggtactat

SEQ ID NO: 129169 - DNA, 60 bp, Artificial
  Synthetic oligonucleotide
cgagaccttcctagacccagaagtgaccatgcagattatacacacacactacttctcttg

SEQ ID NO: 129170 - DNA, 60 bp, Artificial
  Synthetic oligonucleotide
ggacaggagagagctataaatttggaaaacacaaccaaccagcaagcagagctccaagcc

SEQ ID NO: 129171 - DNA, 60 bp, Artificial
  Synthetic oligonucleotide
gtttaccttggtcccagagcccatagaaacagcacccacctactatgtggatggagcagc

SEQ ID NO: 129172 - DNA, 60 bp, Artificial
  Synthetic oligonucleotide
ggactgggagggacctgagagtggcttgccctcagatccagcataaaagcagacgctctg

SEQ ID NO: 129173 - DNA, 60 bp, Artificial
  Synthetic oligonucleotide
aatgcttagaaggattaggcagggctactctcccctctctccacagatccatacccgaca

SEQ ID NO: 129174 - DNA, 60 bp, Artificial
  Synthetic oligonucleotide
atagtgtcccattagacaaagaattccgaccctacacggccttctcggtccctgcagtga

SEQ ID NO: 129175 - DNA, 60 bp, Artificial
  Synthetic oligonucleotide
ccgacagaagtgcgcaggagacctgtgccccacgtcaaggctagggcaatcagcttggga

SEQ ID NO: 129176 - DNA, 60 bp, Artificial
  Synthetic oligonucleotide
aagccacaacagccaagcttctagagcaagttaggaaggacaatcaggacgccttaatag

SEQ ID NO: 129177 - DNA, 60 bp, Artificial
  Synthetic oligonucleotide
gggctaaggtacccatcaggggctgatgtggcgggagtgtcatcaacgccagcagaacaa

SEQ ID NO: 129178 - DNA, 60 bp, Artificial
  Synthetic oligonucleotide
caactgtggacaatttggacatttggcaagagattgccccaagcctaagtctaccagatg

SEQ ID NO: 129179 - DNA, 60 bp, Artificial
  Synthetic oligonucleotide
gcgctggaagaagcggcaggcacagatccttgtcgctgttttcagaagacctccacaacc

SEQ ID NO: 129180 - DNA, 60 bp, Artificial
  Synthetic oligonucleotide
aaaagagctgcgcagcaaaagaggtaaggtgtcgggcgagcctagaggggtggcagacct

SEQ ID NO: 129181 - DNA, 60 bp, Artificial
  Synthetic oligonucleotide
ccaggggccacattaaaagagatgttacaggcctgccaggggattgagggacccatgcac

SEQ ID NO: 129182 - DNA, 60 bp, Artificial
  Synthetic oligonucleotide
caggacaaggcatttgtaataatgtaaccgctaggcactgcactcatgacatattaccgc

SEQ ID NO: 129183 - DNA, 60 bp, Artificial
  Synthetic oligonucleotide
atctcctccagtggcgcccgaacaggggcttgactacatatcaacccgttcggaggttcg

SEQ ID NO: 129184 - DNA, 60 bp, Artificial
  Synthetic oligonucleotide
ggcctgagagcccttgcctaggggttgagaccccggctcgcttgcttgcagaaaggcttt

SEQ ID NO: 129185 - DNA, 60 bp, Artificial
  Synthetic oligonucleotide
agcaaacagagagccagggaacgtgttgataacgacagcatgcctacccacggaccccgc

SEQ ID NO: 129186 - DNA, 57 bp, Artificial
  Synthetic oligonucleotide
ccccagactctaattccatgccaaatgctgaccccacaccatctttgagaccctcca

SEQ ID NO: 129187 - DNA, 60 bp, Artificial
  Synthetic oligonucleotide
gcgccacaacaagcgggcatacaaccgtcaccccttggggcagatgggcagacaataatg

SEQ ID NO: 129188 - DNA, 60 bp, Artificial
  Synthetic oligonucleotide
cttctccttttgctctaggctggccctaaagtcaggcccgcagcttaatcaaatacaaca

SEQ ID NO: 129189 - DNA, 60 bp, Artificial
  Synthetic oligonucleotide
acatacagtaaaaaccaaatatcgccatgaccaatggatggtctgcagaataaggcagtt

SEQ ID NO: 129190 - DNA, 60 bp, Artificial
  Synthetic oligonucleotide
ggtggtgtcaacctaagccaccaatagaagtgaacgtcctccggctcctggaagaaggag

SEQ ID NO: 129191 - DNA, 60 bp, Artificial
  Synthetic oligonucleotide
gtcaaggaacagtgggacaattggtgggcagactcatggcaaacaacttggattcccgac

SEQ ID NO: 129192 - DNA, 60 bp, Artificial
  Synthetic oligonucleotide
caaggagtagtagaaaatgcaaacaaacagttaaaggaaaccattcacaaagtaagggaa

SEQ ID NO: 129193 - DNA, 60 bp, Artificial
  Synthetic oligonucleotide
catggctaagtcgtcaaacgccaacaactatggttcaggcgcaagccgccctgtgggaac

SEQ ID NO: 129194 - DNA, 60 bp, Artificial
  Synthetic oligonucleotide
gagtgctcctgcccagtacgcccgaaagtcccgattcgtgatgtcaactacaaactcatg

SEQ ID NO: 129195 - DNA, 60 bp, Artificial
  Synthetic oligonucleotide
ctggaaggcaaggtcatcttggtggcagtacatgtagccagtagtttcatatgggccagg

SEQ ID NO: 129196 - DNA, 60 bp, Artificial
  Synthetic oligonucleotide
aactccaagccgcagtctcaggagcgctcgacgcccttgcgatcttcacatggaactgga

SEQ ID NO: 129197 - DNA, 60 bp, Artificial
  Synthetic oligonucleotide
ttacccacggcaaccagggttcctgtggtgcttgagaccggtagccatgacagaggagtc

SEQ ID NO: 129198 - DNA, 60 bp, Artificial
  Synthetic oligonucleotide
gacagaaacatgctaagaacaggaaagtttgccaagatcagaacagcccatagtaacccc

SEQ ID NO: 129199 - DNA, 60 bp, Artificial
  Synthetic oligonucleotide
ccggtgaacttctccccactagtagggcccaaggaagagccacccaaggacaggaaagac

SEQ ID NO: 129200 - DNA, 60 bp, Artificial
  Synthetic oligonucleotide
ggtcaactggaggaagcagggcctaataacccatataattcaccagtattcgccataaga

SEQ ID NO: 129201 - DNA, 60 bp, Artificial
  Synthetic oligonucleotide
caaaattggaaataacactaaacatggtaatggcaggacagcaattgaaacccactaaag

SEQ ID NO: 129202 - DNA, 60 bp, Artificial
  Synthetic oligonucleotide
taccccatgtcacaagaagccagactggggatcaagccccacatacagagactgttggac

SEQ ID NO: 129203 - DNA, 60 bp, Artificial
  Synthetic oligonucleotide
taccccatgtcacaagaagccagactggggatcaagccccacatacagaggctgttggac

SEQ ID NO: 129204 - DNA, 60 bp, Artificial
  Synthetic oligonucleotide
aataccccatgtcacaagaagccagactggggatcaagccccacatacagagactgttgg

SEQ ID NO: 129205 - DNA, 60 bp, Artificial
  Synthetic oligonucleotide
acaataccccatgtcacaagaagccagactggggatcaagccccacatacagagactgct

SEQ ID NO: 129206 - DNA, 60 bp, Artificial
  Synthetic oligonucleotide
gtgtccataaaacaataccccatgtcacaagaagccagactggggatcaagccccacata

SEQ ID NO: 129207 - DNA, 60 bp, Artificial
  Synthetic oligonucleotide
aaattttccaattagtcccattgaaactgtaccagtaaaattaaagccaggaatggatgg

SEQ ID NO: 129208 - DNA, 60 bp, Artificial
  Synthetic oligonucleotide
gtccagtgagcatcttagatattaaacagggaccaaaagaaccattcagagattatgtag

SEQ ID NO: 129209 - DNA, 60 bp, Artificial
  Synthetic oligonucleotide
gccaggaagatggaaaccaaaaatgatagggggaattggaggttttatcaaagtaagaca

SEQ ID NO: 129210 - DNA, 60 bp, Artificial
  Synthetic oligonucleotide
cctgttggtccgttaaacaggctaacttgacaacatcactcctcggggacttattggatg

SEQ ID NO: 129211 - DNA, 60 bp, Artificial
  Synthetic oligonucleotide
tccttatccctcgactcccctccttccccacccagagaacctctaagaccctcaaggtcc

SEQ ID NO: 129212 - DNA, 60 bp, Artificial
  Synthetic oligonucleotide
caataccttatccctcggctcccctccttccccacccagagaacctccaagaccctcaag

SEQ ID NO: 129213 - DNA, 60 bp, Artificial
  Synthetic oligonucleotide
tggtttggctttaatggaactagagcagaaaatagaacatatatctattggcatggcagg

SEQ ID NO: 129214 - DNA, 60 bp, Artificial
  Synthetic oligonucleotide
gatatcagacaagggcccaaagaaccattcaaagattatgtagacagattctataaagca

SEQ ID NO: 129215 - DNA, 60 bp, Artificial
  Synthetic oligonucleotide
tagcggaggctagaaggagagagatgggtgcgagagcgtcagtattaagtgggggaaaat

SEQ ID NO: 129216 - DNA, 58 bp, Artificial
  Synthetic oligonucleotide
ggggatatagtgcaggggaaagaataatagacataatagcaacagacatacaaactag

SEQ ID NO: 129217 - DNA, 60 bp, Artificial
  Synthetic oligonucleotide
ccaggacttcgtggcacggctcttagatactataggtaagataatgtcagatgaacaggc

SEQ ID NO: 129218 - DNA, 60 bp, Artificial
  Synthetic oligonucleotide
cgtggcacgacttttagatactataggtaagataatgtcagatgaaaaggctgggatggt

SEQ ID NO: 129219 - DNA, 60 bp, Artificial
  Synthetic oligonucleotide
atgtgctcgtatagctgatgttaaccgacagcaaggtatacagacctcctatgaaatgtt

SEQ ID NO: 129220 - DNA, 60 bp, Artificial
  Synthetic oligonucleotide
tgatgttaaccgacagcaaggtatacagacctcctatgaaatgttgattggcgaaggccc

SEQ ID NO: 129221 - DNA, 60 bp, Artificial
  Synthetic oligonucleotide
ccgacagcaaggtatacagacctcctatgaaatgttgattggtgaaggcccttaccaggc

SEQ ID NO: 129222 - DNA, 60 bp, Artificial
  Synthetic oligonucleotide
agatcgaaaaggcttggggtgttttccctagggacctctgattctcctgtgacgcacgcc

SEQ ID NO: 129223 - DNA, 60 bp, Artificial
  Synthetic oligonucleotide
ccggcagggacctgatgagccttaccaggacttcgtggcacgacttttagatactatagg

SEQ ID NO: 129224 - DNA, 59 bp, Artificial
  Synthetic oligonucleotide
ttatcggcaccacctctcctgaagtttttaacttatttacattgattcaacaggttcta

SEQ ID NO: 129225 - DNA, 60 bp, Artificial
  Synthetic oligonucleotide
gaaaaggcttggggtgttttccctagggacctctgattctcctgtgacgcatgccgatcc

SEQ ID NO: 129226 - DNA, 60 bp, Artificial
  Synthetic oligonucleotide
cgtggcacggctcttagatactataggtaagataatgtcagatgaacaggctgggatggt

SEQ ID NO: 129227 - DNA, 60 bp, Artificial
  Synthetic oligonucleotide
cggcagcaaggtatacagacctcctatgaaatgttgactggtgaaggcgctttccaagct

SEQ ID NO: 129228 - DNA, 60 bp, Artificial
  Synthetic oligonucleotide
ggccaaaacagatggctatttctactctccagggtattggccaaactaccaatccagaac

SEQ ID NO: 129229 - DNA, 60 bp, Artificial
  Synthetic oligonucleotide
agatcgaaaaggcttggggtgttttccctagggacctctgattctcctgtgacgcatgcc

SEQ ID NO: 129230 - DNA, 60 bp, Artificial
  Synthetic oligonucleotide
ggcggtacttgggagtggcttcccctcagagctgcataaaagcagatgctcgctggcttg

SEQ ID NO: 129231 - DNA, 60 bp, Artificial
  Synthetic oligonucleotide
ggcggtactgggagtggctttcccctcagagctgcataaaagcagatgctcgctggcttg

SEQ ID NO: 129232 - DNA, 60 bp, Artificial
  Synthetic oligonucleotide
aggaggcacgatgggcgcagcggcgacagccctgacggtacagtctcggtcattactggc

SEQ ID NO: 129233 - DNA, 60 bp, Artificial
  Synthetic oligonucleotide
aggcacaatgggcgcagcggcgacagccctgacggtacagtctcggtctttgttggctgg

SEQ ID NO: 129234 - DNA, 60 bp, Artificial
  Synthetic oligonucleotide
gatggctgactgaggccagaaaagagactgtgatggggcagcctactccgaagacccctc

SEQ ID NO: 129235 - DNA, 60 bp, Artificial
  Synthetic oligonucleotide
ggctgactgaggccagaaaagagactgtgatggggcagcctactccaaagacccctcgac

SEQ ID NO: 129236 - DNA, 60 bp, Artificial
  Synthetic oligonucleotide
gaggccagaaaagagactgtgatggggcagcctactccgaagacccctcgacaactaaga

SEQ ID NO: 129237 - DNA, 60 bp, Artificial
  Synthetic oligonucleotide
gactgaggccagaaaagagactgtgatggggcagcctactccgaagacccctcgacagct

SEQ ID NO: 129238 - DNA, 60 bp, Artificial
  Synthetic oligonucleotide
gctgactgaggccagaaaagagactgtgatggggcagcctactccgaagacccctcgaca

SEQ ID NO: 129239 - DNA, 60 bp, Artificial
  Synthetic oligonucleotide
gactgaggccagaaaagagactgtgatggggcagcccactccgaagacccctcgacaact

SEQ ID NO: 129240 - DNA, 59 bp, Artificial
  Synthetic oligonucleotide
cccgtggtggaactgacgagttcggaacacccggccgcaaccctgggagacgtcccagg

SEQ ID NO: 129241 - DNA, 60 bp, Artificial
  Synthetic oligonucleotide
ggctactggaggaaagcggtatcgctggaccacggatcgcaaagtacatctagctaccgg

SEQ ID NO: 129242 - DNA, 51 bp, Artificial
  Synthetic oligonucleotide
tatagaccccagagttcaggtcaggtagagagaatgaatagaaccatcaag

SEQ ID NO: 129243 - DNA, 60 bp, Artificial
  Synthetic oligonucleotide
gcttaccgaccccaaagttcaggtcaggtagagagaatgaatagaaccatcaaggagact

SEQ ID NO: 129244 - DNA, 60 bp, Artificial
  Synthetic oligonucleotide
gagatcctatttggaaaggaccagccaaactactctggaaaggtgaaggggcagtagtca

SEQ ID NO: 129245 - DNA, 60 bp, Artificial
  Synthetic oligonucleotide
ccaacgagccgaactgatagcactcacccaagccttaaagatggcagaaggtaagaagct

SEQ ID NO: 129246 - DNA, 60 bp, Artificial
  Synthetic oligonucleotide
gggactgaataaattagtgagaatgtacagtcctgttagcattttggacataaaacaagg

SEQ ID NO: 129247 - DNA, 60 bp, Artificial
  Synthetic oligonucleotide
gagaccctatttggaaaggaccagccaaactactctggaaaggtgaaggggcagcagtga

SEQ ID NO: 129248 - DNA, 60 bp, Artificial
  Synthetic oligonucleotide
cgaagttgcagctagctctcctcagcggcctgggagccctaggagactggtagagcggcc

SEQ ID NO: 129249 - DNA, 60 bp, Artificial
  Synthetic oligonucleotide
gatccacctagcctctacaattctccgttacttactttactacgcgctgatcagcccaat

SEQ ID NO: 129250 - DNA, 60 bp, Artificial
  Synthetic oligonucleotide
catgggagtggtggactcgagcacaatgggaaataccagtaggacaaggtgtattaatta

SEQ ID NO: 129251 - DNA, 60 bp, Artificial
  Synthetic oligonucleotide
ggggaatatttcactgcgtggaattcttcccatggcataagacaacagcttttgcaggac

SEQ ID NO: 129252 - DNA, 60 bp, Artificial
  Synthetic oligonucleotide
catacagacaatggtccaaacttcatcagtgatgcctttgcggcagcctgttggtgggca

SEQ ID NO: 129253 - DNA, 60 bp, Artificial
  Synthetic oligonucleotide
gaaaccatcaatcaaattagggaagaagtagaaagattagagacagcggtggcaatggcc

SEQ ID NO: 129254 - DNA, 60 bp, Artificial
  Synthetic oligonucleotide
gcagtaaacacagccagtgggtatacagaaactaaaatattgaaaagagaaacagggcaa

SEQ ID NO: 129255 - DNA, 60 bp, Artificial
  Synthetic oligonucleotide
ggcagggaccagcttctctactgtggaagggagaaggagcagtagtgatccagacaccag

SEQ ID NO: 129256 - DNA, 60 bp, Artificial
  Synthetic oligonucleotide
gctggagatctaccttaactgaacccatcttggatcccaaaagagactttgactctgggg

SEQ ID NO: 129257 - DNA, 60 bp, Artificial
  Synthetic oligonucleotide
tggggtcacagagctcaaagaagcagccatctcgctgggacgagaagtggcgcaccagat

SEQ ID NO: 129258 - DNA, 60 bp, Artificial
  Synthetic oligonucleotide
caagggagattgaaaacagggaaagctgcgaaaagagcattttgcaaagtcaaaggagaa

SEQ ID NO: 129259 - DNA, 60 bp, Artificial
  Synthetic oligonucleotide
tacagaatttgaaggagatgctgagtgtcaaaatgtaacagcagtttcatgcacacatcc

SEQ ID NO: 129260 - DNA, 58 bp, Artificial
  Synthetic oligonucleotide
gggattccctgtggagctggtttgatctgtcgaaatggttccagtaccttaagatagg

SEQ ID NO: 129261 - DNA, 66 bp, Artificial
  Synthetic oligonucleotide
ggggttttaaggataagaaacatcagtataatgcattcttttacaagtcagatataatgagagagg

SEQ ID NO: 129262 - DNA, 60 bp, Artificial
  Synthetic oligonucleotide
gtccgggagagaaagagaagacacgcaagaacaactgctgaggactttgctgcgcatagc

SEQ ID NO: 129263 - DNA, 60 bp, Artificial
  Synthetic oligonucleotide
ctagtaggctttcctgttttaccacaagtacccttgagacccttaacttacaaacttgcc

SEQ ID NO: 129264 - DNA, 60 bp, Artificial
  Synthetic oligonucleotide
gtcctacatcctcggaacacccagtagtcgaacagattatgcaaaaggctatggagaaag

SEQ ID NO: 129265 - DNA, 60 bp, Artificial
  Synthetic oligonucleotide
gagataccagttcaaggtgttgccacaaggatggaagggatcgcccactatctttcaggc

SEQ ID NO: 129266 - DNA, 60 bp, Artificial
  Synthetic oligonucleotide
gcaatgcaagtgatcaaagatgtgattaatgaggaagggtctgaatgggacctacaacac

SEQ ID NO: 129267 - DNA, 60 bp, Artificial
  Synthetic oligonucleotide
cgatggggccgctaataggaatagcaaagaaggacaagcaggttacataacagatagggg

SEQ ID NO: 129268 - DNA, 60 bp, Artificial
  Synthetic oligonucleotide
atgcttgaaaaggggcaattggaaaaggcctcccctacaaatccttataataccccagtt

SEQ ID NO: 129269 - DNA, 60 bp, Artificial
  Synthetic oligonucleotide
ttgactgagctagggacccgagagaggagacgccagtcaaagggaccgcagaggaacgtg

SEQ ID NO: 129270 - DNA, 60 bp, Artificial
  Synthetic oligonucleotide
agaagacgcacgggaaacgcgccttcagtggcgcccgaacagggacttgactgagctagg

SEQ ID NO: 129271 - DNA, 60 bp, Artificial
  Synthetic oligonucleotide
aggaggaaacataagggtaagacaatataaccagatcagatttcaaatagaaagaccaga

SEQ ID NO: 129272 - DNA, 60 bp, Artificial
  Synthetic oligonucleotide
ctacaggcagtggataattctaggattacaaaagtgtgtgcaagtctacaatcctgtcaa

SEQ ID NO: 129273 - DNA, 60 bp, Artificial
  Synthetic oligonucleotide
gtccaactaaagccagggaaggagctacctaaattaaaacagtggcctctgacaagagaa

SEQ ID NO: 129274 - DNA, 60 bp, Artificial
  Synthetic oligonucleotide
gtgtcccaaatgccaaatcagaggagaaccaaaacatgggcaagtagacacagatctagg

SEQ ID NO: 129275 - DNA, 59 bp, Artificial
  Synthetic oligonucleotide
gcacacattagcaagttaggacaacaacagtgggggtacataattaaacaagggccaca

SEQ ID NO: 129276 - DNA, 60 bp, Artificial
  Synthetic oligonucleotide
aacgtgcgcacgaagaagagaagcggtgtccgccctatgccgatcggcgaccggattgag

SEQ ID NO: 129277 - DNA, 60 bp, Artificial
  Synthetic oligonucleotide
gggcagtccaacaagcacttagaggggagaagttgacttcgcactgctggaatttccata

SEQ ID NO: 129278 - DNA, 60 bp, Artificial
  Synthetic oligonucleotide
gacgaggcaggagtaataagtgccactgccaaagcagaacaggtagcccaagaagcatgc

SEQ ID NO: 129279 - DNA, 60 bp, Artificial
  Synthetic oligonucleotide
gcttagaggtggaagcaggtccagaagaaacacccaccatggcttggattagatgcatgc

SEQ ID NO: 129280 - DNA, 60 bp, Artificial
  Synthetic oligonucleotide
gaaatagaagggtacttggtagatgaggaagacacactgatgatgcacccagcagcagga

SEQ ID NO: 129281 - DNA, 60 bp, Artificial
  Synthetic oligonucleotide
ggaggatgcctatggattttaggaaactcaatgaagcaacacaggacttttgggaagtac

SEQ ID NO: 129282 - DNA, 60 bp, Artificial
  Synthetic oligonucleotide
cagcagtaacgtggcagcaagcatgtggcaataactctcgttgcccaacaccccaatggg

SEQ ID NO: 129283 - DNA, 60 bp, Artificial
  Synthetic oligonucleotide
ccttaacgcccgactcactgctctagagacgtatctcagagaccaagccattatgtcaaa

SEQ ID NO: 129284 - DNA, 60 bp, Artificial
  Synthetic oligonucleotide
tgctggaggctgtagaggcacaacagcacctcttaggcttaacggtctggggtgtgaaaa

SEQ ID NO: 129285 - DNA, 51 bp, Artificial
  Synthetic oligonucleotide
cagttgaattttgcacctactgctaatgtggaagatgtgtggagagctgat

SEQ ID NO: 129286 - DNA, 60 bp, Artificial
  Synthetic oligonucleotide
ggaggtcgcaaccacaaggagacctggaagtgagaacacattggtttcaatgtggcggag

SEQ ID NO: 129287 - DNA, 60 bp, Artificial
  Synthetic oligonucleotide
ctctattccaccagaaaaatggcaggacaaattccccttgcaatggttagggtacacgct

SEQ ID NO: 129288 - DNA, 60 bp, Artificial
  Synthetic oligonucleotide
gtgcataagaggggcaaaagcacttaccgacattgtagaactgacagaagaggcagaagc

SEQ ID NO: 129289 - DNA, 60 bp, Artificial
  Synthetic oligonucleotide
ggaccaaggtaacaatgttgctggacacaggggcagatgacaccataataagagaacaag

SEQ ID NO: 129290 - DNA, 60 bp, Artificial
  Synthetic oligonucleotide
cacatagcaaggcagtgtagacaaccaagaaaaggacaaggcaaccctcctccacaggcc

SEQ ID NO: 129291 - DNA, 60 bp, Artificial
  Synthetic oligonucleotide
atgcttcaccccaacagaagcacatagcaatggccaccccgctacagccacagtcctctc

SEQ ID NO: 129292 - DNA, 60 bp, Artificial
  Synthetic oligonucleotide
ccttggaagaaatgcttcaagcttgccaaggggtaggaggaccacaatacaaagcaaaac

SEQ ID NO: 129293 - DNA, 56 bp, Artificial
  Synthetic oligonucleotide
ctgtgccagtaaaattaaagccaggaatggatggcccaaaggttaaacaatggcca

SEQ ID NO: 129294 - DNA, 60 bp, Artificial
  Synthetic oligonucleotide
tcattagggactatggaaaacagatggcaggtgatgattgtgtggcaagtagacaggatg

SEQ ID NO: 129295 - DNA, 60 bp, Artificial
  Synthetic oligonucleotide
accagctcacctgggaccccatcgatggacgcgttgtcggctctcctctccaatacctta

SEQ ID NO: 129296 - DNA, 60 bp, Artificial
  Synthetic oligonucleotide
acaggatgccgaagcaccgcgttggataccggaaaggctggtacgcgcggcagaggaatt

SEQ ID NO: 129297 - DNA, 60 bp, Artificial
  Synthetic oligonucleotide
acagaatgccgaagcgccgcgctggattccggaaaggctggtacgcgcggcagaggaact

SEQ ID NO: 129298 - DNA, 60 bp, Artificial
  Synthetic oligonucleotide
ctgtattaatatggggacgagggcatgtttgtgtttttccacaggatgccgaagcaccgc

SEQ ID NO: 129299 - DNA, 60 bp, Artificial
  Synthetic oligonucleotide
gcaaggtatcagccattttggtctgatcctctcaaccccatcttttgcctctcttatttt

SEQ ID NO: 129300 - DNA, 60 bp, Artificial
  Synthetic oligonucleotide
gcaagtacctaagctccctgtcccgccaccctcaggaagtcttaagagcttttggagctc

SEQ ID NO: 129301 - DNA, 60 bp, Artificial
  Synthetic oligonucleotide
ccagcaaagcttctctggaaaggtgaaggggcagtagtaatacaagataatagtgaaata

SEQ ID NO: 129302 - DNA, 60 bp, Artificial
  Synthetic oligonucleotide
gaaatgctcttaggcagaaggtagctccctcgactgggtgacaaggaagaaaccattcag

SEQ ID NO: 129303 - DNA, 60 bp, Artificial
  Synthetic oligonucleotide
agttttagatcttaacaggaaatactcttaggcagaaggtagctccctcgactgggtgac

SEQ ID NO: 129304 - DNA, 60 bp, Artificial
  Synthetic oligonucleotide
gaggcttacacctcaggaaggagtgtggctaatgctggtaaggcacctttctatcagtac

SEQ ID NO: 129305 - DNA, 60 bp, Artificial
  Synthetic oligonucleotide
gggtgacaaggaagaaaccattcaggaagtgcttccttctgctcggggagatacatgagt

SEQ ID NO: 129306 - DNA, 60 bp, Artificial
  Synthetic oligonucleotide
cacctttctatcagtacaatcaagcccattcctccccatgttctcagggtgtgtgcggcg

SEQ ID NO: 129307 - DNA, 60 bp, Artificial
  Synthetic oligonucleotide
gagtgtggctaatgctggtaaggcacctttctatcagtacaatcaagcccattcctcccc

SEQ ID NO: 129308 - DNA, 60 bp, Artificial
  Synthetic oligonucleotide
aagcccattcctccccatgttctcagggtgtgtgcggcgtaagatcgaatccccacacac

SEQ ID NO: 129309 - DNA, 60 bp, Artificial
  Synthetic oligonucleotide
atccctgaaggaagtatagctcttcaggtaaagaggccagtattaaaagagctacccttc

SEQ ID NO: 129310 - DNA, 60 bp, Artificial
  Synthetic oligonucleotide
gctatccctgaaggaagcatagctcttcaggtaaagaggccagtattaaaagagctaccc

SEQ ID NO: 129311 - DNA, 60 bp, Artificial
  Synthetic oligonucleotide
ggttgtgggcaactactaattgcataccagatgatcatgactatacagaagtaccactga

SEQ ID NO: 129312 - DNA, 60 bp, Artificial
  Synthetic oligonucleotide
ggaggactggatgggatttattactccgataggagaaataagatccttaatctgtatgcc

SEQ ID NO: 129313 - DNA, 60 bp, Artificial
  Synthetic oligonucleotide
cctggttggccaccaggggtaaggactccttggcttagaaagctaataaacttgcctgca

SEQ ID NO: 129314 - DNA, 60 bp, Artificial
  Synthetic oligonucleotide
aaatagtaagaatgtatagccctgttagcattttggacataaaacaagggccaaaagaac

SEQ ID NO: 129315 - DNA, 60 bp, Artificial
  Synthetic oligonucleotide
agaccctggtctgttaggaccctttctgctttgggaaaccaaggcaggaaaatccctagc

SEQ ID NO: 129316 - DNA, 57 bp, Artificial
  Synthetic oligonucleotide
cttttgtgcaaccaagaatagggatacttggggaaccatacagtgcttgccagacaa

SEQ ID NO: 129317 - DNA, 60 bp, Artificial
  Synthetic oligonucleotide
ggagtggccaaccctcagatgctgcatataagcagctgcttttcgcctgtactgggtctc

SEQ ID NO: 129318 - DNA, 60 bp, Artificial
  Synthetic oligonucleotide
ggcagttcattgcatgaattttaaaagaaggggaggaataggggatatgaccccagcaga

SEQ ID NO: 129319 - DNA, 60 bp, Artificial
  Synthetic oligonucleotide
ctcattgcatgaattttaaaagaaggggaggaataggggatatgacccctgcagagagac

SEQ ID NO: 129320 - DNA, 60 bp, Artificial
  Synthetic oligonucleotide
gcagttcattgcatgaattttaaaagaaggggaggaataggggatatgaccccatcagag

SEQ ID NO: 129321 - DNA, 60 bp, Artificial
  Synthetic oligonucleotide
ggcaactcactgcatgaattttaaaagaaggggaggaataggggatatgacccctgcaga

SEQ ID NO: 129322 - DNA, 60 bp, Artificial
  Synthetic oligonucleotide
acattgcatgaattttaaaagaaggggaggaataggggatatgactcctgcagaaagaat

SEQ ID NO: 129323 - DNA, 60 bp, Artificial
  Synthetic oligonucleotide
gcatgaattttaaaagaaggggaggaataggggatatgactccagcagaaagattagtca

SEQ ID NO: 129324 - DNA, 60 bp, Artificial
  Synthetic oligonucleotide
gcagctcactgcatgaattttaaaagaaggggaggaataggggatatgacccctgcagag

SEQ ID NO: 129325 - DNA, 60 bp, Artificial
  Synthetic oligonucleotide
gcagctcattgcatgaattttaaaagaaggggaggaataggggatatgacccctgcagaa

SEQ ID NO: 129326 - DNA, 58 bp, Artificial
  Synthetic oligonucleotide
atggcagttcattgcatgaattttaaaagaaggggaggaataggggatatgactccag

SEQ ID NO: 129327 - DNA, 60 bp, Artificial
  Synthetic oligonucleotide
ggcagttcattgcatgaattttaaaagaaggggaggaataggggatatgactccagcaga

SEQ ID NO: 129328 - DNA, 60 bp, Artificial
  Synthetic oligonucleotide
ggcagttcattgcatgaattttaaaagaaggggaggaataggggatatgaccccagtaga

SEQ ID NO: 129329 - DNA, 60 bp, Artificial
  Synthetic oligonucleotide
gaggatcaaagaattccctctggaaacccatttcgagaggctggaatgacagcggcccag

SEQ ID NO: 129330 - DNA, 60 bp, Artificial
  Synthetic oligonucleotide
ggaaggaggtgagttaaatcctttacagagaggtaagtggttacaacaaaagaaaatcga

SEQ ID NO: 129331 - DNA, 60 bp, Artificial
  Synthetic oligonucleotide
gactgggagagaaaatatgatagacatttaaaaggctgtattacatgagtcatagctagc

SEQ ID NO: 129332 - DNA, 60 bp, Artificial
  Synthetic oligonucleotide
cttccatactagagaatggcattgtgacatggtaaaagaattagtagcaggaacaggacc

SEQ ID NO: 129333 - DNA, 60 bp, Artificial
  Synthetic oligonucleotide
ggtattgtaaatctccccacaggttgtttgatggaagagcgactcccttggatcatcgga

SEQ ID NO: 129334 - DNA, 60 bp, Artificial
  Synthetic oligonucleotide
ctacagaggagagtggaacagtcagaaaggatgatcctgatgctccaccagcgagtgtct

SEQ ID NO: 129335 - DNA, 66 bp, Artificial
  Synthetic oligonucleotide
cttggaattttactaattataatgaaagtgctacaataggagaatgggcagaacaaagtgaacaag

SEQ ID NO: 129336 - DNA, 60 bp, Artificial
  Synthetic oligonucleotide
gaatctatgggtaacaagcaaatatatgtgggatatacagcaagaagaaatatggacggg

SEQ ID NO: 129337 - DNA, 60 bp, Artificial
  Synthetic oligonucleotide
attctgatatggagaaccagcaggccagttggataggaccctatgaaggagaggccctac

SEQ ID NO: 129338 - DNA, 60 bp, Artificial
  Synthetic oligonucleotide
ggattaacagtggcattaatagggacctcggtggcagggctgataggagcaaccactggc

SEQ ID NO: 129339 - DNA, 60 bp, Artificial
  Synthetic oligonucleotide
gggctgataggagcaaccactggcaccacggccttagtagtgtctcagaacctaagaggg

SEQ ID NO: 129340 - DNA, 52 bp, Artificial
  Synthetic oligonucleotide
gcagaggtgcaacttgggttacctcacccagcaggattacagagaaggaaaa

SEQ ID NO: 129341 - DNA, 58 bp, Artificial
  Synthetic oligonucleotide
aaggtatgtgtggaagagtctccctcaaggatgggtattaagtcctttgatatatcaa

SEQ ID NO: 129342 - DNA, 58 bp, Artificial
  Synthetic oligonucleotide
gattgggcatattagcacagattgttatcaaatgacttcgggaaacggaaagcagggg

SEQ ID NO: 129343 - DNA, 60 bp, Artificial
  Synthetic oligonucleotide
gccactcctccaactataaaagcaatatggaggatggactcccgaccccgagttgaggcc

SEQ ID NO: 129344 - DNA, 60 bp, Artificial
  Synthetic oligonucleotide
acagcaagttagagtgcaacaggtccaaacaagacaaaaaccccaaagacaacaaaataa

SEQ ID NO: 129345 - DNA, 61 bp, Artificial
  Synthetic oligonucleotide
gagataatctacaaaagttaggggtaacaatggtaatggctatgatatcagatagaatacc

SEQ ID NO: 129346 - DNA, 60 bp, Artificial
  Synthetic oligonucleotide
ggatatatcagttatcaatgaaagagattgggaaccaggaaattcaattagagagggacc

SEQ ID NO: 129347 - DNA, 60 bp, Artificial
  Synthetic oligonucleotide
cctcaagaacaacaagcactggctcattttgaaccagctagaagacaatgtagagaatgg

SEQ ID NO: 129348 - DNA, 60 bp, Artificial
  Synthetic oligonucleotide
tgaaagagctgactagggaatatgagagaacacatccttcggatgggccaagaccattgc

SEQ ID NO: 129349 - DNA, 60 bp, Artificial
  Synthetic oligonucleotide
cagatctaactcccactgatatggctcaattattaatgtcagctccaggatgtgctgcag

SEQ ID NO: 129350 - DNA, 60 bp, Artificial
  Synthetic oligonucleotide
caaccctagaacagtagcaatttggatggaaaaggctagagagggaatacatagtgaaga

SEQ ID NO: 129351 - DNA, 60 bp, Artificial
  Synthetic oligonucleotide
tggtagctacaggacgagaccctcaggcacctcctacgtcagtagaagacctgagagacc

SEQ ID NO: 129352 - DNA, 60 bp, Artificial
  Synthetic oligonucleotide
ttaaaaaccctgcagtagtctgtaagagtggctagtctgagaagcttcggcggacagact

SEQ ID NO: 129353 - DNA, 60 bp, Artificial
  Synthetic oligonucleotide
ggacagactgcccctcaggtagaataaagcccataagtattgaaccctgacatctgcctg

SEQ ID NO: 129354 - DNA, 60 bp, Artificial
  Synthetic oligonucleotide
gctagcttaaccgtaaaccgcaagtgcgaacggctgaataaccacaagatgcttgcttgc

SEQ ID NO: 129355 - DNA, 60 bp, Artificial
  Synthetic oligonucleotide
catagtgagtgtttattatcagaagaatggggaagatgggacactccctttaattggaca

SEQ ID NO: 129356 - DNA, 60 bp, Artificial
  Synthetic oligonucleotide
ttatagtaggcgtattagtatacataggacttattatggcaattgcaacagggatatcgc

SEQ ID NO: 129357 - DNA, 60 bp, Artificial
  Synthetic oligonucleotide
ccaggaacaccttttaatggaacagaagctaattattcatgtgcaaatggtacacaacca

SEQ ID NO: 129358 - DNA, 57 bp, Artificial
  Synthetic oligonucleotide
atattggaataggcaaaatgagacagacccggactcaccattgggaggatatctttt

SEQ ID NO: 129359 - DNA, 60 bp, Artificial
  Synthetic oligonucleotide
atgggacccggaacgtggcaaatagattgtacacatctagaaggacaaatattgttagtg

SEQ ID NO: 129360 - DNA, 60 bp, Artificial
  Synthetic oligonucleotide
ccatgttacaatcctaactatacaattcctattttggtgcaatgcgctctacatcaagaa

SEQ ID NO: 129361 - DNA, 60 bp, Artificial
  Synthetic oligonucleotide
gcaatattagagcttatacaaacacataatgtcctagaggttcaaactgataatgggcca

SEQ ID NO: 129362 - DNA, 60 bp, Artificial
  Synthetic oligonucleotide
ggaaaggttcggtacctgtgatatattggggagaaggatcagtgttaattaaagagcctg

SEQ ID NO: 129363 - DNA, 60 bp, Artificial
  Synthetic oligonucleotide
ggcaagaagtagaaacattgcacgcagctgttgcattggctacctttgctctcaataaaa

SEQ ID NO: 129364 - DNA, 60 bp, Artificial
  Synthetic oligonucleotide
aaggacaatggatcgaacaaggacagaaagtagcccaattattaatcatgccagtacaac

SEQ ID NO: 129365 - DNA, 51 bp, Artificial
  Synthetic oligonucleotide
acagcatagaaaggtggtattagagcttagacaaatgctgttgtggtgggg

SEQ ID NO: 129366 - DNA, 59 bp, Artificial
  Synthetic oligonucleotide
gaagggagatacagagttaaattcaagaagagaatggacccctgaagcgaggcaagaag

SEQ ID NO: 129367 - DNA, 60 bp, Artificial
  Synthetic oligonucleotide
ctacaaaagaaagaagcaatctttttagattgggttccaggacataaaggaattcctgga

SEQ ID NO: 129368 - DNA, 60 bp, Artificial
  Synthetic oligonucleotide
gaaacctggtatattgatggaggaagaaagaaaggacaaaaggcaagagcaggatggtgg

SEQ ID NO: 129369 - DNA, 60 bp, Artificial
  Synthetic oligonucleotide
ggaaagtcctctataggaagtaagggattagacgttttaggaggagtgatagattcaggg

SEQ ID NO: 129370 - DNA, 60 bp, Artificial
  Synthetic oligonucleotide
tgggcattcaaaatgaagaatgcttcatggaattggaatactacaaatgcaacttggtta

SEQ ID NO: 129371 - DNA, 60 bp, Artificial
  Synthetic oligonucleotide
tctcttatgtgggtctaagggatccgggacttaggctcgcagttggcgcccgaacaggga

SEQ ID NO: 129372 - DNA, 60 bp, Artificial
  Synthetic oligonucleotide
ggcgcccgaacagggacttgaatgagggttacttcttcaatctgaaggatcaggactccc

SEQ ID NO: 129373 - DNA, 60 bp, Artificial
  Synthetic oligonucleotide
ctgaaggatcaggactcccagtcaagagtaaggcttggtagggcttctttggtagggctc

SEQ ID NO: 129374 - DNA, 60 bp, Artificial
  Synthetic oligonucleotide
ggctccgagaggagaccccattgaagaccccaggactctctggcttggttgaagagacac

SEQ ID NO: 129375 - DNA, 60 bp, Artificial
  Synthetic oligonucleotide
aggaaactgggaaggccttttttccttttcagcggcgttcgtgcctgatcaggtgaagag

SEQ ID NO: 129376 - DNA, 60 bp, Artificial
  Synthetic oligonucleotide
gactccttcacggatcatcaagccaggtgactcgacgagggacgtgcgaacaggtaagag

SEQ ID NO: 129377 - DNA, 60 bp, Artificial
  Synthetic oligonucleotide
cgtgcgaacaggtaagagaaatacattgctgtctgtcatggggaatgagtcagggaagga

SEQ ID NO: 129378 - DNA, 60 bp, Artificial
  Synthetic oligonucleotide
cctagggcagttacagttaagcaaggccctaaggagccatattcagaatttgtagatagg

SEQ ID NO: 129379 - DNA, 50 bp, Artificial
  Synthetic oligonucleotide
accagcaaaactactctggaaaggtgaaggggcagtagtaatacaagaca

SEQ ID NO: 129380 - DNA, 60 bp, Artificial
  Synthetic oligonucleotide
ccagagcaccagctcacctgggaccccatcgatggacgggttgtcggctctcgtctccaa

SEQ ID NO: 129381 - DNA, 57 bp, Artificial
  Synthetic oligonucleotide
gaagcaagttaagtgtgtgttcccatctctcctagtcgccgcctggtcattcggtgt

SEQ ID NO: 129382 - DNA, 60 bp, Artificial
  Synthetic oligonucleotide
attagaagcaagttgagtgtgtgttcccatctctcctagtcgccgcctggtcactcggtg

SEQ ID NO: 129383 - DNA, 60 bp, Artificial
  Synthetic oligonucleotide
ctgtcagccacccaccaggccctcaatatctccaaccccagcctagcccaaaattgctgg

SEQ ID NO: 129384 - DNA, 60 bp, Artificial
  Synthetic oligonucleotide
tcagacagcccccttgtgtgacaggccaagtaacccaaatacagccccagggccaaaagg

SEQ ID NO: 129385 - DNA, 60 bp, Artificial
  Synthetic oligonucleotide
cgtctcccagcctatcagaactacttcccctttcccctctctacccgctcccctccctat

SEQ ID NO: 129386 - DNA, 60 bp, Artificial
  Synthetic oligonucleotide
tccactgtcttgctaccataggaaaaccacacaccattaaaacagacaatggcccgggat

SEQ ID NO: 129387 - DNA, 60 bp, Artificial
  Synthetic oligonucleotide
gtaaaagcttgcaaacagtgtgtcgtagccacccctgtaccccatcttggcgtgaacccc

SEQ ID NO: 129388 - DNA, 60 bp, Artificial
  Synthetic oligonucleotide
ttggaatcagcaagcccctattcacgtctccgacggtggcggaccccaagatgctgtgag

SEQ ID NO: 129389 - DNA, 60 bp, Artificial
  Synthetic oligonucleotide
ggcatccccaaacttctcagcagcatgctacggttatgtggcgtgaccctctcaccagtg

SEQ ID NO: 129390 - DNA, 60 bp, Artificial
  Synthetic oligonucleotide
caaagtcctatgcctcgttatcagtggaaggttctgccacagggcatggccaacagtccc

SEQ ID NO: 129391 - DNA, 60 bp, Artificial
  Synthetic oligonucleotide
cctaggattccaccaaaatttaccgtagtcgtgccattgacattcctgtaccccacgctg

SEQ ID NO: 129392 - DNA, 60 bp, Artificial
  Synthetic oligonucleotide
taaaaggcgatccaaatcctttatcggttcgagcactgaccccagaggcaaagcaatctc

SEQ ID NO: 129393 - DNA, 60 bp, Artificial
  Synthetic oligonucleotide
gcgccgaggcagccaaggcctgctatgctcacattatatcctgtcttacctcatatggac

SEQ ID NO: 129394 - DNA, 60 bp, Artificial
  Synthetic oligonucleotide
aaccttcccctagtactcctcttgctcccaactccccatacacccaccgcggtgttttgg

SEQ ID NO: 129395 - DNA, 60 bp, Artificial
  Synthetic oligonucleotide
tgctgccattcttcgcgcctcttgtcccatccctttctcatccacgacaggcttgctcgg

SEQ ID NO: 129396 - DNA, 60 bp, Artificial
  Synthetic oligonucleotide
aaactgcaacagctaattttaaacagacaacaccctttctttatcggacatcttcgggcc

SEQ ID NO: 129397 - DNA, 60 bp, Artificial
  Synthetic oligonucleotide
agctcagagcccaccgagcctacctacacccattcctataagcggctaaatctaaagacc

SEQ ID NO: 129398 - DNA, 60 bp, Artificial
  Synthetic oligonucleotide
caggttagctccaataccacgggccgagcgtctcctcaccctgacacacacaccatccct

SEQ ID NO: 129399 - DNA, 60 bp, Artificial
  Synthetic oligonucleotide
ccttggacccttattcgctatcatcctgttcttctcttttgccccttggatcctaagacg

SEQ ID NO: 129400 - DNA, 60 bp, Artificial
  Synthetic oligonucleotide
tccctagccgaagtagtcctccaaaacagaagaggcttagacctactcactgcagaacag

SEQ ID NO: 129401 - DNA, 59 bp, Artificial
  Synthetic oligonucleotide
ttttggctccggggaaagtgagagctcctttgtaaaacacctagcctatgaaaacgcta

SEQ ID NO: 129402 - DNA, 60 bp, Artificial
  Synthetic oligonucleotide
catgtgcagtcccaacgatactgtcatgacccaaatgctaagccaggggtatctccccgg

SEQ ID NO: 129403 - DNA, 60 bp, Artificial
  Synthetic oligonucleotide
gctctgcccatgctgttggcctagccataggagctgccctccaaaatcttgcccccgcgc

SEQ ID NO: 129404 - DNA, 60 bp, Artificial
  Synthetic oligonucleotide
agtaggattgggtgtctctacagcagtcgctaccggtacagcaggactcggggtggctgt

SEQ ID NO: 129405 - DNA, 60 bp, Artificial
  Synthetic oligonucleotide
caacctcgcctttactgctctgcctgcaaactggacagggtcatgtgtgttagccgccct

SEQ ID NO: 129406 - DNA, 60 bp, Artificial
  Synthetic oligonucleotide
ccataagccctaccgcggggctagtgcccctgggtcttctgatgtctactgggttcaaca

SEQ ID NO: 129407 - DNA, 60 bp, Artificial
  Synthetic oligonucleotide
ggacctctgtaccaccaccgacacaatactaaccacccaaaatagccctctgacacttcc

SEQ ID NO: 129408 - DNA, 60 bp, Artificial
  Synthetic oligonucleotide
aagcatgccccgggcgtggtggcgggccaccaatggaggacctgatcacgggcaagacat

SEQ ID NO: 129409 - DNA, 60 bp, Artificial
  Synthetic oligonucleotide
gggcgaggctcagcctgcatatacgatcaaaaggaggatggcccccgctggctccctgag

SEQ ID NO: 129410 - DNA, 60 bp, Artificial
  Synthetic oligonucleotide
tcccctgtaaccggttccctgcacggccgtcccgattaaccgattccccgcacggagcac

SEQ ID NO: 129411 - DNA, 60 bp, Artificial
  Synthetic oligonucleotide
accgattccccgcacggagcaccgcggaccacccgaccgcgagccgactcctggagttcg

SEQ ID NO: 129412 - DNA, 60 bp, Artificial
  Synthetic oligonucleotide
aagggtctattgactcccgtgtttggggacgtgttggtgattgtctgaacgactattacc

SEQ ID NO: 129413 - DNA, 60 bp, Artificial
  Synthetic oligonucleotide
atcctcctactgcacccacgcctctgcccagtcacaaagggaggacttggaaagccatcc

SEQ ID NO: 129414 - DNA, 60 bp, Artificial
  Synthetic oligonucleotide
gggactcagaccaataattacgccaccccaacttacactcaggtaacagattgtggggac

SEQ ID NO: 129415 - DNA, 60 bp, Artificial
  Synthetic oligonucleotide
gtgcccaagcgagtgcacaaacaacattaaatcccagatgcactcctcctgctattctag

SEQ ID NO: 129416 - DNA, 60 bp, Artificial
  Synthetic oligonucleotide
gcaaggagggtcacaaaattcttattagccactcccgacctccatctagacaagcccctg

SEQ ID NO: 129417 - DNA, 60 bp, Artificial
  Synthetic oligonucleotide
aaatacaaccacctactcaactcccaactcaacctaatgccccacaggctagccttataa

SEQ ID NO: 129418 - DNA, 60 bp, Artificial
  Synthetic oligonucleotide
ccccagcttaccctttagagtccagcccatgccttcccaagtatacccttgcttctttaa

SEQ ID NO: 129419 - DNA, 60 bp, Artificial
  Synthetic oligonucleotide
gccttagctgatgctgccacacagattttccccattataagtgacccaatacatgaggct

SEQ ID NO: 129420 - DNA, 60 bp, Artificial
  Synthetic oligonucleotide
ccaatttgccaagcttcaccagttcatattccccaagatcacaaaatgtgccccaattcc

SEQ ID NO: 129421 - DNA, 60 bp, Artificial
  Synthetic oligonucleotide
ccctcctttggctccatctacctgcctccccatcaaaagtcttactcacctacccctcgc

SEQ ID NO: 129422 - DNA, 60 bp, Artificial
  Synthetic oligonucleotide
caggaccaattaacctggctcctgcaaacctctgacgaatgggccattgcattatcctcc

SEQ ID NO: 129423 - DNA, 60 bp, Artificial
  Synthetic oligonucleotide
gttaacaaccgttgctactcacctgcgcggtattggccaggccaccaacccccaacaaag

SEQ ID NO: 129424 - DNA, 60 bp, Artificial
  Synthetic oligonucleotide
cgttcctggttcccccacggccccaaacttgcccggtgtagccctagccaaaccctccgg

SEQ ID NO: 129425 - DNA, 60 bp, Artificial
  Synthetic oligonucleotide
cccagtggcagttgcggctcctgttttgcatgcccctacttcaggcgttcctggttcccc

SEQ ID NO: 129426 - DNA, 57 bp, Artificial
  Synthetic oligonucleotide
acaccccggcattgccacctttccggccaccgtcctatgtttctacagcagtgcccc

SEQ ID NO: 129427 - DNA, 60 bp, Artificial
  Synthetic oligonucleotide
gatatttccaaacagtttgcagagcgaacgcgcgtaaggcctcctccaaaggatggaccc

SEQ ID NO: 129428 - DNA, 60 bp, Artificial
  Synthetic oligonucleotide
cctcattctcgggcgcatactccgccccaacatttgcccttgcttgctaattctaaaacc

SEQ ID NO: 129429 - DNA, 60 bp, Artificial
  Synthetic oligonucleotide
actgtcgagtctcctgagaggtaagctggcttgcatagaggttggtactcgaaaaatcct

SEQ ID NO: 129430 - DNA, 60 bp, Artificial
  Synthetic oligonucleotide
ccaacccctgccctcccagtaatcaaccacgccgctacgtcacagacctctggcgagcaa

SEQ ID NO: 129431 - DNA, 60 bp, Artificial
  Synthetic oligonucleotide
cgcaactcctggagcccaggcccgcctttgctataattgtcaccaacccggccatctttc

SEQ ID NO: 129432 - DNA, 60 bp, Artificial
  Synthetic oligonucleotide
gcgtgatctagaatatggcagactgtagccggttcccctcctacgggagcagcataccgc

SEQ ID NO: 129433 - DNA, 55 bp, Artificial
  Synthetic oligonucleotide
acgcgggctaccagatatggcttgcttgcagatccgcttatagggcaatcatcaa

SEQ ID NO: 129434 - DNA, 52 bp, Artificial
  Synthetic oligonucleotide
gacgcgaccaagaaggagacttggtgagtaggcttctcgagtgccgggaaaa

SEQ ID NO: 129435 - DNA, 60 bp, Artificial
  Synthetic oligonucleotide
cgcggggtgcgacgtgaccgagaagggctcggtgagtaggcttctcgagtgccgggaaaa

SEQ ID NO: 129436 - DNA, 60 bp, Artificial
  Synthetic oligonucleotide
ttgctgggatactgcagcagcagaagaatctgctggcggctgtggaggctcaacagcaga

SEQ ID NO: 129437 - DNA, 60 bp, Artificial
  Synthetic oligonucleotide
tactaggagaccagcttgagcctgggtgttcgctggttagcctaacctggttggccacca

SEQ ID NO: 129438 - DNA, 60 bp, Artificial
  Synthetic oligonucleotide
tgccgggaaaaagctcgagcctagttagaggactaggaagggccgtagccgtaactactc

SEQ ID NO: 129439 - DNA, 60 bp, Artificial
  Synthetic oligonucleotide
cgagcctagttagaggactaggaagggccgtagccgtaactactctgggcaagtagggca

SEQ ID NO: 129440 - DNA, 60 bp, Artificial
  Synthetic oligonucleotide
agttagaggactaggagaggccgtagccgtaactactctgggcaagtagggcaggcggtg

SEQ ID NO: 129441 - DNA, 60 bp, Artificial
  Synthetic oligonucleotide
ccaggggtaaggactccttggcttagaaagctaataaacttgcctgcattagagcttatc

SEQ ID NO: 129442 - DNA, 60 bp, Artificial
  Synthetic oligonucleotide
ggcgacagccctgacggtccagtctcagcatttgcttgctgggatactgcagcagcagaa

SEQ ID NO: 129443 - DNA, 55 bp, Artificial
  Synthetic oligonucleotide
ggagaccagcttgagcctgggtgttcgctggttagcctaacctggttggccacca

SEQ ID NO: 129444 - DNA, 54 bp, Artificial
  Synthetic oligonucleotide
caccaggggtaaggactccttggcttagaaagctaataaacttgcctgcattag

SEQ ID NO: 129445 - DNA, 60 bp, Artificial
  Synthetic oligonucleotide
gacgcgaccaagaaggagacttggtgagtaggcttctcgagtgccgggaaaaagctcgag

SEQ ID NO: 129446 - DNA, 60 bp, Artificial
  Synthetic oligonucleotide
gcgacagccctgacggtccagtctcagcatttacttgctgggatattgcagcagcagaag

SEQ ID NO: 129447 - DNA, 60 bp, Artificial
  Synthetic oligonucleotide
ttagaggactaggaagggccgtagccataactactctgggcaagtagggcaggcggacgg

SEQ ID NO: 129448 - DNA, 60 bp, Artificial
  Synthetic oligonucleotide
ggagaccagcttgagcctgggtgttcgctggttagcctaacctggttggccaccaggggt

SEQ ID NO: 129449 - DNA, 60 bp, Artificial
  Synthetic oligonucleotide
gttaaagcgctagcagctgcttaaccgcaaaaccacatcctatgtaaagcttgccaatga

SEQ ID NO: 129450 - DNA, 60 bp, Artificial
  Synthetic oligonucleotide
aagcgctagcagctgcttaaccgcaaaaccacatcctatgtaaagcttgccaatgacgta

SEQ ID NO: 129451 - DNA, 60 bp, Artificial
  Synthetic oligonucleotide
ctcagcgctagcagctgcttaaccgcaaaaccacatcctatgtaaagcttgccgatgacg

SEQ ID NO: 129452 - DNA, 60 bp, Artificial
  Synthetic oligonucleotide
gcgctagcagctgcttaaccgcaaaaccacatcctatgtaaagcttgccaatgacgtata

SEQ ID NO: 129453 - DNA, 60 bp, Artificial
  Synthetic oligonucleotide
gctagcagctgcttaaccgcaaaaccacatcctatgtaaagcttgccgatgacgtagatt

SEQ ID NO: 129454 - DNA, 60 bp, Artificial
  Synthetic oligonucleotide
gcagcagtccatgtagcaagtaggtatctagaagcagaagtaatacccacagaaacagga

SEQ ID NO: 129455 - DNA, 60 bp, Artificial
  Synthetic oligonucleotide
gactatccatgtggggctgctcattcgcccaggtatgccacacacatgtaccatggccaa

SEQ ID NO: 129456 - DNA, 60 bp, Artificial
  Synthetic oligonucleotide
gggagtgatagagttgccccagaacacagcagaatgattcaagagttaagagaccacctc

SEQ ID NO: 129457 - DNA, 60 bp, Artificial
  Synthetic oligonucleotide
gcaggcaaaactacacacgcttcagtcctagtgggccccacacctgtaaatattgtaggt

SEQ ID NO: 129458 - DNA, 60 bp, Artificial
  Synthetic oligonucleotide
ccagtatatccacagtgcccagtaagagaacccacctacaaggacttggttgatatgccc

SEQ ID NO: 129459 - DNA, 60 bp, Artificial
  Synthetic oligonucleotide
ccgaacataacatggaatttcacaggtcccatggaagaaaatgaggtagtaatgcaagca

SEQ ID NO: 129460 - DNA, 60 bp, Artificial
  Synthetic oligonucleotide
cagattcacagtatgctatgggtatcctatcggcagcacccgaccaatcagacaacccca

SEQ ID NO: 129461 - DNA, 60 bp, Artificial
  Synthetic oligonucleotide
gccgaccacagaaggttgccatggagatgacctgcagaaatgctgactctggagggactt

SEQ ID NO: 129462 - DNA, 60 bp, Artificial
  Synthetic oligonucleotide
gaacaagcaataagacaagccctgctaggaaagagactaacagtgtgctacttccactgg

SEQ ID NO: 129463 - DNA, 60 bp, Artificial
  Synthetic oligonucleotide
gggttgtgcccttaaaacaataaaggtctctgactacaccacgaaaggcgaaccaggagc

SEQ ID NO: 129464 - DNA, 60 bp, Artificial
  Synthetic oligonucleotide
cgctagagcaagcgagaccgccgaggcaaccccagtaggcaaaaggaaaagaggggaagt

SEQ ID NO: 129465 - DNA, 60 bp, Artificial
  Synthetic oligonucleotide
caaggaccaaaggagccgttcaaggactatgtggacaggttttacaaagctctgcgggcg

SEQ ID NO: 129466 - DNA, 60 bp, Artificial
  Synthetic oligonucleotide
agctccatctagtggccgaaaaggaaaatgcagcatcagaaaaagaacaaagagcaatag

SEQ ID NO: 129467 - DNA, 60 bp, Artificial
  Synthetic oligonucleotide
aaccacccgaggacgaggcccctcaaagagaaccatacaatgaatggctaattgacacct

SEQ ID NO: 129468 - DNA, 60 bp, Artificial
  Synthetic oligonucleotide
aacttcccggcgatgccattgaccccaacggcccctccaatgccagggatggaagaccca

SEQ ID NO: 129469 - DNA, 59 bp, Artificial
  Synthetic oligonucleotide
gctcatcgggggctcccttgcttggtcttggtagacctctagcagtctcggtggccaag

SEQ ID NO: 129470 - DNA, 60 bp, Artificial
  Synthetic oligonucleotide
catagggcaagttagagaccaagcagagaaactagaaacagcagttcaaatggcagtatt

SEQ ID NO: 129471 - DNA, 60 bp, Artificial
  Synthetic oligonucleotide
ggggaaagaaacaatataggctaaaacacttagtatgggcaagcagggagctggaaagat

SEQ ID NO: 129472 - DNA, 59 bp, Artificial
  Synthetic oligonucleotide
aaaatgtcagcacagtacaatgtacacatggaattaggccagtagtatcaactcaacta

SEQ ID NO: 129473 - DNA, 60 bp, Artificial
  Synthetic oligonucleotide
gcctgttgcaccaggccaaatgagagaaccaaggggaagtgacatagcaggaactactag

SEQ ID NO: 129474 - DNA, 60 bp, Artificial
  Synthetic oligonucleotide
cagtcatgtctcatgtattagtcaatgcctcaaaagagttgtctgattgggcgaaagata

SEQ ID NO: 129475 - DNA, 60 bp, Artificial
  Synthetic oligonucleotide
tagtgttaagtaataaatgggtaacagtatatcaaggagtacctgcatgggaagaagcag

SEQ ID NO: 129476 - DNA, 60 bp, Artificial
  Synthetic oligonucleotide
tgggctcagcgtctgtggcgctgacgatccaggctcaatcccttaatggaagggctagtg

SEQ ID NO: 129477 - DNA, 60 bp, Artificial
  Synthetic oligonucleotide
cctgagtctgagtagcttgcttggttgaagggcttgagggactccagtcccctcgcgcta

SEQ ID NO: 129478 - DNA, 60 bp, Artificial
  Synthetic oligonucleotide
aggggagattattcaggcaggtatggctaaagaagccattcatgtagcctggtgtccagc

SEQ ID NO: 129479 - DNA, 60 bp, Artificial
  Synthetic oligonucleotide
agggtggactggaggggattattagaacccctgagagagatgacctgatagagcagtatg

SEQ ID NO: 129480 - DNA, 60 bp, Artificial
  Synthetic oligonucleotide
cccatcagtgaacaatttggcaccagggactagatatgtgtacaaagtgctaccgcaggg

SEQ ID NO: 129481 - DNA, 60 bp, Artificial
  Synthetic oligonucleotide
gtgtgccctctacttgcacgttcatgcggggcaatgtcgctttccctctacgcaaaaccc

SEQ ID NO: 129482 - DNA, 60 bp, Artificial
  Synthetic oligonucleotide
tgttcagagtgtcagaacaaaggacaagctgttcatggccagctagattatagctatggc

SEQ ID NO: 129483 - DNA, 60 bp, Artificial
  Synthetic oligonucleotide
tctcttcggagacgaccaatagttatagtagaagtagaaggacaaaagtgccaagcgctg

SEQ ID NO: 129484 - DNA, 60 bp, Artificial
  Synthetic oligonucleotide
ggttgcaggaccaggtagagaacataacccgggaggccagaaggcacttccctttgactc

SEQ ID NO: 129485 - DNA, 60 bp, Artificial
  Synthetic oligonucleotide
ggccctcataaaattggctagtcagtgggaggttagacaagttcacacagataatgggcc

SEQ ID NO: 129486 - DNA, 60 bp, Artificial
  Synthetic oligonucleotide
tggaacttggttttagagcctctgaaggaggcaccaacttattggacagatggaggatgc

SEQ ID NO: 129487 - DNA, 60 bp, Artificial
  Synthetic oligonucleotide
taagtgggaaacagatttaagctggcaacaagcagtagggtacatgcacatcataagggg

SEQ ID NO: 129488 - DNA, 60 bp, Artificial
  Synthetic oligonucleotide
cacaggatcagaagtgttgaggtccctatatggatgttctgtgtgttactgcctgcacag

SEQ ID NO: 129489 - DNA, 60 bp, Artificial
  Synthetic oligonucleotide
gaggaaatagttctcacagaaatctaaacactgccaatggagcaaaattctactatgagc

SEQ ID NO: 129490 - DNA, 60 bp, Artificial
  Synthetic oligonucleotide
agataggcaggactaatgtgtcttcacagatccgtggccaagaccgggagtgggaacagc

SEQ ID NO: 129491 - DNA, 60 bp, Artificial
  Synthetic oligonucleotide
gtccagcagccacaacagcaaggagcattaaggcagcctacagcatcagatatcacaggc

SEQ ID NO: 129492 - DNA, 60 bp, Artificial
  Synthetic oligonucleotide
ctgtcctgcctcaacatccgccaacaacctcagacaagaggaggagtgcttggcagactc

SEQ ID NO: 129493 - DNA, 60 bp, Artificial
  Synthetic oligonucleotide
ggaagagtggtggagcagcttgttgcgtcattgcagcaatgggatccttactgtcctgcc

SEQ ID NO: 129494 - DNA, 60 bp, Artificial
  Synthetic oligonucleotide
attcttgagacacttcagaggtggctacgatctgcggcgcgtggctggcgtcgagcgcct

SEQ ID NO: 129495 - DNA, 60 bp, Artificial
  Synthetic oligonucleotide
gtagaagatgtagaagcaggatgttatgtgatgtctcgactgccagtacgacaggcgacc

SEQ ID NO: 129496 - DNA, 56 bp, Artificial
  Synthetic oligonucleotide
tgaccgtccccaaggtcctgcctaattgcccttgcccgctttgctatagacatcca

SEQ ID NO: 129497 - DNA, 60 bp, Artificial
  Synthetic oligonucleotide
gtgatatgactatagtggatccagttaggacagggttctgtgcagctccaggatacatgc

SEQ ID NO: 129498 - DNA, 60 bp, Artificial
  Synthetic oligonucleotide
caagaatcctagaaccgttcaggaagagaggacaattgcaaatagctcagtacatggatg

SEQ ID NO: 129499 - DNA, 60 bp, Artificial
  Synthetic oligonucleotide
ctacatagagcaacttggagagtatgcatacagctatgacttgagtctgttgagcgttac

SEQ ID NO: 129500 - DNA, 60 bp, Artificial
  Synthetic oligonucleotide
agggaagaaaacattagaagacctacagaaagtccggctgaagaaagggaagaaaggatg

SEQ ID NO: 129501 - DNA, 60 bp, Artificial
  Synthetic oligonucleotide
aataccaggcagatcctccatacaagtggatgggctatgaattacatcctaagcaatgga

SEQ ID NO: 129502 - DNA, 60 bp, Artificial
  Synthetic oligonucleotide
aggtaagaagcatttgttggaggaagtgcagcttagtgcagaagcagaagaggagctaca

SEQ ID NO: 129503 - DNA, 60 bp, Artificial
  Synthetic oligonucleotide
acatgaggacatttgggtagacattttcaggttagggaaaggacaatggggctatgcagt

SEQ ID NO: 129504 - DNA, 60 bp, Artificial
  Synthetic oligonucleotide
gggaagccatagtcacctggggaaaggtgcccaaaatgaaagtcccagcaaagagagagg

SEQ ID NO: 129505 - DNA, 60 bp, Artificial
  Synthetic oligonucleotide
gacctggggagaggaggatccatggcagaacatgacctggaaacagtggcatgagcgagt

SEQ ID NO: 129506 - DNA, 60 bp, Artificial
  Synthetic oligonucleotide
gggcagtgagaatttgttatccaatgggcaaaaggaagccgaaaccgttaagggaatgga

SEQ ID NO: 129507 - DNA, 60 bp, Artificial
  Synthetic oligonucleotide
cgctccaggaccggtagagggaggtcattaatgggcaacgagcagggactgttagggaag

SEQ ID NO: 129508 - DNA, 60 bp, Artificial
  Synthetic oligonucleotide
gcacacaccacaggacacccctataatcctcaatcacaaggagttgtagagcagagaaac

SEQ ID NO: 129509 - DNA, 60 bp, Artificial
  Synthetic oligonucleotide
cattagaaagcaaagtagcaatggcagtctatgcgctcaattttaaaagaaagggaggat

SEQ ID NO: 129510 - DNA, 60 bp, Artificial
  Synthetic oligonucleotide
gcacacaggagagtggcaaggaccaggagaactggtgtggaaaggtgaaggagcggtagt

SEQ ID NO: 129511 - DNA, 60 bp, Artificial
  Synthetic oligonucleotide
actgatcgcctcctcagaagagaggtaagtcgaaaaaggggacttacgggtggagtcaag

SEQ ID NO: 129512 - DNA, 60 bp, Artificial
  Synthetic oligonucleotide
gctggtgaatagttgggtcactcatgccaggatcctgtatgggccgcctccaggaggtca

SEQ ID NO: 129513 - DNA, 60 bp, Artificial
  Synthetic oligonucleotide
gctccaatgatttgcaccaaagtaaataggactgaaaatggcactagtacagtagcccca

SEQ ID NO: 129514 - DNA, 60 bp, Artificial
  Synthetic oligonucleotide
ttggaattgggaagatacaaattggtaaaaatgaggacaactacttatgtcccaacagat

SEQ ID NO: 129515 - DNA, 60 bp, Artificial
  Synthetic oligonucleotide
agttctgactcttgcctggctgcgcctgagccctgagtggcttgccagctatcagccttg

SEQ ID NO: 129516 - DNA, 60 bp, Artificial
  Synthetic oligonucleotide
gctatgctttctttcaaaagggctgggaatccgctataagaagaataagagtgctacaca

SEQ ID NO: 129517 - DNA, 60 bp, Artificial
  Synthetic oligonucleotide
gtcagggaatagggcacttagccagaatgtgtcccaaaagaccaataggaggagccggtc

SEQ ID NO: 129518 - DNA, 60 bp, Artificial
  Synthetic oligonucleotide
tagcagcatgccagggagtgggaggaccagaccacaaggcaaaggtgctagcagaggcta

SEQ ID NO: 129519 - DNA, 60 bp, Artificial
  Synthetic oligonucleotide
ttcgggactttccaagttgggagggacctgggcggagggaagggcgtgccctgctaaact

SEQ ID NO: 129520 - DNA, 60 bp, Artificial
  Synthetic oligonucleotide
tttgaagcttcaagcagcgtttgagtactagtttcacgtccgccttctctgccctcagag

SEQ ID NO: 129521 - DNA, 60 bp, Artificial
  Synthetic oligonucleotide
aattggacatgccaatagtaacagggcctcaagggccagtgcatcaacccctgagcccca

SEQ ID NO: 129522 - DNA, 60 bp, Artificial
  Synthetic oligonucleotide
ctatcactccaaggaatggaaatagaacaagtgatccagaggctactttcacctttgtga

SEQ ID NO: 129523 - DNA, 60 bp, Artificial
  Synthetic oligonucleotide
gaccgtggacggctggtctggcttatgtgagaatcatggagtgtgccctctacttgcacg

SEQ ID NO: 129524 - DNA, 60 bp, Artificial
  Synthetic oligonucleotide
tagctggtacacggatggcagcagttttctgattgagggaaagcgaagggctggagctgc

SEQ ID NO: 129525 - DNA, 60 bp, Artificial
  Synthetic oligonucleotide
gcggcagccacctgatagatggatgactaatgcccggatgacacactatcagagtctgct

SEQ ID NO: 129526 - DNA, 60 bp, Artificial
  Synthetic oligonucleotide
actgacaatgggacagcaggtgactgtcgtggcccctcatgccctggagagtattgtgcg

SEQ ID NO: 129527 - DNA, 60 bp, Artificial
  Synthetic oligonucleotide
gctactgcacatatccatggggccatctacaggcagcgagggttattgacttcagccggt

SEQ ID NO: 129528 - DNA, 60 bp, Artificial
  Synthetic oligonucleotide
accaaaagagccttacagatagataaaaacatggtgacccactctttcctggtgatacct

SEQ ID NO: 129529 - DNA, 60 bp, Artificial
  Synthetic oligonucleotide
ggttcccgattcaggctctgtcttaccctcctctttgcttattcatttaaaggccctgaa

SEQ ID NO: 129530 - DNA, 60 bp, Artificial
  Synthetic oligonucleotide
cccattactttaacgttagcagtgcttttaggattgggagtggccgcagctggggtaggt

SEQ ID NO: 129531 - DNA, 60 bp, Artificial
  Synthetic oligonucleotide
gggcttgcaatacaggtctcactccttgtatatctatgtctgttttcaatagctccaaag

SEQ ID NO: 129532 - DNA, 60 bp, Artificial
  Synthetic oligonucleotide
aggggactgagagactcctcacagaactggggaatttggggtatcgagtttcggctaaaa

SEQ ID NO: 129533 - DNA, 60 bp, Artificial
  Synthetic oligonucleotide
ccccagtcaagatgaagaaacccacgaagacaactgggctgtggaagccactgataaccc

SEQ ID NO: 129534 - DNA, 60 bp, Artificial
  Synthetic oligonucleotide
ccctcattagagacaaccttagcctccccaccactcctagatacagaaaaccgtctggtc

SEQ ID NO: 129535 - DNA, 60 bp, Artificial
  Synthetic oligonucleotide
ggaagttgactctgacagcagtttcaggaaatgggctttgtttaggtcaggtgccccagg

SEQ ID NO: 129536 - DNA, 60 bp, Artificial
  Synthetic oligonucleotide
gtgtcccaaacggggtaggaagcactactggatgttcggggcagttctatcgagctaatc

SEQ ID NO: 129537 - DNA, 60 bp, Artificial
  Synthetic oligonucleotide
tttctgttttgcggacgctcggtgaggccgtgcttcgagagggagcgcggagtggataag

SEQ ID NO: 129538 - DNA, 60 bp, Artificial
  Synthetic oligonucleotide
aaaactcccctaccctgtttgacgaagccctccatcgggatttagcaccctttcgcgctc

SEQ ID NO: 129539 - DNA, 60 bp, Artificial
  Synthetic oligonucleotide
tagagctcatgtgggagggccaacgccaggacctaatgatctcattcctttacagtactg

SEQ ID NO: 129540 - DNA, 60 bp, Artificial
  Synthetic oligonucleotide
ggggattcttcatttggtgcgttggccgggaatcagcgcgaccacccagaggtcctaggc

SEQ ID NO: 129541 - DNA, 60 bp, Artificial
  Synthetic oligonucleotide
acactatgcttagtgcatgaggttcgaccccagagctctggtctttgtgctttcttgtcg

SEQ ID NO: 129542 - DNA, 60 bp, Artificial
  Synthetic oligonucleotide
tttccccttgaaccgccccaactgggactacaacactgcggaaggtaggggacgcctcct

SEQ ID NO: 129543 - DNA, 60 bp, Artificial
  Synthetic oligonucleotide
tggcctgtcagtccccctggaacactccacttttgccagtacgaaagccagggaccaatg

SEQ ID NO: 129544 - DNA, 60 bp, Artificial
  Synthetic oligonucleotide
gcgtctgcaccccaagagtcaacttctgtttgcctttgaatggagagacccagagggcgg

SEQ ID NO: 129545 - DNA, 60 bp, Artificial
  Synthetic oligonucleotide
cccctcagcctttgggagtggatgtggaatcccaccccataaggaagggagtggatgtgg

SEQ ID NO: 129546 - DNA, 60 bp, Artificial
  Synthetic oligonucleotide
caccctacagtcccgaacccgtacaacttactaagctctctcccacccgagagaacctgg

SEQ ID NO: 129547 - DNA, 56 bp, Artificial
  Synthetic oligonucleotide
ccccaggaccatgcaaaggtaaatactgcaaccccctactcataaaattcactgag

SEQ ID NO: 129548 - DNA, 60 bp, Artificial
  Synthetic oligonucleotide
ccgccaaccacaccacggcaggtacgtgagtttctggggactgctggcttttgtagactc

SEQ ID NO: 129549 - DNA, 60 bp, Artificial
  Synthetic oligonucleotide
taggacccaacaaggtccttacggaacaggcccccccagttgcaccggctcccccgagag

SEQ ID NO: 129550 - DNA, 60 bp, Artificial
  Synthetic oligonucleotide
ggaagcctactggaagccttccgctgattgggacctgatcacggtaaaacgtggtagtgg

SEQ ID NO: 129551 - DNA, 60 bp, Artificial
  Synthetic oligonucleotide
aagaacaccaaagagcttttgaggctatcaaatcgtctctaatgactgcccctgcgctag

SEQ ID NO: 129552 - DNA, 60 bp, Artificial
  Synthetic oligonucleotide
catgaggttcgaccccagagctctggtctttgtgctttcttgtcgtggcttcattaaatc

SEQ ID NO: 129553 - DNA, 60 bp, Artificial
  Synthetic oligonucleotide
tggcagcccctcagccggaaccaacagcaagcggggctcagggaccggcgggagggactc

SEQ ID NO: 129554 - DNA, 60 bp, Artificial
  Synthetic oligonucleotide
ccttgacctttggcagaactctttaattgagtaaaacctgtactttccctaccctgcttc

SEQ ID NO: 129555 - DNA, 60 bp, Artificial
  Synthetic oligonucleotide
gaaattcttcctgaaacactcctaaactccttaacattcctgaactcttcttcaccccag

SEQ ID NO: 129556 - DNA, 60 bp, Artificial
  Synthetic oligonucleotide
ccctcccttctcagaaaacccctctgggcttactgggctccttgaatcacttatgttctc

SEQ ID NO: 129557 - DNA, 60 bp, Artificial
  Synthetic oligonucleotide
ggaggactttgtgctgctctcaaagaggaatgttgtttctatgtcgaccactcgggagtg

SEQ ID NO: 129558 - DNA, 60 bp, Artificial
  Synthetic oligonucleotide
ccctgttagaagccatacatgcgcccaagaaggtagccatcatccactgtcccggtcacc

SEQ ID NO: 129559 - DNA, 60 bp, Artificial
  Synthetic oligonucleotide
gtcagggattggccactcagttgggcattgattggaaattacattgtgcttaccgccctc

SEQ ID NO: 129560 - DNA, 60 bp, Artificial
  Synthetic oligonucleotide
gccagaggggtgctgacacaagcactaggaccctggaagagaccggtagcctatctgtca

SEQ ID NO: 129561 - DNA, 60 bp, Artificial
  Synthetic oligonucleotide
cctggagtgtattgggaggtggattttactgaagttaaacccggaatgtatggtaataag

SEQ ID NO: 129562 - DNA, 60 bp, Artificial
  Synthetic oligonucleotide
ccctaacttgaagtcagtggctcaaaagattataaactcctgcaaagcgtgtgcattcac

SEQ ID NO: 129563 - DNA, 60 bp, Artificial
  Synthetic oligonucleotide
aggagaccttgactaaattggccatggagaccggcgggaaagactgggtggctctcctcc

SEQ ID NO: 129564 - DNA, 60 bp, Artificial
  Synthetic oligonucleotide
ctgggcggaacaagcagggatggggttggctaaacaagtgcctccagtcgtggtagaact

SEQ ID NO: 129565 - DNA, 57 bp, Artificial
  Synthetic oligonucleotide
cgacctcctctggatggactcccaacctcccccttaccccctgccccagcagccacc

SEQ ID NO: 129566 - DNA, 60 bp, Artificial
  Synthetic oligonucleotide
ctacaccccagggaccaccgcagtaccccacgagttccaggtcggggaccaagtcttggt

SEQ ID NO: 129567 - DNA, 60 bp, Artificial
  Synthetic oligonucleotide
gaggctggaggggctccaagattatacgctccaagatttagtgaaggaagcagagaaggt

SEQ ID NO: 129568 - DNA, 60 bp, Artificial
  Synthetic oligonucleotide
gccctaagaaaagaaggcaattcaaggtcctgaccctagaagacgattagggaagtcggg

SEQ ID NO: 129569 - DNA, 60 bp, Artificial
  Synthetic oligonucleotide
atctgaatctttaagttgtctgtggtcgacgcgaagtcgccgccggttttggtttctttt

SEQ ID NO: 129570 - DNA, 60 bp, Artificial
  Synthetic oligonucleotide
gtcctcagcacggaagaagagtaccggttgcatgaagagcaacccaaaggtgcagcccct

SEQ ID NO: 129571 - DNA, 60 bp, Artificial
  Synthetic oligonucleotide
tgtgacctggcagagtctcgtccagttcccaccttcgtgggtcaagccctggaccccaaa

SEQ ID NO: 129572 - DNA, 60 bp, Artificial
  Synthetic oligonucleotide
caggggcagactgaaccaccctcagtctttctggagcgtcttatggaggcgtataggagg

SEQ ID NO: 129573 - DNA, 60 bp, Artificial
  Synthetic oligonucleotide
cttagaagcaagtcaagagtgtgttctcatctctcctagtcgccgcctggtcattcgggg

SEQ ID NO: 129574 - DNA, 60 bp, Artificial
  Synthetic oligonucleotide
ccaggaaaatggaaaccaaaaatgatagggggaattggaggttttatcaaagtaagacaa

SEQ ID NO: 129575 - DNA, 60 bp, Artificial
  Synthetic oligonucleotide
ggatccttccctgattggcagaactacacaccagggccaggggtcagatttccactgacc

SEQ ID NO: 129576 - DNA, 60 bp, Artificial
  Synthetic oligonucleotide
ttcttgggagctgctgggactgcaatgggagcagcggcgacagccctgacggtccagtct

SEQ ID NO: 129577 - DNA, 60 bp, Artificial
  Synthetic oligonucleotide
ggctacttccctgattggcagaactacacaccagggccagggaccagatatccactgacc

SEQ ID NO: 129578 - DNA, 56 bp, Artificial
  Synthetic oligonucleotide
accagcaaagcttctctggaaaggtgaaggggcagtagtaatacaagataatagtg

SEQ ID NO: 129579 - DNA, 60 bp, Artificial
  Synthetic oligonucleotide
aaatagtacgaatgtatagccctgtcagcattttggacataaaacaagggccaaaagaac

SEQ ID NO: 129580 - DNA, 50 bp, Artificial
  Synthetic oligonucleotide
ctgggtgttccctgctagactctcaccagcactaggccagtgttgggcag

SEQ ID NO: 129581 - DNA, 50 bp, Artificial
  Synthetic oligonucleotide
ctgggtgttccctgctagactctcaccagcacttggccggtgctgggcag

SEQ ID NO: 129582 - DNA, 60 bp, Artificial
  Synthetic oligonucleotide
agcggctgctacaaaagcctggagaaaacttcccgttaagggagacccaggagcctccct

SEQ ID NO: 129583 - DNA, 60 bp, Artificial
  Synthetic oligonucleotide
cccgttaagggagacccaggagcttcccttacaggagtcaaacaaggacccgatgagcca

SEQ ID NO: 129584 - DNA, 60 bp, Artificial
  Synthetic oligonucleotide
cagcaccgatgcacaaatgcagtatgatccaggattgtttgctcaaattcaagcggctgc

SEQ ID NO: 129585 - DNA, 60 bp, Artificial
  Synthetic oligonucleotide
tgctcaaattcaagcggctgctacaaaagcctggagaaaacttcccgttaagggagaccc

SEQ ID NO: 129586 - DNA, 56 bp, Artificial
  Synthetic oligonucleotide
atctgtagcggacaattggcttacccctacagattggaatacgcttgttagggcag

SEQ ID NO: 129587 - DNA, 60 bp, Artificial
  Synthetic oligonucleotide
ggaatacgcttgttagggcagtcctctcaggaggagatcacttactgtggaaatctgagt

SEQ ID NO: 129588 - DNA, 50 bp, Artificial
  Synthetic oligonucleotide
gcacccactgtaatggcggttgttaatccaaaagaggagctcaaagaaaa

SEQ ID NO: 129589 - DNA, 60 bp, Artificial
  Synthetic oligonucleotide
ctgccccatacacattagccatagtagaatctgtagcggacaattggcttacccctacag

SEQ ID NO: 129590 - DNA, 60 bp, Artificial
  Synthetic oligonucleotide
cccaggagcctcccttacaggagtcaaacaaggacccgatgagccatttgcagatttcgt

SEQ ID NO: 129591 - DNA, 60 bp, Artificial
  Synthetic oligonucleotide
caaggacccgatgagccatttgcagattttgtacacagacttataacaactgctgggaga

SEQ ID NO: 129592 - DNA, 55 bp, Artificial
  Synthetic oligonucleotide
aacgcattgccaccattaaacgagacttgatcagaacactgtcttgtctccattt

SEQ ID NO: 129593 - DNA, 60 bp, Artificial
  Synthetic oligonucleotide
ggcaacacattgccaccattaaatgagacttgatcagaacactgtcttgtctccatttct

SEQ ID NO: 129594 - DNA, 60 bp, Artificial
  Synthetic oligonucleotide
catacacttatctacccacaaattggacgggaagctgtgtacttgctactcttttacccg

SEQ ID NO: 129595 - DNA, 60 bp, Artificial
  Synthetic oligonucleotide
gcggtaacaataaggcatacacttatctacccacaaattggacgggaagttgtgtacttg

SEQ ID NO: 129596 - DNA, 59 bp, Artificial
  Synthetic oligonucleotide
cagaacggttagtaagacaggtgtctaacaataaccaatccagggagtgattctctccc

SEQ ID NO: 129597 - DNA, 60 bp, Artificial
  Synthetic oligonucleotide
ccagaacgactagtaaaacaaatacctaacaataaccaatccagggagtgattctctccc

SEQ ID NO: 129598 - DNA, 60 bp, Artificial
  Synthetic oligonucleotide
ggcgaacttcctggttcttctctgtgttgctttcccgccggcgcgaatgtttcccgctct

SEQ ID NO: 129599 - DNA, 60 bp, Artificial
  Synthetic oligonucleotide
ggacagccaatgacgggtaagagagtgacatttctcactaacctaagacaggagggccgt

SEQ ID NO: 129600 - DNA, 60 bp, Artificial
  Synthetic oligonucleotide
cacctcccctgcgagctaagctggacagccaatgacgggtaagagagtgacatttttcac

SEQ ID NO: 129601 - DNA, 56 bp, Artificial
  Synthetic oligonucleotide
cacctcccctgcgagctaagctggacagccaatgacgggtaagagagtgacatttt

SEQ ID NO: 129602 - DNA, 60 bp, Artificial
  Synthetic oligonucleotide
gccactccttccgcacccactgtaatggcggttgttaatccaaaagaggaattaaaagag

SEQ ID NO: 129603 - DNA, 60 bp, Artificial
  Synthetic oligonucleotide
ggcctcccttcctaacccgtccacctccttataataaagccactccttccgcacccactg

SEQ ID NO: 129604 - DNA, 60 bp, Artificial
  Synthetic oligonucleotide
ggcctcccttcctaacccgtccacctccttacaataaagctactccttccgcacccactg

SEQ ID NO: 129605 - DNA, 60 bp, Artificial
  Synthetic oligonucleotide
ttaacagcacaaactagtaaagaccctgaagaccccaacccctcagaggtagactgggac

SEQ ID NO: 129606 - DNA, 60 bp, Artificial
  Synthetic oligonucleotide
ccttggtttccgcaagagggaaccatagatattaaacggtggcgtagagtaggcgactgt

SEQ ID NO: 129607 - DNA, 60 bp, Artificial
  Synthetic oligonucleotide
cttgtccttggtttccgcaagagggaaccatagatatcaaaaggtggcgtagagtaggcg

SEQ ID NO: 129608 - DNA, 60 bp, Artificial
  Synthetic oligonucleotide
tgaacgttatgtagaacaattgaagcaggctttaaagacacggggagtaaaggttaaata

SEQ ID NO: 129609 - DNA, 54 bp, Artificial
  Synthetic oligonucleotide
tcctcagacatatattgggtccaacctattacttgtcaaaaaccttccttaaca

SEQ ID NO: 129610 - DNA, 60 bp, Artificial
  Synthetic oligonucleotide
gcattactataaaaggtctacaagtttatccaggagtaattgataatgactatactgggg

SEQ ID NO: 129611 - DNA, 60 bp, Artificial
  Synthetic oligonucleotide
ggaggactggcctcctaattggcctataacagataccttaaccaatttaagaggaatagg

SEQ ID NO: 129612 - DNA, 60 bp, Artificial
  Synthetic oligonucleotide
gtcactatcatcaagctagaggactggcctcctaattggcctataacagataccttaacc

SEQ ID NO: 129613 - DNA, 60 bp, Artificial
  Synthetic oligonucleotide
taccaccccatcagggaaacggactgaggggccagccccaggccccgaaacaagcttatg

SEQ ID NO: 129614 - DNA, 60 bp, Artificial
  Synthetic oligonucleotide
ataccaccccatcagggaaacgggtggaggggccagccccaggccccgaaacaagcttat

SEQ ID NO: 129615 - DNA, 60 bp, Artificial
  Synthetic oligonucleotide
ggccgaagtagcattactatgaagggtctacaagtttatccaggagtaattgataatgac

SEQ ID NO: 129616 - DNA, 60 bp, Artificial
  Synthetic oligonucleotide
aggccccgaaacaagcttatggggcggtcagctttgttccagccaacaaaaacaacccat

SEQ ID NO: 129617 - DNA, 60 bp, Artificial
  Synthetic oligonucleotide
cccatcacgtggaaatcagacgaacctgtctgggttgatcagtggccattaaccagtgaa

SEQ ID NO: 129618 - DNA, 60 bp, Artificial
  Synthetic oligonucleotide
cagtgcgctgaacccatcacgtggaaatcagacgaacctgtctgggttgatcagtggcca

SEQ ID NO: 129619 - DNA, 51 bp, Artificial
  Synthetic oligonucleotide
cgttaatgccactatggtattaatgggagctttacaacctggattaccctc

SEQ ID NO: 129620 - DNA, 60 bp, Artificial
  Synthetic oligonucleotide
atggtattaatgggagctttacaacctggattgccctctccggtggctatcccacaaggg

SEQ ID NO: 129621 - DNA, 60 bp, Artificial
  Synthetic oligonucleotide
tcaaactaatcttaattcggctcaactagtagaattacaagccttaattgcagtcctatc

SEQ ID NO: 129622 - DNA, 52 bp, Artificial
  Synthetic oligonucleotide
atctaccagtccctcatttaggagttaatcctaggggattatttcccaacat

SEQ ID NO: 129623 - DNA, 52 bp, Artificial
  Synthetic oligonucleotide
tgcccaacagttagtgcaagaacagttagaggcaggacatattactgaaagt

SEQ ID NO: 129624 - DNA, 60 bp, Artificial
  Synthetic oligonucleotide
gtgcaagaacagttagaggcaggacatattactgaaagtagttctccctggaacactccc

SEQ ID NO: 129625 - DNA, 60 bp, Artificial
  Synthetic oligonucleotide
tctccctggaacactcccatatttgttataaaaaagaaatctggtaaatggaggctctta

SEQ ID NO: 129626 - DNA, 60 bp, Artificial
  Synthetic oligonucleotide
gaaatctggtaaatggaggctcttacaagatttacgagccgttaatgccactatggtatt

SEQ ID NO: 129627 - DNA, 60 bp, Artificial
  Synthetic oligonucleotide
ctggaatcccctataatccccaaggccaaggaatagttgaaagagcccacttatctctta

SEQ ID NO: 129628 - DNA, 60 bp, Artificial
  Synthetic oligonucleotide
ggggcagaggttcagtctgtgtttactctcaaacccatgatgccgctagatggctaccag

SEQ ID NO: 129629 - DNA, 60 bp, Artificial
  Synthetic oligonucleotide
gtgagaagcagtgtgtgctcatctgttcaaccctggtgtctagagatccctcagatcacg

SEQ ID NO: 129630 - DNA, 60 bp, Artificial
  Synthetic oligonucleotide
tctatcgtctcccgctctcggtgcctcctgaactgcgcccgtcgtctaggtaagctcgga

SEQ ID NO: 129631 - DNA, 60 bp, Artificial
  Synthetic oligonucleotide
cccaaatcaaccttgcttccgatgcgggaaagctggccattggagccgagactgcaccca

SEQ ID NO: 129632 - DNA, 60 bp, Artificial
  Synthetic oligonucleotide
actgatcatgagttgcaaatatcccctggaggcccgggctccctcggcaagaacagctgc

SEQ ID NO: 129633 - DNA, 60 bp, Artificial
  Synthetic oligonucleotide
gcgcccgccgccctacctgaggccgccatccgtgctggttgagtcgaggtctatcgtctc

SEQ ID NO: 129634 - DNA, 60 bp, Artificial
  Synthetic oligonucleotide
acttcctccccatgtttgtccgtcgcctctgggcgctgacgacaacccctagccccaaaa

SEQ ID NO: 129635 - DNA, 60 bp, Artificial
  Synthetic oligonucleotide
ctgccactctaacggcttggcaaaatggcctcctcccgttccagacaagcctcaccaccc

SEQ ID NO: 129636 - DNA, 60 bp, Artificial
  Synthetic oligonucleotide
ggcctaccacccttcatttctactttcgcacgggctcatacaatactcttctttccacac

SEQ ID NO: 129637 - DNA, 60 bp, Artificial
  Synthetic oligonucleotide
acgctccctcttacgcctcctcttttcctccgcccggcgatgccggtctcgctgcgtctc

SEQ ID NO: 129638 - DNA, 60 bp, Artificial
  Synthetic oligonucleotide
ttctttctcctcctctctccgccgagcagcacgggccgcttcttcctctaaccgccgcct

SEQ ID NO: 129639 - DNA, 60 bp, Artificial
  Synthetic oligonucleotide
ttctgacccctgctccctgaagtgcccttaccttggttgccagtcctggacatgccccta

SEQ ID NO: 129640 - DNA, 60 bp, Artificial
  Synthetic oligonucleotide
ccccttactccctcattccaacctggaccatatcctcgagccctccataccatggaagtc

SEQ ID NO: 129641 - DNA, 60 bp, Artificial
  Synthetic oligonucleotide
gcccgctcctcacctagcgttacccttcaattggacccactgttttgaccccaaactgca

SEQ ID NO: 129642 - DNA, 60 bp, Artificial
  Synthetic oligonucleotide
atgcctttaccgattccctgttggttacccctgtcctccaactttctcctgccaaactac

SEQ ID NO: 129643 - DNA, 60 bp, Artificial
  Synthetic oligonucleotide
aaataacccacaacaccaaatgccccggggacacatccggcgcggcttactccccaacca

SEQ ID NO: 129644 - DNA, 60 bp, Artificial
  Synthetic oligonucleotide
ccgctgtgcccactgtgcctgtccggtcccagtggaccctcccagaacttcaaaccctcc

SEQ ID NO: 129645 - DNA, 60 bp, Artificial
  Synthetic oligonucleotide
ggccccgcccaaccaccgcccttggcagatgaaagacctccaagccataaagcaggaggt

SEQ ID NO: 129646 - DNA, 60 bp, Artificial
  Synthetic oligonucleotide
cccgaaatcagccagtttcctttaaacctgaacgcctccaggccctgcagcacttggtcc

SEQ ID NO: 129647 - DNA, 60 bp, Artificial
  Synthetic oligonucleotide
tgccttgccagggagtgccaaagacccctcatgggcctccatccttcagggtctagaaga

SEQ ID NO: 129648 - DNA, 60 bp, Artificial
  Synthetic oligonucleotide
aacacgcctgtacctccctagccatccgccacaccacccacatcccatataaccccacca

SEQ ID NO: 129649 - DNA, 60 bp, Artificial
  Synthetic oligonucleotide
gcctggtatacccctccactccaaactctttaattttctcccttcggtcgctacgctgcc

SEQ ID NO: 129650 - DNA, 54 bp, Artificial
  Synthetic oligonucleotide
ccccgccaataattcaattcgcccgttaacctctcccgctcctggatccacccc

SEQ ID NO: 129651 - DNA, 60 bp, Artificial
  Synthetic oligonucleotide
tcgcctccctaggacaatgggccaaatcattccccgcgtcaccagccctattccccggcc

SEQ ID NO: 129652 - DNA, 60 bp, Artificial
  Synthetic oligonucleotide
ggactatgctcagcccgccttcatcgtcatgcccttttggccacttgcccggaacaccag

SEQ ID NO: 129653 - DNA, 60 bp, Artificial
  Synthetic oligonucleotide
cacccagcgaacctccaagacccttaaagtcctcacccctccaaccactcatacgacccc

SEQ ID NO: 129654 - DNA, 60 bp, Artificial
  Synthetic oligonucleotide
ccagtacatggatgacatacttttagcaagccccactccggaagacctacagcggctctc

SEQ ID NO: 129655 - DNA, 60 bp, Artificial
  Synthetic oligonucleotide
tgctcgcctcacttccttgtttcgtttctgttacgcgccgccgcaaaccggaggttcctc

SEQ ID NO: 129656 - DNA, 60 bp, Artificial
  Synthetic oligonucleotide
acctctaccaactatcccccccaatcacctggcccctcttgcctcatgtagtcttttgcc

SEQ ID NO: 129657 - DNA, 60 bp, Artificial
  Synthetic oligonucleotide
aatcgggtcctcacaggctggggccttaattgggaccttggactgtctcaatgggcgcgt

SEQ ID NO: 129658 - DNA, 60 bp, Artificial
  Synthetic oligonucleotide
gagtcaatgaaatactaaatatactcatccaagcccaggtccaaacccctccccatcccc

SEQ ID NO: 129659 - DNA, 60 bp, Artificial
  Synthetic oligonucleotide
tctcattctacctcccttctccctgtcgcccgtccccgccctgagccaccgcactcggcg

SEQ ID NO: 129660 - DNA, 60 bp, Artificial
  Synthetic oligonucleotide
taaacgggctgtatgcccaagactcgccggggacaccgccgatcccaaagaaagagacca

SEQ ID NO: 129661 - DNA, 60 bp, Artificial
  Synthetic oligonucleotide
gctgctgtaccctcacagtcggggtctcctcctaccactcaaagccctgtaatcctaccc

SEQ ID NO: 129662 - DNA, 60 bp, Artificial
  Synthetic oligonucleotide
ccccgtaacggctcttatgcctgtcttcaccgtttccccggtagtcctggacactgcccc

SEQ ID NO: 129663 - DNA, 60 bp, Artificial
  Synthetic oligonucleotide
ccacacagaccttcaaccatttcatccacacctctgaccaccccagcgtccccattctac

SEQ ID NO: 129664 - DNA, 60 bp, Artificial
  Synthetic oligonucleotide
cctttgtcaagacccaacccactggaaaagggactgccctcgcctaaaacccgccaccgc

SEQ ID NO: 129665 - DNA, 60 bp, Artificial
  Synthetic oligonucleotide
accctaccaacatcacatacgtcagcccagcaggccgagctatttggccttttacatggc

SEQ ID NO: 129666 - DNA, 60 bp, Artificial
  Synthetic oligonucleotide
caacaaattcccgaaaacctgttcaagccctgttagacactggggcggacatgaccgtcc

SEQ ID NO: 129667 - DNA, 60 bp, Artificial
  Synthetic oligonucleotide
acaactgggtcataattggccgcgacgccctacagcaatgccaaggggccctatacctcc

SEQ ID NO: 129668 - DNA, 60 bp, Artificial
  Synthetic oligonucleotide
gctcaaagccgcagcacaagaagcagttaaccatctggcgagctttgcacgcaacgcggc

SEQ ID NO: 129669 - DNA, 60 bp, Artificial
  Synthetic oligonucleotide
accggttgccctgcatgaggaagcagaaacatgtgaaaggcattgcttggtacacccagc

SEQ ID NO: 129670 - DNA, 60 bp, Artificial
  Synthetic oligonucleotide
cctgagtttagaaaatacacagctttcaccatccctacggtaaacaatgagggaccaggc

SEQ ID NO: 129671 - DNA, 60 bp, Artificial
  Synthetic oligonucleotide
aacccaggcgagagaaactccagcatggcgcccgaacagggacttgagtgaaggcacgta

SEQ ID NO: 129672 - DNA, 60 bp, Artificial
  Synthetic oligonucleotide
cagggtcggaaggaatgaaaagtctgtataatctggtgtgcgtattgctttgcgtccacc

SEQ ID NO: 129673 - DNA, 60 bp, Artificial
  Synthetic oligonucleotide
acagtcgaaagagggaaaagcaggctacataacccaacaaggcaaacaaagagtacaaca

SEQ ID NO: 129674 - DNA, 60 bp, Artificial
  Synthetic oligonucleotide
gaagcagcccagtgggatgtaacccacccaccgccggcaggccccttgccagcgggacag

SEQ ID NO: 129675 - DNA, 60 bp, Artificial
  Synthetic oligonucleotide
caggaggaaggggagagacagggaagacccatagcggaaagggcatataagtattatcgc

SEQ ID NO: 129676 - DNA, 60 bp, Artificial
  Synthetic oligonucleotide
aaggctccgcaacctctaccccagcaacctctactacggcaggaaccaaactaccctgtg

SEQ ID NO: 129677 - DNA, 54 bp, Artificial
  Synthetic oligonucleotide
cccctccaccgaacaactctacaccttacgacccagcaaagaagctcctgcagc

SEQ ID NO: 129678 - DNA, 60 bp, Artificial
  Synthetic oligonucleotide
cagagatccagtgtggaagggacctgctcgcctgatctggaaaggagaaggcgcggtagt

SEQ ID NO: 129679 - DNA, 60 bp, Artificial
  Synthetic oligonucleotide
tgcccgcgtcacagctcttgagaagtacctggcggatcaggcacggttaaacgcttgggg

SEQ ID NO: 129680 - DNA, 60 bp, Artificial
  Synthetic oligonucleotide
aagtgacaagtctgcctgggtccaaggggctactggaggaaagcggtatcgctggaccac

SEQ ID NO: 129681 - DNA, 60 bp, Artificial
  Synthetic oligonucleotide
gtggcagaggatttgctgcacctcaattctctctttggagaagaccagtagtcactgctc

SEQ ID NO: 129682 - DNA, 60 bp, Artificial
  Synthetic oligonucleotide
gtcccattgaaactgtaccagtaaaactaaaaccaggaatggatggaccaaaggttaaac

SEQ ID NO: 129683 - DNA, 60 bp, Artificial
  Synthetic oligonucleotide
accagccaaactactctggaaaggtgaaggggcagtagtaatacaagataacagtgacat

SEQ ID NO: 129684 - DNA, 60 bp, Artificial
  Synthetic oligonucleotide
gggaatgctattcttaggggttctaagtgcagcaggtagcactatgggcgcagcggcaac

SEQ ID NO: 129685 - DNA, 60 bp, Artificial
  Synthetic oligonucleotide
agttatcatgatagtacttaatatagtgaagaacattaggcagggatatcaacccctctc

SEQ ID NO: 129686 - DNA, 60 bp, Artificial
  Synthetic oligonucleotide
tgctgttctttggggtactaagtgcagcaggtagcactatgggcgcagcggcaacaacgc

SEQ ID NO: 129687 - DNA, 60 bp, Artificial
  Synthetic oligonucleotide
gttctaagtgcagcaggtagcactatgggcgcagcggcaacagcgctgacggtacagacc

SEQ ID NO: 129688 - DNA, 60 bp, Artificial
  Synthetic oligonucleotide
gataaaacacatagtatgggcaagcagggagctggaaagattcgcacttaaccctggcct

SEQ ID NO: 129689 - DNA, 50 bp, Artificial
  Synthetic oligonucleotide
gctagagcctgggtgttcgctggttagcctaacccggttggccaccgggg

SEQ ID NO: 129690 - DNA, 60 bp, Artificial
  Synthetic oligonucleotide
cacggcaggaggcacaatgggcgcagcggcgacagccctgacggtacagtctcggtcatt

SEQ ID NO: 129691 - DNA, 60 bp, Artificial
  Synthetic oligonucleotide
tattcaacaattgacccagaagacagcaatatatctggcatgggtaccagcccataaagg

SEQ ID NO: 129692 - DNA, 60 bp, Artificial
  Synthetic oligonucleotide
tatagactaaaacatctagtatgggcaagcagggagctggaaagattcgcacttaaccct

SEQ ID NO: 129693 - DNA, 60 bp, Artificial
  Synthetic oligonucleotide
ccagcaaagctactctggaaaggtgaaggggcagtagtaatacaagataatagtgacata

SEQ ID NO: 129694 - DNA, 60 bp, Artificial
  Synthetic oligonucleotide
ggctacttccctgattggcagaactacacaccagggccaggaactagatttccactgacc

SEQ ID NO: 129695 - DNA, 60 bp, Artificial
  Synthetic oligonucleotide
gcaaagttgggagaatcaggtgggtcatagaagaattaggccacataaaatagcaactgg

SEQ ID NO: 129696 - DNA, 59 bp, Artificial
  Synthetic oligonucleotide
cataggatggcttcaaaatacccggaagaaggaccaataactgagggggttgaagaaga

SEQ ID NO: 129697 - DNA, 60 bp, Artificial
  Synthetic oligonucleotide
gcaccatccgttcctcaattagaactaagagttcctcggttaacaagcctgattgcaaaa

SEQ ID NO: 129698 - DNA, 60 bp, Artificial
  Synthetic oligonucleotide
ggcagagcttctacgcttggaccttcacgaaggagactatccagagtggctgcagctcct

SEQ ID NO: 129699 - DNA, 60 bp, Artificial
  Synthetic oligonucleotide
tttctgggcacaccccatagtcccagaggattattggattactgcattcacttggcaagg

SEQ ID NO: 129700 - DNA, 60 bp, Artificial
  Synthetic oligonucleotide
gttcagactgcccagtgctaaccaaaccacttacagatgaatacttggaaattgaacccc

SEQ ID NO: 129701 - DNA, 60 bp, Artificial
  Synthetic oligonucleotide
cctggattatgcaactttgtccgaggtggcagagtggttatgtatctgtcatactcgggg

SEQ ID NO: 129702 - DNA, 60 bp, Artificial
  Synthetic oligonucleotide
accaaatccacgagatgtcgccctatggcttggaagatctacagccgctattgaaggagt

SEQ ID NO: 129703 - DNA, 60 bp, Artificial
  Synthetic oligonucleotide
atgtcacgagaaaagaacctagaagagaagaacaactttcggcatgcaacagagcgggag

SEQ ID NO: 129704 - DNA, 60 bp, Artificial
  Synthetic oligonucleotide
tggaagtgcctctgggaacagtgaggagagggtgtcatgggccaaagagaattctcacag

SEQ ID NO: 129705 - DNA, 60 bp, Artificial
  Synthetic oligonucleotide
acacccaagacggatcctactcgtcctgcaacatcttatagcctatgccgaagcgactat

SEQ ID NO: 129706 - DNA, 60 bp, Artificial
  Synthetic oligonucleotide
cccggagggacgactgatgtccttggaatggaaagcaatgtttggctcactaaatttgtt

SEQ ID NO: 129707 - DNA, 60 bp, Artificial
  Synthetic oligonucleotide
cctactgagactggcaccaaaggtctaactcttatgagaaggcatgtgcaaaattcccct

SEQ ID NO: 129708 - DNA, 56 bp, Artificial
  Synthetic oligonucleotide
tattgtggattttcttggttttcagattactaatgaaggccggggcctgacagata

SEQ ID NO: 129709 - DNA, 60 bp, Artificial
  Synthetic oligonucleotide
tggaactgagaatactgaggattggggatggctggcatatactgactcttttccatcccc

SEQ ID NO: 129710 - DNA, 60 bp, Artificial
  Synthetic oligonucleotide
cacctttaagagactgaaaagcatgactcgtgcacaggaagctcctttagggtagaggaa

SEQ ID NO: 129711 - DNA, 60 bp, Artificial
  Synthetic oligonucleotide
aaatagaattgactggaggtttataaacgattcatggattcaagaagaattaggtgtttc

SEQ ID NO: 129712 - DNA, 60 bp, Artificial
  Synthetic oligonucleotide
tcggttgctgaccttaaaagattaaggccagatgttgttgtgacccatgagccaggtcac

SEQ ID NO: 129713 - DNA, 60 bp, Artificial
  Synthetic oligonucleotide
gcaacaggaatggtccattagtttggggaatcatacagcacaatttgcagaaatagctgc

SEQ ID NO: 129714 - DNA, 60 bp, Artificial
  Synthetic oligonucleotide
aggaaagtactatgaacactcctgtctacccagtacccaagccaaatggtcgctggagaa

SEQ ID NO: 129715 - DNA, 60 bp, Artificial
  Synthetic oligonucleotide
aaggctttggcctctcgatggttgagttggctttcttatttggaagatccgagaattagg

SEQ ID NO: 129716 - DNA, 60 bp, Artificial
  Synthetic oligonucleotide
cttggcaaatagaacattcaaccactctggaaactttaattactaaactaaacggggcag

SEQ ID NO: 129717 - DNA, 60 bp, Artificial
  Synthetic oligonucleotide
cactgaactagagaaattgctgaccactgtgcacaagggtcttttaaaggccttggactt

SEQ ID NO: 129718 - DNA, 59 bp, Artificial
  Synthetic oligonucleotide
aagaaatggaggaggaagcgctgccgcagtacatacagtaaaagcgtctgaaaacgaaa

SEQ ID NO: 129719 - DNA, 60 bp, Artificial
  Synthetic oligonucleotide
acaaaatgccacacatggaatattttgttctgatgcactatatagtaattggtatccacg

SEQ ID NO: 129720 - DNA, 60 bp, Artificial
  Synthetic oligonucleotide
cagcacaccagcataatggaacaagaacatgtgatgaccctgaaggaatggatggaatgg

SEQ ID NO: 129721 - DNA, 60 bp, Artificial
  Synthetic oligonucleotide
ccatctaggccaacggaaatctgtgagtattgacaatttaaaacctacagcacaccagca

SEQ ID NO: 129722 - DNA, 60 bp, Artificial
  Synthetic oligonucleotide
gctctggttggtcaccatacgttggccagctggtccaggagagggtgtacaggccgtcac

SEQ ID NO: 129723 - DNA, 60 bp, Artificial
  Synthetic oligonucleotide
gctcttggttgggaggcctttaaagtggtataaccttatatccagtgtgcaacttgctct

SEQ ID NO: 129724 - DNA, 60 bp, Artificial
  Synthetic oligonucleotide
cgggagctggaatgctgccatatcagctttatggaggaaagctcacggtgctgcagctca

SEQ ID NO: 129725 - DNA, 60 bp, Artificial
  Synthetic oligonucleotide
ccggcccactccttccaattctgagtccgtatgtaatggcttgggacaaccctcagaacg

SEQ ID NO: 129726 - DNA, 60 bp, Artificial
  Synthetic oligonucleotide
gcctttttggacttagagcctgccagaggacctgaaaggcatggtccctttggagatggc

SEQ ID NO: 129727 - DNA, 59 bp, Artificial
  Synthetic oligonucleotide
ttaggcctggccaatgcaattactactgtggctaagatctctgacctgaatgatcaaaa

SEQ ID NO: 129728 - DNA, 60 bp, Artificial
  Synthetic oligonucleotide
gccgatattacctgtgttccaaaggacttgcttcaaggagaagaacctgttaggcagcaa

SEQ ID NO: 129729 - DNA, 60 bp, Artificial
  Synthetic oligonucleotide
cccgcatgtaagaacttcaatagaactagacaagaccatccatatgcttgcagattttgg

SEQ ID NO: 129730 - DNA, 60 bp, Artificial
  Synthetic oligonucleotide
gcagcctcagcgctacggccaaggaccaccaggaccaaacccgtaccgacgattcggaga

SEQ ID NO: 129731 - DNA, 59 bp, Artificial
  Synthetic oligonucleotide
tgctttggagagcacaagctgatgatccaagtgatgttgcttccctgtatcccagagtc

SEQ ID NO: 129732 - DNA, 60 bp, Artificial
  Synthetic oligonucleotide
acaagaccctagagagtgtaacctagaagaatggtgcctgtatagtcttgatcctgaaca

SEQ ID NO: 129733 - DNA, 60 bp, Artificial
  Synthetic oligonucleotide
ggggaataatcaggactcttttaccaggacaagccctagtaaccaatgctcagtcacaat

SEQ ID NO: 129734 - DNA, 60 bp, Artificial
  Synthetic oligonucleotide
gggtccaggtgatagatgggctagagtgacaatacgattacaagataacacaggacaacc

SEQ ID NO: 129735 - DNA, 60 bp, Artificial
  Synthetic oligonucleotide
tgggcaaagtattagacctcgggtccaaacacagccactacaaactcgaccccggaaccc

SEQ ID NO: 129736 - DNA, 60 bp, Artificial
  Synthetic oligonucleotide
ctatcccaggtataggccacgacagttggcgcccaacgtggggctcgattgagtgaaatt

SEQ ID NO: 129737 - DNA, 60 bp, Artificial
  Synthetic oligonucleotide
ggcatgcaacagagcgggagcttggtgtaggagctaagtcaccgtcttacatctagagcc

SEQ ID NO: 129738 - DNA, 60 bp, Artificial
  Synthetic oligonucleotide
ctaaggtgtggattcaacaaccatttgaagtactaaaccaggaatgtggaacaaatatat

SEQ ID NO: 129739 - DNA, 60 bp, Artificial
  Synthetic oligonucleotide
cattgggccattgccaccatcagaaggttatgtgcatgttttagttgtggtagatgctgc

SEQ ID NO: 129740 - DNA, 60 bp, Artificial
  Synthetic oligonucleotide
gatgctgccactggatttacttggttgtaccccactaaggctcaaacctccaaggccaca

SEQ ID NO: 129741 - DNA, 60 bp, Artificial
  Synthetic oligonucleotide
aatcccaagctggacattgagcaaataaaggcaattcaagcatgtcaaaataatgaaaga

SEQ ID NO: 129742 - DNA, 60 bp, Artificial
  Synthetic oligonucleotide
tggtaaatcctttgaatttgaaacctattagccctcaagctattgtacacccaaccaaac

SEQ ID NO: 129743 - DNA, 60 bp, Artificial
  Synthetic oligonucleotide
cgtagaggttaacatctcagggatcccacaaggtcttttcttcgcacctcaaccaaaacc

SEQ ID NO: 129744 - DNA, 60 bp, Artificial
  Synthetic oligonucleotide
ggaaataaagtttggccttcacaagatttaatacaagatcaatgtccattacctcctcgc

SEQ ID NO: 129745 - DNA, 60 bp, Artificial
  Synthetic oligonucleotide
ccagcgaaactactctggaaaggtgaaggggcagtagtaatacaagacaatagtgatata

SEQ ID NO: 129746 - DNA, 60 bp, Artificial
  Synthetic oligonucleotide
ggggacgcctgaagtaaggtaagagagacacctactgggaaaagtagggaaatacccttc

SEQ ID NO: 129747 - DNA, 53 bp, Artificial
  Synthetic oligonucleotide
ctcaccatatggggagtgaagaatctccaagcacgcctgacagcccttgagga

SEQ ID NO: 129748 - DNA, 59 bp, Artificial
  Synthetic oligonucleotide
gcctgttgcaccaggccaaatgagagaaccaaggggaagtgacatagcaggaactacta

SEQ ID NO: 129749 - DNA, 60 bp, Artificial
  Synthetic oligonucleotide
tgcagggcctattgcaccaggccaaatgagagaaccaaggggaagtgacatagcaggaac

SEQ ID NO: 129750 - DNA, 60 bp, Artificial
  Synthetic oligonucleotide
tttgtgctagggttcttgggttttctcgcgacagcaggttctgcaatgggcgcggcgtcc

SEQ ID NO: 129751 - DNA, 60 bp, Artificial
  Synthetic oligonucleotide
gagactgtaccagtaaaattaaagccaggaatggatggcccaaaggttaaacaatggcca

SEQ ID NO: 129752 - DNA, 60 bp, Artificial
  Synthetic oligonucleotide
gaaactgtaccagtaaaattaaagccaggaatggatggcccaaaggttaaacaatggcca

SEQ ID NO: 129753 - DNA, 60 bp, Artificial
  Synthetic oligonucleotide
gcttaccgccctcaaagctcaggacaggtagagaggatgaatagaacattaaaggagacc

SEQ ID NO: 129754 - DNA, 60 bp, Artificial
  Synthetic oligonucleotide
ggcccatgcacaaatgtcagcacagtacaatgtacacatggaattaagccagtggtatca

SEQ ID NO: 129755 - DNA, 60 bp, Artificial
  Synthetic oligonucleotide
gaagttacattgtgcataccgaccccaaagttcaggtcaggtagaaagaatgaatagatc

SEQ ID NO: 129756 - DNA, 60 bp, Artificial
  Synthetic oligonucleotide
ttagggaatagtggtcggccacaggcggcgtggcgatcctgccctcatccgtctcgctta

SEQ ID NO: 129757 - DNA, 60 bp, Artificial
  Synthetic oligonucleotide
cggcgacagccctgacggtccagtctcagcatttacttgctgggatactgcagcagcaga

SEQ ID NO: 129758 - DNA, 60 bp, Artificial
  Synthetic oligonucleotide
ggaactaaaaacctccagactagagtcactgccatcgagaaatacctaaaggatcaggca

SEQ ID NO: 129759 - DNA, 60 bp, Artificial
  Synthetic oligonucleotide
ggggcctatggcaccaggccaaatgagagaaccaaggggaagtgacatagcaggaactac

SEQ ID NO: 129760 - DNA, 60 bp, Artificial
  Synthetic oligonucleotide
gggccgattgcaccaggccaaatgagagaaccaaggggaagtgacatagcaggaactacc

SEQ ID NO: 129761 - DNA, 54 bp, Artificial
  Synthetic oligonucleotide
atagaagcagaagtgataccagcagaaacaggacaagaagctgcctatttcctg

SEQ ID NO: 129762 - DNA, 60 bp, Artificial
  Synthetic oligonucleotide
gaaactgtgccagtaaaattaaagccaggaatggatggcccaaaagttaaacaatggcca

SEQ ID NO: 129763 - DNA, 60 bp, Artificial
  Synthetic oligonucleotide
cagcagtgaatcccgattggacagagggatattctttgaactccctctttggagaagacc

SEQ ID NO: 129764 - DNA, 60 bp, Artificial
  Synthetic oligonucleotide
cggcaatgaatccggattggaccgagggatattctttgaactccctctttggagaagacc

SEQ ID NO: 129765 - DNA, 60 bp, Artificial
  Synthetic oligonucleotide
ctctggcaggcgttgcacaaaacgcatgtcaccagatatggcttgcttgcagatccgctt

SEQ ID NO: 129766 - DNA, 60 bp, Artificial
  Synthetic oligonucleotide
ggtacatgtacccttgtcaccgcgcaccttaaatgcgtgggtaaaagcagtagaggagaa

SEQ ID NO: 129767 - DNA, 50 bp, Artificial
  Synthetic oligonucleotide
gacgtgaccaagaagggcttggtgagtaggcttctcgagtgccgggaaaa

SEQ ID NO: 129768 - DNA, 60 bp, Artificial
  Synthetic oligonucleotide
gagaggctcaattacacttccacccagagttccttttccgtctttggaacacctgtgtag

SEQ ID NO: 129769 - DNA, 60 bp, Artificial
  Synthetic oligonucleotide
acatttaaggttctgggggctcgagaccccagacaaaaagttccaaaaagaacctccttt

SEQ ID NO: 129770 - DNA, 60 bp, Artificial
  Synthetic oligonucleotide
gggcggttcgcaggcccctggcttgtagctctgggtagctcgtcaggtgttctggaaagg

SEQ ID NO: 129771 - DNA, 60 bp, Artificial
  Synthetic oligonucleotide
tcggtggcagagatttgatatctagtgagagtagagaaaaaatctccagcagtggcgccc

SEQ ID NO: 129772 - DNA, 60 bp, Artificial
  Synthetic oligonucleotide
gggcggttcgcaggcccctggcttgtggctctgggtagctcgtcaggtgttctggaaagg

SEQ ID NO: 129773 - DNA, 60 bp, Artificial
  Synthetic oligonucleotide
aaatctctagcagtggcgcccgaacagggactagaaagcgaaagtaagaccagaggagct

SEQ ID NO: 129774 - DNA, 60 bp, Artificial
  Synthetic oligonucleotide
tcctaggtttaaataaaatagtaagaatgtatagccctgtcagcattttggacataaaac

SEQ ID NO: 129775 - DNA, 60 bp, Artificial
  Synthetic oligonucleotide
aaatcattagggattatggaaaacagatggcaggtgatgattgtgtggcaagtagacagg

SEQ ID NO: 129776 - DNA, 60 bp, Artificial
  Synthetic oligonucleotide
atttggaattccctacaatccccaaagtcagggagtagtagaatctatgaataaagagtt

SEQ ID NO: 129777 - DNA, 60 bp, Artificial
  Synthetic oligonucleotide
aaaatctctagcagtggcgcccgaacagggaccggaaaacgaaagagaaaccagaggagc

SEQ ID NO: 129778 - DNA, 60 bp, Artificial
  Synthetic oligonucleotide
gctaaaacacatagtatgggcaagcagagagctggaaagattcgcacttaaccctggcct

SEQ ID NO: 129779 - DNA, 60 bp, Artificial
  Synthetic oligonucleotide
ggggaaagaaacattatatgctaaaacatttagtatgggcaagcagggagctggaaagat

SEQ ID NO: 129780 - DNA, 52 bp, Artificial
  Synthetic oligonucleotide
gcaaaagaatagatgggaatggaggccagactttgagagtgaaagggtaaaa

SEQ ID NO: 129781 - DNA, 60 bp, Artificial
  Synthetic oligonucleotide
cctaggaggcacatacggagagtcccagaaccctgcactcttcctgaaggggatgagtga

SEQ ID NO: 129782 - DNA, 60 bp, Artificial
  Synthetic oligonucleotide
caaagatcattagggattatggaaaacagatggcaggtgatgattgtgtggcaagtagac

SEQ ID NO: 129783 - DNA, 50 bp, Artificial
  Synthetic oligonucleotide
ggggaggaaatcctctctcagctataccgccctctagaagcatgctataa

SEQ ID NO: 129784 - DNA, 60 bp, Artificial
  Synthetic oligonucleotide
gcagggcccgtcgcaccaggccaaatgagagaaccaaggggaagtgacatagcaggaact

SEQ ID NO: 129785 - DNA, 60 bp, Artificial
  Synthetic oligonucleotide
gcagggcctaatccaccaggccaaatgagagaaccaaggggaagtgacatagcaggaact

SEQ ID NO: 129786 - DNA, 60 bp, Artificial
  Synthetic oligonucleotide
tggaacacggctgagtgagggcagtaagggcggcaggaacaaaccacgacggagtgctcc

SEQ ID NO: 129787 - DNA, 60 bp, Artificial
  Synthetic oligonucleotide
ggtggaccagatctgagcctgggagctctctggctatctagggaacccactgcttaagcc

SEQ ID NO: 129788 - DNA, 60 bp, Artificial
  Synthetic oligonucleotide
gtcagcacagtacaatgtacacatggaattaggccagtagtatcaactcaactgctgtta

SEQ ID NO: 129789 - DNA, 60 bp, Artificial
  Synthetic oligonucleotide
aaacaacaaagccctgttaacactcctaatttgtgcccacgctgtaaaaaaggaaagcat

SEQ ID NO: 129790 - DNA, 60 bp, Artificial
  Synthetic oligonucleotide
actgcttctgtatctttagcacaatccattcaagttgctcatactgtagattccttgtcc

SEQ ID NO: 129791 - DNA, 51 bp, Artificial
  Synthetic oligonucleotide
agaagcaagttaagtgtgtgttcccatctctcctagtcgccgcctggtcat

SEQ ID NO: 129792 - DNA, 60 bp, Artificial
  Synthetic oligonucleotide
agggattatggaaaacagatggcaggtgatgattgtgtggcaggtagacaggatgaggat

SEQ ID NO: 129793 - DNA, 60 bp, Artificial
  Synthetic oligonucleotide
tagggattatggaaaacagatggcaggtgatgattgtgtggcaggtagacaggatgagga

SEQ ID NO: 129794 - DNA, 60 bp, Artificial
  Synthetic oligonucleotide
cgcgaacctgaatgaagcagaaggcttcatttggtgaccccgacgtgatcgttagggaat

SEQ ID NO: 129795 - DNA, 60 bp, Artificial
  Synthetic oligonucleotide
gcgaacaactgaatgaagcagaaggcttcatttggtgaccccgacgtgatcgttagggaa

SEQ ID NO: 129796 - DNA, 56 bp, Artificial
  Synthetic oligonucleotide
acctgaatgaagcggaaggcttcatttggtgaccccgacgtgatcgttagggaata

SEQ ID NO: 129797 - DNA, 60 bp, Artificial
  Synthetic oligonucleotide
gtggaagccatctctggatcccgtggcgtctcctaaagaggggtatatgcccaagacccg

SEQ ID NO: 129798 - DNA, 60 bp, Artificial
  Synthetic oligonucleotide
tgccggagtagactagtaaatcagctgcccattttggcccttataatactccggcccaca

SEQ ID NO: 129799 - DNA, 60 bp, Artificial
  Synthetic oligonucleotide
cgccacttcctgtagcaggggaccatagttctcgccttcactgagcacccaagcgcaaca

SEQ ID NO: 129800 - DNA, 60 bp, Artificial
  Synthetic oligonucleotide
ataactccgccacttcctgtagcaggggaccatagttctcgccttcactgagcacccaag

SEQ ID NO: 129801 - DNA, 60 bp, Artificial
  Synthetic oligonucleotide
gccacttcctgtagcaggggaccatagttctcgccttcactgagcacccaagcgcaacat

SEQ ID NO: 129802 - DNA, 60 bp, Artificial
  Synthetic oligonucleotide
gagaccctatttggaaaggaccagccaaactactctggaaaggtgaaggagcagtagtaa

SEQ ID NO: 129803 - DNA, 60 bp, Artificial
  Synthetic oligonucleotide
gaggaattgtcacaaaatatggaattgaggagaaatggtaggcaatgtggcatgtctgaa

SEQ ID NO: 129804 - DNA, 60 bp, Artificial
  Synthetic oligonucleotide
accacattggtgtgcacctgggttgatggccggaccgtcgattccctaacgattgcgaac

SEQ ID NO: 129805 - DNA, 60 bp, Artificial
  Synthetic oligonucleotide
accacattggtgtgcacctgggttgatggccggaccgttgagtccctaacggttgcgaac

SEQ ID NO: 129806 - DNA, 60 bp, Artificial
  Synthetic oligonucleotide
gccattttaccactcaccacattggtgtgcacctgggttgatggccggaccgtcgattcc

SEQ ID NO: 129807 - DNA, 60 bp, Artificial
  Synthetic oligonucleotide
gccattttaccccccaccacattggtgtgcacctgggttgatggccggaccgttgattcc

SEQ ID NO: 129808 - DNA, 60 bp, Artificial
  Synthetic oligonucleotide
attggtgtgcacctgggttgatggccggaccgtcgattccctaacgattgcgaacacctg

SEQ ID NO: 129809 - DNA, 60 bp, Artificial
  Synthetic oligonucleotide
tggtgtgcacctgggttgatggccggaccgttgattccctgacgactacgagcacatgca

SEQ ID NO: 129810 - DNA, 60 bp, Artificial
  Synthetic oligonucleotide
accacattggtgtgcacctgggttgatggccggaccgtcgattccctgacgactacgaac

SEQ ID NO: 129811 - DNA, 60 bp, Artificial
  Synthetic oligonucleotide
ccattcaccacattggtgtgcacctgggttgatggccggaccgttgattccctgacgact

SEQ ID NO: 129812 - DNA, 60 bp, Artificial
  Synthetic oligonucleotide
tttacctcccaccacattggtgtgcacctgggttgatggccggaccgtcgattccctgac

SEQ ID NO: 129813 - DNA, 60 bp, Artificial
  Synthetic oligonucleotide
tttaccattcaccacattggtgtgcacctgggttgatggccggaccgtcgattccctaac

SEQ ID NO: 129814 - DNA, 60 bp, Artificial
  Synthetic oligonucleotide
accacattggtgtgcacctgggttgatggccggaccgttgattccctgacgtctacgagc

SEQ ID NO: 129815 - DNA, 60 bp, Artificial
  Synthetic oligonucleotide
accacattggtgtgcacctgggttgatggccggaccgttgattccctgacgactacgagc

SEQ ID NO: 129816 - DNA, 60 bp, Artificial
  Synthetic oligonucleotide
gagatctcctaaccaaactcggagctcagatccacttctccgaggcaggggcccaggtgt

SEQ ID NO: 129817 - DNA, 60 bp, Artificial
  Synthetic oligonucleotide
gcacaaatggactaaccgccggacagttaacctagggcaaggaatggtgacacactcctt

SEQ ID NO: 129818 - DNA, 60 bp, Artificial
  Synthetic oligonucleotide
cccaagcgggccactccaagagtgcccctgtaattcttaccagtcctcagtacacagttc

SEQ ID NO: 129819 - DNA, 60 bp, Artificial
  Synthetic oligonucleotide
tcttggtggacacaggcgcccaacactcggttttgaccaaggcaaacggacccctgtcct

SEQ ID NO: 129820 - DNA, 60 bp, Artificial
  Synthetic oligonucleotide
ttggatcaaggactgccccaagcgtcctagagaccagaagaaacccgcccctgtcctcac

SEQ ID NO: 129821 - DNA, 60 bp, Artificial
  Synthetic oligonucleotide
tgggcgggccaagtgtcaagccccaatcataattgatctaaagcccacagcggtgcctgt

SEQ ID NO: 129822 - DNA, 60 bp, Artificial
  Synthetic oligonucleotide
gcacttgacttcttacttgcccttgtcctcctaccccgcgccgtacatagcagtaacccc

SEQ ID NO: 129823 - DNA, 60 bp, Artificial
  Synthetic oligonucleotide
cagccaccgctatgctggtcaaagactctgctaagttaacccttgggcagccactgactg

SEQ ID NO: 129824 - DNA, 60 bp, Artificial
  Synthetic oligonucleotide
accaaaatcctggcagccgtagtgactgaaaaaagggcaggaaagtcaggggaaacaaga

SEQ ID NO: 129825 - DNA, 60 bp, Artificial
  Synthetic oligonucleotide
agggctagggatcaccgcagccttcacaacaggagctacaggcctaggtgtctctgtgac

SEQ ID NO: 129826 - DNA, 60 bp, Artificial
  Synthetic oligonucleotide
ctctcctccccgacattgacatcattcccggagatgaaccggtccccatccctgctattg

SEQ ID NO: 129827 - DNA, 60 bp, Artificial
  Synthetic oligonucleotide
cccaccaatttggccaaggtaaggactataactcagggaaaagatgaaagcccggcagcc

SEQ ID NO: 129828 - DNA, 60 bp, Artificial
  Synthetic oligonucleotide
ccctcgcaaagccatagaactagtacaaaagcgatatggccgaccatgcgattgcagcgg

SEQ ID NO: 129829 - DNA, 60 bp, Artificial
  Synthetic oligonucleotide
tggataaccaacgcacgcctaacccactaccaggccctcttactggacacggaccgcgtc

SEQ ID NO: 129830 - DNA, 60 bp, Artificial
  Synthetic oligonucleotide
cagcttttgcaggtccttctaaccaccgaagaaaggcagcgagtcctcctggaagcccgg

SEQ ID NO: 129831 - DNA, 60 bp, Artificial
  Synthetic oligonucleotide
ctcaggtactcggagggcgggagcagcggtagtagacggacacaataccatttgggcaca

SEQ ID NO: 129832 - DNA, 60 bp, Artificial
  Synthetic oligonucleotide
ctcctgccctttcttggccctctacttaccctcctgctcttactcaccattgggccgtgc

SEQ ID NO: 129833 - DNA, 60 bp, Artificial
  Synthetic oligonucleotide
ttgcatcagcgaaggaaaactgcattccccagacctccccggggctagcacctatcccac

SEQ ID NO: 129834 - DNA, 60 bp, Artificial
  Synthetic oligonucleotide
aaaccgcgcggccccggccaccggtggcggacggacgacgggacgactcttgtgtgtagt

SEQ ID NO: 129835 - DNA, 60 bp, Artificial
  Synthetic oligonucleotide
gggagggccctggtgcaccagtaaacgactttctgccgaaatttgtgtgttgggtggttc

SEQ ID NO: 129836 - DNA, 60 bp, Artificial
  Synthetic oligonucleotide
cctaaggacgggacaatgggacagacgctaacaactcctctatctttgactttgacgcac

SEQ ID NO: 129837 - DNA, 60 bp, Artificial
  Synthetic oligonucleotide
cccctgccatctgaatcacttgtagtactttggcgccattctctggccgcgcggctcatc

SEQ ID NO: 129838 - DNA, 60 bp, Artificial
  Synthetic oligonucleotide
gtggatatccaccctacggtccccaatccttacaacttgctcagtaccttaaaaccagac

SEQ ID NO: 129839 - DNA, 60 bp, Artificial
  Synthetic oligonucleotide
ccttccccaaaaggaagccctggcaatgatccagcagatgcatgcctggacacacttggg

SEQ ID NO: 129840 - DNA, 60 bp, Artificial
  Synthetic oligonucleotide
gccatgttgccttcagcaactgtacctccataaccaatgtcaccggtcccatatgcgctg

SEQ ID NO: 129841 - DNA, 60 bp, Artificial
  Synthetic oligonucleotide
gtactggctgagacccatggaacacgagaagaccttaaagaccaagagctcccagacgcg

SEQ ID NO: 129842 - DNA, 60 bp, Artificial
  Synthetic oligonucleotide
gccacttacaacttactcctaatgtccaacacgagcctagtggacgactgttggctttgt

SEQ ID NO: 129843 - DNA, 60 bp, Artificial
  Synthetic oligonucleotide
ggcggaagtactgaccctagccacagaacctgacaacaccagccacataactattgaaca

SEQ ID NO: 129844 - DNA, 60 bp, Artificial
  Synthetic oligonucleotide
tgtcaaccttacttaactccttttctccctccaattctaagactgacctacaggcccggc

SEQ ID NO: 129845 - DNA, 60 bp, Artificial
  Synthetic oligonucleotide
cccacccggcaagaaacggcacacatagtagccaagaagatcctagaagaaatctttcct

SEQ ID NO: 129846 - DNA, 60 bp, Artificial
  Synthetic oligonucleotide
tcagcaggtaaacgctggggctacccgagtgccagcagggaaacggactcgtggtaaccg

SEQ ID NO: 129847 - DNA, 60 bp, Artificial
  Synthetic oligonucleotide
gcctgcacgcaaggtactaggcatctactccaggaactaggtgagaaaggataccgggca

SEQ ID NO: 129848 - DNA, 60 bp, Artificial
  Synthetic oligonucleotide
ccctacattgttctcctgaccacacccacagccataaaggttgacggaatcgccacgtgg

SEQ ID NO: 129849 - DNA, 60 bp, Artificial
  Synthetic oligonucleotide
atagagactgtggctcgcattccaccgccccggaatcccagagaggtgcgtgaattcctg

SEQ ID NO: 129850 - DNA, 60 bp, Artificial
  Synthetic oligonucleotide
ttgtctgccccagcccttgggttaccggacacctcaaagccctttaccctcttcctggac

SEQ ID NO: 129851 - DNA, 60 bp, Artificial
  Synthetic oligonucleotide
cgccttgggtgaaaccctttctccataccccttctacatccaagtccaccctccttgccc

SEQ ID NO: 129852 - DNA, 60 bp, Artificial
  Synthetic oligonucleotide
agaagtcccaaagaaccggaccctggatccgcctaaacccgtactcccggatgagtcgca

SEQ ID NO: 129853 - DNA, 60 bp, Artificial
  Synthetic oligonucleotide
cccactccttcctctcttgtctcctcgtcgaccccgccttcctctccagccccacctgaa

SEQ ID NO: 129854 - DNA, 60 bp, Artificial
  Synthetic oligonucleotide
ccctccccgtaaatggttctgtttgttcgtggcgcaggcagagtttgttgcaaggcttga

SEQ ID NO: 129855 - DNA, 60 bp, Artificial
  Synthetic oligonucleotide
tgctttcccgccctccgaattgtaaaacaagccctgcctcagccggaaattccaaaccag

SEQ ID NO: 129856 - DNA, 60 bp, Artificial
  Synthetic oligonucleotide
cagtagaaacaatagtactaatggcagttcattgcatgaattttaaaagaaggggaggaa

SEQ ID NO: 129857 - DNA, 60 bp, Artificial
  Synthetic oligonucleotide
cttcccatgtaacaagccccagcagagacattccagccacgtccagcagcatttgggccg

SEQ ID NO: 129858 - DNA, 60 bp, Artificial
  Synthetic oligonucleotide
accaattacaggcggtcttgggagacctccaatgggtctctaggggcacacccactaccc

SEQ ID NO: 129859 - DNA, 60 bp, Artificial
  Synthetic oligonucleotide
gatgaacgtcttcccatgtaacaagccccagcagagacattccagccacatccagcagca

SEQ ID NO: 129860 - DNA, 60 bp, Artificial
  Synthetic oligonucleotide
agatcacttcgactgcccccactgggacaatgcctcccaggccgatcaagggtcctttta

SEQ ID NO: 129861 - DNA, 60 bp, Artificial
  Synthetic oligonucleotide
cggtacggaaaccaaatggcacctggaggtttgtgcatgacctacgagctacaaatgctc

SEQ ID NO: 129862 - DNA, 60 bp, Artificial
  Synthetic oligonucleotide
tctcactcttactctcctcgctctctgtcagcccatccagacttggagatgctccctgtc

SEQ ID NO: 129863 - DNA, 60 bp, Artificial
  Synthetic oligonucleotide
ccatgactcaggccctttctcgagccctctggactcacaatcagattaacctcctaccaa

SEQ ID NO: 129864 - DNA, 60 bp, Artificial
  Synthetic oligonucleotide
cgcccctaaacccgattctgattatcaggccttgctaccgtctgcaccagagatctactc

SEQ ID NO: 129865 - DNA, 60 bp, Artificial
  Synthetic oligonucleotide
ttggagccagggccatggtcacatatgattgcgagccccgatgcccttatgtgggggcag

SEQ ID NO: 129866 - DNA, 60 bp, Artificial
  Synthetic oligonucleotide
gaaaccaacaatggatgacagcatacaaccaagaggcaaaattttccatctccattgacc

SEQ ID NO: 129867 - DNA, 60 bp, Artificial
  Synthetic oligonucleotide
gggctcccgaaatattagtatataacaaaaccatctccagctctggacccggcctcgccc

SEQ ID NO: 129868 - DNA, 60 bp, Artificial
  Synthetic oligonucleotide
cccgccggcccctgcaacttctctactcttcccttaaaaggcatcatgaccctagggcca

SEQ ID NO: 129869 - DNA, 60 bp, Artificial
  Synthetic oligonucleotide
ttgccccagacaccaggggagccatacgttatctctccacccttttgacgctatgcccgg

SEQ ID NO: 129870 - DNA, 60 bp, Artificial
  Synthetic oligonucleotide
ccaacctcacagacgctttgcctggcgggtcctacctcaaggcttcattaacagcccagc

SEQ ID NO: 129871 - DNA, 60 bp, Artificial
  Synthetic oligonucleotide
cgctatgcccagctacttgtattctacccctaggcgagcccttctctcctaatgtcccca

SEQ ID NO: 129872 - DNA, 60 bp, Artificial
  Synthetic oligonucleotide
gcttttaccctccctacccccgggggactccaacctcatagacgctttgcctggcgggtc

SEQ ID NO: 129873 - DNA, 60 bp, Artificial
  Synthetic oligonucleotide
cttccagattccagtcgaagaccgcttccgctcctactttgcttttaccctccctacccc

SEQ ID NO: 129874 - DNA, 60 bp, Artificial
  Synthetic oligonucleotide
ggcaccgggttcgcaagtatggatacaaacactacgacttgcaatcttacaggccgaccc

SEQ ID NO: 129875 - DNA, 60 bp, Artificial
  Synthetic oligonucleotide
cctgaccccgtaccctcctacgccctcctatataaaagcctcctccgacatccagcaatc

SEQ ID NO: 129876 - DNA, 60 bp, Artificial
  Synthetic oligonucleotide
ctccgacatccagcaatctttgttggtcatgtccggagccactcttcagcatcccacccc

SEQ ID NO: 129877 - DNA, 60 bp, Artificial
  Synthetic oligonucleotide
agctctatctccggtcctctgaccgtctccacgtggactctctctcttgcctcctgaccc

SEQ ID NO: 129878 - DNA, 60 bp, Artificial
  Synthetic oligonucleotide
cttgatcacagcaattaatcagacccactataatttgcttaatgtggcctctgtggttgc

SEQ ID NO: 129879 - DNA, 60 bp, Artificial
  Synthetic oligonucleotide
gagcttggcttcaacctgaccccgtaccctcctatgccctcctatataaaagcctcctcc

SEQ ID NO: 129880 - DNA, 60 bp, Artificial
  Synthetic oligonucleotide
tccacgttctggagcaagatcagcaacgcttgatcacagcaattaaccagacccactata

SEQ ID NO: 129881 - DNA, 60 bp, Artificial
  Synthetic oligonucleotide
gctctcttcttcggcgcccttcagcggccaggagagaccggcaaacaattgggggctcgt

SEQ ID NO: 129882 - DNA, 59 bp, Artificial
  Synthetic oligonucleotide
ttcagcatcccaccccattgcttccctgaacaattatgtagatcaactgcttcccttag

SEQ ID NO: 129883 - DNA, 56 bp, Artificial
  Synthetic oligonucleotide
ggggctcgtccgggattgatcaccccggaaccctaacgatcctctggacccacccc

SEQ ID NO: 129884 - DNA, 60 bp, Artificial
  Synthetic oligonucleotide
ttgtacatccggctgggttttcaaagcctatgtcccacaattaatgagccttgctgtttc

SEQ ID NO: 129885 - DNA, 54 bp, Artificial
  Synthetic oligonucleotide
tcgtcaaagcgcgcaaaggctcaatccgcgaccctctcctagcgattttaccga

SEQ ID NO: 129886 - DNA, 60 bp, Artificial
  Synthetic oligonucleotide
taaggcaaaccacggtttggagggtggttctcggctgagaccgccgcgagctctatctcc

SEQ ID NO: 129887 - DNA, 60 bp, Artificial
  Synthetic oligonucleotide
gcctagatctcaaagatgccttcttccagattccagtcgaagaccgcttccgctcctatt

SEQ ID NO: 129888 - DNA, 60 bp, Artificial
  Synthetic oligonucleotide
taagctcacccactgcaactctcgggccttgtctcgatggccgaacccacgtatctctgc

SEQ ID NO: 129889 - DNA, 54 bp, Artificial
  Synthetic oligonucleotide
atgcgaactattcagagagggtgggccccgaatcatatttggcaggccgatata

SEQ ID NO: 129890 - DNA, 59 bp, Artificial
  Synthetic oligonucleotide
cctaccaatgccaattgccctcggcctctagcgacggttgccccatcatcgggcacggc

SEQ ID NO: 129891 - DNA, 58 bp, Artificial
  Synthetic oligonucleotide
ggggccccactctctacatgcctgcccggccctggttttgtccaatgacgtcaccatc

SEQ ID NO: 129892 - DNA, 60 bp, Artificial
  Synthetic oligonucleotide
tggatgcccccccgagccacattggattagaacatctgccccccccccctgaggtacctc

SEQ ID NO: 129893 - DNA, 60 bp, Artificial
  Synthetic oligonucleotide
ttgcacgtgtttgtagatacttactctggagctactcatgcctcagcaaagcgagggctc

SEQ ID NO: 129894 - DNA, 60 bp, Artificial
  Synthetic oligonucleotide
cccctgggacgggccaggcaataatccagtcttcccggtacggaaaccaaatggcacctg

SEQ ID NO: 129895 - DNA, 60 bp, Artificial
  Synthetic oligonucleotide
gccagcaccgagttcgaacacagccctaccctgagcctctctgagtgcatgactgagtgt

SEQ ID NO: 129896 - DNA, 60 bp, Artificial
  Synthetic oligonucleotide
ccccggaccgccagaccttaccgctatccctacacaccttccacatatcatttgcctaga

SEQ ID NO: 129897 - DNA, 60 bp, Artificial
  Synthetic oligonucleotide
ggatgccaatacctgcagactcaggccttaagctcttatgccaagcccatactcaaatac

SEQ ID NO: 129898 - DNA, 60 bp, Artificial
  Synthetic oligonucleotide
tctcctgaaccgattcctgcggccctttgcctctttagtgacggggctacaggacgagga

SEQ ID NO: 129899 - DNA, 60 bp, Artificial
  Synthetic oligonucleotide
gggtcagacgtagtcccgtcgcggccctgaccttaggcctagccctgtcagtggggctca

SEQ ID NO: 129900 - DNA, 60 bp, Artificial
  Synthetic oligonucleotide
gtccaccctggtactcttccaaaagggcgctcaatttcccctggcctactttcagacccc

SEQ ID NO: 129901 - DNA, 60 bp, Artificial
  Synthetic oligonucleotide
gcttcgacaagccctgtcccacaacgcaagatctagatataacgagcaagaacccctgct

SEQ ID NO: 129902 - DNA, 60 bp, Artificial
  Synthetic oligonucleotide
aatcagacggcacgggccttcccagactgtgctatatgttgggaaccttcccctccctgg

SEQ ID NO: 129903 - DNA, 60 bp, Artificial
  Synthetic oligonucleotide
ccggttgtccgtctttgccccagacaccaggggagccatacgttatctctccaccctttt

SEQ ID NO: 129904 - DNA, 60 bp, Artificial
  Synthetic oligonucleotide
gcccttagccatcagagactcacctccctgatccacgttctggagcaagatcagcaacgc

SEQ ID NO: 129905 - DNA, 60 bp, Artificial
  Synthetic oligonucleotide
ccgggaccttgtcccatatgtaaagatccttcccattggaaacgagactgtccaaccctc

SEQ ID NO: 129906 - DNA, 60 bp, Artificial
  Synthetic oligonucleotide
ttccggccccagaatccgctcaaaagggagaactagcaggtctcttggcgggcttagcag

SEQ ID NO: 129907 - DNA, 60 bp, Artificial
  Synthetic oligonucleotide
ccacaagaggcagcgcgggattggacctctgtgccacctcctacacagtattaactcccg

SEQ ID NO: 129908 - DNA, 60 bp, Artificial
  Synthetic oligonucleotide
gcctactacatggccaaaacagatggctatttccactctccagggtattggccaaactac

SEQ ID NO: 129909 - DNA, 60 bp, Artificial
  Synthetic oligonucleotide
tggccaaactaccaatccagaacagagttcatcccttcttacttggaaggataaagatgg

SEQ ID NO: 129910 - DNA, 60 bp, Artificial
  Synthetic oligonucleotide
acaatgatgcatatgggagccctacaacctgggttgcccactccttctgctatacctgat

SEQ ID NO: 129911 - DNA, 60 bp, Artificial
  Synthetic oligonucleotide
gccaaactactaatccagaacagagttcatcccttcttacttggaaggataaagatggac

SEQ ID NO: 129912 - DNA, 60 bp, Artificial
  Synthetic oligonucleotide
gccaaactaccaatccagaacagagttcatcccttcttacttggaaggataaagatggac

SEQ ID NO: 129913 - DNA, 60 bp, Artificial
  Synthetic oligonucleotide
ctgtcgagccacaagaggcagcgcgggattggacctctgtgccacctcctacacagtatt

SEQ ID NO: 129914 - DNA, 60 bp, Artificial
  Synthetic oligonucleotide
ttgctaacagtacctacttccttcaatttatttacagacagctcctacgtggtcggtgcc

SEQ ID NO: 129915 - DNA, 60 bp, Artificial
  Synthetic oligonucleotide
tttgcagtccaccaagcgttgctaactgtacctacttccttcaatttatttacagacagc

SEQ ID NO: 129916 - DNA, 60 bp, Artificial
  Synthetic oligonucleotide
gctcaagttgtggaattatttgcagtccaccaagcgttgctaactgtacctacttccttc

SEQ ID NO: 129917 - DNA, 60 bp, Artificial
  Synthetic oligonucleotide
gactctgatcctgcgtcaccccgaacactttctttagaaggacgaactgctttacaatca

SEQ ID NO: 129918 - DNA, 60 bp, Artificial
  Synthetic oligonucleotide
atatggtgtcaaccctcgaggtttacgccctaatcacctctggcaaacagatgttactca

SEQ ID NO: 129919 - DNA, 55 bp, Artificial
  Synthetic oligonucleotide
ctaactgtacctacttccttcaatttatttacagacagctcctatgtggtcggtg

SEQ ID NO: 129920 - DNA, 60 bp, Artificial
  Synthetic oligonucleotide
ggctggtacgcgcggcagaggaactccctgacacatcaaatgcaacgcatgacactgagc

SEQ ID NO: 129921 - DNA, 60 bp, Artificial
  Synthetic oligonucleotide
ggccaaaacagatggctatttccactctccagggtattggccaaactaccaatccagaac

SEQ ID NO: 129922 - DNA, 60 bp, Artificial
  Synthetic oligonucleotide
ggctatttccactctccagggtattggccaaactaccaatccagaacagagttcatccct

SEQ ID NO: 129923 - DNA, 60 bp, Artificial
  Synthetic oligonucleotide
tcaaagaataaaagaggagtctttgtgctagggttcttgggttttctcgcgacggcaggt

SEQ ID NO: 129924 - DNA, 60 bp, Artificial
  Synthetic oligonucleotide
tggcaatcccagtcgatgcaccctgttcataggagcctcttcctaccactccgacccctg

SEQ ID NO: 129925 - DNA, 60 bp, Artificial
  Synthetic oligonucleotide
cagctacaggccctcccttcccgtctgcagcaccgcagtcagccctactctcttcttaat

SEQ ID NO: 129926 - DNA, 58 bp, Artificial
  Synthetic oligonucleotide
cccctgccccgtgtgtcaggatcccacccactggaagcgggactgcccacagttaaaa

SEQ ID NO: 129927 - DNA, 60 bp, Artificial
  Synthetic oligonucleotide
aaattattagggactatggaaaacagatggcaggtgctgattgtgtggcaggtagacagg

SEQ ID NO: 129928 - DNA, 58 bp, Artificial
  Synthetic oligonucleotide
tagcggaggctagaaggagagagatgggtgcgagagcgtcagtattaagaggggaaaa

SEQ ID NO: 129929 - DNA, 60 bp, Artificial
  Synthetic oligonucleotide
gtggaagaactgacgagttcgtattcccgaccgcagccctgggagacgtctcagaggcat

SEQ ID NO: 129930 - DNA, 60 bp, Artificial
  Synthetic oligonucleotide
catacattgtcacctgggaggctattgcctatgaaccccctccgtgggtcaaaccttttg

SEQ ID NO: 129931 - DNA, 60 bp, Artificial
  Synthetic oligonucleotide
ctcccatcctcccatccggtccttcgacccaacctccgccccgatctgccctttaccccg

SEQ ID NO: 129932 - DNA, 60 bp, Artificial
  Synthetic oligonucleotide
tccaaccgctcccatcctcccatccggtccttcgacccaacctccgccccgatctgccct

SEQ ID NO: 129933 - DNA, 60 bp, Artificial
  Synthetic oligonucleotide
ttctgccatccggtccttcgacccaacctccgccccgatctgccctttaccctgctctta

SEQ ID NO: 129934 - DNA, 60 bp, Artificial
  Synthetic oligonucleotide
ggatttggagacccccgcccagggaccacgacccaccgtcgggaggtaagctggccagcg

SEQ ID NO: 129935 - DNA, 60 bp, Artificial
  Synthetic oligonucleotide
gggcctgttgcaccaggacaaatgagagaaccaaggggaagtgacatagcaggaactact

SEQ ID NO: 129936 - DNA, 60 bp, Artificial
  Synthetic oligonucleotide
ttgactacccgtcacgggggtctttcatttgggggctcgtccgggatccggagaccccag

SEQ ID NO: 129937 - DNA, 60 bp, Artificial
  Synthetic oligonucleotide
gaaaggaccagccaaactactctggaaaggtgaaggggcagtagtaatacaagataacgg

SEQ ID NO: 129938 - DNA, 51 bp, Artificial
  Synthetic oligonucleotide
atagacctgttcaggatctgagagaagtcaacaagcgggtagaagacgtcc

SEQ ID NO: 129939 - DNA, 60 bp, Artificial
  Synthetic oligonucleotide
cttcatttggtgaccccgacgtgatagttagggaatagtggtcggccacagacggcgtgg

SEQ ID NO: 129940 - DNA, 60 bp, Artificial
  Synthetic oligonucleotide
ttggtgaccccgacgtgatagttagggaatagtggtcggccacagacggcgtggcgatcc

SEQ ID NO: 129941 - DNA, 60 bp, Artificial
  Synthetic oligonucleotide
ccgacgtgatagttagggaatagtggtcggccacagacggcgtggcgatcctgtcctcat

SEQ ID NO: 129942 - DNA, 60 bp, Artificial
  Synthetic oligonucleotide
gtgatagttagggaatagtggtcggccacagacggcgtggcgatcctgtctccatccgtc

SEQ ID NO: 129943 - DNA, 60 bp, Artificial
  Synthetic oligonucleotide
gtgatagttagggaatagtggtcggccacagacggcgtggcgatcctgtcctcatccgtc

SEQ ID NO: 129944 - DNA, 60 bp, Artificial
  Synthetic oligonucleotide
accccgacgtgatagttagggaatagtggtcggccacagacggcgtggcgatcctgccct

SEQ ID NO: 129945 - DNA, 60 bp, Artificial
  Synthetic oligonucleotide
tgatagttagggaatagtggtcggccacagacggcgtggcgatcctgccctcatccgtct

SEQ ID NO: 129946 - DNA, 60 bp, Artificial
  Synthetic oligonucleotide
ttagggaatagtggtcggccacagacggcgtggcgatcctgccctcatccgtctcgctta

SEQ ID NO: 129947 - DNA, 60 bp, Artificial
  Synthetic oligonucleotide
agaagagcatgaaaaatatcacagcaattggagagcaatggctagtgagtttaatctacc

SEQ ID NO: 129948 - DNA, 60 bp, Artificial
  Synthetic oligonucleotide
aatggaaaccaaaaatgatagggggaattggaggttttatcaaagtaagacagtatgatc

SEQ ID NO: 129949 - DNA, 60 bp, Artificial
  Synthetic oligonucleotide
ggctaaaacatctagtatgggcaagcagggagctggaaagatttgcacttaaccctggcc

SEQ ID NO: 129950 - DNA, 60 bp, Artificial
  Synthetic oligonucleotide
agcacacatttggggtaccctacaacccccaaagtcagggagtagtagaatctatgaata

SEQ ID NO: 129951 - DNA, 60 bp, Artificial
  Synthetic oligonucleotide
cttatccctcgactcccctccttccccacccagagaacctccaagacccttaaggtcctc

SEQ ID NO: 129952 - DNA, 59 bp, Artificial
  Synthetic oligonucleotide
aaaatctctagcagtggcgcccgaacagggactcgaaagcgaaagtaagaccagagaag

SEQ ID NO: 129953 - DNA, 60 bp, Artificial
  Synthetic oligonucleotide
aaaatctctagcagtggcgcccgaacagggacttgaaagtgaaagggaaaccagaggagc

SEQ ID NO: 129954 - DNA, 60 bp, Artificial
  Synthetic oligonucleotide
aagaaccattgcagacctctgtcgagccacaagaggcagcgcgggattggacctctgtgc

SEQ ID NO: 129955 - DNA, 60 bp, Artificial
  Synthetic oligonucleotide
ctgcaggttccaaaagaaccattgcagacctctgtcgagccacaagaggcagcgcaggat

SEQ ID NO: 129956 - DNA, 60 bp, Artificial
  Synthetic oligonucleotide
gttatggggcaacactgcaggttccaaaagaaccattgcagacctctgtcgagccacaag

SEQ ID NO: 129957 - DNA, 60 bp, Artificial
  Synthetic oligonucleotide
attccggaaaggctggtacgcgcggcagaggaactccctgacgcatcagatgcaacgcat

SEQ ID NO: 129958 - DNA, 60 bp, Artificial
  Synthetic oligonucleotide
cactgcaggttccaaaagaaccattgcagacctctgtcgagccacaagaggcagcgcggg

SEQ ID NO: 129959 - DNA, 60 bp, Artificial
  Synthetic oligonucleotide
tggggcaacactgcaggttccaaaaggaccattgcagacctctgtcgagccacaagaggc

SEQ ID NO: 129960 - DNA, 60 bp, Artificial
  Synthetic oligonucleotide
aaaatattagcctccgctcctaacaaaattattgtaatcaatgcaggacagcgtatagct

SEQ ID NO: 129961 - DNA, 60 bp, Artificial
  Synthetic oligonucleotide
tgttatagatttaaaagattgtttttacactattcctcttgcacctcaagattgcaaaag

SEQ ID NO: 129962 - DNA, 60 bp, Artificial
  Synthetic oligonucleotide
tcatcctggtgtgattgactctgattatacaggagagataaaaatattagcctccgctcc

SEQ ID NO: 129963 - DNA, 60 bp, Artificial
  Synthetic oligonucleotide
gaaccattgcagacctctgtcgagccacaagaggcagcgcaggattggacctctgtgcca

SEQ ID NO: 129964 - DNA, 60 bp, Artificial
  Synthetic oligonucleotide
gcgctggattccggaaaggctggtacgcgcggcagaggaactccctgacatatcaaatgc

SEQ ID NO: 129965 - DNA, 60 bp, Artificial
  Synthetic oligonucleotide
gctggattccggaaaggctggtacgcgcggcagaggaactccctgacgcatcagatgcaa

SEQ ID NO: 129966 - DNA, 60 bp, Artificial
  Synthetic oligonucleotide
tgaaacttcggggacgcctgaaggagtaaggtaagtgactctgctgtacgcggggcgagg

SEQ ID NO: 129967 - DNA, 60 bp, Artificial
  Synthetic oligonucleotide
actgaaacttcggggacgcctgaaggagtacggtaagtgactctgctgtacgcggggcga

SEQ ID NO: 129968 - DNA, 60 bp, Artificial
  Synthetic oligonucleotide
ggaccatgtacaaatgtcagcacagtacaatgtacacatggaattaggccagtagtatca

SEQ ID NO: 129969 - DNA, 60 bp, Artificial
  Synthetic oligonucleotide
gctgccagttagaagcaagctaagtgtgtgttcccatctctcctagtcgccgcctggtca

SEQ ID NO: 129970 - DNA, 60 bp, Artificial
  Synthetic oligonucleotide
ggctgcctgggtccaaggggctactggaggaaagcggtatcgctggaccacggatcgcaa

SEQ ID NO: 129971 - DNA, 60 bp, Artificial
  Synthetic oligonucleotide
gtctgcctgggtccaaggggctactggaggaaagcggtatcgctggaccacggatcgcaa

SEQ ID NO: 129972 - DNA, 60 bp, Artificial
  Synthetic oligonucleotide
tccttatccctcgactcccctccttccccacccagagaacctctaagacccttaaggtcc

SEQ ID NO: 129973 - DNA, 60 bp, Artificial
  Synthetic oligonucleotide
ccctcagaccatctagtcagtgtggaaaatctctagcagtggcgcccgaacagggacccg

SEQ ID NO: 129974 - DNA, 60 bp, Artificial
  Synthetic oligonucleotide
gaccagatctgagcctgggagctctctggctatctagggaacccactgcttaagcctcaa

SEQ ID NO: 129975 - DNA, 60 bp, Artificial
  Synthetic oligonucleotide
catctacacactgataatggcccaaactttacctctcagaatgtggcagcggtgtgctgg

SEQ ID NO: 129976 - DNA, 60 bp, Artificial
  Synthetic oligonucleotide
ctactacagagaaggtagagatccagtgtggaaaggaccagcgcgactcatctggaaagg

SEQ ID NO: 129977 - DNA, 60 bp, Artificial
  Synthetic oligonucleotide
cccacagtcacagggtagtgtagaaagcatgaacagacagctcaaggaaatcatctctca

SEQ ID NO: 129978 - DNA, 60 bp, Artificial
  Synthetic oligonucleotide
ggagggtgtcagagaggcaaataagcagatggagggggatagtgacttacaagatcagga

SEQ ID NO: 129979 - DNA, 60 bp, Artificial
  Synthetic oligonucleotide
cccatatgtattaaaatgtcctgtgtagagctgaatggtacagccacgacaaaggccacc

SEQ ID NO: 129980 - DNA, 60 bp, Artificial
  Synthetic oligonucleotide
cagtacagagcagatagaaggagaaatggcagaggaaccagcatccaactgcacttttgc

SEQ ID NO: 129981 - DNA, 60 bp, Artificial
  Synthetic oligonucleotide
ctgtaccagaaattggatgattggtcagggttctggtcatggttctcactgtcaacttgg

SEQ ID NO: 129982 - DNA, 60 bp, Artificial
  Synthetic oligonucleotide
ggcttccctgtgcaacctcgagtccccttaagacagatgacctataaattagcagtggac

SEQ ID NO: 129983 - DNA, 60 bp, Artificial
  Synthetic oligonucleotide
gcccgcgtcacagctctcgagaagtacctagaggatcaggcacggctaaattcatgggga

SEQ ID NO: 129984 - DNA, 60 bp, Artificial
  Synthetic oligonucleotide
tcatcaggacagcagtgggatacctgcagtatgggctccagcaactccaagaggcagcaa

SEQ ID NO: 129985 - DNA, 60 bp, Artificial
  Synthetic oligonucleotide
gataacaccaattggctttgctcctacagatgtaagaagatatactggccccacaagaga

SEQ ID NO: 129986 - DNA, 60 bp, Artificial
  Synthetic oligonucleotide
cacggcactatacgtggcaatagattataacaacaagtctggcccaataaatgtgaccct

SEQ ID NO: 129987 - DNA, 60 bp, Artificial
  Synthetic oligonucleotide
cggaacggccagacaacggaggagggcaagacagaggtggagaaagcagcagcagcaaat

SEQ ID NO: 129988 - DNA, 60 bp, Artificial
  Synthetic oligonucleotide
ctgttatcactgtgagctttgcttcctgcagaagggcttaggagtgcgttatcatgtctc

SEQ ID NO: 129989 - DNA, 60 bp, Artificial
  Synthetic oligonucleotide
cgagtcatcatagaaggaacgccagtgcaagccttgttagatacaggagcagatgacact

SEQ ID NO: 129990 - DNA, 60 bp, Artificial
  Synthetic oligonucleotide
cctccagcagtatgcagagaagggacagcgcctgagagaggagagagaacagacaaggaa

SEQ ID NO: 129991 - DNA, 60 bp, Artificial
  Synthetic oligonucleotide
ggtcactcagcactgtcagggagaagcctcgacacgttcgagaagattaggctacgtccg

SEQ ID NO: 129992 - DNA, 60 bp, Artificial
  Synthetic oligonucleotide
caaatgctttaagtgcggcaaaattggccatatggcaaaagactgcaagaatggacaggc

SEQ ID NO: 129993 - DNA, 60 bp, Artificial
  Synthetic oligonucleotide
aggactccttggcttcatatagctcaataaacctgctcgcttagtcgctatattggagtc

SEQ ID NO: 129994 - DNA, 60 bp, Artificial
  Synthetic oligonucleotide
gagaaaggctaggccgcgacaggggcgcgggtcccattagtggcaaccaacccagttgga

SEQ ID NO: 129995 - DNA, 60 bp, Artificial
  Synthetic oligonucleotide
ttgagaagaggcatcggcaccgaccgctgagttgctgagcgtcggagagggacgactcag

SEQ ID NO: 129996 - DNA, 60 bp, Artificial
  Synthetic oligonucleotide
ggctacaagacatgctcagggatctaaacgaagaagccagaaggcactttggaatgaaca

SEQ ID NO: 129997 - DNA, 60 bp, Artificial
  Synthetic oligonucleotide
ggctatcagaggggagaagtatacgtggtgcacattcaaggaaggacataaaggtcaggt

SEQ ID NO: 129998 - DNA, 60 bp, Artificial
  Synthetic oligonucleotide
gtccaaagagaaccgccatgggaatggatggggtataaattgcatccgaataaatggacc

SEQ ID NO: 129999 - DNA, 60 bp, Artificial
  Synthetic oligonucleotide
ggcaggactattggcaagtatcctggataccagaatgggagtttgttagcacaccactcc

SEQ ID NO: 130000 - DNA, 60 bp, Artificial
  Synthetic oligonucleotide
aaaacaccactaaccaacaagcagaattaacagcagttaagatggcattggaggacagtg

SEQ ID NO: 130001 - DNA, 60 bp, Artificial
  Synthetic oligonucleotide
taagacagatcctcttcttagatagaatagaagaagcacaagatgaccatgcaaagtacc

SEQ ID NO: 130002 - DNA, 60 bp, Artificial
  Synthetic oligonucleotide
tgtagccagtggattcatagaagcagaggtgatcccaagagaaactgggaaggagacagc

SEQ ID NO: 130003 - DNA, 60 bp, Artificial
  Synthetic oligonucleotide
cagaagtaagcatagaaaatatacatctgagaaggatatggggagatccagaatcagcga

SEQ ID NO: 130004 - DNA, 60 bp, Artificial
  Synthetic oligonucleotide
cctgtgacaaagggaagccaggaccaggaccatgtgttcagagaacttatgttgcctgcc

SEQ ID NO: 130005 - DNA, 60 bp, Artificial
  Synthetic oligonucleotide
taagttttacaacttgacagtgagatgccgaagacctggtaataaaacagtgttgccagt

SEQ ID NO: 130006 - DNA, 60 bp, Artificial
  Synthetic oligonucleotide
gagggaagcctggggcagactgggtgctattgtccgatccgcttatcgggcagtcatcaa

SEQ ID NO: 130007 - DNA, 60 bp, Artificial
  Synthetic oligonucleotide
caggcccggggataaggtacccgagagtctttggcttctgctttaagctagtcccagtgg

SEQ ID NO: 130008 - DNA, 60 bp, Artificial
  Synthetic oligonucleotide
ccccaaaaggtcctagacattcgacagggacctaaagaacccttccaggactatgtagac

SEQ ID NO: 130009 - DNA, 60 bp, Artificial
  Synthetic oligonucleotide
cccctcagtaaataatacagggccagggataaggtatcagttcaattgtctgcctcaggg

SEQ ID NO: 130010 - DNA, 60 bp, Artificial
  Synthetic oligonucleotide
ggtacaagtacaattggaggataaaatcatcaccggctcaattctaataggaagtacacc

SEQ ID NO: 130011 - DNA, 60 bp, Artificial
  Synthetic oligonucleotide
gtatggacagaagaggcagaggcagaatataagaacaatcaagggatagtgcaggaaaca

SEQ ID NO: 130012 - DNA, 60 bp, Artificial
  Synthetic oligonucleotide
ccttggaggaaatgctaatagcttgccagggagtaggagggccacaacataaggctaagc

SEQ ID NO: 130013 - DNA, 60 bp, Artificial
  Synthetic oligonucleotide
caacagttcaaaagcaaggagaagggcaatggacataccaattcacccaagaaggggcag

SEQ ID NO: 130014 - DNA, 59 bp, Artificial
  Synthetic oligonucleotide
ggacaggacacacagaccaccagctggcccgttaccagcagggcagctaagagacccga

SEQ ID NO: 130015 - DNA, 60 bp, Artificial
  Synthetic oligonucleotide
cccagtagtaaatcagaataatgcctgggtacaccagcctttgtctccgcgcacgttaaa

SEQ ID NO: 130016 - DNA, 60 bp, Artificial
  Synthetic oligonucleotide
ccccgttggaaccgacaggctccgaggggctaaaagctctgtttaatttgtgctgcgtca

SEQ ID NO: 130017 - DNA, 60 bp, Artificial
  Synthetic oligonucleotide
gggcctattgcaccaggccaaatgagagaaccaaggggaagtgacatagcaggaactact

SEQ ID NO: 130018 - DNA, 60 bp, Artificial
  Synthetic oligonucleotide
cgaagattgctggctgtgcttgcggtcaggtgatcccgttcctctcgccctgccttatga

SEQ ID NO: 130019 - DNA, 60 bp, Artificial
  Synthetic oligonucleotide
gggcgcgagcgcgtcaggtcttaggggagagaaattggatgaactggaaacaattaggtt

SEQ ID NO: 130020 - DNA, 60 bp, Artificial
  Synthetic oligonucleotide
caaatgatggcagaggccatgcagaagatgcagtcagaagtcatgatgcagaactcgggg

SEQ ID NO: 130021 - DNA, 60 bp, Artificial
  Synthetic oligonucleotide
cagccgccagaggatgaggctccacaaagagaaccatataatgagtggctgatagataca

SEQ ID NO: 130022 - DNA, 60 bp, Artificial
  Synthetic oligonucleotide
aggtagggaagtatgctaggacaaaacatgcccacacaaatgagttaagggtgcttgcag

SEQ ID NO: 130023 - DNA, 60 bp, Artificial
  Synthetic oligonucleotide
ggcccctggcttgtagctctgggtagctcgtcaggtgttctggaaaggtctcgctaagtg

SEQ ID NO: 130024 - DNA, 60 bp, Artificial
  Synthetic oligonucleotide
ggggctggaggtgacggtacagaataatgagagtaccacacaagaaaatagggtatgtaa

SEQ ID NO: 130025 - DNA, 60 bp, Artificial
  Synthetic oligonucleotide
gcctcaaggggtgctgagaaacccaacaggaagtgacattgcaggaacaacaagcagcat

SEQ ID NO: 130026 - DNA, 60 bp, Artificial
  Synthetic oligonucleotide
gaaaacaatgggtaacagtatattatggcacacctaaatggcacccagcaagaacgcatc

SEQ ID NO: 130027 - DNA, 60 bp, Artificial
  Synthetic oligonucleotide
cagttattagaggagcagcggctattggaagggccattgggaacatccctcggcgcatca

SEQ ID NO: 130028 - DNA, 60 bp, Artificial
  Synthetic oligonucleotide
aagagaggagcagtcttgcttggaatgctcggcctcttgggcttggcaggttccgcgatg

SEQ ID NO: 130029 - DNA, 60 bp, Artificial
  Synthetic oligonucleotide
cctcacagccttggaggactatgtagcggaccaatcaagactagcagtatggggatgctc

SEQ ID NO: 130030 - DNA, 60 bp, Artificial
  Synthetic oligonucleotide
tacaagcctctcctatactgcctaccaggagaaatcagactgctgcaagaggaagtggtg

SEQ ID NO: 130031 - DNA, 60 bp, Artificial
  Synthetic oligonucleotide
ggaatttagcataccccctatagtggcaaaagaaatagttgcacagtgcccaaagtgtca

SEQ ID NO: 130032 - DNA, 60 bp, Artificial
  Synthetic oligonucleotide
cagagggcagcaaaggagaccaagcaggagaaggacaagggtccctacgaggcagcttac

SEQ ID NO: 130033 - DNA, 60 bp, Artificial
  Synthetic oligonucleotide
ggaccagcagaactcatttggaaaggagaaggagcagtggtaatcaaagaaggaacagac

SEQ ID NO: 130034 - DNA, 60 bp, Artificial
  Synthetic oligonucleotide
gccctcttccttatgtcttaaagggagactatctccgacctcgcaacctcagacagccag

SEQ ID NO: 130035 - DNA, 60 bp, Artificial
  Synthetic oligonucleotide
ccgctgtgagaaaggtgctgtacggagaaagaatagtagcgtgttacagcccctggggac

SEQ ID NO: 130036 - DNA, 58 bp, Artificial
  Synthetic oligonucleotide
ggggttgaaggtggtatgtgataggaagggaaacaggtctatagtttcagtcccaagt

SEQ ID NO: 130037 - DNA, 60 bp, Artificial
  Synthetic oligonucleotide
ggcccaggaatcaggtaccagtataatgttcttccacagggatggaaaggctctccggca

SEQ ID NO: 130038 - DNA, 60 bp, Artificial
  Synthetic oligonucleotide
ggggagtggtcaaccctcagatgctgcatataagcagctgcttttcgcctgtactcggtc

SEQ ID NO: 130039 - DNA, 60 bp, Artificial
  Synthetic oligonucleotide
cccggaacaccaggtcacctgggaccccatcgatggacgcgttatcggatcaactctaca

SEQ ID NO: 130040 - DNA, 60 bp, Artificial
  Synthetic oligonucleotide
ccaggcgcaactaaattcatggggatgtgcatttagacaagtctgccacactactgtacc

SEQ ID NO: 130041 - DNA, 60 bp, Artificial
  Synthetic oligonucleotide
cttgggcttgcagcgatgtgtaaaaatgtataaccctgtcaatattttgggcatcaaaca

SEQ ID NO: 130042 - DNA, 60 bp, Artificial
  Synthetic oligonucleotide
gaacactctttatccctccctgtcatctctctttggggaagaccaatgagagaagtctcc

SEQ ID NO: 130043 - DNA, 60 bp, Artificial
  Synthetic oligonucleotide
tctttatccctccctgtcatctctctttggggaagaccaatgagagaagtctccatgggg

SEQ ID NO: 130044 - DNA, 52 bp, Artificial
  Synthetic oligonucleotide
ggggacaagtggtgtccatgttattagacacaggggcggacgacaccatcgt

SEQ ID NO: 130045 - DNA, 60 bp, Artificial
  Synthetic oligonucleotide
tgctcaatgctataggagattatcaaggggcagtacagattattaaagatgtcatcaatg

SEQ ID NO: 130046 - DNA, 60 bp, Artificial
  Synthetic oligonucleotide
cgctgttggagactatcaaggagcagtacagattattaaagatgtcatcaatgaacaggc

SEQ ID NO: 130047 - DNA, 60 bp, Artificial
  Synthetic oligonucleotide
ggcaccccaaccagtagcagggcttagagaccctagcggagcagacatagcaggagtaac

SEQ ID NO: 130048 - DNA, 60 bp, Artificial
  Synthetic oligonucleotide
agcacctcaaccggtggcagggcttagagaccctagcggagcagacatagcaggagttac

SEQ ID NO: 130049 - DNA, 60 bp, Artificial
  Synthetic oligonucleotide
ggagcggaagaagcgcctaaccgcaaaccgcttcctatagaactctgctcgggactttcc

SEQ ID NO: 130050 - DNA, 60 bp, Artificial
  Synthetic oligonucleotide
agtggctctaccccgctatccagcataaaagcagacgctctgtagcgactcttcggagtc

SEQ ID NO: 130051 - DNA, 60 bp, Artificial
  Synthetic oligonucleotide
gggacaagtggtgtccatgttattagacacaggggcggacgataccattgtccaagaatc

SEQ ID NO: 130052 - DNA, 60 bp, Artificial
  Synthetic oligonucleotide
ggagaatgttaatagatttcaggaaattgaatgaggctacgcaagacttggctgaggtcc

SEQ ID NO: 130053 - DNA, 60 bp, Artificial
  Synthetic oligonucleotide
tgccacgatgggcgcagcggcaacagcgctgacggtacaatcccggtcattgttggctgg

SEQ ID NO: 130054 - DNA, 54 bp, Artificial
  Synthetic oligonucleotide
ctcacaggattctcgagtctcttgtgggacgacctgaggagtctggtaatttgg

SEQ ID NO: 130055 - DNA, 60 bp, Artificial
  Synthetic oligonucleotide
ggagcggaagatgcgcctaaccgcaaaccgcttcctatagaactctgcccgggactttcc

SEQ ID NO: 130056 - DNA, 58 bp, Artificial
  Synthetic oligonucleotide
caaatgggactccctttggagttggtttgatatttccgattggcagaggtacattaag

SEQ ID NO: 130057 - DNA, 60 bp, Artificial
  Synthetic oligonucleotide
ttaatatgcttagaaggattaggcagggctactcacctctctccccgcagatccttatcc

SEQ ID NO: 130058 - DNA, 60 bp, Artificial
  Synthetic oligonucleotide
taatatgcttagaagggttaggcagggctactcacctctctccccgcagatccttacccc

SEQ ID NO: 130059 - DNA, 60 bp, Artificial
  Synthetic oligonucleotide
gaacctgctgagggctgtagaggcccaacagagcttattacagctatctgtatggggcat

SEQ ID NO: 130060 - DNA, 60 bp, Artificial
  Synthetic oligonucleotide
ggatagggcagaatgggagcgaggcactcggcgatgctgacgggtactaagttggatagg

SEQ ID NO: 130061 - DNA, 51 bp, Artificial
  Synthetic oligonucleotide
aaaagaagtaacagactcccaccagaggatagggcagaatgggagcgaggc

SEQ ID NO: 130062 - DNA, 60 bp, Artificial
  Synthetic oligonucleotide
cccacacagaggggagaaactgtgaaagaggagtaacagactcccaccagaggatagggc

SEQ ID NO: 130063 - DNA, 60 bp, Artificial
  Synthetic oligonucleotide
cgcagccccttgaagagaaggtaaggagaccggacgggtctagaagggtggcagacttct

SEQ ID NO: 130064 - DNA, 60 bp, Artificial
  Synthetic oligonucleotide
cagtgacttcaagctcgcaggcgggacccaaggattgcccctggccgagtggtccggctc

SEQ ID NO: 130065 - DNA, 60 bp, Artificial
  Synthetic oligonucleotide
accagatccatcgcagtggcgcccgaacaggggcttgaagcatcccagtgacttcaagct

SEQ ID NO: 130066 - DNA, 60 bp, Artificial
  Synthetic oligonucleotide
gtggtagaaattacctccctaggagaacagcaatggggatacatgttcagtcaggacagc

SEQ ID NO: 130067 - DNA, 60 bp, Artificial
  Synthetic oligonucleotide
tagaaaattaaatgaggctacgcaagacttggctgaggtccagttgggaattccgcaccc

SEQ ID NO: 130068 - DNA, 60 bp, Artificial
  Synthetic oligonucleotide
cacagaattagaaacacaacacttaaacacacaaaattccaaatttcaaaaatttcgggt

SEQ ID NO: 130069 - DNA, 60 bp, Artificial
  Synthetic oligonucleotide
gctggtgggcagacatacaacacaccacaggggtgccatacaacccgcaaagtcaagggg

SEQ ID NO: 130070 - DNA, 60 bp, Artificial
  Synthetic oligonucleotide
cagttgtgttttctaaggaagggactaggtctttcccttcatggcagatcccgcaaacgg

SEQ ID NO: 130071 - DNA, 60 bp, Artificial
  Synthetic oligonucleotide
ccgatccagattggacagtggatcaggcagcaatagcatgtgcaatagattacatcaggg

SEQ ID NO: 130072 - DNA, 53 bp, Artificial
  Synthetic oligonucleotide
aaaatgtgtcaagtcctccttccaaccggttcccatacactactgtgctccac

SEQ ID NO: 130073 - DNA, 60 bp, Artificial
  Synthetic oligonucleotide
caaaagtgtgtcaagacctccttccaaccggttcccatacactactgtgctccgcccggc

SEQ ID NO: 130074 - DNA, 60 bp, Artificial
  Synthetic oligonucleotide
tcattgggcatatccttcttgacgtttctcagtgcggcaggtgccacgatgggcgcagcg

SEQ ID NO: 130075 - DNA, 60 bp, Artificial
  Synthetic oligonucleotide
ttcattgggaatatccttcttgacgtttctcagtgcggcaggtaccacgatgggcgcagc

SEQ ID NO: 130076 - DNA, 60 bp, Artificial
  Synthetic oligonucleotide
ggcaggtgccacgatgggcgcagcggcaacagcgctgacggtacaatcccggtcattgtt

SEQ ID NO: 130077 - DNA, 60 bp, Artificial
  Synthetic oligonucleotide
tgaaggcagtaagggcggcaggaacaaaccacgacggagagctcctagaaaggcgcgggc

SEQ ID NO: 130078 - DNA, 60 bp, Artificial
  Synthetic oligonucleotide
aggcagtaagggcggcaggaacaaaccacgacggagtgctcctgtaaaggcgcgggcgaa

SEQ ID NO: 130079 - DNA, 60 bp, Artificial
  Synthetic oligonucleotide
ggtctttgttggctgggatagtgcagcaacaggctaatctgttgagagccgtagaagccc

SEQ ID NO: 130080 - DNA, 60 bp, Artificial
  Synthetic oligonucleotide
gtcccggtctttgttggctgggatagtgcagcaacaggctaatctgttgagggccgtaga

SEQ ID NO: 130081 - DNA, 54 bp, Artificial
  Synthetic oligonucleotide
caggtagagcctgggtgttccctgctagactctcaccagcacttggccagtgct

SEQ ID NO: 130082 - DNA, 60 bp, Artificial
  Synthetic oligonucleotide
gatgaaactgaacaattttgaacttcctgatgagtgcggaagatatgtgtctaagttggc

SEQ ID NO: 130083 - DNA, 60 bp, Artificial
  Synthetic oligonucleotide
gcaccgattcatgaaccgcagaactggaagccagcaactgttgacgatttcacttgcaga

SEQ ID NO: 130084 - DNA, 60 bp, Artificial
  Synthetic oligonucleotide
ccagaccccgaggtagaattggctacagtgttggaaatttgtgggttggaatcaggtagg

SEQ ID NO: 130085 - DNA, 60 bp, Artificial
  Synthetic oligonucleotide
ccgaggtttatgtcgttttgatggattatgtccctgggaactcactggctggaattgttg

SEQ ID NO: 130086 - DNA, 60 bp, Artificial
  Synthetic oligonucleotide
ctacttgccaagacttctatctcggtctggctcgttaatctttaaaacctattgccaccg

SEQ ID NO: 130087 - DNA, 60 bp, Artificial
  Synthetic oligonucleotide
caacaaaatcagagatgacgcatctggaaatttgaagattgaaagttatcccaatccgca

SEQ ID NO: 130088 - DNA, 60 bp, Artificial
  Synthetic oligonucleotide
gcagctacaacctgggatctgtccctgaaggcggaatctctctatctccagatgacaccg

SEQ ID NO: 130089 - DNA, 60 bp, Artificial
  Synthetic oligonucleotide
tttcaatctcacttcagggttttcagagaggccgcatgtaccatcggacagtaaactctt

SEQ ID NO: 130090 - DNA, 57 bp, Artificial
  Synthetic oligonucleotide
ctttgggctctaaaagcggaatcctacttcccaacggccagtggttttctatcgtgg

SEQ ID NO: 130091 - DNA, 60 bp, Artificial
  Synthetic oligonucleotide
caatcggaatgtgcagggcatagtccaccatcatatatcatgtaatgagtgcctgaggga

SEQ ID NO: 130092 - DNA, 60 bp, Artificial
  Synthetic oligonucleotide
ttattcgaaactcccataggacccctccatcttaccctctgagcaaatgggatctcgggg

SEQ ID NO: 130093 - DNA, 60 bp, Artificial
  Synthetic oligonucleotide
cgatccagatcactcatcgaaggaatgtggcccttctgaagaaaccaagagagacactcg

SEQ ID NO: 130094 - DNA, 60 bp, Artificial
  Synthetic oligonucleotide
aggagacgggtcaggaggtcttactgccatgtgtctcagatggaatcgattcagcagagg

SEQ ID NO: 130095 - DNA, 60 bp, Artificial
  Synthetic oligonucleotide
cgaccaagtctgatgtttcagagctcatcgccggatgggttaaaagatattctgggcccc

SEQ ID NO: 130096 - DNA, 60 bp, Artificial
  Synthetic oligonucleotide
acttgctggcaacacccgtctgatctcactgacaagtccacgtggaactattttgtggat

SEQ ID NO: 130097 - DNA, 60 bp, Artificial
  Synthetic oligonucleotide
ggtcgctttgacagagggttgacaccgtccgttctctcatctcggagcaatctgctgacc

SEQ ID NO: 130098 - DNA, 60 bp, Artificial
  Synthetic oligonucleotide
ggctcagggtgacaatcaggttatgaattcccactacaaacttcctgcttatcggactga

SEQ ID NO: 130099 - DNA, 60 bp, Artificial
  Synthetic oligonucleotide
tccaggctctccaggcttttgactcctggccaaatgacccaaattattgcaagttggtcg

SEQ ID NO: 130100 - DNA, 60 bp, Artificial
  Synthetic oligonucleotide
ggtcaaggactccacggcaacggttgaagatgacttatggatgacaacttatctcttggc

SEQ ID NO: 130101 - DNA, 60 bp, Artificial
  Synthetic oligonucleotide
tggagcaaatcaccgaagacaactctgatgactggacctcgttcggagttcaaatcctca

SEQ ID NO: 130102 - DNA, 60 bp, Artificial
  Synthetic oligonucleotide
cctgagtacccgggagatgcgtttaagaagtctcggaacaaaccaacgttgactaggcca

SEQ ID NO: 130103 - DNA, 60 bp, Artificial
  Synthetic oligonucleotide
catcttttggaatactcggtcagcccaaataaaacgaaattgggagcagagcggcttcgg

SEQ ID NO: 130104 - DNA, 60 bp, Artificial
  Synthetic oligonucleotide
ctgcattcttggtgggtccgcgaacttttaagttcgtgttggcctatctgctgggttatt

SEQ ID NO: 130105 - DNA, 60 bp, Artificial
  Synthetic oligonucleotide
ttcgttgagcccatttgcaaccttagaatgacccagctagctaataaacatcgtccatta

SEQ ID NO: 130106 - DNA, 60 bp, Artificial
  Synthetic oligonucleotide
gaggttgggtatgtggtggcttgggatgtcagttatctgtcagcaccggcgttgagtccg

SEQ ID NO: 130107 - DNA, 60 bp, Artificial
  Synthetic oligonucleotide
cggttgggagtctgatgatgtccagacgctcaatcaatgctcgtcatttggaggccccag

SEQ ID NO: 130108 - DNA, 60 bp, Artificial
  Synthetic oligonucleotide
gattggattctggtgttgcccaatggactcatactgaataagaactttgtgctgatgatc

SEQ ID NO: 130109 - DNA, 60 bp, Artificial
  Synthetic oligonucleotide
ggctcgtttggctcctgagattccgggtgtcgctcatgtgtatcaactcacgtccgatgg

SEQ ID NO: 130110 - DNA, 60 bp, Artificial
  Synthetic oligonucleotide
gcctccccagctacgactcagagacgacaactcctggagctctgtcaacttatcgcagac

SEQ ID NO: 130111 - DNA, 60 bp, Artificial
  Synthetic oligonucleotide
caacgggcagtcatgctccgctggttcagcttcgggtccaatgagggatcagaagttgca

SEQ ID NO: 130112 - DNA, 60 bp, Artificial
  Synthetic oligonucleotide
aagaccaacctggggtccgtgtgggtggagttcagatcgtcagtggaggagaggctgaag

SEQ ID NO: 130113 - DNA, 60 bp, Artificial
  Synthetic oligonucleotide
cgccggcgcagacgcaggttcgagatgccttgtttgatgaaacaatggtgacggtgacag

SEQ ID NO: 130114 - DNA, 60 bp, Artificial
  Synthetic oligonucleotide
ccgagcagccgtgcccttcgcagatgacgaatacggagacttcaaaagagccagagagcg

SEQ ID NO: 130115 - DNA, 60 bp, Artificial
  Synthetic oligonucleotide
ttgaggatgttgggtatttgatttctgtgttgtatttagatccatctcttggaggagtct

SEQ ID NO: 130116 - DNA, 60 bp, Artificial
  Synthetic oligonucleotide
cctgaatttgtcagactgcgcagagacccaagaggccaaagttccaactgcagaattcac

SEQ ID NO: 130117 - DNA, 60 bp, Artificial
  Synthetic oligonucleotide
gctgcaaagttgagaaatgcgatcaattggtttgtcaggtctgactcattactggcgaga

SEQ ID NO: 130118 - DNA, 60 bp, Artificial
  Synthetic oligonucleotide
atgttgggattaaatacctggtgcaagtgaggaaggaaaggacaaccccaggcccatgga

SEQ ID NO: 130119 - DNA, 60 bp, Artificial
  Synthetic oligonucleotide
ccctttcgagatgctggggaaggtgtgttatctatttcgtgggtcgggttgtgaatgtcc

SEQ ID NO: 130120 - DNA, 60 bp, Artificial
  Synthetic oligonucleotide
ggattttggagacaaatggcacacattgccccttacacagtgctttgacatcccagatct

SEQ ID NO: 130121 - DNA, 60 bp, Artificial
  Synthetic oligonucleotide
cggctgacacatattgtcccagagctctttgttcggtctttggggagataccatcttccc

SEQ ID NO: 130122 - DNA, 60 bp, Artificial
  Synthetic oligonucleotide
gaaaccagaatctctcaatataccgtcctccttatcagctcagattttgatcagaaccga

SEQ ID NO: 130123 - DNA, 60 bp, Artificial
  Synthetic oligonucleotide
tatggcatgcaagccgaggaacacctgattcgattcttatacagcatcaaacctctgttc

SEQ ID NO: 130124 - DNA, 60 bp, Artificial
  Synthetic oligonucleotide
gaatccaagaagtggtctcgagtcaactgcgtaacaaatgatcagttgcccacattcggc

SEQ ID NO: 130125 - DNA, 60 bp, Artificial
  Synthetic oligonucleotide
tttaaggggttgacgatggccgatgatatgaccggagtcatcaagaaactgctagagtgc

SEQ ID NO: 130126 - DNA, 60 bp, Artificial
  Synthetic oligonucleotide
ctctgagaccataaagtggatagaatggactagaactgatgatggcttactcaacggacc

SEQ ID NO: 130127 - DNA, 60 bp, Artificial
  Synthetic oligonucleotide
atacagcaaattccctacgaagagggtcctgacaacttttttgactgagccggcacgtga

SEQ ID NO: 130128 - DNA, 60 bp, Artificial
  Synthetic oligonucleotide
ccggaattcattggatcgagggagcagtacagaaactctttattgtcgtagttgcgaccg

SEQ ID NO: 130129 - DNA, 60 bp, Artificial
  Synthetic oligonucleotide
aaaagtgggagtagttgctacatgaaaaaaacaactgggagtcatcatggagtcctggcc

SEQ ID NO: 130130 - DNA, 60 bp, Artificial
  Synthetic oligonucleotide
gactacaatctgaacaatcctctcctgagtgatggcttaacagcgttttgtcgatacttg

SEQ ID NO: 130131 - DNA, 60 bp, Artificial
  Synthetic oligonucleotide
gcccaaaattattgacgacgaattggcccaagctttaggtagtgatttagcatatctggt

SEQ ID NO: 130132 - DNA, 60 bp, Artificial
  Synthetic oligonucleotide
gcgatacgccatcatgatgagtcggatgctgggagagtcctactacaagtcgtacggact

SEQ ID NO: 130133 - DNA, 60 bp, Artificial
  Synthetic oligonucleotide
gtgttcgaggctctaggagatttgtttgggatggagaacttgtacaacgagacttatgac

SEQ ID NO: 130134 - DNA, 66 bp, Artificial
  Synthetic oligonucleotide
ggataagttccatttgatttgattgtaataaaacgtctagaatcaatgtctgctaaactcaactgg

SEQ ID NO: 130135 - DNA, 60 bp, Artificial
  Synthetic oligonucleotide
gcgaaatcaactgagtcctatgtagccgggctggcacagataagaaatcggtttgctgcg

SEQ ID NO: 130136 - DNA, 60 bp, Artificial
  Synthetic oligonucleotide
ggccacaagtgtagcagtgctcaggagggttaaaggacctgcattcataggctgcatgga

SEQ ID NO: 130137 - DNA, 60 bp, Artificial
  Synthetic oligonucleotide
acaaaactttctcaatcccagaatccttcaatctctctatgatagtggcagacaagagcg

SEQ ID NO: 130138 - DNA, 60 bp, Artificial
  Synthetic oligonucleotide
cccaattggacttaacgaagaaaacttacagcacggtcaaaaatcaggcagcaaaaatca

SEQ ID NO: 130139 - DNA, 59 bp, Artificial
  Synthetic oligonucleotide
aaaagttccctgatgatcacaaaattatcggattgaggtcgaaagagcgagaaatgaac

SEQ ID NO: 130140 - DNA, 60 bp, Artificial
  Synthetic oligonucleotide
gcatagggtatatagtgagctcggtcaatacactgcatcccgttagtcaactagggatcc

SEQ ID NO: 130141 - DNA, 60 bp, Artificial
  Synthetic oligonucleotide
cctctgatcgcaaaggggctgagggaagtgttgagggaaaacaggacttggggattgaag

SEQ ID NO: 130142 - DNA, 60 bp, Artificial
  Synthetic oligonucleotide
catttgtcacgggaaagtttggtattgggaccctctgaagagttatgtggatgagggaat

SEQ ID NO: 130143 - DNA, 60 bp, Artificial
  Synthetic oligonucleotide
gttcgaggaagtttagagggagaaacacacgaatattctcagaagacgccaaagcctcta

SEQ ID NO: 130144 - DNA, 60 bp, Artificial
  Synthetic oligonucleotide
cgcacaaacacagagccacacgacagtcaagcgacatggatctgaatgatcaattactag

SEQ ID NO: 130145 - DNA, 60 bp, Artificial
  Synthetic oligonucleotide
cgttgctgcgtctgtcagtaagaaggtctctgctcagggcgcaaacggtgaccctatgga

SEQ ID NO: 130146 - DNA, 59 bp, Artificial
  Synthetic oligonucleotide
ggggttaaaaggtttaaaagcggtgtatgcaattagaaccaaggacctgatcagaagat

SEQ ID NO: 130147 - DNA, 60 bp, Artificial
  Synthetic oligonucleotide
tgacattggatgtgacagaggcagaatgtgttgccgtcatgcgctcccagtgccccacac

SEQ ID NO: 130148 - DNA, 60 bp, Artificial
  Synthetic oligonucleotide
gaacaagcaaggtgttgagcaacatgtggcctgggcggatcataacatctacgttactgg

SEQ ID NO: 130149 - DNA, 60 bp, Artificial
  Synthetic oligonucleotide
ccgtgcaagatggtttctaagatcactctgctctgcttcgcaatcacctgtgacgtcttg

SEQ ID NO: 130150 - DNA, 60 bp, Artificial
  Synthetic oligonucleotide
caatcaggagacgatgacaatagagaatgcactcaacaccatagccgggaatgctcaagc

SEQ ID NO: 130151 - DNA, 60 bp, Artificial
  Synthetic oligonucleotide
ttctccagtgctgatacagttatccttcgttctcctaatgctggcaccaatcctgatggt

SEQ ID NO: 130152 - DNA, 60 bp, Artificial
  Synthetic oligonucleotide
ctagcaaagcaagtgaggaggatagggtgggggaaagagctgatcggtgttacagtggca

SEQ ID NO: 130153 - DNA, 60 bp, Artificial
  Synthetic oligonucleotide
ccctgaagcaaagatatccatgacccttgaacatgtcccagccaaatcatgggaattcgg

SEQ ID NO: 130154 - DNA, 60 bp, Artificial
  Synthetic oligonucleotide
aaggacctgttggagttggctgcaaagagtcaggggattgtggttactgatgtgatgcag

SEQ ID NO: 130155 - DNA, 60 bp, Artificial
  Synthetic oligonucleotide
gagggtaatagggtggtttgtcccagaggaaagcgagactgcaaagatcattatgtcatg

SEQ ID NO: 130156 - DNA, 60 bp, Artificial
  Synthetic oligonucleotide
caggtagcatctagtgggataaaagggacatcggaggagttggtttcaaagatgaaagcc

SEQ ID NO: 130157 - DNA, 60 bp, Artificial
  Synthetic oligonucleotide
tattctacccgatatcatgtttcaacagacacattcacacgatatgccaaaggagcccag

SEQ ID NO: 130158 - DNA, 60 bp, Artificial
  Synthetic oligonucleotide
cccgaggagccgatcaaattgacaaagagccagagttctcgtatagagcatgggaaagtg

SEQ ID NO: 130159 - DNA, 60 bp, Artificial
  Synthetic oligonucleotide
aacaactctgtgaacacggtcactgtagactactgtctagtccttgctgtgtcaatcccc

SEQ ID NO: 130160 - DNA, 60 bp, Artificial
  Synthetic oligonucleotide
gcagctctgatgagattcccacggaaccaatggagaagaagataacggagtgggcgcctc

SEQ ID NO: 130161 - DNA, 60 bp, Artificial
  Synthetic oligonucleotide
ggagatgcatgagcttatctgattggaagacaccaaccacggaagctatatcaagagccg

SEQ ID NO: 130162 - DNA, 60 bp, Artificial
  Synthetic oligonucleotide
caagctcattgttagggtttcaaccagagggagataaagagacaactgtattcgctgctg

SEQ ID NO: 130163 - DNA, 60 bp, Artificial
  Synthetic oligonucleotide
gattcagttattcggcctacacaggatctggggtcatccgctggtggatccggcaaaagg

SEQ ID NO: 130164 - DNA, 60 bp, Artificial
  Synthetic oligonucleotide
aattgatggctcagggatacagggagaagcatggtgtttatccaaatgtcaaaggtaatg

SEQ ID NO: 130165 - DNA, 60 bp, Artificial
  Synthetic oligonucleotide
tacacgagcacacgggtatgaagtttagtgatttgctagtggagatggattgtccggcca

SEQ ID NO: 130166 - DNA, 60 bp, Artificial
  Synthetic oligonucleotide
ccaacctgctacgacatcatctgccagtaagatattcggcgacatggacctatggaatga

SEQ ID NO: 130167 - DNA, 60 bp, Artificial
  Synthetic oligonucleotide
ggcgaggaactggttttcagagacagagctttacgtggttgaccagaccctatccgactg

SEQ ID NO: 130168 - DNA, 60 bp, Artificial
  Synthetic oligonucleotide
ccctcatgatgattgggttagaatgcgagggatgcagaacttgctaatagtgatgaacgc

SEQ ID NO: 130169 - DNA, 60 bp, Artificial
  Synthetic oligonucleotide
tcttttctctgcctattgtggggtctgttctgccatataaaggatcgtatacaagactgt

SEQ ID NO: 130170 - DNA, 60 bp, Artificial
  Synthetic oligonucleotide
ggtttggtggatcatgaaagccagacggtcctccggcaaattgttgggctatcacaggag

SEQ ID NO: 130171 - DNA, 60 bp, Artificial
  Synthetic oligonucleotide
ggcgtacgacagtctagcaggagtgacaatagggaagagagcatcacggaaatggtcgga

SEQ ID NO: 130172 - DNA, 60 bp, Artificial
  Synthetic oligonucleotide
gcgtgatcacgttgccatcttccgttgatatcgtgttaaagttgcttgtgttgtgccctc

SEQ ID NO: 130173 - DNA, 60 bp, Artificial
  Synthetic oligonucleotide
cggcggggaatgtggctacactcagagttcttgtcgcagactcactaaatgctgtggatg

SEQ ID NO: 130174 - DNA, 60 bp, Artificial
  Synthetic oligonucleotide
gggacaggatgctagatgaatctgagtattgggctatcgattggatcccgtcaggtcctc

SEQ ID NO: 130175 - DNA, 60 bp, Artificial
  Synthetic oligonucleotide
ccctgagagctgattctgacatacttggacctggggcactccgatgtgagttcttgtttc

SEQ ID NO: 130176 - DNA, 60 bp, Artificial
  Synthetic oligonucleotide
gggatacaaagtatgatgataccaagtgtccgttcgattctttccaatcccatggatgcg

SEQ ID NO: 130177 - DNA, 60 bp, Artificial
  Synthetic oligonucleotide
cagtctcaaccgccactccagaagagagaatcaggcatgaaaaggaaaagctcctggccg

SEQ ID NO: 130178 - DNA, 60 bp, Artificial
  Synthetic oligonucleotide
cagttggcaatcccacatagccaaggagggaaggatgtccatcgagcctctgtctcaaga

SEQ ID NO: 130179 - DNA, 60 bp, Artificial
  Synthetic oligonucleotide
ccagatcctgtgtccttagcatatagccagttgttctcgtggggtgttccaaccggaggt

SEQ ID NO: 130180 - DNA, 60 bp, Artificial
  Synthetic oligonucleotide
tgaggcaagtcccattgtttgataaagaggatctggatgctatgaagagcgacacaacct

SEQ ID NO: 130181 - DNA, 60 bp, Artificial
  Synthetic oligonucleotide
ggctggaccattttcacggttgtgtgcttggactggatatgtaggaaacataactgcact

SEQ ID NO: 130182 - DNA, 60 bp, Artificial
  Synthetic oligonucleotide
ggatatgtcaagagcatcacgagcaaagtgacgaaatcatcaacaatcgtaagtttggcg

SEQ ID NO: 130183 - DNA, 60 bp, Artificial
  Synthetic oligonucleotide
actggcgctcattataaaattcggagtatattacatggaatgggaatccattacagggac

SEQ ID NO: 130184 - DNA, 60 bp, Artificial
  Synthetic oligonucleotide
ccattcaatgagatcttgttcaatcagctatgtcgtacagtggataatcatttgaaatgg

SEQ ID NO: 130185 - DNA, 60 bp, Artificial
  Synthetic oligonucleotide
ggctgtttcagtaaaaggaggatacaagcagaagtggagtactagaggtgatgggctccc

SEQ ID NO: 130186 - DNA, 51 bp, Artificial
  Synthetic oligonucleotide
gctgccttaaaatcatctgatagacctgcagatttattgaccattagcctt

SEQ ID NO: 130187 - DNA, 60 bp, Artificial
  Synthetic oligonucleotide
ccttgagactatgctacaaatattcggagtacccacaggtgtgtcccacgcggccgcctt

SEQ ID NO: 130188 - DNA, 60 bp, Artificial
  Synthetic oligonucleotide
ggttattcaaagagaggctaaaatcagaaacactgctgtcaaagtcttggcacaaggtga

SEQ ID NO: 130189 - DNA, 60 bp, Artificial
  Synthetic oligonucleotide
taccgattttccgtggagtgattagagggttagagaccaagagatggtcacgagtgactt

SEQ ID NO: 130190 - DNA, 61 bp, Artificial
  Synthetic oligonucleotide
gggtgctctcaatcaaatggtttctaataatgagaaaattatgactgcaatcaaaataggg

SEQ ID NO: 130191 - DNA, 60 bp, Artificial
  Synthetic oligonucleotide
acctgctgagcaatcctatcaagtcggcagatgtataggttttctatatggagacttggc

SEQ ID NO: 130192 - DNA, 60 bp, Artificial
  Synthetic oligonucleotide
ggggaagggaatccagagggacaattacaacaatccctgtttattatacgaccacccctt

SEQ ID NO: 130193 - DNA, 60 bp, Artificial
  Synthetic oligonucleotide
gagagccagttgctgccaagtgatacatagaagaagtctggctcatttgaagaggccggc

SEQ ID NO: 130194 - DNA, 60 bp, Artificial
  Synthetic oligonucleotide
gggaattggaagaatttagcacctgcagagcaatcctatcaagtcggcagatgtataggt

SEQ ID NO: 130195 - DNA, 60 bp, Artificial
  Synthetic oligonucleotide
agggcttatttgccacataggatggggaagacccctcccatgctcaatgtaccagagcac

SEQ ID NO: 130196 - DNA, 60 bp, Artificial
  Synthetic oligonucleotide
aggcaagagtcaaatattttctgtagactatgaaaaaaagtaacagatatcacaatctaa

SEQ ID NO: 130197 - DNA, 60 bp, Artificial
  Synthetic oligonucleotide
ctccggatgtatataaggtcactccagtgatgaacacacatccgtcccaatcagaagccg

SEQ ID NO: 130198 - DNA, 60 bp, Artificial
  Synthetic oligonucleotide
cagatatcatggataatctcacaaaagttcgtgagtatctcaagtcctactctcgtctag

SEQ ID NO: 130199 - DNA, 60 bp, Artificial
  Synthetic oligonucleotide
ggatcttggattattccctctgccaagaaacctggagcaaaatcggggcaggtcttccca

SEQ ID NO: 130200 - DNA, 60 bp, Artificial
  Synthetic oligonucleotide
ggagaaactttaacagtaatcaaaatgtctgttacagtcaagagaatcattgacagcaca

SEQ ID NO: 130201 - DNA, 60 bp, Artificial
  Synthetic oligonucleotide
aacatatgcaggcttcgggttcccagcttgggtcctacttttatttcagaaggatgggct

SEQ ID NO: 130202 - DNA, 60 bp, Artificial
  Synthetic oligonucleotide
cctcagtggatgtaagtctcattcaggacgttgagaggatcttggattattccctctgcc

SEQ ID NO: 130203 - DNA, 60 bp, Artificial
  Synthetic oligonucleotide
cattcctgatccttttgtaaaccttgagactatgctacaaatattcggagtacccacagg

SEQ ID NO: 130204 - DNA, 60 bp, Artificial
  Synthetic oligonucleotide
gtctcattcaggacgttgagaggatcttggattattccctctgccaagaaacctggagca

SEQ ID NO: 130205 - DNA, 60 bp, Artificial
  Synthetic oligonucleotide
ttacatggaatgggaatccattacagggacttcttaagttgtggagacggttccggcggg

SEQ ID NO: 130206 - DNA, 60 bp, Artificial
  Synthetic oligonucleotide
tacatagcagaggaatattcaatagtctgttagaattgtcagggtcagtcatgcgaggtg

SEQ ID NO: 130207 - DNA, 60 bp, Artificial
  Synthetic oligonucleotide
gcaccggattttggatgagcaaggagttttaatctacaagacttatggaacatatatttg

SEQ ID NO: 130208 - DNA, 60 bp, Artificial
  Synthetic oligonucleotide
cgtacttgaatcatgctgattacaacttgaattctcctctaattagtgatgatatcgaca

SEQ ID NO: 130209 - DNA, 60 bp, Artificial
  Synthetic oligonucleotide
ccttgacaggtattccctcccaattcattcctgatccttttgtaaaccttgagactatgc

SEQ ID NO: 130210 - DNA, 51 bp, Artificial
  Synthetic oligonucleotide
gagaaaagtcttatatactacaatggaagaccagacttgatgcgtgttcac

SEQ ID NO: 130211 - DNA, 60 bp, Artificial
  Synthetic oligonucleotide
ggaaccgatatgcaacttgaagctgatgaaattagcaagagaatcaaggcctttagtccc

SEQ ID NO: 130212 - DNA, 60 bp, Artificial
  Synthetic oligonucleotide
ggaaaaatggactgattcattcaaaattctcgcttatttgtgtcaaaagtttttggactt

SEQ ID NO: 130213 - DNA, 57 bp, Artificial
  Synthetic oligonucleotide
tttatggatcattcagacattggggtcatccttttatagattattacgctgggctgg

SEQ ID NO: 130214 - DNA, 60 bp, Artificial
  Synthetic oligonucleotide
cattaaaaagatgttagattcctcatccggccaaggattgaagtcatatgaggcaatttg

SEQ ID NO: 130215 - DNA, 60 bp, Artificial
  Synthetic oligonucleotide
ggaggatgcaaacggtgctatccatggtatgtagaatagacaacctgttctcagagcaag

SEQ ID NO: 130216 - DNA, 57 bp, Artificial
  Synthetic oligonucleotide
aatgttgggtccacaacatcgaaaagagactccttgtgcaccatgtaacacatcagg

SEQ ID NO: 130217 - DNA, 60 bp, Artificial
  Synthetic oligonucleotide
gtggacatgttcagctactcatgctgacaccttaagatacaaatcctggggccgtacagt

SEQ ID NO: 130218 - DNA, 60 bp, Artificial
  Synthetic oligonucleotide
gtatcatgaagaggatcggctcagaagtttcttatggtcaataaatcctctgttccctag

SEQ ID NO: 130219 - DNA, 60 bp, Artificial
  Synthetic oligonucleotide
gaggttcaagataagataccgggcttgcacagttctactttcaaatacgccatgttgtat

SEQ ID NO: 130220 - DNA, 60 bp, Artificial
  Synthetic oligonucleotide
aatgagtgtgaaaacagtggatctcacactggtgatttatggatcattcagacattgggg

SEQ ID NO: 130221 - DNA, 60 bp, Artificial
  Synthetic oligonucleotide
ggcacagccatacaagtcaaaatgcccaagagtcacaaggctattcaagcagacggttgg

SEQ ID NO: 130222 - DNA, 60 bp, Artificial
  Synthetic oligonucleotide
cctggcattccgactataaggtcaaagggctatgtgattctaacctcatttccatggaca

SEQ ID NO: 130223 - DNA, 60 bp, Artificial
  Synthetic oligonucleotide
agaagggcacagggttcagaagtaactactttgcttatgaaactggagacaaggcctgca

SEQ ID NO: 130224 - DNA, 60 bp, Artificial
  Synthetic oligonucleotide
ggaaagagaaagcaaagtcccactgattaaaagagctacacgtcttagagatgctatctc

SEQ ID NO: 130225 - DNA, 60 bp, Artificial
  Synthetic oligonucleotide
caggcaacgttgctctatgctcaaattaccaccactgttgcaagagacggatggaccacc

SEQ ID NO: 130226 - DNA, 60 bp, Artificial
  Synthetic oligonucleotide
cccgtacaatggatgccgacaagattgtattcaaagtcaataatcaggtggtctctttga

SEQ ID NO: 130227 - DNA, 60 bp, Artificial
  Synthetic oligonucleotide
gaggtcagtgacaaaccaagcgactcatctccactcaattacctaagcgaccaatgcaag

SEQ ID NO: 130228 - DNA, 60 bp, Artificial
  Synthetic oligonucleotide
tcctacatgaaaagtcagcacaacattcatgggtctctttaccatccacatatcgatgag

SEQ ID NO: 130229 - DNA, 60 bp, Artificial
  Synthetic oligonucleotide
gtccccagttttgcgagacttcatgacctgtataacagacctataacttattacttcaga

SEQ ID NO: 130230 - DNA, 60 bp, Artificial
  Synthetic oligonucleotide
atgacaaatggctacctttgtatctacttggcttatacagagtgggcagaacacaaatgc

SEQ ID NO: 130231 - DNA, 60 bp, Artificial
  Synthetic oligonucleotide
caaatacactccagatgataataccggaggattgacgactaatgcaccgccacaaggcag

SEQ ID NO: 130232 - DNA, 60 bp, Artificial
  Synthetic oligonucleotide
tgtgttggagataacaaatacactccagatgatagtaccggaggattgacgactaatgca

SEQ ID NO: 130233 - DNA, 60 bp, Artificial
  Synthetic oligonucleotide
atgacaaatggttgcctttgtatctacttggcttatacagagtgggcagaacacaaatgc

SEQ ID NO: 130234 - DNA, 60 bp, Artificial
  Synthetic oligonucleotide
tacactccagatgatagtaccggaggattgacgactaatgcaccgccacaaggcagagat

SEQ ID NO: 130235 - DNA, 60 bp, Artificial
  Synthetic oligonucleotide
caaatacactccagatgatagtaccggaggattgacgactaatgcaccgccacaaggcag

SEQ ID NO: 130236 - DNA, 60 bp, Artificial
  Synthetic oligonucleotide
gagaggcaatcctgctgtccaagacccatagggataactttatacttttcttaaaatccg

SEQ ID NO: 130237 - DNA, 60 bp, Artificial
  Synthetic oligonucleotide
gttccgagagagtgtgatttatctgtgttctggggagggcgatcttaggggagatcctgt

SEQ ID NO: 130238 - DNA, 60 bp, Artificial
  Synthetic oligonucleotide
ccctcttcagtggagagtgttggtgcggattggctggtgctctggggagacacttggaga

SEQ ID NO: 130239 - DNA, 60 bp, Artificial
  Synthetic oligonucleotide
ggacagtcctaactcctcataatcatactgacggcctgtccatcactctggggatcatcg

SEQ ID NO: 130240 - DNA, 60 bp, Artificial
  Synthetic oligonucleotide
gtccaattaagagcattcttacaagatgtgaatgacaaaggactcccggacaatgacaag

SEQ ID NO: 130241 - DNA, 60 bp, Artificial
  Synthetic oligonucleotide
cgttagagcgtgtggagaaggttccagtgatggtcgactcttgggagctgccagtgcaca

SEQ ID NO: 130242 - DNA, 60 bp, Artificial
  Synthetic oligonucleotide
cccagctttatctgaccctcaaatcgctcctgtcccaagtaacaatatcctctcttatag

SEQ ID NO: 130243 - DNA, 60 bp, Artificial
  Synthetic oligonucleotide
aagttaaatcgttgaagactggggaggtttactggtggatgccaacggagagtcatgtgt

SEQ ID NO: 130244 - DNA, 60 bp, Artificial
  Synthetic oligonucleotide
cccttggttgccagcctctaaaggaggggaattcgtggtgattccttgtcagagtgagcc

SEQ ID NO: 130245 - DNA, 60 bp, Artificial
  Synthetic oligonucleotide
ccactcagctgcaatcctgcctagagtgtcaggcgatagtgctggacaggccgtcccaaa

SEQ ID NO: 130246 - DNA, 60 bp, Artificial
  Synthetic oligonucleotide
cagcaaagaaggctaagtccggaactctgtgaagactgctttagcgagctgctgcgaggg

SEQ ID NO: 130247 - DNA, 60 bp, Artificial
  Synthetic oligonucleotide
ctgacaaatcctacggtgtctgcagatttcttctattccagcatctagaattggagggga

SEQ ID NO: 130248 - DNA, 60 bp, Artificial
  Synthetic oligonucleotide
gaaatacttaatttctgcaggttcaacagacgccggcacagcatacactctgtctcgagg

SEQ ID NO: 130249 - DNA, 60 bp, Artificial
  Synthetic oligonucleotide
ccagcattaggcaacgcttcggttcactttatggattggcctcggccaccctgaacgcca

SEQ ID NO: 130250 - DNA, 60 bp, Artificial
  Synthetic oligonucleotide
gtcgccttctctgcacgaataggtaatcatctcacctcatcatgcgtcggggaagtgaac

SEQ ID NO: 130251 - DNA, 60 bp, Artificial
  Synthetic oligonucleotide
gtggggtccgacatctgtgtcatggaaattgggaagcaaacactgtgggcacccgtccct

SEQ ID NO: 130252 - DNA, 60 bp, Artificial
  Synthetic oligonucleotide
caaggacgaccccactatagcctccgactgggctggagtgtgcaccgccatcactgcagg

SEQ ID NO: 130253 - DNA, 60 bp, Artificial
  Synthetic oligonucleotide
ccgtttggactccttaccttgggcagttgattgttatgacagcatccaggcggagataaa

SEQ ID NO: 130254 - DNA, 60 bp, Artificial
  Synthetic oligonucleotide
gagacccacaaatctcatgttcctgccgtactggctgggtaagagggaaaatgttctgca

SEQ ID NO: 130255 - DNA, 60 bp, Artificial
  Synthetic oligonucleotide
caccggagacatcagcggagggatcccgaactttctagtcactcccacgtcccacttctc

SEQ ID NO: 130256 - DNA, 60 bp, Artificial
  Synthetic oligonucleotide
cactatgttcagcccaagaacttgatgtgaaggtgttgcatgaaatcgccggggcaactc

SEQ ID NO: 130257 - DNA, 60 bp, Artificial
  Synthetic oligonucleotide
gagcatgacctgaagccttcttcatgttctcgcataaccgctcaacagtatcgggatctg

SEQ ID NO: 130258 - DNA, 59 bp, Artificial
  Synthetic oligonucleotide
acccaacacccaagatgtcaatccttgtaatcatccttattctcccaatcctcttcggc

SEQ ID NO: 130259 - DNA, 60 bp, Artificial
  Synthetic oligonucleotide
ggcattcaaccttaggaagccccatgaaaccgggaatgtctttatccacactgttccctc

SEQ ID NO: 130260 - DNA, 60 bp, Artificial
  Synthetic oligonucleotide
gaggcgtctggaagactggtgggagtctctgtgcacgggtccctttctggaattgttccg

SEQ ID NO: 130261 - DNA, 60 bp, Artificial
  Synthetic oligonucleotide
gcagaagatgagtggggacgccatattgccttcatccctcgttggcagcttgttgcatac

SEQ ID NO: 130262 - DNA, 60 bp, Artificial
  Synthetic oligonucleotide
ccaatgagacctacagtctattcgggaagaagaagaaccagaccgccggcactcatcttc

SEQ ID NO: 130263 - DNA, 60 bp, Artificial
  Synthetic oligonucleotide
cttcacatggatttcaaactccgtactcaggacctctccccgtgcaagctcattccctcc

SEQ ID NO: 130264 - DNA, 60 bp, Artificial
  Synthetic oligonucleotide
gtacctatcctgaacatttggagccctacttccactaaatggcaacaagaggtgcacggg

SEQ ID NO: 130265 - DNA, 60 bp, Artificial
  Synthetic oligonucleotide
tgcaacattcagggtgcgaatagttgagctactagagcaccaggaggggacggcattcct

SEQ ID NO: 130266 - DNA, 60 bp, Artificial
  Synthetic oligonucleotide
atccgctcgcatctcagtctgtgctggagttgtgtggcgctgtgcaaatatgggaaaaga

SEQ ID NO: 130267 - DNA, 60 bp, Artificial
  Synthetic oligonucleotide
acatggagactcccataattccctccagctccagccttgaccgctccggcaacagctcca

SEQ ID NO: 130268 - DNA, 60 bp, Artificial
  Synthetic oligonucleotide
cccgcggggtaaggtggacgatgtggtctacagctgcaggactagataaagttaccagga

SEQ ID NO: 130269 - DNA, 60 bp, Artificial
  Synthetic oligonucleotide
ggaagaaggtcttagcgtccccggagaaatgagcaaactagatccactcgctctaccatc

SEQ ID NO: 130270 - DNA, 60 bp, Artificial
  Synthetic oligonucleotide
gggacggccaaaatgtgtcaggcgaggaggagtcagggctgctgctttacctcatgttga

SEQ ID NO: 130271 - DNA, 60 bp, Artificial
  Synthetic oligonucleotide
gatctggtattcaaaggagaaatgtagtgactgcataactgagattaaggaccccgatcc

SEQ ID NO: 130272 - DNA, 60 bp, Artificial
  Synthetic oligonucleotide
ggtatggagcttgtagagggtcgtgctcgataacacgcaacaccacggacaacaccatgg

SEQ ID NO: 130273 - DNA, 60 bp, Artificial
  Synthetic oligonucleotide
gctcgcccagctccgtcggagatcatagacacagtagccccagccatccttgacaagatg

SEQ ID NO: 130274 - DNA, 60 bp, Artificial
  Synthetic oligonucleotide
gcctcgctgaacaaaaggcatgtccctcaaggggtgggagactatgctgatccaaggaac

SEQ ID NO: 130275 - DNA, 60 bp, Artificial
  Synthetic oligonucleotide
gatatgacaagacatcccatcttcaacaaggaatatcaaaaggctgttcgtcacttcggg

SEQ ID NO: 130276 - DNA, 60 bp, Artificial
  Synthetic oligonucleotide
cagattatcctgaccttgatcctgaagcattaacagtgttggacagcattcgagagggca

SEQ ID NO: 130277 - DNA, 60 bp, Artificial
  Synthetic oligonucleotide
taatcgggtcatatgaagccctcctagctgggatcatccaggcgagagataacccgcagg

SEQ ID NO: 130278 - DNA, 60 bp, Artificial
  Synthetic oligonucleotide
cccgacacttaagatgctacttaaagggcgccgaccatatgaaccagtgaagtcacctgt

SEQ ID NO: 130279 - DNA, 60 bp, Artificial
  Synthetic oligonucleotide
cggggagctgacccaggactcatgcaagttggcccagtgcacaatcaagagatttaccca

SEQ ID NO: 130280 - DNA, 60 bp, Artificial
  Synthetic oligonucleotide
ggtgggatgcactcatggaagaccttaacccagaacagattgcctgcgctcatggattgt

SEQ ID NO: 130281 - DNA, 60 bp, Artificial
  Synthetic oligonucleotide
gctacactgctcccataagtctccctaccatcacagaaggggtggataagaaggttcatc

SEQ ID NO: 130282 - DNA, 60 bp, Artificial
  Synthetic oligonucleotide
ctgccacagagagcgacgccaccctctctactgtcagtgcagccgttcagtctggggctg

SEQ ID NO: 130283 - DNA, 59 bp, Artificial
  Synthetic oligonucleotide
ggggtcaaggcggcatgtatgaaagagcggcatggaatacccttagtcttcattaagac

SEQ ID NO: 130284 - DNA, 60 bp, Artificial
  Synthetic oligonucleotide
tgggtcatccagggacgctgcaccttccagacatcatcatgcgagggttccctgatcctc

SEQ ID NO: 130285 - DNA, 60 bp, Artificial
  Synthetic oligonucleotide
gactaggggagctcactgaaagggagaaaatcatactagcaatcggtatacactgcggcg

SEQ ID NO: 130286 - DNA, 60 bp, Artificial
  Synthetic oligonucleotide
cacccgagcactcacagaagccgggtctcttcatcggacttatgctctcttacagtcccc

SEQ ID NO: 130287 - DNA, 54 bp, Artificial
  Synthetic oligonucleotide
tcattcccaaagaccatcccctggctccttatattgcaacacagacatggcccc

SEQ ID NO: 130288 - DNA, 60 bp, Artificial
  Synthetic oligonucleotide
accaagtgttgtgtcccacttatatgctgtcttctggcctcaataacgaaggactcaggt

SEQ ID NO: 130289 - DNA, 60 bp, Artificial
  Synthetic oligonucleotide
catgactgaaggccctacttgctggaatggtcaggatggaggattagaaggtctaaggca

SEQ ID NO: 130290 - DNA, 60 bp, Artificial
  Synthetic oligonucleotide
gggcgattctttgcactgatgtcttggaacctgagactgtactttgtgattaccgagaag

SEQ ID NO: 130291 - DNA, 60 bp, Artificial
  Synthetic oligonucleotide
gtcggactgttattatgtctgtatcgattgagcaagatagtcggtcagaacacagcaaac

SEQ ID NO: 130292 - DNA, 60 bp, Artificial
  Synthetic oligonucleotide
cctggacgtcagagctggtccaaaaggactttagattggcagattcgacttttcattggc

SEQ ID NO: 130293 - DNA, 60 bp, Artificial
  Synthetic oligonucleotide
cttcacaagactccacgagctctacaactctcctgtgacttattactttggaaagcagac

SEQ ID NO: 130294 - DNA, 60 bp, Artificial
  Synthetic oligonucleotide
cctgatgtccacaagtctgtgtcagatgtcgacctgggtctgcctcattggggtttctgg

SEQ ID NO: 130295 - DNA, 60 bp, Artificial
  Synthetic oligonucleotide
ccctgagctttccctctgcccctgttcctcgagccaaagtggtgtcatcttgggagtcct

SEQ ID NO: 130296 - DNA, 60 bp, Artificial
  Synthetic oligonucleotide
tggacctgttgaaggcggctgtgtttcctctccgacaccctttaatcagccgggaggcag

SEQ ID NO: 130297 - DNA, 60 bp, Artificial
  Synthetic oligonucleotide
cccgccattctagatgggaagaaaccagggatcaccttggggaaggcacctgatctaaac

SEQ ID NO: 130298 - DNA, 60 bp, Artificial
  Synthetic oligonucleotide
gtcattgcgaagaagggagagaaaatcaaccccagcgtgatcgtcgatatagttcgcact

SEQ ID NO: 130299 - DNA, 60 bp, Artificial
  Synthetic oligonucleotide
gcccctattccctcgtttcttgagtgagctcttcagctcttctttcctgggtattcctga

SEQ ID NO: 130300 - DNA, 60 bp, Artificial
  Synthetic oligonucleotide
gtgaatccagattataaggcaatccaccatctatcccgagcattcccaaatgtgacaggg

SEQ ID NO: 130301 - DNA, 60 bp, Artificial
  Synthetic oligonucleotide
ccgcttcagttagctctggaaacgagagtcggcatgattctgagagcatgcatgatccaa

SEQ ID NO: 130302 - DNA, 60 bp, Artificial
  Synthetic oligonucleotide
ggggagccgctttatgttgattcattgccggaagatatgagcagattgagaatagaggac

SEQ ID NO: 130303 - DNA, 60 bp, Artificial
  Synthetic oligonucleotide
gcctattagaagtgaacgacttgatggcatcaggcactcaccctttaccgccgtctgccc

SEQ ID NO: 130304 - DNA, 60 bp, Artificial
  Synthetic oligonucleotide
cagcaacggaaagaaggccatgaacgggtcacgcatctgcggattcaaggatgaaagggg

SEQ ID NO: 130305 - DNA, 60 bp, Artificial
  Synthetic oligonucleotide
agctcatcagaaggttccagggtttacctgtaccggggtcgtgaacgaggcagagacata

SEQ ID NO: 130306 - DNA, 60 bp, Artificial
  Synthetic oligonucleotide
cagccctctccctgccatcatgaatataccttgctttgttgtgattctcagcttagccac

SEQ ID NO: 130307 - DNA, 60 bp, Artificial
  Synthetic oligonucleotide
ctaatgccctgactgtagctcaacactctcaatcccttgtgaagcccatgcgagacttcc

SEQ ID NO: 130308 - DNA, 60 bp, Artificial
  Synthetic oligonucleotide
tgcagttcatgaccccgggtataacgacaactccctattccctgtgaacatctatggcaa

SEQ ID NO: 130309 - DNA, 60 bp, Artificial
  Synthetic oligonucleotide
gggccgatatgatcttgcagacccaacagtccccggatgatgaaaacacctcacttttat

SEQ ID NO: 130310 - DNA, 60 bp, Artificial
  Synthetic oligonucleotide
gagggctctatcactcaaagagtccatcaactggtttgtgtctcgggagtctaacttggc

SEQ ID NO: 130311 - DNA, 60 bp, Artificial
  Synthetic oligonucleotide
atcatattgtacatgaatgcgttggattgggaagaggagaagaccattctggccctgtgg

SEQ ID NO: 130312 - DNA, 60 bp, Artificial
  Synthetic oligonucleotide
cctgtgtcgactttacatctcaggggataggcttctctccagttgtgggaatgcaggata

SEQ ID NO: 130313 - DNA, 60 bp, Artificial
  Synthetic oligonucleotide
gtggtggatctactggttcaaagagctgagacgttccgtcctttaattcactcactgggg

SEQ ID NO: 130314 - DNA, 59 bp, Artificial
  Synthetic oligonucleotide
ccccggatctctgtctcagtgttgccttcctttgacccttctttcctctcaaggggccc

SEQ ID NO: 130315 - DNA, 60 bp, Artificial
  Synthetic oligonucleotide
ccagcaattcgacaatattcatgatttggtatttatttacggatgttaccggcactgggg

SEQ ID NO: 130316 - DNA, 60 bp, Artificial
  Synthetic oligonucleotide
ccgttactcgtaagttgaaatctctcctttctcattgtctaaatacttctgaacacaatc

SEQ ID NO: 130317 - DNA, 60 bp, Artificial
  Synthetic oligonucleotide
gacgacccgatagaccctgttgagccagaaggagaatggaatagcagtcccgtagttcca

SEQ ID NO: 130318 - DNA, 60 bp, Artificial
  Synthetic oligonucleotide
gtaggcctccaaatcagagtgagcgccagacaatgtcacatccagggtcgtctctggtgc

SEQ ID NO: 130319 - DNA, 60 bp, Artificial
  Synthetic oligonucleotide
tcggctctcagagtcggaacagtcgtgacagcctacgaggattgctcaggcttggtctcc

SEQ ID NO: 130320 - DNA, 60 bp, Artificial
  Synthetic oligonucleotide
ctcgcctgaattgctctcctagggacatgttaagagagacagaagcttgccttagaacct

SEQ ID NO: 130321 - DNA, 60 bp, Artificial
  Synthetic oligonucleotide
gaggccagagtagaggcttcgctcgctgatgacgggactgtagactcagatgaggaggac

SEQ ID NO: 130322 - DNA, 60 bp, Artificial
  Synthetic oligonucleotide
ccccgtactcgtccaatgctgtaggtcatactttcaatttaatccactttgtaggatgct

SEQ ID NO: 130323 - DNA, 60 bp, Artificial
  Synthetic oligonucleotide
cgagatccatgggataaacagggtgacacaaacccctcaacgactcgggagagtatggac

SEQ ID NO: 130324 - DNA, 60 bp, Artificial
  Synthetic oligonucleotide
gatgatttggagcttaagagaggagccccgtccaagatggccattataatcgccgttgcc

SEQ ID NO: 130325 - DNA, 60 bp, Artificial
  Synthetic oligonucleotide
cgtaggtatattgcggtgagttctaatcatcaagcgaggccgaactcttttgcagaattc

SEQ ID NO: 130326 - DNA, 60 bp, Artificial
  Synthetic oligonucleotide
gggttagtcaaagtggttatcgggcttgtactttcaggatctccagtcccggagggcatg

SEQ ID NO: 130327 - DNA, 60 bp, Artificial
  Synthetic oligonucleotide
gcccggctcgaggaggcagagtaaaggctgagaggacccataaaagaactcgaatttggc

SEQ ID NO: 130328 - DNA, 60 bp, Artificial
  Synthetic oligonucleotide
agactcagaagtatccatcagcatctgcgcctccagacgatgatgacatttggatgcccc

SEQ ID NO: 130329 - DNA, 60 bp, Artificial
  Synthetic oligonucleotide
ctgctaggtatagtgagggcggttactcagccgtgtgtcccaacctactgtcccacatat

SEQ ID NO: 130330 - DNA, 60 bp, Artificial
  Synthetic oligonucleotide
ccacctctctaaatccagcatctgcttctgacattgacctcagatctttatcacgtcagt

SEQ ID NO: 130331 - DNA, 60 bp, Artificial
  Synthetic oligonucleotide
agctttagaaggttgagccatttccgaaagttagttccaggatatgggaaggcctacact

SEQ ID NO: 130332 - DNA, 60 bp, Artificial
  Synthetic oligonucleotide
cctgagaaggacaagatgggtagatcaagaggtccgccatgcagctaagtcaatgacacc

SEQ ID NO: 130333 - DNA, 60 bp, Artificial
  Synthetic oligonucleotide
gaccctcgagaatgaatgtcacagagaacacaaccaggtcttacaaagtcttgagagcac

SEQ ID NO: 130334 - DNA, 60 bp, Artificial
  Synthetic oligonucleotide
cgagttgagggcagagatcttctccatccctcagaaagtgcctgcggcttacccgacgac

SEQ ID NO: 130335 - DNA, 60 bp, Artificial
  Synthetic oligonucleotide
ggagctcaggcaatgatggggctgtgggtcttggggtctcactcagaatcgtctcgaagc

SEQ ID NO: 130336 - DNA, 60 bp, Artificial
  Synthetic oligonucleotide
gactgtgactacaaccaaagaatcacttctcataatatcgcccagcatcgtggaaatgga

SEQ ID NO: 130337 - DNA, 60 bp, Artificial
  Synthetic oligonucleotide
ccgagtgctatcagagccggtctggccgatcttgagatggctgaagagactgttgatctg

SEQ ID NO: 130338 - DNA, 60 bp, Artificial
  Synthetic oligonucleotide
tacaatgttccggtgaattgtggagagcttcatccggtaaaagctcatgagatcaaatgt

SEQ ID NO: 130339 - DNA, 60 bp, Artificial
  Synthetic oligonucleotide
gcaatgactctggcaatcaagaaaagaatgaagttccgattaaacagagcagcctggaag

SEQ ID NO: 130340 - DNA, 60 bp, Artificial
  Synthetic oligonucleotide
tgattattggaatctaggagagacattaagcaaaatagtagaagatataagggaggttgg

SEQ ID NO: 130341 - DNA, 60 bp, Artificial
  Synthetic oligonucleotide
gaaagggcacagtgaatctgatcttagaagtcaacaatcgtttgagtttaaagaatttga

SEQ ID NO: 130342 - DNA, 60 bp, Artificial
  Synthetic oligonucleotide
ggagttatgaggagagaagataagtttacctacccatctcgctatatccttcaaacatta

SEQ ID NO: 130343 - DNA, 60 bp, Artificial
  Synthetic oligonucleotide
ttgctgttcacggaagttgggtgacaaatagtgaattctgtaaaattgcagccggcttcg

SEQ ID NO: 130344 - DNA, 60 bp, Artificial
  Synthetic oligonucleotide
ggattgacttaagcaaattttcgaacattattttgagagaagagagtatcgatatggtgc

SEQ ID NO: 130345 - DNA, 60 bp, Artificial
  Synthetic oligonucleotide
gcaggtttcaaaccgttttaagtatgaacgtttgcactgatgaatataaatacacggaag

SEQ ID NO: 130346 - DNA, 60 bp, Artificial
  Synthetic oligonucleotide
cagccaataccaattaacaatcttcattatctagctccatttgagccaggcaagcatcct

SEQ ID NO: 130347 - DNA, 60 bp, Artificial
  Synthetic oligonucleotide
tatcatcacatcagtcataatacttggcccacgcaacagattatagatgagtttggagat

SEQ ID NO: 130348 - DNA, 60 bp, Artificial
  Synthetic oligonucleotide
tcccagtcaacttggattaactaccctgagaattgcacatctatcagcctgcaagatgga

SEQ ID NO: 130349 - DNA, 66 bp, Artificial
  Synthetic oligonucleotide
cttacatcccgttagaaatatttaaaggtgataatcaggctagtattagacttgagttgattaagc

SEQ ID NO: 130350 - DNA, 60 bp, Artificial
  Synthetic oligonucleotide
gaagagccttattatcctcctccaaagtgtgattcctctaaatcttcagttagtgagctc

SEQ ID NO: 130351 - DNA, 60 bp, Artificial
  Synthetic oligonucleotide
ggggaggatgtcgtcaaaattatggaagaggggaatgaaatagatgatccctactcctac

SEQ ID NO: 130352 - DNA, 60 bp, Artificial
  Synthetic oligonucleotide
ggctcccacgagaccaggaagggattatgcatatttatttgagcaaacaagttggcaaga

SEQ ID NO: 130353 - DNA, 57 bp, Artificial
  Synthetic oligonucleotide
ttttgaggatggagaatggtggagtatagaaaaccaaacagaatctgacttccaaaa

SEQ ID NO: 130354 - DNA, 60 bp, Artificial
  Synthetic oligonucleotide
ctctaaaagacataaccggaacatggataccagatgtaagagtcgaagaaataagtgagc

SEQ ID NO: 130355 - DNA, 60 bp, Artificial
  Synthetic oligonucleotide
cccaattagtgtttcaacaggtctctttccttcatcatgtactgcacattgaataagaaa

SEQ ID NO: 130356 - DNA, 60 bp, Artificial
  Synthetic oligonucleotide
gactggatttcttttggtgttaatatcggaagacggaatcaagaaattaatgtttggaac

SEQ ID NO: 130357 - DNA, 60 bp, Artificial
  Synthetic oligonucleotide
gaaagtcttggatgtgatggtagatgagtatgatgggagttacttgtcaaaagccttgat

SEQ ID NO: 130358 - DNA, 65 bp, Artificial
  Synthetic oligonucleotide
gtctatcatgatgaaagagataagaatgaattgcagttcaacacaaaatcctatctaatacaggc

SEQ ID NO: 130359 - DNA, 60 bp, Artificial
  Synthetic oligonucleotide
ccaagatattaaaagacttgcatccacggttggttctccggagttgagtcccttcaagcc

SEQ ID NO: 130360 - DNA, 60 bp, Artificial
  Synthetic oligonucleotide
aaaagaagtgctaggtacaacagtgccacatcctgcggaaatgtttaagggatacagggg

SEQ ID NO: 130361 - DNA, 60 bp, Artificial
  Synthetic oligonucleotide
gggattgctccgcatctttggctgattcattaaggaaacgatcatggggaaaagaagtgc

SEQ ID NO: 130362 - DNA, 60 bp, Artificial
  Synthetic oligonucleotide
ccagtcctcaaaagagcatgtgatctgaggaaaagtattaactggtttgtaactccagac

SEQ ID NO: 130363 - DNA, 60 bp, Artificial
  Synthetic oligonucleotide
ggagaggttaattatgatttcatgtttcaatcaaccctggtttggtgtcaaatgtcttct

SEQ ID NO: 130364 - DNA, 56 bp, Artificial
  Synthetic oligonucleotide
attggtaattggactaaaggctaaggaaagagagcttaaagaagaagggaggtttt

SEQ ID NO: 130365 - DNA, 60 bp, Artificial
  Synthetic oligonucleotide
ggaataactatcaaagaattgaatccaatgggccggtgttcactgtgatgggacgatttt

SEQ ID NO: 130366 - DNA, 60 bp, Artificial
  Synthetic oligonucleotide
gggagtgaaagtgtgttgggaaggacaaaagggaggattagaaggtttgagacaaaaggg

SEQ ID NO: 130367 - DNA, 60 bp, Artificial
  Synthetic oligonucleotide
ccagagaaagtcactgagttttgcatcagggagtgcaagaaaattcaaaatgcacgtccc

SEQ ID NO: 130368 - DNA, 60 bp, Artificial
  Synthetic oligonucleotide
tggtctcgagttaactttacatccaatgatcaacttcccagcacttcaactgtcattaac

SEQ ID NO: 130369 - DNA, 60 bp, Artificial
  Synthetic oligonucleotide
gaaagaccccatgatgcaatcaatggacacttgctgttcggatctttgggtttattgctg

SEQ ID NO: 130370 - DNA, 60 bp, Artificial
  Synthetic oligonucleotide
ttttggaatgactttaagaggtggtctgaggataggaaagttgagatagtaatttggtgg

SEQ ID NO: 130371 - DNA, 60 bp, Artificial
  Synthetic oligonucleotide
agaagaatcatctgaccaagatcactcacaatcagtcaataaaacactagaaggcgatga

SEQ ID NO: 130372 - DNA, 60 bp, Artificial
  Synthetic oligonucleotide
actgtgcagaataatgactataaactaggttcaatcagggatctcagaattaaactgttc

SEQ ID NO: 130373 - DNA, 60 bp, Artificial
  Synthetic oligonucleotide
gatcaagtgagatagatatatgtgatattcccaagaaaatcagggtagtgcctacatgaa

SEQ ID NO: 130374 - DNA, 60 bp, Artificial
  Synthetic oligonucleotide
gggaagcccaaaggaggctcagtggatgataggaattcatcttatagagagtcagatcct

SEQ ID NO: 130375 - DNA, 60 bp, Artificial
  Synthetic oligonucleotide
atgaagagattagaagcatcaaaggtggaagtaaacaaactggtgatgataggttctttg

SEQ ID NO: 130376 - DNA, 60 bp, Artificial
  Synthetic oligonucleotide
ggttttcagtcaaagacaaaatggcattcatggggaactggattcgcttattacacagac

SEQ ID NO: 130377 - DNA, 60 bp, Artificial
  Synthetic oligonucleotide
cgccggcaggaggaagctccggaaataggctgaatgtaactctaaacggaatgatcttcg

SEQ ID NO: 130378 - DNA, 60 bp, Artificial
  Synthetic oligonucleotide
cgaggtaatggagtatgataatgtggaagagaacttgattaggtatgaggaggatgagaa

SEQ ID NO: 130379 - DNA, 60 bp, Artificial
  Synthetic oligonucleotide
cacggcaaaggcagtaagatggacaatttgggctgttggtgcaatagtcaccacatatgc

SEQ ID NO: 130380 - DNA, 60 bp, Artificial
  Synthetic oligonucleotide
gtgtttggtaagatctacatatctggtttgatgggaagagcaataggaaaacgtatggtt

SEQ ID NO: 130381 - DNA, 60 bp, Artificial
  Synthetic oligonucleotide
taagtcaaatgttgcaaaattctggcgtagatggggtggcaatgtcagcaatatctcaag

SEQ ID NO: 130382 - DNA, 61 bp, Artificial
  Synthetic oligonucleotide
ggacatgctaggacatttgttcacttctgttcaactaataaacaccaatttatctagtatg

SEQ ID NO: 130383 - DNA, 60 bp, Artificial
  Synthetic oligonucleotide
ggaatcccaggtaaataaagactgtcaagtcgacattcagtacgctaatttattggctag

SEQ ID NO: 130384 - DNA, 60 bp, Artificial
  Synthetic oligonucleotide
cgggactttatatgtggaggagacggatctggtggaatgacatcgtgtttactgagatta

SEQ ID NO: 130385 - DNA, 60 bp, Artificial
  Synthetic oligonucleotide
aaaagtttgcctcacaaaatacctacgagttatcctatgaatttaagtgatctgggaagc

SEQ ID NO: 130386 - DNA, 65 bp, Artificial
  Synthetic oligonucleotide
ggtgattcactgttaagtcacaaaaggaattatgagtttaagagtttattcccagtttcaattcg

SEQ ID NO: 130387 - DNA, 60 bp, Artificial
  Synthetic oligonucleotide
cgggactgaaaagctcggattgagaatcaatttggatgagaccatgacaagtgctgatta

SEQ ID NO: 130388 - DNA, 60 bp, Artificial
  Synthetic oligonucleotide
tcacgcgttgtgtcaggaggccgggaaccccgatcttggagagagaacactcgagagctt

SEQ ID NO: 130389 - DNA, 60 bp, Artificial
  Synthetic oligonucleotide
gcagttctttgaggggacatgtccggaagactggaccagctatggaatcctgattgcacg

SEQ ID NO: 130390 - DNA, 60 bp, Artificial
  Synthetic oligonucleotide
ctctggtggaaataaaacgcaatgatgtagaagggaattgggctctgacaggaggtatgg

SEQ ID NO: 130391 - DNA, 60 bp, Artificial
  Synthetic oligonucleotide
gaggggacatgtccggaagactggaccagctatggaatcgtgattgcacgaaaaggagat

SEQ ID NO: 130392 - DNA, 60 bp, Artificial
  Synthetic oligonucleotide
ctggggcaatgatgggaattacctgaagattgtggcctgtgtggacatgttttacgacca

SEQ ID NO: 130393 - DNA, 60 bp, Artificial
  Synthetic oligonucleotide
gatctagggtttggacctgggatagtgatgccgtctgtgtcggaccatgagggaggtaca

SEQ ID NO: 130394 - DNA, 60 bp, Artificial
  Synthetic oligonucleotide
taagcgaatccgaattccgtctgcactgtaatcacagccaaacagagcgagaaatggcct

SEQ ID NO: 130395 - DNA, 60 bp, Artificial
  Synthetic oligonucleotide
caggagacacatacagaaaaccgccgaaagaggcttcgtacctggtgagtgaggaaccga

SEQ ID NO: 130396 - DNA, 51 bp, Artificial
  Synthetic oligonucleotide
ttgttgctgcattatgccgctccaagagagcactgaacgcaagacagcctg

SEQ ID NO: 130397 - DNA, 60 bp, Artificial
  Synthetic oligonucleotide
caaaggttctaggaacaagcgtagattttacagattgatcatgttccgttgtgcgttaga

SEQ ID NO: 130398 - DNA, 60 bp, Artificial
  Synthetic oligonucleotide
gaccacgtgatatcaacacccaacaaaccaatcccgagcaagaaggttttagagaccatg

SEQ ID NO: 130399 - DNA, 60 bp, Artificial
  Synthetic oligonucleotide
gacaagagccattcgatgaacaggaaggaagtgattgaccacgtgatatccacacccaac

SEQ ID NO: 130400 - DNA, 60 bp, Artificial
  Synthetic oligonucleotide
ggtaccaacagtgtcttccgctcctagagactctgggacatgggtagaatagaaggggga

SEQ ID NO: 130401 - DNA, 60 bp, Artificial
  Synthetic oligonucleotide
gaagaggagtaaacggcctgcaacagaatcacacgaaatgcggtctttagtttgagagac

SEQ ID NO: 130402 - DNA, 60 bp, Artificial
  Synthetic oligonucleotide
gatgaggagtcctacttcccaacttcaaaattgagtgtcgaagaacgcatgcactattta

SEQ ID NO: 130403 - DNA, 60 bp, Artificial
  Synthetic oligonucleotide
catccattcatatcttactttgaggggctgcaaaagctccacgaccaggtgacgctgcct

SEQ ID NO: 130404 - DNA, 60 bp, Artificial
  Synthetic oligonucleotide
ctcacattgaagcattttgggagagccataccatcgttatggaaaattaagaattgggaa

SEQ ID NO: 130405 - DNA, 60 bp, Artificial
  Synthetic oligonucleotide
cggataagccaacaagcgaccggagcgcattacaaattgaggagccttctcaaggggatg

SEQ ID NO: 130406 - DNA, 60 bp, Artificial
  Synthetic oligonucleotide
ggagtcggcatcatcaagacctgggatcagatacatccatggatgggaaggtggttcgac

SEQ ID NO: 130407 - DNA, 60 bp, Artificial
  Synthetic oligonucleotide
gcactgtaatcacagccaaacagagcgagaaatggccttggttgggatcagactgaggag

SEQ ID NO: 130408 - DNA, 60 bp, Artificial
  Synthetic oligonucleotide
gaatcaagaagtcaaaaggtactcctcccacttacgaggagacactggcgactgcaccag

SEQ ID NO: 130409 - DNA, 60 bp, Artificial
  Synthetic oligonucleotide
catcatgagtgtcattcggatcaaaacaaatgctaccgttgctgccgtgcttccagctag

SEQ ID NO: 130410 - DNA, 60 bp, Artificial
  Synthetic oligonucleotide
ttgtgtcgatctggtcctctgcgggaagaattggagagaattccacacaagatgacgagt

SEQ ID NO: 130411 - DNA, 60 bp, Artificial
  Synthetic oligonucleotide
gccttatgatgattgcaatgcacaaccctgccattcggagtagtatgtacacaaagatgt

SEQ ID NO: 130412 - DNA, 60 bp, Artificial
  Synthetic oligonucleotide
ggtgtgatgtcttctgtttctaccaatgctcttacagttgcccactttgcagccagccca

SEQ ID NO: 130413 - DNA, 60 bp, Artificial
  Synthetic oligonucleotide
ccaaacgatggtccagagtcacctgcatcaccaatgatcagattccaactcttgcgggtg

SEQ ID NO: 130414 - DNA, 60 bp, Artificial
  Synthetic oligonucleotide
gcggactcatggttgaagacacacaacaaggggttatccatggaacatgtacgaagacat

SEQ ID NO: 130415 - DNA, 60 bp, Artificial
  Synthetic oligonucleotide
catcctctcaaagagcacgtggataatggaacatggcctactgcagcccaaattcaggat

SEQ ID NO: 130416 - DNA, 60 bp, Artificial
  Synthetic oligonucleotide
gcccctgacgaaatgcttcgaagttccagacctgctagacccgtctgtgatttactcaga

SEQ ID NO: 130417 - DNA, 60 bp, Artificial
  Synthetic oligonucleotide
ccaagatgcgatcggatgtggagacggttcaggagggctctccagttgtttgttacgaga

SEQ ID NO: 130418 - DNA, 60 bp, Artificial
  Synthetic oligonucleotide
aagtcctagatctgcacaaattgactctgttgattaattcagtagattccagtgagacag

SEQ ID NO: 130419 - DNA, 60 bp, Artificial
  Synthetic oligonucleotide
caagcagagagtgaactcacctcagaaataccagtgaccttcattaaaggctggattggg

SEQ ID NO: 130420 - DNA, 60 bp, Artificial
  Synthetic oligonucleotide
ggggatctctgccaaatcaccatactcaacaataaagaatccgtctttccacttctgggg

SEQ ID NO: 130421 - DNA, 60 bp, Artificial
  Synthetic oligonucleotide
cgactcagaacacaattgtccacaaggggagtcattcttacggacagtacaagcagagag

SEQ ID NO: 130422 - DNA, 60 bp, Artificial
  Synthetic oligonucleotide
aagattgctgggagattcttctccctgatgtcatggcaattgagggagtactttgtaatt

SEQ ID NO: 130423 - DNA, 60 bp, Artificial
  Synthetic oligonucleotide
gagggttcggatcaatattcagagtgagaaacggaacattagagagagggagcactactt

SEQ ID NO: 130424 - DNA, 60 bp, Artificial
  Synthetic oligonucleotide
ggatctgccatgcagctgaatggaaaacaacttgtgattacagatggtacggaccccaat

SEQ ID NO: 130425 - DNA, 60 bp, Artificial
  Synthetic oligonucleotide
ggacatttcctatgccagtagacgtggtgcctcgcgttccttccctgttcatgggagatt

SEQ ID NO: 130426 - DNA, 60 bp, Artificial
  Synthetic oligonucleotide
cgcaatttcttgctcatgatgaaagacaccttgattggacgactacaaacattgttatca

SEQ ID NO: 130427 - DNA, 60 bp, Artificial
  Synthetic oligonucleotide
gtgcaaaacatatagaggaagttgaaggaattatgtacgggaatgttccaagaggggatg

SEQ ID NO: 130428 - DNA, 60 bp, Artificial
  Synthetic oligonucleotide
cgttgtgcgttagaactcaagcatgtgtcgggaacatactctgttgacgggtcggccttg

SEQ ID NO: 130429 - DNA, 60 bp, Artificial
  Synthetic oligonucleotide
agcgatggtagagaacaatcagacgatcatgaatgggatcataacagggacaggaaaatt

SEQ ID NO: 130430 - DNA, 60 bp, Artificial
  Synthetic oligonucleotide
aggacacatgaattctttgagtcgagtctcatttattataacgggaggccggacctgatg

SEQ ID NO: 130431 - DNA, 60 bp, Artificial
  Synthetic oligonucleotide
acatacgggagttttggatatcctccatggaactggagatcgattagatcgttcggtgcc

SEQ ID NO: 130432 - DNA, 60 bp, Artificial
  Synthetic oligonucleotide
ctgcattttgatcagcgaatctgccatatgcactactagactatcaaacaaaagggaagt

SEQ ID NO: 130433 - DNA, 60 bp, Artificial
  Synthetic oligonucleotide
gaaaaatcctaccatatcggtagatgccaagggttcctgtatggggatctcacttatcag

SEQ ID NO: 130434 - DNA, 60 bp, Artificial
  Synthetic oligonucleotide
cttggataagagtctggtctaggatgaaagaccgagaaagaagatgggaagctagagaag

SEQ ID NO: 130435 - DNA, 60 bp, Artificial
  Synthetic oligonucleotide
ccgatcccgagcaagaaggttttagagaccatgataaacaaccctgcaacagactggcca

SEQ ID NO: 130436 - DNA, 60 bp, Artificial
  Synthetic oligonucleotide
ggactggttcagcattgcaccgattcacaacttcaagagtcagcaacggcggatttagtg

SEQ ID NO: 130437 - DNA, 55 bp, Artificial
  Synthetic oligonucleotide
ggggagaaattggatgttttaaggcaatatgtctatatgggactggtggagaaaa

SEQ ID NO: 130438 - DNA, 60 bp, Artificial
  Synthetic oligonucleotide
tctgatcaagacacattatgttccgctcttcaagggattaactatggctgatgatctcac

SEQ ID NO: 130439 - DNA, 60 bp, Artificial
  Synthetic oligonucleotide
ggtcatcaaaaagaactagagtgtataccttgtcaaacatctggactgacatatatatcc

SEQ ID NO: 130440 - DNA, 60 bp, Artificial
  Synthetic oligonucleotide
ctccttggctagattcctaattagatcttttccagatccagtgacagagggacttgcttt

SEQ ID NO: 130441 - DNA, 60 bp, Artificial
  Synthetic oligonucleotide
gctgcgacactgtatctggatccttcattaggaggagtttgtggcatttccttggctaga

SEQ ID NO: 130442 - DNA, 60 bp, Artificial
  Synthetic oligonucleotide
ctcccaccatgtcgtcaaggcaacgagctatggacaccacccatggggacttcatcgagc

SEQ ID NO: 130443 - DNA, 60 bp, Artificial
  Synthetic oligonucleotide
aagtccatcatcgactctgccaggaggattgtcaagctgatgaggatcgttgcagacgtc

SEQ ID NO: 130444 - DNA, 60 bp, Artificial
  Synthetic oligonucleotide
ggattggggcagcggtaagaccggggcagaagttaaccaaggccatctacgggatcattc

SEQ ID NO: 130445 - DNA, 60 bp, Artificial
  Synthetic oligonucleotide
ccaccctcgatgagaagatctactactccatgagtctggccgccgccattctgggaggga

SEQ ID NO: 130446 - DNA, 60 bp, Artificial
  Synthetic oligonucleotide
caaaccatcaagcctggagttgacagcgtatccgatcaacccacctgggcgaatcccctg

SEQ ID NO: 130447 - DNA, 56 bp, Artificial
  Synthetic oligonucleotide
tgaggtagagcaagccaacatcccactcgccaactcccactcccctagatagaaaa

SEQ ID NO: 130448 - DNA, 60 bp, Artificial
  Synthetic oligonucleotide
cagatcttgtccgccaggccgagcaggcagcgcaagagaccgagggcgaggatgataagt

SEQ ID NO: 130449 - DNA, 60 bp, Artificial
  Synthetic oligonucleotide
gactggcaggagtcagggtttcaccccccttccgaaagctggcaaccgagattgctcgcc

SEQ ID NO: 130450 - DNA, 60 bp, Artificial
  Synthetic oligonucleotide
agggaagtgctccaagtcgccgtgtcagacccattggtcaaatgtggtgtggaagggaga

SEQ ID NO: 130451 - DNA, 60 bp, Artificial
  Synthetic oligonucleotide
cggatttatcccatttcaccaggattttggaagagtgccgtctgcatggaattgaggccc

SEQ ID NO: 130452 - DNA, 60 bp, Artificial
  Synthetic oligonucleotide
gagtcttgatgggggtagctggatggaaggacctcgccacccaccagacctggaggggat

SEQ ID NO: 130453 - DNA, 60 bp, Artificial
  Synthetic oligonucleotide
ctcggcggctgcgcggttccgtatctccaggaatgggcagatgtcccactgatattcgca

SEQ ID NO: 130454 - DNA, 60 bp, Artificial
  Synthetic oligonucleotide
gcctgttttcggaagaaagagcgagaattctttgacattcccgagggaccgacatggaag

SEQ ID NO: 130455 - DNA, 60 bp, Artificial
  Synthetic oligonucleotide
ctacggaatatgggaaaccgacgcgcaatccatcatcaccaagacggtctacatcacccg

SEQ ID NO: 130456 - DNA, 60 bp, Artificial
  Synthetic oligonucleotide
ccggaccccaaaattcaggcaatacctgtttccagtagacgagttcctccctctccccag

SEQ ID NO: 130457 - DNA, 60 bp, Artificial
  Synthetic oligonucleotide
catcgctaccaatagtgtgactccttacctgctatccaaattcagatctccccacccagg

SEQ ID NO: 130458 - DNA, 58 bp, Artificial
  Synthetic oligonucleotide
cggtgatgaatggggcgggtttcacggtcttcatggcaacgatactcctgtgattccg

SEQ ID NO: 130459 - DNA, 60 bp, Artificial
  Synthetic oligonucleotide
ctccgggcacaagaggaagcgacagcaggggagggtcttcggggtggaataaaagaatcc

SEQ ID NO: 130460 - DNA, 60 bp, Artificial
  Synthetic oligonucleotide
gaactcctcgccaacagtctactgggatcagctctcggaatgctcgcctttcccactccg

SEQ ID NO: 130461 - DNA, 60 bp, Artificial
  Synthetic oligonucleotide
gcaaattattcgattcgcccttctcactcaatctagccaccgaagaagacgcaaccgcgg

SEQ ID NO: 130462 - DNA, 60 bp, Artificial
  Synthetic oligonucleotide
aaaatcatttcccaacgagcacaagctgtcctgatggcagtcattctcagagttacagat

SEQ ID NO: 130463 - DNA, 60 bp, Artificial
  Synthetic oligonucleotide
ggacaggccgcaccatactggaacctctacacccaactccggacaatcctcctccagagt

SEQ ID NO: 130464 - DNA, 60 bp, Artificial
  Synthetic oligonucleotide
tcaactagactccatgcccgacttacagaagacctaatcaaactacagcatcttgaagtc

SEQ ID NO: 130465 - DNA, 60 bp, Artificial
  Synthetic oligonucleotide
agcgcccagggacccagcacccagatacaaaaaaacgagaccagtgttcccgttcgggaa

SEQ ID NO: 130466 - DNA, 60 bp, Artificial
  Synthetic oligonucleotide
ttgaggcacggacgatgtgtcccagggaggatggaaaggttgtccggaaacaagcgcctc

SEQ ID NO: 130467 - DNA, 60 bp, Artificial
  Synthetic oligonucleotide
ccctctggaacaacttgttctgaagtatgtggttgtggtctgctcccttgatgcgctccg

SEQ ID NO: 130468 - DNA, 60 bp, Artificial
  Synthetic oligonucleotide
cctctcggcagtcatctccatccggtccaacctcaacgagaactccagtccccgacacaa

SEQ ID NO: 130469 - DNA, 60 bp, Artificial
  Synthetic oligonucleotide
ggtgccaatggtacacggacaatgtacataacgacctgacattctactatacgaccgcca

SEQ ID NO: 130470 - DNA, 60 bp, Artificial
  Synthetic oligonucleotide
ctcaagaaggcagcctctgcggcaatcatctccagtgaacaatatcaagacatccccacc

SEQ ID NO: 130471 - DNA, 60 bp, Artificial
  Synthetic oligonucleotide
tttctcttttcggccagtcatgtggggtgtgacgacaaccgggtcaagctggctggcctg

SEQ ID NO: 130472 - DNA, 60 bp, Artificial
  Synthetic oligonucleotide
gagctccgggcctggacctgtcagcccttagtccctcgtcttttctgagagagagtcttg

SEQ ID NO: 130473 - DNA, 60 bp, Artificial
  Synthetic oligonucleotide
cgggacagacaagctctataccctggcgatcatcaagagggcagtcagtcaggtcggagg

SEQ ID NO: 130474 - DNA, 60 bp, Artificial
  Synthetic oligonucleotide
tacatcacacatcgtctggcgattgcaaggaaagccctcctgagcgagaaactggacccc

SEQ ID NO: 130475 - DNA, 60 bp, Artificial
  Synthetic oligonucleotide
ctggatgaccccaactcaaagctggcggaggtcctgacggaagagaacatggtggacctg

SEQ ID NO: 130476 - DNA, 60 bp, Artificial
  Synthetic oligonucleotide
gcatgtgcgatcaccaccattcgagccacagaagtcatcctaagtgcaggctctcgagtc

SEQ ID NO: 130477 - DNA, 60 bp, Artificial
  Synthetic oligonucleotide
ggtacggagaaggagtggtgtttggatacatcaggagtcaacacatccaccatggcgcac

SEQ ID NO: 130478 - DNA, 60 bp, Artificial
  Synthetic oligonucleotide
ccaggccaatgaatccggtatacctggactgcgacctcaccaccaacatgaccgcatggg

SEQ ID NO: 130479 - DNA, 60 bp, Artificial
  Synthetic oligonucleotide
aggggacctcatcgcaatcgaatacaatggcggggcgacccttctcgcattccctgcttg

SEQ ID NO: 130480 - DNA, 60 bp, Artificial
  Synthetic oligonucleotide
gaactcccgatcagcgacacaccatggaagcagagggactggacatgctccaacgaccct

SEQ ID NO: 130481 - DNA, 60 bp, Artificial
  Synthetic oligonucleotide
gctgtcaaaacgaagcgatgaccgacgtggtttcatccacatcaacaagagtctggacat

SEQ ID NO: 130482 - DNA, 60 bp, Artificial
  Synthetic oligonucleotide
gcgaagatggggatgaggcatggaatagactccttgttgttgtcggggcattaaggtcct

SEQ ID NO: 130483 - DNA, 60 bp, Artificial
  Synthetic oligonucleotide
tcgtaaccaagtttgcgtcggcgagaactatgcggaccctcgcaatgggagactcatccg

SEQ ID NO: 130484 - DNA, 60 bp, Artificial
  Synthetic oligonucleotide
gacgagatagaaaacagaggggctcccgagtcactccttcagagctcgctgcaggatctc

SEQ ID NO: 130485 - DNA, 60 bp, Artificial
  Synthetic oligonucleotide
cactgagccgaaacatagatctatccctagaaagtgaactggaaaagagcgggctgaccc

SEQ ID NO: 130486 - DNA, 60 bp, Artificial
  Synthetic oligonucleotide
cctcagggtcgagcgagtcatgcagaagaccaaactcacccactacattcttgcacaggg

SEQ ID NO: 130487 - DNA, 60 bp, Artificial
  Synthetic oligonucleotide
ggctgaaatcgtagctgccgccgatgccatctacaacaacgaaggagacagactgatcgc

SEQ ID NO: 130488 - DNA, 60 bp, Artificial
  Synthetic oligonucleotide
gcagaccgccaagctcactcgcggatctctcgtcccctactatggaactcaaacaaagcc

SEQ ID NO: 130489 - DNA, 60 bp, Artificial
  Synthetic oligonucleotide
tccactgcgactgcagcacaggccttccgcaagatcgacgaacagctggaggtagaagga

SEQ ID NO: 130490 - DNA, 60 bp, Artificial
  Synthetic oligonucleotide
caaacagaagctcagccgttgtttcagttctttggactcttcaaacatttcgcgtacccc

SEQ ID NO: 130491 - DNA, 60 bp, Artificial
  Synthetic oligonucleotide
ctccgcagatgacatggaccgagaaacactgctagaaaccatcgaggacactgcaccagg

SEQ ID NO: 130492 - DNA, 60 bp, Artificial
  Synthetic oligonucleotide
gagaagcgatcctcttgtctaagactcatagggataactttatacttttcttaaagtcca

SEQ ID NO: 130493 - DNA, 60 bp, Artificial
  Synthetic oligonucleotide
gggatccgaggtggcatcaaagagtccatgtccccagttggaccagacaatctctacacc

SEQ ID NO: 130494 - DNA, 55 bp, Artificial
  Synthetic oligonucleotide
aatggcccaaatgatgcttccaggccaagaaattgacaaggccgattcatacatg

SEQ ID NO: 130495 - DNA, 60 bp, Artificial
  Synthetic oligonucleotide
cctctgcaaaataaccggaatgtctacagaagatgtaacgacctggatcttgaaccgaga

SEQ ID NO: 130496 - DNA, 60 bp, Artificial
  Synthetic oligonucleotide
cggcgtacttccagatggagtatcagatgcttccagaaccagcgcagatgacaaatggct

SEQ ID NO: 130497 - DNA, 56 bp, Artificial
  Synthetic oligonucleotide
atggagtatcggatgcttccagaaccagcgcagatgacaaatggctgcctttgtat

SEQ ID NO: 130498 - DNA, 60 bp, Artificial
  Synthetic oligonucleotide
gacggtgtacttccagatggagtatcggatgcttccagaaccagcgcagatgacaaatgg

SEQ ID NO: 130499 - DNA, 60 bp, Artificial
  Synthetic oligonucleotide
ccagatggagtatcggatgcttccagaaccagcgcagatgacaaatggctgcctttgtat

SEQ ID NO: 130500 - DNA, 60 bp, Artificial
  Synthetic oligonucleotide
gacggcgtacttccagatggagtatcggatgcttccagaaccagcgcagatgacaaatgg

SEQ ID NO: 130501 - DNA, 60 bp, Artificial
  Synthetic oligonucleotide
atggatgccgacaagattgtattcaaagtcaataatcaggtggtctctttgaagcctgag

SEQ ID NO: 130502 - DNA, 60 bp, Artificial
  Synthetic oligonucleotide
atggatgccgacaagattgtatttaaagtcaataatcaggtggtctctttgaagcctgag

SEQ ID NO: 130503 - DNA, 60 bp, Artificial
  Synthetic oligonucleotide
ggaagggttaaagtgtgtagcccgaatggttactcgttcaggatcctgcggcacattctg

SEQ ID NO: 130504 - DNA, 60 bp, Artificial
  Synthetic oligonucleotide
ggaggggttaaagtgtgtagcccgaatggttactcgttcaggatcctgcggcacattctg

SEQ ID NO: 130505 - DNA, 60 bp, Artificial
  Synthetic oligonucleotide
caatggatgccgacaagattgtattcaaagtcaataatcaggtggtctctttgaagcctg

SEQ ID NO: 130506 - DNA, 60 bp, Artificial
  Synthetic oligonucleotide
ctacaatggatgccgacaagattgtattcaaagtcaataatcaggtggtctctttgaagc

SEQ ID NO: 130507 - DNA, 60 bp, Artificial
  Synthetic oligonucleotide
ctgtaacacccctacaatggatgccgacaagattgtattcaaagtcaataatcaggtggt

SEQ ID NO: 130508 - DNA, 60 bp, Artificial
  Synthetic oligonucleotide
cccctacaatggatgccgacaagattgtattcaaagtcaataatcaggtggtctctttga

SEQ ID NO: 130509 - DNA, 60 bp, Artificial
  Synthetic oligonucleotide
cacccctacaatggatgccgacaagattgtattcaaagtcaataatcaggtggtctcttt

SEQ ID NO: 130510 - DNA, 60 bp, Artificial
  Synthetic oligonucleotide
ggactaggactaggtcccggaggtgcaactgggtcacaccggagtcgcaaggagatttca

SEQ ID NO: 130511 - DNA, 60 bp, Artificial
  Synthetic oligonucleotide
ggcctcatgaagcttcgttcagtagctctaatggagaaggagatcccaccagaatgtgcc

SEQ ID NO: 130512 - DNA, 60 bp, Artificial
  Synthetic oligonucleotide
gggcgattcgtctgtgtgggatgttggtagattcctcaacactatggtacaagaggttgg

SEQ ID NO: 130513 - DNA, 60 bp, Artificial
  Synthetic oligonucleotide
agccaaggatctgctaaagctcagtgaacatacatctgtatatgcaccgaaaaacccatg

SEQ ID NO: 130514 - DNA, 60 bp, Artificial
  Synthetic oligonucleotide
ctggctcgctgttgcaacaagagtcaaatggagggattggctgaggcactatgctccggc

SEQ ID NO: 130515 - DNA, 60 bp, Artificial
  Synthetic oligonucleotide
ccgagtccctgatggacgataatacggacaccatcatcaccggtaaggggaggtctgccc

SEQ ID NO: 130516 - DNA, 60 bp, Artificial
  Synthetic oligonucleotide
ggggaggtctgcccacaatgagggagaataccacctaaagtctgccctgagaagccacag

SEQ ID NO: 130517 - DNA, 60 bp, Artificial
  Synthetic oligonucleotide
cacagggtcaatggagatatagaagaggcagtcaaatgctgtgtgacggagatgaggacg

SEQ ID NO: 130518 - DNA, 60 bp, Artificial
  Synthetic oligonucleotide
aaggtcccttgggcccatctgcttgaagacccggtcagtgtcaaccatgacgctcccatg

SEQ ID NO: 130519 - DNA, 60 bp, Artificial
  Synthetic oligonucleotide
cctgatgtcaacattgcacatggcaggcatggagggagggatagagtttgcaagacgatc

SEQ ID NO: 130520 - DNA, 60 bp, Artificial
  Synthetic oligonucleotide
acacaggacaaccaactgtctcattgcgaagtcaaattccgtgatgggtccgtctttcct

SEQ ID NO: 130521 - DNA, 60 bp, Artificial
  Synthetic oligonucleotide
gtgtcaagaccattgggcagtgccggattgtcaagcatcctggatatactggcagagacc

SEQ ID NO: 130522 - DNA, 60 bp, Artificial
  Synthetic oligonucleotide
atgtcacagacgtgagagagctattcagggtaactcccaagcctatcggagcacccgggg

SEQ ID NO: 130523 - DNA, 60 bp, Artificial
  Synthetic oligonucleotide
cctactgagatggcggcggcttacggagaagaggacctactgtccagacccattcatctg

SEQ ID NO: 130524 - DNA, 60 bp, Artificial
  Synthetic oligonucleotide
gtggtcaacatcgatttcagaaaatggaaccaacagatgagagaggagatgactgtcccc

SEQ ID NO: 130525 - DNA, 60 bp, Artificial
  Synthetic oligonucleotide
ggtcaccaaggatcatcccctgtctgatggaggagagatgtggtcggacagcataagcat

SEQ ID NO: 130526 - DNA, 60 bp, Artificial
  Synthetic oligonucleotide
ccccatgttccttgatgctgatagactgtttggctacaccaatctggtggggaggacaca

SEQ ID NO: 130527 - DNA, 60 bp, Artificial
  Synthetic oligonucleotide
tctgatgtcctggtgatactgcaaggtttgaagatccagcaagtgtcatgcctgcatggc

SEQ ID NO: 130528 - DNA, 60 bp, Artificial
  Synthetic oligonucleotide
gcagaccaagacatcaggagggaacctgatcaatccccactctagagggccgtatccggt

SEQ ID NO: 130529 - DNA, 60 bp, Artificial
  Synthetic oligonucleotide
cggacagcataagcatttgcaggggaggctcaaggaggaaggtcaacgttaagccgaacc

SEQ ID NO: 130530 - DNA, 60 bp, Artificial
  Synthetic oligonucleotide
tccggatgtctgacaaaaggcccatgtgtggataaagtggagatatgcaatgacatcctc

SEQ ID NO: 130531 - DNA, 60 bp, Artificial
  Synthetic oligonucleotide
cctacacaaagtcatgggaggtccagccatagtatcacccctgggtatgatgatgagggg

SEQ ID NO: 130532 - DNA, 60 bp, Artificial
  Synthetic oligonucleotide
gcctcgagggtgtttccgttatctaatgatcaagtcatgactattggcaacatggcagcc

SEQ ID NO: 130533 - DNA, 60 bp, Artificial
  Synthetic oligonucleotide
ggcccagcagctgcattcggaaggctaatatgtgccgacttagcatcattggtcaccaag

SEQ ID NO: 130534 - DNA, 60 bp, Artificial
  Synthetic oligonucleotide
ggaggtaccagctgttggaaatgggtgtgaccctggatgaactacgatccaacaacccgg

SEQ ID NO: 130535 - DNA, 60 bp, Artificial
  Synthetic oligonucleotide
gcagaatgacaccgaaaattatcccgaatagagtctctcccagttgggtcaatgacgtca

SEQ ID NO: 130536 - DNA, 60 bp, Artificial
  Synthetic oligonucleotide
gctctatcatgacgacgaaacagacgactgtgctcttgagctccttgatgcagagctgga

SEQ ID NO: 130537 - DNA, 60 bp, Artificial
  Synthetic oligonucleotide
gctgtcaagatggagcagaccccgggccagaagtggggagattttcaggccacatacaag

SEQ ID NO: 130538 - DNA, 60 bp, Artificial
  Synthetic oligonucleotide
cagggagtcgtacagtgtcaggaggatgcatggaacaaacataccatctacggtagggcc

SEQ ID NO: 130539 - DNA, 60 bp, Artificial
  Synthetic oligonucleotide
gcagaagttggtgtcatctgatgattaatgacagcccaggcaccatcaacatccagcact

SEQ ID NO: 130540 - DNA, 60 bp, Artificial
  Synthetic oligonucleotide
gagcatatggcaaatgacaacctcttggactacttccccatggtcacaatgtctgacagc

SEQ ID NO: 130541 - DNA, 60 bp, Artificial
  Synthetic oligonucleotide
ccagcacttgatcaacaccctggataaactgacggaacgagtgaacataatgacctacct

SEQ ID NO: 130542 - DNA, 60 bp, Artificial
  Synthetic oligonucleotide
caatccggctgctcaattcactccattcccaagggacgggcccatagcagtgtcaagacc

SEQ ID NO: 130543 - DNA, 60 bp, Artificial
  Synthetic oligonucleotide
ccggcaagaatgtagatataagggtgttacatgatgttatgggtgcaagcttaggagggt

SEQ ID NO: 130544 - DNA, 60 bp, Artificial
  Synthetic oligonucleotide
gactgagctggggcaaggaaatcctgtccatcaccaccccgcatcctgcagccttcttga

SEQ ID NO: 130545 - DNA, 60 bp, Artificial
  Synthetic oligonucleotide
caggtgataaccaccttgaagctgcctgtgactttatatgtatggccccagatgaagcgg

SEQ ID NO: 130546 - DNA, 60 bp, Artificial
  Synthetic oligonucleotide
tcaggggaatatgtaccacaagtctcactcagaggaaggttggtgcaagaggagccctac

SEQ ID NO: 130547 - DNA, 60 bp, Artificial
  Synthetic oligonucleotide
gcaggtcctatcacttgagaaagagttggatatacacaacataagataccacttggagga

SEQ ID NO: 130548 - DNA, 60 bp, Artificial
  Synthetic oligonucleotide
ggcagagaccaatggaatcatcatggtcggggatgacagtgtcagcatcactatatggag

SEQ ID NO: 130549 - DNA, 52 bp, Artificial
  Synthetic oligonucleotide
gactgccaccgtcctaaggatgaacaagagctcctccgtcattgccaccatt

SEQ ID NO: 130550 - DNA, 60 bp, Artificial
  Synthetic oligonucleotide
gtcatacgaatccatgagccccttggatagaagaactgccagcatcagcatgctgtccgc

SEQ ID NO: 130551 - DNA, 60 bp, Artificial
  Synthetic oligonucleotide
gtgggcaacgttgatgtggtactgacaaagagggtggagttcccgatcctgaaaggaaat

SEQ ID NO: 130552 - DNA, 57 bp, Artificial
  Synthetic oligonucleotide
tgtcttatgtccgagctcacaccaccacatttaggaaacactcccgcggagggaaaa

SEQ ID NO: 130553 - DNA, 60 bp, Artificial
  Synthetic oligonucleotide
tggagtggattgcaggagatgcagagcatagatatcaagacatggcgaccaaacatgggg

SEQ ID NO: 130554 - DNA, 60 bp, Artificial
  Synthetic oligonucleotide
taaagaggagcctacagaactcagccccatggggaggaaattggccgataaggtgtttgc

SEQ ID NO: 130555 - DNA, 60 bp, Artificial
  Synthetic oligonucleotide
ccatgagtagcatagagatgtgggccgggactgtcaatctcacagagatcatccctgcag

SEQ ID NO: 130556 - DNA, 60 bp, Artificial
  Synthetic oligonucleotide
ggaccatcatgactgcgtgtgacttaatgtatgtagctagacaacatgggttgaagattg

SEQ ID NO: 130557 - DNA, 60 bp, Artificial
  Synthetic oligonucleotide
ggagccctacagttggaccaatgacccttctgggaaagagggcctgcggcagaaatattg

SEQ ID NO: 130558 - DNA, 60 bp, Artificial
  Synthetic oligonucleotide
gattgtggaggtgaccaccgacaaggttggagatggaggtgaattaacaacggaggggaa

SEQ ID NO: 130559 - DNA, 60 bp, Artificial
  Synthetic oligonucleotide
cctgccgctaaagacagaggaaacctggatctcccccaacctgctcatgttcttcaagat

SEQ ID NO: 130560 - DNA, 60 bp, Artificial
  Synthetic oligonucleotide
ctcgcctgctagaggaccccactaccctgaatataaaaggaggggccagtcccaccattc

SEQ ID NO: 130561 - DNA, 60 bp, Artificial
  Synthetic oligonucleotide
gaagcgacttgcctcctatgaaggacataagcaatagatcacaatcatctcacatcccga

SEQ ID NO: 130562 - DNA, 60 bp, Artificial
  Synthetic oligonucleotide
ccgttgatgctttatgcacagacttggacatcagaactggtgcaaaaggacacacgactg

SEQ ID NO: 130563 - DNA, 60 bp, Artificial
  Synthetic oligonucleotide
ctgtagcacaacactctcagtctttgattaagccgatgagggactttctgcttatgtcag

SEQ ID NO: 130564 - DNA, 60 bp, Artificial
  Synthetic oligonucleotide
cttggaacgaagtcatcccctcaaaaggttgcctaaaagtcggagggaggtgtcatcccc

SEQ ID NO: 130565 - DNA, 60 bp, Artificial
  Synthetic oligonucleotide
ccgccatatagggtcagcccaaggactcctgtattcaatcttggttgcgattcatgactc

SEQ ID NO: 130566 - DNA, 60 bp, Artificial
  Synthetic oligonucleotide
gggcccaaactctgattagaaacataatgtctctgactggcccggactttccactggaag

SEQ ID NO: 130567 - DNA, 60 bp, Artificial
  Synthetic oligonucleotide
gtccccagtgagaaagttattattacggctctttccaaacctccagtcaaccccagagaa

SEQ ID NO: 130568 - DNA, 60 bp, Artificial
  Synthetic oligonucleotide
gaaaagatcacacataaggaggtatgtctcagtcagctccaatcatcaggctcgtcccaa

SEQ ID NO: 130569 - DNA, 60 bp, Artificial
  Synthetic oligonucleotide
ctctggttacgaagtcatcaaaatattagagccatacgttgtgaatagcctggttcagag

SEQ ID NO: 130570 - DNA, 60 bp, Artificial
  Synthetic oligonucleotide
taaagaccaccagacttgttggaagcatagaagacctgtccggggaaatagagaagcatc

SEQ ID NO: 130571 - DNA, 60 bp, Artificial
  Synthetic oligonucleotide
agatgaactttctgcgcaaaatagtgaagacctgtagagatgaggacacccagaagcccc

SEQ ID NO: 130572 - DNA, 60 bp, Artificial
  Synthetic oligonucleotide
taaatgacctgatggcgtcaggaacacatccactgcctccctcagcaatcatgagtgggg

SEQ ID NO: 130573 - DNA, 60 bp, Artificial
  Synthetic oligonucleotide
agaatgatcgggttggttaaagttgtcgttggattggcgttgtcaggagccccagtcccg

SEQ ID NO: 130574 - DNA, 60 bp, Artificial
  Synthetic oligonucleotide
gataagtcctatcaagagtgcttggcaagcgacctggccagaaggatcctcaggtgggga

SEQ ID NO: 130575 - DNA, 60 bp, Artificial
  Synthetic oligonucleotide
ggtgagtcatcccctccacaccactcgtttagatgaccgcctctctttgagatctgaggg

SEQ ID NO: 130576 - DNA, 60 bp, Artificial
  Synthetic oligonucleotide
ttcgtgggggaggaaggtggtcggcacaacagtccctcacccctctgagatgttagggtt

SEQ ID NO: 130577 - DNA, 60 bp, Artificial
  Synthetic oligonucleotide
tgcaccccttggcagacccatcaacagtcttcaaggacggtgatgaggcggaagactttg

SEQ ID NO: 130578 - DNA, 60 bp, Artificial
  Synthetic oligonucleotide
ctccagcatgtattgcgctacgaacgagaagcaatcacagcatccccggagaatgactgg

SEQ ID NO: 130579 - DNA, 60 bp, Artificial
  Synthetic oligonucleotide
aggtgggtggatcaagaagtgcgccatgctgcaagaactatgacagggagttacagcccc

SEQ ID NO: 130580 - DNA, 60 bp, Artificial
  Synthetic oligonucleotide
ttgctaggaacatcgaggacaatcaggctcatctccaaggagaacccatagaggtggaca

SEQ ID NO: 130581 - DNA, 60 bp, Artificial
  Synthetic oligonucleotide
cccagtttgccagggaagtccacagaagacaaagccactcaaactgccagccgagaactc

SEQ ID NO: 130582 - DNA, 60 bp, Artificial
  Synthetic oligonucleotide
cgacagaagggctggagtctggttagtttgttaatgatagatcgtgaatcccagaccagg

SEQ ID NO: 130583 - DNA, 60 bp, Artificial
  Synthetic oligonucleotide
ttctttcacgtgatcaccctttacatgaacgccttggactgggatgaggagaagaccatc

SEQ ID NO: 130584 - DNA, 60 bp, Artificial
  Synthetic oligonucleotide
cagagttactggacagggacttttagactattcaagggttacatatgcttttcgcctgga

SEQ ID NO: 130585 - DNA, 60 bp, Artificial
  Synthetic oligonucleotide
ggataacagtctcctctacctactgcccaactaaccacgattacaccatctggatgcccg

SEQ ID NO: 130586 - DNA, 60 bp, Artificial
  Synthetic oligonucleotide
ctacccttcgagaaatgagccttgtattattcaactgtagcagccccaagagcgagatgc

SEQ ID NO: 130587 - DNA, 60 bp, Artificial
  Synthetic oligonucleotide
catcgtggaccaatatgagtacaagtacccggcaatcaaagactcgaggaagcccagtat

SEQ ID NO: 130588 - DNA, 60 bp, Artificial
  Synthetic oligonucleotide
ccggggcaggagactgcaattcctcactcttatttcatccattttcgttcgttgggcctg

SEQ ID NO: 130589 - DNA, 60 bp, Artificial
  Synthetic oligonucleotide
cctggagcccgatagacatacatcatctcagctgtcccaacaatttggttgtggaagacg

SEQ ID NO: 130590 - DNA, 60 bp, Artificial
  Synthetic oligonucleotide
gccagatgcctgcagagctgcacacgactggaagatagccggcgatcctagatatgaaga

SEQ ID NO: 130591 - DNA, 60 bp, Artificial
  Synthetic oligonucleotide
gctgcagtaccatgatgtacttgtccactgccttaggggatgtgcccagctttgcgagac

SEQ ID NO: 130592 - DNA, 60 bp, Artificial
  Synthetic oligonucleotide
ggggtatggagttgacaagggatcccactgttccagagcatgcatccttggttggtcttc

SEQ ID NO: 130593 - DNA, 60 bp, Artificial
  Synthetic oligonucleotide
tccggggtaagttggataaagattggtcaagtttcggaataaacatcgggaaagcagggg

SEQ ID NO: 130594 - DNA, 60 bp, Artificial
  Synthetic oligonucleotide
tccggggtaagttggataaagattggtcaagtttcggaataaacatcgggaaggcagggg

SEQ ID NO: 130595 - DNA, 60 bp, Artificial
  Synthetic oligonucleotide
tccgaggcaagttggataaagattggtcaagtttcggaataaacatcgggaaagcagggg

SEQ ID NO: 130596 - DNA, 52 bp, Artificial
  Synthetic oligonucleotide
cactctttcaccagaacgagactagcttcttggttgtcagagaacagagggg

SEQ ID NO: 130597 - DNA, 60 bp, Artificial
  Synthetic oligonucleotide
cctctgcaaaataaccggaatgtctacagaagatgtgacgacctggatcttgaaccgaga

SEQ ID NO: 130598 - DNA, 60 bp, Artificial
  Synthetic oligonucleotide
ggacacctctgcaaaataaccggaatgtctacagaagatgtgacgacctggatcctgaac

SEQ ID NO: 130599 - DNA, 60 bp, Artificial
  Synthetic oligonucleotide
gaggatccagtggaatacccggcagattacttcagaaaatcaaaagagattcctctttac

SEQ ID NO: 130600 - DNA, 60 bp, Artificial
  Synthetic oligonucleotide
cctctgcaaaataaccggaatgtctacagaagatgtaactacctggatcttgaaccgaga

SEQ ID NO: 130601 - DNA, 60 bp, Artificial
  Synthetic oligonucleotide
gcaacaggaggaggcaatcctagagtttctgtatcagtactcccgtcttttgatcagtca

SEQ ID NO: 130602 - DNA, 60 bp, Artificial
  Synthetic oligonucleotide
gcaacaggaggaggcaatcctagagtttctgtatcagtacttccgtcctttgatcagtca

SEQ ID NO: 130603 - DNA, 60 bp, Artificial
  Synthetic oligonucleotide
agcaacaggaggaggcaatcctagagtttctgtatcagtactcccgtcctttgatcagtc

SEQ ID NO: 130604 - DNA, 60 bp, Artificial
  Synthetic oligonucleotide
gcaacaggaggaggcaatcctagagtttctgtatcagtactcccgtcctttgatcagtca

SEQ ID NO: 130605 - DNA, 52 bp, Artificial
  Synthetic oligonucleotide
ggggaggcaatcctagagtttctgtatcagtactcccgtccttcgatcagtc

SEQ ID NO: 130606 - DNA, 60 bp, Artificial
  Synthetic oligonucleotide
ggagcaacaggaggaggcaatcctagagtttctgtatcagtactcccgtcctttgatcag

SEQ ID NO: 130607 - DNA, 60 bp, Artificial
  Synthetic oligonucleotide
gcacttgtggagcaacaggaggaggcaatcctagagtttctgtatcagtactcccgtcct

SEQ ID NO: 130608 - DNA, 50 bp, Artificial
  Synthetic oligonucleotide
aactgtcaacaccactgataaaatgaactttctccgcaagatagtcagga

SEQ ID NO: 130609 - DNA, 59 bp, Artificial
  Synthetic oligonucleotide
tacctagctgcagctatggagttatttgaggggatctgcccagaggactggacaagtta

SEQ ID NO: 130610 - DNA, 60 bp, Artificial
  Synthetic oligonucleotide
cagttggtgtctgttaagccggaggtgatagtagatcaatatgagtacaaatatcccgct

SEQ ID NO: 130611 - DNA, 60 bp, Artificial
  Synthetic oligonucleotide
gcaccgccacaaggcagagatgtagtcgaatggctcggatggtttgaagatcagaacaga

SEQ ID NO: 130612 - DNA, 60 bp, Artificial
  Synthetic oligonucleotide
tgaccttgtatccctgaaagccctggatggcgtacttccagatggagtatcggatgcttc

SEQ ID NO: 130613 - DNA, 60 bp, Artificial
  Synthetic oligonucleotide
ccttgtatccgtgaaagctctggacggcgtacttccagatggagtatcggatgcttccag

SEQ ID NO: 130614 - DNA, 60 bp, Artificial
  Synthetic oligonucleotide
atgacggcgtgggtgccaaccagccagccgagtgtcctgggatctgtcaacttccacatc

SEQ ID NO: 130615 - DNA, 60 bp, Artificial
  Synthetic oligonucleotide
gaccagcacacgacttccctacctccatgtgcttgacatgaggataagtctcctagaggg

SEQ ID NO: 130616 - DNA, 60 bp, Artificial
  Synthetic oligonucleotide
cggactcaatgacaactccaagatctcctacattctgtctcagatcagtgggaagtacgc

SEQ ID NO: 130617 - DNA, 60 bp, Artificial
  Synthetic oligonucleotide
ccaaatagtcagacaaatgaggtcaggagagagatttctcaagatatggtcacagaccgt

SEQ ID NO: 130618 - DNA, 60 bp, Artificial
  Synthetic oligonucleotide
ctggggctgatcatcaagaaagaagagaccatgtgtagttatgactttctcatatatggg

SEQ ID NO: 130619 - DNA, 60 bp, Artificial
  Synthetic oligonucleotide
cacttcaacatatgttgcagtactatgatgtatctatctaccgctctaggcgatgtcccc

SEQ ID NO: 130620 - DNA, 60 bp, Artificial
  Synthetic oligonucleotide
gtggatgatcttgagttacagaggggaactctgtctaaagtggctatcattatatccatc

SEQ ID NO: 130621 - DNA, 60 bp, Artificial
  Synthetic oligonucleotide
cttttctagtccacaagatggtggatgatcttgagttacagaggggaactctgtctaaag

SEQ ID NO: 130622 - DNA, 60 bp, Artificial
  Synthetic oligonucleotide
gttcgagccagggcaagagacagctgttcctcactcttatttcatccacttccgttcact

SEQ ID NO: 130623 - DNA, 60 bp, Artificial
  Synthetic oligonucleotide
gcctggaggggatcaaggtgacagagaagttccgcgagttcgctgagcttgttgcggaag

SEQ ID NO: 130624 - DNA, 60 bp, Artificial
  Synthetic oligonucleotide
ggaaggcctggaggggatcaaggtgacagagaagttccgcgagttcgctgagcttgttgc

SEQ ID NO: 130625 - DNA, 60 bp, Artificial
  Synthetic oligonucleotide
gaagtacgcagtggactccctggaaggcctggaggggatcaaggtgacagagaagttccg

SEQ ID NO: 130626 - DNA, 60 bp, Artificial
  Synthetic oligonucleotide
tctgtcacagatcagtgggaagtacgcagtggactccctggaaggcctggaggggatcaa

SEQ ID NO: 130627 - DNA, 60 bp, Artificial
  Synthetic oligonucleotide
aagtacgcagtggactccctggaaggcctggaggggatcaaggtgacagagaagttccgc

SEQ ID NO: 130628 - DNA, 60 bp, Artificial
  Synthetic oligonucleotide
aagtacgcagtggactccttggagggcctggaggggatcaaggtgacagagaagttccgc

SEQ ID NO: 130629 - DNA, 60 bp, Artificial
  Synthetic oligonucleotide
gcgctacgccatcatgatgagtcggatgctgggagagtcctactacaagtcgtatggact

SEQ ID NO: 130630 - DNA, 60 bp, Artificial
  Synthetic oligonucleotide
tccaagagcgatacgccatcatgatgagtcggatgctgggagagtcctactacaagtcgt

SEQ ID NO: 130631 - DNA, 60 bp, Artificial
  Synthetic oligonucleotide
tcctactacaagtcgtatggactcaatgacaactccaagatctcctacattctgtcacag

SEQ ID NO: 130632 - DNA, 60 bp, Artificial
  Synthetic oligonucleotide
cggatgctgggagagtcctactacaagtcgtatggactcaatgacaactccaagatctcc

SEQ ID NO: 130633 - DNA, 60 bp, Artificial
  Synthetic oligonucleotide
ctgggctatgcggagggaacaattttttcctacatgaaaagtcagcacaacattcatggg

SEQ ID NO: 130634 - DNA, 52 bp, Artificial
  Synthetic oligonucleotide
ggggcatcaaagagtccatgtccccagttggaccagacaatctctatacaca

SEQ ID NO: 130635 - DNA, 51 bp, Artificial
  Synthetic oligonucleotide
ttttcctacatgaaaagtcagcacaacattcatgggtctctttaccatccg

SEQ ID NO: 130636 - DNA, 60 bp, Artificial
  Synthetic oligonucleotide
tttttcctacatgaaaagtcagcacaacattcatgggtctctttaccatccacatatcga

SEQ ID NO: 130637 - DNA, 60 bp, Artificial
  Synthetic oligonucleotide
cctatcacagggcaccagccatgaatctgggtcaactaggacagggttcctacctacgcc

SEQ ID NO: 130638 - DNA, 60 bp, Artificial
  Synthetic oligonucleotide
cccctggttcatctattccagagtgctatgatctttggagaaaccagtgagaagattgac

SEQ ID NO: 130639 - DNA, 52 bp, Artificial
  Synthetic oligonucleotide
ggggcatcaaagagtccatgtccccagttggaccggacaatctctatacaca

SEQ ID NO: 130640 - DNA, 60 bp, Artificial
  Synthetic oligonucleotide
ggatccgaggtggcatcaaagagtccatgtccccagttggaccagacaatctctacaccc

SEQ ID NO: 130641 - DNA, 60 bp, Artificial
  Synthetic oligonucleotide
aaagattggtccagtttcggaataaacatcgggaaggcaggggatacaatcggaatattt

SEQ ID NO: 130642 - DNA, 60 bp, Artificial
  Synthetic oligonucleotide
ggtccagtttcggaataaacatcgggaaggcaggggatacaatcggaatatttgaccttg

SEQ ID NO: 130643 - DNA, 60 bp, Artificial
  Synthetic oligonucleotide
caccaccacatttaagagaaaacacttccgcccgatgccagatgcctgcagagctgcaca

SEQ ID NO: 130644 - DNA, 60 bp, Artificial
  Synthetic oligonucleotide
accggtgttgtgacagaagccgagacctacaccaactttgtcggttatgtcaccaccaca

SEQ ID NO: 130645 - DNA, 60 bp, Artificial
  Synthetic oligonucleotide
cctacaccaactttgtcggttatgtcaccaccacatttaagagaaaacacttccgcccga

SEQ ID NO: 130646 - DNA, 60 bp, Artificial
  Synthetic oligonucleotide
gacagaggcagaaacctacaccaactttgtcggttatgtcaccaccacatttaagagaaa

SEQ ID NO: 130647 - DNA, 60 bp, Artificial
  Synthetic oligonucleotide
cagtgggctgattccaggggccctcttgaaggggaggagttagaatactctcaagagatc

SEQ ID NO: 130648 - DNA, 60 bp, Artificial
  Synthetic oligonucleotide
cccttatattccagtgggctgattccaggggccctcttgaaggggaggagttagaatact

SEQ ID NO: 130649 - DNA, 60 bp, Artificial
  Synthetic oligonucleotide
ctcctgagggcatgaactgggtatacaaattgaggagaacccttattttccagtgggctg

SEQ ID NO: 130650 - DNA, 60 bp, Artificial
  Synthetic oligonucleotide
ccctgagggcatgaactgggtatacaaattgaggagaacctttatcttccagtgggctga

SEQ ID NO: 130651 - DNA, 60 bp, Artificial
  Synthetic oligonucleotide
cctgagggcatgaactgggtatacaaattgaggagaacccttatattccagtgggctgat

SEQ ID NO: 130652 - DNA, 60 bp, Artificial
  Synthetic oligonucleotide
ggcgttgtcaggagccccagtcccggagggtatgaactgggtatacaaattgaggagaac

SEQ ID NO: 130653 - DNA, 60 bp, Artificial
  Synthetic oligonucleotide
acctacttcaccacctggtgtgacctccccagggtctccaacctgcccgagatggatcaa

SEQ ID NO: 130654 - DNA, 60 bp, Artificial
  Synthetic oligonucleotide
gatagacgggagactctcgtcgacacagtggtccctccccgcgcttccttctcgagaaaa

SEQ ID NO: 130655 - DNA, 60 bp, Artificial
  Synthetic oligonucleotide
gcctctcctgggtcctcaagggtctgagatacggagtatgggacaccgacgctcaatcca

SEQ ID NO: 130656 - DNA, 60 bp, Artificial
  Synthetic oligonucleotide
tgctcccatgcactagacatcgatgtagcctcactccccgcccttcgagcacaggaagag

SEQ ID NO: 130657 - DNA, 60 bp, Artificial
  Synthetic oligonucleotide
gacgtagagagagggaaacactcattgaactactatccaacagcctgctcgggtcagccc

SEQ ID NO: 130658 - DNA, 60 bp, Artificial
  Synthetic oligonucleotide
atcaagggcaggggattcgggctgatgaccttcatgcctcgtctcctccaagtcctccgt

SEQ ID NO: 130659 - DNA, 60 bp, Artificial
  Synthetic oligonucleotide
caaaagtctggacatcaacaaattttgcaccagccagagacaattcaactccaatgcggt

SEQ ID NO: 130660 - DNA, 60 bp, Artificial
  Synthetic oligonucleotide
aagactactatgcccaggagacagccctggccctgaccttcgcggctcccgaaaagcggg

SEQ ID NO: 130661 - DNA, 60 bp, Artificial
  Synthetic oligonucleotide
ggcgaggatggagatacccctatcacaagaaggcgataactgggcggattcgggcgtcag

SEQ ID NO: 130662 - DNA, 60 bp, Artificial
  Synthetic oligonucleotide
ctctcactcacccatccatcggccgacccaaccctcctccatccccagagtccatccact

SEQ ID NO: 130663 - DNA, 60 bp, Artificial
  Synthetic oligonucleotide
caggaagtgggcaacaccataccacgtcaacattgcagacttcatcatccaaggcctgat

SEQ ID NO: 130664 - DNA, 60 bp, Artificial
  Synthetic oligonucleotide
caagcgggcggtgagtcaagtcggaggagagggaacgagaaaggcattgagcctcctgtg

SEQ ID NO: 130665 - DNA, 60 bp, Artificial
  Synthetic oligonucleotide
gagacaatggaccaccgcgacataaacacgaacatggaggcactcagagaagctctgcga

SEQ ID NO: 130666 - DNA, 60 bp, Artificial
  Synthetic oligonucleotide
gcacaactgagggcaattctcctccagagccaaaagatcaagaaacaagagacgggcacg

SEQ ID NO: 130667 - DNA, 60 bp, Artificial
  Synthetic oligonucleotide
aacgagaaccacagtcccctacccaagccactcgacccggatcaggtgaaggccgctcgt

SEQ ID NO: 130668 - DNA, 60 bp, Artificial
  Synthetic oligonucleotide
caaaccgtcaaacccgacaccgcaagcgaatcagaccaacccacctggtcaaacccgctc

SEQ ID NO: 130669 - DNA, 60 bp, Artificial
  Synthetic oligonucleotide
ggaattcaccaagtcaggagagctcccaagtgtaacaccgtatgcggacttccttgcctg

SEQ ID NO: 130670 - DNA, 60 bp, Artificial
  Synthetic oligonucleotide
ccactccctccgcgtcgcagagtatccccatgtatcacctggcaaaccggtcctaaagga

SEQ ID NO: 130671 - DNA, 60 bp, Artificial
  Synthetic oligonucleotide
aacatcgcaaccgaagaggacgcgacggcagtcatcaaacgacaggcaacaaaaatcctc

SEQ ID NO: 130672 - DNA, 60 bp, Artificial
  Synthetic oligonucleotide
ttggttaacttcaacgccaacaggggagtcctggccaagatcggggcggtgcttagaccc

SEQ ID NO: 130673 - DNA, 60 bp, Artificial
  Synthetic oligonucleotide
ggcacttcagttgtaacctgataacgtgcttcagacactataaaccgagacagaacaagc

SEQ ID NO: 130674 - DNA, 60 bp, Artificial
  Synthetic oligonucleotide
gaccgaataaagggagtcaccccagacaacgcaggatcccaagaggtgaagaacatggcc

SEQ ID NO: 130675 - DNA, 60 bp, Artificial
  Synthetic oligonucleotide
cacgactcacagaggatctcatcaccattcaaagccccgagatcgattcctcagtccttg

SEQ ID NO: 130676 - DNA, 60 bp, Artificial
  Synthetic oligonucleotide
gtcgctgtggacgaggtatccaaggacaggacaacttacagggcccatcgcgctaccagt

SEQ ID NO: 130677 - DNA, 60 bp, Artificial
  Synthetic oligonucleotide
ggaatcacaacggctccttcaccccgtggaactgctcctgggatatggcgaaggggtcat

SEQ ID NO: 130678 - DNA, 60 bp, Artificial
  Synthetic oligonucleotide
gcgcactgcttcaccttgagggcttctttccactaggcgaacaataggtacactccagca

SEQ ID NO: 130679 - DNA, 60 bp, Artificial
  Synthetic oligonucleotide
tgaggggaatcgtcgcctgctaattcgactggtcacgaaaaacaagagaggaggcaaggt

SEQ ID NO: 130680 - DNA, 60 bp, Artificial
  Synthetic oligonucleotide
ccaggaggcccgacaagaacaagggtctatctcaactggagcaactcatcctaaagtacg

SEQ ID NO: 130681 - DNA, 60 bp, Artificial
  Synthetic oligonucleotide
tccgcaacacctcaccctggcaatcaagaaggccgcctccgccgcgatcatatcaagtga

SEQ ID NO: 130682 - DNA, 60 bp, Artificial
  Synthetic oligonucleotide
tcgacgaatgcacggcacttggtctagacacccctcacatctgggcggacggggtcttct

SEQ ID NO: 130683 - DNA, 60 bp, Artificial
  Synthetic oligonucleotide
cctccaagaggatgcagcgagtattgtacatggacctcagcatcaccaagggcgaggggc

SEQ ID NO: 130684 - DNA, 60 bp, Artificial
  Synthetic oligonucleotide
gccagacgcattgtcagactgatgaggatcgtagcagaggccccaggggtagcagcaaag

SEQ ID NO: 130685 - DNA, 60 bp, Artificial
  Synthetic oligonucleotide
ctgtcacgggctggcatggacgaacagacagcaaagctcactcgagggttcctagtccct

SEQ ID NO: 130686 - DNA, 60 bp, Artificial
  Synthetic oligonucleotide
ctccctcaactcacccctaaattactcactgtctgcacaactgacagaccgcatgacccc

SEQ ID NO: 130687 - DNA, 60 bp, Artificial
  Synthetic oligonucleotide
agaccacctgtgaccatgtggaaatgctccacagtgttggcgaaggagctccgagacacc

SEQ ID NO: 130688 - DNA, 60 bp, Artificial
  Synthetic oligonucleotide
accacaaccgcagccgctctgtacttcccagctccccgatgccaatggtacaccgacaac

SEQ ID NO: 130689 - DNA, 60 bp, Artificial
  Synthetic oligonucleotide
gcaggagccaccaacatcaaccccagactgaattacatgatcaggagcatcacggacgaa

SEQ ID NO: 130690 - DNA, 60 bp, Artificial
  Synthetic oligonucleotide
gtaccgcacaatctgctcaacagggttcttcgggggtcagacgatagagaaggcgcttgt

SEQ ID NO: 130691 - DNA, 60 bp, Artificial
  Synthetic oligonucleotide
cacaatacgaggtgaggcaacaaaattggcaaagaacctattcatttcacgcgggctcaa

SEQ ID NO: 130692 - DNA, 60 bp, Artificial
  Synthetic oligonucleotide
acctggccttgacctctccgccctgagtccctcctcatttctaagagacagtctcgagcg

SEQ ID NO: 130693 - DNA, 54 bp, Artificial
  Synthetic oligonucleotide
gggggcgtcagagctgatccgccgggcggagatggcatctcggggaccagacat

SEQ ID NO: 130694 - DNA, 60 bp, Artificial
  Synthetic oligonucleotide
gagttcggaagcacccaagaaaaggtcaacttcggctctcggaaaccagcacctcagacc

SEQ ID NO: 130695 - DNA, 60 bp, Artificial
  Synthetic oligonucleotide
cactcctggccatctatcaaaacgtggacgacatcctgaaacgagcgggccagcctgcga

SEQ ID NO: 130696 - DNA, 60 bp, Artificial
  Synthetic oligonucleotide
gcaaggtcaataggcatcctcctccaggatcccggctaccaagacagaaaaaaatggcac

SEQ ID NO: 130697 - DNA, 60 bp, Artificial
  Synthetic oligonucleotide
tgggtttcgtgctggagtctttggacactggggcaccaccagacgctaccttcgcagatc

SEQ ID NO: 130698 - DNA, 60 bp, Artificial
  Synthetic oligonucleotide
cgagctacggacaccacccctggggactgcatcaggcctgtatgattgaattctgtgggc

SEQ ID NO: 130699 - DNA, 60 bp, Artificial
  Synthetic oligonucleotide
cccgaagtgtgaggacaagactgtggggatgaggggaaacttggatgactttgcctatct

SEQ ID NO: 130700 - DNA, 60 bp, Artificial
  Synthetic oligonucleotide
gaccccagacccatgaacctcgtgcatcttgactgcgatctcacccacaacatggtcgca

SEQ ID NO: 130701 - DNA, 60 bp, Artificial
  Synthetic oligonucleotide
tttattggaggaaaatgcaccaaatcaccctgccagactcattggtccaacgtcgtttgg

SEQ ID NO: 130702 - DNA, 60 bp, Artificial
  Synthetic oligonucleotide
gaggtctcggagggtgcgccgttccctaccttcaggaatggccagacacaccaatcatct

SEQ ID NO: 130703 - DNA, 60 bp, Artificial
  Synthetic oligonucleotide
caaatcagggtgagtgccagacagtgccatattcaagggaggatttggtgcatcaacatg

SEQ ID NO: 130704 - DNA, 57 bp, Artificial
  Synthetic oligonucleotide
cgcgatgaactttctccgcaagatagtgagaggttgcagggatgaggaggatcagaa

SEQ ID NO: 130705 - DNA, 60 bp, Artificial
  Synthetic oligonucleotide
cctggaggcctacccgtctctatgtctggttgtgggtgatggatccggtggaatctccag

SEQ ID NO: 130706 - DNA, 60 bp, Artificial
  Synthetic oligonucleotide
ggaggcctgctcagttcaccgacaacacaggcgggaaagaagaaggaagcgatgaggact

SEQ ID NO: 130707 - DNA, 60 bp, Artificial
  Synthetic oligonucleotide
ggaggtgaatgacttcatggcctcaggaacacatccgttgcctccatctgccatcgtgag

SEQ ID NO: 130708 - DNA, 60 bp, Artificial
  Synthetic oligonucleotide
cgatctgagatattctcaattcctcaaaagatccccgcagcttacccaacaacaatgaaa

SEQ ID NO: 130709 - DNA, 60 bp, Artificial
  Synthetic oligonucleotide
gggacaacttcatattgttcttgaaatctattgagccactcttcccgagattcctcagtg

SEQ ID NO: 130710 - DNA, 60 bp, Artificial
  Synthetic oligonucleotide
gttggtgaacccagactacaaggccattcagcacctctcaagagcatttccttctgtgac

SEQ ID NO: 130711 - DNA, 60 bp, Artificial
  Synthetic oligonucleotide
cgatgacataagatcacgatcctccttgctggattatagttgcttgtgaggcaggacatg

SEQ ID NO: 130712 - DNA, 60 bp, Artificial
  Synthetic oligonucleotide
ctccatggagcccactccgaatccaccagaagtcgaaagtgcctctctgatctagcccta

SEQ ID NO: 130713 - DNA, 60 bp, Artificial
  Synthetic oligonucleotide
gttttacccgccttcagaccccaagattttaagacacttcaatatctgctgcagcaccct

SEQ ID NO: 130714 - DNA, 60 bp, Artificial
  Synthetic oligonucleotide
gggaccactgttcctcatccaggggagatgttggtgttgttgcctaagtcatccgtctcc

SEQ ID NO: 130715 - DNA, 60 bp, Artificial
  Synthetic oligonucleotide
ctgcaggtgatccgagatatgaggaatccttacacaatccctatccagactctcactggc

SEQ ID NO: 130716 - DNA, 60 bp, Artificial
  Synthetic oligonucleotide
cgtggatccactccttgtgtcaagaagcaggcaacccggacttgggtgatagaagtttgg

SEQ ID NO: 130717 - DNA, 60 bp, Artificial
  Synthetic oligonucleotide
gtctggtgttatttaattgcagcagtcccaagagtgagatgcagagggctcgttcattga

SEQ ID NO: 130718 - DNA, 60 bp, Artificial
  Synthetic oligonucleotide
gaggggatttgtcctgacgattgggagagctacgggattctcattgctaggaaaggggac

SEQ ID NO: 130719 - DNA, 60 bp, Artificial
  Synthetic oligonucleotide
cagactaagcaaagtgtccggacagaacacagggaattacaaaaccaacgtggctgacag

SEQ ID NO: 130720 - DNA, 60 bp, Artificial
  Synthetic oligonucleotide
attcgtcaacattctccagaggatagtcgctccttattgacaagattgtgagttctttga

SEQ ID NO: 130721 - DNA, 60 bp, Artificial
  Synthetic oligonucleotide
gccctcacactctgcgtcggcaagtttcccatctacacaatccctgataagttaggcccg

SEQ ID NO: 130722 - DNA, 60 bp, Artificial
  Synthetic oligonucleotide
gctatccgatcacagaggaggccccgtccccagtgagaaagtcataattacagcgctctc

SEQ ID NO: 130723 - DNA, 60 bp, Artificial
  Synthetic oligonucleotide
cggatgaggacaggaacacttccctgctgctagaataacccttcctctccacagtcactc

SEQ ID NO: 130724 - DNA, 60 bp, Artificial
  Synthetic oligonucleotide
gtcaactcagctgttccacgcctgggagaaggtaaccaacgtccatgttgtcaagagggc

SEQ ID NO: 130725 - DNA, 60 bp, Artificial
  Synthetic oligonucleotide
ggcgagtgacctggctaaacggatcctcaggtggggtttcgacaaatactccaaatggta

SEQ ID NO: 130726 - DNA, 60 bp, Artificial
  Synthetic oligonucleotide
gtcgggacagtagtgactgcatacgaagattgttcagggctagtctctttcacagggttc

SEQ ID NO: 130727 - DNA, 60 bp, Artificial
  Synthetic oligonucleotide
ctgttcataatcaaaataggaggaggatctcgcctttccctcacataattctggactgcc

SEQ ID NO: 130728 - DNA, 60 bp, Artificial
  Synthetic oligonucleotide
ggaatggtcaggatggaggtctcgaggggttgaggcagaaaggttggagtctagtgagcc

SEQ ID NO: 130729 - DNA, 60 bp, Artificial
  Synthetic oligonucleotide
gcgcatcagattgcagagagcttctcaaagaagtacaagttcccatccagatcctctgga

SEQ ID NO: 130730 - DNA, 60 bp, Artificial
  Synthetic oligonucleotide
cgacagagtcacgggacaaggtctgcaagattattcgagggtgacatatgctttccacct

SEQ ID NO: 130731 - DNA, 60 bp, Artificial
  Synthetic oligonucleotide
cccctggaggtttatgatgaccctgtggacccggtcgaaccggagatagatgcaagaagc

SEQ ID NO: 130732 - DNA, 60 bp, Artificial
  Synthetic oligonucleotide
cctaggaggtcacggggaagacaccctagactctgatgaggacattcaggggttgttgcg

SEQ ID NO: 130733 - DNA, 60 bp, Artificial
  Synthetic oligonucleotide
cccgagtgcaattcgagctggcttagctgaccttgagatggcggaagagacggttgactt

SEQ ID NO: 130734 - DNA, 60 bp, Artificial
  Synthetic oligonucleotide
gtgtctggggcagtgccgcaatttcagaggcttccggagatcaacctaaagcccggcaag

SEQ ID NO: 130735 - DNA, 60 bp, Artificial
  Synthetic oligonucleotide
gtacaaataccccgccattaaagatcggaaaaaacccagcataacccttggaaaagctcc

SEQ ID NO: 130736 - DNA, 60 bp, Artificial
  Synthetic oligonucleotide
ggccaagactatgaccggggatcacagccctagcaagaaagtatcccggaaggctgggtg

SEQ ID NO: 130737 - DNA, 60 bp, Artificial
  Synthetic oligonucleotide
acctcattcatttcgtcgggagttacatgggtcaagtcaggtcattgaatgcgacagtca

SEQ ID NO: 130738 - DNA, 60 bp, Artificial
  Synthetic oligonucleotide
tttgtcttggagctggtgtgatactacttctgtctttaagaaagttgcctgcaattcgaa

SEQ ID NO: 130739 - DNA, 60 bp, Artificial
  Synthetic oligonucleotide
tcagggacgagagggaacttgcagagcatgaggcaatcgaatcaaccaagactgatgtgg

SEQ ID NO: 130740 - DNA, 60 bp, Artificial
  Synthetic oligonucleotide
aaaagatatgtgtcagtcagctcgaatcatcaggccagacctaactcctttgcagaattc

SEQ ID NO: 130741 - DNA, 60 bp, Artificial
  Synthetic oligonucleotide
gaggcaacatactagtccccgagtctaagagatgggccagggtgtcatgcatctcaaatg

SEQ ID NO: 130742 - DNA, 60 bp, Artificial
  Synthetic oligonucleotide
cgactttatgtttcaacctttaatgctatacgcacaaacctggacctctgagcttgtgca

SEQ ID NO: 130743 - DNA, 60 bp, Artificial
  Synthetic oligonucleotide
caggagacaatgtcctgtcaacatgcggcaactctgggtatgacgtcatcaagatgctgg

SEQ ID NO: 130744 - DNA, 60 bp, Artificial
  Synthetic oligonucleotide
caggcagaaagaacatgaggaacttctgtgttaacggagaggtaaaggtgtgcagcccta

SEQ ID NO: 130745 - DNA, 60 bp, Artificial
  Synthetic oligonucleotide
cattacaagtctatcagagaatggaccgatgtgatcccctccaagggatgtctgatggca

SEQ ID NO: 130746 - DNA, 60 bp, Artificial
  Synthetic oligonucleotide
cgaggaatgcactgtcgatatatcgggccattgaggaaggggcatccaaactggggctta

SEQ ID NO: 130747 - DNA, 60 bp, Artificial
  Synthetic oligonucleotide
ctgggtttacaaggtaagacgcaccctggtgtttcaatgggcagagtcccgtggtcccct

SEQ ID NO: 130748 - DNA, 60 bp, Artificial
  Synthetic oligonucleotide
caattcatgactccggctacaacgatgccacaatttttcccatgaacatatatagcaaga

SEQ ID NO: 130749 - DNA, 60 bp, Artificial
  Synthetic oligonucleotide
gttgatggatgggtcatgggtgtctattcaaaatcacgatgaggcaaaatggtgctcccc

SEQ ID NO: 130750 - DNA, 60 bp, Artificial
  Synthetic oligonucleotide
ggtgctgaggattttgttgaagtccaccttcctgacgtgcaaaagcagatctcggggatt

SEQ ID NO: 130751 - DNA, 60 bp, Artificial
  Synthetic oligonucleotide
ctgctcaaccaatcatgattacacaatctggatgcccgagaatcccaacccgggtgtgtc

SEQ ID NO: 130752 - DNA, 60 bp, Artificial
  Synthetic oligonucleotide
gggtgtcggctttggctttccttgccttgatgatatttattgccgcctgctgtaggagag

SEQ ID NO: 130753 - DNA, 60 bp, Artificial
  Synthetic oligonucleotide
tctgtatgattgagtatgtgatgagacaacacgcagcacggtcacagctgatagggggcg

SEQ ID NO: 130754 - DNA, 60 bp, Artificial
  Synthetic oligonucleotide
agaccttgttcgacatgtgcagaattgccctatccttgaaagcacctaatggccaagacg

SEQ ID NO: 130755 - DNA, 60 bp, Artificial
  Synthetic oligonucleotide
cttgtatgcagaataatattccaacattcgacctgcttggagctcttcgagagttcaatc

SEQ ID NO: 130756 - DNA, 60 bp, Artificial
  Synthetic oligonucleotide
gccacctcattctccaaccaacaacacaacacatcactccaaaactcccacacaatcatg

SEQ ID NO: 130757 - DNA, 60 bp, Artificial
  Synthetic oligonucleotide
tggattcgggcaccgtcctgggccccgctgtagtcgtgctggctagcggtcacacaaaac

SEQ ID NO: 130758 - DNA, 60 bp, Artificial
  Synthetic oligonucleotide
caccagcgtcaagtcactgtgttccaaagacttctctcaccttccagcatatgtgttctc

SEQ ID NO: 130759 - DNA, 60 bp, Artificial
  Synthetic oligonucleotide
acaaacagtcaccagcaagagttcaacctcccaggctacccaaaagaaatcactgtctac

SEQ ID NO: 130760 - DNA, 60 bp, Artificial
  Synthetic oligonucleotide
atgtgtcagcatgtcgacgagtaacccaatggaagatcatgtcacctttaaatccgtgtg

SEQ ID NO: 130761 - DNA, 60 bp, Artificial
  Synthetic oligonucleotide
gacctcaccacaggacccacagaagtcccctacactaaagagaagcttataactgcgagt

SEQ ID NO: 130762 - DNA, 60 bp, Artificial
  Synthetic oligonucleotide
gagacttgccggagtgactctatgttaggaaaatggtggtgtccttccctgattggatca

SEQ ID NO: 130763 - DNA, 60 bp, Artificial
  Synthetic oligonucleotide
gcagacccagcatattcatctgtacaaatcccacactctgtgacagaatccacgcgttac

SEQ ID NO: 130764 - DNA, 60 bp, Artificial
  Synthetic oligonucleotide
cctaatgtgccgattatgaaagacaacacacttgcctatgtaccttcaaacatgattcag

SEQ ID NO: 130765 - DNA, 60 bp, Artificial
  Synthetic oligonucleotide
gacttgggctatcttacaactcttgatatcgacccttggattattattgcagcgaggtgc

SEQ ID NO: 130766 - DNA, 60 bp, Artificial
  Synthetic oligonucleotide
cgacgacgcccaattgacgggtgttgtgtatggtgggactcgtagcacgacgctcccttt

SEQ ID NO: 130767 - DNA, 60 bp, Artificial
  Synthetic oligonucleotide
caggaaagagagtattgacagggtcacaagtaaacaagctgttcagcaagataaaacctg

SEQ ID NO: 130768 - DNA, 60 bp, Artificial
  Synthetic oligonucleotide
ccacacccacaacaccacacagcacaacacgacagccagagacaatgatggcaagactgg

SEQ ID NO: 130769 - DNA, 60 bp, Artificial
  Synthetic oligonucleotide
gaagggtgatcggaggagtcattggacactggaaagaaaacaaagatggggcaagaactc

SEQ ID NO: 130770 - DNA, 60 bp, Artificial
  Synthetic oligonucleotide
cagccagaggtttcaagttttgttaatgaaggagtggagataagcatagtatcagaggag

SEQ ID NO: 130771 - DNA, 60 bp, Artificial
  Synthetic oligonucleotide
gggattcatgttatttgatggaggtgggtggactgtggggtgcgtgctggttggtgctcg

SEQ ID NO: 130772 - DNA, 60 bp, Artificial
  Synthetic oligonucleotide
gtatggccttgcactaattcatgagaaaatgggactagtcagaagcgtgtcatatgccaa

SEQ ID NO: 130773 - DNA, 60 bp, Artificial
  Synthetic oligonucleotide
catgtccactcttgcagcaacaacaaacactatgcaagggttaacaggagagctaaacca

SEQ ID NO: 130774 - DNA, 60 bp, Artificial
  Synthetic oligonucleotide
caagagcggaaggttgctgaaggggttgcaggagtataggtatgatcaattgaccaagac

SEQ ID NO: 130775 - DNA, 60 bp, Artificial
  Synthetic oligonucleotide
gattctgatgattggttatatgttattgaatctgcatccccgctgtaattggtgtatgag

SEQ ID NO: 130776 - DNA, 60 bp, Artificial
  Synthetic oligonucleotide
ggtgtgccgagtgactgggttatgagaggattcccagatccgctgacaagtgcaatagcc

SEQ ID NO: 130777 - DNA, 60 bp, Artificial
  Synthetic oligonucleotide
gccgtcaattcagtctcgttatggaaatatggggagctttgtgaagatgcaagtccagcg

SEQ ID NO: 130778 - DNA, 60 bp, Artificial
  Synthetic oligonucleotide
ccaaggttcttctccttgatgtcattttatctgcgattatatgttgtgtcaactgagcag

SEQ ID NO: 130779 - DNA, 60 bp, Artificial
  Synthetic oligonucleotide
agaagatccacaagcattatcccaattttactttcaacgtaattgatgaaagcgagttga

SEQ ID NO: 130780 - DNA, 60 bp, Artificial
  Synthetic oligonucleotide
cacaatctcttctgaacgccatgtgctcatcaaatgtactagaacctaaattcctccacg

SEQ ID NO: 130781 - DNA, 60 bp, Artificial
  Synthetic oligonucleotide
accacggttctgcagggttccagttattatcgaattatgaaccacttgttgtcggagtat

SEQ ID NO: 130782 - DNA, 60 bp, Artificial
  Synthetic oligonucleotide
tgttattcgaaggacccatcaattcttccaagggtgttatgtgtatctttgctcaggaga

SEQ ID NO: 130783 - DNA, 60 bp, Artificial
  Synthetic oligonucleotide
gaggctgtgacagaggtagtcagaccgaaggcccttgacgactcaaccatagtgttgggc

SEQ ID NO: 130784 - DNA, 57 bp, Artificial
  Synthetic oligonucleotide
ttaaaccaattgtcaactttatagcttatgtggcaggggagacagacaaaggacttt

SEQ ID NO: 130785 - DNA, 60 bp, Artificial
  Synthetic oligonucleotide
gccaatacatcttgggaggaatcagaattgcatatacatagaacatcaaagtggacaccc

SEQ ID NO: 130786 - DNA, 52 bp, Artificial
  Synthetic oligonucleotide
ccagagcaagaccaggaaatgatggatgtggctccgatacacaggtccgggg

SEQ ID NO: 130787 - DNA, 60 bp, Artificial
  Synthetic oligonucleotide
ggggacatacaccaacacaacaaggtatgcttggccagtcataaaagagtctatcggaat

SEQ ID NO: 130788 - DNA, 60 bp, Artificial
  Synthetic oligonucleotide
ctactgccacgctcaacccgaacaactcgacactgataatcgaaaacaagaccatcccag

SEQ ID NO: 130789 - DNA, 60 bp, Artificial
  Synthetic oligonucleotide
ggaaggacgatacaggaattgcctcgatggaattttaactaagtgccattaatgttacct

SEQ ID NO: 130790 - DNA, 60 bp, Artificial
  Synthetic oligonucleotide
atgttatggagaagcccaataaagaaagaccatacggaccactggaaccttacttagggt

SEQ ID NO: 130791 - DNA, 60 bp, Artificial
  Synthetic oligonucleotide
cgcagtaccggctttctaatcagcttgagttggagagtgcatatcggggtcagtcatacg

SEQ ID NO: 130792 - DNA, 60 bp, Artificial
  Synthetic oligonucleotide
agaaaggagttctcaccactacgacatgaaaccagcaacatgctctaggattactgcaga

SEQ ID NO: 130793 - DNA, 60 bp, Artificial
  Synthetic oligonucleotide
cacccaccagagaccgtcacgtgagaataagacatgagatcaactctcctataggatcag

SEQ ID NO: 130794 - DNA, 60 bp, Artificial
  Synthetic oligonucleotide
gcaaagcttccaactagtaagcccagcataatggcaatccatcctgcacagcttcaaccc

SEQ ID NO: 130795 - DNA, 60 bp, Artificial
  Synthetic oligonucleotide
gctatggccaggggcttacccgaaattgaacaatacaagctaccagtatcaagacttcag

SEQ ID NO: 130796 - DNA, 60 bp, Artificial
  Synthetic oligonucleotide
cggtccaaattgacagatcgaactggtccattgcagagagatcaaccaatgaggggtgtg

SEQ ID NO: 130797 - DNA, 60 bp, Artificial
  Synthetic oligonucleotide
cttcgttgaatccactttcccctcatatgaccgaggccttgttgagattttccgagcaga

SEQ ID NO: 130798 - DNA, 60 bp, Artificial
  Synthetic oligonucleotide
gactcagacacaatgaacaccatagagcggtcactaaaaggaagccaactcaccacagca

SEQ ID NO: 130799 - DNA, 60 bp, Artificial
  Synthetic oligonucleotide
ctcaggagaggtgttagctcacggtgccataatgaatgcaaatccggacgcttatcgcta

SEQ ID NO: 130800 - DNA, 60 bp, Artificial
  Synthetic oligonucleotide
ggcaatggagcaactactcaaggctcatgaacccataatagacaatccagctgctgacat

SEQ ID NO: 130801 - DNA, 60 bp, Artificial
  Synthetic oligonucleotide
ccactagggtcactgcaaatgcactgaaggtgattcccagggtgaaggtgccaattccta

SEQ ID NO: 130802 - DNA, 60 bp, Artificial
  Synthetic oligonucleotide
gacaagaatagagatcaggattgtcaccaagctctctcagaactccactacaggatctga

SEQ ID NO: 130803 - DNA, 59 bp, Artificial
  Synthetic oligonucleotide
cctgacatgatgcaatatgcgaaacgagcagtcatgtcattgcaaggcctgagagaaaa

SEQ ID NO: 130804 - DNA, 60 bp, Artificial
  Synthetic oligonucleotide
gttgtacgcttatgcagtaggatcctctgccgacttggcacaacagttctgtgttggaga

SEQ ID NO: 130805 - DNA, 60 bp, Artificial
  Synthetic oligonucleotide
ggggcaattgacagctcttctgctcagatctactagagcaaggaatgcccgacaacctga

SEQ ID NO: 130806 - DNA, 60 bp, Artificial
  Synthetic oligonucleotide
cgactcctgatatgatgcagtatgcaaaacgagcagtcatgtcattgcaaggcctgagag

SEQ ID NO: 130807 - DNA, 60 bp, Artificial
  Synthetic oligonucleotide
aaccgactcctgatatgatgcagtatgcaaaacgagcagtcatgtcattgcaaggcctga

SEQ ID NO: 130808 - DNA, 60 bp, Artificial
  Synthetic oligonucleotide
gtagcccaaatggttactcgttcaggatcctgcggcacattctgagatcattcgacgaga

SEQ ID NO: 130809 - DNA, 60 bp, Artificial
  Synthetic oligonucleotide
aactgagatcaacaagcaagtaatcccgggtatccagatccaagatgcagaaattaagtc

SEQ ID NO: 130810 - DNA, 60 bp, Artificial
  Synthetic oligonucleotide
gtccactgtcatcaggattgccttgaaattaggaggagagttacatacgtagacgggttc

SEQ ID NO: 130811 - DNA, 60 bp, Artificial
  Synthetic oligonucleotide
ccctctctaggatgacagtgacttccaaagatgtagtatccaaacttgctattggggaga

SEQ ID NO: 130812 - DNA, 60 bp, Artificial
  Synthetic oligonucleotide
gagcaaacgagatacacagtgtcatacttaaagacaacgaagttatggactttgctaggg

SEQ ID NO: 130813 - DNA, 60 bp, Artificial
  Synthetic oligonucleotide
gggacaagagagagtggaaggcgattattaaacgcagagggtccagattcgttcgtgcag

SEQ ID NO: 130814 - DNA, 60 bp, Artificial
  Synthetic oligonucleotide
cctgctacaactcaagagtgtaacggggccttccataacctatgcaagaacaaagcagga

SEQ ID NO: 130815 - DNA, 60 bp, Artificial
  Synthetic oligonucleotide
ctgatggtcacaattcactcgaagaatgctcggttgtctggaatcgacagtcaagccagt

SEQ ID NO: 130816 - DNA, 60 bp, Artificial
  Synthetic oligonucleotide
gcttcagcgaatcaaattgtggaaggtcaagtattaaaggagggttgtcgagttaggttt

SEQ ID NO: 130817 - DNA, 60 bp, Artificial
  Synthetic oligonucleotide
gctatcaaccacttatcgggagtcagaatccttaccggtagtatcgaagccctaggtctt

SEQ ID NO: 130818 - DNA, 60 bp, Artificial
  Synthetic oligonucleotide
gttgggagggttcaatattgtaacatacttcgacatgatcttgagaggatattcggaccc

SEQ ID NO: 130819 - DNA, 60 bp, Artificial
  Synthetic oligonucleotide
gacactcaatctgagtttgccgggtggttccaagaactaatggagataagtgcagagaaa

SEQ ID NO: 130820 - DNA, 60 bp, Artificial
  Synthetic oligonucleotide
cacttgacaaggggctgttaaagagggcaacaaaattgtttacgtggctgttctctcctg

SEQ ID NO: 130821 - DNA, 60 bp, Artificial
  Synthetic oligonucleotide
ccttctgtcagatgtatccaacccgaacttcccaaagacattgtctaccttctgtcatga

SEQ ID NO: 130822 - DNA, 60 bp, Artificial
  Synthetic oligonucleotide
acatatttagcaagttttagggagcaacttttagacacctggtttcaggatgctacgatc

SEQ ID NO: 130823 - DNA, 60 bp, Artificial
  Synthetic oligonucleotide
caggtgatggggttgtttcggctatggggtcatcctgaagtcgatgcgctgaaggggctg

SEQ ID NO: 130824 - DNA, 60 bp, Artificial
  Synthetic oligonucleotide
ccagagtgtattgtaagtgaagaatgctggttttatgagaacgttgtgactggggctgta

SEQ ID NO: 130825 - DNA, 60 bp, Artificial
  Synthetic oligonucleotide
gttaaacaacagagcaacatagtagatgggtggaacgggatgctagagagatataccaat

SEQ ID NO: 130826 - DNA, 60 bp, Artificial
  Synthetic oligonucleotide
caactcgggtagctacgtcaatactatacaattcacaggaagctgagtccggaatgactg

SEQ ID NO: 130827 - DNA, 60 bp, Artificial
  Synthetic oligonucleotide
agtacactgtcatcggaaacaaaataaggttcactcattgttcacaatcgccgcgagagc

SEQ ID NO: 130828 - DNA, 60 bp, Artificial
  Synthetic oligonucleotide
ggttgctgataatgaaactaggatgattaaagagcttgatgccaaaatgaaggagatggg

SEQ ID NO: 130829 - DNA, 60 bp, Artificial
  Synthetic oligonucleotide
cttgatgaaacactacgtctccttaaagcagagttcaaacacatggggatcttatccgtc

SEQ ID NO: 130830 - DNA, 60 bp, Artificial
  Synthetic oligonucleotide
aagagaatgtcaagatcacgggattgcagtcaggaaggagtgggtgaatgtcttaacacg

SEQ ID NO: 130831 - DNA, 60 bp, Artificial
  Synthetic oligonucleotide
agaacaaaatatacgtcaccacagaattgtcagactcgcaaacagctggtaagtcagagg

SEQ ID NO: 130832 - DNA, 60 bp, Artificial
  Synthetic oligonucleotide
gcgtgaactctcagacttgccatgggcagtgatgcctctcagttatccagccacaccgac

SEQ ID NO: 130833 - DNA, 60 bp, Artificial
  Synthetic oligonucleotide
gcccacattgcatcaaaccagtggatgaacctaaagaagatcttccaactccacttacag

SEQ ID NO: 130834 - DNA, 60 bp, Artificial
  Synthetic oligonucleotide
gttgcttgcgtctgggaattctggatatactttgttgaagacgtatgaggccctggtgac

SEQ ID NO: 130835 - DNA, 60 bp, Artificial
  Synthetic oligonucleotide
tgaaccctgttgcgaggatgtttgccttaatgaccctcaagatgagatcttatgtggtca

SEQ ID NO: 130836 - DNA, 60 bp, Artificial
  Synthetic oligonucleotide
tgagctgtgggagttaggacttctacttcacgttttgattgttgtgtcgatgctgctatg

SEQ ID NO: 130837 - DNA, 60 bp, Artificial
  Synthetic oligonucleotide
cgtatgtttgggatgatgtaccaatttccgaggtatgcccatggaaacacccgatatctc

SEQ ID NO: 130838 - DNA, 60 bp, Artificial
  Synthetic oligonucleotide
cggattgggtgatatttcaaaccccttctgttggtttccattctggagaactgtgggtct

SEQ ID NO: 130839 - DNA, 60 bp, Artificial
  Synthetic oligonucleotide
ataagatattcggtctagatgaagatgagagcacgggtcaaccatgtctccggttggggc

SEQ ID NO: 130840 - DNA, 60 bp, Artificial
  Synthetic oligonucleotide
cgaagaaggggaccactacgtctggcatagtactggatctggaaggtgcaaagctcaccc

SEQ ID NO: 130841 - DNA, 60 bp, Artificial
  Synthetic oligonucleotide
ccgaggtctcagttgcaggaaagctgagcaaggtcactgtcgacgtagatgcctcgaaga

SEQ ID NO: 130842 - DNA, 60 bp, Artificial
  Synthetic oligonucleotide
ggagagcaagtgaaggtgtcaattttaagccaagaggacccaacgtcaatagttgtcggc

SEQ ID NO: 130843 - DNA, 60 bp, Artificial
  Synthetic oligonucleotide
cctaggtgcaatggccccaatctgcggattaaaataaaacctgagatcgccactctcatt

SEQ ID NO: 130844 - DNA, 60 bp, Artificial
  Synthetic oligonucleotide
gggagagcagcaatggatcccagcattaggagaggtgtcttgaagtggatgaaagacggc

SEQ ID NO: 130845 - DNA, 60 bp, Artificial
  Synthetic oligonucleotide
gcactcgcccacggatcattatggatgccatcatttggacctgcttctcacctatcaatg

SEQ ID NO: 130846 - DNA, 60 bp, Artificial
  Synthetic oligonucleotide
catacaagctgtttgagagtatgaaaaccacaaagtgcgctgcgggatatcaatatgcca

SEQ ID NO: 130847 - DNA, 60 bp, Artificial
  Synthetic oligonucleotide
gcaagagcagcatatgggacagaaccattgatcacgcgtcctataaaacttctacgggcc

SEQ ID NO: 130848 - DNA, 60 bp, Artificial
  Synthetic oligonucleotide
cagaccgcccggattcttatgtagaggtagtcgtgaacgatgttgtgttaagtcaccctg

SEQ ID NO: 130849 - DNA, 60 bp, Artificial
  Synthetic oligonucleotide
gtcttatgaggggcacatccgaggttttgaaggactccgacagaaagggtggacggtgtt

SEQ ID NO: 130850 - DNA, 60 bp, Artificial
  Synthetic oligonucleotide
ggggtcaattacggggctgcagtagggagtttagtggtcagcccatcatttcgtctctca

SEQ ID NO: 130851 - DNA, 60 bp, Artificial
  Synthetic oligonucleotide
taaaggcttggaggatgttaaagaaaatcgtcatggatatagagacaattggggatacga

SEQ ID NO: 130852 - DNA, 60 bp, Artificial
  Synthetic oligonucleotide
gggcattagatcaaacgactgaaacgagcagggagaagaattacaatgaattcctgaaaa

SEQ ID NO: 130853 - DNA, 60 bp, Artificial
  Synthetic oligonucleotide
ctccacctcgcgggctggaaaagagaaggcggatgaagtgttcggaatgtaacctgctcc

SEQ ID NO: 130854 - DNA, 60 bp, Artificial
  Synthetic oligonucleotide
catccagaagaaagttgaaaagccaattaagaaggacccgtatgccgacttttaaggagg

SEQ ID NO: 130855 - DNA, 60 bp, Artificial
  Synthetic oligonucleotide
gggatgcagtggctcctagaggaaatggtatcaccgaagacactgcctgcactggagggg

SEQ ID NO: 130856 - DNA, 60 bp, Artificial
  Synthetic oligonucleotide
ccccagtaatcacggaaaggagcacggggtctatcgggatatctgtatcagacaggaggt

SEQ ID NO: 130857 - DNA, 60 bp, Artificial
  Synthetic oligonucleotide
ggtgaagtcttctgaaatccaggggtactccgagttccctcatcaggtcccgggaaacga

SEQ ID NO: 130858 - DNA, 60 bp, Artificial
  Synthetic oligonucleotide
acctattagtctgtcttctgcaaaagtatgaggcatttggtgctggacaagagccaacaa

SEQ ID NO: 130859 - DNA, 60 bp, Artificial
  Synthetic oligonucleotide
gccaaggcttctccaggttctccgagagagcatcgcgaaaggggctagcgagctatttcc

SEQ ID NO: 130860 - DNA, 60 bp, Artificial
  Synthetic oligonucleotide
ccagatcatgcgaggtgagtgtgattacgaggccgtggtcagcatcaactacaacagtgc

SEQ ID NO: 130861 - DNA, 60 bp, Artificial
  Synthetic oligonucleotide
ctgcagcacttcaccgccgacaaagcagccatcagaaagctcgcaggatgtgtgcgtcct

SEQ ID NO: 130862 - DNA, 60 bp, Artificial
  Synthetic oligonucleotide
acctgggctccatgaccacgtgacttcccctgggcgtccgatcccaagtctcccgcctcg

SEQ ID NO: 130863 - DNA, 60 bp, Artificial
  Synthetic oligonucleotide
gtctactggatcggcgctacacctcaggcccattgccctacctcagaaacgcttaagggg

SEQ ID NO: 130864 - DNA, 60 bp, Artificial
  Synthetic oligonucleotide
gatcgctgaagcaaaggccatttacctggacccaagcccagtgaggtctcgcatagaggc

SEQ ID NO: 130865 - DNA, 60 bp, Artificial
  Synthetic oligonucleotide
catgcacgcaaggcatcagacaagccagagaccaaagcccgcaacttcaggagctccacc

SEQ ID NO: 130866 - DNA, 60 bp, Artificial
  Synthetic oligonucleotide
gagcgagagacttactccacagtctcaaaggcaatcaaggcggagttggacgagttggag

SEQ ID NO: 130867 - DNA, 60 bp, Artificial
  Synthetic oligonucleotide
gtacaccaggaacgactcccttccgaatgttcactcaactcccccttaagtctctccctc

SEQ ID NO: 130868 - DNA, 60 bp, Artificial
  Synthetic oligonucleotide
cctcctgtcactgtgctccaacgccctggacattgacgtgaactcccttccttcacttca

SEQ ID NO: 130869 - DNA, 60 bp, Artificial
  Synthetic oligonucleotide
gacccaagcaactacctcaacagtgacctcgatcggtcagaaatctccgctacagacttc

SEQ ID NO: 130870 - DNA, 60 bp, Artificial
  Synthetic oligonucleotide
tccccgtggaggtggatcgagtgggtggagtagtcgagggagaacatgccaggatcaaaa

SEQ ID NO: 130871 - DNA, 60 bp, Artificial
  Synthetic oligonucleotide
gttgagttcgagttcaaggaaggggtggtggtgatccgtgctggtccgaacggactcctg

SEQ ID NO: 130872 - DNA, 60 bp, Artificial
  Synthetic oligonucleotide
cacagcaacagagatgagagtgggacaagaaagctgggaagagaggaaatggacatgctc

SEQ ID NO: 130873 - DNA, 60 bp, Artificial
  Synthetic oligonucleotide
gcaatacaaaagtccaccccaggagagtccatcaccaaattctacagcacagccccagac

SEQ ID NO: 130874 - DNA, 60 bp, Artificial
  Synthetic oligonucleotide
gggtcctccaaacagaagccaagccccaagaagaaatccactccgacaacgctcgaggag

SEQ ID NO: 130875 - DNA, 60 bp, Artificial
  Synthetic oligonucleotide
tcagtcaccagcgtctcagcagtcgcaaatggccactacctacacagagtgacctaccgg

SEQ ID NO: 130876 - DNA, 60 bp, Artificial
  Synthetic oligonucleotide
gagccacacaagaaacaccgagctgcacgtcacatcatccgttgtacaggctgcattcag

SEQ ID NO: 130877 - DNA, 60 bp, Artificial
  Synthetic oligonucleotide
cccggtagacccaaaggactgacccagagccgaggccacgctcccattagatgcacaaaa

SEQ ID NO: 130878 - DNA, 60 bp, Artificial
  Synthetic oligonucleotide
ctcacgaagctatttgattctccattctccctcaacctagccacagaggaagacgcggcc

SEQ ID NO: 130879 - DNA, 60 bp, Artificial
  Synthetic oligonucleotide
ggactgacaccatatatccctcgatcaattcccctcacaatcaccgaactgacaagcgca

SEQ ID NO: 130880 - DNA, 60 bp, Artificial
  Synthetic oligonucleotide
agacaattaggggagaagcgaacaaactggccaagaaactgcacgtcaccaggtcgtatg

SEQ ID NO: 130881 - DNA, 60 bp, Artificial
  Synthetic oligonucleotide
ggtgacgtccctagcttcgcaagacttcacgacctgtataacagacctataacttattac

SEQ ID NO: 130882 - DNA, 60 bp, Artificial
  Synthetic oligonucleotide
ggcgacgtccctagcttcgcaagacttcacgacctgtataacagacctataacttattac

SEQ ID NO: 130883 - DNA, 60 bp, Artificial
  Synthetic oligonucleotide
cgtccctagcttcacaagacttcacgacctgtataacagacctataacttattacttcag

SEQ ID NO: 130884 - DNA, 60 bp, Artificial
  Synthetic oligonucleotide
aataatcaggtggtctctttgaagcctgagattatcgtggatcaatatgagtacaagtac

SEQ ID NO: 130885 - DNA, 50 bp, Artificial
  Synthetic oligonucleotide
tcaggtggtctctttgaagcctgagattatcgtggatcaatatgagtaca

SEQ ID NO: 130886 - DNA, 60 bp, Artificial
  Synthetic oligonucleotide
gcaggaagatgtgggagatctcggggttgctctaggtcacctgaatgtccgaccctttct

SEQ ID NO: 130887 - DNA, 60 bp, Artificial
  Synthetic oligonucleotide
ggcatggttattggcaggattatgatgaggatgagagttggttggatgctgagaatgatg

SEQ ID NO: 130888 - DNA, 60 bp, Artificial
  Synthetic oligonucleotide
tgctgtaacgaataccttcacgtcccgtgtggacaagacagcaaccctaaagaggctcac

SEQ ID NO: 130889 - DNA, 53 bp, Artificial
  Synthetic oligonucleotide
ggggagaagacaccgagaccgaggcaagcaaagctcgcgccattgcgtttata

SEQ ID NO: 130890 - DNA, 60 bp, Artificial
  Synthetic oligonucleotide
gctgaagggaaattgtttcagataggtgccctgacagatgctgagatagttgctgcatgg

SEQ ID NO: 130891 - DNA, 60 bp, Artificial
  Synthetic oligonucleotide
gacactgcgagccacagttgcttataatatagccagtgcagatgccttattagtccctga

SEQ ID NO: 130892 - DNA, 60 bp, Artificial
  Synthetic oligonucleotide
ggtgggagggtcaactcaggagagcgcacagcagatcactggagcaaaacgtcccaacga

SEQ ID NO: 130893 - DNA, 60 bp, Artificial
  Synthetic oligonucleotide
caacatgtgtctcgttttgtcattgggataatgtcaggtagcggcagtgagcagaccccg

SEQ ID NO: 130894 - DNA, 60 bp, Artificial
  Synthetic oligonucleotide
ggggagccagagggcacaggacgcaaacgctctcgggaatgttctgtaaaggaacttgcc

SEQ ID NO: 130895 - DNA, 60 bp, Artificial
  Synthetic oligonucleotide
aaagaagacactccatcgatgaccaagagactgaaaggaggggtgggtgctacaataagc

SEQ ID NO: 130896 - DNA, 60 bp, Artificial
  Synthetic oligonucleotide
ccgatgggaatgaaataaaaggggtgaaggtaaaagtaactttatcgtgggacccggcca

SEQ ID NO: 130897 - DNA, 60 bp, Artificial
  Synthetic oligonucleotide
caacctgccagtctgcaaagacgagcccaaatcatcctacaaaggcacagagctatttcc

SEQ ID NO: 130898 - DNA, 60 bp, Artificial
  Synthetic oligonucleotide
tggactgtgacgagaagagggtcatgacattaagttatgtggagtgcttgcctgagctgc

SEQ ID NO: 130899 - DNA, 58 bp, Artificial
  Synthetic oligonucleotide
cagccgcccagaaggaagtgagtcatattgccctactgttcatgagaaacatatgggg

SEQ ID NO: 130900 - DNA, 60 bp, Artificial
  Synthetic oligonucleotide
accacggcacagcatgtccagccaacaagaaaccaacgacaagagcaacacacaggggca

SEQ ID NO: 130901 - DNA, 60 bp, Artificial
  Synthetic oligonucleotide
acaccgggaacaccgaagacagcccgcccgacaccgacaacgtccccatcacagatgacg

SEQ ID NO: 130902 - DNA, 60 bp, Artificial
  Synthetic oligonucleotide
agtgcaacggctggccagattgattagcaggtccacgcaacaaggggagccgcccggggc

SEQ ID NO: 130903 - DNA, 60 bp, Artificial
  Synthetic oligonucleotide
aaccttggctctcctagaaaggaggggtacagtctggcatcatccgacggcgcaccgtga

SEQ ID NO: 130904 - DNA, 60 bp, Artificial
  Synthetic oligonucleotide
gtcatgagggatgaaggaagaagccatttattctccagaagcacagctaccaatgcctta

SEQ ID NO: 130905 - DNA, 60 bp, Artificial
  Synthetic oligonucleotide
ccgaggcataatcttttccatgtgcaattcagcttcagaaagccaccagaggggctgcac

SEQ ID NO: 130906 - DNA, 60 bp, Artificial
  Synthetic oligonucleotide
ccctgacaggactgactagcaatcagatacctccattctctgtaaacctggcactgccta

SEQ ID NO: 130907 - DNA, 60 bp, Artificial
  Synthetic oligonucleotide
ctacagcccgttcaatctcctaccaataactctcatagggtcttccgtccttcaccccat

SEQ ID NO: 130908 - DNA, 60 bp, Artificial
  Synthetic oligonucleotide
gacgtggacgtgagggtgggcctttgtgtgagcggcgggtgtggtgtgtcttatctatga

SEQ ID NO: 130909 - DNA, 60 bp, Artificial
  Synthetic oligonucleotide
ggaggtccagctgccattgcttgccggaggtgaggacctaaataaccttgaggtggtcct

SEQ ID NO: 130910 - DNA, 60 bp, Artificial
  Synthetic oligonucleotide
ataagatagagcaggtgtatctggggtaacggcggagacccgtgacggcgccgctactca

SEQ ID NO: 130911 - DNA, 60 bp, Artificial
  Synthetic oligonucleotide
cccctcaccagcttgcagacctacatgggctttatcgcatctgggcgcatccaatcatag

SEQ ID NO: 130912 - DNA, 60 bp, Artificial
  Synthetic oligonucleotide
cgggtgtatccttctcagccagtcgaagctacgagccattgatagaagatgtttgcagcc

SEQ ID NO: 130913 - DNA, 60 bp, Artificial
  Synthetic oligonucleotide
cctattacaactaatggccacacagtcatgaccgcatgctcatctgatcccaactgggtg

SEQ ID NO: 130914 - DNA, 60 bp, Artificial
  Synthetic oligonucleotide
tatagattggcgaagaaactcggcccacccagagcgaacgcacacagcaggcgcaaggag

SEQ ID NO: 130915 - DNA, 60 bp, Artificial
  Synthetic oligonucleotide
agggacaagcgcaacaagcatcaggttctgggacggcacagcaagcctcaggctcaggga

SEQ ID NO: 130916 - DNA, 60 bp, Artificial
  Synthetic oligonucleotide
agggaccgcccaacaagcaacaggatctggggccgcacaacaacaagcccaaggaagcca

SEQ ID NO: 130917 - DNA, 60 bp, Artificial
  Synthetic oligonucleotide
taacaacaatcaaagacaaggacccaccggaacggagggagcgacccggcaaaggcccca

SEQ ID NO: 130918 - DNA, 60 bp, Artificial
  Synthetic oligonucleotide
cccaactccacatagaaggacaatgggcgaggggaagaaccaccaatcattctcattcaa

SEQ ID NO: 130919 - DNA, 60 bp, Artificial
  Synthetic oligonucleotide
cctcatctggggtcaatgtagacgagctaaggaaagactcccaccactacaggacagtgg

SEQ ID NO: 130920 - DNA, 60 bp, Artificial
  Synthetic oligonucleotide
gagaaacgaagaccagatcgagaacaccaccccacacgcaatgcacctgtactactatac

SEQ ID NO: 130921 - DNA, 60 bp, Artificial
  Synthetic oligonucleotide
gttcgaggctcttgcatcaaactggagcacagactcaggggaggttcattatgtggatgg

SEQ ID NO: 130922 - DNA, 60 bp, Artificial
  Synthetic oligonucleotide
ccctgataagttggtctcggacataaggactcaggtagagaatgtatccaaccaaacagg

SEQ ID NO: 130923 - DNA, 60 bp, Artificial
  Synthetic oligonucleotide
agtcatgtgggacccttcggaggttgctccatttccctggtagggtcagagccccggtca

SEQ ID NO: 130924 - DNA, 60 bp, Artificial
  Synthetic oligonucleotide
ccctaatctatcaaattcgtcacctcttcctctatggtatgggagctgtataaactcgtg

SEQ ID NO: 130925 - DNA, 60 bp, Artificial
  Synthetic oligonucleotide
gcacctttccgagctgtgacggacattgatcctcaaagaatggtgcaagagagtacagta

SEQ ID NO: 130926 - DNA, 60 bp, Artificial
  Synthetic oligonucleotide
gcacgccaggggaaagaatgagaatatacatttccaagcatgcatcatccagacaatgta

SEQ ID NO: 130927 - DNA, 60 bp, Artificial
  Synthetic oligonucleotide
gcaaattgttcggacttccagggctatattctagatctcatcagattttccgagacagca

SEQ ID NO: 130928 - DNA, 60 bp, Artificial
  Synthetic oligonucleotide
ggtgtatcattccgctcagaattgcagacccgagtagaatccccatgtgctgggcatttg

SEQ ID NO: 130929 - DNA, 60 bp, Artificial
  Synthetic oligonucleotide
agacagacaggtgacaacagaaaccctgggtccatgcaagccttatctaggtgcttatac

SEQ ID NO: 130930 - DNA, 60 bp, Artificial
  Synthetic oligonucleotide
actggagttggaaatcttgcggagagtatgtgaggtggtaagactagcatccgaagggaa

SEQ ID NO: 130931 - DNA, 60 bp, Artificial
  Synthetic oligonucleotide
gagccaagagcaaatcttgatctaacaacaccccagatgattccgaccttccccaccttg

SEQ ID NO: 130932 - DNA, 65 bp, Artificial
  Synthetic oligonucleotide
ctggatatagatgattgcataataggattatttcccaaggagagagaattaaagattatggcaag

SEQ ID NO: 130933 - DNA, 60 bp, Artificial
  Synthetic oligonucleotide
caagggtcaacatccaaacgacccatgagcgatgtgataggaagagtcggtgctgctggc

SEQ ID NO: 130934 - DNA, 60 bp, Artificial
  Synthetic oligonucleotide
ccatgatactatcacaccagacacccgtttacaccaccaaagagaagcgattaggcaaga

SEQ ID NO: 130935 - DNA, 60 bp, Artificial
  Synthetic oligonucleotide
ctgtatgtgacatagcagcagtggccaggcatcacccaggggtgtttcatcttgttgggg

SEQ ID NO: 130936 - DNA, 60 bp, Artificial
  Synthetic oligonucleotide
atgttatcatccgggctctcccacgaggggcttttatatgagcttgagagtatttccagg

SEQ ID NO: 130937 - DNA, 60 bp, Artificial
  Synthetic oligonucleotide
ctggatatgtctgacggacctacctgctggaacggtcaagatggagggctggaaggcctc

SEQ ID NO: 130938 - DNA, 60 bp, Artificial
  Synthetic oligonucleotide
cagacaatctaaacaaggtatttaagaagctaattgatcgcgtgacgggacagggattgc

SEQ ID NO: 130939 - DNA, 60 bp, Artificial
  Synthetic oligonucleotide
tgagtgacctcatggcttcagggactcacccgttacctccctccgcaatcatgagcggag

SEQ ID NO: 130940 - DNA, 60 bp, Artificial
  Synthetic oligonucleotide
ctaatcacgactatacactgtggatgccagaggattccaattccgggatgtcttgcgaca

SEQ ID NO: 130941 - DNA, 60 bp, Artificial
  Synthetic oligonucleotide
acatcttatagtggaggagttaatcaaggaaagagaagagtgtctagatgcactggagtc

SEQ ID NO: 130942 - DNA, 60 bp, Artificial
  Synthetic oligonucleotide
tccgaggcaatatactggtccccgaatctaagagatgggctcgagtgtcttgtatctcta

SEQ ID NO: 130943 - DNA, 60 bp, Artificial
  Synthetic oligonucleotide
cgatccctcagaaaataccggctgcatatccaaccacaatgaaggagggaaacagatctg

SEQ ID NO: 130944 - DNA, 60 bp, Artificial
  Synthetic oligonucleotide
agatctttaaatgccactgttatatctacttgcgcacctcacgagatgtcagtcttgggg

SEQ ID NO: 130945 - DNA, 60 bp, Artificial
  Synthetic oligonucleotide
gacgtttcatgcctgggagaaggtgacaaatgtccatgtagttaagcgggctctgtcgct

SEQ ID NO: 130946 - DNA, 60 bp, Artificial
  Synthetic oligonucleotide
ggttaaccaccgggaataagcccatgagattgacccttacagacaattgcatccgctcct

SEQ ID NO: 130947 - DNA, 60 bp, Artificial
  Synthetic oligonucleotide
tcagcccttgtttgtcaattgagacaggagttgggtgtgcatattagcagcaagttgaat

SEQ ID NO: 130948 - DNA, 60 bp, Artificial
  Synthetic oligonucleotide
gccattgtgatagtgtattctaacagggtgttcaacgtgtctaagccgcttaatgatccc

SEQ ID NO: 130949 - DNA, 60 bp, Artificial
  Synthetic oligonucleotide
gccatccaaagaaccaaatgggttgatcaggaagtccgccatgccgccaagaccatgact

SEQ ID NO: 130950 - DNA, 60 bp, Artificial
  Synthetic oligonucleotide
cccggacaagaaactgccgttcctcactcttatttcatccacttcagatcccttgggctc

SEQ ID NO: 130951 - DNA, 58 bp, Artificial
  Synthetic oligonucleotide
atcaagaaagatcaggtcaagtttagagactcaatctggggttccttaatagtcacca

SEQ ID NO: 130952 - DNA, 60 bp, Artificial
  Synthetic oligonucleotide
tatagtgaaggaggcgaggggtgtgccaggcatcatccgtcttgccaaggagggtcttcg

SEQ ID NO: 130953 - DNA, 60 bp, Artificial
  Synthetic oligonucleotide
ggtcttgttcctcagagagagcccatttgttgagggagatttcttggggacgaaaacgtg

SEQ ID NO: 130954 - DNA, 60 bp, Artificial
  Synthetic oligonucleotide
ccactttaagggaaatgagccttgttctattcaattgtagcagtcccaagagtgagctcc

SEQ ID NO: 130955 - DNA, 60 bp, Artificial
  Synthetic oligonucleotide
ccgttgttccctaggttcctcagcgaactatttagctcttctttcctgggcatacccgag

SEQ ID NO: 130956 - DNA, 60 bp, Artificial
  Synthetic oligonucleotide
ccttgctatgtcacgtattgtttatttggacccatccctcggaggagtctctggaatgtc

SEQ ID NO: 130957 - DNA, 59 bp, Artificial
  Synthetic oligonucleotide
ggaagactgtcaacaccactgataaaatgaactttctacgcaagatagttaggaattgc

SEQ ID NO: 130958 - DNA, 60 bp, Artificial
  Synthetic oligonucleotide
atcacaccggctactttagttgacataaggagaacagatattcagggcagctgggctctg

SEQ ID NO: 130959 - DNA, 60 bp, Artificial
  Synthetic oligonucleotide
cgacgacgacctgataataggcttgaaaccaaaagagagagagttgaagatagagggtcg

SEQ ID NO: 130960 - DNA, 60 bp, Artificial
  Synthetic oligonucleotide
ggagcacaattccaaactttagatttctggctgggacttatgatatgttcttttctcgag

SEQ ID NO: 130961 - DNA, 60 bp, Artificial
  Synthetic oligonucleotide
taaacagtttggtgcagagagccgaagagtttagaccgttgatacactcactgggagact

SEQ ID NO: 130962 - DNA, 60 bp, Artificial
  Synthetic oligonucleotide
caagtactctaagtggtatctagaccccaaattattagctccagaccaccctttagctcc

SEQ ID NO: 130963 - DNA, 60 bp, Artificial
  Synthetic oligonucleotide
accatcagtctcggccgaactcgtttgctgaattcctaaacaagacatactcgagtgatt

SEQ ID NO: 130964 - DNA, 60 bp, Artificial
  Synthetic oligonucleotide
tctttcaccagaacgaaattggcatcttggctagcagagaacagaggaggtcctgtcccc

SEQ ID NO: 130965 - DNA, 60 bp, Artificial
  Synthetic oligonucleotide
ataaccaccatcaaggtcagcggattcacatgcaccggagtcgtgaccgaatcagagact

SEQ ID NO: 130966 - DNA, 60 bp, Artificial
  Synthetic oligonucleotide
gggccggatttggtgcatcaacatgaattccagggcatgccagctatggtccgacatgtc

SEQ ID NO: 130967 - DNA, 60 bp, Artificial
  Synthetic oligonucleotide
ccgtgtacagggcaattccctctctatgcaataccagacaaattaggcccttggagtccg

SEQ ID NO: 130968 - DNA, 60 bp, Artificial
  Synthetic oligonucleotide
gaattgggtctataagctgaggcggactctgatatttcaatgggcagaatcccgcggtcc

SEQ ID NO: 130969 - DNA, 60 bp, Artificial
  Synthetic oligonucleotide
gattgatttgggtgcaacggtacacagggtcctgtagcaattccaatgatctatggtgcc

SEQ ID NO: 130970 - DNA, 60 bp, Artificial
  Synthetic oligonucleotide
ggtggacccggactataaagcaattcaacatctctccagggcttttccccaggtgactgg

SEQ ID NO: 130971 - DNA, 57 bp, Artificial
  Synthetic oligonucleotide
gagaaacccgaacaattgtccaggaccagcatggctcccgagacgacatcaggcccc

SEQ ID NO: 130972 - DNA, 60 bp, Artificial
  Synthetic oligonucleotide
gagtggatatgctcggctcagcaagtttcaatctccacctcttcaaatcctgcccctgtc

SEQ ID NO: 130973 - DNA, 60 bp, Artificial
  Synthetic oligonucleotide
atattatctggcatgaacgccgcgaagttggacccggacgatgtttgctcctacctagct

SEQ ID NO: 130974 - DNA, 60 bp, Artificial
  Synthetic oligonucleotide
tgaatcctcagttatacctctcatccatccgctggcagatccatccaccatcttcagggg

SEQ ID NO: 130975 - DNA, 60 bp, Artificial
  Synthetic oligonucleotide
gtgtctggcgctgtacctagttcccagatacttcccgaggtcaacttgttgccaggtcac

SEQ ID NO: 130976 - DNA, 60 bp, Artificial
  Synthetic oligonucleotide
ctggcggacgatggaactgtcaattcgtatgatgaggattatctctcaggggagacgagg

SEQ ID NO: 130977 - DNA, 60 bp, Artificial
  Synthetic oligonucleotide
caacccctgatgctttatgcccagacgtggacctcagagcttgttcaaaaggacatcaga

SEQ ID NO: 130978 - DNA, 60 bp, Artificial
  Synthetic oligonucleotide
ccccagttccctctagaggaggccccagtgttcaagaggacaggatctgcactacacagg

SEQ ID NO: 130979 - DNA, 60 bp, Artificial
  Synthetic oligonucleotide
ccgagtgcaatcagagcaggcatggccgatctggaaatggcagaggagactgttgacttg

SEQ ID NO: 130980 - DNA, 60 bp, Artificial
  Synthetic oligonucleotide
cggatttgggtgatagaagcttagagaaatttacccgcttgctagaggaccctaccactc

SEQ ID NO: 130981 - DNA, 60 bp, Artificial
  Synthetic oligonucleotide
cctgggagtcatacaaatcgagacaggggcactccagatcatgagtcaccagttgtcgac

SEQ ID NO: 130982 - DNA, 60 bp, Artificial
  Synthetic oligonucleotide
cccactggattcgattgatttacaaaatagtcaaaacgacccgtctgacagggagtccag

SEQ ID NO: 130983 - DNA, 60 bp, Artificial
  Synthetic oligonucleotide
gggttggacgaggatgactgcataatcgggttatatcccaaagaacgagagatgaagacc

SEQ ID NO: 130984 - DNA, 60 bp, Artificial
  Synthetic oligonucleotide
gtgtcagctccacggggaacttgcgggcccatgtgggtaccatctttgctcactggacaa

SEQ ID NO: 130985 - DNA, 60 bp, Artificial
  Synthetic oligonucleotide
gggaccaagttgtaattctccaatcattccagatccccaagagtgtaaatttggccacta

SEQ ID NO: 130986 - DNA, 60 bp, Artificial
  Synthetic oligonucleotide
ctgatggaacaataagcgcacaacatgacgccaagaacagaccaacaaagaagcgaccac

SEQ ID NO: 130987 - DNA, 60 bp, Artificial
  Synthetic oligonucleotide
gaggacccaatagagagtgactattctacttcagatatctccctcatgtcttgtcctgcc

SEQ ID NO: 130988 - DNA, 60 bp, Artificial
  Synthetic oligonucleotide
caggcttcctagatcagtatgccagtagagagcactgtacaccctctgacagcttctcta

SEQ ID NO: 130989 - DNA, 60 bp, Artificial
  Synthetic oligonucleotide
caacagggacatgtgcggtcaagtaccaagctccccacttccgaatatgtacacgactgg

SEQ ID NO: 130990 - DNA, 60 bp, Artificial
  Synthetic oligonucleotide
gtatattttcatttcgcaggtacacaatggaagggatggatcactgggagaacgctaagt

SEQ ID NO: 130991 - DNA, 60 bp, Artificial
  Synthetic oligonucleotide
gcctgttatctgtacctttgctcgggagagtatgtaccggtgatctcaaacaaccaactg

SEQ ID NO: 130992 - DNA, 60 bp, Artificial
  Synthetic oligonucleotide
gaagctgcacgaccatctgaacagaacaaggaggatgaggtggttgcaatggacacagat

SEQ ID NO: 130993 - DNA, 60 bp, Artificial
  Synthetic oligonucleotide
cggctgtgtcaaaacccttgagcctgttgcagccagcgggatatgcatagatgtgaacct

SEQ ID NO: 130994 - DNA, 60 bp, Artificial
  Synthetic oligonucleotide
gcgcatgttttgatggaagattgtccaagtcaaggagcgacgcaagccattatgctgttg

SEQ ID NO: 130995 - DNA, 60 bp, Artificial
  Synthetic oligonucleotide
tggacaagcaggtgctaatgtcccgaggcaacatcaggcaaggaagaaacgagctagggg

SEQ ID NO: 130996 - DNA, 60 bp, Artificial
  Synthetic oligonucleotide
gtgaatcatgatgcaccgccccacggaatcgcagcactgagagcccaagcagaggcagta

SEQ ID NO: 130997 - DNA, 56 bp, Artificial
  Synthetic oligonucleotide
tatcatccaaagcgcagacaatgggcagagaagacgataacaggtccagcaagatg

SEQ ID NO: 130998 - DNA, 60 bp, Artificial
  Synthetic oligonucleotide
ggaaggtggtaaggaaaaggaaatcaaggaaagagatcgatgtaggaaggttcaagatgg

SEQ ID NO: 130999 - DNA, 60 bp, Artificial
  Synthetic oligonucleotide
gcaggagatcacagaaggatacaactacggagacaaggacgcagaatgaaccaacccacc

SEQ ID NO: 131000 - DNA, 60 bp, Artificial
  Synthetic oligonucleotide
ggagctctctattgtaacggatggaatcaggacagatccggcctcggagtatttgagtct

SEQ ID NO: 131001 - DNA, 60 bp, Artificial
  Synthetic oligonucleotide
gatccagccctcgttccttgtcttcctacatcaaactggacgatcagcgatcccaccacc

SEQ ID NO: 131002 - DNA, 60 bp, Artificial
  Synthetic oligonucleotide
cagaatggcaggtatatacgcagtttcaatcaagggccatgcatcggcgatattcaaccg

SEQ ID NO: 131003 - DNA, 60 bp, Artificial
  Synthetic oligonucleotide
gcttgcggaaaagcgaaacaggggaagccagacgcagacatcgcgtttatagaaggggtc

SEQ ID NO: 131004 - DNA, 60 bp, Artificial
  Synthetic oligonucleotide
ggggctgatcggaaattctatcatgccacaacaaacaatgggctgctggggagttctctt

SEQ ID NO: 131005 - DNA, 60 bp, Artificial
  Synthetic oligonucleotide
caacaatgtttcaggagaggctacaattctcactagccagtcgcttgttgatgctgctat

SEQ ID NO: 131006 - DNA, 60 bp, Artificial
  Synthetic oligonucleotide
ctgcgttgtcccataaaactaatttagacgatcctgactcacatttatatgatgcatgca

SEQ ID NO: 131007 - DNA, 60 bp, Artificial
  Synthetic oligonucleotide
gcgaacaataaagcagtaaaggaggttggaagaatgaaagcagatgtgttcatacagtgc

SEQ ID NO: 131008 - DNA, 60 bp, Artificial
  Synthetic oligonucleotide
gcagtaatggaagagctgcatagtatgctacaagagaaggggctagcatgtcatacggaa

SEQ ID NO: 131009 - DNA, 60 bp, Artificial
  Synthetic oligonucleotide
ggaggcaacatgtacaaaacaatctccagtgagtgttgaggagaccagagtatgtgagcg

SEQ ID NO: 131010 - DNA, 58 bp, Artificial
  Synthetic oligonucleotide
agcatgagctcttgctatggtgggtacaaggcaacaataggtaatgataacgggactc

SEQ ID NO: 131011 - DNA, 60 bp, Artificial
  Synthetic oligonucleotide
ctgatgccgactccatgcccgataggagggtagaactcaatggcgtgacattcaagcttg

SEQ ID NO: 131012 - DNA, 60 bp, Artificial
  Synthetic oligonucleotide
ccagcagagtcgaccaactctgtccaggaagaagaaaaccagagagagcattcagatgct

SEQ ID NO: 131013 - DNA, 60 bp, Artificial
  Synthetic oligonucleotide
caaaggtcgcactccctcctagtcaagtactctcatggttgagggtcagtgggtcagaga

SEQ ID NO: 131014 - DNA, 60 bp, Artificial
  Synthetic oligonucleotide
atagtacatcatcatccatcttcgatactttcaggcctagtaacacatggctccaaggac

SEQ ID NO: 131015 - DNA, 60 bp, Artificial
  Synthetic oligonucleotide
caaccgcacaacccgcaaacactggcaaggtggcaatgtctcaccataatccgggcgtgg

SEQ ID NO: 131016 - DNA, 60 bp, Artificial
  Synthetic oligonucleotide
ggcaaagagtgctgagggaccatctgcttctaccgaggacatcaaagactcggacacaaa

SEQ ID NO: 131017 - DNA, 60 bp, Artificial
  Synthetic oligonucleotide
ctggacaggcgatataatcaggatggcaccaccctacgacaacccagaatggatcaaagg

SEQ ID NO: 131018 - DNA, 60 bp, Artificial
  Synthetic oligonucleotide
gcacatcctgttcgccgagattgtagatggagtaggcaacgtgtcaggtaagatcagcgg

SEQ ID NO: 131019 - DNA, 60 bp, Artificial
  Synthetic oligonucleotide
gcccgatgagataaccggtgacgtagaacacaggtaccacgacatggcaaccaaacacgg

SEQ ID NO: 131020 - DNA, 60 bp, Artificial
  Synthetic oligonucleotide
gccatccacacgacacattgcacgagcggaaattgcaccttctatcgaatggggtaacac

SEQ ID NO: 131021 - DNA, 60 bp, Artificial
  Synthetic oligonucleotide
caggacgaactcctgctgctagtggctgacgttttggtgattttaactgattagtagatt

SEQ ID NO: 131022 - DNA, 60 bp, Artificial
  Synthetic oligonucleotide
caacgctcgggacaggctttcagtcaatcagcacaaaagactacacgccaactctcgcat

SEQ ID NO: 131023 - DNA, 60 bp, Artificial
  Synthetic oligonucleotide
tcatggcttattgttgtccggatacatagcaggcagcacatcagggaggttccaaacagt

SEQ ID NO: 131024 - DNA, 60 bp, Artificial
  Synthetic oligonucleotide
ctgctcccaatatcagattagccgtccggttgcaacccagaagagcgatgtgtcctgcat

SEQ ID NO: 131025 - DNA, 60 bp, Artificial
  Synthetic oligonucleotide
ttgctaggatatcaggacgacttctcatcgaaaaggtccggagctttagcatcaaacccg

SEQ ID NO: 131026 - DNA, 60 bp, Artificial
  Synthetic oligonucleotide
ccagcccacacaaatcctatcgtgctatcaaagaaatctgatctatatgtccccgctgct

SEQ ID NO: 131027 - DNA, 60 bp, Artificial
  Synthetic oligonucleotide
cacgtatatctctgttaagggcaagatgtcagaggcactccagataacttggcatccagc

SEQ ID NO: 131028 - DNA, 60 bp, Artificial
  Synthetic oligonucleotide
ggtttgttaatgagttggcttatacgggatacggaggaggtgtaacaatctgcattacac

SEQ ID NO: 131029 - DNA, 60 bp, Artificial
  Synthetic oligonucleotide
cgtaggatcaacgatacccggttttgtaaattcagtactatcaagggtcgatcaatctac

SEQ ID NO: 131030 - DNA, 60 bp, Artificial
  Synthetic oligonucleotide
ctgattgtgatgcatgcttatcttatgaccccggatgttggagtcaggacgcaaaccttg

SEQ ID NO: 131031 - DNA, 60 bp, Artificial
  Synthetic oligonucleotide
gttaccatctgagtcaatgcaatcccaagggagggactcccagcttcttaaggtcaggga

SEQ ID NO: 131032 - DNA, 60 bp, Artificial
  Synthetic oligonucleotide
gggttttgacgaaaaggataggaaacagctgggagctaagaagaggtcaattcaggcctt

SEQ ID NO: 131033 - DNA, 60 bp, Artificial
  Synthetic oligonucleotide
ccgatacaccaaggcctatcacagggcaccagccatgaatctgggtcaactaggacaggg

SEQ ID NO: 131034 - DNA, 60 bp, Artificial
  Synthetic oligonucleotide
acgtccaatgatgaggaccgtgtctccaccatcctgacggaaggcaccctcaccatcacg

SEQ ID NO: 131035 - DNA, 60 bp, Artificial
  Synthetic oligonucleotide
ggggtcacccaggaccagatcttttctcttctctgctttgcatgggcccttaggggacta

SEQ ID NO: 131036 - DNA, 60 bp, Artificial
  Synthetic oligonucleotide
cacgaagacatcccacaccaaacaccttggatatctgtttcaagatgccgactccctcca

SEQ ID NO: 131037 - DNA, 60 bp, Artificial
  Synthetic oligonucleotide
tggttcgaggacttgctgggagaatggtcgagaaagaactcctggaggccgaaatgtgcg

SEQ ID NO: 131038 - DNA, 60 bp, Artificial
  Synthetic oligonucleotide
atgaggggggcaacggacgacttttcctatctcaaccatctcatcaccaacatggctcaa

SEQ ID NO: 131039 - DNA, 60 bp, Artificial
  Synthetic oligonucleotide
gggagtcttccgatctgtgtcccagcgtgtccagagtgttacagagagaaagaacgggtc

SEQ ID NO: 131040 - DNA, 60 bp, Artificial
  Synthetic oligonucleotide
ttccgtcccaactcagatcatccatctcccgctatcagtcaccagcgtctccgcagtggc

SEQ ID NO: 131041 - DNA, 60 bp, Artificial
  Synthetic oligonucleotide
ccccgggagagtccatcaccaagttctatagcacagccccagacacccatagacttctcc

SEQ ID NO: 131042 - DNA, 60 bp, Artificial
  Synthetic oligonucleotide
cccagaccaagccactgatcgcaaaagcctacatggagctcaagggaaaccccaggacca

SEQ ID NO: 131043 - DNA, 60 bp, Artificial
  Synthetic oligonucleotide
gacccggcaaggcgcactatcttctggacggtcaaatcatgcgaggtgactgtgactacg

SEQ ID NO: 131044 - DNA, 60 bp, Artificial
  Synthetic oligonucleotide
cgttcatatttgcagacgaccacgttggagggaaaggccaccgcgagaagctaggggcac

SEQ ID NO: 131045 - DNA, 60 bp, Artificial
  Synthetic oligonucleotide
tagaggccccgcacgtatgggcagatggagcattctccggactgatgggtggaattgagg

SEQ ID NO: 131046 - DNA, 60 bp, Artificial
  Synthetic oligonucleotide
gccagacggatcatccagttgatgagacaggtgtcagaggcgaagtccatccaagagcgc

SEQ ID NO: 131047 - DNA, 60 bp, Artificial
  Synthetic oligonucleotide
ggcagatcacatagccaccatggatcagggaataacccaaattgacgacgcactggccag

SEQ ID NO: 131048 - DNA, 60 bp, Artificial
  Synthetic oligonucleotide
ggtggaccgggtgggtggggttgtcgaaggagaacgcgccagaattcaacacatcagcaa

SEQ ID NO: 131049 - DNA, 60 bp, Artificial
  Synthetic oligonucleotide
ccaacgacgctggaggaaatcattggacacttcgtccctgaagatctccaactagacgcc

SEQ ID NO: 131050 - DNA, 60 bp, Artificial
  Synthetic oligonucleotide
gacgtacccacatttctttcaggcctaggaacgggaatggagacaatctcagagtgtgtc

SEQ ID NO: 131051 - DNA, 60 bp, Artificial
  Synthetic oligonucleotide
agttttgcaccagtcaacgccagttcaactccttggcggttttccagagtctagatgaac

SEQ ID NO: 131052 - DNA, 60 bp, Artificial
  Synthetic oligonucleotide
cccaaaatagggacatctggtacgacgggggatcatcaggaagagacaccacagaaaaga

SEQ ID NO: 131053 - DNA, 60 bp, Artificial
  Synthetic oligonucleotide
tccagctcttcgggcgcttggctcctaagacagagcacatcaggtaccaagctgggagga

SEQ ID NO: 131054 - DNA, 60 bp, Artificial
  Synthetic oligonucleotide
gtggcaagactcaccgctaactccttttctcgactcatgcccagggggaggattcagcta

SEQ ID NO: 131055 - DNA, 60 bp, Artificial
  Synthetic oligonucleotide
gaaacatggcgacccaacccgcgctcagcacaaccagcttctctccgctcgtcctccgcg

SEQ ID NO: 131056 - DNA, 60 bp, Artificial
  Synthetic oligonucleotide
gggcacaagcactcctgctcacggccatctgccagacccttgaacccgatctagttcccc

SEQ ID NO: 131057 - DNA, 60 bp, Artificial
  Synthetic oligonucleotide
ctgaacaagcgcagccaggcaaaggagatctacaccatttggcggacacagaggaagggg

SEQ ID NO: 131058 - DNA, 60 bp, Artificial
  Synthetic oligonucleotide
cggaatgagagggcacttggattcaaccggggactgaccacagctgccatcgccatgaag

SEQ ID NO: 131059 - DNA, 60 bp, Artificial
  Synthetic oligonucleotide
tgcactctccgcactcgggggaccccagactgtgcaggcgttgtccgtgcttctctccta

SEQ ID NO: 131060 - DNA, 60 bp, Artificial
  Synthetic oligonucleotide
ctcctcttgtccctgtgttccaatgccctagatatcgacgtcaactccctcccctcactt

SEQ ID NO: 131061 - DNA, 60 bp, Artificial
  Synthetic oligonucleotide
ccggtcgaaaacatctcgacgtaccatgcagattgggacactccgctctacactcatccc

SEQ ID NO: 131062 - DNA, 60 bp, Artificial
  Synthetic oligonucleotide
caaccgacgagaccaagtggaggcccttttacttattgagagccacaccagaaagaccga

SEQ ID NO: 131063 - DNA, 60 bp, Artificial
  Synthetic oligonucleotide
caaggagcccgaggtcaacccagaaaaacggaccatagaactactcctggtgagcagtct

SEQ ID NO: 131064 - DNA, 60 bp, Artificial
  Synthetic oligonucleotide
aacgaggcaagcaaggatcacgagtacccgttcttccccgaaccctcctgcatctggatg

SEQ ID NO: 131065 - DNA, 60 bp, Artificial
  Synthetic oligonucleotide
gtgactacaaccttcaagaggaaacatttccggccaactgtgagcgcctgtagagatgcc

SEQ ID NO: 131066 - DNA, 60 bp, Artificial
  Synthetic oligonucleotide
tcttctcctttcccgacgtatcaaagagaatatcaaggatggtgtcaggagcagtgcctc

SEQ ID NO: 131067 - DNA, 60 bp, Artificial
  Synthetic oligonucleotide
cagctggtctcggtaagacctgaggtgatttctgatcagtatgagtataagtaccctgct

SEQ ID NO: 131068 - DNA, 60 bp, Artificial
  Synthetic oligonucleotide
caaccctagtgcacttagatccggcttggctgacttggagatggctgaggagacagtgga

SEQ ID NO: 131069 - DNA, 60 bp, Artificial
  Synthetic oligonucleotide
atcgccccttggagttgatttctggagtcatttcttatatacttctgaggcttgacaatc

SEQ ID NO: 131070 - DNA, 58 bp, Artificial
  Synthetic oligonucleotide
taacacctgctacgttagtggacattcacaggacgaacactgagggcaactgggctca

SEQ ID NO: 131071 - DNA, 60 bp, Artificial
  Synthetic oligonucleotide
aatcatcggattaatccaaaactcccgaaccatccgacgccaattcaggagaagcttgtc

SEQ ID NO: 131072 - DNA, 60 bp, Artificial
  Synthetic oligonucleotide
cgtggaagacgagggatgcacgactctcaccccattctcgtacatggaactgaaagtggg

SEQ ID NO: 131073 - DNA, 60 bp, Artificial
  Synthetic oligonucleotide
gggagggtgtggagctgttccgcagagcgagcagatcagttgagagagatatcatggggc

SEQ ID NO: 131074 - DNA, 59 bp, Artificial
  Synthetic oligonucleotide
caggcatagatctgggttttcccgaatggaagcgttactttcttataggaatatctgtg

SEQ ID NO: 131075 - DNA, 60 bp, Artificial
  Synthetic oligonucleotide
gaagttgcccctccggtgcatgctggggagtgtggcatccaatcattccaaaaggttcca

SEQ ID NO: 131076 - DNA, 60 bp, Artificial
  Synthetic oligonucleotide
ttatatgaattactgcctttgcatattgaaccgagcgagggattgagattagaaaggtca

SEQ ID NO: 131077 - DNA, 60 bp, Artificial
  Synthetic oligonucleotide
cttgctcctcgaatgaccatcactccaagccactgctcaatcagttacctccacatgatg

SEQ ID NO: 131078 - DNA, 60 bp, Artificial
  Synthetic oligonucleotide
gctgctggagccttatatcgtgaataagttggtacagaaagcagagaagtttagaccttt

SEQ ID NO: 131079 - DNA, 60 bp, Artificial
  Synthetic oligonucleotide
cttatggcatctggaacgcatcccctacctccttccgcattgatgagtggtggggaggat

SEQ ID NO: 131080 - DNA, 60 bp, Artificial
  Synthetic oligonucleotide
aacgcccttgactgggatgaagagaaaaccatcttggccttatggaaagagattgcctcc

SEQ ID NO: 131081 - DNA, 60 bp, Artificial
  Synthetic oligonucleotide
ccgtccagagtgcagccaacatgtcctacgacttaataatctgtgatgcggaagtgaccg

SEQ ID NO: 131082 - DNA, 60 bp, Artificial
  Synthetic oligonucleotide
cgtccggattgaacaaggagggcttgctgtatgagttggacagtatatcaaggaatgcca

SEQ ID NO: 131083 - DNA, 60 bp, Artificial
  Synthetic oligonucleotide
tccaacagagtattcaatgtgtcaaaacctctgaacgaccctaaattttaccctccgtca

SEQ ID NO: 131084 - DNA, 60 bp, Artificial
  Synthetic oligonucleotide
atcaaatatactgcctggatatgaccaatggtcctacctgttggaacggccaggacgggg

SEQ ID NO: 131085 - DNA, 60 bp, Artificial
  Synthetic oligonucleotide
gacaggaattatcaagagtgtctggcgagcgatttggctaagaggatacttaggtgggga

SEQ ID NO: 131086 - DNA, 60 bp, Artificial
  Synthetic oligonucleotide
cgagtcacagggcagggcttattagattattcccgggtgacttatgcattccacctagat

SEQ ID NO: 131087 - DNA, 60 bp, Artificial
  Synthetic oligonucleotide
ccaggctgctggaagaccccacaacattaaacataagaggaggagcaagcccgaccatcc

SEQ ID NO: 131088 - DNA, 60 bp, Artificial
  Synthetic oligonucleotide
caccttgtggttgaagagttggtgaagaagagggaagagtgtttggatgctttagaaact

SEQ ID NO: 131089 - DNA, 60 bp, Artificial
  Synthetic oligonucleotide
cagtggttactgcttatgaggattgttcggggttggtgtctttcacagggttcatcaagc

SEQ ID NO: 131090 - DNA, 60 bp, Artificial
  Synthetic oligonucleotide
ccgagagtgaaaactcatacgtccctctccagtcttatcttgatgctgtgggaatgcaga

SEQ ID NO: 131091 - DNA, 60 bp, Artificial
  Synthetic oligonucleotide
gggcttgcaagcagagactctgtggggtccctggcatgagattgatggatggatcatggg

SEQ ID NO: 131092 - DNA, 60 bp, Artificial
  Synthetic oligonucleotide
ccaaacagatgagggttcgattgagacaactgaactccctgatgcggcaggtcttaggag

SEQ ID NO: 131093 - DNA, 60 bp, Artificial
  Synthetic oligonucleotide
agatgcaaaagcccaacccagtctctgcccctcctgacgacgatgacctatggcttcccc

SEQ ID NO: 131094 - DNA, 60 bp, Artificial
  Synthetic oligonucleotide
gaaagagctacaggattacgaggcagcagaaagcactaaggttgatgtagcattggcaga

SEQ ID NO: 131095 - DNA, 60 bp, Artificial
  Synthetic oligonucleotide
cgggagacacgagaagcccagaggcagtatacaccaggattatgatgaacggagggagat

SEQ ID NO: 131096 - DNA, 60 bp, Artificial
  Synthetic oligonucleotide
cgaggaagagatcaagagaatgtttgagccagggcaagaaacagctgttccgcactcgta

SEQ ID NO: 131097 - DNA, 60 bp, Artificial
  Synthetic oligonucleotide
acgagatgggtggatcaagaggtccgtcatgccgcgaaaacgatgaagtgtgattatagt

SEQ ID NO: 131098 - DNA, 60 bp, Artificial
  Synthetic oligonucleotide
gtgtttaagagaactggatctgccctccaccgcttcaaatcagcaagatacagcgagggg

SEQ ID NO: 131099 - DNA, 60 bp, Artificial
  Synthetic oligonucleotide
cccgggctgtcctgtgatatattcacaactagcaaaggaaagaaagcaaccaaagacggg

SEQ ID NO: 131100 - DNA, 60 bp, Artificial
  Synthetic oligonucleotide
cgagagactcgaaccttgctcagaccttgatccgaaacatagtgtcgttgacaggcccct

SEQ ID NO: 131101 - DNA, 60 bp, Artificial
  Synthetic oligonucleotide
caagaatatctgtgtcagttctcccgtctctcgaccagtccttcttctccagaggtcccc

SEQ ID NO: 131102 - DNA, 60 bp, Artificial
  Synthetic oligonucleotide
gactccatgagctgtacaacaatcctgtgacctattacttcaagaagcagacattggggg

SEQ ID NO: 131103 - DNA, 60 bp, Artificial
  Synthetic oligonucleotide
caaggttctgagaggctattttaagaagttagatgtcgggtcaatgcgggcaggaggtct

SEQ ID NO: 131104 - DNA, 60 bp, Artificial
  Synthetic oligonucleotide
ctaccgaggtttacgatgatccggtggatcctgttgagccagaagcagacctgagaagca

SEQ ID NO: 131105 - DNA, 60 bp, Artificial
  Synthetic oligonucleotide
gaggcggaccagtccctagtgagaaagtgatcattacagcactctccagacctccagtca

SEQ ID NO: 131106 - DNA, 60 bp, Artificial
  Synthetic oligonucleotide
cccatctgtcaacatgcttttcacactgtggcctagtcgagtcaagagatgtgaaaaaaa

SEQ ID NO: 131107 - DNA, 60 bp, Artificial
  Synthetic oligonucleotide
ccaggaatcatcaggtcctccaggattagactgggctgccagcaatgatgaggatgatgg

SEQ ID NO: 131108 - DNA, 60 bp, Artificial
  Synthetic oligonucleotide
tctcatatacgggaaaactccattgtttaggggcaatatcctggttccggagtctaagag

SEQ ID NO: 131109 - DNA, 60 bp, Artificial
  Synthetic oligonucleotide
cccgcttttagtataagctcagagccttgccacgctctttacccatttataagaatagtg

SEQ ID NO: 131110 - DNA, 60 bp, Artificial
  Synthetic oligonucleotide
tgttggcaatgtcaaggataatttatctggacccgtctcttggtggagtctcagggatgt

SEQ ID NO: 131111 - DNA, 60 bp, Artificial
  Synthetic oligonucleotide
gtccaagaagttgcagaatccgctgatatctggtctcagggttgtccaatgggcaactgg

SEQ ID NO: 131112 - DNA, 60 bp, Artificial
  Synthetic oligonucleotide
tcaacactcacaatccttgatcaagcccatgagagactttctcctgatgtctgtccaggc

SEQ ID NO: 131113 - DNA, 60 bp, Artificial
  Synthetic oligonucleotide
agggactgctcaggggctcctgtactccattttggttgctactcacgattcagggtacaa

SEQ ID NO: 131114 - DNA, 60 bp, Artificial
  Synthetic oligonucleotide
agggctggtgaaggttgtcattgggttggcactgtccggggcccctgttccagatggaat

SEQ ID NO: 131115 - DNA, 60 bp, Artificial
  Synthetic oligonucleotide
gagccgtcgaggaaggggcatctaagctagggctgatcatcaagaaagaagagaccatgt

SEQ ID NO: 131116 - DNA, 60 bp, Artificial
  Synthetic oligonucleotide
gggctgatcatcaagaaagaagagaccatgtgtagttacgacttcctcatctacgggaag

SEQ ID NO: 131117 - DNA, 60 bp, Artificial
  Synthetic oligonucleotide
gccgtcgaggaaggggcatctaaactagggctgatcatcaagaaagaagagaccatgtgt

SEQ ID NO: 131118 - DNA, 57 bp, Artificial
  Synthetic oligonucleotide
gtggatgatcttgagttacagaggggaactctgtccaaagtggctatcattatagcc

SEQ ID NO: 131119 - DNA, 57 bp, Artificial
  Synthetic oligonucleotide
gagcattaaaggacatccggggtaagttggacaaagattggtcaagtttcggaataa

SEQ ID NO: 131120 - DNA, 60 bp, Artificial
  Synthetic oligonucleotide
cctctgcaaaataaccgggatgtctacagaagatgtaacgacctggatcttgaaccgaga

SEQ ID NO: 131121 - DNA, 60 bp, Artificial
  Synthetic oligonucleotide
gaagagtctctacacaatccgtaccctgactaccactggcttcgaactgtaagaaccacc

SEQ ID NO: 131122 - DNA, 60 bp, Artificial
  Synthetic oligonucleotide
caggtggtctctttgaagcctgagattatcgtggatcaacatgagtacaagtaccctgcc

SEQ ID NO: 131123 - DNA, 60 bp, Artificial
  Synthetic oligonucleotide
atcaggtggtctctttgaagcctgagattatcgtggatcaacatgagtacaagtaccctg

SEQ ID NO: 131124 - DNA, 60 bp, Artificial
  Synthetic oligonucleotide
tctcactggatcaggttgatttacaagatagtgaagactaccagactcgttggcagcatc

SEQ ID NO: 131125 - DNA, 60 bp, Artificial
  Synthetic oligonucleotide
ctgtcatctcactggatcaggttgatttacaagatagtgaagactaccagactcgtaggc

SEQ ID NO: 131126 - DNA, 60 bp, Artificial
  Synthetic oligonucleotide
ctgtcatctcactggatcaggttgatttacaagatagtgaagactaccagactcgttggc

SEQ ID NO: 131127 - DNA, 60 bp, Artificial
  Synthetic oligonucleotide
cttcctgcaaatgaggatccagtggaatacccggcggattacttcagaaaatcaaaggag

SEQ ID NO: 131128 - DNA, 60 bp, Artificial
  Synthetic oligonucleotide
gcccgacagcctgatgacattgagtatacatctcttactacagcaggtttgttgtatgct

SEQ ID NO: 131129 - DNA, 60 bp, Artificial
  Synthetic oligonucleotide
gcccgacaacctgatgacattgagtatacatctcttactacagcaggtttgttgtacgct

SEQ ID NO: 131130 - DNA, 60 bp, Artificial
  Synthetic oligonucleotide
gatcaatgaacagtttgaacctcttgtgccagaaggtcgtgacatttttgatgtgtgggg

SEQ ID NO: 131131 - DNA, 60 bp, Artificial
  Synthetic oligonucleotide
ccgagaagttgcagatgagatggtccaaatgatgcttccaggccaagaaattgacaaggc

SEQ ID NO: 131132 - DNA, 60 bp, Artificial
  Synthetic oligonucleotide
tggatcttgaaccgagaagttgcagatgagatggtccaaatgatgcttccaggccaagaa

SEQ ID NO: 131133 - DNA, 60 bp, Artificial
  Synthetic oligonucleotide
gattgtcttctaagtctccatattcttccgtcaaaaaccctgccttccacttctgggggc

SEQ ID NO: 131134 - DNA, 60 bp, Artificial
  Synthetic oligonucleotide
gagaagttgcagatgagatggtccaaatgatgcttccaggccaagaaattgacaaggccg

SEQ ID NO: 131135 - DNA, 60 bp, Artificial
  Synthetic oligonucleotide
gagaagttgcagatgaaatggtccaaatgatgcttccaggccaagaaattgacaaggccg

SEQ ID NO: 131136 - DNA, 60 bp, Artificial
  Synthetic oligonucleotide
cttcctgcaaatgaggatccagtggaatacccggcagattacttcagaaaatcaaaggag

SEQ ID NO: 131137 - DNA, 60 bp, Artificial
  Synthetic oligonucleotide
gatcaatgaacagtttgaacctcttgtgccagaaggtcgtgacatctttgatgtgtgggg

SEQ ID NO: 131138 - DNA, 60 bp, Artificial
  Synthetic oligonucleotide
gcccgacagcctgatgacattgagtatacatctcttactacagcaggtttgttgtacgct

SEQ ID NO: 131139 - DNA, 60 bp, Artificial
  Synthetic oligonucleotide
ggtgttggtcgatctgaggaggaccatccaggtctatatcagagcagggacgttctccgg

SEQ ID NO: 131140 - DNA, 60 bp, Artificial
  Synthetic oligonucleotide
caacctcaggagatgaatcgttactcccgtcgttctagacatcccaaccctcctgtcccc

SEQ ID NO: 131141 - DNA, 60 bp, Artificial
  Synthetic oligonucleotide
ggatctaccgactgaacctccgcacacaactcacacccaggggagaagatgacggtctgg

SEQ ID NO: 131142 - DNA, 60 bp, Artificial
  Synthetic oligonucleotide
gccctgtaaattgcatgttaaccttcatcttcaaaatgtgcctctccagctggccttggc

SEQ ID NO: 131143 - DNA, 60 bp, Artificial
  Synthetic oligonucleotide
gacagccctagagaggcaatggttgatcaaggatgaaccgtcacaccatgttgacttggg

SEQ ID NO: 131144 - DNA, 60 bp, Artificial
  Synthetic oligonucleotide
gatgtgacgtcatggagactgccgctgctgatgcacgcaacatgggagtctatcctgcct

SEQ ID NO: 131145 - DNA, 60 bp, Artificial
  Synthetic oligonucleotide
cctagggttgagatctaagcctgtatgtcactccactccccaataatgtccacgtccgcc

SEQ ID NO: 131146 - DNA, 60 bp, Artificial
  Synthetic oligonucleotide
gcatcaatcttatactggggtctgacagaggaatcactgcatgccatgacggctttggcc

SEQ ID NO: 131147 - DNA, 60 bp, Artificial
  Synthetic oligonucleotide
gctgattagtcctcatgatgctgggcaagaatgcttgtgggaagatccgcccgcaacctg

SEQ ID NO: 131148 - DNA, 60 bp, Artificial
  Synthetic oligonucleotide
tctggcaagtgaccaccaaagtggcagcaactgtagcatccgactggactaatttggcga

SEQ ID NO: 131149 - DNA, 60 bp, Artificial
  Synthetic oligonucleotide
gaaggttgccgagggagcactgatcctacatccattgacgacttgcttcaggacaccaac

SEQ ID NO: 131150 - DNA, 60 bp, Artificial
  Synthetic oligonucleotide
gaggagcagcaggtccggccccgaagaagacacgatcaggcttatagatctcagctcggt

SEQ ID NO: 131151 - DNA, 60 bp, Artificial
  Synthetic oligonucleotide
ccactttctccgatctggggctccctttaaaagcatctgaaacatgggtcagtgactctc

SEQ ID NO: 131152 - DNA, 60 bp, Artificial
  Synthetic oligonucleotide
cgatcaacacatcagcaatctcctataacttccaggattgggactgtgtgatggtggaga

SEQ ID NO: 131153 - DNA, 60 bp, Artificial
  Synthetic oligonucleotide
cacccgagtccctgttctcaatctatggagtcctgtgtcctctagttggaagcacctggc

SEQ ID NO: 131154 - DNA, 60 bp, Artificial
  Synthetic oligonucleotide
tgaggctttgcttgcaggaataatccaaaggagggacaaccagggactaataccggacag

SEQ ID NO: 131155 - DNA, 60 bp, Artificial
  Synthetic oligonucleotide
ctagaaggaacacttacctatgtgctgtgttggcctccctgaacaagaagaacgttccgc

SEQ ID NO: 131156 - DNA, 60 bp, Artificial
  Synthetic oligonucleotide
ttcgactattgcagaggccatgttcgactcagctgcgatagccgcgggtcgggtcgtgat

SEQ ID NO: 131157 - DNA, 60 bp, Artificial
  Synthetic oligonucleotide
gaagagtgggtacgtgaaagtgatggcaggtaaagatactaccatctacattgggactga

SEQ ID NO: 131158 - DNA, 60 bp, Artificial
  Synthetic oligonucleotide
tctgtctcgcggagttaagagatcctcgcctccaagtcaggaaggcggtcaatccggcca

SEQ ID NO: 131159 - DNA, 60 bp, Artificial
  Synthetic oligonucleotide
cgggacaccacccatgggaacaaattgcatgtcttggcggcagctttcctgtgtgtgctc

SEQ ID NO: 131160 - DNA, 60 bp, Artificial
  Synthetic oligonucleotide
gctcgaacacagcacctgtctccgtcattctggagcggttggagttccttcacaatggga

SEQ ID NO: 131161 - DNA, 60 bp, Artificial
  Synthetic oligonucleotide
gcagcggatgacacatcgcctcttgactgtgctgtgtaccatcttatctggggcgacacc

SEQ ID NO: 131162 - DNA, 60 bp, Artificial
  Synthetic oligonucleotide
cattcctctattcatgtccaagcctcaatatagccttctcagctcgggtcgggaaacaca

SEQ ID NO: 131163 - DNA, 60 bp, Artificial
  Synthetic oligonucleotide
ccttgatgatctccctgtatgctcattcgggcgaggacatgatgaggaatgcaagcggcc

SEQ ID NO: 131164 - DNA, 60 bp, Artificial
  Synthetic oligonucleotide
cgttgagcatgaatcgtgtgttggcaggttctagactcgggacccgggggataagatggg

SEQ ID NO: 131165 - DNA, 60 bp, Artificial
  Synthetic oligonucleotide
ctcgtgtgacaactggattcgcaggggtcatggtgacagattactacgcaactgtggcag

SEQ ID NO: 131166 - DNA, 60 bp, Artificial
  Synthetic oligonucleotide
ggaggagatcaaaggggaattcgatcatagaaggggcatatcaggagatatcagcggagg

SEQ ID NO: 131167 - DNA, 60 bp, Artificial
  Synthetic oligonucleotide
gccagggcgcccacaaatatagaatgggtaaggtcatagacatcgcagtgtccacccacc

SEQ ID NO: 131168 - DNA, 60 bp, Artificial
  Synthetic oligonucleotide
cacctcatctacttccccaccatcctgtctctcatcctaggtacagagggcacaccagca

SEQ ID NO: 131169 - DNA, 60 bp, Artificial
  Synthetic oligonucleotide
gtggaaccgtctccagaacgaacaaccccagctttgtcagagatgccatcagcacctaac

SEQ ID NO: 131170 - DNA, 60 bp, Artificial
  Synthetic oligonucleotide
cccaagatcatggacccaagactagcgagcatcatcgcaacatcgggtcatatgagcatc

SEQ ID NO: 131171 - DNA, 60 bp, Artificial
  Synthetic oligonucleotide
ggcgagtggtcaacagttccaattgggctcttgctcacctggatcaggaacccgaggtct

SEQ ID NO: 131172 - DNA, 60 bp, Artificial
  Synthetic oligonucleotide
ggagccaactttctcgcatcaagcaaggcattgaaacatatccctctgctcggggtacag

SEQ ID NO: 131173 - DNA, 60 bp, Artificial
  Synthetic oligonucleotide
gcacattgctcaggctgtctgtgaaagagccgtcacacatcatgcaagcgatcaacagca

SEQ ID NO: 131174 - DNA, 60 bp, Artificial
  Synthetic oligonucleotide
tcttgatgaacacgaccctggcagccaacacccatcttaagtcccttttcaccctcctag

SEQ ID NO: 131175 - DNA, 60 bp, Artificial
  Synthetic oligonucleotide
gacacgtatctgagaaacattctggaagtggacccgacacaattctatgcaatagacggc

SEQ ID NO: 131176 - DNA, 60 bp, Artificial
  Synthetic oligonucleotide
cctgccttaaggactgagatcgatgacactatcgctgcgatttggaggatgagtggaggg

SEQ ID NO: 131177 - DNA, 60 bp, Artificial
  Synthetic oligonucleotide
gcatgggcgggtgatgagtcggggaaggaagggcttcgtcagaagggttggacaattctg

SEQ ID NO: 131178 - DNA, 60 bp, Artificial
  Synthetic oligonucleotide
cgacgcactatgttctgctgaggaactggatgtgaaggtgctgcacgaagtagccggagc

SEQ ID NO: 131179 - DNA, 60 bp, Artificial
  Synthetic oligonucleotide
ctcctccatatgacactcgccatcgcagcagctggagctcatattcccatcatcaagcac

SEQ ID NO: 131180 - DNA, 60 bp, Artificial
  Synthetic oligonucleotide
ggtgcaggagtctctagcaataactggtacggagcctgccgaggagcttgctctatgacc

SEQ ID NO: 131181 - DNA, 60 bp, Artificial
  Synthetic oligonucleotide
accaaggaaaggttcaaggccacagacattgctgccgcgtatgggaacgaagacatcctg

SEQ ID NO: 131182 - DNA, 60 bp, Artificial
  Synthetic oligonucleotide
tcaacaaggactctcactgaggctgcatcacttcacacgacctttgcaatgctgcattct

SEQ ID NO: 131183 - DNA, 60 bp, Artificial
  Synthetic oligonucleotide
cagcataccgagcacccgatggtaattgagacgcctgtcgggccatggctaccatacagc

SEQ ID NO: 131184 - DNA, 60 bp, Artificial
  Synthetic oligonucleotide
atgacaatctcacggagagggagaagaggatccttgctgtaggagtcagatgcggagagg

SEQ ID NO: 131185 - DNA, 60 bp, Artificial
  Synthetic oligonucleotide
ccctcatgtcattccggctcagattgtactgtgtgtcaacagaggcattattaggggaca

SEQ ID NO: 131186 - DNA, 60 bp, Artificial
  Synthetic oligonucleotide
ggctcaacccttggtcctaaaagaaagacacgcagtaatggcaccaactcagcccagcct

SEQ ID NO: 131187 - DNA, 60 bp, Artificial
  Synthetic oligonucleotide
gcaccttgggaccctttatggtgatctcttcactcgtcagagcacgctcggccacagcga

SEQ ID NO: 131188 - DNA, 60 bp, Artificial
  Synthetic oligonucleotide
gctccgttcacgcaatgcagcaacagggacgatgaagaaatgatcatcaagatacaacgg

SEQ ID NO: 131189 - DNA, 60 bp, Artificial
  Synthetic oligonucleotide
gtctatgtgtggaaactccggctatgaagtcatcaaaatattggagccatatgtcgtgaa

SEQ ID NO: 131190 - DNA, 60 bp, Artificial
  Synthetic oligonucleotide
cgagtcctggattcacgcgttgtgtcaagaggctgggaacccagatcttggagagagaac

SEQ ID NO: 131191 - DNA, 60 bp, Artificial
  Synthetic oligonucleotide
tggagagagatctggttaagctcccacgaatcctggattcacgcgttgtgtcaagaggcc

SEQ ID NO: 131192 - DNA, 60 bp, Artificial
  Synthetic oligonucleotide
ggagaggtgaaagtgtgtagtccgaacggttactcgttcaggatcctgcggcacattctg

SEQ ID NO: 131193 - DNA, 60 bp, Artificial
  Synthetic oligonucleotide
ccctgagggcatgaactgggtatacaaattgaggagaacccttatcttccagtgggctga

SEQ ID NO: 131194 - DNA, 60 bp, Artificial
  Synthetic oligonucleotide
cagagttctaactgtctttttgacagaaactacacacttatgctgaaagaccttttcttg

SEQ ID NO: 131195 - DNA, 60 bp, Artificial
  Synthetic oligonucleotide
gggtaggcacagtagtcactgcttatgaggactgttcagggttggtgtcgtttacagggt

SEQ ID NO: 131196 - DNA, 60 bp, Artificial
  Synthetic oligonucleotide
gtaggcacagtagtcactgcttatgaggactgctcagggctggtgtcgtttactgggttc

SEQ ID NO: 131197 - DNA, 60 bp, Artificial
  Synthetic oligonucleotide
tctgagggccagtacacggcttccctacctccatgtgcttgacatgaggataagtctcct

SEQ ID NO: 131198 - DNA, 60 bp, Artificial
  Synthetic oligonucleotide
atgaccgcgtgggtgccaaccagccagccgagtgtcttgggatccgtcaacttccacatc

SEQ ID NO: 131199 - DNA, 60 bp, Artificial
  Synthetic oligonucleotide
tgaagattgaaggtcgattctttgctctaatgtcatggaatctaagattgtattttgtca

SEQ ID NO: 131200 - DNA, 60 bp, Artificial
  Synthetic oligonucleotide
cggggtcagccttgcataggttcaagtctgccagatacagcgaaggagggtattcttctg

SEQ ID NO: 131201 - DNA, 60 bp, Artificial
  Synthetic oligonucleotide
aaggacggggtcagccttgcataggttcaagtctgccagatacagcgaaggagggtattc

SEQ ID NO: 131202 - DNA, 60 bp, Artificial
  Synthetic oligonucleotide
aaaggacggggtcagccttgcataggttcaagtctgccagatacagcgaaggagggtatt

SEQ ID NO: 131203 - DNA, 60 bp, Artificial
  Synthetic oligonucleotide
ggagcaacaggaggaggcaatcctagagtttctgtatcagtactcccgtccttcgatcag

SEQ ID NO: 131204 - DNA, 60 bp, Artificial
  Synthetic oligonucleotide
acgaccaaatagtcaacctcgccaatataatgtcgacagtgtccaccaatgctctgacag

SEQ ID NO: 131205 - DNA, 60 bp, Artificial
  Synthetic oligonucleotide
gaatgtctctcgggaggttccatatacgtcagttctcagaccctgtctctgaagggttgt

SEQ ID NO: 131206 - DNA, 60 bp, Artificial
  Synthetic oligonucleotide
gtgggctgattccaggggccctcttgaaggggaggagttggaacactctcaagagatcac

SEQ ID NO: 131207 - DNA, 60 bp, Artificial
  Synthetic oligonucleotide
gtgggctgattccaggggccctcttgaaggggaagaactggaacactctcaggagatcac

SEQ ID NO: 131208 - DNA, 60 bp, Artificial
  Synthetic oligonucleotide
cagtgggctgattccaggggccctcttgaaggggaagaattggaacactctcaggagatc

SEQ ID NO: 131209 - DNA, 60 bp, Artificial
  Synthetic oligonucleotide
cagtgggctgattccaggggccctcttgaaggggaggagttggaatactctcaggagatc

SEQ ID NO: 131210 - DNA, 60 bp, Artificial
  Synthetic oligonucleotide
cccttatcttccagtgggctgattccaggggccctcttgaaggggaggagttggaatact

SEQ ID NO: 131211 - DNA, 60 bp, Artificial
  Synthetic oligonucleotide
ccctcatcttccagtgggctgattccaggggccctcttgaaggggaagaattggaacact

SEQ ID NO: 131212 - DNA, 60 bp, Artificial
  Synthetic oligonucleotide
aggagaacctttatcttccagtgggctgattccaggggccctcttgaaggggaggagttg

SEQ ID NO: 131213 - DNA, 60 bp, Artificial
  Synthetic oligonucleotide
ggagaacccttatcttccagtgggctgattccaggggccctcttgaaggggaggagttgg

SEQ ID NO: 131214 - DNA, 60 bp, Artificial
  Synthetic oligonucleotide
ggtatacaagttgaggagaacccttatcttccagtgggctgattccaggggccctcttga

SEQ ID NO: 131215 - DNA, 54 bp, Artificial
  Synthetic oligonucleotide
agatctcacatacggagatatgtctcagtcagttccaatcatcaagcccgtcca

SEQ ID NO: 131216 - DNA, 60 bp, Artificial
  Synthetic oligonucleotide
agatctcacatacggagatatgtctcagtcagttccaatcatcaagcccgtccaagctca

SEQ ID NO: 131217 - DNA, 60 bp, Artificial
  Synthetic oligonucleotide
ctgaagagatctcatatacggagatatgtctcagtcagttccaatcatcaagcccgtcca

SEQ ID NO: 131218 - DNA, 54 bp, Artificial
  Synthetic oligonucleotide
agatcgcacatacggagatatgtctcagtcagttccaatcatcaagcccgtcca

SEQ ID NO: 131219 - DNA, 54 bp, Artificial
  Synthetic oligonucleotide
agatcgcacatacggagatatgtctcagtcagttccaatcatcaagctcgtcca

SEQ ID NO: 131220 - DNA, 60 bp, Artificial
  Synthetic oligonucleotide
gcgtactgatgtagaagggaattgggctctgacaggaggcatggaattgacaagggaccc

SEQ ID NO: 131221 - DNA, 60 bp, Artificial
  Synthetic oligonucleotide
ctctggtggagataaaacgtactgatgtagaagggaattgggctctgacaggaggcatgg

SEQ ID NO: 131222 - DNA, 60 bp, Artificial
  Synthetic oligonucleotide
aatggaggtcgactgaagagatctcatatacggagatatgtctcagtcagttccaatcat

SEQ ID NO: 131223 - DNA, 60 bp, Artificial
  Synthetic oligonucleotide
gcgtactgatgtagaagggaattgggctctgacaggaggcatggaactgacaagggaccc

SEQ ID NO: 131224 - DNA, 60 bp, Artificial
  Synthetic oligonucleotide
attccagagtgccatgatctttggagaaaccagtgagaagattgacttcgggacccggag

SEQ ID NO: 131225 - DNA, 60 bp, Artificial
  Synthetic oligonucleotide
cccagatatgaagagtctctacacaatccgtaccctgactaccactggcttcgaactgta

SEQ ID NO: 131226 - DNA, 60 bp, Artificial
  Synthetic oligonucleotide
gcagtcatgtcactgcaaggcctaagagagaagacaattggcaagtatgctaagtcagag

SEQ ID NO: 131227 - DNA, 60 bp, Artificial
  Synthetic oligonucleotide
gagcagtcatgtcactgcaaggcctaagagagaagacaattggcaagtatgctaagtcag

SEQ ID NO: 131228 - DNA, 60 bp, Artificial
  Synthetic oligonucleotide
tgtatcaatcatacatgtcaacagctacttgtatggagcattgaaggacatccggggtaa

SEQ ID NO: 131229 - DNA, 60 bp, Artificial
  Synthetic oligonucleotide
tgtatcaatcatacatgtcaacagctacttgtatggagcattaaaggacatccggggtaa

SEQ ID NO: 131230 - DNA, 57 bp, Artificial
  Synthetic oligonucleotide
caaggcctgagagagaagacaattggcaagtatgctaagtcagaatttgacaaatga

SEQ ID NO: 131231 - DNA, 60 bp, Artificial
  Synthetic oligonucleotide
caaggcctgagagagaagacaattggcaagtatgctaagtcagaatttgacaaatgaccc

SEQ ID NO: 131232 - DNA, 60 bp, Artificial
  Synthetic oligonucleotide
tcttccaatgggctgattctaggggccctcttgaaggggaggagttagaatactcccagg

SEQ ID NO: 131233 - DNA, 54 bp, Artificial
  Synthetic oligonucleotide
aggtcgattctttgctctaatgtcatggaatctaagattgtattttgtcatcac

SEQ ID NO: 131234 - DNA, 60 bp, Artificial
  Synthetic oligonucleotide
gaacgggagttgaagatcgagggccgattctttgctctaatgtcatggaatctaagatta

SEQ ID NO: 131235 - DNA, 60 bp, Artificial
  Synthetic oligonucleotide
gattgaaggtcgattctttgctctaatgtcatggaatctaagattgtattttgtcatcac

SEQ ID NO: 131236 - DNA, 60 bp, Artificial
  Synthetic oligonucleotide
cgggaattgaagattgaaggtcgattctttgctctaatgtcatggaatctaagattgtat

SEQ ID NO: 131237 - DNA, 60 bp, Artificial
  Synthetic oligonucleotide
gaggctggataatcatccctctctgtatataatgctcagagaaccgtctcttagaggaga

SEQ ID NO: 131238 - DNA, 60 bp, Artificial
  Synthetic oligonucleotide
gtgctggggtgtctctatcatcctacgatcacagagctgcttccaagcttagagaagtac

SEQ ID NO: 131239 - DNA, 60 bp, Artificial
  Synthetic oligonucleotide
catcgagtggcctctcagtgacacgctctctacattcctctctgacaaggcaatcaccca

SEQ ID NO: 131240 - DNA, 60 bp, Artificial
  Synthetic oligonucleotide
ctcaggccaacctaattccccacctggttagctctgcctctggtgacctcaacactccga

SEQ ID NO: 131241 - DNA, 60 bp, Artificial
  Synthetic oligonucleotide
cctcaggaccaaagacctcaaagactaggccctccatcaacccacaacgccccagtccca

SEQ ID NO: 131242 - DNA, 60 bp, Artificial
  Synthetic oligonucleotide
caccgtgcgccccaactggacctgggaggattaagtccagggtcttacctgagaagagca

SEQ ID NO: 131243 - DNA, 60 bp, Artificial
  Synthetic oligonucleotide
gcacggaccgggacgccacagaagaactagcatctcctgccccagaggagatatatgaag

SEQ ID NO: 131244 - DNA, 60 bp, Artificial
  Synthetic oligonucleotide
tcctgggatcggccctcggaatgctcccctttcccactcccgtagatctagagaaacgag

SEQ ID NO: 131245 - DNA, 60 bp, Artificial
  Synthetic oligonucleotide
gggactcacatgcacgagaaaatccatcaccacgcaggggacactgagtgggaatttgcc

SEQ ID NO: 131246 - DNA, 60 bp, Artificial
  Synthetic oligonucleotide
gatcctcgcacatgccgggtggaagagcctctgtgtgagtcagacttggaagggatggga

SEQ ID NO: 131247 - DNA, 60 bp, Artificial
  Synthetic oligonucleotide
actacctggtgtgacctcccaaggctgtctacccttcctagtcttgacccgcaggacgct

SEQ ID NO: 131248 - DNA, 60 bp, Artificial
  Synthetic oligonucleotide
tcagtgtaaaggaggttcccatggcgaaagatgcaagttcggggattgaggcgccgctgg

SEQ ID NO: 131249 - DNA, 60 bp, Artificial
  Synthetic oligonucleotide
gaggctgaactctgtgatgtgacggtgcccggcaaccggaaagccatagtggatgcagta

SEQ ID NO: 131250 - DNA, 60 bp, Artificial
  Synthetic oligonucleotide
gacagagtgtaccttctccgttgcgtctgtacaggctgcgttccaaaagatagatgatgg

SEQ ID NO: 131251 - DNA, 60 bp, Artificial
  Synthetic oligonucleotide
cgctggagagggattggactttgacccatccgaggttgaattgaccgtttatcggaccgg

SEQ ID NO: 131252 - DNA, 60 bp, Artificial
  Synthetic oligonucleotide
cctaagcttctcggagaggtccctcaccccagcatagtgataacctacaatcagaccgac

SEQ ID NO: 131253 - DNA, 60 bp, Artificial
  Synthetic oligonucleotide
tgactcagaagatgatgacgatcaggactacagcaagtatgcctaaaacagaacttcccc

SEQ ID NO: 131254 - DNA, 60 bp, Artificial
  Synthetic oligonucleotide
aacttgtatccagtccctccaccctgctggccctgaaaggcaagctagagaacccgtccc

SEQ ID NO: 131255 - DNA, 60 bp, Artificial
  Synthetic oligonucleotide
taatgtcccgcctctctcgcgaccctagagactgcatccatcacaccgttgacacccgag

SEQ ID NO: 131256 - DNA, 60 bp, Artificial
  Synthetic oligonucleotide
tctgcaggaccaccccgatacacccagccgtctgaagtccccatcaatatgacccgcatg

SEQ ID NO: 131257 - DNA, 60 bp, Artificial
  Synthetic oligonucleotide
gagggaatcaaggtctccgcagagttcgctgacctcgcccgcaggattgcaatcgctcta

SEQ ID NO: 131258 - DNA, 60 bp, Artificial
  Synthetic oligonucleotide
ccagttcacttactctcccaaaatgtcaggacaatgtcgttcagatgagagggaacctgg

SEQ ID NO: 131259 - DNA, 60 bp, Artificial
  Synthetic oligonucleotide
ggagcatgtcggactgaaggataaccggagtttgtttgcagcgggggagggacttagaga

SEQ ID NO: 131260 - DNA, 60 bp, Artificial
  Synthetic oligonucleotide
ggtgacccaattgaagcattcctactggagttcgtagatgagaggaggcaagttgaggca

SEQ ID NO: 131261 - DNA, 60 bp, Artificial
  Synthetic oligonucleotide
gggcaatggaatttggggcctcagtggagaaactggacttcatgacccgggagaacaaag

SEQ ID NO: 131262 - DNA, 60 bp, Artificial
  Synthetic oligonucleotide
tcatccgacccaaatgaggcacacaaatcgcccctcgccccctgtcatcctcaacttgca

SEQ ID NO: 131263 - DNA, 60 bp, Artificial
  Synthetic oligonucleotide
gagaggggattgcatctatgagggagtggccgaaatctccgaaaacaggacaacatacag

SEQ ID NO: 131264 - DNA, 60 bp, Artificial
  Synthetic oligonucleotide
taccagaaactcaaggacttggggattgacgcaccacacacctggggagatggagtgttc

SEQ ID NO: 131265 - DNA, 60 bp, Artificial
  Synthetic oligonucleotide
gcacgagagtgcttaaatctttgaaacccaaacaacccgccgccaagacacaagagaacc

SEQ ID NO: 131266 - DNA, 60 bp, Artificial
  Synthetic oligonucleotide
catcggagggtcaagtccttgagtacctcgattgacacccagcttgcaatggagcttgag

SEQ ID NO: 131267 - DNA, 60 bp, Artificial
  Synthetic oligonucleotide
atctagaccttaacacactcccatccctgcgagcccaggaagaggcgagctcaggtgagg

SEQ ID NO: 131268 - DNA, 60 bp, Artificial
  Synthetic oligonucleotide
gatatcacctttgaatttgtggagggtgtggtgttcatacacggaggtgaagacgggttt

SEQ ID NO: 131269 - DNA, 60 bp, Artificial
  Synthetic oligonucleotide
ggcctcacagcatcaaaggcgaaaatcctgcacatggacctcaaaccagaagatacccat

SEQ ID NO: 131270 - DNA, 60 bp, Artificial
  Synthetic oligonucleotide
caggcaaggcttgaacgaggacctttagtgccttattatgggactcagacgcagccactc

SEQ ID NO: 131271 - DNA, 60 bp, Artificial
  Synthetic oligonucleotide
ggtccttactcaattaggtgacgtactgggcgacagatttgggctggaagacgacttcaa

SEQ ID NO: 131272 - DNA, 60 bp, Artificial
  Synthetic oligonucleotide
ggacatcacagatgagaaggaatcggagatgtttgtcaccaaatttgccactgcaaggac

SEQ ID NO: 131273 - DNA, 60 bp, Artificial
  Synthetic oligonucleotide
gggtttggactaatgacgttcaagccccgtctgctccaagttttaagagagagcattgcg

SEQ ID NO: 131274 - DNA, 60 bp, Artificial
  Synthetic oligonucleotide
cggggagacacgccgcgagaactctaggtgggctcctgaacattaaggtcccaaatttgg

SEQ ID NO: 131275 - DNA, 60 bp, Artificial
  Synthetic oligonucleotide
cgccgtctgcatcacagtcagccgttccatctcggtcactctggagaccaaaaagtcgat

SEQ ID NO: 131276 - DNA, 60 bp, Artificial
  Synthetic oligonucleotide
ctgcaaggaggatcgtacgactgatggtccaggtatctcaggctgaaaccatccaggccc

SEQ ID NO: 131277 - DNA, 60 bp, Artificial
  Synthetic oligonucleotide
aggagccagggcgctcgcagctatgagaatcaacgggacagggatgactatggtgggtct

SEQ ID NO: 131278 - DNA, 60 bp, Artificial
  Synthetic oligonucleotide
cctggcgaaaggggttaaaaccaagtcgttattcatccaccagagtgtcccctctcacct

SEQ ID NO: 131279 - DNA, 60 bp, Artificial
  Synthetic oligonucleotide
ccagttacggagtgcccgagctagaagagtttccgaccgagtcctccgccctcaagaagt

SEQ ID NO: 131280 - DNA, 60 bp, Artificial
  Synthetic oligonucleotide
gagggcgaaggctgaactcacaaagtgaccacccacacccaactcaggctcaaagtcagc

SEQ ID NO: 131281 - DNA, 60 bp, Artificial
  Synthetic oligonucleotide
aacatgcccggcaacaaccacaatgaccgccccgtcgccctaataatgtcccgcctctct

SEQ ID NO: 131282 - DNA, 60 bp, Artificial
  Synthetic oligonucleotide
tgagagggggtacagctcagccatcgccatcgtgaatcagctcaaggtgaccgagccctc

SEQ ID NO: 131283 - DNA, 60 bp, Artificial
  Synthetic oligonucleotide
cgagagggcctccgcagaaaacagagcaaatctcaagtccatgatggaatctcaggctga

SEQ ID NO: 131284 - DNA, 60 bp, Artificial
  Synthetic oligonucleotide
ggacagtgtgccaagtcgccctgccccactcattggccaaacgtttattgggtcggggaa

SEQ ID NO: 131285 - DNA, 60 bp, Artificial
  Synthetic oligonucleotide
gtggcctctttgatcctcatctggtactgctgctgccgagtgactccgcaagccctgaac

SEQ ID NO: 131286 - DNA, 60 bp, Artificial
  Synthetic oligonucleotide
agagatctgatgcggtcactcaggccccatcacagtgtcactccaagaagtcgggacccc

SEQ ID NO: 131287 - DNA, 60 bp, Artificial
  Synthetic oligonucleotide
acgcatagatcttgggctagcacagacagcatcaaggaaaagggagtgacacaagacagg

SEQ ID NO: 131288 - DNA, 60 bp, Artificial
  Synthetic oligonucleotide
gtcaccaccacgttcaaaagaaagcatttccgcccaacaccagatgcatgtcgagctgct

SEQ ID NO: 131289 - DNA, 60 bp, Artificial
  Synthetic oligonucleotide
gtcacaaccacgttcaaaagaaagcatttccgcccaacaccagatgcatgtagagccgcg

SEQ ID NO: 131290 - DNA, 60 bp, Artificial
  Synthetic oligonucleotide
ccaggttttatgtccgacatatatgttgtcgccagggctatctcaagaggggctcctcta

SEQ ID NO: 131291 - DNA, 60 bp, Artificial
  Synthetic oligonucleotide
ccaccacgttcaaaagaaagcatttccgcccaacaccagatgcatgtcgagctgcttaca

SEQ ID NO: 131292 - DNA, 60 bp, Artificial
  Synthetic oligonucleotide
ctagaataatcaatttatatcccgcaagtttatcacttgtttacctctggaggagagaac

SEQ ID NO: 131293 - DNA, 60 bp, Artificial
  Synthetic oligonucleotide
cttctagaataatcagattatatcccgcaaatttatcacttgtttacctctggaggagag

SEQ ID NO: 131294 - DNA, 60 bp, Artificial
  Synthetic oligonucleotide
atatcccgcaaatttatcacttgtttacctctggaggagagaacatatgggctcaactcc

SEQ ID NO: 131295 - DNA, 60 bp, Artificial
  Synthetic oligonucleotide
tcagattatatcccgcaaatttatcacttgtttacctctggaggagagaacatatgggct

SEQ ID NO: 131296 - DNA, 60 bp, Artificial
  Synthetic oligonucleotide
gtccgacatatatgttgtcgccagggctatctcaagaggggctcctctatgaattggaga

SEQ ID NO: 131297 - DNA, 60 bp, Artificial
  Synthetic oligonucleotide
ccgttcgctgggcttgagtgggaagtccccttattcatcaaatgctgttggtcacgtgtt

SEQ ID NO: 131298 - DNA, 60 bp, Artificial
  Synthetic oligonucleotide
cgttcgctgggcttgagtgggaagtccccttattcatcaaatgctgttggtcacgtgttc

SEQ ID NO: 131299 - DNA, 60 bp, Artificial
  Synthetic oligonucleotide
gcgatgacatcgtgtctagggtcgttgattttgagtcaatttgggagaagccgtctgatc

SEQ ID NO: 131300 - DNA, 60 bp, Artificial
  Synthetic oligonucleotide
cttgacaaccatccatctctgtatgtcatgctcagggaatcatctctcagatcagagatc

SEQ ID NO: 131301 - DNA, 60 bp, Artificial
  Synthetic oligonucleotide
tgacggagatgactttctccttgctatgtcccgcattatttacttggacccatccctcgg

SEQ ID NO: 131302 - DNA, 60 bp, Artificial
  Synthetic oligonucleotide
ggtgaatccagactataaggcaattcaacatctctccagggcgttccctaaggcaactgg

SEQ ID NO: 131303 - DNA, 60 bp, Artificial
  Synthetic oligonucleotide
cttgtactgttcaattgtagtagtccgaaaagtgagttgcagagagcccgctcgttgaac

SEQ ID NO: 131304 - DNA, 60 bp, Artificial
  Synthetic oligonucleotide
cagaaacttcccgaggtctacttgaagccaggtcactttgattctctctgcggaaaggac

SEQ ID NO: 131305 - DNA, 60 bp, Artificial
  Synthetic oligonucleotide
gggatcgacttgggtctctcggagtgggagagatatctgatcatcggggcttctgctgta

SEQ ID NO: 131306 - DNA, 60 bp, Artificial
  Synthetic oligonucleotide
gacctctttctatccagattcaactccctactcatattactttctcctccagagcctagg

SEQ ID NO: 131307 - DNA, 60 bp, Artificial
  Synthetic oligonucleotide
gtgggaagatcagatctactgcttggacatgtcggatggacccacctgttggaatggtca

SEQ ID NO: 131308 - DNA, 60 bp, Artificial
  Synthetic oligonucleotide
catctttacaacaagcaaaggaaagaaagcatcgaagggaggtaaggtgtgcgggttcgt

SEQ ID NO: 131309 - DNA, 60 bp, Artificial
  Synthetic oligonucleotide
ggactctctcaggaagggcttctgtatgagcttgaaagtatctcaagaaacgctctctcg

SEQ ID NO: 131310 - DNA, 60 bp, Artificial
  Synthetic oligonucleotide
ttaaagtgttacttccgaaaggtcgatgttgggtctttgaaagtcgggggtcttgcagca

SEQ ID NO: 131311 - DNA, 60 bp, Artificial
  Synthetic oligonucleotide
ctttaacgggatcattttaagtccagacggacatgtcttaattccggagatgcagtcctc

SEQ ID NO: 131312 - DNA, 60 bp, Artificial
  Synthetic oligonucleotide
tctgaattacacactaggaaacagaggcctcaggataccaccagagggagtccttttctg

SEQ ID NO: 131313 - DNA, 60 bp, Artificial
  Synthetic oligonucleotide
caaactgttggctcaagatcaccctttgactccctatataaggacacagacatggcctcc

SEQ ID NO: 131314 - DNA, 60 bp, Artificial
  Synthetic oligonucleotide
gcaaacttaagttgtgcggaatctctggtctcaggcttatggacgggtcttgggtctcca

SEQ ID NO: 131315 - DNA, 60 bp, Artificial
  Synthetic oligonucleotide
ccccactggtatctgctccaccagatgatgatgatctatggcttcctcctccagagtatg

SEQ ID NO: 131316 - DNA, 60 bp, Artificial
  Synthetic oligonucleotide
ggctggtcaaggtggtcataggtctggctctgtctggagctcccgttccggaaggaatga

SEQ ID NO: 131317 - DNA, 60 bp, Artificial
  Synthetic oligonucleotide
gtgttaccagccttgccagagatggtctccggcttcctctcaggtgtatacttggatggg

SEQ ID NO: 131318 - DNA, 58 bp, Artificial
  Synthetic oligonucleotide
gtacaaatatcccgctatcaaagaccaaaagaagcctagtataactcttgggaaggct

SEQ ID NO: 131319 - DNA, 60 bp, Artificial
  Synthetic oligonucleotide
ccacccttgttgacataaagagaacagatattgagggcaattgggcattgacgggaggac

SEQ ID NO: 131320 - DNA, 60 bp, Artificial
  Synthetic oligonucleotide
tgcgaggcaatgccatattcagggccggatttggtgcatcaatatgaactcccgggcatg

SEQ ID NO: 131321 - DNA, 60 bp, Artificial
  Synthetic oligonucleotide
gggtagaccaggaagtccgccatgccgccaagacaatgacaggtgaccatagcccttcca

SEQ ID NO: 131322 - DNA, 60 bp, Artificial
  Synthetic oligonucleotide
cctctgatgctttacgctcaaacatggacttcagagcttgttcaaaaggacatcagactg

SEQ ID NO: 131323 - DNA, 60 bp, Artificial
  Synthetic oligonucleotide
tggatatgttcagcccagcaggtagcaatatccacctcttcaaatccagctccagtttca

SEQ ID NO: 131324 - DNA, 60 bp, Artificial
  Synthetic oligonucleotide
ggtcctcgacatctatgtcaacccagctgtttcatgcttgggagaaagtgaccaatgtcc

SEQ ID NO: 131325 - DNA, 60 bp, Artificial
  Synthetic oligonucleotide
tgctgaccctattgccaaaatcttccatctcttgcgtctgtggcccaacagggagtgaga

SEQ ID NO: 131326 - DNA, 60 bp, Artificial
  Synthetic oligonucleotide
aaccgggtcagcattgcacagattcaagtctgctagatacagtgaagggggttactcgtc

SEQ ID NO: 131327 - DNA, 60 bp, Artificial
  Synthetic oligonucleotide
aaggctcatgttggagtggctgaccaccggaaacaggcctggacgactgaccctcactga

SEQ ID NO: 131328 - DNA, 60 bp, Artificial
  Synthetic oligonucleotide
ggtccagttcatcggagccgtggattcattctctatgtcaagaggctggcaacccggact

SEQ ID NO: 131329 - DNA, 60 bp, Artificial
  Synthetic oligonucleotide
accaaatcagtcagttttagacgtctcagccacctaaggaagcttgtgccaggattcggg

SEQ ID NO: 131330 - DNA, 60 bp, Artificial
  Synthetic oligonucleotide
caacatcatgtcaacggtttccactaacgctctgactgtggctcaacactctcagtctct

SEQ ID NO: 131331 - DNA, 60 bp, Artificial
  Synthetic oligonucleotide
aaaagctgatagatcgagtgacgggacagggattacaggattactccagggttacatatg

SEQ ID NO: 131332 - DNA, 60 bp, Artificial
  Synthetic oligonucleotide
gatgatgacctgataataggcttgaaaccgaaggaaagagaattgaagatagagggtcga

SEQ ID NO: 131333 - DNA, 60 bp, Artificial
  Synthetic oligonucleotide
ggacgaagttggcgtcttggcttgccgagaatagaggaggtcctgttcctagtgagaagg

SEQ ID NO: 131334 - DNA, 60 bp, Artificial
  Synthetic oligonucleotide
ccctaaaggcacatgctcgggagcctcggtcccttcgattttctgctccactaatcatga

SEQ ID NO: 131335 - DNA, 60 bp, Artificial
  Synthetic oligonucleotide
aatggactaatcaagcagaggagaatactagagaactgcctaattttcccttccccttgt

SEQ ID NO: 131336 - DNA, 60 bp, Artificial
  Synthetic oligonucleotide
cttgaaggtacattcggtccgagcgccaggaaattcttccaggttctagaccaattcgac

SEQ ID NO: 131337 - DNA, 60 bp, Artificial
  Synthetic oligonucleotide
tcacggacaatcagacgacaattcagacggagcctttccaggtccttagaggagtctttt

SEQ ID NO: 131338 - DNA, 60 bp, Artificial
  Synthetic oligonucleotide
cgccattgtgatagtatactctaatagggtgtttaatgtgtccaagccacttagcgatcc

SEQ ID NO: 131339 - DNA, 60 bp, Artificial
  Synthetic oligonucleotide
gggtgtcttgcaactcaaatctcagcttgtcatcccattggattcgattaatttacaaaa

SEQ ID NO: 131340 - DNA, 60 bp, Artificial
  Synthetic oligonucleotide
caggatgttgagtgcaggatgagtgaggacttccaaatggacgaagttgaagacccgaac

SEQ ID NO: 131341 - DNA, 60 bp, Artificial
  Synthetic oligonucleotide
gagctgtccaaacaacctgattgttgaggatgagggatgcacgagcctgtccgggttttc

SEQ ID NO: 131342 - DNA, 60 bp, Artificial
  Synthetic oligonucleotide
gcaggtgaccccaggtatgaggagtctctgcacaacccttatccagactatcactggttg

SEQ ID NO: 131343 - DNA, 60 bp, Artificial
  Synthetic oligonucleotide
gggccagataagatctttgaatgcgactgtcatatccacctgtgctcctcatgagatgtc

SEQ ID NO: 131344 - DNA, 60 bp, Artificial
  Synthetic oligonucleotide
cgagtagggacggtggtaaccgcttatgaagattgttctggacttgtctcgtttacaggg

SEQ ID NO: 131345 - DNA, 60 bp, Artificial
  Synthetic oligonucleotide
ggtcacacattaggagatacatctcagtcagctccaaccatcagtcccgaccgaactcat

SEQ ID NO: 131346 - DNA, 60 bp, Artificial
  Synthetic oligonucleotide
acaatcaccaaaggagagaatcaaatggaccaacgtttcgcgtgatgggacaattcttgg

SEQ ID NO: 131347 - DNA, 60 bp, Artificial
  Synthetic oligonucleotide
agcaacagactggccgaagtttctagagtcagtagatctaaatgggttagacgaagaaga

SEQ ID NO: 131348 - DNA, 60 bp, Artificial
  Synthetic oligonucleotide
ggcccttgtgatcctgttgttggggatctatcgagtggcatctatcacaaacgatgcgta

SEQ ID NO: 131349 - DNA, 60 bp, Artificial
  Synthetic oligonucleotide
catagcagaaaacaatggggttatcatgagcgccatcgagaggggcacaaacaaattggg

SEQ ID NO: 131350 - DNA, 60 bp, Artificial
  Synthetic oligonucleotide
ccttggtgtggaaaccatcccctgacctcctgccttatgcagcatctccggaagcagagg

SEQ ID NO: 131351 - DNA, 60 bp, Artificial
  Synthetic oligonucleotide
gcgccagtattgcttcttcggatgctttgctcttaaactggtctccatgcacaatcccgc

SEQ ID NO: 131352 - DNA, 60 bp, Artificial
  Synthetic oligonucleotide
ccgcggaaacattcgttgtctagaagggaaaaggtggtccagggtgacatgtgtgaccaa

SEQ ID NO: 131353 - DNA, 60 bp, Artificial
  Synthetic oligonucleotide
tcccgggatatacgacccagcccagatggtttggacctggagtgacagcagagaccaagc

SEQ ID NO: 131354 - DNA, 60 bp, Artificial
  Synthetic oligonucleotide
ccctcagtggagtgctggattgggtgttcacggagactgtcgcagctgaagtggagaaga

SEQ ID NO: 131355 - DNA, 60 bp, Artificial
  Synthetic oligonucleotide
taatgagaatgtttccggatccagtcaccgaggggctagcgttttggaaggtggtctaca

SEQ ID NO: 131356 - DNA, 60 bp, Artificial
  Synthetic oligonucleotide
ggaagtgattgctcaggaagagtgggaggaaagagaggctgcatggacggaataagctcg

SEQ ID NO: 131357 - DNA, 60 bp, Artificial
  Synthetic oligonucleotide
gtctctgaacacacctggccaacaccaaaacaagtagacgactttggagacaactggcat

SEQ ID NO: 131358 - DNA, 60 bp, Artificial
  Synthetic oligonucleotide
gtgcccaaggcgatatcatacatgcggtgggtgagtgggtgggaactggagtgggtggat

SEQ ID NO: 131359 - DNA, 60 bp, Artificial
  Synthetic oligonucleotide
ccgagtgctccgatggccctgcctgacagtgactacggaatcaaaacaatgatggtggag

SEQ ID NO: 131360 - DNA, 60 bp, Artificial
  Synthetic oligonucleotide
tggagggattcaaacgaactgggtctgctctgcaccgtttctccagtgctcgagtcagct

SEQ ID NO: 131361 - DNA, 60 bp, Artificial
  Synthetic oligonucleotide
gcgagatagtcaatggacctctattcaatgggaatcggatggacaatgggactcttaggg

SEQ ID NO: 131362 - DNA, 60 bp, Artificial
  Synthetic oligonucleotide
gcccactcgagatgcatggaggaatttggatacccagtgaggcacccagggagagttgca

SEQ ID NO: 131363 - DNA, 60 bp, Artificial
  Synthetic oligonucleotide
ttgagagtgggagaccactacctccctgtccagctccagccgaagcacccaaaccacccg

SEQ ID NO: 131364 - DNA, 59 bp, Artificial
  Synthetic oligonucleotide
aggatcagcatggtcaaaagaaagaaccagaccggagatccagagcacagccatagaga

SEQ ID NO: 131365 - DNA, 60 bp, Artificial
  Synthetic oligonucleotide
ttgggctggatgatagacgattggctgcaagtagacatcggggcggaaacagacgttgct

SEQ ID NO: 131366 - DNA, 60 bp, Artificial
  Synthetic oligonucleotide
cgggacggcataccgggtgctcaacggacagttgcaagcttctaaggccacctatgtaag

SEQ ID NO: 131367 - DNA, 60 bp, Artificial
  Synthetic oligonucleotide
gtcaattggaaaatgacttgggcactcgcaaaagttcacaagtgttggaatgacacggaa

SEQ ID NO: 131368 - DNA, 60 bp, Artificial
  Synthetic oligonucleotide
tctgatgtgtcccagttatgcatctgagctgaataaggaggccgcttggccacagattgg

SEQ ID NO: 131369 - DNA, 54 bp, Artificial
  Synthetic oligonucleotide
gagccgatttgcatccgtgaatgtttgtgcaccagagaggttcagcaagtactt

SEQ ID NO: 131370 - DNA, 60 bp, Artificial
  Synthetic oligonucleotide
cgacttcatgtttcagtccttgctaatccactcacagatcacaacaggcgaagtccttgg

SEQ ID NO: 131371 - DNA, 60 bp, Artificial
  Synthetic oligonucleotide
ctgggaaagtgacaatctcagatgttgtcgtcagtaatgagaagcaggcagtcccttcag

SEQ ID NO: 131372 - DNA, 59 bp, Artificial
  Synthetic oligonucleotide
tcaacagcttgttggagataaaggaaacagatttgaggggcagttctccgagtccgcca

SEQ ID NO: 131373 - DNA, 60 bp, Artificial
  Synthetic oligonucleotide
gcctgcgccctcatgggatccatcagatcacagaacgccctgcgagcttcggaggacaat

SEQ ID NO: 131374 - DNA, 60 bp, Artificial
  Synthetic oligonucleotide
cgcacctgtaaccggactagaatgtcaacaggcaatagtcaaagcatccaaagacgagct

SEQ ID NO: 131375 - DNA, 60 bp, Artificial
  Synthetic oligonucleotide
gccgcaatcgaagagaccagagaggaagagccatatttagacaacttcctcgcatccatc

SEQ ID NO: 131376 - DNA, 60 bp, Artificial
  Synthetic oligonucleotide
ggatggcggacggggcgatgccactcatcattattgaattccaagatctaactgcatcgg

SEQ ID NO: 131377 - DNA, 60 bp, Artificial
  Synthetic oligonucleotide
gaaaccaggtgatcaactccactgataaacttgtttgctggcagggacaaaagggagggc

SEQ ID NO: 131378 - DNA, 60 bp, Artificial
  Synthetic oligonucleotide
acgatggaggagcccctgagggtgagccgaacctggcagaagatgctggaatgcccaaaa

SEQ ID NO: 131379 - DNA, 60 bp, Artificial
  Synthetic oligonucleotide
ggctgggaatatcaagaacccaaggcctggaaccatcggtgatctgctgaagcaccaagc

SEQ ID NO: 131380 - DNA, 60 bp, Artificial
  Synthetic oligonucleotide
ctctcgcaacaatccacaggaggaattttgaccatccgaccaaatttcaagcaacacagt

SEQ ID NO: 131381 - DNA, 60 bp, Artificial
  Synthetic oligonucleotide
gccagcttacttaggatcaaagacatcagagaccaccagcatcatccaaccatgggacag

SEQ ID NO: 131382 - DNA, 60 bp, Artificial
  Synthetic oligonucleotide
ggcggaaattttcccgatgtgggattgctcctctctacaggctaagatgttgagacaaga

SEQ ID NO: 131383 - DNA, 60 bp, Artificial
  Synthetic oligonucleotide
caaacaccactttgtcccactatttcatggattgactatggcggatgacatgactcaagt

SEQ ID NO: 131384 - DNA, 60 bp, Artificial
  Synthetic oligonucleotide
gaacaaaggggatgacgcctatgaggctattaagatgctggaaccaatgtgtaatctcca

SEQ ID NO: 131385 - DNA, 60 bp, Artificial
  Synthetic oligonucleotide
cgtcgacaactgccgttcttaggagcttgtaggatgtcaatgtgcggagaggtaggaatg

SEQ ID NO: 131386 - DNA, 60 bp, Artificial
  Synthetic oligonucleotide
gcgacggacgggtgctgtcctttatcgctagtgttccaatgtgtgatggagagctgactg

SEQ ID NO: 131387 - DNA, 60 bp, Artificial
  Synthetic oligonucleotide
agggggatgcagactggaggaaagtggatgaatcatgccgattgattgtaccacagtgca

SEQ ID NO: 131388 - DNA, 60 bp, Artificial
  Synthetic oligonucleotide
ccgcacaaatcgcttgcatatccgaattgcgaagagccagagagaagaaggcagttagca

SEQ ID NO: 131389 - DNA, 60 bp, Artificial
  Synthetic oligonucleotide
gggatctttacaaagagcatgtactgtaccctcactcgatgatccaagaccacacagtta

SEQ ID NO: 131390 - DNA, 60 bp, Artificial
  Synthetic oligonucleotide
cttctggctttgactctagggctccgagtagagagtgggatagcctcagtcttgtgctca

SEQ ID NO: 131391 - DNA, 60 bp, Artificial
  Synthetic oligonucleotide
gcccaagtggactccaacggacacagaaactttgagacaactgagagaaactgcatccag

SEQ ID NO: 131392 - DNA, 60 bp, Artificial
  Synthetic oligonucleotide
ggccctattcggagtaagcctctgtatatgggcctgttcctcgcatcatgccacaatgcc

SEQ ID NO: 131393 - DNA, 60 bp, Artificial
  Synthetic oligonucleotide
cacaatctacaagtgaccgacaccacgagtcttattccctgaaagagcctcatggcatca

SEQ ID NO: 131394 - DNA, 60 bp, Artificial
  Synthetic oligonucleotide
gatgacggaccatgcctttcccctccattaccacaaatccaggtggaacacaactactgg

SEQ ID NO: 131395 - DNA, 60 bp, Artificial
  Synthetic oligonucleotide
cccctagactgggtctgtaacccggttgccatctcttatgagtgcaacactcccgaacgt

SEQ ID NO: 131396 - DNA, 60 bp, Artificial
  Synthetic oligonucleotide
gggtagcctgtaattctagcttgagtctgtcatctcactggatcaggttgatttacaaga

SEQ ID NO: 131397 - DNA, 60 bp, Artificial
  Synthetic oligonucleotide
gggtagcctgtaactctagcttgagtctgtcatctcactggatcaggttgatttacaaga

SEQ ID NO: 131398 - DNA, 60 bp, Artificial
  Synthetic oligonucleotide
ccaaatagtcagacaaatgaggtcaggagagagattcctcaagatatggtcacagaccgt

SEQ ID NO: 131399 - DNA, 60 bp, Artificial
  Synthetic oligonucleotide
attggacccaacagaggaggggccagatgacctggaggacagatctcagcaggcagatgc

SEQ ID NO: 131400 - DNA, 60 bp, Artificial
  Synthetic oligonucleotide
caaccatcctgcaggagctaagatgtccacactgccagtgtctactcttcacaggtccaa

SEQ ID NO: 131401 - DNA, 60 bp, Artificial
  Synthetic oligonucleotide
atgatccagatgtcgggagatcctgaggcattgatgcagggagtggcagaggggtcattc

SEQ ID NO: 131402 - DNA, 60 bp, Artificial
  Synthetic oligonucleotide
ccaaagcaatcccaatatgcatcctccctgccccgccaggcaatgaggttgaggtggctg

SEQ ID NO: 131403 - DNA, 60 bp, Artificial
  Synthetic oligonucleotide
tatttctctctctacgtaggaaacatggctaacccaagtgagattgattacatgactccc

SEQ ID NO: 131404 - DNA, 60 bp, Artificial
  Synthetic oligonucleotide
cctgttcaattactcctattcagaaggaatgtgcaggaatatagccgacatgttcaacca

SEQ ID NO: 131405 - DNA, 60 bp, Artificial
  Synthetic oligonucleotide
gggccggggagaatgctgtgcactcgttcatcggtatgttcacgactgtgttcgagtgga

SEQ ID NO: 131406 - DNA, 60 bp, Artificial
  Synthetic oligonucleotide
agcagatcaatatgtgcactgtgatgtccttcagatcactcatcactgtgataggaccca

SEQ ID NO: 131407 - DNA, 60 bp, Artificial
  Synthetic oligonucleotide
ttcacggggctttcaggccaagccagtttagctggtctcacaagacaggcaatgatcttg

SEQ ID NO: 131408 - DNA, 60 bp, Artificial
  Synthetic oligonucleotide
tacaacggcctatcaggatcaagtgcaaacgccggccctgtgtcccgcaaactctacaac

SEQ ID NO: 131409 - DNA, 60 bp, Artificial
  Synthetic oligonucleotide
cgggcctgtctactggattatccactgttgatggtgtgataaacacatggttgggacaag

SEQ ID NO: 131410 - DNA, 60 bp, Artificial
  Synthetic oligonucleotide
agtgttgcgacggggagactgcaggatctataatgaaggggataagatcctcagtgtggg

SEQ ID NO: 131411 - DNA, 60 bp, Artificial
  Synthetic oligonucleotide
ccacagctatcgttaattgttactcgggctaaggaccctgacggagaatgctgccttccc

SEQ ID NO: 131412 - DNA, 60 bp, Artificial
  Synthetic oligonucleotide
cttcctgtgggcactgttggcagccctggtaatcctgttgctctggatattgtggaaggt

SEQ ID NO: 131413 - DNA, 60 bp, Artificial
  Synthetic oligonucleotide
ggggcctgcaagagcagcgataacgaccttgatatgacaccccacatgttgatggagccc

SEQ ID NO: 131414 - DNA, 60 bp, Artificial
  Synthetic oligonucleotide
cagcccggcacgatgtcaaccttctgctctttaaccgtattaatgtttcttcttatctca

SEQ ID NO: 131415 - DNA, 65 bp, Artificial
  Synthetic oligonucleotide
cggaacttgtgtttgtttatcacttcatatatattaacagcttcacatatattctcattccaggg

SEQ ID NO: 131416 - DNA, 60 bp, Artificial
  Synthetic oligonucleotide
gtcaggactgggacgagaagaaggacaaacagtggagggagaagccagcagataagaaac

SEQ ID NO: 131417 - DNA, 60 bp, Artificial
  Synthetic oligonucleotide
tcagcatacgccctgaaacatcaggccagcttgtccgactgtgacaaagaggccctcaga

SEQ ID NO: 131418 - DNA, 60 bp, Artificial
  Synthetic oligonucleotide
ccccttccgccagacctgcgcccgttgtgaatgtacacgtccctgccgcctcgtcctctc

SEQ ID NO: 131419 - DNA, 60 bp, Artificial
  Synthetic oligonucleotide
caaccctcaccaagtcgtcacataccttcctactcggtgggtgtcacatcacctcacagg

SEQ ID NO: 131420 - DNA, 60 bp, Artificial
  Synthetic oligonucleotide
tagggacgaggtcagggagacggcaagtcgtaggatggcccacgggtccgacagcaatgt

SEQ ID NO: 131421 - DNA, 60 bp, Artificial
  Synthetic oligonucleotide
ccgatcctcgaaaggcaaagtcattggagaacaagcctgggctggcagcggaggcagaca

SEQ ID NO: 131422 - DNA, 60 bp, Artificial
  Synthetic oligonucleotide
ggagatgcttcatgactgtcgggtaggcagagtactgagctacatcaccctcagcgaggt

SEQ ID NO: 131423 - DNA, 60 bp, Artificial
  Synthetic oligonucleotide
cagaaacgcctaatacacaaaacgtccatcaaggtgactgggtcggaaggtgaggggagg

SEQ ID NO: 131424 - DNA, 60 bp, Artificial
  Synthetic oligonucleotide
gatggcacatatactggtgaagggaggagccgtcgctgtcaatgaatactccgatcctcg

SEQ ID NO: 131425 - DNA, 60 bp, Artificial
  Synthetic oligonucleotide
ccttggtgctggacgacaggatgcttagtctcacgaccatgatatggaacacagcagcgg

SEQ ID NO: 131426 - DNA, 60 bp, Artificial
  Synthetic oligonucleotide
ccagggaaatgttcaccaccaaggtaaatatgtacccagaggtccccagctcatcccaag

SEQ ID NO: 131427 - DNA, 60 bp, Artificial
  Synthetic oligonucleotide
accattcaggcagtcccaacatcggagaactcagacacatcgctgaatcgggccatccac

SEQ ID NO: 131428 - DNA, 60 bp, Artificial
  Synthetic oligonucleotide
cacccggccagttgctaacatggcttcatgacaaccaggtatctaggcctctcagtgtga

SEQ ID NO: 131429 - DNA, 60 bp, Artificial
  Synthetic oligonucleotide
gtcgcataagagatcgtggcgttcgtcaacatcatcaacgttggtcgatgcggaatatgt

SEQ ID NO: 131430 - DNA, 60 bp, Artificial
  Synthetic oligonucleotide
taggaagaggcacggacttctcagattcctaatccttcaacatgtggatcttacggggat

SEQ ID NO: 131431 - DNA, 60 bp, Artificial
  Synthetic oligonucleotide
cttccctctgaatataccggtggtcacctactgtgcacccggacctaggttcaagaccaa

SEQ ID NO: 131432 - DNA, 60 bp, Artificial
  Synthetic oligonucleotide
tccgccagcaacaccgcgggacccagtggttagagccatcaacagctcagggcctgctct

SEQ ID NO: 131433 - DNA, 60 bp, Artificial
  Synthetic oligonucleotide
aacactgtctgtggccactgtcaaaagagaacgtcaacagtgcgaggcaggcatcgggga

SEQ ID NO: 131434 - DNA, 60 bp, Artificial
  Synthetic oligonucleotide
gccaccatgaccaaatcagcattcaccggcccgaccatcaagaaagatctagagcagggg

SEQ ID NO: 131435 - DNA, 60 bp, Artificial
  Synthetic oligonucleotide
gagcaggggaatgtctaccgatatgcgatgacagtgggcggcatgttgagcacatcacac

SEQ ID NO: 131436 - DNA, 60 bp, Artificial
  Synthetic oligonucleotide
cgatagggccgtggctagccgtctctacggagtcccatcgcaccatgtttatgtgtacgg

SEQ ID NO: 131437 - DNA, 60 bp, Artificial
  Synthetic oligonucleotide
ccccagctcatcccaagtgtccgacgacatagacaacgacacacacgtagatgaggtcgc

SEQ ID NO: 131438 - DNA, 60 bp, Artificial
  Synthetic oligonucleotide
gatggagcattgactaccactcagacggatgacaatcagataggtatggtgaagaagatc

SEQ ID NO: 131439 - DNA, 60 bp, Artificial
  Synthetic oligonucleotide
caaagaacctcagagcatgggtagcgagcaacaccaacccagggaaccccttggtgctgg

SEQ ID NO: 131440 - DNA, 60 bp, Artificial
  Synthetic oligonucleotide
aagagcgggataacggttctttacgagcaggagggagtgataggccatggcaaggtcggc

SEQ ID NO: 131441 - DNA, 60 bp, Artificial
  Synthetic oligonucleotide
cggtagtgtattggtgagtccttctcccttagctacggtcccagccctaaatacatgatg

SEQ ID NO: 131442 - DNA, 60 bp, Artificial
  Synthetic oligonucleotide
aagagccccaatgcagcctctggagtgacaattatgtgaaaggcatgcttgtgaagtatc

SEQ ID NO: 131443 - DNA, 60 bp, Artificial
  Synthetic oligonucleotide
cacagcagcggagcattatactatgatcggtaaatctcaggtcaatcgtatgtcagcgct

SEQ ID NO: 131444 - DNA, 60 bp, Artificial
  Synthetic oligonucleotide
ctgagaatatattgaggcatggcggccctgagggagagatatttatgacaaaagagcccc

SEQ ID NO: 131445 - DNA, 60 bp, Artificial
  Synthetic oligonucleotide
tggatgtatacatattgcatagagggaatggatgacgccccgatagacatggaggtgggg

SEQ ID NO: 131446 - DNA, 60 bp, Artificial
  Synthetic oligonucleotide
gttgtctccatgacccaaagagtcacaaccccatttgaggtccaatacacatcatcctcc

SEQ ID NO: 131447 - DNA, 60 bp, Artificial
  Synthetic oligonucleotide
ggggatggccatcaagtgggttccgacatgtgacctgtccacaacagggaccatcaaggt

SEQ ID NO: 131448 - DNA, 60 bp, Artificial
  Synthetic oligonucleotide
tcgtcctctctgacaggggccctggatgccatgaacagtgactgacagccacctctccat

SEQ ID NO: 131449 - DNA, 60 bp, Artificial
  Synthetic oligonucleotide
actctccaattaattggtcaattacaacctaaattttcgtaacacggcaagcttagctat

SEQ ID NO: 131450 - DNA, 60 bp, Artificial
  Synthetic oligonucleotide
ccgcggaatcttatgccccagtgtcgagtacatgatcatcgatgaattctcaatggccac

SEQ ID NO: 131451 - DNA, 60 bp, Artificial
  Synthetic oligonucleotide
acccgcggaatcttatgccccagtgtcgagtacatgatcatcgatgaattctcaatggcc

SEQ ID NO: 131452 - DNA, 60 bp, Artificial
  Synthetic oligonucleotide
cccgcggaatcttatgccccagtgtcgagtacatgatcatcgatgaattctcaatggcca

SEQ ID NO: 131453 - DNA, 60 bp, Artificial
  Synthetic oligonucleotide
gatctcaacaagcacccatacaacaagtaccgtagtaatatcgtacgtgtatatggtgaa

SEQ ID NO: 131454 - DNA, 60 bp, Artificial
  Synthetic oligonucleotide
cacaatccatacagtaaaagaatcatgtcatctaagctcgcttgagtcttcggtgaactg

SEQ ID NO: 131455 - DNA, 60 bp, Artificial
  Synthetic oligonucleotide
cgctaataaggtcggaattaatctcggtgatgacattttgcacgagacaatcccaacacc

SEQ ID NO: 131456 - DNA, 61 bp, Artificial
  Synthetic oligonucleotide
ccccatctatatcatggcattattcgcactcctaagccctgcttcggccttagctcccgga

SEQ ID NO: 131457 - DNA, 60 bp, Artificial
  Synthetic oligonucleotide
gctaactcctatcgctaaatccttcatcgcttcatgcttcctaactgaacacatcttgga

SEQ ID NO: 131458 - DNA, 60 bp, Artificial
  Synthetic oligonucleotide
gcttagctatgcaatgttcgcgatcatccaccatgctctccttctcctcacacttcccag

SEQ ID NO: 131459 - DNA, 61 bp, Artificial
  Synthetic oligonucleotide
ccgttaccgggtaaggtcaccgctcgtatgcaagcatcaccattcattcaaggacttcaag

SEQ ID NO: 131460 - DNA, 61 bp, Artificial
  Synthetic oligonucleotide
caacacatcacttaatttccttctaattatcctcttcatactactctgtcttctcatcaca

SEQ ID NO: 131461 - DNA, 61 bp, Artificial
  Synthetic oligonucleotide
cagcaccaaagcggttcttcatctattatcgtgtaatgacagctcgccttaccccatccca

SEQ ID NO: 131462 - DNA, 61 bp, Artificial
  Synthetic oligonucleotide
cagcccaaaattcaacatctccatgctccgcagacgattcaaccggatgctttaaatatct

SEQ ID NO: 131463 - DNA, 52 bp, Artificial
  Synthetic oligonucleotide
gatggccacgctgctggcgccgcttggatttcaggggacatcaacggtgaca

SEQ ID NO: 131464 - DNA, 60 bp, Artificial
  Synthetic oligonucleotide
tccaactggtgacttctgcaataacaacgcatggatgtcgcctggcttagcaacagctga

SEQ ID NO: 131465 - DNA, 60 bp, Artificial
  Synthetic oligonucleotide
gcagctccccgagaacggtatatctgtgtcgagatgcatctaggaagagcgtggggccga

SEQ ID NO: 131466 - DNA, 60 bp, Artificial
  Synthetic oligonucleotide
agcacatcagcattaggctgtgtttacaacccagcttcatattaccttcatggcgatgca

SEQ ID NO: 131467 - DNA, 61 bp, Artificial
  Synthetic oligonucleotide
gcctttagcatcatcaggttcagttaagcgtacctgggctggtgaatttagacatctcccc

SEQ ID NO: 131468 - DNA, 58 bp, Artificial
  Synthetic oligonucleotide
gatgtcggggctatctccgacaccattgtgggcgctgcaggaaatgaccgcttcggta

SEQ ID NO: 131469 - DNA, 61 bp, Artificial
  Synthetic oligonucleotide
ggcattggcacactcctccttatcttttctctctatttcctgctacggttgcttatccacc

SEQ ID NO: 131470 - DNA, 60 bp, Artificial
  Synthetic oligonucleotide
ctaagggtgatttgcatcatatctgctccagccacccgatatcatgacctccgtgcatcg

SEQ ID NO: 131471 - DNA, 60 bp, Artificial
  Synthetic oligonucleotide
cccacgcatcacgctactcccatcaagccacataccatcaattcggtcatcctgttgcca

SEQ ID NO: 131472 - DNA, 60 bp, Artificial
  Synthetic oligonucleotide
cctgttgccaaggctcaaacaatgcccggcgtttgtccaacacctcgctcactacgctac

SEQ ID NO: 131473 - DNA, 60 bp, Artificial
  Synthetic oligonucleotide
tgacagtatctgtgattctgcagcttatacaatacctgtggttaaatacaacagccccta

SEQ ID NO: 131474 - DNA, 60 bp, Artificial
  Synthetic oligonucleotide
cccgtcttcacaaaatctacattcatagccctatgcttggccggacattcttcctctggt

SEQ ID NO: 131475 - DNA, 60 bp, Artificial
  Synthetic oligonucleotide
tccacttgctctcacactaaagattctcacctatgtaatttcactgcctcgtcacctgag

SEQ ID NO: 131476 - DNA, 60 bp, Artificial
  Synthetic oligonucleotide
gcttaaattaaatggcgttacatacagcgatgaggttgatgctctatcgtatgggctgct

SEQ ID NO: 131477 - DNA, 60 bp, Artificial
  Synthetic oligonucleotide
ccacctaagctctgcgacgctcgcatcaactggtcatgcctccacaccggatcttgcaag

SEQ ID NO: 131478 - DNA, 60 bp, Artificial
  Synthetic oligonucleotide
taagcagcagaaaatcgtcatatctcagggctccacacaggcactaccgtttctcaatca

SEQ ID NO: 131479 - DNA, 60 bp, Artificial
  Synthetic oligonucleotide
tctgatcttcctcttgtcttcagcactctttggatctggggctcatggctttgcactaca

SEQ ID NO: 131480 - DNA, 60 bp, Artificial
  Synthetic oligonucleotide
acctgcaccaatccaacattcagtggctaggacagtgcaatgaaccgccgcgcacgccct

SEQ ID NO: 131481 - DNA, 61 bp, Artificial
  Synthetic oligonucleotide
cccaacgaccccattctgcctaaacgttccactcaaaagaccatcgttcctgatccctccc

SEQ ID NO: 131482 - DNA, 61 bp, Artificial
  Synthetic oligonucleotide
cccctaggaacgcccgtttaattgaaattccccagtccttcgcagtagaacgcggtaatgg

SEQ ID NO: 131483 - DNA, 61 bp, Artificial
  Synthetic oligonucleotide
gctcatgtctccatcatagaaggcgaccctgaccagcttaaattcaactgtaaaggctgtc

SEQ ID NO: 131484 - DNA, 60 bp, Artificial
  Synthetic oligonucleotide
gcaatcacactgaaccttacgactgcatgttttgggctgcaaatggcgactgtacatgta

SEQ ID NO: 131485 - DNA, 60 bp, Artificial
  Synthetic oligonucleotide
aaacgctgaagcccactacactaatcacacctttctaccctcctcgtgatacacgtactc

SEQ ID NO: 131486 - DNA, 60 bp, Artificial
  Synthetic oligonucleotide
atccaagttacacctcatcatgcgcttatctctacacctctcttccacctaagctctgcg

SEQ ID NO: 131487 - DNA, 61 bp, Artificial
  Synthetic oligonucleotide
ggggccgagtcatctgcctttcacgtttccgacgacattgccacagagagctagctattgc

SEQ ID NO: 131488 - DNA, 61 bp, Artificial
  Synthetic oligonucleotide
cccaattcgacctactacatttctcctacatctatcaggctattgcagtattacttggcag

SEQ ID NO: 131489 - DNA, 60 bp, Artificial
  Synthetic oligonucleotide
ggccttagctcccggacaggcgcgtgttagaggttctcccgctacattcaaatcaacccc

SEQ ID NO: 131490 - DNA, 60 bp, Artificial
  Synthetic oligonucleotide
cacgacatatcctaaacatctcttttatgacgtgcccggtaaatatgccgcgcctgctgg

SEQ ID NO: 131491 - DNA, 60 bp, Artificial
  Synthetic oligonucleotide
aggaaggatatccacctgcccacaccgtgcaacgatcctttctcactatcctctatctca

SEQ ID NO: 131492 - DNA, 60 bp, Artificial
  Synthetic oligonucleotide
tcggctacaccattccagagcgatttatggctggcaagtcagggtgtaaaatttgtgggc

SEQ ID NO: 131493 - DNA, 60 bp, Artificial
  Synthetic oligonucleotide
tacgctacaaaggtctctgctatgaggtcgactggtcagttcgctcaccagctccaccaa

SEQ ID NO: 131494 - DNA, 61 bp, Artificial
  Synthetic oligonucleotide
agacgatgggcggtggattagttttgcattccttttcaatgaggtttgcaaagcgaggtcc

SEQ ID NO: 131495 - DNA, 60 bp, Artificial
  Synthetic oligonucleotide
tctcaaagaggtacggcaaaatggctatcacctatcttaaccccaacgaccccattctgc

SEQ ID NO: 131496 - DNA, 61 bp, Artificial
  Synthetic oligonucleotide
gccgctcgtgaagacatgccatctgaagtcatcgatttcaaagtgataaagcaagacggtg

SEQ ID NO: 131497 - DNA, 60 bp, Artificial
  Synthetic oligonucleotide
acgacaagaacaacgtcaccatcttcagaactaacgcaacccgttcagaacttcctggcg

SEQ ID NO: 131498 - DNA, 60 bp, Artificial
  Synthetic oligonucleotide
cttcttctgtcaaggccgccaaacgtggaaagcacaagattgaattcattctccgctcct

SEQ ID NO: 131499 - DNA, 61 bp, Artificial
  Synthetic oligonucleotide
cggtaagctcaaaacagccgctacgtatgaaggtgaggtcttccagctccacctagaccct

SEQ ID NO: 131500 - DNA, 60 bp, Artificial
  Synthetic oligonucleotide
tattttatgtcctagtgtagaatacatgatcatcgatgaattctcaatggccactgacat

SEQ ID NO: 131501 - DNA, 61 bp, Artificial
  Synthetic oligonucleotide
cggcaccattgaaacatacgattgcactcctacactcacagtcaatggacactcaatcacc

SEQ ID NO: 131502 - DNA, 60 bp, Artificial
  Synthetic oligonucleotide
acagccgctacgtatgaaggtgaggtcttccagctccacctagaccctatcaacatgctc

SEQ ID NO: 131503 - DNA, 60 bp, Artificial
  Synthetic oligonucleotide
tggcggtggcatcatcttcgctactctccagtcaacccgtggtatcttatgtcctagtgt

SEQ ID NO: 131504 - DNA, 61 bp, Artificial
  Synthetic oligonucleotide
ggacactcaatcaccaccaaatacttcaactctatctatccttcttctgtcaaggccgcca

SEQ ID NO: 131505 - DNA, 60 bp, Artificial
  Synthetic oligonucleotide
atcgcaaggcagaacatttgaccgtggaatcgtcgtcagctaccgcaacaccgcgttcac

SEQ ID NO: 131506 - DNA, 61 bp, Artificial
  Synthetic oligonucleotide
gccatttccataccacacccttgaaaaccgctatcagagtgaaaaggcaaagtatcttggc

SEQ ID NO: 131507 - DNA, 60 bp, Artificial
  Synthetic oligonucleotide
ggctttgcttacaacggcaccattgaaacatacgattgcactcctacactcacagtcaat

SEQ ID NO: 131508 - DNA, 60 bp, Artificial
  Synthetic oligonucleotide
ttgccgtccttgctagctcccactctgcagttgataatattggtaactcagtcaatccct

SEQ ID NO: 131509 - DNA, 60 bp, Artificial
  Synthetic oligonucleotide
tcgcatacaatggaccacagaacaaactctccaacatgtacactgacaacatcaagccat

SEQ ID NO: 131510 - DNA, 60 bp, Artificial
  Synthetic oligonucleotide
tcgagaaattcaacaatcccgatctagctaagcatctcatcaacactggcaaaagtcatc

SEQ ID NO: 131511 - DNA, 60 bp, Artificial
  Synthetic oligonucleotide
ggtaactcagtcaatccctccatcttccgcagatgcaagagacttatccctcaagaatca

SEQ ID NO: 131512 - DNA, 60 bp, Artificial
  Synthetic oligonucleotide
tcactgtacatcgatggcggtatcaagaagggtatcaagaacatcagaatcaccactcct

SEQ ID NO: 131513 - DNA, 61 bp, Artificial
  Synthetic oligonucleotide
cctcaccaacatccgtaccaaattggaagtccgcgaacgtgaacccactctgatcgacact

SEQ ID NO: 131514 - DNA, 60 bp, Artificial
  Synthetic oligonucleotide
tccgcgaacgtgaacccactctgatcgacacttcatacaaacacaatgtcatcttccaga

SEQ ID NO: 131515 - DNA, 60 bp, Artificial
  Synthetic oligonucleotide
gtaccggtaagacatacaccataaacaaattccttgcaagaatcaatgaaattctcccta

SEQ ID NO: 131516 - DNA, 60 bp, Artificial
  Synthetic oligonucleotide
catcaacaaattccttgcaagaatcaatgaaattctccctaattctaacattgccgtcct

SEQ ID NO: 131517 - DNA, 61 bp, Artificial
  Synthetic oligonucleotide
ccgcaacaccgcgttcacaaaggatccaaacattgtgaatgtagccgtcagtcgtttccgc

SEQ ID NO: 131518 - DNA, 61 bp, Artificial
  Synthetic oligonucleotide
ccctcaagaatcagaagacaaagtccgtaccaggttccaaagatacacaactggcggtggc

SEQ ID NO: 131519 - DNA, 60 bp, Artificial
  Synthetic oligonucleotide
ggccaaagtatcagcagaagtaatgactcgcttgctgttcgagaaattcaacaatcccga

SEQ ID NO: 131520 - DNA, 52 bp, Artificial
  Synthetic oligonucleotide
catcaggaaaatgtatgtagacaacgacttccgctgcgcccagcatctagac

SEQ ID NO: 131521 - DNA, 60 bp, Artificial
  Synthetic oligonucleotide
acgtatacaacacagacgtttaccattccaacatcatcaacaatcatcagctcacaggca

SEQ ID NO: 131522 - DNA, 60 bp, Artificial
  Synthetic oligonucleotide
tacactgtccacacatcgcaaggcagaacatttgaccgtggaatcgtcgtcagctaccgc

SEQ ID NO: 131523 - DNA, 60 bp, Artificial
  Synthetic oligonucleotide
cgcatgggctcaaagatcaatgatttcatctcagaaaacttctactacggcaagctcaaa

SEQ ID NO: 131524 - DNA, 60 bp, Artificial
  Synthetic oligonucleotide
tcaacatgctctcacagatccatgcaatttgggaatcatcacctcagaacaacttcgcca

SEQ ID NO: 131525 - DNA, 61 bp, Artificial
  Synthetic oligonucleotide
cagaagacaaagtccgtaccaggttccaaagatacacaactggcggtggcatcatcttcgc

SEQ ID NO: 131526 - DNA, 50 bp, Artificial
  Synthetic oligonucleotide
caaatgtcacaatgaagattgcgcaaaccatcccatctggtacacagagc

SEQ ID NO: 131527 - DNA, 61 bp, Artificial
  Synthetic oligonucleotide
gccgtcagtcgtttccgcttccagtgtatctgcatgcaccagggcaatccatactacgcta

SEQ ID NO: 131528 - DNA, 61 bp, Artificial
  Synthetic oligonucleotide
ccacacatcgcaaggcagaacatttgaccgtggaatcgtcgtcagctaccgcaacaccgcg

SEQ ID NO: 131529 - DNA, 60 bp, Artificial
  Synthetic oligonucleotide
ctctcaaggaagccaagaaggtgttcacacgcgaagataacctcagatgggccaaagtat

SEQ ID NO: 131530 - DNA, 60 bp, Artificial
  Synthetic oligonucleotide
cctcaacatcttccgtggcattcaattccaagcttccaccttctacattgacaacaccgg

SEQ ID NO: 131531 - DNA, 60 bp, Artificial
  Synthetic oligonucleotide
tccaacattgccgtccttgctagctcccactctgcagttgataacattggtaactcagtc

SEQ ID NO: 131532 - DNA, 60 bp, Artificial
  Synthetic oligonucleotide
tctccctaattccaacattgccgtccttgctagctcccactctgcagttgataacattgg

SEQ ID NO: 131533 - DNA, 61 bp, Artificial
  Synthetic oligonucleotide
caatcccgatctagctaagcacctcatcaacactggcaaaagtcatctagtcgaaaacacc

SEQ ID NO: 131534 - DNA, 60 bp, Artificial
  Synthetic oligonucleotide
tccgtggcattcaattccaagcttccaccttctacattgacaacaccggaagtcttcttg

SEQ ID NO: 131535 - DNA, 61 bp, Artificial
  Synthetic oligonucleotide
gccgccaaacgtggaaagcacaagattgaattcattctccgctcctacatggctcgcctcc

SEQ ID NO: 131536 - DNA, 61 bp, Artificial
  Synthetic oligonucleotide
ctccgctcctacatggctcgcctccaacacactgtcactgatcaaatcaccctcgtcttta

SEQ ID NO: 131537 - DNA, 60 bp, Artificial
  Synthetic oligonucleotide
ctatccactcaacacgtatacaacacagacgtttaccattccaacatcatcaacaatcat

SEQ ID NO: 131538 - DNA, 61 bp, Artificial
  Synthetic oligonucleotide
ccacctagaccctatcaacatgctctcacagatccatgcaatttgggaatcatcacctcag

SEQ ID NO: 131539 - DNA, 60 bp, Artificial
  Synthetic oligonucleotide
ccttgtgccaggcgtcacggactcaggctcgaagaccacttccgcactgataaccccgat

SEQ ID NO: 131540 - DNA, 60 bp, Artificial
  Synthetic oligonucleotide
ccacttccgcactgataaccccgatggcccctaactaagggtgatttgcatcatatctgc

SEQ ID NO: 131541 - DNA, 60 bp, Artificial
  Synthetic oligonucleotide
ccgcactgataaccccgatggcccctaactaagggtgatttgcatcatatctgctacagc

SEQ ID NO: 131542 - DNA, 60 bp, Artificial
  Synthetic oligonucleotide
ccattccttgtgccaggcgtcacggactcaggctcgaagaccacttccgcactgataacc

SEQ ID NO: 131543 - DNA, 60 bp, Artificial
  Synthetic oligonucleotide
caatatgaatccattccttgtgccaggcgtcacggactcaggctcgaagaccacttccgc

SEQ ID NO: 131544 - DNA, 60 bp, Artificial
  Synthetic oligonucleotide
attccttgtgccaggcgtcacggactcaggctcgaagaccacttccgcactgataacccc

SEQ ID NO: 131545 - DNA, 60 bp, Artificial
  Synthetic oligonucleotide
cattccttgtgccaggcgtcacggactcaggctcgaagaccacttccgcactgataaccc

SEQ ID NO: 131546 - DNA, 51 bp, Artificial
  Synthetic oligonucleotide
atatctgctacagccacccgatatcacgacctccgtgcatcgatgaatagc

SEQ ID NO: 131547 - DNA, 60 bp, Artificial
  Synthetic oligonucleotide
tccttgtgccaggcgtcacggactcaggctcgaagaccacttccgcactgataaccccga

SEQ ID NO: 131548 - DNA, 52 bp, Artificial
  Synthetic oligonucleotide
catatctgctacagccacccgatatcacgacctccgtgcatcgatgaatagc

SEQ ID NO: 131549 - DNA, 51 bp, Artificial
  Synthetic oligonucleotide
catatctgctacagccacccgatatcacgacctccgtgcatcgatgaatag

SEQ ID NO: 131550 - DNA, 52 bp, Artificial
  Synthetic oligonucleotide
tcatatctgctacagccacccgatatcacgacctccgtgcatcgatgaatag

SEQ ID NO: 131551 - DNA, 53 bp, Artificial
  Synthetic oligonucleotide
tcatatctgctacagccacccgatatcacgacctccgtgcatcgatgaatagc

SEQ ID NO: 131552 - DNA, 60 bp, Artificial
  Synthetic oligonucleotide
tgataaccccgatggcccctaactaagggtgatttgcatcatatctgctacagccacccg

SEQ ID NO: 131553 - DNA, 60 bp, Artificial
  Synthetic oligonucleotide
gataaccccgatggcccctaactaagggtgatttgcatcatatctgctacagccacccga

SEQ ID NO: 131554 - DNA, 60 bp, Artificial
  Synthetic oligonucleotide
cgcactgataaccccgatggcccctaactaagggtgatttgcatcatatctgctacagcc

SEQ ID NO: 131555 - DNA, 60 bp, Artificial
  Synthetic oligonucleotide
ctgataaccccgatggcccctaactaagggtgatttgcatcatatctgctacagccaccc

SEQ ID NO: 131556 - DNA, 60 bp, Artificial
  Synthetic oligonucleotide
acggcttcctcagcggcaaatccctccacttccctcgacacatcttcgacacctgcactg

SEQ ID NO: 131557 - DNA, 61 bp, Artificial
  Synthetic oligonucleotide
tctgtatcttcgataaactcgagtcatcacaccaccggcgcgaggcagcatcgagaagagg

SEQ ID NO: 131558 - DNA, 60 bp, Artificial
  Synthetic oligonucleotide
ttcccgttcctctcacccatgacatcgtctccatcctcatcgccttcgccatacgcaatg

SEQ ID NO: 131559 - DNA, 60 bp, Artificial
  Synthetic oligonucleotide
ccaacgatgcatacgacgctcgcgctttcttccgcagcaatcaacacgccgcgcagacca

SEQ ID NO: 131560 - DNA, 60 bp, Artificial
  Synthetic oligonucleotide
gaaccacgcttatcactacacacacactaacctgtctctcatcgttcgcggcctctgtca

SEQ ID NO: 131561 - DNA, 60 bp, Artificial
  Synthetic oligonucleotide
cagataggctttgcatataacggcaccactgacacctacgattgcactcccacactcaca

SEQ ID NO: 131562 - DNA, 60 bp, Artificial
  Synthetic oligonucleotide
tggcggcagggttatcggatccagtgatacgctcggtgttgctcgtctcccctctgacat

SEQ ID NO: 131563 - DNA, 60 bp, Artificial
  Synthetic oligonucleotide
tgcccatatcgtcggtatctcctgcatccctccagtcaacggtgccctcacatggaaccc

SEQ ID NO: 131564 - DNA, 60 bp, Artificial
  Synthetic oligonucleotide
tcgccatggaacaattctaccgctccgccctcagccactgttaccagctccgcttcatct

SEQ ID NO: 131565 - DNA, 61 bp, Artificial
  Synthetic oligonucleotide
cgcgaacaactcacgatggtttcgatgtcgttaaatgtcggctgtggtccgctgcagggtg

SEQ ID NO: 131566 - DNA, 60 bp, Artificial
  Synthetic oligonucleotide
tcctctacaacattccactcacctacttccaccacgcgcaagcctcataccacgacaccc

SEQ ID NO: 131567 - DNA, 60 bp, Artificial
  Synthetic oligonucleotide
gccaagctccgtcacccggccctcgccacactcggtctctccccggacttcatcgccact

SEQ ID NO: 131568 - DNA, 61 bp, Artificial
  Synthetic oligonucleotide
ccccataacaccagtcctcaacgtattccgtggcattcagcaacaggtctcaacatatagc

SEQ ID NO: 131569 - DNA, 61 bp, Artificial
  Synthetic oligonucleotide
cgcttcgactcattcgctaaactcaccacactcatcgcaaacaatcctaaacttgcctgca

SEQ ID NO: 131570 - DNA, 60 bp, Artificial
  Synthetic oligonucleotide
gacttcaccgactcattgcatccctctccgccatcatacacaccgaaaacccatcacaga

SEQ ID NO: 131571 - DNA, 60 bp, Artificial
  Synthetic oligonucleotide
atgcgccactgtatcatctacatccttcttcagttcgcctttatctgctttgatcacgga

SEQ ID NO: 131572 - DNA, 61 bp, Artificial
  Synthetic oligonucleotide
cgacattggtacaggcgcaaacactttctacacctccttcgacacaatcaactctgctcca

SEQ ID NO: 131573 - DNA, 61 bp, Artificial
  Synthetic oligonucleotide
cgaaagaactctccatcacactcacaaacgtcaccactcccatcccagtcaagcacgaggc

SEQ ID NO: 131574 - DNA, 61 bp, Artificial
  Synthetic oligonucleotide
ccagaaaacacactcctcttaggtgctgcgcgtagagatggtgagtgcccattcattccac

SEQ ID NO: 131575 - DNA, 60 bp, Artificial
  Synthetic oligonucleotide
tcacaccacgctcggtcccctacatccggaagattttccacacctagctgttcgccgcgt

SEQ ID NO: 131576 - DNA, 60 bp, Artificial
  Synthetic oligonucleotide
tcgctgtcatcaccgacaaacgctacaccatcaactccacaacatataccctcccatctg

SEQ ID NO: 131577 - DNA, 60 bp, Artificial
  Synthetic oligonucleotide
cttcagatccacacaccgccgcaccaccacatgtgcatacacgcagccaacaacacctgc

SEQ ID NO: 131578 - DNA, 60 bp, Artificial
  Synthetic oligonucleotide
atcctcatcaacgcatggccactcacacgcaccgacaacacactcgatgacgttcctgtc

SEQ ID NO: 131579 - DNA, 60 bp, Artificial
  Synthetic oligonucleotide
catctcgaccccatcaacatgctctctcaaatccatgcaatctgggaatcatcggcgcag

SEQ ID NO: 131580 - DNA, 60 bp, Artificial
  Synthetic oligonucleotide
actcgtcaactgatcccatcgctagccttctccctgttccttccaacgctgacccttaca

SEQ ID NO: 131581 - DNA, 60 bp, Artificial
  Synthetic oligonucleotide
tcctcgacggcactactaagcttccttacactctcgactcactcaaatcatccacacgcg

SEQ ID NO: 131582 - DNA, 60 bp, Artificial
  Synthetic oligonucleotide
acattcctgaagcatactcgcgactcgccgccatctacaacgctgtggtcaacattccct

SEQ ID NO: 131583 - DNA, 60 bp, Artificial
  Synthetic oligonucleotide
catactaaagccgatcatctctgtaatttcactgcttccgcatctgagttcgatctaaag

SEQ ID NO: 131584 - DNA, 60 bp, Artificial
  Synthetic oligonucleotide
gccgtgaacatacacttcgcatattccactactgctcatgtttctctaatagaaggtgac

SEQ ID NO: 131585 - DNA, 60 bp, Artificial
  Synthetic oligonucleotide
ccgtgaacatacacttcgcatattccactactgctcatgtttctctaatagaaggtgacc

SEQ ID NO: 131586 - DNA, 60 bp, Artificial
  Synthetic oligonucleotide
cggagccgtgaacatacacttcgcatattccactactgctcatgtttctctaatagaagg

SEQ ID NO: 131587 - DNA, 60 bp, Artificial
  Synthetic oligonucleotide
gatgctctttcgtatagtctcctcctgaatccgcatcactgcgatttcggagccgtgaac

SEQ ID NO: 131588 - DNA, 60 bp, Artificial
  Synthetic oligonucleotide
atttcggagccgtgaacatacacttcgcatattccactactgctcatgtttctctaatag

SEQ ID NO: 131589 - DNA, 60 bp, Artificial
  Synthetic oligonucleotide
ggtagatgctctttcgtatagtctcctcctgaatccgcatcactgcgatttcggagccgt

SEQ ID NO: 131590 - DNA, 60 bp, Artificial
  Synthetic oligonucleotide
gtagatgctctttcgtatagtctcctcctgaatccgcatcactgcgatttcggagccgtg

SEQ ID NO: 131591 - DNA, 60 bp, Artificial
  Synthetic oligonucleotide
aggtagatgctctttcgtatagtctcctcctgaatccgcatcactgcgatttcggagccg

SEQ ID NO: 131592 - DNA, 60 bp, Artificial
  Synthetic oligonucleotide
tcttttcactaacaaccaaatgcaatgttccatcaaaggtattgactctcactcttatca

SEQ ID NO: 131593 - DNA, 60 bp, Artificial
  Synthetic oligonucleotide
tcaagccattcgcagctacgaccccttgggagctatagttcaatgtaattacgatcagac

SEQ ID NO: 131594 - DNA, 60 bp, Artificial
  Synthetic oligonucleotide
tcagtttccaacatagccttccagatctgtgaccctgccaccaatgaatgcgcatccatc

SEQ ID NO: 131595 - DNA, 60 bp, Artificial
  Synthetic oligonucleotide
actaaagccgatcatctctgtaatttcactgcttccgcatctgagttcgatctaaagtta

SEQ ID NO: 131596 - DNA, 60 bp, Artificial
  Synthetic oligonucleotide
ctaaagccgatcatctctgtaatttcactgcttccgcatctgagttcgatctaaagttaa

SEQ ID NO: 131597 - DNA, 60 bp, Artificial
  Synthetic oligonucleotide
tgaggtagatgctctttcgtatagtctcctcctgaatccgcatcactgcgatttcggagc

SEQ ID NO: 131598 - DNA, 60 bp, Artificial
  Synthetic oligonucleotide
attacgatcagacatatatttccactatcacagcccgtcagcaacgttcacttcttctaa

SEQ ID NO: 131599 - DNA, 60 bp, Artificial
  Synthetic oligonucleotide
tctcatactaaagccgatcatctctgtaatttcactgcttccgcatctgagttcgatcta

SEQ ID NO: 131600 - DNA, 60 bp, Artificial
  Synthetic oligonucleotide
taattacgatcagacatatatttccactatcacagcccgtcagcaacgttcacttcttct

SEQ ID NO: 131601 - DNA, 60 bp, Artificial
  Synthetic oligonucleotide
ctcatactaaagccgatcatctctgtaatttcactgcttccgcatctgagttcgatctta

SEQ ID NO: 131602 - DNA, 60 bp, Artificial
  Synthetic oligonucleotide
tgtaattacgatcagacatatatttccactatcacagcccgtcagcaacgttcacttctt

SEQ ID NO: 131603 - DNA, 60 bp, Artificial
  Synthetic oligonucleotide
tcaatgtaattacgatcagacatatatttccactatcacagcccgtcagcaacgttcact

SEQ ID NO: 131604 - DNA, 59 bp, Artificial
  Synthetic oligonucleotide
cagtttccaacatagccttccagatctgtgaccctgccaccaatgaatgcgcatccatc

SEQ ID NO: 131605 - DNA, 60 bp, Artificial
  Synthetic oligonucleotide
ctgattctcttaatactttcggcgctgcaacatgctctcatactaaagccgatcatctct

SEQ ID NO: 131606 - DNA, 60 bp, Artificial
  Synthetic oligonucleotide
agccattcgcagctacgaccccttgggagctatagttcaatgtaattacgatcagacata

SEQ ID NO: 131607 - DNA, 60 bp, Artificial
  Synthetic oligonucleotide
gccattcgcagctacgaccccttgggagctatagttcaatgtaattacgatcagacatat

SEQ ID NO: 131608 - DNA, 58 bp, Artificial
  Synthetic oligonucleotide
agtttccaacatagccttccagatctgtgaccctgccaccaatgaatgcgcatccatc

SEQ ID NO: 131609 - DNA, 60 bp, Artificial
  Synthetic oligonucleotide
acatacacttcgcatattccactactgctcatgtttctctaatagaaggtgaccctgacc

SEQ ID NO: 131610 - DNA, 60 bp, Artificial
  Synthetic oligonucleotide
cgtgaacatacacttcgcatattccactactgctcatgtttctctaatagaaggtgaccc

SEQ ID NO: 131611 - DNA, 60 bp, Artificial
  Synthetic oligonucleotide
tctctaatagaaggtgaccctgaccaactctctttcgactgtacaggctgtcttttcact

SEQ ID NO: 131612 - DNA, 60 bp, Artificial
  Synthetic oligonucleotide
caagccattcgcagctacgaccccttgggagctatagttcaatgtaattacgatcagaca

SEQ ID NO: 131613 - DNA, 60 bp, Artificial
  Synthetic oligonucleotide
agaaggtgaccctgaccaactctctttcgactgtacaggctgtcttttcactaacaacca

SEQ ID NO: 131614 - DNA, 60 bp, Artificial
  Synthetic oligonucleotide
tagaaggtgaccctgaccaactctctttcgactgtacaggctgtcttttcactaacaacc

SEQ ID NO: 131615 - DNA, 60 bp, Artificial
  Synthetic oligonucleotide
ggtgaccctgaccaactctctttcgactgtacaggctgtcttttcactaacaaccaaatg

SEQ ID NO: 131616 - DNA, 60 bp, Artificial
  Synthetic oligonucleotide
gaaggtgaccctgaccaactctctttcgactgtacaggctgtcttttcactaacaaccaa

SEQ ID NO: 131617 - DNA, 60 bp, Artificial
  Synthetic oligonucleotide
actgattctcttaatactttcggcgctgcaacatgctctcatactaaagccgatcatctc

SEQ ID NO: 131618 - DNA, 60 bp, Artificial
  Synthetic oligonucleotide
aagccattcgcagctacgaccccttgggagctatagttcaatgtaattacgatcagacat

SEQ ID NO: 131619 - DNA, 60 bp, Artificial
  Synthetic oligonucleotide
gccgatcatctctgtaatttcactgcttccgcatctgagttcgatcttaaagttaatggt

SEQ ID NO: 131620 - DNA, 60 bp, Artificial
  Synthetic oligonucleotide
agccgatcatctctgtaatttcactgcttccgcatctgagttcgatcttaaagttaatgg

SEQ ID NO: 131621 - DNA, 60 bp, Artificial
  Synthetic oligonucleotide
tactgattctcttaatactttcggcgctgcaacatgctctcatactaaagccgatcatct

SEQ ID NO: 131622 - DNA, 60 bp, Artificial
  Synthetic oligonucleotide
ccgatcatctctgtaatttcactgcttccgcatctgagttcgatcttaaagttaatggta

SEQ ID NO: 131623 - DNA, 60 bp, Artificial
  Synthetic oligonucleotide
actcttatcaaattactgattctcttaatactttcggcgctgcaacatgctctcatacta

SEQ ID NO: 131624 - DNA, 60 bp, Artificial
  Synthetic oligonucleotide
accaaatgcaatgttccatcaaaggtattgactctcactcttatcaaattactgattctc

SEQ ID NO: 131625 - DNA, 60 bp, Artificial
  Synthetic oligonucleotide
caaccaaatgcaatgttccatcaaaggtattgactctcactcttatcaaattactgattc

SEQ ID NO: 131626 - DNA, 51 bp, Artificial
  Synthetic oligonucleotide
tcgctcatccccaagtagctaagacaacattcaaagttggtgcgcttttca

SEQ ID NO: 131627 - DNA, 60 bp, Artificial
  Synthetic oligonucleotide
cactaacaaccaaatgcaatgttccatcaaaggtattgactctcactcttatcaaattac

SEQ ID NO: 131628 - DNA, 60 bp, Artificial
  Synthetic oligonucleotide
gcaactataaatcaagccattcgcagctacgaccccttaggagctatagttcaatgtaat

SEQ ID NO: 131629 - DNA, 60 bp, Artificial
  Synthetic oligonucleotide
gtgaccctgaccaactctctttcgactgtacaggctgtcttttcactaacaaccaaatgc

SEQ ID NO: 131630 - DNA, 60 bp, Artificial
  Synthetic oligonucleotide
aattacgatcagacatatatttccactatcacagcccgtcagcaacgttcacttcttcta

SEQ ID NO: 131631 - DNA, 60 bp, Artificial
  Synthetic oligonucleotide
ctaacaaccaaatgcaatgttccatcaaaggtattgactctcactcttatcaaattactg

SEQ ID NO: 131632 - DNA, 60 bp, Artificial
  Synthetic oligonucleotide
gtaattacgatcagacatatatttccactatcacagcccgtcagcaacgttcacttcttc

SEQ ID NO: 131633 - DNA, 61 bp, Artificial
  Synthetic oligonucleotide
gggttggttcaatgtccgtcgacggctaccacaacatttctaccaaggatggtgactgcgg

SEQ ID NO: 131634 - DNA, 60 bp, Artificial
  Synthetic oligonucleotide
gattacgatccagaaaaagtcggtccacccaaggtatggcctgtagaatcaatcactgct

SEQ ID NO: 131635 - DNA, 60 bp, Artificial
  Synthetic oligonucleotide
gctgatgacatcagggttggttcaatgtccgtcgacggctaccacaacatttctaccaag

SEQ ID NO: 131636 - DNA, 61 bp, Artificial
  Synthetic oligonucleotide
aaaagtcggtccacccaaggtatggcctgtagaatcaatcactgctctcagcacgatcctc

SEQ ID NO: 131637 - DNA, 60 bp, Artificial
  Synthetic oligonucleotide
actacacccaaactccctacaaactatcagctaattggttgcgagacactggaccagtac

SEQ ID NO: 131638 - DNA, 59 bp, Artificial
  Synthetic oligonucleotide
attcggtaaactccaacgtacccagtacgcatacttcgttaccgctgatgacatcaggg

SEQ ID NO: 131639 - DNA, 58 bp, Artificial
  Synthetic oligonucleotide
cttccgtgtttcacagcccaagacaaacttccttgtcggtctcgtcactcatgaagta

SEQ ID NO: 131640 - DNA, 60 bp, Artificial
  Synthetic oligonucleotide
aagatcccactcaacttcactcaccgtaacctgaacttccgtgtttcacagcccaagaca

SEQ ID NO: 131641 - DNA, 58 bp, Artificial
  Synthetic oligonucleotide
atacaacaagtaccgtagtaatatcgtacgtgtatatggtgaacgtggtgatctcaac

SEQ ID NO: 131642 - DNA, 60 bp, Artificial
  Synthetic oligonucleotide
tcaaggaggcactagacgatttcatcaacggatacgtcgccaacttgcaacgaggtactg

SEQ ID NO: 131643 - DNA, 60 bp, Artificial
  Synthetic oligonucleotide
cacaaaaggtgaagaaactcatgacatcgaactgttgagcgacgaatatgacgccactcc

SEQ ID NO: 131644 - DNA, 60 bp, Artificial
  Synthetic oligonucleotide
tactcaaattcggtaaactccaacgtacccagtacgcatacttcgttaccgctgatgaca

SEQ ID NO: 131645 - DNA, 60 bp, Artificial
  Synthetic oligonucleotide
ggaccagtacgtcaatgcccgtaatctcgttaccggccaatttcctcagatcaaggaggc

SEQ ID NO: 131646 - DNA, 60 bp, Artificial
  Synthetic oligonucleotide
acgtcaatgcccgtaatctcgttaccggccaatttcctcagatcaaggaggcactagacg

SEQ ID NO: 131647 - DNA, 60 bp, Artificial
  Synthetic oligonucleotide
ccagtacgtcaatgcccgtaatctcgttaccggccaatttcctcagatcaaggaggcact

SEQ ID NO: 131648 - DNA, 60 bp, Artificial
  Synthetic oligonucleotide
actccctacaaactatcagctaattggttgcgagacactggaccagtacgtcaatgcccg

SEQ ID NO: 131649 - DNA, 60 bp, Artificial
  Synthetic oligonucleotide
ccctacaaactatcagctaattggttgcgagacactggaccagtacgtcaatgcccgtaa

SEQ ID NO: 131650 - DNA, 60 bp, Artificial
  Synthetic oligonucleotide
tcttcgtccacgccgcattcctcaacgcatacgcccaagcaattgactcaaagatcccac

SEQ ID NO: 131651 - DNA, 60 bp, Artificial
  Synthetic oligonucleotide
caagcaattgactcaaagatcccactcaacttcactcaccgtaacctgaacttccgtgtt

SEQ ID NO: 131652 - DNA, 60 bp, Artificial
  Synthetic oligonucleotide
gactcaaagatcccactcaacttcactcaccgtaacctgaacttccgtgtttcacagccc

SEQ ID NO: 131653 - DNA, 60 bp, Artificial
  Synthetic oligonucleotide
cctcgtcacatcttcgactcctgtactgacaacactctcacacgacacatccgcgtcaca

SEQ ID NO: 131654 - DNA, 61 bp, Artificial
  Synthetic oligonucleotide
ccgcgtcacaaaaggtgaagaaactcatgacatcgaactgttgagcgacgaatatgacgcc

SEQ ID NO: 131655 - DNA, 60 bp, Artificial
  Synthetic oligonucleotide
cagctcgacttcttcgtccacgccgcattcctcaacgcatacgcccaagcaattgactca

SEQ ID NO: 131656 - DNA, 60 bp, Artificial
  Synthetic oligonucleotide
cttcttcgtccacgccgcattcctcaacgcatacgcccaagcaattgactcaaagatccc

SEQ ID NO: 131657 - DNA, 60 bp, Artificial
  Synthetic oligonucleotide
gagctcacatcgtcggcattgctagcatccctcctgtcaacggtgccctgacctggaatg

SEQ ID NO: 131658 - DNA, 60 bp, Artificial
  Synthetic oligonucleotide
ggagctcacatcgtcggcattgctagcatccctcctgtcaacggtgccctgacctggaat

SEQ ID NO: 131659 - DNA, 60 bp, Artificial
  Synthetic oligonucleotide
tggagctcacatcgtcggcattgctagcatccctcctgtcaacggtgccctgacctggaa

SEQ ID NO: 131660 - DNA, 60 bp, Artificial
  Synthetic oligonucleotide
cacatccgcgtcacaaaaggtgaagaaactcatgacatcgaactgttgagcgacgaatat

SEQ ID NO: 131661 - DNA, 60 bp, Artificial
  Synthetic oligonucleotide
ctcacatcgtcggcattgctagcatccctcctgtcaacggtgccctgacctggaatgcag

SEQ ID NO: 131662 - DNA, 60 bp, Artificial
  Synthetic oligonucleotide
gctcacatcgtcggcattgctagcatccctcctgtcaacggtgccctgacctggaatgca

SEQ ID NO: 131663 - DNA, 60 bp, Artificial
  Synthetic oligonucleotide
agctcacatcgtcggcattgctagcatccctcctgtcaacggtgccctgacctggaatgc

SEQ ID NO: 131664 - DNA, 60 bp, Artificial
  Synthetic oligonucleotide
acctggaatgcagaaaaggaaatgctctgcggaccaaatgatgactacgattacgatcca

SEQ ID NO: 131665 - DNA, 60 bp, Artificial
  Synthetic oligonucleotide
cttccctcgtcacatcttcgactcctgtactgacaacactctcacacgacacatccgcgt

SEQ ID NO: 131666 - DNA, 60 bp, Artificial
  Synthetic oligonucleotide
tccctcgtcacatcttcgactcctgtactgacaacactctcacacgacacatccgcgtca

SEQ ID NO: 131667 - DNA, 60 bp, Artificial
  Synthetic oligonucleotide
ggtgatctcaacggcttcctcagcggcaaattcctctacttccctcgtcacatcttcgac

SEQ ID NO: 131668 - DNA, 60 bp, Artificial
  Synthetic oligonucleotide
acttccctcgtcacatcttcgactcctgtactgacaacactctcacacgacacatccgcg

SEQ ID NO: 131669 - DNA, 60 bp, Artificial
  Synthetic oligonucleotide
cgtggtgatctcaacggcttcctcagcggcaaattcctctacttccctcgtcacatcttc

SEQ ID NO: 131670 - DNA, 60 bp, Artificial
  Synthetic oligonucleotide
gtggtgatctcaacggcttcctcagcggcaaattcctctacttccctcgtcacatcttcg

SEQ ID NO: 131671 - DNA, 60 bp, Artificial
  Synthetic oligonucleotide
ggtgaacgtggtgatctcaacggcttcctcagcggcaaattcctctacttccctcgtcac

SEQ ID NO: 131672 - DNA, 60 bp, Artificial
  Synthetic oligonucleotide
gaacgtggtgatctcaacggcttcctcagcggcaaattcctctacttccctcgtcacatc

SEQ ID NO: 131673 - DNA, 60 bp, Artificial
  Synthetic oligonucleotide
atatggtgaacgtggtgatctcaacggcttcctcagcggcaaattcctctacttccctcg

SEQ ID NO: 131674 - DNA, 60 bp, Artificial
  Synthetic oligonucleotide
tcaaagatcccactcaacttcactcaccgtaacctgaacttccgtgtttcacagcccaag

SEQ ID NO: 131675 - DNA, 60 bp, Artificial
  Synthetic oligonucleotide
caacagctcgacttcttcgtccacgccgcattcctcaacgcatacgcccaagcaattgac

SEQ ID NO: 131676 - DNA, 60 bp, Artificial
  Synthetic oligonucleotide
gcactagacgatttcatcaacggatacgtcgccaacttgcaacgaggtactgaagcctac

SEQ ID NO: 131677 - DNA, 61 bp, Artificial
  Synthetic oligonucleotide
ggaggcactagacgatttcatcaacggatacgtcgccaacttgcaacgaggtactgaagcc

SEQ ID NO: 131678 - DNA, 60 bp, Artificial
  Synthetic oligonucleotide
atcaacagctcgacttcttcgtccacgccgcattcctcaacgcatacgcccaagcaattg

SEQ ID NO: 131679 - DNA, 60 bp, Artificial
  Synthetic oligonucleotide
catgaagaaatccaccgacgacaagtactcctactatcaacagctcgacttcttcgtcca

SEQ ID NO: 131680 - DNA, 60 bp, Artificial
  Synthetic oligonucleotide
gcagatgatctcatgaagaaatccaccgacgacaagtactcctactatcaacagctcgac

SEQ ID NO: 131681 - DNA, 60 bp, Artificial
  Synthetic oligonucleotide
agcagcagatgatctcatgaagaaatccaccgacgacaagtactcctactatcaacagct

SEQ ID NO: 131682 - DNA, 60 bp, Artificial
  Synthetic oligonucleotide
cccctaactaagggtgatttgcatcatatctgctccagccacccgatatcatgacctccg

SEQ ID NO: 131683 - DNA, 61 bp, Artificial
  Synthetic oligonucleotide
gcccctaactaagggtgatttgcatcatatctgctccagccacccgatatcatgacctccg

SEQ ID NO: 131684 - DNA, 60 bp, Artificial
  Synthetic oligonucleotide
gcccctaactaagggtgatttgcatcatatctgctccagccacccgatatcatgacctcc

SEQ ID NO: 131685 - DNA, 60 bp, Artificial
  Synthetic oligonucleotide
ggcccctaactaagggtgatttgcatcatatctgctccagccacccgatatcatgacctc

SEQ ID NO: 131686 - DNA, 60 bp, Artificial
  Synthetic oligonucleotide
tccttcgcagtcgaacgcggaaatggatggatgttggcatatgccccaggtaaaaatcca

SEQ ID NO: 131687 - DNA, 54 bp, Artificial
  Synthetic oligonucleotide
ccttcgcagtcgaacgcggaaatggatggatgttggcatatgccccaggtaaaa

SEQ ID NO: 131688 - DNA, 55 bp, Artificial
  Synthetic oligonucleotide
tccttcgcagtcgaacgcggaaatggatggatgttggcatatgccccaggtaaaa

SEQ ID NO: 131689 - DNA, 60 bp, Artificial
  Synthetic oligonucleotide
cttaaggaagccaagaaggtgttcacacgcgaagataatcagaaatgggctaaggtctca

SEQ ID NO: 131690 - DNA, 60 bp, Artificial
  Synthetic oligonucleotide
acacttaaggaagccaagaaggtgttcacacgcgaagataatcagaaatgggctaaggtc

SEQ ID NO: 131691 - DNA, 60 bp, Artificial
  Synthetic oligonucleotide
acttaaggaagccaagaaggtgttcacacgcgaagataatcagaaatgggctaaggtctc

SEQ ID NO: 131692 - DNA, 51 bp, Artificial
  Synthetic oligonucleotide
tcgcagtagaacgcggtaatggatggactctggcatatgccccaggtaaaa

SEQ ID NO: 131693 - DNA, 54 bp, Artificial
  Synthetic oligonucleotide
ccttcgcagtcgaacgcggtaatggatggactctggcatatgccccaggtaaaa

SEQ ID NO: 131694 - DNA, 60 bp, Artificial
  Synthetic oligonucleotide
tccttcgcagtcgaacgcggtaatggatggactctggcatatgccccaggtaaaaatcca

SEQ ID NO: 131695 - DNA, 60 bp, Artificial
  Synthetic oligonucleotide
ccagtcgcatacactaaactacacgaagatcgtcacctaatccgtgaccgtctcacacac

SEQ ID NO: 131696 - DNA, 61 bp, Artificial
  Synthetic oligonucleotide
gccagtcgcatacactaaactacacgaagatcgtcacctaatccgtgaccgtctcacacac

SEQ ID NO: 131697 - DNA, 60 bp, Artificial
  Synthetic oligonucleotide
agccagtcgcatacactaaactacacgaagatcgtcacctaatccgtgaccgtctcacac

SEQ ID NO: 131698 - DNA, 61 bp, Artificial
  Synthetic oligonucleotide
ccgtgatcgtctcacacacatggacttcacctcaggccaagagttctacgctactgaattc

SEQ ID NO: 131699 - DNA, 60 bp, Artificial
  Synthetic oligonucleotide
tcagccagtcgcatacactaaactacacgaagatcgtcacctaatccgtgatcgtctcac

SEQ ID NO: 131700 - DNA, 60 bp, Artificial
  Synthetic oligonucleotide
cagccagtcgcatacactaaactacacgaagatcgtcacctaatccgtgaccgtctcaca

SEQ ID NO: 131701 - DNA, 61 bp, Artificial
  Synthetic oligonucleotide
acctcacgcatccctatgacgctctcctcgaacctctacttcctcctaacactctcgtcgg

SEQ ID NO: 131702 - DNA, 60 bp, Artificial
  Synthetic oligonucleotide
cctgcacgcatccctatgacgctctcctcgaacctctacttcctcctaacactctcgtcg

SEQ ID NO: 131703 - DNA, 60 bp, Artificial
  Synthetic oligonucleotide
cttcaacctcacgcatccctatgacgctctcctcgaacctctacttcctcctaacactct

SEQ ID NO: 131704 - DNA, 60 bp, Artificial
  Synthetic oligonucleotide
caacctgcacgcatccctatgacgctctcctcgaacctctacttcctcctaacactctcg

SEQ ID NO: 131705 - DNA, 60 bp, Artificial
  Synthetic oligonucleotide
aacctgcacgcatccctatgacgctctcctcgaacctctacttcctcctaacactctcgt

SEQ ID NO: 131706 - DNA, 61 bp, Artificial
  Synthetic oligonucleotide
acctgcacgcatccctatgacgctctcctcgaacctctacttcctcctaacactctcgtcg

SEQ ID NO: 131707 - DNA, 60 bp, Artificial
  Synthetic oligonucleotide
aattcatcaatgagttcaatgacgtcgaattcaagacagctgaacggtgataccattcac

SEQ ID NO: 131708 - DNA, 60 bp, Artificial
  Synthetic oligonucleotide
ctcacacacatggacttcacctcaggtcaagagttctacgctactgaattcatcaatgag

SEQ ID NO: 131709 - DNA, 60 bp, Artificial
  Synthetic oligonucleotide
cgtctcacacacatggacttcacctcaggtcaagagttctacgctactgaattcatcaat

SEQ ID NO: 131710 - DNA, 60 bp, Artificial
  Synthetic oligonucleotide
gtgatcgtctcacacacatggacttcacctcaggccaagagttctacgctactgaattca

SEQ ID NO: 131711 - DNA, 60 bp, Artificial
  Synthetic oligonucleotide
gatcgtctcacacacatggacttcacctcaggccaagagttctacgctactgaattcatc

SEQ ID NO: 131712 - DNA, 60 bp, Artificial
  Synthetic oligonucleotide
agttcaatgacgtcgaattcaagacagctgaacggtgataccattcacttcaacctgcac

SEQ ID NO: 131713 - DNA, 60 bp, Artificial
  Synthetic oligonucleotide
gttcaatgacgtcgaattcaagacagctgaacggtgataccattcacttcaacctgcacg

SEQ ID NO: 131714 - DNA, 60 bp, Artificial
  Synthetic oligonucleotide
acttcaacctcacgcatccctatgacgctctcctcgaacctctacttcctcctaacactc

SEQ ID NO: 131715 - DNA, 60 bp, Artificial
  Synthetic oligonucleotide
cacttcaacctcacgcatccctatgacgctctcctcgaacctctacttcctcctaacact

SEQ ID NO: 131716 - DNA, 60 bp, Artificial
  Synthetic oligonucleotide
tcacttcaacctcacgcatccctatgacgctctcctcgaacctctacttcctcctaacac

SEQ ID NO: 131717 - DNA, 60 bp, Artificial
  Synthetic oligonucleotide
accattcacttcaacctcacgcatccctatgacgctctcctcgaacctctacttcctcct

SEQ ID NO: 131718 - DNA, 60 bp, Artificial
  Synthetic oligonucleotide
taccattcacttcaacctgcacgcatccctatgacgctctcctcgaacctctacttcctc

SEQ ID NO: 131719 - DNA, 60 bp, Artificial
  Synthetic oligonucleotide
aaagcactgcgttccatcttcatcggcccagccttcatgaacgatgtttaccgctgcttc

SEQ ID NO: 131720 - DNA, 60 bp, Artificial
  Synthetic oligonucleotide
aatactcttacatcatgaatcacgcatatcactacactcacactaacctctctcttatta

SEQ ID NO: 131721 - DNA, 60 bp, Artificial
  Synthetic oligonucleotide
catgaatcacgcatatcactacactcacactaacctctctcttattactcgtggcctctg

SEQ ID NO: 131722 - DNA, 60 bp, Artificial
  Synthetic oligonucleotide
tcatgaatcacgcatatcactacactcacactaacctctctcttattactcgtggcctct

SEQ ID NO: 131723 - DNA, 60 bp, Artificial
  Synthetic oligonucleotide
cccaagtttgacacctgtgttgacaccatggcacaatactcttacatcatgaatcacgca

SEQ ID NO: 131724 - DNA, 60 bp, Artificial
  Synthetic oligonucleotide
gacacctgtgttgacaccatggcacaatactcttacatcatgaatcacgcatatcactac

SEQ ID NO: 131725 - DNA, 60 bp, Artificial
  Synthetic oligonucleotide
aggtgattccaaagatctccatccaacctgtagacaaagcactgcgttccatcttcatcg

SEQ ID NO: 131726 - DNA, 60 bp, Artificial
  Synthetic oligonucleotide
ctatctggctatttgaggtgattccaaagatctccatccaacctgtagacaaagcactgc

SEQ ID NO: 131727 - DNA, 60 bp, Artificial
  Synthetic oligonucleotide
tggctatttgaggtgattccaaagatctccatccaacctgtagacaaagcactgcgttcc

SEQ ID NO: 131728 - DNA, 60 bp, Artificial
  Synthetic oligonucleotide
cacgcatatcactacactcacactaacctctctcttattactcgtggcctctgtcagtta

SEQ ID NO: 131729 - DNA, 60 bp, Artificial
  Synthetic oligonucleotide
aagacgatgcatactctacacaccgcgccttcgaatggaacatctctcgctgtgccactc

SEQ ID NO: 131730 - DNA, 60 bp, Artificial
  Synthetic oligonucleotide
tggcatacaaagtaaagacgatgcatactctacacaccgcgctttcgaatggaacatctc

SEQ ID NO: 131731 - DNA, 60 bp, Artificial
  Synthetic oligonucleotide
gtaaagacgatgcatactctacacaccgcgccttcgaatggaacatctctcgctgtgcca

SEQ ID NO: 131732 - DNA, 60 bp, Artificial
  Synthetic oligonucleotide
taaagacgatgcatactctacacaccgcgccttcgaatggaacatctctcgctgtgccac

SEQ ID NO: 131733 - DNA, 60 bp, Artificial
  Synthetic oligonucleotide
aaagacgatgcatactctacacaccgcgccttcgaatggaacatctctcgctgtgccact

SEQ ID NO: 131734 - DNA, 60 bp, Artificial
  Synthetic oligonucleotide
tctctcgctgtgccactcttagcgacgacacactcgccatcatcaatccagacgtcttcg

SEQ ID NO: 131735 - DNA, 60 bp, Artificial
  Synthetic oligonucleotide
ctctcgctgtgccactcttagcgacgacacactcgccatcatcaatccagacgtcttcga

SEQ ID NO: 131736 - DNA, 60 bp, Artificial
  Synthetic oligonucleotide
ctcgctgtgccactcttagcgacgacacactcgccatcatcaatccagacgtcttcgatc

SEQ ID NO: 131737 - DNA, 60 bp, Artificial
  Synthetic oligonucleotide
agacgatgcatactctacacaccgcgccttcgaatggaacatctctcgctgtgccactct

SEQ ID NO: 131738 - DNA, 60 bp, Artificial
  Synthetic oligonucleotide
ggaacatctctcgctgtgccactcttagcgacgacacactcgccatcatcaatccagacg

SEQ ID NO: 131739 - DNA, 60 bp, Artificial
  Synthetic oligonucleotide
ccatcttcatcggcccagccttcatgaacgatgtttaccgctgcttcaacaccgcatggc

SEQ ID NO: 131740 - DNA, 60 bp, Artificial
  Synthetic oligonucleotide
gatctcgcaagactatcccaagtttgacacctgtgttgacaccatggcacaatactctta

SEQ ID NO: 131741 - DNA, 60 bp, Artificial
  Synthetic oligonucleotide
cgcaagactatcccaagtttgacacctgtgttgacaccatggcacaatactcttacatca

SEQ ID NO: 131742 - DNA, 60 bp, Artificial
  Synthetic oligonucleotide
tcacggcaggattcaacccaaaaggcaaagccaagtggatctcgcaagactatcccaagt

SEQ ID NO: 131743 - DNA, 60 bp, Artificial
  Synthetic oligonucleotide
atcatgaatcacgcatatcactacactcacactaacctctctcttattactcgtggcctc

SEQ ID NO: 131744 - DNA, 61 bp, Artificial
  Synthetic oligonucleotide
cgctgcttcaacaccgcatggctagaattcaccaaaacacgactttcctacaacactgtcc

SEQ ID NO: 131745 - DNA, 56 bp, Artificial
  Synthetic oligonucleotide
atcatctactacaacagcatgctcatcaggaaactgcatggggtgtcaagtggtga

SEQ ID NO: 131746 - DNA, 60 bp, Artificial
  Synthetic oligonucleotide
atcacgcatatcactacactcacactaacctctctcttattactcgtggcctctgtcagt

SEQ ID NO: 131747 - DNA, 60 bp, Artificial
  Synthetic oligonucleotide
tcacgcatatcactacactcacactaacctctctcttattactcgtggcctctgtcagtt

SEQ ID NO: 131748 - DNA, 60 bp, Artificial
  Synthetic oligonucleotide
gaatcacgcatatcactacactcacactaacctctctcttattactcgtggcctctgtca

SEQ ID NO: 131749 - DNA, 60 bp, Artificial
  Synthetic oligonucleotide
aatcacgcatatcactacactcacactaacctctctcttattactcgtggcctctgtcag

SEQ ID NO: 131750 - DNA, 60 bp, Artificial
  Synthetic oligonucleotide
tccatcttcatcggcccagccttcatgaacgatgtttaccgctgcttcaacaccgcatgg

SEQ ID NO: 131751 - DNA, 60 bp, Artificial
  Synthetic oligonucleotide
tgaatcacgcatatcactacactcacactaacctctctcttattactcgtggcctctgtc

SEQ ID NO: 131752 - DNA, 60 bp, Artificial
  Synthetic oligonucleotide
gcgttccatcttcatcggcccagccttcatgaacgatgtttaccgctgcttcaacaccgc

SEQ ID NO: 131753 - DNA, 60 bp, Artificial
  Synthetic oligonucleotide
cgttccatcttcatcggcccagccttcatgaacgatgtttaccgctgcttcaacaccgca

SEQ ID NO: 131754 - DNA, 60 bp, Artificial
  Synthetic oligonucleotide
catcttcatcggcccagccttcatgaacgatgtttaccgctgcttcaacaccgcatggct

SEQ ID NO: 131755 - DNA, 60 bp, Artificial
  Synthetic oligonucleotide
ccgctgcttcaacaccgcatggctagaattcaccaaaacacgactttcctacaacactgt

SEQ ID NO: 131756 - DNA, 60 bp, Artificial
  Synthetic oligonucleotide
atgaatcacgcatatcactacactcacactaacctctctcttattactcgtggcctctgt

SEQ ID NO: 131757 - DNA, 60 bp, Artificial
  Synthetic oligonucleotide
gccactgtaacagtatcatcacaaacatcgccttctacagacaaatcattgacaatcaag

SEQ ID NO: 131758 - DNA, 60 bp, Artificial
  Synthetic oligonucleotide
tctcgcaagactatcccaagtttgacacctgtgttgacaccatggcacaatactcttaca

SEQ ID NO: 131759 - DNA, 60 bp, Artificial
  Synthetic oligonucleotide
tccagacgtcttcgatcttgatcaatacctttcaagctatcgaactctaggtggttatga

SEQ ID NO: 131760 - DNA, 60 bp, Artificial
  Synthetic oligonucleotide
taacagtatcatcacaaacatcgccttctacagacaaatcattgacaatcaagtgcccga

SEQ ID NO: 131761 - DNA, 60 bp, Artificial
  Synthetic oligonucleotide
ggatcacggcaggattcaacccaaaaggcaaagccaagtggatctcgcaagactatccca

SEQ ID NO: 131762 - DNA, 60 bp, Artificial
  Synthetic oligonucleotide
gctgtgccactcttagcgacgacacacttgccatcatcaatccagacgtcttcgatcttg

SEQ ID NO: 131763 - DNA, 60 bp, Artificial
  Synthetic oligonucleotide
tccgtgatgagccatatgaattcacctccagatacttctcaaagaggacggttctgtaca

SEQ ID NO: 131764 - DNA, 60 bp, Artificial
  Synthetic oligonucleotide
cgtcttcgatcttgatcaatacctttcaagctatcgaactctaggtggttatgaaatcac

SEQ ID NO: 131765 - DNA, 60 bp, Artificial
  Synthetic oligonucleotide
gaacagccactgtaacagtatcatcacaaacatcgccttctacagacaaatcattgacaa

SEQ ID NO: 131766 - DNA, 60 bp, Artificial
  Synthetic oligonucleotide
caacaccgcatggctagaattcaccaaaacacgactttcctacaacactgtcctcatcgg

SEQ ID NO: 131767 - DNA, 60 bp, Artificial
  Synthetic oligonucleotide
gctgcttcaacaccgcatggctagaattcaccaaaacacgactttcctacaacactgtcc

SEQ ID NO: 131768 - DNA, 60 bp, Artificial
  Synthetic oligonucleotide
cagtatcatcacaaacatcgccttctacagacaaatcattgacaatcaagtgcccgaaga

SEQ ID NO: 131769 - DNA, 60 bp, Artificial
  Synthetic oligonucleotide
aaaagcacagtcattcgcattacaagcatgtacaatatacaacttcgacatcactccaga

SEQ ID NO: 131770 - DNA, 60 bp, Artificial
  Synthetic oligonucleotide
gcacagtcattcgcattacaagcatgtacaacatacaacttcgacatcactccagacaac

SEQ ID NO: 131771 - DNA, 60 bp, Artificial
  Synthetic oligonucleotide
attcgcattacaagcatgtacaacatacaacttcgacatcactccagacaacatctgtcc

SEQ ID NO: 131772 - DNA, 60 bp, Artificial
  Synthetic oligonucleotide
cgtcactggttctccgctggtctctcactctcctgcgcatctatttacccacatgaagac

SEQ ID NO: 131773 - DNA, 60 bp, Artificial
  Synthetic oligonucleotide
ctggttctccgctggtctctcactctcctgcgcatctatttacccacatgaagacatgac

SEQ ID NO: 131774 - DNA, 60 bp, Artificial
  Synthetic oligonucleotide
tcgaacgtcactggttctccgctggtctctcactctcctgcgcatctatttacccacatg

SEQ ID NO: 131775 - DNA, 60 bp, Artificial
  Synthetic oligonucleotide
cgaacgtcactggttctccgctggtctctcactctcctgcgcatctatttacccacatga

SEQ ID NO: 131776 - DNA, 60 bp, Artificial
  Synthetic oligonucleotide
atctgtccagaaggcgtctatgacttcgagacatatcgtcccggcaattgtgatcccatc

SEQ ID NO: 131777 - DNA, 60 bp, Artificial
  Synthetic oligonucleotide
catctgtccagaaggcgtctatgacttcgagacatatcgtcccggcaattgtgatcccat

SEQ ID NO: 131778 - DNA, 60 bp, Artificial
  Synthetic oligonucleotide
cactccagacaacatctgtccagaaggcgtctatgacttcgagacatatcgtcccggcaa

SEQ ID NO: 131779 - DNA, 60 bp, Artificial
  Synthetic oligonucleotide
tcactccagacaacatctgtccagaaggcgtctatgacttcgagacatatcgtcccggca

SEQ ID NO: 131780 - DNA, 60 bp, Artificial
  Synthetic oligonucleotide
cgcattacaagcatgtacaacatacaacttcgacatcactccagacaacatctgtccaga

SEQ ID NO: 131781 - DNA, 60 bp, Artificial
  Synthetic oligonucleotide
tcgcattacaagcatgtacaacatacaacttcgacatcactccagacaacatctgtccag

SEQ ID NO: 131782 - DNA, 60 bp, Artificial
  Synthetic oligonucleotide
ttcgcattacaagcatgtacaacatacaacttcgacatcactccagacaacatctgtcca

SEQ ID NO: 131783 - DNA, 60 bp, Artificial
  Synthetic oligonucleotide
catcgaacgtcactggttctccgctggtctctcactctcctgcgcatctatctatccaca

SEQ ID NO: 131784 - DNA, 60 bp, Artificial
  Synthetic oligonucleotide
tcgaacgtcactggttctccgctggtctctcactctcctgcgcatctatctatccacatg

SEQ ID NO: 131785 - DNA, 60 bp, Artificial
  Synthetic oligonucleotide
gatcccatcaaagctctcaacgccgtcacgtattgcatcgaacgtcactggttctccgct

SEQ ID NO: 131786 - DNA, 60 bp, Artificial
  Synthetic oligonucleotide
catcgaacgtcactggttctccgctggtctctcactctcctgcgcatctatttacccaca

SEQ ID NO: 131787 - DNA, 60 bp, Artificial
  Synthetic oligonucleotide
gtgatcccatcaaagctctcaacgccgtcacgtattgcatcgaacgtcactggttctccg

SEQ ID NO: 131788 - DNA, 60 bp, Artificial
  Synthetic oligonucleotide
tgatcccatcaaagctctcaacgccgtcacgtattgcatcgaacgtcactggttctccgc

SEQ ID NO: 131789 - DNA, 60 bp, Artificial
  Synthetic oligonucleotide
gtcccggcaattgtgatcccatcaaagctctcaacgccgtcacgtattgcatcgaacgtc

SEQ ID NO: 131790 - DNA, 60 bp, Artificial
  Synthetic oligonucleotide
cccggcaattgtgatcccatcaaagctctcaacgccgtcacgtattgcatcgaacgtcac

SEQ ID NO: 131791 - DNA, 60 bp, Artificial
  Synthetic oligonucleotide
tctgtccagaaggcgtctatgacttcgagacatatcgtcccggcaattgtgatcccatca

SEQ ID NO: 131792 - DNA, 60 bp, Artificial
  Synthetic oligonucleotide
cgtcccggcaattgtgatcccatcaaagctctcaacgccgtcacgtattgcatcgaacgt

SEQ ID NO: 131793 - DNA, 56 bp, Artificial
  Synthetic oligonucleotide
tcattcaaggacttcaagaacaatccctccaagttgtcaagtcatctgatggtaag

SEQ ID NO: 131794 - DNA, 57 bp, Artificial
  Synthetic oligonucleotide
tcattcaaggacttcaagaacaatccctccaagttgtcaagtcatctgatggtaagt

SEQ ID NO: 131795 - DNA, 60 bp, Artificial
  Synthetic oligonucleotide
ctccttccaaccgactcactcgcaatgcaaggctcatcgagattcctcaatccttcgcag

SEQ ID NO: 131796 - DNA, 60 bp, Artificial
  Synthetic oligonucleotide
ctccttccaaccgacccactcgcaatgcaaggctcatcgagattcctcaatccttcgcag

SEQ ID NO: 131797 - DNA, 60 bp, Artificial
  Synthetic oligonucleotide
cgactcactcgcaatgcaaggctcatcgagattcctcaatccttcgcagtcgaacgcgga

SEQ ID NO: 131798 - DNA, 60 bp, Artificial
  Synthetic oligonucleotide
cgacccactcgcaatgcaaggctcatcgagattcctcaatccttcgcagtcgaacgcgga

SEQ ID NO: 131799 - DNA, 60 bp, Artificial
  Synthetic oligonucleotide
atccactaccgggaaaagtcatcgctcgtatgcaggcatctccattcattcaaggacttc

SEQ ID NO: 131800 - DNA, 60 bp, Artificial
  Synthetic oligonucleotide
taaaaatccactaccgggaaaagtcatcgctcgtatgcaggcatctccattcattcaagg

SEQ ID NO: 131801 - DNA, 60 bp, Artificial
  Synthetic oligonucleotide
ccactaccgggaaaagtcatcgctcgtatgcaggcatctccattcattcaaggacttcaa

SEQ ID NO: 131802 - DNA, 60 bp, Artificial
  Synthetic oligonucleotide
tccactaccgggaaaagtcatcgctcgtatgcaggcatctccattcattcaaggacttca

SEQ ID NO: 131803 - DNA, 60 bp, Artificial
  Synthetic oligonucleotide
cactaccgggaaaagtcatcgctcgtatgcaggcatctccattcattcaaggacttcaag

SEQ ID NO: 131804 - DNA, 61 bp, Artificial
  Synthetic oligonucleotide
ccactaccgggaaaagtcatcgctcgtatgcaggcatctccattcattcaaggacttcaag

SEQ ID NO: 131805 - DNA, 60 bp, Artificial
  Synthetic oligonucleotide
aaagcgttcaacacagaagtcaatcgttcccgatccttcccttgacatagagaacctagc

SEQ ID NO: 131806 - DNA, 60 bp, Artificial
  Synthetic oligonucleotide
gcgttcaacacagaagtcaatcgttcccgatccttcccttgacatagagaacctagctga

SEQ ID NO: 131807 - DNA, 60 bp, Artificial
  Synthetic oligonucleotide
cccaacgatcccattctgccaaagcgttcaacacagaagtcaatcgttcccgatccttcc

SEQ ID NO: 131808 - DNA, 60 bp, Artificial
  Synthetic oligonucleotide
ccaacgatcccattctgccaaagcgttcaacacagaagtcaatcgttcccgatccttccc

SEQ ID NO: 131809 - DNA, 60 bp, Artificial
  Synthetic oligonucleotide
cgatcccattctgccaaagcgttcaacacagaagtcaatcgttcccgatccttcccttga

SEQ ID NO: 131810 - DNA, 60 bp, Artificial
  Synthetic oligonucleotide
gatcccattctgccaaagcgttcaacacagaagtcaatcgttcccgatccttcccttgac

SEQ ID NO: 131811 - DNA, 55 bp, Artificial
  Synthetic oligonucleotide
cattcaaggacttcaagaacaatccctccaagttgtcaagtcatctgatggtaag

SEQ ID NO: 131812 - DNA, 56 bp, Artificial
  Synthetic oligonucleotide
cattcaaggacttcaagaacaatccctccaagttgtcaagtcatctgatggtaagt

SEQ ID NO: 131813 - DNA, 55 bp, Artificial
  Synthetic oligonucleotide
attcaaggacttcaagaacaatccctccaagttgtcaagtcatctgatggtaagt

SEQ ID NO: 131814 - DNA, 61 bp, Artificial
  Synthetic oligonucleotide
cccaacgatcccattctgccaaagcgttcaacacagaagtcaatcgttcccgatccttccc

SEQ ID NO: 131815 - DNA, 60 bp, Artificial
  Synthetic oligonucleotide
ccgactcactcgcaatgcaaggctcatcgagattcctcaatccttcgcagtcgaacgcgg

SEQ ID NO: 131816 - DNA, 60 bp, Artificial
  Synthetic oligonucleotide
cgacccactcgcaatgcaaggctcatcgagattcctcaatccttcgcagtcgaacgcggt

SEQ ID NO: 131817 - DNA, 60 bp, Artificial
  Synthetic oligonucleotide
acctagctgaaggtatccacgcaatgagccttgaagacgacgaatccatggaaacacaat

SEQ ID NO: 131818 - DNA, 60 bp, Artificial
  Synthetic oligonucleotide
cctagctgaaggtatccacgcaatgagccttgaagacgacgaatccatggaaacacaatc

SEQ ID NO: 131819 - DNA, 60 bp, Artificial
  Synthetic oligonucleotide
agaacctagctgaaggtatccacgcaatgagccttgaagacgacgaatccatggaaacac

SEQ ID NO: 131820 - DNA, 60 bp, Artificial
  Synthetic oligonucleotide
gaacctagctgaaggtatccacgcaatgagccttgaagacgacgaatccatggaaacaca

SEQ ID NO: 131821 - DNA, 61 bp, Artificial
  Synthetic oligonucleotide
accgactcactcgcaatgcaaggctcatcgagattcctcaatccttcgcagtcgaacgcgg

SEQ ID NO: 131822 - DNA, 60 bp, Artificial
  Synthetic oligonucleotide
accgactcactcgcaatgcaaggctcatcgagattcctcaatccttcgcagtcgaacgcg

SEQ ID NO: 131823 - DNA, 61 bp, Artificial
  Synthetic oligonucleotide
accgacccactcgcaatgcaaggctcatcgagattcctcaatccttcgcagtcgaacgcgg

SEQ ID NO: 131824 - DNA, 60 bp, Artificial
  Synthetic oligonucleotide
accgacccactcgcaatgcaaggctcatcgagattcctcaatccttcgcagtcgaacgcg

SEQ ID NO: 131825 - DNA, 61 bp, Artificial
  Synthetic oligonucleotide
ccgacccactcgcaatgcaaggctcatcgagattcctcaatccttcgcagtcgaacgcggt

SEQ ID NO: 131826 - DNA, 60 bp, Artificial
  Synthetic oligonucleotide
ccgacccactcgcaatgcaaggctcatcgagattcctcaatccttcgcagtcgaacgcgg

SEQ ID NO: 131827 - DNA, 61 bp, Artificial
  Synthetic oligonucleotide
ccgacccactcgcaatgcaaggctcatcgagattcctcaatccttcgcagtcgaacgcgga

SEQ ID NO: 131828 - DNA, 61 bp, Artificial
  Synthetic oligonucleotide
ccgactcactcgcaatgcaaggctcatcgagattcctcaatccttcgcagtcgaacgcgga

SEQ ID NO: 131829 - DNA, 60 bp, Artificial
  Synthetic oligonucleotide
ctagctgaaggtatccacgcaatgagccttgaagacgacgaatccatggaaacacaatca

SEQ ID NO: 131830 - DNA, 60 bp, Artificial
  Synthetic oligonucleotide
catagagaacctagctgaaggtatccacgcaatgagccttgaagacgacgaacccatgga

SEQ ID NO: 131831 - DNA, 60 bp, Artificial
  Synthetic oligonucleotide
acatagagaacctagctgaaggtatccacgcaatgagccttgaagacgacgaacccatgg

SEQ ID NO: 131832 - DNA, 60 bp, Artificial
  Synthetic oligonucleotide
gaagtcaatcgttcccgatccttcccttgacatagagaacctagctgaaggtatccacgc

SEQ ID NO: 131833 - DNA, 60 bp, Artificial
  Synthetic oligonucleotide
agaagtcaatcgttcccgatccttcccttgacatagagaacctagctgaaggtatccacg

SEQ ID NO: 131834 - DNA, 60 bp, Artificial
  Synthetic oligonucleotide
cagaagtcaatcgttcccgatccttcccttgacatagagaacctagctgaaggtatccac

SEQ ID NO: 131835 - DNA, 60 bp, Artificial
  Synthetic oligonucleotide
cacagaagtcaatcgttcccgatccttcccttgacatagagaacctagctgaaggtatcc

SEQ ID NO: 131836 - DNA, 60 bp, Artificial
  Synthetic oligonucleotide
gacatagagaacctagctgaaggtatccacgcaatgagccttgaagacgacgaacccatg

SEQ ID NO: 131837 - DNA, 60 bp, Artificial
  Synthetic oligonucleotide
cttgacatagagaacctagctgaaggtatccacgcaatgagccttgaagacgacgaaccc

SEQ ID NO: 131838 - DNA, 60 bp, Artificial
  Synthetic oligonucleotide
ccttgacatagagaacctagctgaaggtatccacgcaatgagccttgaagacgacgaacc

SEQ ID NO: 131839 - DNA, 60 bp, Artificial
  Synthetic oligonucleotide
cgatccttcccttgacatagagaacctagctgaaggtatccacgcaatgagccttgaaga

SEQ ID NO: 131840 - DNA, 60 bp, Artificial
  Synthetic oligonucleotide
cggggttacccgcttatattatgcctaccagtatgatagaggtgattttccttgcaaata

SEQ ID NO: 131841 - DNA, 61 bp, Artificial
  Synthetic oligonucleotide
cggggttacccgcttatattatgcctaccagtatgatagaggtgattttccttgcaaatac

SEQ ID NO: 131842 - DNA, 60 bp, Artificial
  Synthetic oligonucleotide
ccggggttacccgcttatattatgcctaccagtatgatagaggtgattttccttgcaaat

SEQ ID NO: 131843 - DNA, 59 bp, Artificial
  Synthetic oligonucleotide
ccggggttacccgcttatattatgcctaccagtatgatagaggtgattttccttgcaaa

SEQ ID NO: 131844 - DNA, 60 bp, Artificial
  Synthetic oligonucleotide
ttccttgcaaatacacagtcactcaaactcacgtcaaataccctgtaattggcgatgttg

SEQ ID NO: 131845 - DNA, 60 bp, Artificial
  Synthetic oligonucleotide
tccttgcaaatacacagtcactcaaactcacgtcaaataccctgtaattggcgatgttgc

SEQ ID NO: 131846 - DNA, 60 bp, Artificial
  Synthetic oligonucleotide
ggggttacccgcttatattatgcctaccagtatgatagaggtgattttccttgcaaatac

SEQ ID NO: 131847 - DNA, 60 bp, Artificial
  Synthetic oligonucleotide
atagaggtgattttccttgcaaatacacagtcactcaaactcacgtcaaataccctgtaa

SEQ ID NO: 131848 - DNA, 61 bp, Artificial
  Synthetic oligonucleotide
ccttgcaaatacacagtcactcaaactcacgtcaaataccctgtaattggcgatgttgctg

SEQ ID NO: 131849 - DNA, 60 bp, Artificial
  Synthetic oligonucleotide
ccttgcaaatacacagtcactcaaactcacgtcaaataccctgtaattggcgatgttgct

SEQ ID NO: 131850 - DNA, 60 bp, Artificial
  Synthetic oligonucleotide
ctgggctcgtctcatgtgtcatgatattctcaagcgagtcttcaatcactgtcgtgactg

SEQ ID NO: 131851 - DNA, 60 bp, Artificial
  Synthetic oligonucleotide
gggctcgtctcatgtgtcatgatattctcaagcgagtcttcaatcactgtcgtgactgtg

SEQ ID NO: 131852 - DNA, 60 bp, Artificial
  Synthetic oligonucleotide
acacagtcactcaaactcacgtcaaataccctgtaattggcgatgttcctgtggaacctg

SEQ ID NO: 131853 - DNA, 60 bp, Artificial
  Synthetic oligonucleotide
cttgcaaatacacagtcactcaaactcacgtcaaataccctgtaattggcgatgttgctg

SEQ ID NO: 131854 - DNA, 60 bp, Artificial
  Synthetic oligonucleotide
cagtcactcaaactcacgtcaaataccctgtaattggcgatgttcctgtggaacctgaag

SEQ ID NO: 131855 - DNA, 60 bp, Artificial
  Synthetic oligonucleotide
cacagtcactcaaactcacgtcaaataccctgtaattggcgatgttcctgtggaacctga

SEQ ID NO: 131856 - DNA, 60 bp, Artificial
  Synthetic oligonucleotide
gtcactcaaactcacgtcaaataccctgtaattggcgatgttcctgtggaacctgaagaa

SEQ ID NO: 131857 - DNA, 60 bp, Artificial
  Synthetic oligonucleotide
agtcactcaaactcacgtcaaataccctgtaattggcgatgttcctgtggaacctgaaga

SEQ ID NO: 131858 - DNA, 60 bp, Artificial
  Synthetic oligonucleotide
acctgggctcgtctcatgtgtcatgatattctcaagcgagtcttcaatcactgtcgtgac

SEQ ID NO: 131859 - DNA, 60 bp, Artificial
  Synthetic oligonucleotide
taccctgtaattggcgatgttgctgtggaacctgaagaatgcaaaaatccgatctgcaac

SEQ ID NO: 131860 - DNA, 61 bp, Artificial
  Synthetic oligonucleotide
cctgggctcgtctcatgtgtcatgatattctcaagcgagtcttcaatcactgtcgtgactg

SEQ ID NO: 131861 - DNA, 60 bp, Artificial
  Synthetic oligonucleotide
cctgggctcgtctcatgtgtcatgatattctcaagcgagtcttcaatcactgtcgtgact

SEQ ID NO: 131862 - DNA, 60 bp, Artificial
  Synthetic oligonucleotide
ggccggggttactcgcttatattatgcctaccagtatgatagaggtgattttccttgcaa

SEQ ID NO: 131863 - DNA, 60 bp, Artificial
  Synthetic oligonucleotide
tggccggggttactcgcttatattatgcctaccagtatgatagaggtgattttccttgca

SEQ ID NO: 131864 - DNA, 60 bp, Artificial
  Synthetic oligonucleotide
atggccggggttactcgcttatattatgcctaccagtatgatagaggtgattttccttgc

SEQ ID NO: 131865 - DNA, 60 bp, Artificial
  Synthetic oligonucleotide
catggccggggttactcgcttatattatgcctaccagtatgatagaggtgattttccttg

SEQ ID NO: 131866 - DNA, 60 bp, Artificial
  Synthetic oligonucleotide
aactacgacagaaacaccggcatgtcctgttctctcactgaattccagctctctccctct

SEQ ID NO: 131867 - DNA, 60 bp, Artificial
  Synthetic oligonucleotide
ggccataagatctgggccaagaaatattaccacaccagtggaatattctgtaaacctcga

SEQ ID NO: 131868 - DNA, 60 bp, Artificial
  Synthetic oligonucleotide
gccataaaatctgggccaagaaatattaccacaccagtggtatattctgtaaaccacgtg

SEQ ID NO: 131869 - DNA, 60 bp, Artificial
  Synthetic oligonucleotide
cggccataagatctgggccaagaaatattaccacaccagtggaatattctgtaaacctcg

SEQ ID NO: 131870 - DNA, 60 bp, Artificial
  Synthetic oligonucleotide
ggccataaaatctgggccaagaaatattaccacaccagtggtatattctgtaaaccacgt

SEQ ID NO: 131871 - DNA, 60 bp, Artificial
  Synthetic oligonucleotide
tcggccataaaatctgggccaagaaatattaccacaccagtggtatattctgtaaaccac

SEQ ID NO: 131872 - DNA, 60 bp, Artificial
  Synthetic oligonucleotide
cggccataaaatctgggccaagaaatattaccacaccagtggtatattctgtaaaccacg

SEQ ID NO: 131873 - DNA, 60 bp, Artificial
  Synthetic oligonucleotide
tcggccataagatctgggccaagaaatattaccacaccagtggaatattctgtaaacctc

SEQ ID NO: 131874 - DNA, 60 bp, Artificial
  Synthetic oligonucleotide
ccataagatctgggccaagaaatattaccacaccagtggaatattctgtaaacctcgagc

SEQ ID NO: 131875 - DNA, 60 bp, Artificial
  Synthetic oligonucleotide
gccataagatctgggccaagaaatattaccacaccagtggaatattctgtaaacctcgag

SEQ ID NO: 131876 - DNA, 60 bp, Artificial
  Synthetic oligonucleotide
ccataaaatctgggccaagaaatattaccacaccagtggtatattctgtaaaccacgtgc

SEQ ID NO: 131877 - DNA, 60 bp, Artificial
  Synthetic oligonucleotide
ctccagactgcatccattgggctgctaatggtgactgtttctgcaactctaccaactgcg

SEQ ID NO: 131878 - DNA, 60 bp, Artificial
  Synthetic oligonucleotide
ggtcaaccaactgagctttcagactgcatccattgggctgctaatggtgactgtttctgc

SEQ ID NO: 131879 - DNA, 61 bp, Artificial
  Synthetic oligonucleotide
cggtcaaccaactgagctttcagactgcatccattgggctgctaatggtgactgtttctgc

SEQ ID NO: 131880 - DNA, 60 bp, Artificial
  Synthetic oligonucleotide
ccggtcaaccaactgagctttcagactgcatccattgggctgctaatggtgactgtttct

SEQ ID NO: 131881 - DNA, 60 bp, Artificial
  Synthetic oligonucleotide
gccggtcaaccaactgagctttcagactgcatccattgggctgctaatggtgactgtttc

SEQ ID NO: 131882 - DNA, 60 bp, Artificial
  Synthetic oligonucleotide
tctcccactacaacttcttctactacacaatctcttccgtcttccactccttctagtgac

SEQ ID NO: 131883 - DNA, 51 bp, Artificial
  Synthetic oligonucleotide
actgtttctgcaactctaccaactgcgactggagtgaacacgttcaaattc

SEQ ID NO: 131884 - DNA, 60 bp, Artificial
  Synthetic oligonucleotide
ctagtgacgccgataatccttgtgttgcacaggacgatgccggttgttacagctatctta

SEQ ID NO: 131885 - DNA, 60 bp, Artificial
  Synthetic oligonucleotide
tctagtgacgccgataatccttgtgttgcacaggacgatgccggttgttacagctatctt

SEQ ID NO: 131886 - DNA, 60 bp, Artificial
  Synthetic oligonucleotide
gacgccgataatccttgtgttgcacaggacgatgccggttgttacagctatcttaatgac

SEQ ID NO: 131887 - DNA, 53 bp, Artificial
  Synthetic oligonucleotide
tgactgtttctgcaactctaccaactgcgactggagtgaacacgttcaaattc

SEQ ID NO: 131888 - DNA, 60 bp, Artificial
  Synthetic oligonucleotide
ccattgggctgctaatggtgactgtttctgcaactctaccaactgcgactggagtgaaca

SEQ ID NO: 131889 - DNA, 60 bp, Artificial
  Synthetic oligonucleotide
cctaactactgagcaatttgaagaaatgtccttagatgaagcaagatactctgacattgt

SEQ ID NO: 131890 - DNA, 60 bp, Artificial
  Synthetic oligonucleotide
gactgcatccattgggctgctaatggtgactgtttctgcaactctaccaactgcgactgg

SEQ ID NO: 131891 - DNA, 60 bp, Artificial
  Synthetic oligonucleotide
tactctgacattgtatctttataccgaatcaataacataacatcagtccctggctgtatg

SEQ ID NO: 131892 - DNA, 52 bp, Artificial
  Synthetic oligonucleotide
gactgtttctgcaactctaccaactgcgactggagtgaacacgttcaaattc

SEQ ID NO: 131893 - DNA, 59 bp, Artificial
  Synthetic oligonucleotide
tccattctatcctcccagagacactaaaacactagccacacatcttggtcctcgcgttc

SEQ ID NO: 131894 - DNA, 60 bp, Artificial
  Synthetic oligonucleotide
ctctgacattgtatctttataccgaatcaataacataacatcagtccctggctgtatgta

SEQ ID NO: 131895 - DNA, 60 bp, Artificial
  Synthetic oligonucleotide
actctgacattgtatctttataccgaatcaataacataacatcagtccctggctgtatgt

SEQ ID NO: 131896 - DNA, 60 bp, Artificial
  Synthetic oligonucleotide
tccattgggctgctaatggtgactgtttctgcaactctaccaactgcgactggagtgaac

SEQ ID NO: 131897 - DNA, 65 bp, Artificial
  Synthetic oligonucleotide
ctccactttcaatcttctagttattggatgtttcatatttctatgtttcttcatcactcctgctt

SEQ ID NO: 131898 - DNA, 60 bp, Artificial
  Synthetic oligonucleotide
cactacaacttcttctgccacacaatctcttccgtcttccactccttctagtgacgccga

SEQ ID NO: 131899 - DNA, 60 bp, Artificial
  Synthetic oligonucleotide
ttctagtgacgccgataatccttgtgttgcacaggacgatgccggttgttacagctatct

SEQ ID NO: 131900 - DNA, 60 bp, Artificial
  Synthetic oligonucleotide
cctcgcgttttccgtaatgccggtgattatcaaattttccttgaacctggctggctcggt

SEQ ID NO: 131901 - DNA, 50 bp, Artificial
  Synthetic oligonucleotide
tttccttgaacctggctggctcggtagaacataccttgacggttattctt

SEQ ID NO: 131902 - DNA, 60 bp, Artificial
  Synthetic oligonucleotide
cattctattctcaactccactttcaatcttctagttattggatgtttcatatttctatgc

SEQ ID NO: 131903 - DNA, 64 bp, Artificial
  Synthetic oligonucleotide
caactccactttcaatcttctagttattggatgtttcatatttctatgcttcttcatcactcct

SEQ ID NO: 131904 - DNA, 60 bp, Artificial
  Synthetic oligonucleotide
tcctcgcgttttccgtaatgccggtgattatcaaattttccttgaacctggctggctcgg

SEQ ID NO: 131905 - DNA, 61 bp, Artificial
  Synthetic oligonucleotide
actccactttcaatcttctagttattggatgtttcatatttctatgcttcttcatcactcc

SEQ ID NO: 131906 - DNA, 60 bp, Artificial
  Synthetic oligonucleotide
tcccactacaacttcttctgccacacaatctcttccgtcttccactccttctagtgacgc

SEQ ID NO: 131907 - DNA, 60 bp, Artificial
  Synthetic oligonucleotide
ttccattctatcctcccagagacactaaaacactagccacacatcttggtcctcgcgttc

SEQ ID NO: 131908 - DNA, 60 bp, Artificial
  Synthetic oligonucleotide
gtgacgccgataatccttgtgttgcacaggacgatgccggttgttacagctatcttaatg

SEQ ID NO: 131909 - DNA, 61 bp, Artificial
  Synthetic oligonucleotide
cccactacaacttcttctgccacacaatctcttccgtcttccactccttctagtgacgccg

SEQ ID NO: 131910 - DNA, 60 bp, Artificial
  Synthetic oligonucleotide
cccactacaacttcttctgccacacaatctcttccgtcttccactccttctagtgacgcc

SEQ ID NO: 131911 - DNA, 60 bp, Artificial
  Synthetic oligonucleotide
ccactacaacttcttctactacacaatctcttccgtcttccactccttctagtgacgccg

SEQ ID NO: 131912 - DNA, 60 bp, Artificial
  Synthetic oligonucleotide
ccactacattaattattccattctatcctcccagagacactaaaacactagccacacatc

SEQ ID NO: 131913 - DNA, 60 bp, Artificial
  Synthetic oligonucleotide
attattccattctatcctcccagagacactaaaacactagccacacatcttggtcctcgc

SEQ ID NO: 131914 - DNA, 60 bp, Artificial
  Synthetic oligonucleotide
ctttcggtacaacctacaatcatcaaatcagtagtcaaattttgtataatcacaaaatgg

SEQ ID NO: 131915 - DNA, 60 bp, Artificial
  Synthetic oligonucleotide
tctgataactgttgggcttattataacaaggcatcgaaaagcatttttatccaattccat

SEQ ID NO: 131916 - DNA, 60 bp, Artificial
  Synthetic oligonucleotide
attccattctatcctcccagagacactaaaacactagccacacatcttggtcctcgcgtt

SEQ ID NO: 131917 - DNA, 60 bp, Artificial
  Synthetic oligonucleotide
ttattccattctatcctcccagagacactaaaacactagccacacatcttggtcctcgcg

SEQ ID NO: 131918 - DNA, 60 bp, Artificial
  Synthetic oligonucleotide
tattccattctatcctcccagagacactaaaacactagccacacatcttggtcctcgcgt

SEQ ID NO: 131919 - DNA, 60 bp, Artificial
  Synthetic oligonucleotide
gcatccattgggctgctaatggtgactgtttctgcaactctaccaactgcgactggagtg

SEQ ID NO: 131920 - DNA, 60 bp, Artificial
  Synthetic oligonucleotide
ccagactgcatccattgggctgctaatggtgactgtttctgcaactctaccaactgcgac

SEQ ID NO: 131921 - DNA, 60 bp, Artificial
  Synthetic oligonucleotide
ctgcatccattgggctgctaatggtgactgtttctgcaactctaccaactgcgactggag

SEQ ID NO: 131922 - DNA, 60 bp, Artificial
  Synthetic oligonucleotide
gatactctgacattgtatctttataccgaatcaataacataacatcagtccctggctgta

SEQ ID NO: 131923 - DNA, 61 bp, Artificial
  Synthetic oligonucleotide
gtcctcgcgttcttcgtaatgccggtgattatcaaattttccttgaacctggctggctcgg

SEQ ID NO: 131924 - DNA, 61 bp, Artificial
  Synthetic oligonucleotide
gtcctcgcgttttccgtaatgccggtgattatcaaattttccttgaacctggctggctcgg

SEQ ID NO: 131925 - DNA, 60 bp, Artificial
  Synthetic oligonucleotide
ggtcctcgcgttttccgtaatgccggtgattatcaaattttccttgaacctggctggctc

SEQ ID NO: 131926 - DNA, 60 bp, Artificial
  Synthetic oligonucleotide
tctgacattgtatctttataccgaatcaataacataacatcagtccctggctgtatgtac

SEQ ID NO: 131927 - DNA, 61 bp, Artificial
  Synthetic oligonucleotide
ctgtacacacatcacaaggcagaacatttgaccgtggtatcgtcgtcagctacggtaacac

SEQ ID NO: 131928 - DNA, 60 bp, Artificial
  Synthetic oligonucleotide
cacttaaggaagccaagaaggtgttcacacgcgaagataatcagaaatgggctaaggtct

SEQ ID NO: 131929 - DNA, 61 bp, Artificial
  Synthetic oligonucleotide
cacttaaggaagccaagaaggtgttcacacgcgaagataatcagaaatgggctaaggtctc

SEQ ID NO: 131930 - DNA, 50 bp, Artificial
  Synthetic oligonucleotide
acaacccagagctctcaaagcacctaataaacacaggcaagagtcacctc

SEQ ID NO: 131931 - DNA, 60 bp, Artificial
  Synthetic oligonucleotide
tcgcctacaacggtccaaacaacaaactctcaaacatgtacactgacaacatcaaaccat

SEQ ID NO: 131932 - DNA, 60 bp, Artificial
  Synthetic oligonucleotide
ctgcatgcaccaaggcaacccatactacagtaaacttccatactacaacactgcacagat

SEQ ID NO: 131933 - DNA, 60 bp, Artificial
  Synthetic oligonucleotide
ccattcccataccatacacttgaaaaccgctatcaaagtgagaaggcaaactatcttggc

SEQ ID NO: 131934 - DNA, 60 bp, Artificial
  Synthetic oligonucleotide
atctgcatgcaccaaggcaacccatactacagtaaacttccatactacaacactgcacag

SEQ ID NO: 131935 - DNA, 60 bp, Artificial
  Synthetic oligonucleotide
tctgcatgcaccaaggcaacccatactacagtaaacttccatactacaacactgcacaga

SEQ ID NO: 131936 - DNA, 60 bp, Artificial
  Synthetic oligonucleotide
ccaatgtatctgcatgcaccaaggcaacccatactacagtaaacttccatactacaacac

SEQ ID NO: 131937 - DNA, 60 bp, Artificial
  Synthetic oligonucleotide
gtatctgcatgcaccaaggcaacccatactacagtaaacttccatactacaacactgcac

SEQ ID NO: 131938 - DNA, 60 bp, Artificial
  Synthetic oligonucleotide
tgtacacacatcacaaggcagaacatttgaccgtggtatcgtcgtcagctacggtaacac

SEQ ID NO: 131939 - DNA, 60 bp, Artificial
  Synthetic oligonucleotide
gtacacacatcacaaggcagaacatttgaccgtggtatcgtcgtcagctacggtaacacg

SEQ ID NO: 131940 - DNA, 60 bp, Artificial
  Synthetic oligonucleotide
acagttatcgcctacaacggtccaaacaacaaactctcaaacatgtacactgacaacatc

SEQ ID NO: 131941 - DNA, 60 bp, Artificial
  Synthetic oligonucleotide
tgcatgcaccaaggcaacccatactacagtaaacttccatactacaacactgcacagatc

SEQ ID NO: 131942 - DNA, 60 bp, Artificial
  Synthetic oligonucleotide
ctgtacacacatcacaaggcagaacatttgaccgtggtatcgtcgtcagctacggtaaca

SEQ ID NO: 131943 - DNA, 60 bp, Artificial
  Synthetic oligonucleotide
ttttacagacctcgacatcaacatcccaatctacactgtacacacatcacaaggcagaac

SEQ ID NO: 131944 - DNA, 60 bp, Artificial
  Synthetic oligonucleotide
ctacaacggtccaaacaacaaactctcaaacatgtacactgacaacatcaaaccattccc

SEQ ID NO: 131945 - DNA, 60 bp, Artificial
  Synthetic oligonucleotide
cctacaacggtccaaacaacaaactctcaaacatgtacactgacaacatcaaaccattcc

SEQ ID NO: 131946 - DNA, 60 bp, Artificial
  Synthetic oligonucleotide
gcctacaacggtccaaacaacaaactctcaaacatgtacactgacaacatcaaaccattc

SEQ ID NO: 131947 - DNA, 60 bp, Artificial
  Synthetic oligonucleotide
cgcctacaacggtccaaacaacaaactctcaaacatgtacactgacaacatcaaaccatt

SEQ ID NO: 131948 - DNA, 61 bp, Artificial
  Synthetic oligonucleotide
tgtacacacatcacaaggcagaacatttgaccgtggtatcgtcgtcagctacggtaacacg

SEQ ID NO: 131949 - DNA, 60 bp, Artificial
  Synthetic oligonucleotide
accattcccataccatacacttgaaaaccgctatcaaagtgagaaggcaaactatcttgg

SEQ ID NO: 131950 - DNA, 60 bp, Artificial
  Synthetic oligonucleotide
gacaacatcaaaccattcccataccatacacttgaaaaccgctatcaaagtgagaaggca

SEQ ID NO: 131951 - DNA, 60 bp, Artificial
  Synthetic oligonucleotide
tgacaacatcaaaccattcccataccatacacttgaaaaccgctatcaaagtgagaaggc

SEQ ID NO: 131952 - DNA, 60 bp, Artificial
  Synthetic oligonucleotide
gtattttacagacctcgacatcaacatcccaatctacactgtacacacatcacaaggcag

SEQ ID NO: 131953 - DNA, 60 bp, Artificial
  Synthetic oligonucleotide
cagtattttacagacctcgacatcaacatcccaatctacactgtacacacatcacaaggc

SEQ ID NO: 131954 - DNA, 60 bp, Artificial
  Synthetic oligonucleotide
aatccattcgaaacacttaaggaagccaagaaggtgttcacacgcgaagataatcagaaa

SEQ ID NO: 131955 - DNA, 60 bp, Artificial
  Synthetic oligonucleotide
cattcccataccatacacttgaaaaccgctatcaaagtgagaaggcaaactatcttggca

SEQ ID NO: 131956 - DNA, 60 bp, Artificial
  Synthetic oligonucleotide
aatcatccgtcagtattttacagacctcgacatcaacatcccaatctacactgtacacac

SEQ ID NO: 131957 - DNA, 60 bp, Artificial
  Synthetic oligonucleotide
ccgtcagtattttacagacctcgacatcaacatcccaatctacactgtacacacatcaca

SEQ ID NO: 131958 - DNA, 60 bp, Artificial
  Synthetic oligonucleotide
tccgtcagtattttacagacctcgacatcaacatcccaatctacactgtacacacatcac

SEQ ID NO: 131959 - DNA, 60 bp, Artificial
  Synthetic oligonucleotide
cggcatatcctgttctctcactgaattccagctctctctctcgcacatcctttaccgctc

SEQ ID NO: 131960 - DNA, 60 bp, Artificial
  Synthetic oligonucleotide
cctcatggtctctccgctagcttcgctgcccaaggacgcaatgcttacaatgttgctcac

SEQ ID NO: 131961 - DNA, 60 bp, Artificial
  Synthetic oligonucleotide
caccggcatgtcctgttctctcactgaattccagctctctctctctcacatcctctaccg

SEQ ID NO: 131962 - DNA, 60 bp, Artificial
  Synthetic oligonucleotide
accggcatgtcctgttctctcactgaattccagctctctctctctcacatcctctaccgt

SEQ ID NO: 131963 - DNA, 61 bp, Artificial
  Synthetic oligonucleotide
acaccggcatgtcctgttctctcactgaattccagctctctctctctcacatcctctaccg

SEQ ID NO: 131964 - DNA, 61 bp, Artificial
  Synthetic oligonucleotide
caccggcatgtcctgttctctcactgaattccagctctctctctctcacatcctctaccgt

SEQ ID NO: 131965 - DNA, 60 bp, Artificial
  Synthetic oligonucleotide
acaccggcatgtcctgttctctcactgaattccagctctctctctctcacatcctctacc

SEQ ID NO: 131966 - DNA, 60 bp, Artificial
  Synthetic oligonucleotide
ctcatggtctctccgctagcttcgctgcccaaggacgcaatgcttacaatgttgctcaca

SEQ ID NO: 131967 - DNA, 60 bp, Artificial
  Synthetic oligonucleotide
ctcaaggaagccaagaaggtgttcacacgcgaagataacctcagatgggccaaagtatca

SEQ ID NO: 131968 - DNA, 60 bp, Artificial
  Synthetic oligonucleotide
actctcaaggaagccaagaaggtgttcacacgcgaagataacctcagatgggccaaagta

SEQ ID NO: 131969 - DNA, 60 bp, Artificial
  Synthetic oligonucleotide
tctcaaggaagccaagaaggtgttcacacgcgaagataacctcagatgggccaaagtatc

SEQ ID NO: 131970 - DNA, 60 bp, Artificial
  Synthetic oligonucleotide
aactctcaaggaagccaagaaggtgttcacacgcgaagataacctcagatgggccaaagt

SEQ ID NO: 131971 - DNA, 60 bp, Artificial
  Synthetic oligonucleotide
atgctagagcgttctcgcatctagccataaaactaatagagcaggaaattgatcccgact

SEQ ID NO: 131972 - DNA, 60 bp, Artificial
  Synthetic oligonucleotide
gagcaggaaattgatcccgactcaaccatcctggacataggcagcgcgccagcaaggagg

SEQ ID NO: 131973 - DNA, 60 bp, Artificial
  Synthetic oligonucleotide
atagagcaggaaattgatcccgactcaaccatcctggatatcggcagtgcaccagcaagg

SEQ ID NO: 131974 - DNA, 60 bp, Artificial
  Synthetic oligonucleotide
gagcaggaaattgatcccgactcaaccatcctggatatcggcagtgcaccagcaaggagg

SEQ ID NO: 131975 - DNA, 60 bp, Artificial
  Synthetic oligonucleotide
aattgatggcagccagatgcgccacttggatgaacatggaagtgaagatcatagatgcag

SEQ ID NO: 131976 - DNA, 60 bp, Artificial
  Synthetic oligonucleotide
gtcaggtacagctcttcttgcggttcccaagccgtcgggacaacaaccacagacaagacc

SEQ ID NO: 131977 - DNA, 60 bp, Artificial
  Synthetic oligonucleotide
gccaggtgcccagtggaagacagtgattcatcgactccacccaagacggtcccatgccta

SEQ ID NO: 131978 - DNA, 60 bp, Artificial
  Synthetic oligonucleotide
cgccgacagcgccttcacaagattgaccgacgcgcctgtaatctctgagttgacgtgcac

SEQ ID NO: 131979 - DNA, 60 bp, Artificial
  Synthetic oligonucleotide
ccagctgccaccttcctacaggaaccaggtttaaatttggggccatgatgaagtcgggca

SEQ ID NO: 131980 - DNA, 60 bp, Artificial
  Synthetic oligonucleotide
cgtgtgtaaacacgaccacgcagctgcctaccgtgcccacaccgcatcccttagagcaaa

SEQ ID NO: 131981 - DNA, 60 bp, Artificial
  Synthetic oligonucleotide
ccgggacaaagcatacggaggagcgacctaaagtccaagtgattcaagctgccgagcctc

SEQ ID NO: 131982 - DNA, 60 bp, Artificial
  Synthetic oligonucleotide
aatagtgctgggaggagccaacgaaggtaccagaaccgccctttccgttgtgacatggaa

SEQ ID NO: 131983 - DNA, 60 bp, Artificial
  Synthetic oligonucleotide
cggtggtgtcgcaggcattcagcaagtgggcaaaagagtatcgacttgaccaggaagacg

SEQ ID NO: 131984 - DNA, 60 bp, Artificial
  Synthetic oligonucleotide
ctggtcacacggggggacttggtcgccagcggaaagaaagaaaactgtcaggagatcatg

SEQ ID NO: 131985 - DNA, 60 bp, Artificial
  Synthetic oligonucleotide
gcaccgaagtcgaccataagagtatctccagaagatgtacgctgccgatcaccgccattg

SEQ ID NO: 131986 - DNA, 60 bp, Artificial
  Synthetic oligonucleotide
tctggaacaacaacacccattctataggggacggtgggcttcagggcaggtgctggtcgc

SEQ ID NO: 131987 - DNA, 60 bp, Artificial
  Synthetic oligonucleotide
ggctacaccactaccaacaatgtgtcgaccacgccatgaaattacaaatgctgggcggtg

SEQ ID NO: 131988 - DNA, 60 bp, Artificial
  Synthetic oligonucleotide
cacagacacaattgctggtgagcgggtttcgttccccatctgcacgtatgtaccatcaac

SEQ ID NO: 131989 - DNA, 60 bp, Artificial
  Synthetic oligonucleotide
ccattgtcgtggtgattcgtgtctcagtggtggtgcttctgtcattcgccgcctcggtct

SEQ ID NO: 131990 - DNA, 60 bp, Artificial
  Synthetic oligonucleotide
aacgaagccaatcccagcaccacgtaccagcctacgccccgtcccagctcctagaagata

SEQ ID NO: 131991 - DNA, 60 bp, Artificial
  Synthetic oligonucleotide
atttggagcggagcgggtctttgacgagcagtggatcaccgcccagacggaggtaacgat

SEQ ID NO: 131992 - DNA, 60 bp, Artificial
  Synthetic oligonucleotide
gttcctggcccgcaactaccctacagtggcgtcctaccagattacggatgaatatgacgc

SEQ ID NO: 131993 - DNA, 60 bp, Artificial
  Synthetic oligonucleotide
gtggaggtttcctggtttatgaccatgttacaaggacagcatgccgcatagcagacccgt

SEQ ID NO: 131994 - DNA, 60 bp, Artificial
  Synthetic oligonucleotide
gcccttggagaccacgcatgcctacaatgcagagaccagaccaacaggcccgacaaatgc

SEQ ID NO: 131995 - DNA, 60 bp, Artificial
  Synthetic oligonucleotide
atgacgtgggcacaacatcttgccggcggagttgggttgctgatagctctggccgtgcta

SEQ ID NO: 131996 - DNA, 60 bp, Artificial
  Synthetic oligonucleotide
tggcctgaccaaaacggacacgcacgatcacacaaagattagatatgctgaaggacacga

SEQ ID NO: 131997 - DNA, 60 bp, Artificial
  Synthetic oligonucleotide
gcaggactcaagcagaggtggcagtctatcaggacgtctatgcggtccatgcaccgactt

SEQ ID NO: 131998 - DNA, 60 bp, Artificial
  Synthetic oligonucleotide
gagaaagtccgggccgaaagtacagacgccgaatacgtttatgatgtggaccgcaaacag

SEQ ID NO: 131999 - DNA, 60 bp, Artificial
  Synthetic oligonucleotide
ggaagcagaagataccctagcagccttaccaccgctgattccgaccgctccagtactcga

SEQ ID NO: 132000 - DNA, 60 bp, Artificial
  Synthetic oligonucleotide
ggaggactggcaacgagagcatgacaccatcatgagggcaataacgcaggaagcagctcc

SEQ ID NO: 132001 - DNA, 60 bp, Artificial
  Synthetic oligonucleotide
tgcggtggggccgaactttaacaatacatccgaggccgagggagatcgtgacttggcagc

SEQ ID NO: 132002 - DNA, 60 bp, Artificial
  Synthetic oligonucleotide
gcactcgaggtagagatctgttcggcaatagtgaagtgcgctggtgagtgcactccaccg

SEQ ID NO: 132003 - DNA, 60 bp, Artificial
  Synthetic oligonucleotide
cgaccttctcctcacccacgcccgaggttacactcgaggtagagatctgttcggcaatag

SEQ ID NO: 132004 - DNA, 60 bp, Artificial
  Synthetic oligonucleotide
ctgcgtggtgaagaagtgccgctccaaaagaatccggatagtcaagagctaaattccggt

SEQ ID NO: 132005 - DNA, 60 bp, Artificial
  Synthetic oligonucleotide
agccaggcctcgccatggcagcgacactggaggctacatctccgggcccgcaatgcgctg

SEQ ID NO: 132006 - DNA, 60 bp, Artificial
  Synthetic oligonucleotide
acatcggtggccgtcaggtcatcgttgccgacatagggagcgcaccagcgagaagaatcg

SEQ ID NO: 132007 - DNA, 60 bp, Artificial
  Synthetic oligonucleotide
tcatcgttgccgacatagggagcgcaccagcgagaagagtcggggcacccgataatgtca

SEQ ID NO: 132008 - DNA, 60 bp, Artificial
  Synthetic oligonucleotide
gccaataccgtcaaaacgaccttctcctcacccacgcccgaggttgcactcgaggtagag

SEQ ID NO: 132009 - DNA, 60 bp, Artificial
  Synthetic oligonucleotide
ggggttggtgccgtccccatgtccatcaacattccggacgcgaagttcacccgcaaacta

SEQ ID NO: 132010 - DNA, 60 bp, Artificial
  Synthetic oligonucleotide
gcgctgaagaccctgagaggctggcttcttacgccaggaaacttgtcagggctgtggaga

SEQ ID NO: 132011 - DNA, 60 bp, Artificial
  Synthetic oligonucleotide
ggatgttctggagaacccggacacgtcactggaaaccaccagtatctgcctgaacgacga

SEQ ID NO: 132012 - DNA, 57 bp, Artificial
  Synthetic oligonucleotide
cacttggctaccaagtggattgagcgcgacatcgatggccgtcaggtcatcgttgcc

SEQ ID NO: 132013 - DNA, 60 bp, Artificial
  Synthetic oligonucleotide
tcgtggtcaacgggaccaccgtccgcaacgtcaactccatggataactcgctgattcccg

SEQ ID NO: 132014 - DNA, 60 bp, Artificial
  Synthetic oligonucleotide
ccacctcgtaccaccgtgatggagtggtggtgaccaagttctctgatacgatcaaccacg

SEQ ID NO: 132015 - DNA, 59 bp, Artificial
  Synthetic oligonucleotide
tggcgggcagcttcccgctatatgacgccaactggagcgactcggcggtactggcagca

SEQ ID NO: 132016 - DNA, 60 bp, Artificial
  Synthetic oligonucleotide
gccactggtaccgtctggagaaatccactactcggtgggtagcacccactacgttgagga

SEQ ID NO: 132017 - DNA, 60 bp, Artificial
  Synthetic oligonucleotide
cggaggattccattaaatggagattccgtttccgtgacaagccactggtaccgtctggag

SEQ ID NO: 132018 - DNA, 60 bp, Artificial
  Synthetic oligonucleotide
ccgacaaaggtacgcgagtggtatactggatcgggttcgagccgttcgtgttccacacgg

SEQ ID NO: 132019 - DNA, 60 bp, Artificial
  Synthetic oligonucleotide
tatactggatcgggttcgagccgttcgtgttccacacggacgctatggcgggcagcttcc

SEQ ID NO: 132020 - DNA, 60 bp, Artificial
  Synthetic oligonucleotide
tgtttcccatgcaattcaccaactcagcctatcgccagatggagcccatgtttgcaccgg

SEQ ID NO: 132021 - DNA, 60 bp, Artificial
  Synthetic oligonucleotide
ggaaggaggtaaggatctccgtaaagtgtgcccgacagagcaccttccccgtgtaccacg

SEQ ID NO: 132022 - DNA, 60 bp, Artificial
  Synthetic oligonucleotide
cggggcacccgataacgtcacataccacagtgtgtgtcctcgcaaatgcgctgaagaccc

SEQ ID NO: 132023 - DNA, 52 bp, Artificial
  Synthetic oligonucleotide
ctgttactcgacacggtaacaggcactgtaagccgagtgtcggaccctgtaa

SEQ ID NO: 132024 - DNA, 60 bp, Artificial
  Synthetic oligonucleotide
caggacttgagatcgtacctgggcgcgcgaggggagtacgtatccctctacgtctaacct

SEQ ID NO: 132025 - DNA, 60 bp, Artificial
  Synthetic oligonucleotide
caaccaaccatgtttcccatgcaattcaccaactcagcctatcgccagatggagcccatg

SEQ ID NO: 132026 - DNA, 60 bp, Artificial
  Synthetic oligonucleotide
tggaggcgttcgacacgacagagtgcgacgtcaccatctactgcctggccaacaacatgg

SEQ ID NO: 132027 - DNA, 60 bp, Artificial
  Synthetic oligonucleotide
gcgtaccagatgcgccccactcaaaagaacaagagtcgctacctgtccgcgaaggtccac

SEQ ID NO: 132028 - DNA, 60 bp, Artificial
  Synthetic oligonucleotide
cgccccactcaaaagaacaagagtcgctacctgtccgcgaaggtccataacatgaaacac

SEQ ID NO: 132029 - DNA, 60 bp, Artificial
  Synthetic oligonucleotide
caacgtcacgcagatgagagagctcccgactatggactcagcggcaatgaacgtggaggc

SEQ ID NO: 132030 - DNA, 60 bp, Artificial
  Synthetic oligonucleotide
caactatgtcaaacccaatgatctgtacggggacatcggaattgaagtactgcagccgac

SEQ ID NO: 132031 - DNA, 60 bp, Artificial
  Synthetic oligonucleotide
gtttacgtggacggggtaacatcagccaggggcactgacctcaagatcgtggctggacca

SEQ ID NO: 132032 - DNA, 60 bp, Artificial
  Synthetic oligonucleotide
cggggctggccgaccaggcacattcggagacattcaagctaggtcaaccaactatgtcaa

SEQ ID NO: 132033 - DNA, 60 bp, Artificial
  Synthetic oligonucleotide
cgcagtgaactttaccgtcatctcaccaactacggctctggaatactggacctgtgcagg

SEQ ID NO: 132034 - DNA, 60 bp, Artificial
  Synthetic oligonucleotide
tacagagctgcaaggcgtacgaacacaccgtggtggtcccaatggatccaagagccccgt

SEQ ID NO: 132035 - DNA, 60 bp, Artificial
  Synthetic oligonucleotide
gctacgaacacaccgtggtggtcccaatggatccaagagccccgtcgtacgaagcagtga

SEQ ID NO: 132036 - DNA, 60 bp, Artificial
  Synthetic oligonucleotide
cccaacgatctgtatggggacatcggaattgaagtactgcagccgactaacgaccacgta

SEQ ID NO: 132037 - DNA, 60 bp, Artificial
  Synthetic oligonucleotide
ggctgcaggacgctccgaaaccactcagtgtcacagcaccgcacggttgtaagatcagtg

SEQ ID NO: 132038 - DNA, 60 bp, Artificial
  Synthetic oligonucleotide
cttacggccatcgtttcaaacctcaactacgaaggtagaatgaagactacgaacccgtgc

SEQ ID NO: 132039 - DNA, 60 bp, Artificial
  Synthetic oligonucleotide
gctggaacagtcgtttagtgcactggtggaggcgttcgacacgacagagtgcgacgtcac

SEQ ID NO: 132040 - DNA, 60 bp, Artificial
  Synthetic oligonucleotide
gtgaccgcgttttgcggaagaacatctcccgccgttgcactcatacgcttacggccatcg

SEQ ID NO: 132041 - DNA, 60 bp, Artificial
  Synthetic oligonucleotide
cgctgcggtaagaccgacgggaaaggtggtgctttgtggtgaccctaaacaagtcggatg

SEQ ID NO: 132042 - DNA, 60 bp, Artificial
  Synthetic oligonucleotide
taaacgccagcagcataccttctaccgtaggcccaagcagtcctcaggcatctatgtgcc

SEQ ID NO: 132043 - DNA, 56 bp, Artificial
  Synthetic oligonucleotide
aatccgccttaccaccagtttgccttcgaggcgctgcgtaaaaggccggctcacac

SEQ ID NO: 132044 - DNA, 60 bp, Artificial
  Synthetic oligonucleotide
gagcgtatgacaaacgccagcagcataccttctaccgtaggcccaagcagtcctcgggca

SEQ ID NO: 132045 - DNA, 60 bp, Artificial
  Synthetic oligonucleotide
gagggtggtcggctctgctggtcatccttgcgtatgtacagagctgcaaggcgtacgaac

SEQ ID NO: 132046 - DNA, 52 bp, Artificial
  Synthetic oligonucleotide
tggtgcgcaccactgcaaagtgtgacgtgctgcaggccactggccactacat

SEQ ID NO: 132047 - DNA, 60 bp, Artificial
  Synthetic oligonucleotide
tgaaacctctctgcgatacctgggaagggacggtaaggtttacgccgcggacaacacgcg

SEQ ID NO: 132048 - DNA, 60 bp, Artificial
  Synthetic oligonucleotide
taagggtggtgcggcgggtgaaacctctctgcgatacctgggaagggacgggaaggttca

SEQ ID NO: 132049 - DNA, 60 bp, Artificial
  Synthetic oligonucleotide
cctccccatacagggcgtactgccccgattgtgacggaacagcgtgtatctcgccgatag

SEQ ID NO: 132050 - DNA, 60 bp, Artificial
  Synthetic oligonucleotide
cgcgcggatcaaccctacctggacatcattgcctacttgtggaccaacagcaaagtggcc

SEQ ID NO: 132051 - DNA, 60 bp, Artificial
  Synthetic oligonucleotide
gtctcactgttgcggccacactggacggtacccggcatcaatgcaccacggttttcgaac

SEQ ID NO: 132052 - DNA, 60 bp, Artificial
  Synthetic oligonucleotide
cgactgaagggctcgaggtcacgtggggcaacaacgagccgtataagtattggccgcagt

SEQ ID NO: 132053 - DNA, 60 bp, Artificial
  Synthetic oligonucleotide
gtgcatacactatttgacatgtctgccgaggacttcgatgccattatagccgcacacttc

SEQ ID NO: 132054 - DNA, 60 bp, Artificial
  Synthetic oligonucleotide
attcaagaagcagaaaacacacacggtctacaagaggcctgatacccagtcaatccagaa

SEQ ID NO: 132055 - DNA, 60 bp, Artificial
  Synthetic oligonucleotide
ggaagatcagtcactcatgtacgcacccatttcaccacgaccctcctgtgataggccggg

SEQ ID NO: 132056 - DNA, 60 bp, Artificial
  Synthetic oligonucleotide
gagccaacgctatcgcttgattacatcacgtgcgagtacaaaaccgtcatcccgtctccg

SEQ ID NO: 132057 - DNA, 60 bp, Artificial
  Synthetic oligonucleotide
cagtacgccagtcagtgctgccggtgaacaccctggaggaagtccacgaggagaagtgtt

SEQ ID NO: 132058 - DNA, 60 bp, Artificial
  Synthetic oligonucleotide
gtgttgtacgtagacgaggcgtttgcgtgccactctggaacgttacttgctttgatcgcc

SEQ ID NO: 132059 - DNA, 60 bp, Artificial
  Synthetic oligonucleotide
gctacaccatattgcgatgcacggaccagccctgaacaccgacgaagagtcgtatgagct

SEQ ID NO: 132060 - DNA, 60 bp, Artificial
  Synthetic oligonucleotide
ccacgaaaaggaactgcaacgtcacacagatgagggaattacccactttggactcggcag

SEQ ID NO: 132061 - DNA, 60 bp, Artificial
  Synthetic oligonucleotide
acgcgtggtggccatagtcttaggaggagctaatgaaggagcccgtacagccctctcggt

SEQ ID NO: 132062 - DNA, 60 bp, Artificial
  Synthetic oligonucleotide
aatgtccatggccacctttgcaagctccagatccaacttcgagaagctcagaggacccgt

SEQ ID NO: 132063 - DNA, 60 bp, Artificial
  Synthetic oligonucleotide
tagccttgcactgcctactaagagagtcacttgggtagcgccactaggtgtccgcggagc

SEQ ID NO: 132064 - DNA, 60 bp, Artificial
  Synthetic oligonucleotide
cgatgtcatgggtgcagaagatcacgggaggtgtgggactggttgttgctgttgccgcac

SEQ ID NO: 132065 - DNA, 60 bp, Artificial
  Synthetic oligonucleotide
ggcgaccatgccgtcacagtcaaggacgccaaattcattgtggggccaatgtcttcagcc

SEQ ID NO: 132066 - DNA, 60 bp, Artificial
  Synthetic oligonucleotide
gcacccacgtcgctataccaccaggcgattaaaggggtccgagtggcgtactgggttggg

SEQ ID NO: 132067 - DNA, 60 bp, Artificial
  Synthetic oligonucleotide
ttgtaggacaggccacccgagcaggatgtgcaccgtcgtaccgggtaaaacgcatggaca

SEQ ID NO: 132068 - DNA, 60 bp, Artificial
  Synthetic oligonucleotide
ggcagaaaaggatacagcaccacggaaggcgcactgtactcatatctagaagggacccgt

SEQ ID NO: 132069 - DNA, 60 bp, Artificial
  Synthetic oligonucleotide
ccgaagtagccctgaatgaaatatgcacgcgcatgtatggggtggatctagacagcgggc

SEQ ID NO: 132070 - DNA, 60 bp, Artificial
  Synthetic oligonucleotide
cccaccattccacgaatttgcgtatgaaggactgaaacgaagaccagcggctccatacaa

SEQ ID NO: 132071 - DNA, 60 bp, Artificial
  Synthetic oligonucleotide
cgcgcccacactgcttccctcagagccaaaatcaaggtaacatatggcaccgtaaatcag

SEQ ID NO: 132072 - DNA, 60 bp, Artificial
  Synthetic oligonucleotide
gccaggaacataggactgtgctccgcggcactgactgagggacaccttggcaagctatca

SEQ ID NO: 132073 - DNA, 60 bp, Artificial
  Synthetic oligonucleotide
aatcactacagagagcgtttccagcatttgaagtggaagcacagcaggttacaccaaatg

SEQ ID NO: 132074 - DNA, 60 bp, Artificial
  Synthetic oligonucleotide
gcgtgtacgccgtccgaatgaaggtcaacgaaaacccactgtacgcacaatcatcggagc

SEQ ID NO: 132075 - DNA, 60 bp, Artificial
  Synthetic oligonucleotide
ccgctctagatgcccagttgaggatagtgactcatcgactccaccgaagacagtcccatg

SEQ ID NO: 132076 - DNA, 60 bp, Artificial
  Synthetic oligonucleotide
gcagtgcaaccaccgcagttgccgcttgcaatgaattcctggcccggaactaccctacag

SEQ ID NO: 132077 - DNA, 60 bp, Artificial
  Synthetic oligonucleotide
tgcctatgacggccgtgttttaatcccgacaggcgcggctatcccggtacccgatttcca

SEQ ID NO: 132078 - DNA, 60 bp, Artificial
  Synthetic oligonucleotide
acaagtgggcgacggagtctgcagggcagtagcacggaaatggcctcaagccttccgcaa

SEQ ID NO: 132079 - DNA, 60 bp, Artificial
  Synthetic oligonucleotide
ggtcactataactggcactatggggccgtccagtacacaggaggcagattcacggtgccc

SEQ ID NO: 132080 - DNA, 60 bp, Artificial
  Synthetic oligonucleotide
attaccattgccagtagagtgctggaagccagattaactaactcagcctgtgccgcattt

SEQ ID NO: 132081 - DNA, 60 bp, Artificial
  Synthetic oligonucleotide
ccacttatcaacaccacctgccgagtaccattggctcccgaagccctagtcaggagcggt

SEQ ID NO: 132082 - DNA, 60 bp, Artificial
  Synthetic oligonucleotide
cgagctgctctccatgctgttatgaaaaggggcctgagccgacgctgagaatgctggaag

SEQ ID NO: 132083 - DNA, 60 bp, Artificial
  Synthetic oligonucleotide
ggctcttcttatcctgactacatgttgcgcccgatcactactttcctgctgcaagggatc

SEQ ID NO: 132084 - DNA, 60 bp, Artificial
  Synthetic oligonucleotide
gacgatctgtgaccaaatgacaggcattctggcgactgaggtcacgcccgaggatgcgca

SEQ ID NO: 132085 - DNA, 60 bp, Artificial
  Synthetic oligonucleotide
acttttcgaccgcatcagccgccccttccttcatagtatccgtctgcagctcgcgtgcca

SEQ ID NO: 132086 - DNA, 60 bp, Artificial
  Synthetic oligonucleotide
tgcaccgaggtacaccataagagcatttccagaagatgcacgctaccagtcaccgccatt

SEQ ID NO: 132087 - DNA, 60 bp, Artificial
  Synthetic oligonucleotide
ggacggtgggcttctgggcaggtgttggtcgcagaacgaagaactcagccgattgacatc

SEQ ID NO: 132088 - DNA, 60 bp, Artificial
  Synthetic oligonucleotide
accagtttgcgtcccgtccccgcgcccagaaggtgtatgccaagaccagcagtagagctg

SEQ ID NO: 132089 - DNA, 60 bp, Artificial
  Synthetic oligonucleotide
aggctgcagaagctaaggaggcagaagagacactggcagccctaccacctctgatcccga

SEQ ID NO: 132090 - DNA, 60 bp, Artificial
  Synthetic oligonucleotide
cctcatactgcctagaaggaaggtaacgtggattgccccgccgactgtgacaggagccga

SEQ ID NO: 132091 - DNA, 60 bp, Artificial
  Synthetic oligonucleotide
cgcaccttctagcggcaatggacaccactgaagcacgggttactatctactgccgcgata

SEQ ID NO: 132092 - DNA, 60 bp, Artificial
  Synthetic oligonucleotide
cgtcatggacatgaagcgcgatgtgaaggttacaccagggacgaagcacacagaggaacg

SEQ ID NO: 132093 - DNA, 60 bp, Artificial
  Synthetic oligonucleotide
gtgagtgcgcggtgacaggaacgatgggacactttatcttggccaaatgtccaccaggcg

SEQ ID NO: 132094 - DNA, 60 bp, Artificial
  Synthetic oligonucleotide
gagcagaaaccgaagcaaaagaagacccctaagaagaagcccgggagaagggagcgcatg

SEQ ID NO: 132095 - DNA, 60 bp, Artificial
  Synthetic oligonucleotide
agaccacgaatgccgccacgcccttggaggccacgcccacctacaattcaaagaccagat

SEQ ID NO: 132096 - DNA, 60 bp, Artificial
  Synthetic oligonucleotide
atacgcgcatacaccgtgcgcgaggcccagggcatgagcgtcagcaccgcctgcatccat

SEQ ID NO: 132097 - DNA, 60 bp, Artificial
  Synthetic oligonucleotide
atacgcgcatacaccgtgcgcgaggcccagggcatgagcgttggcaccgcctgcatccac

SEQ ID NO: 132098 - DNA, 60 bp, Artificial
  Synthetic oligonucleotide
tgcgccgccttcatgaggctggcatacgcgcatacaccgtgcgcgaggcccagggtatga

SEQ ID NO: 132099 - DNA, 60 bp, Artificial
  Synthetic oligonucleotide
gcagaaggcatttccgtcgttcgaggtggagtcattgcaggtcacaccaaatgaccatgc

SEQ ID NO: 132100 - DNA, 60 bp, Artificial
  Synthetic oligonucleotide
ccgtgcaacaaacccataatcatagacaccacaggacagaccaagcccaagccaggagac

SEQ ID NO: 132101 - DNA, 60 bp, Artificial
  Synthetic oligonucleotide
gcgcctcagagtgctccactaaagagaagcctgactaccaatgcaaggtttacacaggcg

SEQ ID NO: 132102 - DNA, 60 bp, Artificial
  Synthetic oligonucleotide
atgtggacctcgagaacccgattcctccaccgcgcccgaagagagctgcataccttgcct

SEQ ID NO: 132103 - DNA, 60 bp, Artificial
  Synthetic oligonucleotide
tggaggccgagctgactagagaagccttaccacccctcgtccccatcgcgccggcggaga

SEQ ID NO: 132104 - DNA, 60 bp, Artificial
  Synthetic oligonucleotide
cggtcgttacgagggtttgacttggactggaccaccgactcgtcttccactgccagcgat

SEQ ID NO: 132105 - DNA, 60 bp, Artificial
  Synthetic oligonucleotide
cagacgctgaatctcctaccttttgcctgcatacagacgtcacgtgtcgtacggcagccg

SEQ ID NO: 132106 - DNA, 59 bp, Artificial
  Synthetic oligonucleotide
aaaatgctgcgtcaagagagaggaagcgtcgggtttggtgttggtgggagagctaacca

SEQ ID NO: 132107 - DNA, 60 bp, Artificial
  Synthetic oligonucleotide
ggccaggaacataggactgtgtgcagcatccttgactgagggaagactcggcaaactgtc

SEQ ID NO: 132108 - DNA, 60 bp, Artificial
  Synthetic oligonucleotide
atggagttgacctggacagtggcctgttttctgccccgaaggtgtccctgtattacgaga

SEQ ID NO: 132109 - DNA, 60 bp, Artificial
  Synthetic oligonucleotide
ccttgtatgcccctgcgtcggagcacgtgaatgtactgctgacgcgcactgaggataggc

SEQ ID NO: 132110 - DNA, 60 bp, Artificial
  Synthetic oligonucleotide
aagcctggtgcctgtcctggacactgccggaatcagattgacagcagaggagtggagcac

SEQ ID NO: 132111 - DNA, 60 bp, Artificial
  Synthetic oligonucleotide
aatgatgacgtggagctgaccacagacttggtgagagtgcacccggacagcagcctggtg

SEQ ID NO: 132112 - DNA, 60 bp, Artificial
  Synthetic oligonucleotide
gcggaagagataggctgcagcaatccctcaaccatctattcacagcaatggacgccacgg

SEQ ID NO: 132113 - DNA, 60 bp, Artificial
  Synthetic oligonucleotide
ggcactcgtgtcatagccccgtagcaattgaagcgatcaggtccgaagctaccgacggga

SEQ ID NO: 132114 - DNA, 60 bp, Artificial
  Synthetic oligonucleotide
ccgacaagctgatggcggagaggtgcgcgtcgtgggtcaacatggaggtgaagatcattg

SEQ ID NO: 132115 - DNA, 60 bp, Artificial
  Synthetic oligonucleotide
aggggtccgaagagtggtccgccccgctgattactgccatgtgtgtccttgccaatgcta

SEQ ID NO: 132116 - DNA, 60 bp, Artificial
  Synthetic oligonucleotide
tgtgcggctcgtaccccgtcatccacgctgtagcgcctaatttctctgccacgactgaag

SEQ ID NO: 132117 - DNA, 60 bp, Artificial
  Synthetic oligonucleotide
gggcgcacgcagctagtgtggcagagactatggcctacttgtgggaccaaaaccaagcgt

SEQ ID NO: 132118 - DNA, 60 bp, Artificial
  Synthetic oligonucleotide
gctgctgccttgttcgctaagacccacaacttggttccgctgcaggaggttcccatggac

SEQ ID NO: 132119 - DNA, 60 bp, Artificial
  Synthetic oligonucleotide
agaagtgacactgcaccttcacccagatcatcccacgctcttttcctaccgcacactggg

SEQ ID NO: 132120 - DNA, 60 bp, Artificial
  Synthetic oligonucleotide
gggccttcgcaatcggcgctatcctggtgctggttgtggtcacttgcattgggctccgca

SEQ ID NO: 132121 - DNA, 60 bp, Artificial
  Synthetic oligonucleotide
caccatggactcggcagtgttcaacgtggagtgcttcaagcgctatgcctgctccggaga

SEQ ID NO: 132122 - DNA, 60 bp, Artificial
  Synthetic oligonucleotide
cctcatagccatgaccaccttggcgagggacattaaggcgtttaagaaattgagaggacc

SEQ ID NO: 132123 - DNA, 60 bp, Artificial
  Synthetic oligonucleotide
gctttcgcttgccattccggtactctgctggccctaattgctcttgttaaacctcggagc

SEQ ID NO: 132124 - DNA, 60 bp, Artificial
  Synthetic oligonucleotide
aacagtggagagtaacgacctgtacgcgaacacggcactgaagctggcacgcccttcacc

SEQ ID NO: 132125 - DNA, 60 bp, Artificial
  Synthetic oligonucleotide
cggggcaaccgccagagcttacgaacattcgacagtaatgccgaacgtggtggggttccc

SEQ ID NO: 132126 - DNA, 60 bp, Artificial
  Synthetic oligonucleotide
gctacaccagatgaataccaagctgagtgctgtgtatgccggagaagccatgcacacggc

SEQ ID NO: 132127 - DNA, 60 bp, Artificial
  Synthetic oligonucleotide
gcccacgtgaaaggagtcatcgacaacgcggacctggcaaagctagctttcaagacatcg

SEQ ID NO: 132128 - DNA, 60 bp, Artificial
  Synthetic oligonucleotide
caaccatctgtgatcaaatgactggcatactagcgaccgacgtcacaccggaggacgcac

SEQ ID NO: 132129 - DNA, 60 bp, Artificial
  Synthetic oligonucleotide
aggccactccggtggctcccgtcgtccccgacttccaggcccagcagatgcagcaactca

SEQ ID NO: 132130 - DNA, 60 bp, Artificial
  Synthetic oligonucleotide
gcggcgtcttgacactgacgtacaagaccaacaagaacggggactgctctgtacactcgc

SEQ ID NO: 132131 - DNA, 60 bp, Artificial
  Synthetic oligonucleotide
gcgctacgactgctaaaacccggcggcagcctcttgatgagagcttacggatacgccgat

SEQ ID NO: 132132 - DNA, 60 bp, Artificial
  Synthetic oligonucleotide
tatcaaccgcaggctgccgcacgccctggtggctgagtacaagacggttaaaggcagtag

SEQ ID NO: 132133 - DNA, 60 bp, Artificial
  Synthetic oligonucleotide
gcgccgtgggaaacatccctgtctccatgaatttgcctgacagcgcctttacccgcattg

SEQ ID NO: 132134 - DNA, 60 bp, Artificial
  Synthetic oligonucleotide
accacggggctgttcagtacagcggaggtaggttcactataccgacaggagcgggcaaac

SEQ ID NO: 132135 - DNA, 60 bp, Artificial
  Synthetic oligonucleotide
actgtacgcagtgccgtcccgtcaccctttcagaacacactacagaacgtgctagcggcc

SEQ ID NO: 132136 - DNA, 60 bp, Artificial
  Synthetic oligonucleotide
ctggtcaccagcggcaagaaggagaactgccaggaaatagtcaacgacgtgaagaagcac

SEQ ID NO: 132137 - DNA, 60 bp, Artificial
  Synthetic oligonucleotide
tccgattcatcaacacctcccaggacagtgccctgcctgtgccgctacgcaatgacagca

SEQ ID NO: 132138 - DNA, 60 bp, Artificial
  Synthetic oligonucleotide
cctctgggtgtccgagagaggtcacttacttgctgctgcttgtgggcatttaaaacgagg

SEQ ID NO: 132139 - DNA, 60 bp, Artificial
  Synthetic oligonucleotide
ccgccccgtgtactcccctaccgtgatcgaaagattctcaagccccgatgtagcaatcgc

SEQ ID NO: 132140 - DNA, 60 bp, Artificial
  Synthetic oligonucleotide
aagagatcccttgcaccacttatcaacagaccacagcggagaccgtggaggaaatcgaca

SEQ ID NO: 132141 - DNA, 60 bp, Artificial
  Synthetic oligonucleotide
ccaggagacccggttctagagacggacattgcatcattcgacaaaagccaggacgactcc

SEQ ID NO: 132142 - DNA, 60 bp, Artificial
  Synthetic oligonucleotide
aggccagggtactacgacctccttcaggcagccttgacgtgccgaaacggaacaagacac

SEQ ID NO: 132143 - DNA, 60 bp, Artificial
  Synthetic oligonucleotide
gagcttactggcgttgatatcgatcttcgcgtcgtgctacatgctggttgcggcccgcag

SEQ ID NO: 132144 - DNA, 60 bp, Artificial
  Synthetic oligonucleotide
ctccagggacgaaacacacagaggaaagacccaaagtccaggtaattcaagcagcggagc

SEQ ID NO: 132145 - DNA, 60 bp, Artificial
  Synthetic oligonucleotide
ggcagcctttggggaaatatccagctgtcacctaccaactggcacgcgcttcaagttcgg

SEQ ID NO: 132146 - DNA, 60 bp, Artificial
  Synthetic oligonucleotide
gcgtttaggaacaagctgcctttgacgttcggcgactttgacgagcacgaggtcgatgcg

SEQ ID NO: 132147 - DNA, 60 bp, Artificial
  Synthetic oligonucleotide
agggccggcggttaccaggtcgacggatatgacggcagggtcctactaccatgtggatcg

SEQ ID NO: 132148 - DNA, 60 bp, Artificial
  Synthetic oligonucleotide
cggatcctacgctgttctgtcgcctcaagcagtcctccgtagcgagaaactttcctgcat

SEQ ID NO: 132149 - DNA, 60 bp, Artificial
  Synthetic oligonucleotide
gtgaatatgaaggggaatatctgtacgacattgacaaaaggcagtgcgtcaagaaggacc

SEQ ID NO: 132150 - DNA, 60 bp, Artificial
  Synthetic oligonucleotide
cctcatgccttggtcacacacaggacagaacagcctcctagcgacttctcagcgttcgct

SEQ ID NO: 132151 - DNA, 60 bp, Artificial
  Synthetic oligonucleotide
ggggctggtcatgcaggggcgtttggagatcttcaagccaggacaaccaccagtaacgat

SEQ ID NO: 132152 - DNA, 60 bp, Artificial
  Synthetic oligonucleotide
ttggcaccacggagccgtgcagtacgaaaacggaaggttcaccgtgccaaaaggagtggg

SEQ ID NO: 132153 - DNA, 60 bp, Artificial
  Synthetic oligonucleotide
gagacagacatcgcctccttcgacaagagcgaggacgatgcgatggcactgacggcacta

SEQ ID NO: 132154 - DNA, 58 bp, Artificial
  Synthetic oligonucleotide
acccaccccagagatattgggcacaggaaaccgccccaggggacccacacggcctgcc

SEQ ID NO: 132155 - DNA, 60 bp, Artificial
  Synthetic oligonucleotide
atcgtcatagctagcagagttttacgtgaacgcctgactaactcaccctgtgcagcattc

SEQ ID NO: 132156 - DNA, 60 bp, Artificial
  Synthetic oligonucleotide
gactgcggaacagtggaacacggttgcccattttagggatgataaggcacattctgcgga

SEQ ID NO: 132157 - DNA, 60 bp, Artificial
  Synthetic oligonucleotide
gaagggacaaagttccaccaagcggcaaaggacgtggcggaaataaacgcaatgtggccg

SEQ ID NO: 132158 - DNA, 60 bp, Artificial
  Synthetic oligonucleotide
ggcgatcccgctactgtctacgggcatattcgcgggtagtaaggaccgactcatgcagtc

SEQ ID NO: 132159 - DNA, 60 bp, Artificial
  Synthetic oligonucleotide
aatcaccctcccgaacatggcaccgagcacccctgccgcgtgtatacacacgatgcccag

SEQ ID NO: 132160 - DNA, 60 bp, Artificial
  Synthetic oligonucleotide
cccgtgtgtacttatgtgccagcaaccttatgcgaccagatgaccggcatcttggctaca

SEQ ID NO: 132161 - DNA, 60 bp, Artificial
  Synthetic oligonucleotide
gggcggcgcatgagagaagcccaagaataaaactacccatcatggagaaggttcacgttg

SEQ ID NO: 132162 - DNA, 60 bp, Artificial
  Synthetic oligonucleotide
ggcagccgtcatggaggaccccgatctggaacaggacactatttgcttgcacgacgacga

SEQ ID NO: 132163 - DNA, 60 bp, Artificial
  Synthetic oligonucleotide
gcgacgtgaagaaactgcgaggtctggacatagtggcacgcaccgttgattcagtgctgc

SEQ ID NO: 132164 - DNA, 60 bp, Artificial
  Synthetic oligonucleotide
cgcacccacaacccttacaaattatcctccaccctaacaaatatctacactggctcacga

SEQ ID NO: 132165 - DNA, 60 bp, Artificial
  Synthetic oligonucleotide
cctttgtatgcccccaactcagaacacgtcaatgtcttgctcactcgcacggaggacagg

SEQ ID NO: 132166 - DNA, 60 bp, Artificial
  Synthetic oligonucleotide
gctaacagcccgtaacataggtctatgcagttcggacgttatggagaggtcccgcagggg

SEQ ID NO: 132167 - DNA, 60 bp, Artificial
  Synthetic oligonucleotide
cagtgtacaagcgccctgatacccagactgtcataaaagttcccagcgacttccactcct

SEQ ID NO: 132168 - DNA, 60 bp, Artificial
  Synthetic oligonucleotide
cgtcgccgtgcgttgtacgaggagtcgactcgctggaaccgtgtgggcatattttctgag

SEQ ID NO: 132169 - DNA, 60 bp, Artificial
  Synthetic oligonucleotide
acaccggagtacgacgcctacatggacatggtagatggagcctcatgctgcctggacacg

SEQ ID NO: 132170 - DNA, 60 bp, Artificial
  Synthetic oligonucleotide
aaagccaatacctgcacctcgcactgttactacccaacctcctgttccgaaaccgcgcag

SEQ ID NO: 132171 - DNA, 60 bp, Artificial
  Synthetic oligonucleotide
tgtatcctatgcaaccaatgcctcttcgcaacccctacgcgccacctagaagaccgtggt

SEQ ID NO: 132172 - DNA, 60 bp, Artificial
  Synthetic oligonucleotide
gccgccctgtacgcaaagactcacaatctcagcatgcttcaggacatcccgatggaccgc

SEQ ID NO: 132173 - DNA, 60 bp, Artificial
  Synthetic oligonucleotide
caaacttacacgaccgtacacagccaagtgcgtccgctgcgccgttggtagctgtcacag

SEQ ID NO: 132174 - DNA, 60 bp, Artificial
  Synthetic oligonucleotide
ctccagaggggccgcctgccaagaggaagcggaaggaaccacagcagcaggctactcagg

SEQ ID NO: 132175 - DNA, 60 bp, Artificial
  Synthetic oligonucleotide
tgttctgccccgccgatgtgctacgaccgcaagcccgcagagactttggcactacttagt

SEQ ID NO: 132176 - DNA, 60 bp, Artificial
  Synthetic oligonucleotide
gagaagcgagactcaggagacgctgccggatgtccaggaatctatacccgagcctgtgac

SEQ ID NO: 132177 - DNA, 60 bp, Artificial
  Synthetic oligonucleotide
ctgaaattgtactggaacgaacagaattggagatagcgtatgccccgcgcctcgacctgg

SEQ ID NO: 132178 - DNA, 60 bp, Artificial
  Synthetic oligonucleotide
ggtcaacagagcaggatacgcaccattgtctatcagtgtcaccccgactaaagtgaggct

SEQ ID NO: 132179 - DNA, 60 bp, Artificial
  Synthetic oligonucleotide
actttgtcagatgctgggtgctctttaaatgaatgcgtgtactcttcagactttggcggg

SEQ ID NO: 132180 - DNA, 60 bp, Artificial
  Synthetic oligonucleotide
cccacctaaagaccacatcgtaacacgtccacaacaccacgcccaaacattcacagcggc

SEQ ID NO: 132181 - DNA, 60 bp, Artificial
  Synthetic oligonucleotide
gccaagcaggtcactgataatgaccatgctaatgccagagcgttttcgcatctggcttca

SEQ ID NO: 132182 - DNA, 60 bp, Artificial
  Synthetic oligonucleotide
tgaggtagaagccaagcaggtcaccgataatgaccatgctaatgccagagcgttttcgca

SEQ ID NO: 132183 - DNA, 60 bp, Artificial
  Synthetic oligonucleotide
gccaagcaggtcaccgataatgaccatgctaatgccagagcgttttcgcatctggcctcc

SEQ ID NO: 132184 - DNA, 60 bp, Artificial
  Synthetic oligonucleotide
atccgccacgtgcgcagcctccaacccagcgcgcgggtccgactcccggaccttgtccat

SEQ ID NO: 132185 - DNA, 53 bp, Artificial
  Synthetic oligonucleotide
ccgtcataactttgtacggcggtcctaaataggtacgcactacagctacctat

SEQ ID NO: 132186 - DNA, 57 bp, Artificial
  Synthetic oligonucleotide
ggacccgtcgtaaccctgtacggtggtcctaaataggtacgcactacagctacctat

SEQ ID NO: 132187 - DNA, 57 bp, Artificial
  Synthetic oligonucleotide
ggacccgtcataactttgtacggcggtcctaaataggtacgcactacagctacctat

SEQ ID NO: 132188 - DNA, 60 bp, Artificial
  Synthetic oligonucleotide
aagagggcccgtcgtaaccttgtacggcggacctaaataggtacgcactacagctaccta

SEQ ID NO: 132189 - DNA, 60 bp, Artificial
  Synthetic oligonucleotide
cttcctaaaagcagccgaactcactttgagacgtaggcatagcataccgaactcttccac

SEQ ID NO: 132190 - DNA, 60 bp, Artificial
  Synthetic oligonucleotide
cttcctaaaagcagccgaactcactttgagatgtaggcatagcataccgaactcttccac

SEQ ID NO: 132191 - DNA, 60 bp, Artificial
  Synthetic oligonucleotide
gctgcctttaatgtagagtgtttcaagaagtacgcgtgtaacaatgaatactgggacacg

SEQ ID NO: 132192 - DNA, 54 bp, Artificial
  Synthetic oligonucleotide
ccccgccccgtgttccagcgcatgctgtcctactgcaagaccctgagcccggac

SEQ ID NO: 132193 - DNA, 60 bp, Artificial
  Synthetic oligonucleotide
gcgaagtggatcttgaccatgtaatcctggatattgggagcgcgcctgtaaggcacacgc

SEQ ID NO: 132194 - DNA, 60 bp, Artificial
  Synthetic oligonucleotide
gcccattcctcagagctttgcaacggagcttcccgcagtttgaggtagaagccaagcagg

SEQ ID NO: 132195 - DNA, 60 bp, Artificial
  Synthetic oligonucleotide
gggaaaccgtcgggctatgctgccactatgcatcgcgagggattcttgtgctgcaaggta

SEQ ID NO: 132196 - DNA, 60 bp, Artificial
  Synthetic oligonucleotide
ctcccctaaagtcaaatgctgcggctccttggaatgtcagcccgccgctcacgcagacta

SEQ ID NO: 132197 - DNA, 60 bp, Artificial
  Synthetic oligonucleotide
gccggttgatctgcgggctgtccaccaccgcccagtacccacctacccgattcggctgta

SEQ ID NO: 132198 - DNA, 60 bp, Artificial
  Synthetic oligonucleotide
gtcggttgatctgcgggctgtccaccaccgcccagtacccgcctacccggtttggctgcg

SEQ ID NO: 132199 - DNA, 60 bp, Artificial
  Synthetic oligonucleotide
gtcggttgatctgcgggctgtccaccaccgcccagtacccacccacccgattcggctgta

SEQ ID NO: 132200 - DNA, 60 bp, Artificial
  Synthetic oligonucleotide
gtcggttgatctgcgggctgtccaccaccgcccagtacccgcctacccggtttgcctgcg

SEQ ID NO: 132201 - DNA, 60 bp, Artificial
  Synthetic oligonucleotide
tgacacccggtgcggtcggttgatctgcgggctgtccaccaccgcccagtacccgcctac

SEQ ID NO: 132202 - DNA, 60 bp, Artificial
  Synthetic oligonucleotide
gcgcgtttctgaaggcgttgcagcgagcataccccatgtttgaggtggaaccaaagcagg

SEQ ID NO: 132203 - DNA, 60 bp, Artificial
  Synthetic oligonucleotide
acacatagtgggcgagcaggcaggtacgcggttgaagcatacgacgggcgtgttctagtg

SEQ ID NO: 132204 - DNA, 60 bp, Artificial
  Synthetic oligonucleotide
agtttgtgaaccggaagttgcaccacatcgccatgcacggcccagcgctgaacaccgatg

SEQ ID NO: 132205 - DNA, 60 bp, Artificial
  Synthetic oligonucleotide
acagcggaagaccaatctttgacaacaaggggcgcgtcgtggctattgtcctaggcgggg

SEQ ID NO: 132206 - DNA, 60 bp, Artificial
  Synthetic oligonucleotide
ctagaatgcgcacagataccagtgcacatgaaatcggacgcctcaaagttcacccatgaa

SEQ ID NO: 132207 - DNA, 60 bp, Artificial
  Synthetic oligonucleotide
gccgaagaaggcctgcaggacaactcgcacaactgatatccgcagtcagcagactagcac

SEQ ID NO: 132208 - DNA, 60 bp, Artificial
  Synthetic oligonucleotide
gctacgtggatgaacatggaagtgaaaatcatcgatgcagtagtgtcagagaaggcgcca

SEQ ID NO: 132209 - DNA, 60 bp, Artificial
  Synthetic oligonucleotide
ttatgagcatcggtgcccgcactgtgtccgcgtacgagcacgcaacagtgatcccgaaca

SEQ ID NO: 132210 - DNA, 60 bp, Artificial
  Synthetic oligonucleotide
acacctgtggatgcagaccgatccgggttgtttgtcagaacgtcagcaccgtgcaccatc

SEQ ID NO: 132211 - DNA, 60 bp, Artificial
  Synthetic oligonucleotide
gcgtggtaaacgccgccaatccacgcggagtaccaggcgatggagtatgtaaagccgtgt

SEQ ID NO: 132212 - DNA, 60 bp, Artificial
  Synthetic oligonucleotide
gccaggtgaagtggaagagctgacggatagcgagtggtcaacgtgctcggacacagacga

SEQ ID NO: 132213 - DNA, 60 bp, Artificial
  Synthetic oligonucleotide
gcagcatacggcaccatttggctgtcagatagcaacaaacccggtaagagcagtgaactg

SEQ ID NO: 132214 - DNA, 60 bp, Artificial
  Synthetic oligonucleotide
cgaggcattcgcttgtcattcgggaaccctgttggcactgatagccatggttagaccgcg

SEQ ID NO: 132215 - DNA, 60 bp, Artificial
  Synthetic oligonucleotide
caaagcacaccgaggaaaggccgaaagtacaggtcatacaggcggcagaaccactggcaa

SEQ ID NO: 132216 - DNA, 60 bp, Artificial
  Synthetic oligonucleotide
cctgcggacgaaatcatacagacacctcaaataccaactgaagcgtgccaggacgcacaa

SEQ ID NO: 132217 - DNA, 60 bp, Artificial
  Synthetic oligonucleotide
gtgacgagcgggaagggaaaatactccctatggccagcgacaggctcttcactgctaagc

SEQ ID NO: 132218 - DNA, 60 bp, Artificial
  Synthetic oligonucleotide
cgagcaggagcgggcatagtcgaaacaccaaggggagcaattaaagtcacagcccaaccg

SEQ ID NO: 132219 - DNA, 60 bp, Artificial
  Synthetic oligonucleotide
gggctaaaccaacggatagtggtcaatggcaggacgcaacgcaatacaaacaccatgaaa

SEQ ID NO: 132220 - DNA, 60 bp, Artificial
  Synthetic oligonucleotide
taagacgcatacggtgtacaaaagaccggatacccagtcaatccaaaaggtccctgctga

SEQ ID NO: 132221 - DNA, 60 bp, Artificial
  Synthetic oligonucleotide
gcggtcactatccgcgaacctaacgtagatgtcgagggaacagcacaactacagattgcc

SEQ ID NO: 132222 - DNA, 60 bp, Artificial
  Synthetic oligonucleotide
ctgcggggagggacactcatgccacagcccaatagcattagaacggatcagaagtgaggc

SEQ ID NO: 132223 - DNA, 60 bp, Artificial
  Synthetic oligonucleotide
agccttgccctccctgtcatgtgcctgttggcaaacacaaccttcccatgctcccaaccg

SEQ ID NO: 132224 - DNA, 60 bp, Artificial
  Synthetic oligonucleotide
cagaacaaagctaatgtatgctgggctaaatgcctggtccctattcttgacaccgctgga

SEQ ID NO: 132225 - DNA, 60 bp, Artificial
  Synthetic oligonucleotide
aatgacccatacaaatattggccccaactgtctacaaatggtactgcgcacgggcaccca

SEQ ID NO: 132226 - DNA, 60 bp, Artificial
  Synthetic oligonucleotide
cacagttgacggccagacagtacgatacaagtgcaaatgtgacggctccaatgaaggatt

SEQ ID NO: 132227 - DNA, 60 bp, Artificial
  Synthetic oligonucleotide
cgcctcattccctccgaaaacagtcccgtgcctatgccgttatgccatgacgcctgaacg

SEQ ID NO: 132228 - DNA, 60 bp, Artificial
  Synthetic oligonucleotide
caggggctgaccagaaaaggtgtttatgcagtaaggcagaaagtcaacgaaaaccctctg

SEQ ID NO: 132229 - DNA, 60 bp, Artificial
  Synthetic oligonucleotide
ggctaggagtgagcagtgtagccatccctttgctctcaaccggtgtgtactcaggaggca

SEQ ID NO: 132230 - DNA, 60 bp, Artificial
  Synthetic oligonucleotide
cagttcggtgacatccagagccgcacgccagacagcaaggacgtctatgcgaatacgcag

SEQ ID NO: 132231 - DNA, 60 bp, Artificial
  Synthetic oligonucleotide
ctacagagcccacacagcttcagtatcagctaaactacgtgtcttttaccaagggaataa

SEQ ID NO: 132232 - DNA, 60 bp, Artificial
  Synthetic oligonucleotide
ccgaaccagtgaaagggtcattagcgtattgggacgcaagttcagatcgtccagggctct

SEQ ID NO: 132233 - DNA, 60 bp, Artificial
  Synthetic oligonucleotide
gtgatggccgtaccgaatatggaaacatccacattctgcctacacactgatgctacatgc

SEQ ID NO: 132234 - DNA, 60 bp, Artificial
  Synthetic oligonucleotide
ggatgaggacagaagacgtgctctggcagatgaggttactagatggcaaagaaccggctt

SEQ ID NO: 132235 - DNA, 60 bp, Artificial
  Synthetic oligonucleotide
gtataactaccagaaaggttgacgaatttaaccccgaaaccaacataataccggccaacc

SEQ ID NO: 132236 - DNA, 60 bp, Artificial
  Synthetic oligonucleotide
gccacgattatccacagactgaaagagggttgcaggctctacttggcgtcagatacaccg

SEQ ID NO: 132237 - DNA, 60 bp, Artificial
  Synthetic oligonucleotide
tttaagatgtaggcgtaccgaactcttcgacaattctccgaacccgcagggacgtaggag

SEQ ID NO: 132238 - DNA, 60 bp, Artificial
  Synthetic oligonucleotide
cagaagtgcagtgccatcaccattccaaaatacgttgcagaatgtcttggcagcggccac

SEQ ID NO: 132239 - DNA, 60 bp, Artificial
  Synthetic oligonucleotide
gttattctcggtcggctcaacactctaccctgaaagtcgcaaacttttacaaagctggca

SEQ ID NO: 132240 - DNA, 60 bp, Artificial
  Synthetic oligonucleotide
cttgggtccagaagattacaggaggagtgggactcgtggttgctatagctgctttgatct

SEQ ID NO: 132241 - DNA, 60 bp, Artificial
  Synthetic oligonucleotide
gcagcagcgggcagatcacagagacggtcaacagtgaaaagacctatagccagtgtaccc

SEQ ID NO: 132242 - DNA, 60 bp, Artificial
  Synthetic oligonucleotide
tcatcacagccgaagatgttcacgaagccaaagcagccgccgacgaagcacgcgaggtga

SEQ ID NO: 132243 - DNA, 60 bp, Artificial
  Synthetic oligonucleotide
gtgccaccattgtctacaacgaaagagagtttgtgaacaggtacttgcaccacatcgctg

SEQ ID NO: 132244 - DNA, 60 bp, Artificial
  Synthetic oligonucleotide
gccctttatcgactgcctggtccccttttgaccgtaagattgtgcaatacgcaggcgagg

SEQ ID NO: 132245 - DNA, 60 bp, Artificial
  Synthetic oligonucleotide
tctcagctgccgcttccagagcaaactcacgagcttcccgcgctggctcaggaactggtt

SEQ ID NO: 132246 - DNA, 60 bp, Artificial
  Synthetic oligonucleotide
gacctctagtacatcagacgctggcacattttctatccgttcagcacctagtttgaccgg

SEQ ID NO: 132247 - DNA, 60 bp, Artificial
  Synthetic oligonucleotide
acattccaccccgacgttacttgcctgcaaccctgcccactcctacacttgaggcacctg

SEQ ID NO: 132248 - DNA, 60 bp, Artificial
  Synthetic oligonucleotide
caaaactggactcgactcgcctgctataaattgctgcggcacccaggagtgttctcccgc

SEQ ID NO: 132249 - DNA, 60 bp, Artificial
  Synthetic oligonucleotide
gggtacgaccggaggaacaggacccacaacccctacaagttgtccaccacattgactaac

SEQ ID NO: 132250 - DNA, 60 bp, Artificial
  Synthetic oligonucleotide
gaggcgtaggaccaaccaagggaacgggcagaccaaccagaacaatgggcagagaagcag

SEQ ID NO: 132251 - DNA, 60 bp, Artificial
  Synthetic oligonucleotide
gtgacacagccccagcgacacgtccaaacctacaccgccgcggtatctaagaccgcatgg

SEQ ID NO: 132252 - DNA, 60 bp, Artificial
  Synthetic oligonucleotide
ccccgtgtgcacttacgtgccagcaactttgtgcgaccagatgacaggtatcctagcgac

SEQ ID NO: 132253 - DNA, 60 bp, Artificial
  Synthetic oligonucleotide
gaagcccgacactcagaccattattaaggtgcaaagcgacttccattcgttcgtgttacc

SEQ ID NO: 132254 - DNA, 60 bp, Artificial
  Synthetic oligonucleotide
tagatatggtagatggtgcgtcgtgttgcttagacacagctagcttctgccctgctaagc

SEQ ID NO: 132255 - DNA, 60 bp, Artificial
  Synthetic oligonucleotide
ccgggaacaaagcacacagaggagcgccctaaagtgcaagtgatacaggctgccgatccg

SEQ ID NO: 132256 - DNA, 60 bp, Artificial
  Synthetic oligonucleotide
ccactgtacgcttccaactccgagcacgtgaatgtattgctgacaaggacggaagacagg

SEQ ID NO: 132257 - DNA, 60 bp, Artificial
  Synthetic oligonucleotide
ctccagatgtgcagtaggcagctgccatagccccatagccatagaatcggtgcgcagcga

SEQ ID NO: 132258 - DNA, 60 bp, Artificial
  Synthetic oligonucleotide
ccctagtaactaccatgtgcctgttggctaacatcagtttcccgtgctcgcagtcccctc

SEQ ID NO: 132259 - DNA, 60 bp, Artificial
  Synthetic oligonucleotide
cacgagttcgcctacgagagcctaaagaccagaccagcagcaccgtaccaggtacccact

SEQ ID NO: 132260 - DNA, 60 bp, Artificial
  Synthetic oligonucleotide
cggtgtactccggccgtcacctccattgtctccaccctgttttatgacaaaagaatgaga

SEQ ID NO: 132261 - DNA, 60 bp, Artificial
  Synthetic oligonucleotide
ggttcactgtcccgaaaggagtaggagcgaaaggggacagcggccgtcccatcttagaca

SEQ ID NO: 132262 - DNA, 60 bp, Artificial
  Synthetic oligonucleotide
ttctgggcgaaagcatgagtagtatacgctccaagtgccctgttgaggagtcggaagcct

SEQ ID NO: 132263 - DNA, 60 bp, Artificial
  Synthetic oligonucleotide
cgtaatatcgggctgtgcagttcagacgtcatggagcggtcgaggaggggtctgtccatt

SEQ ID NO: 132264 - DNA, 60 bp, Artificial
  Synthetic oligonucleotide
acttgcctgaccccttacagactgacacctaatgcccaattgccgctctgtgtggctgtc

SEQ ID NO: 132265 - DNA, 60 bp, Artificial
  Synthetic oligonucleotide
agcaaggctgggagtacgtgtggggcaatcaccctccaaagagactgtgggcccaagaga

SEQ ID NO: 132266 - DNA, 60 bp, Artificial
  Synthetic oligonucleotide
ccaaaggacccaagaatacgcagaagaccgctaaatcaaagaacaagcctggtaaacgcc

SEQ ID NO: 132267 - DNA, 60 bp, Artificial
  Synthetic oligonucleotide
gtcgggcccaatttcaataaggttgcagaggtcgagggagacagacagctggccgaagcg

SEQ ID NO: 132268 - DNA, 60 bp, Artificial
  Synthetic oligonucleotide
catgtgccttacctccttactgaagccaaatgtaccgttccgcttgctccagaacccgtc

SEQ ID NO: 132269 - DNA, 60 bp, Artificial
  Synthetic oligonucleotide
cgcaaggagggaagccgcagaagagatctgtatttctgatgatgctagcgaagaaccgga

SEQ ID NO: 132270 - DNA, 60 bp, Artificial
  Synthetic oligonucleotide
gccccgacggtacccctagccatccgtaacaatcactgggacaattcaccgtctcccaac

SEQ ID NO: 132271 - DNA, 60 bp, Artificial
  Synthetic oligonucleotide
cgttgtccaccgcagagtgtacgcttaatgagtgcgtctactcttctgactttggcggga

SEQ ID NO: 132272 - DNA, 60 bp, Artificial
  Synthetic oligonucleotide
tgtatctgtccaatgaagtgcgccgaagacccggacagattgttcaagtacgcgtctaag

SEQ ID NO: 132273 - DNA, 60 bp, Artificial
  Synthetic oligonucleotide
aggccaacgtgtgctgggccaaagcactggtcccgatattacgcacggccggaattaaca

SEQ ID NO: 132274 - DNA, 60 bp, Artificial
  Synthetic oligonucleotide
gtcccatacactcaggccccttccggattttcccagtgggtgaaggacaaaccgccctct

SEQ ID NO: 132275 - DNA, 60 bp, Artificial
  Synthetic oligonucleotide
ctgacctgaatggattgcgacgtagtccgatccgccaacatgtttcctttccaacgagcc

SEQ ID NO: 132276 - DNA, 60 bp, Artificial
  Synthetic oligonucleotide
acggctgttcaagttgggtaagccgttggccgctgacgatgagcatgatgatgaccgccg

SEQ ID NO: 132277 - DNA, 60 bp, Artificial
  Synthetic oligonucleotide
gtgaaccgtagattgcctcacgctctggtaaccgttcacacacaacagcctgccagcgac

SEQ ID NO: 132278 - DNA, 60 bp, Artificial
  Synthetic oligonucleotide
ccgtcttgtccgaggtgattctagagcgcacagaactggaaattgcgtatgccccgcgcc

SEQ ID NO: 132279 - DNA, 60 bp, Artificial
  Synthetic oligonucleotide
cctctgtgcatctacccactaagacgaagttcaaatttggagccatgatgaaatccggta

SEQ ID NO: 132280 - DNA, 60 bp, Artificial
  Synthetic oligonucleotide
ggtggatggagcttcctgctgcttggataccgctaccttttgccccgctaaactacgcag

SEQ ID NO: 132281 - DNA, 60 bp, Artificial
  Synthetic oligonucleotide
cagcatcctatattggagcgctctgtccatgagagattctacgccccgcgcctcgacctt

SEQ ID NO: 132282 - DNA, 60 bp, Artificial
  Synthetic oligonucleotide
ccgagctatgttgctggtggtgcataatgccaccggtgtagagcccgcacccatacacta

SEQ ID NO: 132283 - DNA, 60 bp, Artificial
  Synthetic oligonucleotide
cgccagtcgagtattgcgggagaggttaacaaattcaccgtgcgccgcatttatcggaga

SEQ ID NO: 132284 - DNA, 60 bp, Artificial
  Synthetic oligonucleotide
gccacctaaggaccatatcgtcgattacccagcccagcatactgagacgtttacatcagc

SEQ ID NO: 132285 - DNA, 60 bp, Artificial
  Synthetic oligonucleotide
gcgttctagccaatatcaccttcccatgcgatcaaccaccttgcatgccgtgctgctatg

SEQ ID NO: 132286 - DNA, 60 bp, Artificial
  Synthetic oligonucleotide
ccgcagcatacgagcacacggctgtgatgtcgaacaaggtggggatcccttacaaagccc

SEQ ID NO: 132287 - DNA, 60 bp, Artificial
  Synthetic oligonucleotide
ccatcaagctgaagaaagccagcatttacgatcttgagtatggtgacgttccccaatgca

SEQ ID NO: 132288 - DNA, 60 bp, Artificial
  Synthetic oligonucleotide
aattcgttaaccgctacttgcaccacattgccatcaatggtggggcgctgaacaccgacg

SEQ ID NO: 132289 - DNA, 60 bp, Artificial
  Synthetic oligonucleotide
cacgaattcgcatatgaaagtctgaaaacgcgtccagcagcaccgcacaaagtgccaacc

SEQ ID NO: 132290 - DNA, 60 bp, Artificial
  Synthetic oligonucleotide
cgctgggacgctacttgcacttatcgctatcgccaaaccaaagaaggtagtactttgtgg

SEQ ID NO: 132291 - DNA, 60 bp, Artificial
  Synthetic oligonucleotide
caatccctctgctgtccaccggaatttatgcgggcggtaaggatcgcgtcatgcagtcgc

SEQ ID NO: 132292 - DNA, 60 bp, Artificial
  Synthetic oligonucleotide
cccaagagtcaggagaaggcaacccgcacggctggcctcacgaggtggtaatctactact

SEQ ID NO: 132293 - DNA, 60 bp, Artificial
  Synthetic oligonucleotide
gccgcacccgtaacctttgcataacaccctacagattggcaccaaatgcccacgtacctc

SEQ ID NO: 132294 - DNA, 60 bp, Artificial
  Synthetic oligonucleotide
ccatcgtgaacgcagccaacaataaaggccagccaggagcaggcgtctgtggagcactgt

SEQ ID NO: 132295 - DNA, 60 bp, Artificial
  Synthetic oligonucleotide
cggatcacagtggagtatccctagcgccaccggatttgacatcccagaagactgcagcgt

SEQ ID NO: 132296 - DNA, 60 bp, Artificial
  Synthetic oligonucleotide
ccccactgcggcctgacattgaaagagaaaccatcgaagctgacatagacctgataatgc

SEQ ID NO: 132297 - DNA, 60 bp, Artificial
  Synthetic oligonucleotide
tgaccccgggaaccaaacatactgaagaacgcccaaaggttcaagttatacaagctgcag

SEQ ID NO: 132298 - DNA, 58 bp, Artificial
  Synthetic oligonucleotide
ttgcccgtggtagcacaggcattctccagatgggcacgtgaacatcgcgccgacctgg

SEQ ID NO: 132299 - DNA, 60 bp, Artificial
  Synthetic oligonucleotide
tttaagttagggaaaccgctcccgttggaagacgagcaggacgtcgacaggcgccgagct

SEQ ID NO: 132300 - DNA, 60 bp, Artificial
  Synthetic oligonucleotide
gggcgtcagctggagatctgccgacgtctatgtcaacggagagacccctgccaaaatagg

SEQ ID NO: 132301 - DNA, 60 bp, Artificial
  Synthetic oligonucleotide
cccataagcgtgccgatcaaggccattatgtagaaatgcaccaaccgggtatggtcgccg

SEQ ID NO: 132302 - DNA, 60 bp, Artificial
  Synthetic oligonucleotide
atttgaaactgcaacgtccccagccaggagtggtccacaccccatacacccaggcaccct

SEQ ID NO: 132303 - DNA, 60 bp, Artificial
  Synthetic oligonucleotide
cggcaaaacgtaagaaaccggcccctaagcccaagccagctgctccgaagaagaaacggc

SEQ ID NO: 132304 - DNA, 60 bp, Artificial
  Synthetic oligonucleotide
ggagacgcgcacgccggttacatccgcatacagacatccgcaatgttcggcatgaagtcg

SEQ ID NO: 132305 - DNA, 60 bp, Artificial
  Synthetic oligonucleotide
tcgagcacaagcaccgctccctgatcctccacttgcatccagagcaccccacgctattga

SEQ ID NO: 132306 - DNA, 60 bp, Artificial
  Synthetic oligonucleotide
ggcacagtaccctggggatttctccgcaactcttgaggaatggcaagccgaacacgatgc

SEQ ID NO: 132307 - DNA, 60 bp, Artificial
  Synthetic oligonucleotide
tcgccgcggttgcccgttcatttagattctcacgggtctgccagccgaaatgtgcttggg

SEQ ID NO: 132308 - DNA, 60 bp, Artificial
  Synthetic oligonucleotide
accaggttcttcggcgtagatatcgacagcggactgttttcggccccgactgttcccctg

SEQ ID NO: 132309 - DNA, 60 bp, Artificial
  Synthetic oligonucleotide
ccgcgaaaattttccgctgtcgaggagactgcaccggcgatcattccagaacggctcgtc

SEQ ID NO: 132310 - DNA, 60 bp, Artificial
  Synthetic oligonucleotide
cattgtcagctgcgagggttacgttgtgaagaagattaccatcagtccgggagtttacgg

SEQ ID NO: 132311 - DNA, 60 bp, Artificial
  Synthetic oligonucleotide
taggttcatagccccgaaagctgcagatctgctgacagtgatgtcaacaccggacgcaga

SEQ ID NO: 132312 - DNA, 60 bp, Artificial
  Synthetic oligonucleotide
catcctcaccgccgcataccatcccatgtctctgcaattacgccatgacagcagagcgcg

SEQ ID NO: 132313 - DNA, 60 bp, Artificial
  Synthetic oligonucleotide
ggacggcctggctactccacgaatgaagggaaagtgcattcttatttggaaggtacgcgc

SEQ ID NO: 132314 - DNA, 60 bp, Artificial
  Synthetic oligonucleotide
gcaggactcgcaatctttgcataaccccgtataaactagccccgaacgctcaagtcccga

SEQ ID NO: 132315 - DNA, 60 bp, Artificial
  Synthetic oligonucleotide
gggtacggtgtagaggcaaccaccctatttccacctatccaaaatggagaaagttcatgt

SEQ ID NO: 132316 - DNA, 60 bp, Artificial
  Synthetic oligonucleotide
caccggagcctctagttgagcacaaacaccgcaccctgattttacacctgcacccggacc

SEQ ID NO: 132317 - DNA, 60 bp, Artificial
  Synthetic oligonucleotide
cgacagcgggttgttctccgcgccaactgttccgttgacttacaccaatgaacactggga

SEQ ID NO: 132318 - DNA, 60 bp, Artificial
  Synthetic oligonucleotide
cccataccctacacttaactacccgcctatggcgccgattaacccgatggcctaccggga

SEQ ID NO: 132319 - DNA, 60 bp, Artificial
  Synthetic oligonucleotide
cggacaggtgaatggttacgcgtgcgtcgtgggtggacgagtgtttaaaccgctgcacgt

SEQ ID NO: 132320 - DNA, 60 bp, Artificial
  Synthetic oligonucleotide
cggcaaaacgcagaaatcaataaagatcgacaacctgcatgtgcgcacctcagccccttg

SEQ ID NO: 132321 - DNA, 60 bp, Artificial
  Synthetic oligonucleotide
cggtatccttgtattctgaaagccgtggatacaggtagagtggttgacgttcgcacagac

SEQ ID NO: 132322 - DNA, 60 bp, Artificial
  Synthetic oligonucleotide
tccgttgttatctaccggcatttacgcaggtggtaaggacagggttatgcaatcgctgaa

SEQ ID NO: 132323 - DNA, 60 bp, Artificial
  Synthetic oligonucleotide
gtgaggactccctaccgacaccaccattaccaacagtgcgaggaccatgcgatccaccac

SEQ ID NO: 132324 - DNA, 60 bp, Artificial
  Synthetic oligonucleotide
cctaattgaagcagcctttgggaacataacatctgtgcacttaccaacaggcacccgatt

SEQ ID NO: 132325 - DNA, 60 bp, Artificial
  Synthetic oligonucleotide
accctagttcgatgtacttccgagctatggtgacggtggtgcataatgccgccgatgcag

SEQ ID NO: 132326 - DNA, 60 bp, Artificial
  Synthetic oligonucleotide
gagtactgggacttctacaagacaaacccgataagactcaccgcagaaaatgtcactcag

SEQ ID NO: 132327 - DNA, 60 bp, Artificial
  Synthetic oligonucleotide
cgaagcagagattcacgccagtcaaggatcactgtggagcatacccagtatcaccggatc

SEQ ID NO: 132328 - DNA, 60 bp, Artificial
  Synthetic oligonucleotide
tcaaacctatccctgcacctcgtacccgagttaataacatgagccgcagcgcagacacga

SEQ ID NO: 132329 - DNA, 60 bp, Artificial
  Synthetic oligonucleotide
agcacagttatttgcggcctgagatacgatcagcagtgccatcaccgattcaaaacacgc

SEQ ID NO: 132330 - DNA, 60 bp, Artificial
  Synthetic oligonucleotide
gggtgcacccgttgagcagcttggcaggtagacctggttattcaaccaccgagggcaagg

SEQ ID NO: 132331 - DNA, 60 bp, Artificial
  Synthetic oligonucleotide
cgtcagctgcgaaggttacgttgtcaagaagattacgctcagtcctgggatttacgggaa

SEQ ID NO: 132332 - DNA, 60 bp, Artificial
  Synthetic oligonucleotide
ggggttcagaaaattcaatgcagtaaacctgtgatattctccggcactgtacccccggcc

SEQ ID NO: 132333 - DNA, 60 bp, Artificial
  Synthetic oligonucleotide
cccgtacctgcaagaatccccagccctccatgtacatcgaccaacggatcgacgaccagt

SEQ ID NO: 132334 - DNA, 60 bp, Artificial
  Synthetic oligonucleotide
atgtacgtacgtgccagcgacactgtgcgaccagatgaccgggatactggcgactgacgt

SEQ ID NO: 132335 - DNA, 60 bp, Artificial
  Synthetic oligonucleotide
gccgcagcgtacgaacacacagcagtgatgccgaacaaggtggggatcccgtacaaagct

SEQ ID NO: 132336 - DNA, 57 bp, Artificial
  Synthetic oligonucleotide
gagcctactgcttctgcgacaccgaaaacacccagatgagcgaggcgtatgtagagc

SEQ ID NO: 132337 - DNA, 60 bp, Artificial
  Synthetic oligonucleotide
ggaagtggcctggagcttttgataagcagccggtagcaactggtaaagcgcacctcgtca

SEQ ID NO: 132338 - DNA, 60 bp, Artificial
  Synthetic oligonucleotide
ccctgctagcacttatcgccatcgtcaagccaaagaaagttgtattgtgtggagatccga

SEQ ID NO: 132339 - DNA, 60 bp, Artificial
  Synthetic oligonucleotide
acgtcacccttgctgagagcggatcatttacattccacttctccactgcaaacatccatc

SEQ ID NO: 132340 - DNA, 60 bp, Artificial
  Synthetic oligonucleotide
ggccaccgccaatattactctgacccgctcgcagtgggagactattccagcgttcaagga

SEQ ID NO: 132341 - DNA, 60 bp, Artificial
  Synthetic oligonucleotide
cagcgttgaccacattagcatcttcggttagcaactttaaacacataagaggtcacccca

SEQ ID NO: 132342 - DNA, 60 bp, Artificial
  Synthetic oligonucleotide
gccaccgaaagaccacatcgtcgattatccagcacaacataccgaatcctttacgtcggc

SEQ ID NO: 132343 - DNA, 60 bp, Artificial
  Synthetic oligonucleotide
ggtcggtggaaagggtgacagcgggagacctattcttgacaacaaaggtagagtcgtcgc

SEQ ID NO: 132344 - DNA, 60 bp, Artificial
  Synthetic oligonucleotide
ccgagcggcgcccaagtgaaatactactgcaagtgcccagatgtacgagagggaattacc

SEQ ID NO: 132345 - DNA, 60 bp, Artificial
  Synthetic oligonucleotide
ttatctctgcagtcgctcgctcattcaggttctcacgtgtgtgccagccgaagtgtgcct

SEQ ID NO: 132346 - DNA, 60 bp, Artificial
  Synthetic oligonucleotide
cccacctgaacatggagttgaattaccatgcaaccgttacactcacaagcgtgcagacca

SEQ ID NO: 132347 - DNA, 60 bp, Artificial
  Synthetic oligonucleotide
tgtgatcaaccaccctgcatgccatgctgttatgaaaagaatccacacgaaacactcacc

SEQ ID NO: 132348 - DNA, 60 bp, Artificial
  Synthetic oligonucleotide
gtatggaagactttggccggtgacccttggatcaagacgttgacagcatcgtatccaggt

SEQ ID NO: 132349 - DNA, 60 bp, Artificial
  Synthetic oligonucleotide
tgcggagggttcatcgtagtcgatcagattacaggaactgcgtgcagagtcgccgacccc

SEQ ID NO: 132350 - DNA, 60 bp, Artificial
  Synthetic oligonucleotide
gcagctgatccacttgcaaccgcctacctatgtggtatacatcgagagcttgtgcgcagg

SEQ ID NO: 132351 - DNA, 60 bp, Artificial
  Synthetic oligonucleotide
gtggccgtcaaagtttgcaacctagtactgcaagagaattttcccaccgtagccagctat

SEQ ID NO: 132352 - DNA, 60 bp, Artificial
  Synthetic oligonucleotide
cgacgtacccaggagaagaaatgatcggctcgtacgcagtgctttcaccacaagcggtcc

SEQ ID NO: 132353 - DNA, 60 bp, Artificial
  Synthetic oligonucleotide
caccgacttccatttactaccaggcgctgaaaggtgtacgaactatctattggatcgggt

SEQ ID NO: 132354 - DNA, 60 bp, Artificial
  Synthetic oligonucleotide
tccagtatccaatcctggagcgttccgtccatgagaaattttacgccccgcgcctcgatc

SEQ ID NO: 132355 - DNA, 60 bp, Artificial
  Synthetic oligonucleotide
acttgaagctacaacgaccccaggctggtatcgtgcacacacctttcacccaggcgccct

SEQ ID NO: 132356 - DNA, 60 bp, Artificial
  Synthetic oligonucleotide
aaggggatgccggaccaatgtgcctggtcggcgagttagtagacccgccattccacgaat

SEQ ID NO: 132357 - DNA, 60 bp, Artificial
  Synthetic oligonucleotide
ccactgtcatctgcgtggtccccattcgataacaaggtggtggtttatgggcatgaagtg

SEQ ID NO: 132358 - DNA, 60 bp, Artificial
  Synthetic oligonucleotide
tacggcacacacaccactgctgtatcggagacccggcagacctgggcggagtgggctgct

SEQ ID NO: 132359 - DNA, 60 bp, Artificial
  Synthetic oligonucleotide
gaggaagatagtcctttcctcagagctttgcaacggagcttcccgcagtttgaggtagaa

SEQ ID NO: 132360 - DNA, 60 bp, Artificial
  Synthetic oligonucleotide
tgtatggcacacacaccactgctgtgtcggagacccggcagacctgggcggagtgggctg

SEQ ID NO: 132361 - DNA, 60 bp, Artificial
  Synthetic oligonucleotide
gtgtatggcacacacaccactgctgtgtcggagacccggcagacctgggcggagtgggct

SEQ ID NO: 132362 - DNA, 60 bp, Artificial
  Synthetic oligonucleotide
agaacacggagcagaacacccttgtcgtgtatacgcgcacgatgcacaacaccacggggc

SEQ ID NO: 132363 - DNA, 59 bp, Artificial
  Synthetic oligonucleotide
accttctgactgacgcgagatgcacagtgccgctggccccggaacccgtggtgtctttc

SEQ ID NO: 132364 - DNA, 60 bp, Artificial
  Synthetic oligonucleotide
ccccatggattgccacacgagatggtggtgcattactaccacaggtaccccacgccaacc

SEQ ID NO: 132365 - DNA, 60 bp, Artificial
  Synthetic oligonucleotide
taggcctccgtcgttgaggttcactgctccgtttgggtgtgatgtacttgtgaaccccgt

SEQ ID NO: 132366 - DNA, 60 bp, Artificial
  Synthetic oligonucleotide
ggccgatgggactgcgggaccgacaattagtcatgggttgctgctgggcgtttaagaagc

SEQ ID NO: 132367 - DNA, 60 bp, Artificial
  Synthetic oligonucleotide
agatcggacgactgtgcttcagatcatgcggccgcttacaaggctcacacggcatcggtc

SEQ ID NO: 132368 - DNA, 60 bp, Artificial
  Synthetic oligonucleotide
aacatcgttattgcgagcagggtattgagggagcgcttgacaaattcaccttgtgcagca

SEQ ID NO: 132369 - DNA, 60 bp, Artificial
  Synthetic oligonucleotide
tatcggaccttgcatccggtgccgttgtactccgcgtgtgttgaccgcgcatttgctagc

SEQ ID NO: 132370 - DNA, 60 bp, Artificial
  Synthetic oligonucleotide
aaacggttttgtcggaggtggtgctggagaggaccgagttggagatagcgtatgccccgc

SEQ ID NO: 132371 - DNA, 60 bp, Artificial
  Synthetic oligonucleotide
ccgctggccgctttgattgtgttgctccgagtgctgaaatgcgtgtgctgtgtgctgcct

SEQ ID NO: 132372 - DNA, 60 bp, Artificial
  Synthetic oligonucleotide
gggccgaaatccatgtggagcagagttcgctgtcagacgtctccattagcgcttccacgg

SEQ ID NO: 132373 - DNA, 60 bp, Artificial
  Synthetic oligonucleotide
gtcgggcaaatcgggcatcatcaagagcgcagttaccaagcgagacctggtggtaagcgc

SEQ ID NO: 132374 - DNA, 60 bp, Artificial
  Synthetic oligonucleotide
cgctccgtggcggtgccattgttgtccaccggagtatttgctggaaacaaagataggctg

SEQ ID NO: 132375 - DNA, 60 bp, Artificial
  Synthetic oligonucleotide
ggaccacgaaccccagagagacaccgattgagatagacacaacgggcagcaccaagccga

SEQ ID NO: 132376 - DNA, 60 bp, Artificial
  Synthetic oligonucleotide
cggagcacgacgccatcatgcagcacattatggagaaacctgcaccggccgacgtctttc

SEQ ID NO: 132377 - DNA, 60 bp, Artificial
  Synthetic oligonucleotide
cgggtcgtgcgggtgcattcggagacattcaagccagatccatctccagcacggacttgt

SEQ ID NO: 132378 - DNA, 60 bp, Artificial
  Synthetic oligonucleotide
gatagctataagtccaggcctgtacgggaaaccttcgggctacgccgcaacgatgcatcg

SEQ ID NO: 132379 - DNA, 60 bp, Artificial
  Synthetic oligonucleotide
gcagtgccgtcagctattcagaacacacttcagaacgtcctggcggctgcaacgaagagg

SEQ ID NO: 132380 - DNA, 60 bp, Artificial
  Synthetic oligonucleotide
gtgccacatcgtcgacggccatggttatttcctgcttgctagatgccctcccggagactc

SEQ ID NO: 132381 - DNA, 60 bp, Artificial
  Synthetic oligonucleotide
gacgatccttgatattggaagtgcgcccgcccgcagaatgtactctaagcataagtacca

SEQ ID NO: 132382 - DNA, 60 bp, Artificial
  Synthetic oligonucleotide
tggacgatgagcacgatgacgatcgccgccgtgccctacacgaagagtcacaacgctggt

SEQ ID NO: 132383 - DNA, 60 bp, Artificial
  Synthetic oligonucleotide
gtggaccgactggacaccgattctgtgtggagtgacaatcccatcttgcctggtccgacc

SEQ ID NO: 132384 - DNA, 60 bp, Artificial
  Synthetic oligonucleotide
acgagaatgggaggttcacggtaccaaaaggtgttggggcgaagggagacagtggacgcc

SEQ ID NO: 132385 - DNA, 60 bp, Artificial
  Synthetic oligonucleotide
gctatgtatccaatgcaaccaatgcctttccgcagcccgtttccggcccctaggagaccc

SEQ ID NO: 132386 - DNA, 60 bp, Artificial
  Synthetic oligonucleotide
atcagaacgggatgaagaaaggagaaagagggaagaagaagaaacagcgcgagaacgccc

SEQ ID NO: 132387 - DNA, 60 bp, Artificial
  Synthetic oligonucleotide
gctgagttggtcagggtgcacccgaagagttcactggcgggcaggaagggatacagtact

SEQ ID NO: 132388 - DNA, 60 bp, Artificial
  Synthetic oligonucleotide
ccgaaggctgccgcattgttcgctaagacacacgacctgaccatgcttcaggacatcccg

SEQ ID NO: 132389 - DNA, 60 bp, Artificial
  Synthetic oligonucleotide
cgcctgaaagcctcacgccctgagcagattacagtgtgctcctcttttcctttgccgaag

SEQ ID NO: 132390 - DNA, 60 bp, Artificial
  Synthetic oligonucleotide
ccatgtgcctgcttgccaatgtctcgttcccatgttcccagccgcccatgtgctacgatc

SEQ ID NO: 132391 - DNA, 60 bp, Artificial
  Synthetic oligonucleotide
acatacccgggaaagtggttgattggctgtcggacaacccggaggctaactacagggccc

SEQ ID NO: 132392 - DNA, 60 bp, Artificial
  Synthetic oligonucleotide
cgccctcaccaaaccgatatggactgaacaaagatgtggttaggcagctatcccaccggt

SEQ ID NO: 132393 - DNA, 60 bp, Artificial
  Synthetic oligonucleotide
cctcctctcgccccggatgttgaagaacccaccctagaggcagacgtagacctcatgttg

SEQ ID NO: 132394 - DNA, 60 bp, Artificial
  Synthetic oligonucleotide
ggcgcgtacccacaacccctacaaactttcatctacacttaccaacatatacactggagc

SEQ ID NO: 132395 - DNA, 60 bp, Artificial
  Synthetic oligonucleotide
ggacatgccattccagtccctgacttccaggccttgagcgagagcgccaccatcgtgtat

SEQ ID NO: 132396 - DNA, 60 bp, Artificial
  Synthetic oligonucleotide
attcatcagacttcggcgggatcgcctcggtcaagtactcggcgagcaaggcggggaagt

SEQ ID NO: 132397 - DNA, 60 bp, Artificial
  Synthetic oligonucleotide
tgcgccgccttcacgaggccggcatacgcgcatacaccgtgcgcgaggcccagggtatga

SEQ ID NO: 132398 - DNA, 60 bp, Artificial
  Synthetic oligonucleotide
tcacgcagatgcaggtcagtgatcacccagcactccacgcaatttcgcggtatacccgcc

SEQ ID NO: 132399 - DNA, 60 bp, Artificial
  Synthetic oligonucleotide
tgcgcctgttcgcgcgtatgggtcggctccgagcacgaggccccgcccgaccacctcctg

SEQ ID NO: 132400 - DNA, 60 bp, Artificial
  Synthetic oligonucleotide
gggtcaacgctctacccggaaagccgcaagctacttaagagctggcacctaccatcggtg

SEQ ID NO: 132401 - DNA, 60 bp, Artificial
  Synthetic oligonucleotide
gggcaggtgggtatatattctcgtcggacactggtccaggccatttacaacagaagtcgg

SEQ ID NO: 132402 - DNA, 60 bp, Artificial
  Synthetic oligonucleotide
aacatgcgaccactgtaccaaatgttccagggatcccgtataaggcgttggtcgaacgag

SEQ ID NO: 132403 - DNA, 60 bp, Artificial
  Synthetic oligonucleotide
gttagctcacacgcctacagtcacgaagtggttcaaaggcatcaccctccacctgactgc

SEQ ID NO: 132404 - DNA, 60 bp, Artificial
  Synthetic oligonucleotide
ggacgaaacgcaagcctaaaccagggaaacgacagcgtatgtgtatgaagttggagtcgg

SEQ ID NO: 132405 - DNA, 60 bp, Artificial
  Synthetic oligonucleotide
aggacgaaacgcaagcctaaaccagggaaacgacagcgtatgtgtatgaagttggagtcg

SEQ ID NO: 132406 - DNA, 53 bp, Artificial
  Synthetic oligonucleotide
gcccaatcaccctctacggctgacctaaataggtgacgtagtagacacgcacc

SEQ ID NO: 132407 - DNA, 60 bp, Artificial
  Synthetic oligonucleotide
gaacccaatcaccctctacggctgacctaaataggtgacgtagtagacacgcacctaccc

SEQ ID NO: 132408 - DNA, 60 bp, Artificial
  Synthetic oligonucleotide
caagagcataagagggagcccaatcaccctctacggctgacctaaataggtgacgtagta

SEQ ID NO: 132409 - DNA, 60 bp, Artificial
  Synthetic oligonucleotide
cttcgctagacgccaaggacatagtagcccgcactgacatacggctgctgaagccttctg

SEQ ID NO: 132410 - DNA, 60 bp, Artificial
  Synthetic oligonucleotide
aagcatcctctcttgatgctacagacatagtagcccgcactgacatacggctgctgaagc

SEQ ID NO: 132411 - DNA, 57 bp, Artificial
  Synthetic oligonucleotide
atgcactgaagtgtaccataaaagcatctctaggaggtgcacacagactgtaaccgc

SEQ ID NO: 132412 - DNA, 60 bp, Artificial
  Synthetic oligonucleotide
gcggaaaggcgtttatgctgtcaggtacaaagtcaacgagaatccactctactcgcagac

SEQ ID NO: 132413 - DNA, 57 bp, Artificial
  Synthetic oligonucleotide
taccagtggtcgcccaggcgttttccaggtgggcgcgtgaacatcgtgccgacttgg

SEQ ID NO: 132414 - DNA, 60 bp, Artificial
  Synthetic oligonucleotide
aatgcagaattatttattaccagtggtcgcccaggcgttttccaggtgggcgcgtgaaca

SEQ ID NO: 132415 - DNA, 60 bp, Artificial
  Synthetic oligonucleotide
ttattaccagtggtcgcccaggcgttttccaggtgggcgcgtgaacatcgtgccgatctg

SEQ ID NO: 132416 - DNA, 52 bp, Artificial
  Synthetic oligonucleotide
actatacggtaaagttgagaacttggcgtccacaatgcatcgcgagggtttc

SEQ ID NO: 132417 - DNA, 60 bp, Artificial
  Synthetic oligonucleotide
ctcaaccaaaggattgtcgtcaatggtaggacgcagagaaatactaacacaatgcagaat

SEQ ID NO: 132418 - DNA, 55 bp, Artificial
  Synthetic oligonucleotide
cactctactcgcagacttctgagcacgtgaacgtgttacttacacgcacagaaaa

SEQ ID NO: 132419 - DNA, 60 bp, Artificial
  Synthetic oligonucleotide
tgaacgtgttacttacacgcacagaaaaacgcattgtctggaagacgctagctggtgatc

SEQ ID NO: 132420 - DNA, 60 bp, Artificial
  Synthetic oligonucleotide
gtgttggtctgcagctctatgcttataaacacacgtagatgactgagcgcggacactgac

SEQ ID NO: 132421 - DNA, 60 bp, Artificial
  Synthetic oligonucleotide
gtgttggtctgcagctctatgcttataaacacacgtagatgactgagcgcggccactgac

SEQ ID NO: 132422 - DNA, 60 bp, Artificial
  Synthetic oligonucleotide
gtagcccgcactgacatacggctgctgaagccttctgtcaagaacatccacgtcccctac

SEQ ID NO: 132423 - DNA, 60 bp, Artificial
  Synthetic oligonucleotide
catacggctgctgaagccttctgtcaagaacatccacgtcccctacacccaagcagtatc

SEQ ID NO: 132424 - DNA, 60 bp, Artificial
  Synthetic oligonucleotide
cggctgctgaagccttctgtcaagaacatccacgtcccctacacccaagcagtatcaggg

SEQ ID NO: 132425 - DNA, 60 bp, Artificial
  Synthetic oligonucleotide
tccacaacatcttggaactggctgcttgcactgtttgggggagcatcatccctcattgtt

SEQ ID NO: 132426 - DNA, 60 bp, Artificial
  Synthetic oligonucleotide
gcgctgtttgggggagcatcatccctcattgttgtaggacttatagtgttggtctgcagc

SEQ ID NO: 132427 - DNA, 60 bp, Artificial
  Synthetic oligonucleotide
ggggagcatcatccctcattgttgtaggacttatagtgttggtctgcagctctatgctta

SEQ ID NO: 132428 - DNA, 60 bp, Artificial
  Synthetic oligonucleotide
gacttatagtgttggtctgcagctctatgcttataaacacacgtagatgactgagcgcgg

SEQ ID NO: 132429 - DNA, 60 bp, Artificial
  Synthetic oligonucleotide
gcacacagacgccacgtgtagttattttggaagtgtagcagtataccaagatgtgtacgc

SEQ ID NO: 132430 - DNA, 60 bp, Artificial
  Synthetic oligonucleotide
gcacacagacgccacgtgtaggtactttggaagtgtagcagtataccaagatgtgtacgc

SEQ ID NO: 132431 - DNA, 60 bp, Artificial
  Synthetic oligonucleotide
cggcagacctgctggaagtcatgtcaacaccggacgccgagactccatccctatgtatgc

SEQ ID NO: 132432 - DNA, 60 bp, Artificial
  Synthetic oligonucleotide
ccatgataagcgctgaagacccggacagactacaacggtatgcagaaagacttaagaaaa

SEQ ID NO: 132433 - DNA, 60 bp, Artificial
  Synthetic oligonucleotide
ccaatcaccgctatcattgtatctgccctatgataagcgctgaagacccggacagactac

SEQ ID NO: 132434 - DNA, 60 bp, Artificial
  Synthetic oligonucleotide
gcccgtcaggcatacacattccaatcaccgctatcattgtatctgccccatgataagcgc

SEQ ID NO: 132435 - DNA, 60 bp, Artificial
  Synthetic oligonucleotide
agcccaggactatacggtaaagttgagaacttggcgtccacaatgcatcgcgagggtttc

SEQ ID NO: 132436 - DNA, 60 bp, Artificial
  Synthetic oligonucleotide
cgccacgtgtaggtactttggaagtgtagcagtataccaagatgtgtacgcagtccatgc

SEQ ID NO: 132437 - DNA, 60 bp, Artificial
  Synthetic oligonucleotide
agttactcccggcacgaaacatacagaggagcggcctaaggtgcaggttattcaggctgc

SEQ ID NO: 132438 - DNA, 60 bp, Artificial
  Synthetic oligonucleotide
aagttactcccggcacgaaacatacagaggagcggcctaaggtgcaggttattcaggctg

SEQ ID NO: 132439 - DNA, 60 bp, Artificial
  Synthetic oligonucleotide
ccggcacgaaacatacagaggagcggcctaaggtgcaggttattcaggctgcagatcccc

SEQ ID NO: 132440 - DNA, 55 bp, Artificial
  Synthetic oligonucleotide
caatctaaaaccgttgcaggagataccaatggatcaattcgtcatggatctaaaa

SEQ ID NO: 132441 - DNA, 60 bp, Artificial
  Synthetic oligonucleotide
gggtccacccaaacagctctttggcaggcagacctggttactccgtcaatgagggcaagc

SEQ ID NO: 132442 - DNA, 51 bp, Artificial
  Synthetic oligonucleotide
ctaaaaccgttgcaggagataccaatggatcaattcgtcatggatctaaaa

SEQ ID NO: 132443 - DNA, 50 bp, Artificial
  Synthetic oligonucleotide
cgaatatccatactctcttcgacatgtcagcggaagattttgatgcgatt

SEQ ID NO: 132444 - DNA, 60 bp, Artificial
  Synthetic oligonucleotide
acatacagaggagcggcctaaggtgcaggttattcaggctgcggatccgcttgctactgc

SEQ ID NO: 132445 - DNA, 60 bp, Artificial
  Synthetic oligonucleotide
gcccgtcagacatgcacattccaatcaccgctatcattgtatctgccctatgataagcgc

SEQ ID NO: 132446 - DNA, 60 bp, Artificial
  Synthetic oligonucleotide
gcccgtcagacatgcacattccaatcaccgctatcattgtatctgccccatgataagcgc

SEQ ID NO: 132447 - DNA, 60 bp, Artificial
  Synthetic oligonucleotide
ccaatgccagagcattttcgcatgtggcaacaaagctcattgagagcgaagtcgaccggg

SEQ ID NO: 132448 - DNA, 60 bp, Artificial
  Synthetic oligonucleotide
ccaatgccagagcgttttcgcatgtggcaacaaagctcattgagagcgaagtcgaccggg

SEQ ID NO: 132449 - DNA, 60 bp, Artificial
  Synthetic oligonucleotide
tgcgcccgtcagacatgcacattccaatcaccgctatcattgtatctgccctatgataag

SEQ ID NO: 132450 - DNA, 60 bp, Artificial
  Synthetic oligonucleotide
acgcagatgcaggttagtgatcacccagcactccacgcaatttcgcggtatacccgccgc

SEQ ID NO: 132451 - DNA, 60 bp, Artificial
  Synthetic oligonucleotide
taccgctgcccagaagcgggccatcgtagctgtgatacccagacctgtgttcacgcagat

SEQ ID NO: 132452 - DNA, 60 bp, Artificial
  Synthetic oligonucleotide
cctgagcgactggcaccagggcactcatgtctgtcacaccaagcacatggacttctggtg

SEQ ID NO: 132453 - DNA, 60 bp, Artificial
  Synthetic oligonucleotide
tggcgtccgctttgagtccaagatcgtggacggcggctgctttgccccatgggacctcga

SEQ ID NO: 132454 - DNA, 60 bp, Artificial
  Synthetic oligonucleotide
cctaaagtcagatgctgcggctccttggaatgtcagcccgccgctcacgcagactatacc

SEQ ID NO: 132455 - DNA, 60 bp, Artificial
  Synthetic oligonucleotide
ccccgtgtgcacgtatatcccggccaccatatgcgatcagatgaccggcataatggccac

SEQ ID NO: 132456 - DNA, 60 bp, Artificial
  Synthetic oligonucleotide
ctgtgtgcacgtatatcccggccaccatatgcgatcagatgaccggcataatggccacgg

SEQ ID NO: 132457 - DNA, 60 bp, Artificial
  Synthetic oligonucleotide
tacgctgccactatgcaccgcgagggattcttgtgctgcaaggtgacggacacgctgaac

SEQ ID NO: 132458 - DNA, 60 bp, Artificial
  Synthetic oligonucleotide
agttagttgcgacgggtacgtcgtaaagagaatagctattagtccaggcctgtatgggaa

SEQ ID NO: 132459 - DNA, 60 bp, Artificial
  Synthetic oligonucleotide
ttcggacacagcgacgcggcctgctggggcttccccaccgacaccgtgatgagcgtgttc

SEQ ID NO: 132460 - DNA, 58 bp, Artificial
  Synthetic oligonucleotide
aactaagtataggaaccatcactttcagcagtgcgaagaccatgcggcgactctaaaa

SEQ ID NO: 132461 - DNA, 60 bp, Artificial
  Synthetic oligonucleotide
tcactttcagcagtgcgaagaccatgcggcgaccttgaaaaccctctcgcgttcggccct

SEQ ID NO: 132462 - DNA, 60 bp, Artificial
  Synthetic oligonucleotide
agccgtaattattataatcggccttgtgttagcaactgttgttgctatgtacgtgctgac

SEQ ID NO: 132463 - DNA, 60 bp, Artificial
  Synthetic oligonucleotide
catcagtctccaattagacacagaccacctgacactgctcaccaccaggagactaggggc

SEQ ID NO: 132464 - DNA, 60 bp, Artificial
  Synthetic oligonucleotide
acattagcctccaactggatacggaccacctgacactgctcaccaccaggagactaggag

SEQ ID NO: 132465 - DNA, 60 bp, Artificial
  Synthetic oligonucleotide
ccttgggcgccgcagcgtacgaacacacagccgtgatgccgaacaaggtggggatccctt

SEQ ID NO: 132466 - DNA, 60 bp, Artificial
  Synthetic oligonucleotide
gcgacgtgctgcccggccactggctccaaggcggctggggttgctacaacctgagcgact

SEQ ID NO: 132467 - DNA, 57 bp, Artificial
  Synthetic oligonucleotide
ggagtccttcaagaacagtgcaacaccagtgggaaccgcaaagacagtcatgtgcgg

SEQ ID NO: 132468 - DNA, 53 bp, Artificial
  Synthetic oligonucleotide
gtcggtgtgagactatagttagctgcgacgggtacgtcgtcaaaaggatagct

SEQ ID NO: 132469 - DNA, 60 bp, Artificial
  Synthetic oligonucleotide
aggggtcagagtcgcctattggataggattcgacactaccccttttatgtttaagaacct

SEQ ID NO: 132470 - DNA, 60 bp, Artificial
  Synthetic oligonucleotide
gtcggctgatctgcgggctgtccaccaccgcccagtacccgcccacccggttcggctgcg

SEQ ID NO: 132471 - DNA, 60 bp, Artificial
  Synthetic oligonucleotide
atgcggtcggctgatctgcgggctgtccaccaccgcccagtacccgcccacccgcttcgg

SEQ ID NO: 132472 - DNA, 54 bp, Artificial
  Synthetic oligonucleotide
aaaagggacctggtggtcagcgcaaagaaggaaaattgcgcagaaatcatccgg

SEQ ID NO: 132473 - DNA, 60 bp, Artificial
  Synthetic oligonucleotide
agagaccacgtccgatcaattgtcgagggcgcgtgggaagtgcgcgatgttgttaccgct

SEQ ID NO: 132474 - DNA, 60 bp, Artificial
  Synthetic oligonucleotide
agagaccatgtccgctcaattgtcgagggcgcgtgggaagtgcgcgatgttgttaccgct

SEQ ID NO: 132475 - DNA, 60 bp, Artificial
  Synthetic oligonucleotide
taagagaccacgtccgctcaattgtcgagggcgcgtgggaagtgcgcgatgttgttaccg

SEQ ID NO: 132476 - DNA, 60 bp, Artificial
  Synthetic oligonucleotide
cacggagatcaagttctagaaacggacatagcgtccttcgataaaagcgaagacgatgcg

SEQ ID NO: 132477 - DNA, 60 bp, Artificial
  Synthetic oligonucleotide
ccagccgcctatatgctacgaccgcaaaccgtcagaaactcttgccatgcttagcgagaa

SEQ ID NO: 132478 - DNA, 60 bp, Artificial
  Synthetic oligonucleotide
ggcatcaaggccggaacagatcacggtgtgctcatcgttcccgttgccgaagtacagaat

SEQ ID NO: 132479 - DNA, 60 bp, Artificial
  Synthetic oligonucleotide
gttcaaccagtgcacgcagaccaacaggtgtcgcgcctaccgactgcagagtgacaaatg

SEQ ID NO: 132480 - DNA, 60 bp, Artificial
  Synthetic oligonucleotide
cgagcgctgtttgaggaggcagagaggtggaaccgggctggcatttccgtagaactttgc

SEQ ID NO: 132481 - DNA, 60 bp, Artificial
  Synthetic oligonucleotide
cacagtgcccctggcgccagagccggtagtgtcgttcggattcaggtcggtgtctttaaa

SEQ ID NO: 132482 - DNA, 60 bp, Artificial
  Synthetic oligonucleotide
attcgtgtggggtaaccacccgccgcaaaggttctgggctcaggagacagcgcctggaaa

SEQ ID NO: 132483 - DNA, 60 bp, Artificial
  Synthetic oligonucleotide
ggcaaattgttcagaccgatgcatgttgaaggaaagattgataacgagacgttggcagcc

SEQ ID NO: 132484 - DNA, 60 bp, Artificial
  Synthetic oligonucleotide
acgatgccgagccaagtgggaatcccgtttaacaccatcgtgaatagggccgggtacgca

SEQ ID NO: 132485 - DNA, 60 bp, Artificial
  Synthetic oligonucleotide
gaattacttactaccagtagtggctcaggcattcgccaggtgggcaagagagtacaagga

SEQ ID NO: 132486 - DNA, 60 bp, Artificial
  Synthetic oligonucleotide
cgcccctgactgctgacgttgaagaaccgacgctcgaagcagatgttgacctcatgttgc

SEQ ID NO: 132487 - DNA, 60 bp, Artificial
  Synthetic oligonucleotide
gctgggctaaagctcttgtccctgtgctgaaaacagccggaatttccttgacggcagacc

SEQ ID NO: 132488 - DNA, 60 bp, Artificial
  Synthetic oligonucleotide
cgtgcttaacaccttacagattgaccccgaacgcacgccttcccatctgtctggcattgc

SEQ ID NO: 132489 - DNA, 60 bp, Artificial
  Synthetic oligonucleotide
tggccaggtccatggccaacctaacattcaagcagcgccgggagagtccgcccgaaggcc

SEQ ID NO: 132490 - DNA, 60 bp, Artificial
  Synthetic oligonucleotide
cgcaaggactaacccggaagggcgtctatgccgtcaggtacaaggtcaatgagaacccgc

SEQ ID NO: 132491 - DNA, 60 bp, Artificial
  Synthetic oligonucleotide
gcccgttccttcgagctttacagcggagcttcccacagtttgaggtagaagccaagcagg

SEQ ID NO: 132492 - DNA, 60 bp, Artificial
  Synthetic oligonucleotide
gacggtatgaagcgggtgcgtacatcttttcctccgatacaggccaaggacatttgcaac

SEQ ID NO: 132493 - DNA, 60 bp, Artificial
  Synthetic oligonucleotide
ctcatccacctggtctatcccacacgcttccgatttcgatgcggacagcatctccttggc

SEQ ID NO: 132494 - DNA, 60 bp, Artificial
  Synthetic oligonucleotide
gacctcgcaaaactaggagttctagtgcgtcactgtcgccaccgattcacgctcgtaggc

SEQ ID NO: 132495 - DNA, 60 bp, Artificial
  Synthetic oligonucleotide
gcaaaggcgattgtcatccgcccaaagatcatattgtcacgcacccacagtaccacgccc

SEQ ID NO: 132496 - DNA, 60 bp, Artificial
  Synthetic oligonucleotide
gtacagtccgcaaccatgttcccttaccaaccatccatgtacccaatgcaacctgcgccg

SEQ ID NO: 132497 - DNA, 60 bp, Artificial
  Synthetic oligonucleotide
ctgccagtgctggactccgcggcctttaatgtagagtgtttcaagaagtatgcctgcaac

SEQ ID NO: 132498 - DNA, 60 bp, Artificial
  Synthetic oligonucleotide
cttatgcagtcattaaaccacctcctcactgccatggatacgaccgacgcggatgtcgct

SEQ ID NO: 132499 - DNA, 60 bp, Artificial
  Synthetic oligonucleotide
ggtgccgttcaacccaagaatcaaccggccagtaagaagaaacctaataagaaacccgga

SEQ ID NO: 132500 - DNA, 60 bp, Artificial
  Synthetic oligonucleotide
caggttcacggtcccaaaaggagtaggcgctaaaggagatagtggccgacctatactaga

SEQ ID NO: 132501 - DNA, 60 bp, Artificial
  Synthetic oligonucleotide
gccacagccctatagccatagaagaggtgagaagtgacggacatgatggctacatacgca

SEQ ID NO: 132502 - DNA, 60 bp, Artificial
  Synthetic oligonucleotide
cgctaacaaacatctattcgggctccaactttcatgaagcggggtgtgctccctcatacc

SEQ ID NO: 132503 - DNA, 60 bp, Artificial
  Synthetic oligonucleotide
gacggccacggctacttcctcttagctagatgccctgaaggggactcattgaccatggag

SEQ ID NO: 132504 - DNA, 60 bp, Artificial
  Synthetic oligonucleotide
ctcaggcgtataaagcacacacagctgcagcacaggcctttctcaacattacggtcgcag

SEQ ID NO: 132505 - DNA, 60 bp, Artificial
  Synthetic oligonucleotide
gagcaggtaccgcaggagctttcggcgacatccaagctagaacaactaccagcacagacc

SEQ ID NO: 132506 - DNA, 60 bp, Artificial
  Synthetic oligonucleotide
gggcacatgcgtcagcgtgggatacggatatgcagaccgagccagtgaaagcataatagg

SEQ ID NO: 132507 - DNA, 60 bp, Artificial
  Synthetic oligonucleotide
agtgcgtgaagaaagaactggttagcggtctagggatgacgggtgaactcattgaacccc

SEQ ID NO: 132508 - DNA, 60 bp, Artificial
  Synthetic oligonucleotide
ccttgattgcgattgtcaagcccaagaaagccgtgttgtgcggggaccctaagcaatgtg

SEQ ID NO: 132509 - DNA, 60 bp, Artificial
  Synthetic oligonucleotide
acagggcgagcgctggatatgaactcgggtgcgttgcgcgcctacgatccccggataaac

SEQ ID NO: 132510 - DNA, 60 bp, Artificial
  Synthetic oligonucleotide
ggtgggctctactatctatcacgaaaagagggacctactgcggagctggcacttaccatc

SEQ ID NO: 132511 - DNA, 60 bp, Artificial
  Synthetic oligonucleotide
gcagtgtgaaccgatcgttttcatgccctaaagtggccgtagaagcctgcaacgtggtgc

SEQ ID NO: 132512 - DNA, 60 bp, Artificial
  Synthetic oligonucleotide
caggtctctttgcagatcgggataaagacagatgacagccacgattggaccaagctgcgc

SEQ ID NO: 132513 - DNA, 60 bp, Artificial
  Synthetic oligonucleotide
ggctaagaacataggattatgttcaacagacctgacggaaggtagacgaggcaagttgtc

SEQ ID NO: 132514 - DNA, 50 bp, Artificial
  Synthetic oligonucleotide
tgtatttctgaggaagcatggtgcataatgccatgcagcgtctgcataac

SEQ ID NO: 132515 - DNA, 60 bp, Artificial
  Synthetic oligonucleotide
tattggaactaaatacagaaaccatcactttcagcagtgcgaagaccatgcggcgacctt

SEQ ID NO: 132516 - DNA, 60 bp, Artificial
  Synthetic oligonucleotide
ttcagctacctgagaggggcccctataactctctacggctaacctgaatggactacgaca

SEQ ID NO: 132517 - DNA, 60 bp, Artificial
  Synthetic oligonucleotide
ctagctagcagtgttaaatcattcagctacctgagaggggcccctataactctctacggc

SEQ ID NO: 132518 - DNA, 60 bp, Artificial
  Synthetic oligonucleotide
ccaggagggtggagaacatgaaagccataacagctagacgtattctgcaaggcctagggc

SEQ ID NO: 132519 - DNA, 60 bp, Artificial
  Synthetic oligonucleotide
ccaggaaggtggagaacatgaaagccataacagctagacgtattctgcaaggcctagggc

SEQ ID NO: 132520 - DNA, 60 bp, Artificial
  Synthetic oligonucleotide
cagtccaggagggtggagaacatgaaagccataacagctagacgtattctgcaaggccta

SEQ ID NO: 132521 - DNA, 60 bp, Artificial
  Synthetic oligonucleotide
cccagatgcagctttcaccagggtcactgacgctccttccatcacagacatgtcctgcga

SEQ ID NO: 132522 - DNA, 60 bp, Artificial
  Synthetic oligonucleotide
acacgtgcatgcacccgttccgccacgagccaccgctgatagggagagagaagtttcact

SEQ ID NO: 132523 - DNA, 60 bp, Artificial
  Synthetic oligonucleotide
gaaacgccgaggaagcagcccaggctgaaacagatgcggtagaagaacaggaggcagagc

SEQ ID NO: 132524 - DNA, 60 bp, Artificial
  Synthetic oligonucleotide
gaaacaccgagggtcccatcttaccgagtcacatacccggcgcccatctactcgccttca

SEQ ID NO: 132525 - DNA, 60 bp, Artificial
  Synthetic oligonucleotide
gagcgggctgtgccccgtcataccgagtgaaacggatggacatcgcaaagaacactgagg

SEQ ID NO: 132526 - DNA, 60 bp, Artificial
  Synthetic oligonucleotide
cccgtgttccagcgcatgctgtcctactgcaagaccctgagccccgacgcgtactacagc

SEQ ID NO: 132527 - DNA, 60 bp, Artificial
  Synthetic oligonucleotide
ccgccccgtgttccagcgcatgctgtcctactgcaagaccctgagcccagacgcgtacta

SEQ ID NO: 132528 - DNA, 60 bp, Artificial
  Synthetic oligonucleotide
tgagcctgcacatctgccaccccgaccgcgccacgctgacgcacgcctctgtgctcgtcg

SEQ ID NO: 132529 - DNA, 60 bp, Artificial
  Synthetic oligonucleotide
cccttcctcagagcattacaacggagcttcccgcagtttgaggtagaagccaagcaggtc

SEQ ID NO: 132530 - DNA, 60 bp, Artificial
  Synthetic oligonucleotide
cccttcctcagagcattacaacggagtttcccgcagtttgaggtagaagccaagcaggtc

SEQ ID NO: 132531 - DNA, 60 bp, Artificial
  Synthetic oligonucleotide
acgtggccttggcgctcacacgcgacctcgccatcgtcagcctgacccgggcctccgacg

SEQ ID NO: 132532 - DNA, 53 bp, Artificial
  Synthetic oligonucleotide
tcgcttaggactcctatccccatggagaaactcctagatgaggttcttgcccc

SEQ ID NO: 132533 - DNA, 60 bp, Artificial
  Synthetic oligonucleotide
tcggacctcgcttaggactcctatccccatggagaaactcctagatgaggttcttgcccc

SEQ ID NO: 132534 - DNA, 60 bp, Artificial
  Synthetic oligonucleotide
cctgtacgggaaaccgtcgggctatgctgccactatgcaccgcgagggattcttgtgctg

SEQ ID NO: 132535 - DNA, 60 bp, Artificial
  Synthetic oligonucleotide
cacgtagcctaccagtttcttactgctctactctgcaaagcaagagattaataacccatc

SEQ ID NO: 132536 - DNA, 60 bp, Artificial
  Synthetic oligonucleotide
gtagcctaccagtttcttactgctctactctgcaaagcaagagattaataacccatcatg

SEQ ID NO: 132537 - DNA, 60 bp, Artificial
  Synthetic oligonucleotide
catccgccatgtgcgcagcctccaacccagcgcgcgggtccgactcccggaccttgtcca

SEQ ID NO: 132538 - DNA, 60 bp, Artificial
  Synthetic oligonucleotide
cgttgctcaacagcaatgacggtatgatgcgggtgcatacatcttttcctccgataccgg

SEQ ID NO: 132539 - DNA, 60 bp, Artificial
  Synthetic oligonucleotide
tgtctgatagaaaataccactgcgtctgcccgatgcgcagcgcagaagaccctgagaggc

SEQ ID NO: 132540 - DNA, 60 bp, Artificial
  Synthetic oligonucleotide
ccccagtttgaggtagaagccaagcaggtcacagacaatgaccatgctaatgctagagcg

SEQ ID NO: 132541 - DNA, 60 bp, Artificial
  Synthetic oligonucleotide
ccacagtttgaggtagaagccaagcaggtcacagacaacgaccatgctaatgctagagcg

SEQ ID NO: 132542 - DNA, 60 bp, Artificial
  Synthetic oligonucleotide
ccgcagtttgaggtagaagccaagcaggtcactgataatgaccatgctaatgccagagcg

SEQ ID NO: 132543 - DNA, 60 bp, Artificial
  Synthetic oligonucleotide
ccgcagtttgaggtagaagccaagcaggtcacggataatgaccatgctaatgctagagcg

SEQ ID NO: 132544 - DNA, 60 bp, Artificial
  Synthetic oligonucleotide
tgatgcgtaccattgacgccaccttgctcgtggcggttgacttgtggccggtcgcccttg

SEQ ID NO: 132545 - DNA, 60 bp, Artificial
  Synthetic oligonucleotide
gctgatgcgcaccattgacgccaccttgctcgtggcggttgacttgtggccggtcgccct

SEQ ID NO: 132546 - DNA, 60 bp, Artificial
  Synthetic oligonucleotide
atcgtcagcctgacccgggcctccgacgccctctacctccacgagctcgaggacggctca

SEQ ID NO: 132547 - DNA, 60 bp, Artificial
  Synthetic oligonucleotide
tgatgcgcaccattgacgccaccttgctcgtggcggttgacttgtggccggtcgcccttg

SEQ ID NO: 132548 - DNA, 60 bp, Artificial
  Synthetic oligonucleotide
ggcctgtatgggaagccttcaggctatgctgctacgatgcaccgcgagggattcttgtgc

SEQ ID NO: 132549 - DNA, 60 bp, Artificial
  Synthetic oligonucleotide
caacaacaatgacggtttgacgcgggtgcatacatcttttcctccgataccggtcaaggg

SEQ ID NO: 132550 - DNA, 60 bp, Artificial
  Synthetic oligonucleotide
caacagcaatgacggtttgacgcgggtgcatacatcttttcctccgataccggtcaaggg

SEQ ID NO: 132551 - DNA, 60 bp, Artificial
  Synthetic oligonucleotide
ggcagctgccacgaaaagaaattgcaacgtcacgcaaatgagagaattgcccgtattgga

SEQ ID NO: 132552 - DNA, 58 bp, Artificial
  Synthetic oligonucleotide
tcatcattggcctcgtattggcgactctagtggccatgtatgtgctgaccaaccaaaa

SEQ ID NO: 132553 - DNA, 60 bp, Artificial
  Synthetic oligonucleotide
gcgcattcgagcacgcgaccacgatgccgaatcaggtggggatgccgtttaacactatcg

SEQ ID NO: 132554 - DNA, 60 bp, Artificial
  Synthetic oligonucleotide
cggcgtagtacacactattgaatcaaacagccgaccaacagcactaccatcataatggag

SEQ ID NO: 132555 - DNA, 60 bp, Artificial
  Synthetic oligonucleotide
attgacggcgtagtacacactattgaatcaaacagccgaccaacagcactaccatcataa

SEQ ID NO: 132556 - DNA, 60 bp, Artificial
  Synthetic oligonucleotide
gaggtcaccccataaccctctacggctgacctaaataggttgtgcattagtatctaacct

SEQ ID NO: 132557 - DNA, 60 bp, Artificial
  Synthetic oligonucleotide
gaggtcaccccataaccctctacggctgacctaaataggttgtgcattagtacctaacct

SEQ ID NO: 132558 - DNA, 60 bp, Artificial
  Synthetic oligonucleotide
ctacacatgtcggtgtgagactatagttagttgcgacgggtacgttgtcaaaaggatagc

SEQ ID NO: 132559 - DNA, 60 bp, Artificial
  Synthetic oligonucleotide
atccaggcggcggacccattggctacggcttacctgtgcggaatccatcgagagctagtg

SEQ ID NO: 132560 - DNA, 60 bp, Artificial
  Synthetic oligonucleotide
cccgaggaccgaccccttcttagctatgcaggtgcaggagttggcccggtcgatggcgaa

SEQ ID NO: 132561 - DNA, 60 bp, Artificial
  Synthetic oligonucleotide
ctccatgagtggtagcgctgtccgggtaacaccaccgtctgggcagaacgtgcttgtaga

SEQ ID NO: 132562 - DNA, 60 bp, Artificial
  Synthetic oligonucleotide
tgcaatggcgttgactgctctgatgatattggaggatttgggcgtagatccagagctgct

SEQ ID NO: 132563 - DNA, 60 bp, Artificial
  Synthetic oligonucleotide
cacgtgccctaccttctgtctgatgcgaagtgcactgtgccactggcaccggaaccaata

SEQ ID NO: 132564 - DNA, 60 bp, Artificial
  Synthetic oligonucleotide
ccggtgaagacaagatcggctcctatgcggtactttcaccccaggctgtccttcggagtg

SEQ ID NO: 132565 - DNA, 60 bp, Artificial
  Synthetic oligonucleotide
gtatcctgttcccgagtattctgcaagcgtcaaccaagtcttttctagtccgcgcgtggc

SEQ ID NO: 132566 - DNA, 60 bp, Artificial
  Synthetic oligonucleotide
gatgatgaaagaccgctgggattgagggacagacaacttgtgatgggttgctgctgggcg

SEQ ID NO: 132567 - DNA, 60 bp, Artificial
  Synthetic oligonucleotide
gcagtgcggagtgatgggcacgacggctacattaggttacagacatcatctcagtacggt

SEQ ID NO: 132568 - DNA, 60 bp, Artificial
  Synthetic oligonucleotide
tgcgaaccaccaacccaaaggagaccaaaatcgaaattgacactaccggaagtactaagc

SEQ ID NO: 132569 - DNA, 60 bp, Artificial
  Synthetic oligonucleotide
cacgttgacatcgaggaggacagccccttcctcagagcactacaacggagctttccgcag

SEQ ID NO: 132570 - DNA, 60 bp, Artificial
  Synthetic oligonucleotide
gaatggctgtaaacacccagttgacacgctgtacattgatgaggccttcgcatgtcacgc

SEQ ID NO: 132571 - DNA, 60 bp, Artificial
  Synthetic oligonucleotide
gagccatcaaccgccgccacacctgcagcagatagtcagacagaggagaccatgagcata

SEQ ID NO: 132572 - DNA, 60 bp, Artificial
  Synthetic oligonucleotide
gtggggccgaattttaacaaggtatcagagctggaaggggacaaacaattggccgaagct

SEQ ID NO: 132573 - DNA, 60 bp, Artificial
  Synthetic oligonucleotide
aatcaccaaaacctcgcagacggcgccgtcgatctaaagccagcacgagttctacggccc

SEQ ID NO: 132574 - DNA, 60 bp, Artificial
  Synthetic oligonucleotide
gtcaagtacacagcgagtaaatcaggcaaatgtgcagtacatattccctcaggcacggcg

SEQ ID NO: 132575 - DNA, 60 bp, Artificial
  Synthetic oligonucleotide
aaccatccgccccaacggtattgggcacaagaaacagctccaggtaacccacacgggctg

SEQ ID NO: 132576 - DNA, 60 bp, Artificial
  Synthetic oligonucleotide
gccggagcattcggagatcttcaagccagaacgacaaccagcaatgacctgtatgccaac

SEQ ID NO: 132577 - DNA, 60 bp, Artificial
  Synthetic oligonucleotide
accaccttgtgcctcctcgcgaacgtcacattcccttgctccacacccccgatttgctac

SEQ ID NO: 132578 - DNA, 60 bp, Artificial
  Synthetic oligonucleotide
ggccgatagatgtgctacctggctgaacatggaagtcaagatcatcgatgccgtagtagg

SEQ ID NO: 132579 - DNA, 60 bp, Artificial
  Synthetic oligonucleotide
tggtggagcctccgttccacgaattcgcgtatgagagcctaaggactagaccggcagctc

SEQ ID NO: 132580 - DNA, 60 bp, Artificial
  Synthetic oligonucleotide
gcttcgacaccacccagtacattgccatgcctatgcatccattccatgacacccgaacga

SEQ ID NO: 132581 - DNA, 60 bp, Artificial
  Synthetic oligonucleotide
ggcggggcgcagaggctttagtacgaccgatgggaagacattctcataccttgaggggac

SEQ ID NO: 132582 - DNA, 60 bp, Artificial
  Synthetic oligonucleotide
gcgcagctttccgaaacgacacgcctatctggagccaactattcgttctgcagtaccatc

SEQ ID NO: 132583 - DNA, 60 bp, Artificial
  Synthetic oligonucleotide
tatgacccgcgtgtcaatctagtgcccgtcaatcgcaagctgccgcacgcgctggttaca

SEQ ID NO: 132584 - DNA, 60 bp, Artificial
  Synthetic oligonucleotide
cgattcttcggactggatttggactcaggtttgttctccgcacccaccgtaccactgtca

SEQ ID NO: 132585 - DNA, 60 bp, Artificial
  Synthetic oligonucleotide
gcttgcagcggtcatggaggacccggatctagagcaggaaaccatttgtttgcatgatga

SEQ ID NO: 132586 - DNA, 60 bp, Artificial
  Synthetic oligonucleotide
ccgaggtagtacttgaacggacagagttagagcattcgtacgccccgcgcctcgacctag

SEQ ID NO: 132587 - DNA, 60 bp, Artificial
  Synthetic oligonucleotide
gggccagtgaaagcatcatcggggctatcgcacggcagtttaagttttctagagtgtgta

SEQ ID NO: 132588 - DNA, 60 bp, Artificial
  Synthetic oligonucleotide
gtggggcggcgcatactgcttctgtgactctgaaaacacccaactcagccgcgcgtatgt

SEQ ID NO: 132589 - DNA, 60 bp, Artificial
  Synthetic oligonucleotide
ccactagccgcgcttattgtgttgacccgcctactgaagtgtctgtgttgcgtagttcct

SEQ ID NO: 132590 - DNA, 60 bp, Artificial
  Synthetic oligonucleotide
ggtggaaccatccgatacgatcctagacattggaagtgcgcctgcccgcagaatgtattc

SEQ ID NO: 132591 - DNA, 60 bp, Artificial
  Synthetic oligonucleotide
ccataaggtagaattcagaccagttgggagagaaaagtatcggcatccacccgcgcatgg

SEQ ID NO: 132592 - DNA, 60 bp, Artificial
  Synthetic oligonucleotide
tttctatctgacatacgtccgattccagcgccacgtcgacggagggagccggagactgac

SEQ ID NO: 132593 - DNA, 60 bp, Artificial
  Synthetic oligonucleotide
gggctcaaccagcgaatcgtcgtcaacggaagaacacaacgtaacactaatacaatgcca

SEQ ID NO: 132594 - DNA, 60 bp, Artificial
  Synthetic oligonucleotide
gagcgctctgtccatgagaagttctacgccccgcgcctcgacctggaacgtgagaaattg

SEQ ID NO: 132595 - DNA, 55 bp, Artificial
  Synthetic oligonucleotide
agtcatcacagccttgtccacccttgcagccacggtcagcaacttcaagcacata

SEQ ID NO: 132596 - DNA, 60 bp, Artificial
  Synthetic oligonucleotide
gccgtgtattgcgagagaggcttaccaattcgccatgcgctgcgttcatcggcgatgata

SEQ ID NO: 132597 - DNA, 60 bp, Artificial
  Synthetic oligonucleotide
ttgttctaattgcggccacggtagatgtgacagtccaattgccatcgaggacgtgcgcgg

SEQ ID NO: 132598 - DNA, 60 bp, Artificial
  Synthetic oligonucleotide
gcgtagcttcccgaagaaacatagctatttgaagcccgagatacgatcggccgtcccctc

SEQ ID NO: 132599 - DNA, 60 bp, Artificial
  Synthetic oligonucleotide
caggaaagccgtcgaccacttgaacaaaggaggcacctgcgttgcactgggttatggcac

SEQ ID NO: 132600 - DNA, 60 bp, Artificial
  Synthetic oligonucleotide
ggaggaatggcaggctgagcatgacgccatcatgaagcgagtgttagaaactcccgccaa

SEQ ID NO: 132601 - DNA, 60 bp, Artificial
  Synthetic oligonucleotide
gaggcagggccaatgtgccttgttggtgatctagtggaccctccgttccatgagttcgcg

SEQ ID NO: 132602 - DNA, 60 bp, Artificial
  Synthetic oligonucleotide
gggaagacgagtttcacgggcagatgcaataccatcgtcagctgtgagggttacgttgta

SEQ ID NO: 132603 - DNA, 60 bp, Artificial
  Synthetic oligonucleotide
gttatgtgcgttttagccaacatcaccttcccgtgcgatcagccgccttgcatgccgtgc

SEQ ID NO: 132604 - DNA, 60 bp, Artificial
  Synthetic oligonucleotide
gcgaccggcacagcacatttagtaaagcatacacccaatattatccacgcggtagggccg

SEQ ID NO: 132605 - DNA, 60 bp, Artificial
  Synthetic oligonucleotide
ggggtgggttaagcagctgcaaattgactataagaaccacgaaatcatgactgctgccgc

SEQ ID NO: 132606 - DNA, 60 bp, Artificial
  Synthetic oligonucleotide
tcacatccgtatggctcctgtgccgcacccgcaacctgtgcatcactccatacagactgg

SEQ ID NO: 132607 - DNA, 60 bp, Artificial
  Synthetic oligonucleotide
ggtggggatcccttacaaagcactggttgaacgccccggatacgcgccagttcaccttca

SEQ ID NO: 132608 - DNA, 60 bp, Artificial
  Synthetic oligonucleotide
cgaagccgatgtggcccaccttaaaggtatgcaagaagaagcggaggtagtggctgaagc

SEQ ID NO: 132609 - DNA, 60 bp, Artificial
  Synthetic oligonucleotide
ccgccaatgccgtttgtcgtagaggcagaggttcatgctagtcaaggttcgcaatggagc

SEQ ID NO: 132610 - DNA, 60 bp, Artificial
  Synthetic oligonucleotide
cagctccaccggtacccgtgcctgcacgtattccaagcccacgctgttcgcctgcagtta

SEQ ID NO: 132611 - DNA, 60 bp, Artificial
  Synthetic oligonucleotide
ggagtccgacaaaaccttccccatcttgctgaatgggcaggtgaatggatacgcgtgcgt

SEQ ID NO: 132612 - DNA, 60 bp, Artificial
  Synthetic oligonucleotide
atttgaggcgctctattgcgaacctcaccttcaaacaacgggctccgaatccaccggcgg

SEQ ID NO: 132613 - DNA, 60 bp, Artificial
  Synthetic oligonucleotide
gccggttcctttggagacctgcaatcccggacccttacaagcaacgacctgtacgccaac

SEQ ID NO: 132614 - DNA, 60 bp, Artificial
  Synthetic oligonucleotide
cctacacccagaacatccaacgctgctgacgaccagagcactcggaaatgatgccagacc

SEQ ID NO: 132615 - DNA, 60 bp, Artificial
  Synthetic oligonucleotide
gcgtgacgtcaaagtgaccccagggaccaaacacactgaggaacggccaaaagtacaagt

SEQ ID NO: 132616 - DNA, 60 bp, Artificial
  Synthetic oligonucleotide
ggatgccattgcccgaaaagaaagtgttgaagagctcgtggaggacgacaaaccggtgga

SEQ ID NO: 132617 - DNA, 60 bp, Artificial
  Synthetic oligonucleotide
acgttggcagacagcggttcatttacattccatttctccacggccagtattcacccggcg

SEQ ID NO: 132618 - DNA, 60 bp, Artificial
  Synthetic oligonucleotide
cagccctggtccaaacaggtacggtctatgtatgcgcactgccaaggaactagcgcgacg

SEQ ID NO: 132619 - DNA, 60 bp, Artificial
  Synthetic oligonucleotide
cacgtagacttagacgctgacagcccatacgtcaagtcgttgcaaaagtgctttccgcat

SEQ ID NO: 132620 - DNA, 60 bp, Artificial
  Synthetic oligonucleotide
gccgcgtcattgtccctagtggtaccgctattccaattccggactttcaagcgttgagcg

SEQ ID NO: 132621 - DNA, 60 bp, Artificial
  Synthetic oligonucleotide
ccggatgtagaaaccccgtcattatgcatgcacacagactccacttgtaggtaccatggt

SEQ ID NO: 132622 - DNA, 60 bp, Artificial
  Synthetic oligonucleotide
cgatgaggcgttcgcatgccacgctgggacgctgcttgcacttattgccattgtgaaacc

SEQ ID NO: 132623 - DNA, 60 bp, Artificial
  Synthetic oligonucleotide
ataccagtccaggaaggtggagaacatgaaagccataacagctagacgtattctgcaagg

SEQ ID NO: 132624 - DNA, 60 bp, Artificial
  Synthetic oligonucleotide
tgtggggccaatgtcttcagcctggacaccttttgacaacaaaatcgtggtgtacaaagg

SEQ ID NO: 132625 - DNA, 60 bp, Artificial
  Synthetic oligonucleotide
gcaacgtgcgtaccccatgtttgaggtggaacctaggcaggtcacatcgaatgaccatgc

SEQ ID NO: 132626 - DNA, 60 bp, Artificial
  Synthetic oligonucleotide
aaacaattgcaaattgactatcgtggacacgaggtcatgacagcagccgcatcccaaggg

SEQ ID NO: 132627 - DNA, 60 bp, Artificial
  Synthetic oligonucleotide
aaacaactgcaaattgactatcgtggacacgaggtcatgacagcagccgcatcccaaggg

SEQ ID NO: 132628 - DNA, 60 bp, Artificial
  Synthetic oligonucleotide
gcggcttcttcaatatgatgcagatgaaagttaactacaaccataacatctgcacccaag

SEQ ID NO: 132629 - DNA, 60 bp, Artificial
  Synthetic oligonucleotide
ggtgacccgaagcagtgcggcttcttcaatatgatgcagatgaaagtcaactataatcac

SEQ ID NO: 132630 - DNA, 58 bp, Artificial
  Synthetic oligonucleotide
ttttagccgtaatgagcatcggtgcccacactgtgagcgcgtacgaacacgtaacagt

SEQ ID NO: 132631 - DNA, 58 bp, Artificial
  Synthetic oligonucleotide
ttttagccgtaatgagcgtcggtgcccacactgtgagcgcgtacgaacacgtaacagt

SEQ ID NO: 132632 - DNA, 60 bp, Artificial
  Synthetic oligonucleotide
ggagtcctttaagaacagtgcaacaccagtgggaaccgcaaaaacagttatgtgcggtac

SEQ ID NO: 132633 - DNA, 59 bp, Artificial
  Synthetic oligonucleotide
aaacaactgcaaattgactatcgtggacacgaggtcatgacagcagccgcatcccaagg

SEQ ID NO: 132634 - DNA, 60 bp, Artificial
  Synthetic oligonucleotide
cgaacacggtgggagtaccgtataagactctaatcaatagaccgggctacagtcccatgg

SEQ ID NO: 132635 - DNA, 56 bp, Artificial
  Synthetic oligonucleotide
ttagccgtaatgagcgtcggtgcccacactgtgagcgcgtacgaacacgtaacagt

SEQ ID NO: 132636 - DNA, 60 bp, Artificial
  Synthetic oligonucleotide
gatgagcaggtactgaaggctaagaacataggattatgttcaacagacctgacggaaggt

SEQ ID NO: 132637 - DNA, 60 bp, Artificial
  Synthetic oligonucleotide
ggatgagcaggtactgaaggctaagaacataggattatgttcaacagacctgacggaagg

SEQ ID NO: 132638 - DNA, 60 bp, Artificial
  Synthetic oligonucleotide
gggcagatgagcaggtgctgaaggcaaagaacataggattatgttcaacagacctgacgg

SEQ ID NO: 132639 - DNA, 60 bp, Artificial
  Synthetic oligonucleotide
atgctagagcgttctcgcatctagctataaaactaatagagcaggaaattgatcccgact

SEQ ID NO: 132640 - DNA, 60 bp, Artificial
  Synthetic oligonucleotide
cgaatgaccatgctaatgctagagcgttctcgcatctagctataaaactaatagagcagg

SEQ ID NO: 132641 - DNA, 60 bp, Artificial
  Synthetic oligonucleotide
cagcgtgcgtaccccatgtttgaggtggaaccaaggcaggtcacaccgaatgaccatgcc

SEQ ID NO: 132642 - DNA, 60 bp, Artificial
  Synthetic oligonucleotide
gcaacgtgcgtaccccatgtttgaggtggaacctaggcaggtcacaccgaatgaccatgc

SEQ ID NO: 132643 - DNA, 60 bp, Artificial
  Synthetic oligonucleotide
gtggtgacccgaagcagtgcggcttcttcaatatgatgcagatgaaagtcaactacaatc

SEQ ID NO: 132644 - DNA, 60 bp, Artificial
  Synthetic oligonucleotide
tttgtggtgacccgaagcagtgcggcttcttcaatatgatgcagatgaaagtcaactata

SEQ ID NO: 132645 - DNA, 54 bp, Artificial
  Synthetic oligonucleotide
gtcccgggattacgggagaaaccgtgggatacgcggttacaaacaatagcgagg

SEQ ID NO: 132646 - DNA, 60 bp, Artificial
  Synthetic oligonucleotide
ccacagcgacgattttggacataggcagcgcaccggctcgtagaatgttttccgagcacc

SEQ ID NO: 132647 - DNA, 60 bp, Artificial
  Synthetic oligonucleotide
cggcgtagtacacactattgaatcaaacagccgaccaattgcactaccatcacaatggag

SEQ ID NO: 132648 - DNA, 60 bp, Artificial
  Synthetic oligonucleotide
ggcggcgtagtacacactattgaatcaaacagccgaccaattgcactaccatcacaatgg

SEQ ID NO: 132649 - DNA, 60 bp, Artificial
  Synthetic oligonucleotide
attggcggcgtagtacacactattgaatcaaacagccgaccaattgcactaccatcacaa

SEQ ID NO: 132650 - DNA, 60 bp, Artificial
  Synthetic oligonucleotide
ctggaggttcctaccacagcgacgatcttggacataggcagcgcaccggctcgtagaatg

SEQ ID NO: 132651 - DNA, 60 bp, Artificial
  Synthetic oligonucleotide
gagctggaggttcctaccacagcgacgattttggacataggcagcgcaccggctcgtaga

SEQ ID NO: 132652 - DNA, 60 bp, Artificial
  Synthetic oligonucleotide
gccagagcattttcgcatctggctagtaaattaatcgagctggaggttcctaccacagcg

SEQ ID NO: 132653 - DNA, 60 bp, Artificial
  Synthetic oligonucleotide
aatgaccatgctaatgccagagcattttcgcatctggccagtaaactaatcgagctggag

SEQ ID NO: 132654 - DNA, 60 bp, Artificial
  Synthetic oligonucleotide
ccgaatactgactaaccggggtaggtgggtacatattttcgacggacacaggccctgggc

SEQ ID NO: 132655 - DNA, 60 bp, Artificial
  Synthetic oligonucleotide
ctgaatactgactaaccggggtaggtgggtacatattttcgacggacacaggccctgggc

SEQ ID NO: 132656 - DNA, 60 bp, Artificial
  Synthetic oligonucleotide
gtcccgggatcacgggagaaaccgtgggatacgcggttacacacaatagcgagggcttct

SEQ ID NO: 132657 - DNA, 60 bp, Artificial
  Synthetic oligonucleotide
gcggactgaatactgactaaccggggtaggtgggtacatattttcgacggatacagggcc

SEQ ID NO: 132658 - DNA, 53 bp, Artificial
  Synthetic oligonucleotide
tttgcccttttcggcggcgcctcgtcgctattaattataggacttatgatttt

SEQ ID NO: 132659 - DNA, 60 bp, Artificial
  Synthetic oligonucleotide
gccatgtatgtgctgaccaaccagaaacataattgaatatagcagcaattggcgagctgc

SEQ ID NO: 132660 - DNA, 60 bp, Artificial
  Synthetic oligonucleotide
ggagcgtacccgtcctactccacaaactgggccgatgagacggtgctaacagcccgtaac

SEQ ID NO: 132661 - DNA, 60 bp, Artificial
  Synthetic oligonucleotide
agctcatgcgcaccattgacgccaccttgctcgtggcggttgacttgtggccggtcgccc

SEQ ID NO: 132662 - DNA, 60 bp, Artificial
  Synthetic oligonucleotide
cgaacacggtgggagtaccgtataagactctagtcaatagacctggctacagccccatgg

SEQ ID NO: 132663 - DNA, 60 bp, Artificial
  Synthetic oligonucleotide
cgaacacggtgggagtaccgtataagactctagtcaatagaccgggctacagccccatgg

SEQ ID NO: 132664 - DNA, 60 bp, Artificial
  Synthetic oligonucleotide
ctgtgagcgcgtacgaacacgtaacagtgatcccgaacacggtgggagtaccgtataaga

SEQ ID NO: 132665 - DNA, 60 bp, Artificial
  Synthetic oligonucleotide
cgaacacggtgggagtaccgtataagactctagtcaacagaccgggctacagccccatgg

SEQ ID NO: 132666 - DNA, 60 bp, Artificial
  Synthetic oligonucleotide
gatcccgaacacggtgggagtaccgtataagactcttgttagcagaccagggtatagccc

SEQ ID NO: 132667 - DNA, 60 bp, Artificial
  Synthetic oligonucleotide
tatgggtcggctctgagcacgaggccccgcccgaccacctcctggtgtccctccaccgcg

SEQ ID NO: 132668 - DNA, 51 bp, Artificial
  Synthetic oligonucleotide
ataaccctctacggctgacctaaataggttgtgcattagtacctaacctat

SEQ ID NO: 132669 - DNA, 60 bp, Artificial
  Synthetic oligonucleotide
gcaccgcgagggattcttgtgctgcaaggtaacagacacactcaacggggagagggtctc

SEQ ID NO: 132670 - DNA, 60 bp, Artificial
  Synthetic oligonucleotide
ctgggcccacgcccggctacacccgcccctgcaccacacgcatctaccaagtcttgccgg

SEQ ID NO: 132671 - DNA, 60 bp, Artificial
  Synthetic oligonucleotide
ctgggcccacgcccggctacacccgcccctgcaccacacgcatctaccaagtcctgccgg

SEQ ID NO: 132672 - DNA, 60 bp, Artificial
  Synthetic oligonucleotide
gctgggcccacgcccggctacacccgcccctgcaccacacgcatctaccaagtcttgccg

SEQ ID NO: 132673 - DNA, 60 bp, Artificial
  Synthetic oligonucleotide
gctgggcccacgcccggctacacccgcccctgcaccacacgcatataccaggttttgccg

SEQ ID NO: 132674 - DNA, 60 bp, Artificial
  Synthetic oligonucleotide
gaggcagccacccgacctatcctatccaaaatggagaaagtacacgtagacttagacgct

SEQ ID NO: 132675 - DNA, 60 bp, Artificial
  Synthetic oligonucleotide
gaggcagccacccgacctatcctatccaaaatggagaaagtacacgtggacttagacgct

SEQ ID NO: 132676 - DNA, 60 bp, Artificial
  Synthetic oligonucleotide
ggattctggctactgacgtcagtgtcgatgacgctcagaaactgctggttgggctcaacc

SEQ ID NO: 132677 - DNA, 60 bp, Artificial
  Synthetic oligonucleotide
gcacgtacgtgcccgcgacactgtgcgatcagatgacagggattctggctactgacgtca

SEQ ID NO: 132678 - DNA, 60 bp, Artificial
  Synthetic oligonucleotide
cactgtgcgatcagatgacagggattctggctactgatgtcagtgttgacgacgctcaga

SEQ ID NO: 132679 - DNA, 50 bp, Artificial
  Synthetic oligonucleotide
aaaactcaatgtatttctgaggaagcgtggtgcataatgccacgcagcgt

SEQ ID NO: 132680 - DNA, 60 bp, Artificial
  Synthetic oligonucleotide
tggagctggttactggcactctttggcggcgcctcgtcgctattaattataggactcatg

SEQ ID NO: 132681 - DNA, 60 bp, Artificial
  Synthetic oligonucleotide
gcccgtaacatcggcttatgcagctcagatgtcatggaaaggtcccgtagaggtttgtct

SEQ ID NO: 132682 - DNA, 60 bp, Artificial
  Synthetic oligonucleotide
gcccgtaacatcggcttatgcagctcagatgtcatggaacggtctcgtcggggactgtcc

SEQ ID NO: 132683 - DNA, 60 bp, Artificial
  Synthetic oligonucleotide
caggtacttgcatcacatcgccattaatggaggagccttgaataccgatgaagagtacta

SEQ ID NO: 132684 - DNA, 54 bp, Artificial
  Synthetic oligonucleotide
tcgcgcaacaacaatgacggtacgaagcgggtgcgtacatcttctcctccgaca

SEQ ID NO: 132685 - DNA, 60 bp, Artificial
  Synthetic oligonucleotide
tagcgcggcagttcaagttctcccgggtatgcaaaccgaaatcctcacttgaagagacag

SEQ ID NO: 132686 - DNA, 60 bp, Artificial
  Synthetic oligonucleotide
cgcggcagttcaagttctcccgggtatgcaaaccgaaatcctcacttgaagagacagaag

SEQ ID NO: 132687 - DNA, 60 bp, Artificial
  Synthetic oligonucleotide
aggtgtgggtcacgcccgtcataggctctcaggcgcgcaagtgcggactccacatacgcg

SEQ ID NO: 132688 - DNA, 55 bp, Artificial
  Synthetic oligonucleotide
gcgtctgcctggggaaggtagacgccttcgaacatgcgaccactgtaccaaatgt

SEQ ID NO: 132689 - DNA, 60 bp, Artificial
  Synthetic oligonucleotide
ctggcgaaggtagacgccttcgaacatgcgaccactgtcccaaatgtgccgaagattccg

SEQ ID NO: 132690 - DNA, 60 bp, Artificial
  Synthetic oligonucleotide
ttccgctgcccaaaagcgggccatcgtagccgtgatacccagacctgtgttcacgcagat

SEQ ID NO: 132691 - DNA, 60 bp, Artificial
  Synthetic oligonucleotide
cgctgctcaaaagcgggccatcgtagccgtgatacccagacctgtgttcacgcagatgca

SEQ ID NO: 132692 - DNA, 52 bp, Artificial
  Synthetic oligonucleotide
accatccgatacgatcctagacattggaagtgcgcccgcccgcagaatgtat

SEQ ID NO: 132693 - DNA, 60 bp, Artificial
  Synthetic oligonucleotide
tgtgggtcacgcctgtcataggctctcaggcgcgcaagtgcggactccacatacgcgctg

SEQ ID NO: 132694 - DNA, 60 bp, Artificial
  Synthetic oligonucleotide
cggccgaatgcactcttaacgagtgtgtatattcatctgactttggcgggatcgccacag

SEQ ID NO: 132695 - DNA, 60 bp, Artificial
  Synthetic oligonucleotide
gtggatacagaccaggtgatcctggatattgggagcgcgcctgtaaggcacacgcattcc

SEQ ID NO: 132696 - DNA, 60 bp, Artificial
  Synthetic oligonucleotide
ttccattcccgaccgcagcacggtaaagagctaccttgcagcacgtacgtgcagagcacc

SEQ ID NO: 132697 - DNA, 60 bp, Artificial
  Synthetic oligonucleotide
cgaatgaccatgccaatgctagagcattctcgcatctagctataaaactaatagagcagg

SEQ ID NO: 132698 - DNA, 60 bp, Artificial
  Synthetic oligonucleotide
atgctagagcgttctcgcatctagctataaaactaatagagcaggaaattgaccccgact

SEQ ID NO: 132699 - DNA, 60 bp, Artificial
  Synthetic oligonucleotide
aatagagactccgagaggagctatcaaagttactgcccaaccaacagaccacgtcgtggg

SEQ ID NO: 132700 - DNA, 60 bp, Artificial
  Synthetic oligonucleotide
cccaaccaacagaccacgtcgtgggagagtacctggtactctccccgcagaccgtactac

SEQ ID NO: 132701 - DNA, 60 bp, Artificial
  Synthetic oligonucleotide
cgcatctggccagtaaactaatcgagctggagattccgatcacagcgacgattttggaca

SEQ ID NO: 132702 - DNA, 59 bp, Artificial
  Synthetic oligonucleotide
tccacccatctacctacgggtactcgttttaaattcggggcgatgatgaaatccggaat

SEQ ID NO: 132703 - DNA, 60 bp, Artificial
  Synthetic oligonucleotide
tgccccaagtgcgcctacggccgcgccctgagcgaagcccgcactcatgaggactttgcc

SEQ ID NO: 132704 - DNA, 60 bp, Artificial
  Synthetic oligonucleotide
ggtgccccaagtgcgcctacggccgcgccctgagcgaagcccgcactcatgaggacttcg

SEQ ID NO: 132705 - DNA, 60 bp, Artificial
  Synthetic oligonucleotide
ctacacgtgtcggtgtgagactatagttagttgcgacgggtacgtcgtcaaaaggatagc

SEQ ID NO: 132706 - DNA, 53 bp, Artificial
  Synthetic oligonucleotide
gtcggtgtgagactatagttagttgcgacgggtacgtcgttaaaaggatagct

SEQ ID NO: 132707 - DNA, 60 bp, Artificial
  Synthetic oligonucleotide
ccgccagcactcaaattgacggtacgaagcgggagcgtatattttctcatcggaaacagg

SEQ ID NO: 132708 - DNA, 60 bp, Artificial
  Synthetic oligonucleotide
ccgtatcgactgaccccgaatgctcagttacctgtgtgtctagccttcctgtgctgcgcg

SEQ ID NO: 132709 - DNA, 60 bp, Artificial
  Synthetic oligonucleotide
agttccctgctctccatgagcggtagagcggtccgggtaacaccaccatcagggcaaagt

SEQ ID NO: 132710 - DNA, 60 bp, Artificial
  Synthetic oligonucleotide
ccctagccgcgctcattgtggtgacccgcttgctgaagtgcatgtgttgcgtcgttcctt

SEQ ID NO: 132711 - DNA, 60 bp, Artificial
  Synthetic oligonucleotide
ggccctttatcaactgcctggaccccatttgatcggaaagtggtgcagtacgccggagag

SEQ ID NO: 132712 - DNA, 60 bp, Artificial
  Synthetic oligonucleotide
ggccttgccacattattgatggtcacggatatttcctcctcgcacgctgcccagagggcg

SEQ ID NO: 132713 - DNA, 60 bp, Artificial
  Synthetic oligonucleotide
gcctgaatcgcctgaaattcctacagttgctgccgcctctgaaattgacacccaaacgga

SEQ ID NO: 132714 - DNA, 60 bp, Artificial
  Synthetic oligonucleotide
gtacatggacatggtggacggcgcctcttgttgtttagacactgcgagtttttgccctgc

SEQ ID NO: 132715 - DNA, 60 bp, Artificial
  Synthetic oligonucleotide
gtgtggccgatcctttgaagagactgtttaaactcgggaaacctctcgcggctgacgatg

SEQ ID NO: 132716 - DNA, 60 bp, Artificial
  Synthetic oligonucleotide
gcttcctcgtgcagtggcgactggcagagttttggacatgaatactgggaccctgcgtgg

SEQ ID NO: 132717 - DNA, 60 bp, Artificial
  Synthetic oligonucleotide
gtaagagtacatcccaaaagttcgctggcaggacgcaaaggctttagcacggtcgacggg

SEQ ID NO: 132718 - DNA, 60 bp, Artificial
  Synthetic oligonucleotide
gccactgtcaagtactcggctagtaaatcaggcaaatgcgcagtacatgttccctcaggc

SEQ ID NO: 132719 - DNA, 60 bp, Artificial
  Synthetic oligonucleotide
atgagcagcatccgatcgaagtgccccgttgaagaatctgaggcgtcaactccacccagc

SEQ ID NO: 132720 - DNA, 60 bp, Artificial
  Synthetic oligonucleotide
gcctccctgaagacgaagaaggcatccaaatacgacctagagtatgccgatgttcctcaa

SEQ ID NO: 132721 - DNA, 60 bp, Artificial
  Synthetic oligonucleotide
aaagacccaacacaggcaccatccatgttccttacacgcaggcaccgtcaggctttgagc

SEQ ID NO: 132722 - DNA, 60 bp, Artificial
  Synthetic oligonucleotide
gcacgcaggaaggaaaggacgctatgctgttgagccgtatcatggcaaagtggtggtccc

SEQ ID NO: 132723 - DNA, 60 bp, Artificial
  Synthetic oligonucleotide
ccgaagccactttcaaatcgcgcctggatctcggtatcccgcacgaactgcccaaatatg

SEQ ID NO: 132724 - DNA, 60 bp, Artificial
  Synthetic oligonucleotide
gcaaaagaagccgcagcggaagccaaggagattagggaggctgaggagttgcgaatcgca

SEQ ID NO: 132725 - DNA, 60 bp, Artificial
  Synthetic oligonucleotide
gggcggcgtatgagagtagcccaaattaaaactacccattatggagaaagttcacgttga

SEQ ID NO: 132726 - DNA, 57 bp, Artificial
  Synthetic oligonucleotide
aaaagatggcagagctcgcagctgtcatggaggaccccgatttggagcaggatacca

SEQ ID NO: 132727 - DNA, 60 bp, Artificial
  Synthetic oligonucleotide
ggaatccgacatatttgactacccgccagctagatggagaaccgaattacacccacgagc

SEQ ID NO: 132728 - DNA, 60 bp, Artificial
  Synthetic oligonucleotide
cccttgttccactccaccaatttgctacgaccgagcacccgcagaaaccctgatgatgct

SEQ ID NO: 132729 - DNA, 60 bp, Artificial
  Synthetic oligonucleotide
ggggtgtatccgtttatgtggggaggcgcctactgcttctgtgactctgaaaacacgcaa

SEQ ID NO: 132730 - DNA, 60 bp, Artificial
  Synthetic oligonucleotide
ccagaagagtggagaatatgaaagcagtgaccaccaaaagactactcggcggactgggac

SEQ ID NO: 132731 - DNA, 60 bp, Artificial
  Synthetic oligonucleotide
gcagcagatccattggccacagcctacttatgcgggattcatcgtgaactggtgcggagg

SEQ ID NO: 132732 - DNA, 60 bp, Artificial
  Synthetic oligonucleotide
gtgcactaaatcggtcacatccgtggtgtctacgctgttttatgacaagaagatgcgcac

SEQ ID NO: 132733 - DNA, 60 bp, Artificial
  Synthetic oligonucleotide
gtgctgaccaaccagaaacataattagaccacagcagcgattggaaagctgcctattaga

SEQ ID NO: 132734 - DNA, 60 bp, Artificial
  Synthetic oligonucleotide
aaaacccattcccgcgccacgtaccgtttttatccagccaccgaaacctcgcagaagacg

SEQ ID NO: 132735 - DNA, 60 bp, Artificial
  Synthetic oligonucleotide
tcccggagaacttcgacctgcagcccatagaggtcggcaagtcaaggctggttaaagggg

SEQ ID NO: 132736 - DNA, 60 bp, Artificial
  Synthetic oligonucleotide
tgtttccaatgcaaccagcgccttttcgcaacccgtacgctcctcctagaagaccgtggt

SEQ ID NO: 132737 - DNA, 60 bp, Artificial
  Synthetic oligonucleotide
cagaccggcagctccatatcaagtgcctaccataggagtgtacggagtaccaggctcggg

SEQ ID NO: 132738 - DNA, 60 bp, Artificial
  Synthetic oligonucleotide
gacgggtacgtcgtaaaacggatcgctatcagtccaggcctgtatgggaaaccgtcgggc

SEQ ID NO: 132739 - DNA, 60 bp, Artificial
  Synthetic oligonucleotide
ctgcgtcaccgatcacgcccaggcatacaaagcacatacagcctcagtccaagccttcct

SEQ ID NO: 132740 - DNA, 60 bp, Artificial
  Synthetic oligonucleotide
actggaggcggacgttgacttaatgctgcaggaggcgggagcaggatctgtcgaaacccc

SEQ ID NO: 132741 - DNA, 60 bp, Artificial
  Synthetic oligonucleotide
aacacgcatacctcgagcccaccattcggtctgcagtcccatcagcaattcagaacacgc

SEQ ID NO: 132742 - DNA, 60 bp, Artificial
  Synthetic oligonucleotide
gccccttcctcagagcattacaacggagcttcccgcagtttgaggtagaagccaagcagg

SEQ ID NO: 132743 - DNA, 60 bp, Artificial
  Synthetic oligonucleotide
gcccattcctcagagctttgcagcggagcttcccgcagtttgaggtagaagccaagcagg

SEQ ID NO: 132744 - DNA, 60 bp, Artificial
  Synthetic oligonucleotide
gcccattcctcagagctttgcagcggacgttcccgcagtttgaggtagaagccaagcagg

SEQ ID NO: 132745 - DNA, 60 bp, Artificial
  Synthetic oligonucleotide
gaggggatatagccacggccaccgagagtgtcatagtgaacgcagccaatagcaaaggac

SEQ ID NO: 132746 - DNA, 60 bp, Artificial
  Synthetic oligonucleotide
caggccaacaaaggggtaagagttgcatattggataggatttgacaccacgccgttcatg

SEQ ID NO: 132747 - DNA, 60 bp, Artificial
  Synthetic oligonucleotide
agacactcacggcaaaatacccagggaacttctccgcaaccttggaagagtggcaacagg

SEQ ID NO: 132748 - DNA, 60 bp, Artificial
  Synthetic oligonucleotide
gcctacttagaaccgacagtgagatcggctgtcccttccgctatacagaacacactgcag

SEQ ID NO: 132749 - DNA, 60 bp, Artificial
  Synthetic oligonucleotide
aagctcccaaaagcagcaggcgagacgctgaaagggaagctgcacgtgccctacctcctt

SEQ ID NO: 132750 - DNA, 60 bp, Artificial
  Synthetic oligonucleotide
cgcgcattgattgccatcgtgaagccgaagaagacggtactgtgtggagacccgaagcag

SEQ ID NO: 132751 - DNA, 60 bp, Artificial
  Synthetic oligonucleotide
cgtcctaaagtgcaggtaatacaggcagcagacccactcgcaaccgcgtatctgtgtgga

SEQ ID NO: 132752 - DNA, 60 bp, Artificial
  Synthetic oligonucleotide
ccacgcctccaactaccttgccgtgcctgtgcatccatgctatgacgcctgaaagagtgc

SEQ ID NO: 132753 - DNA, 60 bp, Artificial
  Synthetic oligonucleotide
acgtcacaaaatcagacgactgcacccacaaccatgccacggcatacaaggcacacaccg

SEQ ID NO: 132754 - DNA, 60 bp, Artificial
  Synthetic oligonucleotide
ccttttgggtgcgaaatacaagtgaacccggtgcgggcggaaaactgcgccgtaggctct

SEQ ID NO: 132755 - DNA, 60 bp, Artificial
  Synthetic oligonucleotide
ccggcagcaccttaccaagtacctacgattggtgtgtacggagtacccggttcaggcaag

SEQ ID NO: 132756 - DNA, 60 bp, Artificial
  Synthetic oligonucleotide
ggtcatgctattcctgtcaccgatttccaagcgttaagtgaaagcgctaccatcgtgtac

SEQ ID NO: 132757 - DNA, 60 bp, Artificial
  Synthetic oligonucleotide
gccagagccctgtggccattgaatctgctctaagcgaagggcatgatgggtacgtgcgct

SEQ ID NO: 132758 - DNA, 60 bp, Artificial
  Synthetic oligonucleotide
gcccgtcgctccggaacctgaagcagtaactcccactgtgccacctaatgccgtcattgt

SEQ ID NO: 132759 - DNA, 60 bp, Artificial
  Synthetic oligonucleotide
gcggccgtcccattctggacaatcaagggagagtggtagctatcgtcctaggtggggcta

SEQ ID NO: 132760 - DNA, 60 bp, Artificial
  Synthetic oligonucleotide
cgacactgaaggaggtcatagcacgaagagaagcggtggaggaaatatgtatctcagaag

SEQ ID NO: 132761 - DNA, 60 bp, Artificial
  Synthetic oligonucleotide
ccgttaaccgtagactgccacatgccctggtgacatcacacactaatcaccccgcctgcg

SEQ ID NO: 132762 - DNA, 60 bp, Artificial
  Synthetic oligonucleotide
ccagttatgcgtgcgtttcttcggcttggatttggactccggactgttctctgcccctac

SEQ ID NO: 132763 - DNA, 60 bp, Artificial
  Synthetic oligonucleotide
tggcgcaactacgtggatgctctgcaagtcgcggaacacgtgcctcaccccttacagact

SEQ ID NO: 132764 - DNA, 60 bp, Artificial
  Synthetic oligonucleotide
cgccgagcactctatgaggaagccgaacggtggtgtcgagtaggtatcttcgctgagttg

SEQ ID NO: 132765 - DNA, 60 bp, Artificial
  Synthetic oligonucleotide
taatcaacctggcaatgtttaccagcaaatcccggctgcagcgccaaccagagctgcgag

SEQ ID NO: 132766 - DNA, 60 bp, Artificial
  Synthetic oligonucleotide
cggatcgatgcgcgacctggctgaacatggaggttaagatcattgatgcagtagtcggtg

SEQ ID NO: 132767 - DNA, 60 bp, Artificial
  Synthetic oligonucleotide
ggcgactatagtggccatgtatgtgctgaccaaccaaagacgcaattaggaagaagcagc

SEQ ID NO: 132768 - DNA, 58 bp, Artificial
  Synthetic oligonucleotide
aaggaagaaactgcaggccaaccccaccccggccaaccgtagtcgttaccagtcacgc

SEQ ID NO: 132769 - DNA, 60 bp, Artificial
  Synthetic oligonucleotide
gaggatgaacgacctttagggctcagagaccgtcaactggtaatggggtgctgctgggca

SEQ ID NO: 132770 - DNA, 60 bp, Artificial
  Synthetic oligonucleotide
ttcgcgaagccgaggaattgcgtgcagcactaccacccttagcaccagatgtcgaggagc

SEQ ID NO: 132771 - DNA, 60 bp, Artificial
  Synthetic oligonucleotide
atagctattagtccgggcctgtatgggaaaccgtcaggctacgctgccactatgcaccgc

SEQ ID NO: 132772 - DNA, 60 bp, Artificial
  Synthetic oligonucleotide
gccaggcaagaggcagcgaatggtcatgaaattggaatcggacaagacgttccccatttt

SEQ ID NO: 132773 - DNA, 60 bp, Artificial
  Synthetic oligonucleotide
cttgacgttcaagcagcgtcggaacgcgaatccaggcgggccaccggccaagaaacgcaa

SEQ ID NO: 132774 - DNA, 60 bp, Artificial
  Synthetic oligonucleotide
aggttgttgctggcgcatacccaacgtattccacgaattgggcggacgagcaggtcctgc

SEQ ID NO: 132775 - DNA, 60 bp, Artificial
  Synthetic oligonucleotide
caccgcagtgagagataaacaacccagaatgaaggtcactgtagatgttgaggctgacag

SEQ ID NO: 132776 - DNA, 60 bp, Artificial
  Synthetic oligonucleotide
gctccacaaaagcatatccagaagatgcaccctcccgatcacggctatcgtctcgaccct

SEQ ID NO: 132777 - DNA, 60 bp, Artificial
  Synthetic oligonucleotide
cccctggcactaaacatactgaggaacgcccaaaggtgcaagtcatccaggccgccgaac

SEQ ID NO: 132778 - DNA, 60 bp, Artificial
  Synthetic oligonucleotide
gtcagagaagattccaacctatgctagtaagtacccgcggccagtttactcgccgtcggt

SEQ ID NO: 132779 - DNA, 57 bp, Artificial
  Synthetic oligonucleotide
ccttgccaacacctctttcccatgctcgtcacctccctgctacccctgctgctacga

SEQ ID NO: 132780 - DNA, 60 bp, Artificial
  Synthetic oligonucleotide
ccaagaactactagacctgatagaggaagcgtttggggaaattaccagcgtccacctgcc

SEQ ID NO: 132781 - DNA, 60 bp, Artificial
  Synthetic oligonucleotide
gcgcccagatcccagtgcacatgaagtccgacgcctccaagtacacacatgaaaagcccg

SEQ ID NO: 132782 - DNA, 60 bp, Artificial
  Synthetic oligonucleotide
ggaagctgcattcgtacctggaaggtacccgctttcatcagactgcggtggatatggctg

SEQ ID NO: 132783 - DNA, 60 bp, Artificial
  Synthetic oligonucleotide
ccgtgtctgtgtaggtatgctatgactgctgagagagtggcgaggcttcggatgaacaac

SEQ ID NO: 132784 - DNA, 60 bp, Artificial
  Synthetic oligonucleotide
aaactggacggcaaggttaccggctatgcgtgcctagtcggagataaggtcatgaagccg

SEQ ID NO: 132785 - DNA, 60 bp, Artificial
  Synthetic oligonucleotide
aatacggccctaaaactctcaagaccatcacccggggttgtgcatgtgccatacacgcag

SEQ ID NO: 132786 - DNA, 60 bp, Artificial
  Synthetic oligonucleotide
ccgcctgtgggcgcaactgacgactgagggtaaaccccatggctggccacatgaaatcat

SEQ ID NO: 132787 - DNA, 60 bp, Artificial
  Synthetic oligonucleotide
cggcggtcctaaatagatgcagagacactccttcatctacagctcacaacagtaaacatg

SEQ ID NO: 132788 - DNA, 60 bp, Artificial
  Synthetic oligonucleotide
taacgtcacctgccgagtgccgttggcacgagcgccggatgtcacctatggtaagaagga

SEQ ID NO: 132789 - DNA, 60 bp, Artificial
  Synthetic oligonucleotide
tacaagacggacaaacccggcaagtgcgccgttcactcacattccaacgtcgcaacgttg

SEQ ID NO: 132790 - DNA, 60 bp, Artificial
  Synthetic oligonucleotide
cgtgcgagcctccgaaagaccacatcgtcccttatggggcgagccataacaaccaggtct

SEQ ID NO: 132791 - DNA, 60 bp, Artificial
  Synthetic oligonucleotide
gctatcacagacggcgggcaacgtcaaaataacagcaggcggcaggactatcaggtacaa

SEQ ID NO: 132792 - DNA, 60 bp, Artificial
  Synthetic oligonucleotide
gccccttcatcagaacatgtcaacgtattgctgactagaactgaaaaccggctggtgtgg

SEQ ID NO: 132793 - DNA, 60 bp, Artificial
  Synthetic oligonucleotide
cctcccgtactctggagaccgaaacgaagcgcgagaagcagagaaggaagccgaagagac

SEQ ID NO: 132794 - DNA, 60 bp, Artificial
  Synthetic oligonucleotide
aatgcgaagggcacagtcggcgttggggtttgcagagcggtggcgagaaaatggccagac

SEQ ID NO: 132795 - DNA, 60 bp, Artificial
  Synthetic oligonucleotide
tagatgtggaagagctgacgtaccgcgccggagcaggggtagtggagacacccaggaatg

SEQ ID NO: 132796 - DNA, 60 bp, Artificial
  Synthetic oligonucleotide
aatttctccacggtgaccgaggcagagggcgacagagagttggccgccgcataccgtgcc

SEQ ID NO: 132797 - DNA, 60 bp, Artificial
  Synthetic oligonucleotide
ccggaccggggcacttacaacagaagtcagtacggcaacacgcactaccgtgcgaaatgc

SEQ ID NO: 132798 - DNA, 60 bp, Artificial
  Synthetic oligonucleotide
cccgccggagacacccaagatgaagatcgtaggcgtgcattgaaggatgagacggatagg

SEQ ID NO: 132799 - DNA, 60 bp, Artificial
  Synthetic oligonucleotide
acatgcacaccccgattgcggcaagggtcgagatccctgtgtacgataccgctgttgtag

SEQ ID NO: 132800 - DNA, 60 bp, Artificial
  Synthetic oligonucleotide
agctccatgtttgcatgcaacgggctacacacagccggatgcgcaccctcataccgtgtg

SEQ ID NO: 132801 - DNA, 60 bp, Artificial
  Synthetic oligonucleotide
aatgcgcgagccggttgagttaccgtgggagcctgaggacgttgatatccagttcggaga

SEQ ID NO: 132802 - DNA, 60 bp, Artificial
  Synthetic oligonucleotide
gccgtgtactgcgtgagaagctgacaaactccatctgcgccgcgttcatcggggatgaca

SEQ ID NO: 132803 - DNA, 60 bp, Artificial
  Synthetic oligonucleotide
gctgccatgcacctcataccagctgacaacggctcccaccgacgaggagattgacatgca

SEQ ID NO: 132804 - DNA, 60 bp, Artificial
  Synthetic oligonucleotide
gacgtacagggtctctcctacacccacgcctcgcgttctgagagcctcggtatgcagtgt

SEQ ID NO: 132805 - DNA, 60 bp, Artificial
  Synthetic oligonucleotide
tgcctaacaccgtacgctttgacgccaggagcggtggtaccgttgacattggggctgctt

SEQ ID NO: 132806 - DNA, 60 bp, Artificial
  Synthetic oligonucleotide
catctattgccgcgacaaagcctgggagaagaaaatccaggaggctatcgatcgccgcac

SEQ ID NO: 132807 - DNA, 60 bp, Artificial
  Synthetic oligonucleotide
ggagcctccgcaaaagcttatgagcacacagccacaattccgaacgtggtggggttcccg

SEQ ID NO: 132808 - DNA, 60 bp, Artificial
  Synthetic oligonucleotide
gctgcaagcaccggacctacaggctcaacagatgcaacaactgatcagcgcagtctctgc

SEQ ID NO: 132809 - DNA, 60 bp, Artificial
  Synthetic oligonucleotide
gaggcgtctgatggcatgctcaagatccaagtctccgcccaaataggtctggacaaggca

SEQ ID NO: 132810 - DNA, 60 bp, Artificial
  Synthetic oligonucleotide
tactgtttctgcgactccgagaacacgcagcttagcgaggcctatgtcgacaggtcagac

SEQ ID NO: 132811 - DNA, 60 bp, Artificial
  Synthetic oligonucleotide
ctggaagcgtccatgacatgcagaaacagatcacgccaccgccgcagtgtaatagagcac

SEQ ID NO: 132812 - DNA, 60 bp, Artificial
  Synthetic oligonucleotide
ggcggccggatgtatggattcaaccgcgaagtcgcccgtaagtttgagcaacgctaccct

SEQ ID NO: 132813 - DNA, 60 bp, Artificial
  Synthetic oligonucleotide
cagctgggatacgcatgacggcggaggagtgggatacagtgttggctttccgcgaagaca

SEQ ID NO: 132814 - DNA, 60 bp, Artificial
  Synthetic oligonucleotide
tcaggaagatcaggcagatacccggttgaccgctacgacggacgtgtgttggtcccgacg

SEQ ID NO: 132815 - DNA, 60 bp, Artificial
  Synthetic oligonucleotide
acccacccttccatgagttcgcgtatgaaggactgaagatacggcccgcaacgcctttcc

SEQ ID NO: 132816 - DNA, 60 bp, Artificial
  Synthetic oligonucleotide
cggctcactgcttatccgtgcttacgggtacgccgacagagtcagcgaaatggtggtcac

SEQ ID NO: 132817 - DNA, 60 bp, Artificial
  Synthetic oligonucleotide
acacgcggtcaacgtgggcggaagcaagttcatctttggaccgatctcaacagcttggtc

SEQ ID NO: 132818 - DNA, 60 bp, Artificial
  Synthetic oligonucleotide
cctgttgaacgggtgcagaagaggagtagagaatctatacgtggacgaagcatttgcctg

SEQ ID NO: 132819 - DNA, 60 bp, Artificial
  Synthetic oligonucleotide
ccggggacgtacgggaagacggttggatacgccgttacgcaccatgcagaaggtttccta

SEQ ID NO: 132820 - DNA, 60 bp, Artificial
  Synthetic oligonucleotide
cccaagggcgatttcagcgctacgttggaggagtggcaagaggagcatgacaacatcatg

SEQ ID NO: 132821 - DNA, 60 bp, Artificial
  Synthetic oligonucleotide
cctggctaccgacgtcacacccgaagatgcgcagaaactactggtggggttgaaccaacg

SEQ ID NO: 132822 - DNA, 55 bp, Artificial
  Synthetic oligonucleotide
gtaggactaaattctgccgaaccccataacaccggggacgtaggcgtctaatttg

SEQ ID NO: 132823 - DNA, 60 bp, Artificial
  Synthetic oligonucleotide
ccctgcagaatgtgctagcagcagccacgaagagaaattgcaatgttacacagatgagag

SEQ ID NO: 132824 - DNA, 60 bp, Artificial
  Synthetic oligonucleotide
catcgacgaagcgttctcatgccatgcagggactctgttggccactatagccatagtcag

SEQ ID NO: 132825 - DNA, 60 bp, Artificial
  Synthetic oligonucleotide
ccgaatcaggtgggaataccgtttaaagccttgatagagcgaccaggttacgcaggcctc

SEQ ID NO: 132826 - DNA, 60 bp, Artificial
  Synthetic oligonucleotide
ggggcagaaggcgtggagtatgtctggggaaacaacaacccggtacgactatgggcacag

SEQ ID NO: 132827 - DNA, 60 bp, Artificial
  Synthetic oligonucleotide
ttcagtcgctcgaaccaaatgccttacaccctatcaattagcaccaggcgcccaattacc

SEQ ID NO: 132828 - DNA, 60 bp, Artificial
  Synthetic oligonucleotide
cggggacgcgttaatcggcagttacctgatcctatcaccccaagcagtcctacgcagcga

SEQ ID NO: 132829 - DNA, 60 bp, Artificial
  Synthetic oligonucleotide
ggatacgagaaggtcccggtagagagagcagaatcagattatgtgtttgatgtagaccaa

SEQ ID NO: 132830 - DNA, 60 bp, Artificial
  Synthetic oligonucleotide
ccgcacgagaccgtcagcaccctacaaggttcatacagtaggtgtgtacggagtgccagg

SEQ ID NO: 132831 - DNA, 60 bp, Artificial
  Synthetic oligonucleotide
cgctaagcaggtccagagttgcttcccgcagtttgagatcgaagcagtgcagaccacacc

SEQ ID NO: 132832 - DNA, 60 bp, Artificial
  Synthetic oligonucleotide
caccgtgaattggtgcgccgtctcaacaacgcgcttttcccaaacatccacactttgttt

SEQ ID NO: 132833 - DNA, 60 bp, Artificial
  Synthetic oligonucleotide
catgaacaaagtaaatgtgtgctgggcaaagacacttacgcctgtgctggaaactgcggg

SEQ ID NO: 132834 - DNA, 60 bp, Artificial
  Synthetic oligonucleotide
cgaactccgcaacgatgaaggattctgtgcaggatgtccaggaaagcggcgccttgtcgc

SEQ ID NO: 132835 - DNA, 60 bp, Artificial
  Synthetic oligonucleotide
ccgaaagaccacatcgtaccatacgcagccaaacacaacgacgccgagtttccatccatc

SEQ ID NO: 132836 - DNA, 60 bp, Artificial
  Synthetic oligonucleotide
gaggctgaacgctctaccctaagtgtatccacaacagcaccatgtgacatcttggcgacc

SEQ ID NO: 132837 - DNA, 60 bp, Artificial
  Synthetic oligonucleotide
ccacggactgtgccgtgcctctgtcgatacgccatgacaccagagagagtgtaccgactt

SEQ ID NO: 132838 - DNA, 60 bp, Artificial
  Synthetic oligonucleotide
gaatcatcatcttagatcccactgttccaccaacttacaaacggccatgcatcagacggt

SEQ ID NO: 132839 - DNA, 60 bp, Artificial
  Synthetic oligonucleotide
tggatcagagagctgtctggacagatcctccttttcgccgtctagattgcgtagctttcc

SEQ ID NO: 132840 - DNA, 60 bp, Artificial
  Synthetic oligonucleotide
ccatcagactgcggtggacatagccgaaatgcaagtgctgtggcccgccctcaaagagtc

SEQ ID NO: 132841 - DNA, 60 bp, Artificial
  Synthetic oligonucleotide
cggtgcacccaggatatcacggccatcgtttccaaattacattaccaggaccgaatgagg

SEQ ID NO: 132842 - DNA, 60 bp, Artificial
  Synthetic oligonucleotide
gcgaccagatgaccgggatcctagcaacagaagtaacagccgatgatgcccagaaactgc

SEQ ID NO: 132843 - DNA, 60 bp, Artificial
  Synthetic oligonucleotide
ctacagaggtaacgaagtaatgacggctgcagcgtcccaaggactgacgagggcctccgt

SEQ ID NO: 132844 - DNA, 60 bp, Artificial
  Synthetic oligonucleotide
atggtagacgatggagaccagcaccagtccagagatacataccccaaccccaaccaccag

SEQ ID NO: 132845 - DNA, 60 bp, Artificial
  Synthetic oligonucleotide
ggggataaagtcatgaaaccagctcatgtgaagggcacgatcgacaatccagaactagcc

SEQ ID NO: 132846 - DNA, 60 bp, Artificial
  Synthetic oligonucleotide
atgcccatcccctgtgagcatcgagcacgtctggagtgatgccgacgacggcgtactgaa

SEQ ID NO: 132847 - DNA, 60 bp, Artificial
  Synthetic oligonucleotide
aaccaccgaaaatgtcaccacttacgtcgccaagttgaaaggaccgaaagctgcggcctt

SEQ ID NO: 132848 - DNA, 60 bp, Artificial
  Synthetic oligonucleotide
ccgtcacccatcacaaagaaggattcgtagtcggaaaagtcacagataccattcgcggcg

SEQ ID NO: 132849 - DNA, 60 bp, Artificial
  Synthetic oligonucleotide
ccccagcacccaccgggcacaagacccgaattccctgcaaaacttactcccatcagacag

SEQ ID NO: 132850 - DNA, 60 bp, Artificial
  Synthetic oligonucleotide
ccactgtgtttgcccaatgaagtgcacggaagatccagagagaatgctaggatatgcacg

SEQ ID NO: 132851 - DNA, 60 bp, Artificial
  Synthetic oligonucleotide
cctttccctctgaccgacagcacgtgtgcagtcagcgtagcacctgaaccgcaagtgaca

SEQ ID NO: 132852 - DNA, 60 bp, Artificial
  Synthetic oligonucleotide
gggcgtcaggaccgcatattggataggctttgatacaacgccgttcatgtacgatgcact

SEQ ID NO: 132853 - DNA, 60 bp, Artificial
  Synthetic oligonucleotide
acgtaaccagaggagaatcatgcgaggctgaccatgccatcgcttatcaggtacacacag

SEQ ID NO: 132854 - DNA, 60 bp, Artificial
  Synthetic oligonucleotide
cgccaacgaacgctaacgtgcctctgctgctgggcatttaagcgaaacaaacgccacgcc

SEQ ID NO: 132855 - DNA, 60 bp, Artificial
  Synthetic oligonucleotide
atccagcgcccaagatcggatgccaacatcatcccgatcaaccgcaggctccctcactca

SEQ ID NO: 132856 - DNA, 60 bp, Artificial
  Synthetic oligonucleotide
gcagcagtgactgaggaactcatacaagaagcagctgcagtagagcaagaggccgtggat

SEQ ID NO: 132857 - DNA, 60 bp, Artificial
  Synthetic oligonucleotide
ccagccagaatccaacaatcaaagttcatacttgggccgatatccagtgcctggtctcct

SEQ ID NO: 132858 - DNA, 60 bp, Artificial
  Synthetic oligonucleotide
ctcgtactggaaaaaagagaagggagtaccattgaatcgaaacgccccttttggctgtat

SEQ ID NO: 132859 - DNA, 60 bp, Artificial
  Synthetic oligonucleotide
ggcgtacagagtcaaacgtggagacatttcgaacgccccagaggatgcagtggtcaatgc

SEQ ID NO: 132860 - DNA, 60 bp, Artificial
  Synthetic oligonucleotide
cgcgatgaaactccagatgctggcaggcgacgcactgaggcacattaaacctggcggatc

SEQ ID NO: 132861 - DNA, 60 bp, Artificial
  Synthetic oligonucleotide
ccggaacagcagtttcgaaatccgtccaagataaattggtgatccacgctgtcggcccga

SEQ ID NO: 132862 - DNA, 60 bp, Artificial
  Synthetic oligonucleotide
gtagaacagtcactcaaccatctcttcacggcattcgacaatactgatgcagatgtgacc

SEQ ID NO: 132863 - DNA, 60 bp, Artificial
  Synthetic oligonucleotide
cgcgtagggctgcgacacagagtgtgtgaagccatcgaagaccgttatgccgtccactca

SEQ ID NO: 132864 - DNA, 60 bp, Artificial
  Synthetic oligonucleotide
attttgctgaaggagagatccaggggatgggagtggagtttgaatgactaggcagagccg

SEQ ID NO: 132865 - DNA, 60 bp, Artificial
  Synthetic oligonucleotide
ggagcaagtaccaaatgaaaccgtctgaagcaaacaaaagcaggtaccaatctagaaaag

SEQ ID NO: 132866 - DNA, 60 bp, Artificial
  Synthetic oligonucleotide
attttcagacccgtccctgccccgagagcacccgtgctcagaaccacaccgcctcctaaa

SEQ ID NO: 132867 - DNA, 60 bp, Artificial
  Synthetic oligonucleotide
tcttaatgtggttattgcgtgccgagtgttggaggatcaattggcgcagtcgccgtggcc

SEQ ID NO: 132868 - DNA, 60 bp, Artificial
  Synthetic oligonucleotide
ccttgaggacctgggagtagaccaaaacctaatgaatttgatagaggctgcattcgggga

SEQ ID NO: 132869 - DNA, 60 bp, Artificial
  Synthetic oligonucleotide
gtgctcaagtgccggtatgcatgaaatcagacgcatccaagttcacccatgagaaaccag

SEQ ID NO: 132870 - DNA, 60 bp, Artificial
  Synthetic oligonucleotide
cccatcacaccgccaacctaaacttggggataccacctctgctgggcagttttgatgcgg

SEQ ID NO: 132871 - DNA, 60 bp, Artificial
  Synthetic oligonucleotide
tttgacaataccggcaaggtagtagccatagtgctgggaggtgcaaatgaaggggcccgg

SEQ ID NO: 132872 - DNA, 60 bp, Artificial
  Synthetic oligonucleotide
gtgtcctccagaacttatcgttcccgtgtgatgcaccaccatgtgcaccatgctgttacg

SEQ ID NO: 132873 - DNA, 60 bp, Artificial
  Synthetic oligonucleotide
ttcgcgcgtatgggtcggctccgagcacgaggccccgcccgaccacctcctggtgtccct

SEQ ID NO: 132874 - DNA, 60 bp, Artificial
  Synthetic oligonucleotide
ggctatgctgccacgatgcatcgcgagggattcttgtgctgcaaggtgacggacacgctt

SEQ ID NO: 132875 - DNA, 60 bp, Artificial
  Synthetic oligonucleotide
ctacgctgccacgatgcatcgcgagggattcttgtgctgcaaggtgacggacacgcttga

SEQ ID NO: 132876 - DNA, 60 bp, Artificial
  Synthetic oligonucleotide
cggcgccttcgaacacgcgaccacgatgccgaatcaggtgggaatgccgtttaacaccat

SEQ ID NO: 132877 - DNA, 60 bp, Artificial
  Synthetic oligonucleotide
cgtaaaggtgtgtatgccgttcggtacaaggtgaatgaaaatcctctgtacgcacccacc

SEQ ID NO: 132878 - DNA, 60 bp, Artificial
  Synthetic oligonucleotide
cgtaaaggtgtgtatgccgttcggtacaaggtgaatgaaaatcccctgtacgcacccacc

SEQ ID NO: 132879 - DNA, 60 bp, Artificial
  Synthetic oligonucleotide
gcaccgcgagggattcttgtgttgcaaagtgacagacacattgaacggggagagggtctc

SEQ ID NO: 132880 - DNA, 60 bp, Artificial
  Synthetic oligonucleotide
gcaccgcgagggattcttgtgctgcaaagtgacagacacattgaacggggagagggtctc

SEQ ID NO: 132881 - DNA, 51 bp, Artificial
  Synthetic oligonucleotide
ccaaatgactggcatactggcaacagatgtcagtgcggacgacgcgcaaaa

SEQ ID NO: 132882 - DNA, 51 bp, Artificial
  Synthetic oligonucleotide
ccaaatgactggcatactggcaacagatgtcagtgcagacgacgcacaaaa

SEQ ID NO: 132883 - DNA, 60 bp, Artificial
  Synthetic oligonucleotide
cccaagggctgacccgtaaaggagtgtatgccgttcggtacaaggtgaatgaaaatcccc

SEQ ID NO: 132884 - DNA, 60 bp, Artificial
  Synthetic oligonucleotide
gcctcccaagggctgacccgtaaaggagtgtatgccgttcggtacaaggtgaatgaaaat

SEQ ID NO: 132885 - DNA, 60 bp, Artificial
  Synthetic oligonucleotide
cgtaaaggcgtgtatgccgttcggtacaaggtgaatgaaaatcccctgtacgcacccacc

SEQ ID NO: 132886 - DNA, 60 bp, Artificial
  Synthetic oligonucleotide
cccaagggctgacccgtaaaggagtgtatgccgttcggtacaaggtgaatgaaaatcctc

SEQ ID NO: 132887 - DNA, 60 bp, Artificial
  Synthetic oligonucleotide
gcgtgtatgccgttcggtacaaggtgaatgaaaatcccctgtacgcacccacctcagaac

SEQ ID NO: 132888 - DNA, 60 bp, Artificial
  Synthetic oligonucleotide
agatgtgccacagaacatgcgggccgatacattcaagtacacccatgagaaaccccaagg

SEQ ID NO: 132889 - DNA, 60 bp, Artificial
  Synthetic oligonucleotide
gatgtgccacagaacatgcgggccgatacattcaaatacacccatgagaaaccccaaggc

SEQ ID NO: 132890 - DNA, 60 bp, Artificial
  Synthetic oligonucleotide
gcgagacaatagttagttgcgacgggtacgtcgttaaaagaatagctattagtcctggcc

SEQ ID NO: 132891 - DNA, 60 bp, Artificial
  Synthetic oligonucleotide
atagttagttgcgacgggtacgtcgttaaaagaatagctatcagtccaggcctgtatggg

SEQ ID NO: 132892 - DNA, 60 bp, Artificial
  Synthetic oligonucleotide
ccattgccgaagtatagaatcactggtgtgcagaagatccagtgctcccagcctatactg

SEQ ID NO: 132893 - DNA, 60 bp, Artificial
  Synthetic oligonucleotide
accgtgaccggcacagcgtgccgtgtggcagaccccttaaaaaggctgtttaagcttggc

SEQ ID NO: 132894 - DNA, 60 bp, Artificial
  Synthetic oligonucleotide
cggaggtggacccatccgacacgatccttgacattggaagtgcgcccgcccgcagaatgt

SEQ ID NO: 132895 - DNA, 60 bp, Artificial
  Synthetic oligonucleotide
gcgtgtatgccgttcggtacaaggtgaatgaaaatcctttgtacgcacccacctcagagc

SEQ ID NO: 132896 - DNA, 60 bp, Artificial
  Synthetic oligonucleotide
ggggcccctataactctctacggctaacctgaatggactacgacatagtctagtccgcca

SEQ ID NO: 132897 - DNA, 60 bp, Artificial
  Synthetic oligonucleotide
gtatgcagatgtgccacagaacatgcgggccgatacattcaaatacacccatgagaaacc

SEQ ID NO: 132898 - DNA, 60 bp, Artificial
  Synthetic oligonucleotide
ctacctgagaggggcccctataactctctacggctaacctgaatggactacgacatagtc

SEQ ID NO: 132899 - DNA, 60 bp, Artificial
  Synthetic oligonucleotide
ggggcctctataactctctacggctaacctgaatggactacgacttagtctggtccgcca

SEQ ID NO: 132900 - DNA, 60 bp, Artificial
  Synthetic oligonucleotide
gtggacccatccgacacgatccttgacattggaagcgcgcccgcccgcagaatgtattca

SEQ ID NO: 132901 - DNA, 60 bp, Artificial
  Synthetic oligonucleotide
gtgctgcagagacccaaagcaggagcgatccatgtgccatacactcaggcaccatcgggt

SEQ ID NO: 132902 - DNA, 60 bp, Artificial
  Synthetic oligonucleotide
tagtgctgcagagacccaaagcaggagcgatccatgtgccatacactcaggcgccatcgg

SEQ ID NO: 132903 - DNA, 60 bp, Artificial
  Synthetic oligonucleotide
gagccaagcgggaatctcgtataacaccatagtcaacagagcaggctacgcaccactccc

SEQ ID NO: 132904 - DNA, 60 bp, Artificial
  Synthetic oligonucleotide
gatgtgccacagaacatgcgggccgatacattcaagtatacccatgagaagccccaaggc

SEQ ID NO: 132905 - DNA, 60 bp, Artificial
  Synthetic oligonucleotide
gatgtgccacagaacatgcgggccgatacattcaagtacacccatgagaagccccaaggc

SEQ ID NO: 132906 - DNA, 57 bp, Artificial
  Synthetic oligonucleotide
aaaagtgctttccgcattttgagatagaagccacgcaggtcactgacaatgaccatg

SEQ ID NO: 132907 - DNA, 60 bp, Artificial
  Synthetic oligonucleotide
ccgcattttgagatagaagccacgcaggtcaccgacaatgaccatgccaatgctagagcg

SEQ ID NO: 132908 - DNA, 60 bp, Artificial
  Synthetic oligonucleotide
ccaagcacaagtaccactgtatctgcccaatgatcagcgcggaagaccctgatcgactcc

SEQ ID NO: 132909 - DNA, 60 bp, Artificial
  Synthetic oligonucleotide
ccaaacacaagtaccactgtatctgcccaatgatcagtgcagaagaccctgatcgactcc

SEQ ID NO: 132910 - DNA, 60 bp, Artificial
  Synthetic oligonucleotide
gtgccaggtatttgcaggagtatacccattcatgtggggaggagcctattgcttctgcga

SEQ ID NO: 132911 - DNA, 60 bp, Artificial
  Synthetic oligonucleotide
ctcgtcagagacagggcaagggcatctgcaacagaaatcaactcggcagtgcaaactcca

SEQ ID NO: 132912 - DNA, 58 bp, Artificial
  Synthetic oligonucleotide
atggttacgttgtaaagaagattaccatcagtcccggtatctacgggaaggttgataa

SEQ ID NO: 132913 - DNA, 59 bp, Artificial
  Synthetic oligonucleotide
gagggttacgttgtaaagaagattaccatcagtcccggtatttacgggaaagttgataa

SEQ ID NO: 132914 - DNA, 55 bp, Artificial
  Synthetic oligonucleotide
accctttataacactactggcagtgcataatgctgccttttataaaaacactact

SEQ ID NO: 132915 - DNA, 54 bp, Artificial
  Synthetic oligonucleotide
tacttccgagcagcggtaagggtggtgcataatgccacctgcgcagtgcataat

SEQ ID NO: 132916 - DNA, 60 bp, Artificial
  Synthetic oligonucleotide
cgtccaaccacctgcctacgggtactggttttaaattcggggcgatgatgaaatccggaa

SEQ ID NO: 132917 - DNA, 60 bp, Artificial
  Synthetic oligonucleotide
cgatgcatcgcgagggattcttgtgttgcaaggtgacggacacactcaacggggagaggg

SEQ ID NO: 132918 - DNA, 60 bp, Artificial
  Synthetic oligonucleotide
tacgggacaccgtcgggctatgcggccacgatgcatcgcgagggattcttgtgttgcaaa

SEQ ID NO: 132919 - DNA, 60 bp, Artificial
  Synthetic oligonucleotide
ggtaccccaccgtgctctaccgccaccccgcccaccacggcccgtggctcacccttgacg

SEQ ID NO: 132920 - DNA, 58 bp, Artificial
  Synthetic oligonucleotide
accccaccgtgctctaccgccaccccgcccaccacggcccgtggctcacccttgacga

SEQ ID NO: 132921 - DNA, 60 bp, Artificial
  Synthetic oligonucleotide
gaagccaagcaggtcacggataatgaccatgctaatgccagagcattttcgcatttggca

SEQ ID NO: 132922 - DNA, 60 bp, Artificial
  Synthetic oligonucleotide
gcagaggagattgtcaccctcctaaagatcatattgtgacacaaccacaacagcacgtcc

SEQ ID NO: 132923 - DNA, 60 bp, Artificial
  Synthetic oligonucleotide
cgtagcacaacaacaatgacggtttgatgcgggtgcatacatcttttcctccgataccgg

SEQ ID NO: 132924 - DNA, 60 bp, Artificial
  Synthetic oligonucleotide
agtacatccgtcaacactccaactgacggtacgaagcgggagcgtatattttctcatcgg

SEQ ID NO: 132925 - DNA, 60 bp, Artificial
  Synthetic oligonucleotide
gatgacagggattctggctactgacgtcagtgtcgatgatgctcagaaactgctggttgg

SEQ ID NO: 132926 - DNA, 60 bp, Artificial
  Synthetic oligonucleotide
ggaagatagtcctttcctcagagctttgcaacggagcttcccgcagtttgaggtagaagc

SEQ ID NO: 132927 - DNA, 60 bp, Artificial
  Synthetic oligonucleotide
gttcacgttgatatcgaggaggatagccccttcctcagagctttgcaacggagcttcccc

SEQ ID NO: 132928 - DNA, 60 bp, Artificial
  Synthetic oligonucleotide
gaaagtgactccaggaacaaaacatactgaggaacgaccaaaggtacaggtgatccaggc

SEQ ID NO: 132929 - DNA, 60 bp, Artificial
  Synthetic oligonucleotide
aggaggatgatgtcggacaggaagtaccactgcgtctgcccgatgcgcagcgcagaagat

SEQ ID NO: 132930 - DNA, 60 bp, Artificial
  Synthetic oligonucleotide
caggcgtgtacccgttcatgtggggaggggcatattgcttctgcgactcagaaaacacgc

SEQ ID NO: 132931 - DNA, 60 bp, Artificial
  Synthetic oligonucleotide
ggtggacccatccgacacgatccttgacattggaagtgcgcccgcccgcagaatgtattc

SEQ ID NO: 132932 - DNA, 60 bp, Artificial
  Synthetic oligonucleotide
tatacccgccgccattggatcgagtggggccctaaagaagccctacacgtcctcatcgac

SEQ ID NO: 132933 - DNA, 60 bp, Artificial
  Synthetic oligonucleotide
tttcacgcagctgcaggtcagcgatcacccagcactccacgcaatttcgcggtatacccg

SEQ ID NO: 132934 - DNA, 60 bp, Artificial
  Synthetic oligonucleotide
aatttcgcggtacacccgccgccattggatcgagtggggccctaaagaagccctacacgt

SEQ ID NO: 132935 - DNA, 60 bp, Artificial
  Synthetic oligonucleotide
ttcacgcagatgcaggtcagcgatcacccagcactccacgcaatttcgcggtatacccgc

SEQ ID NO: 132936 - DNA, 60 bp, Artificial
  Synthetic oligonucleotide
atccgccacgtgcgcagcctccaacccagcgcgcgggtccgactcccggacctcgtccat

SEQ ID NO: 132937 - DNA, 55 bp, Artificial
  Synthetic oligonucleotide
cggagcttcccgcagtttgaggtagaagccaagcaggtcaccgataacgaccatg

SEQ ID NO: 132938 - DNA, 60 bp, Artificial
  Synthetic oligonucleotide
agtacacgggaggaagattcacggtgcccacaggagtgggtaagcctggcgacagcggtc

SEQ ID NO: 132939 - DNA, 60 bp, Artificial
  Synthetic oligonucleotide
attcacggtgcccacaggagtgggtaagcctggcgacagcggccggcccatctttgataa

SEQ ID NO: 132940 - DNA, 60 bp, Artificial
  Synthetic oligonucleotide
agattgactaactcggcctgtgccgcgttcatcggcgacgacaacgtggttcacggagtc

SEQ ID NO: 132941 - DNA, 60 bp, Artificial
  Synthetic oligonucleotide
ttctgcactgaggggacccgtcatacatctgtacggcggtcctaaataggtgctctacac

SEQ ID NO: 132942 - DNA, 60 bp, Artificial
  Synthetic oligonucleotide
cagcaatggataccactgaggcacgggtcactatctactgccgcgataaaacgtgggagc

SEQ ID NO: 132943 - DNA, 60 bp, Artificial
  Synthetic oligonucleotide
ccatgtcaggtatgctaagcctcggtattctgtgccggtgatgcaaagacttagcagcgc

SEQ ID NO: 132944 - DNA, 60 bp, Artificial
  Synthetic oligonucleotide
ctgtcgacgtcttgtacgtcgatgaggctttcgcttgccatgcagggacattgctagcgc

SEQ ID NO: 132945 - DNA, 60 bp, Artificial
  Synthetic oligonucleotide
gcagcaatggataccactgaggcacgggtcactatctactgccgcgataaaacgtgggag

SEQ ID NO: 132946 - DNA, 60 bp, Artificial
  Synthetic oligonucleotide
ggcaaccccggataacgagtcacggaccttttgccttcacacagatcagacatgcaggac

SEQ ID NO: 132947 - DNA, 60 bp, Artificial
  Synthetic oligonucleotide
tttccaaccgagctgtgcaccgtgctgctatgaaaaggggcctgagccgacgctgaggat

SEQ ID NO: 132948 - DNA, 60 bp, Artificial
  Synthetic oligonucleotide
tacgggctgcatcctacgacaaccattgtcgtggtggttgctgtctcagtagtggtgctc

SEQ ID NO: 132949 - DNA, 60 bp, Artificial
  Synthetic oligonucleotide
ggcgaccccggacaatgagtcacggacattttgccttcacacagatcagacatgcaggac

SEQ ID NO: 132950 - DNA, 60 bp, Artificial
  Synthetic oligonucleotide
attcaaacgtcgcggtactccaggaagtttccatcgagacagaaggtcgatcagtgatcc

SEQ ID NO: 132951 - DNA, 60 bp, Artificial
  Synthetic oligonucleotide
gttgacagaaatattgcagcgaagatagacgacctgcagtcagtgatggcgaccccggac

SEQ ID NO: 132952 - DNA, 60 bp, Artificial
  Synthetic oligonucleotide
cgttgacagaaacatcgcagcgaagatagacgacctgcagtcagtgatggcaaccccgga

SEQ ID NO: 132953 - DNA, 60 bp, Artificial
  Synthetic oligonucleotide
aagtgggattcccgtataaggctcatgttgcgcgtgaaggttacagtcctttgaccctgc

SEQ ID NO: 132954 - DNA, 60 bp, Artificial
  Synthetic oligonucleotide
catcgggagtgccgttgccagtgcttacgagcacacggcaattattccgaaccaagtggg

SEQ ID NO: 132955 - DNA, 60 bp, Artificial
  Synthetic oligonucleotide
cgggcaagtgacacttgttccgccggtcgtctctaagctcttcctctgcattgcaagagt

SEQ ID NO: 132956 - DNA, 60 bp, Artificial
  Synthetic oligonucleotide
cgggcaagtgacacttgttccgccggacgtctctaagctcttcctctgcattgcaagagt

SEQ ID NO: 132957 - DNA, 60 bp, Artificial
  Synthetic oligonucleotide
gcgctgaggacccagagcgtctgctgtattatgccaggaagttagccaaggcatcaggtg

SEQ ID NO: 132958 - DNA, 60 bp, Artificial
  Synthetic oligonucleotide
gcgctgaggacccagagcgtctgctgtattatgctaggaagttggctaaggcatcaggcg

SEQ ID NO: 132959 - DNA, 60 bp, Artificial
  Synthetic oligonucleotide
gcaccgacttctttgtacttccaggcaatgaaaggagtacgcacagcgtactggattggg

SEQ ID NO: 132960 - DNA, 60 bp, Artificial
  Synthetic oligonucleotide
gcggtccatgcaccgacttctttgtacttccaggcaatgaaaggagtacgcacagcgtat

SEQ ID NO: 132961 - DNA, 60 bp, Artificial
  Synthetic oligonucleotide
cgaatgtcgcggtactccaggaagtttccatcgaggcagaaggtcgatcagtgatccact

SEQ ID NO: 132962 - DNA, 60 bp, Artificial
  Synthetic oligonucleotide
tcggacctcgcttaggactcccattcccatggagaaactcctagatgaggttcttgcccc

SEQ ID NO: 132963 - DNA, 60 bp, Artificial
  Synthetic oligonucleotide
ccggacctcgcttaggactcctattcccatggagaaactcctagatgaggttcttgcccc

SEQ ID NO: 132964 - DNA, 60 bp, Artificial
  Synthetic oligonucleotide
tcggacctcgattaggactcctattcccatggagaaactcctagatgaggttcttgcccc

SEQ ID NO: 132965 - DNA, 60 bp, Artificial
  Synthetic oligonucleotide
tcggacctcgcttaggactcctactcccatggagaaactcctagatgaggttcttgcccc

SEQ ID NO: 132966 - DNA, 60 bp, Artificial
  Synthetic oligonucleotide
tcggacctcgcttaggactcctattcccatggagaaactcctagatgaggttcttgcccc

SEQ ID NO: 132967 - DNA, 60 bp, Artificial
  Synthetic oligonucleotide
tcggacctcgcttaggactcctaatcccatggagaaactcctagatgaggttcttgcccc

SEQ ID NO: 132968 - DNA, 60 bp, Artificial
  Synthetic oligonucleotide
ggcagctgccacgaaaagaaattgcaacgtcacgcaaatgagagaattgcctgtattgga

SEQ ID NO: 132969 - DNA, 60 bp, Artificial
  Synthetic oligonucleotide
gctgggcctacgcccggctacacccgcccctgcaccacgcgcatctaccaggtcctgccg

SEQ ID NO: 132970 - DNA, 60 bp, Artificial
  Synthetic oligonucleotide
ccatcgtcagcctgacccgggcctccgacgccctctacctccacgagctcgaggacggct

SEQ ID NO: 132971 - DNA, 60 bp, Artificial
  Synthetic oligonucleotide
cccgtgttccagcgcatgctgtcctactgcaagaccctgagcccggacgcgtactacagc

SEQ ID NO: 132972 - DNA, 52 bp, Artificial
  Synthetic oligonucleotide
ccccgcctatggcgaggaggctttcacctacctctgcactgcaccggggtgc

SEQ ID NO: 132973 - DNA, 51 bp, Artificial
  Synthetic oligonucleotide
ccccgcctatggcgaggaggctttcacctacctctgcactgcaccggggtg

SEQ ID NO: 132974 - DNA, 60 bp, Artificial
  Synthetic oligonucleotide
cgaggaggatagcccattcctcagagctttgcaacggagcttcccacagtttgaggtaga

SEQ ID NO: 132975 - DNA, 60 bp, Artificial
  Synthetic oligonucleotide
gccagagcattttcgcatctggccagtaaactaatcgagctggaggttcctaccacagcg

SEQ ID NO: 132976 - DNA, 60 bp, Artificial
  Synthetic oligonucleotide
cggtgctatccgaagtggtgttggagaggaccgaattggagatttcgtatgccccgcgcc

SEQ ID NO: 132977 - DNA, 60 bp, Artificial
  Synthetic oligonucleotide
cggtgttatccgaagtggtgttggagaggaccgaattggagatttcgtatgccccgcgcc

SEQ ID NO: 132978 - DNA, 60 bp, Artificial
  Synthetic oligonucleotide
cccgtttatgtggggaggcgcctactgcttctgtgacaccgaaaacagtcagatgagtga

SEQ ID NO: 132979 - DNA, 60 bp, Artificial
  Synthetic oligonucleotide
ggactcagtgctcttgaatggatgcaaacaccccgtagagaccctgtatattgacgaagc

SEQ ID NO: 132980 - DNA, 60 bp, Artificial
  Synthetic oligonucleotide
ggccatgactactctagctagcagtgttaaatcattcagctacctgagaggggcccctat

SEQ ID NO: 132981 - DNA, 60 bp, Artificial
  Synthetic oligonucleotide
ctttcagcggccgaatgcactcttaacgagtgcgtgtattcatccgactttggcgggatc

SEQ ID NO: 132982 - DNA, 60 bp, Artificial
  Synthetic oligonucleotide
ccccgaaagtcaaatgttgcggctccttggaatgtcagcccgccgctcacgccgactata

SEQ ID NO: 132983 - DNA, 60 bp, Artificial
  Synthetic oligonucleotide
atagttagttgcgacgggtacgtcgttaaaagaatagctattagtccaggcctgtatggg

SEQ ID NO: 132984 - DNA, 60 bp, Artificial
  Synthetic oligonucleotide
atagtgagttgcgacgggtacgtcgttaaacggatcgctatcagtccaggcctgtacggg

SEQ ID NO: 132985 - DNA, 58 bp, Artificial
  Synthetic oligonucleotide
cttgtgctgcaaggtaacagatacgctcaacggggagagggtctcttttcccgtctgc

SEQ ID NO: 132986 - DNA, 60 bp, Artificial
  Synthetic oligonucleotide
cgctgcccaaaagcgggccatcgtagccgtgatacccagacctgttttcacgcagatgca

SEQ ID NO: 132987 - DNA, 57 bp, Artificial
  Synthetic oligonucleotide
aaaagtgttttccacattttgagatagaagcaacgcaggtcactgacaatgaccatg

SEQ ID NO: 132988 - DNA, 60 bp, Artificial
  Synthetic oligonucleotide
cactgcaaagatgctttccacattttgagatagaagcaacgcaggtcactgacaatgacc

SEQ ID NO: 132989 - DNA, 55 bp, Artificial
  Synthetic oligonucleotide
ggaacgggtctcgttccccgtgtgcacgtatatcccggccaccatatgcgaccag

SEQ ID NO: 132990 - DNA, 60 bp, Artificial
  Synthetic oligonucleotide
caacaacaatgacggtttgatgcgggtgcatacatcttttcctccgacaccggtcaaggg

SEQ ID NO: 132991 - DNA, 53 bp, Artificial
  Synthetic oligonucleotide
gtcggtgtgagactatagttagttgcgacgggtacgtcgtcaaaaggatagct

SEQ ID NO: 132992 - DNA, 60 bp, Artificial
  Synthetic oligonucleotide
gccactatgcaccgcgagggattcttgtgctgcaaggtaacagacacgttgaacggggag

SEQ ID NO: 132993 - DNA, 60 bp, Artificial
  Synthetic oligonucleotide
tgttgctatgtatgtgctgaccaaccagaaacataattagaccacagcagcgattggaaa

SEQ ID NO: 132994 - DNA, 60 bp, Artificial
  Synthetic oligonucleotide
gtactcgaaacacaagtaccactgtatctgtccgatgaaatgcgccgaagatccggacag

SEQ ID NO: 132995 - DNA, 60 bp, Artificial
  Synthetic oligonucleotide
aaaattgttggttgggctcaaccagcgtattgtcgtgaatggacgcactcaaagaaacac

SEQ ID NO: 132996 - DNA, 60 bp, Artificial
  Synthetic oligonucleotide
cgcccaacattatccatgcagtcgggccgaatttctcccgcgtatccgaagtggaaggca

SEQ ID NO: 132997 - DNA, 60 bp, Artificial
  Synthetic oligonucleotide
gacctttgtcctccgcctggtctccgttcgactcaaaggttgtagtgtatgggcacgagg

SEQ ID NO: 132998 - DNA, 60 bp, Artificial
  Synthetic oligonucleotide
cctccaaagctgctgacctactgacggtgatgtcaacaccagacgtagagactccatcat

SEQ ID NO: 132999 - DNA, 60 bp, Artificial
  Synthetic oligonucleotide
gacccaccctttcacgagtttgcatacgaaagtctgaaaacccgtccagcggcgccccat

SEQ ID NO: 133000 - DNA, 60 bp, Artificial
  Synthetic oligonucleotide
aacacggcgtggagttaccctgcaccaagtacacgcacaaacgtgcagaccagggccact

SEQ ID NO: 133001 - DNA, 60 bp, Artificial
  Synthetic oligonucleotide
cacaagcatcgatccctagttttacacctgcacccagaacacccaacactactgacgact

SEQ ID NO: 133002 - DNA, 60 bp, Artificial
  Synthetic oligonucleotide
ctccaaaatcctatcttggagcgctctgtccacgagaaattctacgccccgcgcctcgac

SEQ ID NO: 133003 - DNA, 60 bp, Artificial
  Synthetic oligonucleotide
ggcaaccacctccagctaagaagcagaagcgcaaacaaaagcctggtaaacggcaaagga

SEQ ID NO: 133004 - DNA, 60 bp, Artificial
  Synthetic oligonucleotide
gctgcttttgggaatatcacatctgtccacctcccaacagggacacgcttcaagttcgga

SEQ ID NO: 133005 - DNA, 60 bp, Artificial
  Synthetic oligonucleotide
cacgtggacttagacgctgacagcccttacgtcaagttactgcagaagtgctttccgcat

SEQ ID NO: 133006 - DNA, 60 bp, Artificial
  Synthetic oligonucleotide
gggctcacactggagcattcctagcgcgtctggcttcgaaatccgtgaactgccggaaga

SEQ ID NO: 133007 - DNA, 60 bp, Artificial
  Synthetic oligonucleotide
gcccaataccagcaccgcgtcgcagagtgggagggtttgagactgatactaagcgctacg

SEQ ID NO: 133008 - DNA, 60 bp, Artificial
  Synthetic oligonucleotide
gagccgtgcagtatgaaaacaacaggttcaccgtgccacgaggagtgggcggaaaagggg

SEQ ID NO: 133009 - DNA, 60 bp, Artificial
  Synthetic oligonucleotide
taagcgcgacgtcaaagtaactccggggaccaagcataccgaagaacgaccgaaagtcca

SEQ ID NO: 133010 - DNA, 60 bp, Artificial
  Synthetic oligonucleotide
ccgaacagatacggcttgtgcatgcgtactgccaaagaactggcccgtcgctacccatgc

SEQ ID NO: 133011 - DNA, 60 bp, Artificial
  Synthetic oligonucleotide
cccggtagacacactgtacattgacgaggcctttgcatgccacgcggggacgttactagc

SEQ ID NO: 133012 - DNA, 60 bp, Artificial
  Synthetic oligonucleotide
cgagatcatgacagcggccgcatctcaaggattaacccgcaaaggtgtgtacgcagtcag

SEQ ID NO: 133013 - DNA, 60 bp, Artificial
  Synthetic oligonucleotide
gtattaggagaaagcatgaccagtatccgctctaagtgccctgtagaagattccgaagcc

SEQ ID NO: 133014 - DNA, 60 bp, Artificial
  Synthetic oligonucleotide
ggttcgacgtacttccgagccacgatgacggtggtgcataatgccacctgcgcagtgcat

SEQ ID NO: 133015 - DNA, 60 bp, Artificial
  Synthetic oligonucleotide
cactggcagacagcggtgccttcacgtttcacttttccacagccagcatccacccggcat

SEQ ID NO: 133016 - DNA, 60 bp, Artificial
  Synthetic oligonucleotide
caggatggggataggcgcagagcattgtacgacgaagcgctcagatggaaccggatcggt

SEQ ID NO: 133017 - DNA, 60 bp, Artificial
  Synthetic oligonucleotide
ctgcaagtataaaaccaaggtgccctctcctgtagtcaaatgctgcggctccacccagtg

SEQ ID NO: 133018 - DNA, 60 bp, Artificial
  Synthetic oligonucleotide
gccgcactcgcaatctttgcataacaccatacagattggcacctaacgcccaggtaccca

SEQ ID NO: 133019 - DNA, 60 bp, Artificial
  Synthetic oligonucleotide
ttgtcccaagacgtcctgctccaccggtgccggtacctgcccgtattcctagcccacgct

SEQ ID NO: 133020 - DNA, 60 bp, Artificial
  Synthetic oligonucleotide
caccgtacaagcaccaccattatcagcagtgcgaagaccatgccattcaccacagcatgc

SEQ ID NO: 133021 - DNA, 60 bp, Artificial
  Synthetic oligonucleotide
acacacttcagaacgttttagcggcagccaccaaacgaaactgtaacgtcacccagatgc

SEQ ID NO: 133022 - DNA, 58 bp, Artificial
  Synthetic oligonucleotide
gcagatgcgacagtcccattgccatcgaggacattcgcggagacgctcatgcaggcta

SEQ ID NO: 133023 - DNA, 60 bp, Artificial
  Synthetic oligonucleotide
gcgtcttagctaacatcaccttcccatgtgaccagccaccctgtatgccctgctgttacg

SEQ ID NO: 133024 - DNA, 60 bp, Artificial
  Synthetic oligonucleotide
cccatttactccaccacacgcagcaacagattctcatcggcagacgtcgcggtaagagta

SEQ ID NO: 133025 - DNA, 60 bp, Artificial
  Synthetic oligonucleotide
gcgaggggagagggtatcctttcccgtgtgcacgtatgtaccggcaacactgtgcgatca

SEQ ID NO: 133026 - DNA, 60 bp, Artificial
  Synthetic oligonucleotide
gccggcccctattatcaccgaagccgacgttgcccatcttaaggggatgcaagaagaggc

SEQ ID NO: 133027 - DNA, 60 bp, Artificial
  Synthetic oligonucleotide
gacgaaggcgcccgcactgctctctccgtcgtcacttggaacagcaaaggaaagaccatc

SEQ ID NO: 133028 - DNA, 60 bp, Artificial
  Synthetic oligonucleotide
cggtctatttgcgaagcaaagcatccctttgacgtaccatccagcagacatttcccgccc

SEQ ID NO: 133029 - DNA, 60 bp, Artificial
  Synthetic oligonucleotide
ccggtgaccctcacggatggccacacaaaataattcaacactactatcaacgccacccag

SEQ ID NO: 133030 - DNA, 60 bp, Artificial
  Synthetic oligonucleotide
gacgtccttggccttattgtgctgcgttcggtccgccaacgccgaatctttcaccgacac

SEQ ID NO: 133031 - DNA, 60 bp, Artificial
  Synthetic oligonucleotide
aggagacgtcagccggatacatcaccatgcacaggcctggacctcatgcctatacctcat

SEQ ID NO: 133032 - DNA, 60 bp, Artificial
  Synthetic oligonucleotide
ccgaaagtgaaatgctgcggttcccttgagtgccaacccgcttcgcatgccgactacaac

SEQ ID NO: 133033 - DNA, 60 bp, Artificial
  Synthetic oligonucleotide
gcccagtgcattcccattcaagtaccgccacactccaggaatcaactgttcacgtcttgg

SEQ ID NO: 133034 - DNA, 59 bp, Artificial
  Synthetic oligonucleotide
ccccacgccgcctttattagaccatccgatgcgccatttatctccgaagtgaagtgcga

SEQ ID NO: 133035 - DNA, 60 bp, Artificial
  Synthetic oligonucleotide
cagacatccgcccagttcgggtacgaccaaagtggggcagcagacgtcaacaagtacagg

SEQ ID NO: 133036 - DNA, 60 bp, Artificial
  Synthetic oligonucleotide
gcggcttcaatcacaaaggtacttcttgcttgcgaaatgcccaccgggagatagcgttac

SEQ ID NO: 133037 - DNA, 60 bp, Artificial
  Synthetic oligonucleotide
cggccgaagtcatatgcgaagtggaaggacttcaagcggacattggggccgccctagtag

SEQ ID NO: 133038 - DNA, 60 bp, Artificial
  Synthetic oligonucleotide
cgacctccgaaccgttctcgacacaccagacgtcgaaacaccgtccctttgctttcacaa

SEQ ID NO: 133039 - DNA, 60 bp, Artificial
  Synthetic oligonucleotide
gccaggcacatctaaagacctgaaagtcattgccggacccatctcgtccgcgttttcccc

SEQ ID NO: 133040 - DNA, 60 bp, Artificial
  Synthetic oligonucleotide
accgcaccgccaccatgaatagaggaatatttaacatgctgagccgccgccccttccccg

SEQ ID NO: 133041 - DNA, 60 bp, Artificial
  Synthetic oligonucleotide
cggacgcgccctgctgtcccgtacaaagtggagacaatcggagtaataggaacacccgga

SEQ ID NO: 133042 - DNA, 60 bp, Artificial
  Synthetic oligonucleotide
taatgtcctgctcacgcgcaccgaagacaggctcgtctggaagacattgcagggagaccc

SEQ ID NO: 133043 - DNA, 60 bp, Artificial
  Synthetic oligonucleotide
cccaagaaacacgactaccacggcccgaatatccgcagagccgttccatcagcaatgcaa

SEQ ID NO: 133044 - DNA, 60 bp, Artificial
  Synthetic oligonucleotide
aacaaccaaggccacgcccgctaccacgccctaagaagcagtccccgaagcaaccaccga

SEQ ID NO: 133045 - DNA, 60 bp, Artificial
  Synthetic oligonucleotide
acccatgtactctagcagcgtacccgccagttactccgagcctaaatttgcggtagccgt

SEQ ID NO: 133046 - DNA, 60 bp, Artificial
  Synthetic oligonucleotide
aacccctacattcgttcctgcccgcaagtatatcgaaacaccagaacagcgcatcaccga

SEQ ID NO: 133047 - DNA, 60 bp, Artificial
  Synthetic oligonucleotide
acctgtcggccacatagtcagcacaccccacaagaaggaccaagagttccagaccgccgt

SEQ ID NO: 133048 - DNA, 60 bp, Artificial
  Synthetic oligonucleotide
gcggcggcttcatactgcaagattcagtcacacttaccgcatgccgggtggctgacccat

SEQ ID NO: 133049 - DNA, 60 bp, Artificial
  Synthetic oligonucleotide
cgggaagaacaagagtcatttctgcgcaacacaatttggtacccgttaaccgcaacctgc

SEQ ID NO: 133050 - DNA, 60 bp, Artificial
  Synthetic oligonucleotide
ggcgtacaagagcgaccagaccaagtgggtgttcaactcgcccgatctaatcaggcacgc

SEQ ID NO: 133051 - DNA, 60 bp, Artificial
  Synthetic oligonucleotide
cgaaggtacaagtcatccaggcggcagaacccctggccactgcgtacttatgcgggattc

SEQ ID NO: 133052 - DNA, 60 bp, Artificial
  Synthetic oligonucleotide
acgcagcatcaccgacgatttcaccctgaccagcccgtacctgggcacttgctcgtattg

SEQ ID NO: 133053 - DNA, 60 bp, Artificial
  Synthetic oligonucleotide
gatgctcactaacaccagaagatgaccgctatgccccactgacctgaccagtaaccggtg

SEQ ID NO: 133054 - DNA, 60 bp, Artificial
  Synthetic oligonucleotide
cacggtgcagcaaagaacacggaggaagaacaatacaaggtcctgagggcggaactcgct

SEQ ID NO: 133055 - DNA, 60 bp, Artificial
  Synthetic oligonucleotide
ttcccgtgcagtcgtccgcctacgtgctattcccgaaaaccatctcgtgcccttgacatc

SEQ ID NO: 133056 - DNA, 60 bp, Artificial
  Synthetic oligonucleotide
cgcccgccagggacacaaaccagtgttaaggtgccctcttcctttagtgcgtttccactg

SEQ ID NO: 133057 - DNA, 60 bp, Artificial
  Synthetic oligonucleotide
gacccggtccttgaaacagacatcgcatcgtttgacaaaagccaagatgacgccatggca

SEQ ID NO: 133058 - DNA, 60 bp, Artificial
  Synthetic oligonucleotide
cacgctgcacaagcaccaatacccacaccgcctccacgccttaagaagctagccaggctt

SEQ ID NO: 133059 - DNA, 60 bp, Artificial
  Synthetic oligonucleotide
tgtcgcgccatctataagaggtggcctaactgcttcaccgactctgccaccgaaaccggc

SEQ ID NO: 133060 - DNA, 60 bp, Artificial
  Synthetic oligonucleotide
aaaatttaagtacccaatgatacccaccgaagccaacaagagcaggtaccaatcacggaa

SEQ ID NO: 133061 - DNA, 60 bp, Artificial
  Synthetic oligonucleotide
ccagaaagttcgtccgcgtctcggctgccagacccgagtgcgttaccagtaacactgaga

SEQ ID NO: 133062 - DNA, 60 bp, Artificial
  Synthetic oligonucleotide
atcaagacgatgcacccagcccgtcacggccatagtttcaacactgcattacgatgggaa

SEQ ID NO: 133063 - DNA, 60 bp, Artificial
  Synthetic oligonucleotide
ggattgacgtggtactacagagaaaggaggcagtcaccgagttgaaggatgatgacatgg

SEQ ID NO: 133064 - DNA, 60 bp, Artificial
  Synthetic oligonucleotide
taggcgtccctggtgctgatcggaactataacctggcgttcggatttccaccccagtcgc

SEQ ID NO: 133065 - DNA, 60 bp, Artificial
  Synthetic oligonucleotide
cgtgaaaaatgtcctatagaccttaatccatcttccagcccacccaaaactttcccgtgc

SEQ ID NO: 133066 - DNA, 60 bp, Artificial
  Synthetic oligonucleotide
tcgtatcatgtagtgcgcggggacatagccactgccacggaaggagtaatcgttaatgct

SEQ ID NO: 133067 - DNA, 60 bp, Artificial
  Synthetic oligonucleotide
ccatccgatacgatcctagacattggaagtgcgcctgcccgcagaatgtattccaagcat

SEQ ID NO: 133068 - DNA, 60 bp, Artificial
  Synthetic oligonucleotide
cctgtcggtttgagggccaagtcgcagtgtatcaggatgtgtacgcggttgacggaccga

SEQ ID NO: 133069 - DNA, 60 bp, Artificial
  Synthetic oligonucleotide
gctcgtaatataggcttgtgcagctccgatgtgatggagcggtcacgtagagggatgtcc

SEQ ID NO: 133070 - DNA, 60 bp, Artificial
  Synthetic oligonucleotide
cccggacggaagacaagattgtgtggaagactcttgcaggggacccgtggataaagaccc

SEQ ID NO: 133071 - DNA, 60 bp, Artificial
  Synthetic oligonucleotide
cagtggattacttcaaagaggataaggcccactcagctgagattgtcctgaatcagctgt

SEQ ID NO: 133072 - DNA, 60 bp, Artificial
  Synthetic oligonucleotide
ggaaatgaaataatgaccgcggctgcctcacagggattgacgcggaaaagtgtctatgca

SEQ ID NO: 133073 - DNA, 60 bp, Artificial
  Synthetic oligonucleotide
aaggcagaacggtcctagtagttggtgagaagatgagtatttcaggtaagacggtagact

SEQ ID NO: 133074 - DNA, 60 bp, Artificial
  Synthetic oligonucleotide
ctgtggctatcccgcttctgtccactggaatatttgccggaaacaaggataggttaatgc

SEQ ID NO: 133075 - DNA, 60 bp, Artificial
  Synthetic oligonucleotide
ccaggagagaggcggtagaggagatatgtatctccgaagattcctccgtagcagagccgg

SEQ ID NO: 133076 - DNA, 60 bp, Artificial
  Synthetic oligonucleotide
gattgcgtcaccgatcacgcccaggcatacaaagcacatacagcctcagtccaagccttc

SEQ ID NO: 133077 - DNA, 60 bp, Artificial
  Synthetic oligonucleotide
ccagctccgatgtatacgccaacacaaaccttgtactgcagagacccaaagccggagcga

SEQ ID NO: 133078 - DNA, 60 bp, Artificial
  Synthetic oligonucleotide
cccgctagcttttgacattcccgacgctctgtttaccagggtgtccgaaacaccgacatt

SEQ ID NO: 133079 - DNA, 60 bp, Artificial
  Synthetic oligonucleotide
aaaatggcagattcacagtgcccaaaggagtcggagccaaaggagatagcggccgcccca

SEQ ID NO: 133080 - DNA, 60 bp, Artificial
  Synthetic oligonucleotide
cccgtgcacccaaccacccatctgctacgaccgtaagccagcagagactttgtccatgct

SEQ ID NO: 133081 - DNA, 60 bp, Artificial
  Synthetic oligonucleotide
cccatagccatagaggcggtaaggagcgaagggcacgatggctatgtacgactccagacc

SEQ ID NO: 133082 - DNA, 60 bp, Artificial
  Synthetic oligonucleotide
ggacgtggttaacatccttactgggagggtcagctataattataataattggacttgtgt

SEQ ID NO: 133083 - DNA, 60 bp, Artificial
  Synthetic oligonucleotide
ggatctaccatctaccacgagaagcgagacttactcaggagctggcacttaccgtccgtt

SEQ ID NO: 133084 - DNA, 60 bp, Artificial
  Synthetic oligonucleotide
cgaccagacacccaaacgatcatcaaggtaaacagcgatttccactctttcgtgctgccc

SEQ ID NO: 133085 - DNA, 60 bp, Artificial
  Synthetic oligonucleotide
cagcattaccaccgctgtctgccgatgtagaggaacctgcactggaggcggacgttgact

SEQ ID NO: 133086 - DNA, 60 bp, Artificial
  Synthetic oligonucleotide
ggtgtgtatggcgttcccgggtccgggaagtctggaattattaagagcgcagtcacaaag

SEQ ID NO: 133087 - DNA, 60 bp, Artificial
  Synthetic oligonucleotide
ctgcgacgtagtcaagtccgccgaaatgtttccttatcaaccaatgtatccaatgcagcc

SEQ ID NO: 133088 - DNA, 60 bp, Artificial
  Synthetic oligonucleotide
gagcagtataagatccaaatgccccgttgaggaatcagaggcatccaccccaccaagtac

SEQ ID NO: 133089 - DNA, 60 bp, Artificial
  Synthetic oligonucleotide
ccatcagcaattcagaacacgctgcagaatgtactcgcagctgccacaaagagaaactgc

SEQ ID NO: 133090 - DNA, 60 bp, Artificial
  Synthetic oligonucleotide
atgcagttctgttgcccaacatacacacattatttgacatgtctgctgaggatttcgacg

SEQ ID NO: 133091 - DNA, 60 bp, Artificial
  Synthetic oligonucleotide
agagctggcaaggtccatggccaacttgacgttcaagcaacggcgagatgtgccgcccga

SEQ ID NO: 133092 - DNA, 60 bp, Artificial
  Synthetic oligonucleotide
cggacaaattgcctaaagcatcgggagaaactctcaaaggcaaactgcatgtgcccttcg

SEQ ID NO: 133093 - DNA, 60 bp, Artificial
  Synthetic oligonucleotide
ttgggaatttgtgtggggaaaccatccgcctcaaaggtactggtctcaagaaactgcacc

SEQ ID NO: 133094 - DNA, 60 bp, Artificial
  Synthetic oligonucleotide
gaaccccaccttcctaaccacgaggcagctggatggagaaccagcttacacccacgaact

SEQ ID NO: 133095 - DNA, 59 bp, Artificial
  Synthetic oligonucleotide
aataccattgtcaacagagcgggttatgcacctctacccatcagcatagtacctaccaa

SEQ ID NO: 133096 - DNA, 60 bp, Artificial
  Synthetic oligonucleotide
ccgactttggcgggatcgctacagtcaaatactcggcgagcaagtcaggcaaatgcgcag

SEQ ID NO: 133097 - DNA, 60 bp, Artificial
  Synthetic oligonucleotide
ggccggacgagcaatgcaaagtcttctctggagtatacccatttatgtggggaggggcgt

SEQ ID NO: 133098 - DNA, 60 bp, Artificial
  Synthetic oligonucleotide
cgcccggatacccaaaccatcatcaaagtgaacagcgatttccactcattcgtgctgccc

SEQ ID NO: 133099 - DNA, 60 bp, Artificial
  Synthetic oligonucleotide
ccaccatgtgcctgctcgccaatgtgacgttcccatgtgcccaaccaccaatttgctacg

SEQ ID NO: 133100 - DNA, 60 bp, Artificial
  Synthetic oligonucleotide
aattaacccgctcgatggctaacctgacgttcaagcaacgccgggaagcgccgcctgagg

SEQ ID NO: 133101 - DNA, 60 bp, Artificial
  Synthetic oligonucleotide
tgtcgctacgaagggcaagtcgctgtttaccaggatgtatacgcagttgacggaccgaca

SEQ ID NO: 133102 - DNA, 60 bp, Artificial
  Synthetic oligonucleotide
aatcccctgtacgcacccacctcagaacatgtgaacgtcctactgacccgcacggaggac

SEQ ID NO: 133103 - DNA, 60 bp, Artificial
  Synthetic oligonucleotide
cgccgggcgtaaatagggtgattacaagagaggagtttgaggcgttcgtagcacaacagc

SEQ ID NO: 133104 - DNA, 60 bp, Artificial
  Synthetic oligonucleotide
ttaggtcgaaatgccccgtcgaagagtcggaagcctccacaccacctagcacgctgcctt

SEQ ID NO: 133105 - DNA, 60 bp, Artificial
  Synthetic oligonucleotide
tcacgtgcaaaggtgattgtcaccccccgaaagaccacattgtgacacacccccagtatc

SEQ ID NO: 133106 - DNA, 60 bp, Artificial
  Synthetic oligonucleotide
gggacgtgaaagtgactccaggaacaaaacatactgaagaacggcccaaggtacaggtga

SEQ ID NO: 133107 - DNA, 60 bp, Artificial
  Synthetic oligonucleotide
agcctgagaacacgaccggccgctccttaccaagtaccaaccataggggtgtatggcgtg

SEQ ID NO: 133108 - DNA, 60 bp, Artificial
  Synthetic oligonucleotide
cggcggttaactgcgaaggatacgtagtcaagaagatcaccatcagccccgggatcacgg

SEQ ID NO: 133109 - DNA, 60 bp, Artificial
  Synthetic oligonucleotide
ccatgcatcgtcccggacaacaatccataaccatgctgatggaagagagcggaggggagg

SEQ ID NO: 133110 - DNA, 60 bp, Artificial
  Synthetic oligonucleotide
cagtgacgagaaaccattgaatgtgagagaacgcaaactagctttcggttgcctatgggc

SEQ ID NO: 133111 - DNA, 60 bp, Artificial
  Synthetic oligonucleotide
gaatttggggccggaacacctggagctttcggagatgtccaagcgtcatccaccaccgga

SEQ ID NO: 133112 - DNA, 60 bp, Artificial
  Synthetic oligonucleotide
gtcgcagcggaattcagtgcgttccctatgtcctcggtgtggactacgtcactgccaatg

SEQ ID NO: 133113 - DNA, 60 bp, Artificial
  Synthetic oligonucleotide
aaacgcacaagaggcatataacgaagccgtcgagacagcagaagcggaggagaaagcgaa

SEQ ID NO: 133114 - DNA, 60 bp, Artificial
  Synthetic oligonucleotide
gccattgtcaaaccgagacgtaaagtagtactgtgcggcgacccgaagcagtggcccttc

SEQ ID NO: 133115 - DNA, 60 bp, Artificial
  Synthetic oligonucleotide
ccggacgctgcatttacacgcgtatccgagcccctgccatcactgcttaagtgcaccgtt

SEQ ID NO: 133116 - DNA, 60 bp, Artificial
  Synthetic oligonucleotide
gttgcatataccattcccgctacagcaggctcaatgtacagtaccactggcgcaccttcc

SEQ ID NO: 133117 - DNA, 60 bp, Artificial
  Synthetic oligonucleotide
cggaggtcatgaccgtgcagcttctcaagggctaaccagaaggggcgtttatgcggtcag

SEQ ID NO: 133118 - DNA, 60 bp, Artificial
  Synthetic oligonucleotide
cttgccatgcccaatgtcaaccaccaacggaacacgtaatgaacagaccccagaagtcga

SEQ ID NO: 133119 - DNA, 60 bp, Artificial
  Synthetic oligonucleotide
ccgagcataagtatcactgtgtgtgccccatgcgtagtcctgaagacccggaccgtctta

SEQ ID NO: 133120 - DNA, 60 bp, Artificial
  Synthetic oligonucleotide
ctaaactagccccaatcatcgaaaatggagaaaccgacagtgcacgttgacgtagacccc

SEQ ID NO: 133121 - DNA, 60 bp, Artificial
  Synthetic oligonucleotide
agcgacaagtacgtcgaactgtcaacagattgcgccacagaccatgccgaggcggtcaga

SEQ ID NO: 133122 - DNA, 60 bp, Artificial
  Synthetic oligonucleotide
tctatgctgccggagctgatcgcctggatctctcgctgagatgtcttttcaccgcgctgg

SEQ ID NO: 133123 - DNA, 60 bp, Artificial
  Synthetic oligonucleotide
attgcaaagaaatagagaatgacgtccagaaaatgcggggaatgactatagctacgagaa

SEQ ID NO: 133124 - DNA, 60 bp, Artificial
  Synthetic oligonucleotide
gccgcgtacgcagtaactccgtaacgaacataacggtgtgctcatcctttccgttaccca

SEQ ID NO: 133125 - DNA, 60 bp, Artificial
  Synthetic oligonucleotide
gaacgtaaactcgatgtacttccgaggatgtgggtgcataatgccatacagcggtccact

SEQ ID NO: 133126 - DNA, 60 bp, Artificial
  Synthetic oligonucleotide
cgagagtatacattaacaaggacgagcctcctgttactccccataccgacagcccgccgg

SEQ ID NO: 133127 - DNA, 60 bp, Artificial
  Synthetic oligonucleotide
ccgccttaccacgagctggcatacgaaggattacgtacacgacccgctgccccttaccat

SEQ ID NO: 133128 - DNA, 60 bp, Artificial
  Synthetic oligonucleotide
gcggagtgcggttccatcggcgtttcagaacaccctgcaaaacgtattatcagcagctac

SEQ ID NO: 133129 - DNA, 60 bp, Artificial
  Synthetic oligonucleotide
cccgattaaaaggaccggaagctgcagcactattcgcaaagacacatcaactggtcccgc

SEQ ID NO: 133130 - DNA, 60 bp, Artificial
  Synthetic oligonucleotide
atgagagaggatcgcacaccgagacagccgcctcctgtaccgccaccacgaccaaaacga

SEQ ID NO: 133131 - DNA, 60 bp, Artificial
  Synthetic oligonucleotide
gggagtcagaggagctgaccacaaccatgacctgcatttcgggttcccaccactgtccag

SEQ ID NO: 133132 - DNA, 60 bp, Artificial
  Synthetic oligonucleotide
gcacgtcagatcaacgcccaccgatgacttcactctcacagcaccgtacctcggcttgtg

SEQ ID NO: 133133 - DNA, 60 bp, Artificial
  Synthetic oligonucleotide
aggatcacgacaggcgtagagcgctggaagatgagacaagggcgtggttcagagtgggga

SEQ ID NO: 133134 - DNA, 60 bp, Artificial
  Synthetic oligonucleotide
cctcgagtcgccggatgctgaaactggtaccatttgtttccacaatgacgtaatatgccg

SEQ ID NO: 133135 - DNA, 60 bp, Artificial
  Synthetic oligonucleotide
ggatcgggttcgatacaacgcagtttatgttctcctcgatggcagggtcgtatccgtcct

SEQ ID NO: 133136 - DNA, 60 bp, Artificial
  Synthetic oligonucleotide
ggaagtgaaaatcatagacgcggtcattggtatcaaggccccttacttttgcggcggatt

SEQ ID NO: 133137 - DNA, 60 bp, Artificial
  Synthetic oligonucleotide
ggctcggatcaaacctgcacaattccaatgcgagtaggttacaagttcgtaggcagggaa

SEQ ID NO: 133138 - DNA, 60 bp, Artificial
  Synthetic oligonucleotide
ggggaaatcagaaaccggtccgagtgtacgcgcaggaatcggcacctggcaatcctcatg

SEQ ID NO: 133139 - DNA, 60 bp, Artificial
  Synthetic oligonucleotide
cggcatggatctgagcagtgggatcttctctcgtcctgagatacctctaacgttccatcc

SEQ ID NO: 133140 - DNA, 60 bp, Artificial
  Synthetic oligonucleotide
tattacccctgaatagtaacaaaactagaaaatcgtcaaccaccacggataccgggatcg

SEQ ID NO: 133141 - DNA, 60 bp, Artificial
  Synthetic oligonucleotide
caatgctacacgtcgccagcgcccggctcctcgcacgcgcccgaggaagccgaagactca

SEQ ID NO: 133142 - DNA, 60 bp, Artificial
  Synthetic oligonucleotide
caagaagggattgcctaacaccttaccaactggccccgaacgctaccgtaccatttctgg

SEQ ID NO: 133143 - DNA, 60 bp, Artificial
  Synthetic oligonucleotide
ctacaatgagagagagttcctgaaccggaaactccatcacatcgctacgaagggtgcggc

SEQ ID NO: 133144 - DNA, 60 bp, Artificial
  Synthetic oligonucleotide
aaagacggatccggagcagctccttcttatcgcgttaagagaatgaatatcgcagactgc

SEQ ID NO: 133145 - DNA, 60 bp, Artificial
  Synthetic oligonucleotide
gacgttggcccggtcagcactcaactgcctaaaaccaggaggaacattagccctgaaagc

SEQ ID NO: 133146 - DNA, 60 bp, Artificial
  Synthetic oligonucleotide
aggttgttatacatgcagtgggtcctgattttagaaagtacacgttggaggaagcgacga

SEQ ID NO: 133147 - DNA, 60 bp, Artificial
  Synthetic oligonucleotide
atcacggagctgtccaattttccggcggaaggttcaccatccctacaggagtcggaggcc

SEQ ID NO: 133148 - DNA, 60 bp, Artificial
  Synthetic oligonucleotide
cggcactttctgttgtcacctggaataagaagggagccgctattaaaaccacccacgaag

SEQ ID NO: 133149 - DNA, 60 bp, Artificial
  Synthetic oligonucleotide
gactaaccggggtaggtgggtacatattctcttctgatacaggcccggggcatctgcaac

SEQ ID NO: 133150 - DNA, 60 bp, Artificial
  Synthetic oligonucleotide
ggtaccagatgtcacccaccgtagccaacaagagcaggtaccagtcacggaaagtagaga

SEQ ID NO: 133151 - DNA, 60 bp, Artificial
  Synthetic oligonucleotide
gcagagcaggtgaaaattatcacgcacggtggccgaacaggcaggtattccgtcgaacct

SEQ ID NO: 133152 - DNA, 60 bp, Artificial
  Synthetic oligonucleotide
gaagccgcctcccgtaccgccactacgaccaaaacaaactacgaacttatctcgactcgc

SEQ ID NO: 133153 - DNA, 60 bp, Artificial
  Synthetic oligonucleotide
gccttcggggagatcacaagcgtccacctaccgacagcaaccacgtttaaatttggtgct

SEQ ID NO: 133154 - DNA, 60 bp, Artificial
  Synthetic oligonucleotide
accgaagaaaccgaagcccggtaaacgacagcgtaccgccctgaaatttgaagccgaccg

SEQ ID NO: 133155 - DNA, 60 bp, Artificial
  Synthetic oligonucleotide
aggaaccattgaccacccggccctagcgaaacttaaattcactaaatcttcttcttacga

SEQ ID NO: 133156 - DNA, 60 bp, Artificial
  Synthetic oligonucleotide
acgtatccaaaaccgatgtattctgccagcgtgcctgaccgcttcgtatcacctgaagtg

SEQ ID NO: 133157 - DNA, 60 bp, Artificial
  Synthetic oligonucleotide
gcgtcccaaggtgcaagttattcaagcagcagaaccactggccacggcttacttgtgcgg

SEQ ID NO: 133158 - DNA, 60 bp, Artificial
  Synthetic oligonucleotide
tgcagcatgatgctgactagcacacgaagatgaccgctacgccccaatgacccgaccagc

SEQ ID NO: 133159 - DNA, 60 bp, Artificial
  Synthetic oligonucleotide
ccatgcacggtcccgctaagaatacagaagaggagcagtacaaggttacaaaggcagagc

SEQ ID NO: 133160 - DNA, 60 bp, Artificial
  Synthetic oligonucleotide
caggaaggtatgcagtcgaaccatacgacgctaaagtactgatgccagcaggaagtgccg

SEQ ID NO: 133161 - DNA, 60 bp, Artificial
  Synthetic oligonucleotide
ggccagactgaaaggccctaaggccgccgcactgttcgcaaagacgcataatttggtccc

SEQ ID NO: 133162 - DNA, 60 bp, Artificial
  Synthetic oligonucleotide
gttacaccaggcacgaaacacacagaagaaagaccgaaagtacaagtgatacaagccgca

SEQ ID NO: 133163 - DNA, 60 bp, Artificial
  Synthetic oligonucleotide
gacccggtactggagacggatatcgcctcgttcgacaaaagccaagacgacgctatggcg

SEQ ID NO: 133164 - DNA, 60 bp, Artificial
  Synthetic oligonucleotide
ctgtcgccattccactgctatctacaggcatttacgcagccggaaaagaccgccttgaag

SEQ ID NO: 133165 - DNA, 60 bp, Artificial
  Synthetic oligonucleotide
cccgcaatttgaggtagtagcacagcaggccactccaaatgaccatgctaatgccagagc

SEQ ID NO: 133166 - DNA, 60 bp, Artificial
  Synthetic oligonucleotide
cagaaatgtacctgattttccgacaactagacaacagccgcacacgacaattcaccccgc

SEQ ID NO: 133167 - DNA, 60 bp, Artificial
  Synthetic oligonucleotide
cttcgaaggcaccaaattccatcaagcagcaaaggatatggcggagataaaggtcctgtt

SEQ ID NO: 133168 - DNA, 60 bp, Artificial
  Synthetic oligonucleotide
gcgaccactgttccaaatgtgccacagataccgtataaggcacttgttgaaagggcaggg

SEQ ID NO: 133169 - DNA, 60 bp, Artificial
  Synthetic oligonucleotide
cctgcatggtccctgttgcccacgcgccgaacgtagtacacggctttaaacacatcagcc

SEQ ID NO: 133170 - DNA, 60 bp, Artificial
  Synthetic oligonucleotide
cccgcaatgggctggcttcccaaattcagcaactgaccacagccgtcagtgccctagtca

SEQ ID NO: 133171 - DNA, 60 bp, Artificial
  Synthetic oligonucleotide
gtgtacgtgaacggagtcacaccaggaacgtctaaagacctgaaagtcatagctggacca

SEQ ID NO: 133172 - DNA, 60 bp, Artificial
  Synthetic oligonucleotide
cgtaccgaaatcacgggctgcaccgccatcaagcagtgcgtcgcctataagagcgaccaa

SEQ ID NO: 133173 - DNA, 60 bp, Artificial
  Synthetic oligonucleotide
accgctcccagccgacgacgagcaagacgaagacagaagacgcgctctgctagatgaaac

SEQ ID NO: 133174 - DNA, 60 bp, Artificial
  Synthetic oligonucleotide
gctgcaggtcccggaggaattagtcatggaggccaaggctgctttcgaggatgctcagga

SEQ ID NO: 133175 - DNA, 60 bp, Artificial
  Synthetic oligonucleotide
gcgggatggctaccctgcagtatgtatccgaccgcgaaggacaatgccctgtacattcgc

SEQ ID NO: 133176 - DNA, 60 bp, Artificial
  Synthetic oligonucleotide
tttccgagcaccagtaccattgcgtttgccccatgcgtagtccagaagacccggaccgca

SEQ ID NO: 133177 - DNA, 60 bp, Artificial
  Synthetic oligonucleotide
ccgggatcacgggagaaaccgtgggatacgcggttacacacaatagcgagggcttcttgc

SEQ ID NO: 133178 - DNA, 60 bp, Artificial
  Synthetic oligonucleotide
ccactgagcgactgctttcagggctacgactgtataactctgccacagatcagccagaat

SEQ ID NO: 133179 - DNA, 60 bp, Artificial
  Synthetic oligonucleotide
cacaagggaataattgctgcaataaacagccccgctccccgtaccaatccgttcagctgc

SEQ ID NO: 133180 - DNA, 60 bp, Artificial
  Synthetic oligonucleotide
ccgaatactgtctaaccggggtaggtgggtacatattttcgacggacacaggccctgggc

SEQ ID NO: 133181 - DNA, 60 bp, Artificial
  Synthetic oligonucleotide
ccccggcaacatgccctacggatgtgcctatgtctttcggatcgttttccgacggagaga

SEQ ID NO: 133182 - DNA, 60 bp, Artificial
  Synthetic oligonucleotide
acgttcatgccgtccaagagcctgcccctattccaccgccaaggctaaagaagatggccc

SEQ ID NO: 133183 - DNA, 60 bp, Artificial
  Synthetic oligonucleotide
gatcgagcaggtctgggatgaagcggacgacaacaccatacgcatacagacttccgccca

SEQ ID NO: 133184 - DNA, 60 bp, Artificial
  Synthetic oligonucleotide
ctccccacaagagaatcgaatggatcgccccgattggcatagccggtgcagataagaact

SEQ ID NO: 133185 - DNA, 60 bp, Artificial
  Synthetic oligonucleotide
gcgaggccagtagctcattgggacaacagcccaggaacccgcaagtatgggtacgatcac

SEQ ID NO: 133186 - DNA, 60 bp, Artificial
  Synthetic oligonucleotide
cgcatcaggattcgagatgtggaaaaacaactcaggccgcccactgcaggaaaccgcccc

SEQ ID NO: 133187 - DNA, 60 bp, Artificial
  Synthetic oligonucleotide
gagtagcaactcagcaacgtcatgtacactggcccgcaagataaaaccaaaattcgtggg

SEQ ID NO: 133188 - DNA, 60 bp, Artificial
  Synthetic oligonucleotide
ggccacacgaaatagtacagcattactaccatcgccatcctgtgtacaccatcttagccg

SEQ ID NO: 133189 - DNA, 60 bp, Artificial
  Synthetic oligonucleotide
ctcggcggggctgatgagggaacacgaactgccctttcggtcgtcacctggaatagcaaa

SEQ ID NO: 133190 - DNA, 60 bp, Artificial
  Synthetic oligonucleotide
cgacgtcaagaacgaggacggagatgtcatcgggcacgcactggccatggaaggaaaggt

SEQ ID NO: 133191 - DNA, 60 bp, Artificial
  Synthetic oligonucleotide
cgcaaaaagcgaaggctaagaaaaacgaacagcaaaagaagaacgagaacaagaaaccac

SEQ ID NO: 133192 - DNA, 60 bp, Artificial
  Synthetic oligonucleotide
cttacgagggcagcgctgccaccgctagtgagcggctcttgtgctgacgatattgcccag

SEQ ID NO: 133193 - DNA, 60 bp, Artificial
  Synthetic oligonucleotide
ttggcgaccacgcccggcgttccgtccatggcgggtgccgatgcagccggccccacccat

SEQ ID NO: 133194 - DNA, 60 bp, Artificial
  Synthetic oligonucleotide
gccaagagatcatgaatgatgtaaagaggcaacgcgggttggacgtgaccgctaggaccg

SEQ ID NO: 133195 - DNA, 60 bp, Artificial
  Synthetic oligonucleotide
tccggcggtaaggacagagtgatgcagtccttgaaccacttattcacggcactggacgca

SEQ ID NO: 133196 - DNA, 60 bp, Artificial
  Synthetic oligonucleotide
cagcatcagcatccccggcattcaaggtatctgtgtgcagtgccaaaacgacatgcatgg

SEQ ID NO: 133197 - DNA, 60 bp, Artificial
  Synthetic oligonucleotide
ggctggcgcgtatatcttttcgtctgacactggcccgggtcacctacagcagaagtccgt

SEQ ID NO: 133198 - DNA, 60 bp, Artificial
  Synthetic oligonucleotide
ccgacagaagcgaataagagcaggtaccagtcgaggaaagtagagaacatgaaggcatta

SEQ ID NO: 133199 - DNA, 60 bp, Artificial
  Synthetic oligonucleotide
ctgttttggctggagcttgcaacgccgctcgctgccataatcatactcgtatgctgcctg

SEQ ID NO: 133200 - DNA, 60 bp, Artificial
  Synthetic oligonucleotide
tacacaccgaacctccgatccctccgcctcgccgacgtagagcagccgtcgcccaactta

SEQ ID NO: 133201 - DNA, 60 bp, Artificial
  Synthetic oligonucleotide
tgtcggcggaggactttgatgccatcatagcggcacattttcaaccgggagatgctgtac

SEQ ID NO: 133202 - DNA, 60 bp, Artificial
  Synthetic oligonucleotide
ggtagagagcaaggacctgtatgccaacaccgccctcaagttgtcaagaccttcgtccgg

SEQ ID NO: 133203 - DNA, 60 bp, Artificial
  Synthetic oligonucleotide
ctgcctcgacagagctacgttctgcccggccaaactaagatgttaccctaagcaccacgc

SEQ ID NO: 133204 - DNA, 60 bp, Artificial
  Synthetic oligonucleotide
ccgatggcatgataaagatccaggtcgcagcgcaaattggcatcaacaaaggagggacac

SEQ ID NO: 133205 - DNA, 60 bp, Artificial
  Synthetic oligonucleotide
acctactgccagtggtagcgcaagcattcagtaaatgggcacgagaggcacgcgcagaca

SEQ ID NO: 133206 - DNA, 60 bp, Artificial
  Synthetic oligonucleotide
cagtgccacgctgcggtgactaaccacgacaagtggcagtacacctcctcgtttgtccct

SEQ ID NO: 133207 - DNA, 60 bp, Artificial
  Synthetic oligonucleotide
cgccgccttgatgatgtgcgtcttagccaacgttacattcccatgctcagagcccgcgtg

SEQ ID NO: 133208 - DNA, 60 bp, Artificial
  Synthetic oligonucleotide
tccgcggctgggtgaagcaactgcaaatcgactatcgtggacacgaggtgatgaccgcag

SEQ ID NO: 133209 - DNA, 60 bp, Artificial
  Synthetic oligonucleotide
tcgcatacgaaggactcaagatccgcccagcagccccgtaccacacgacgatcattggtg

SEQ ID NO: 133210 - DNA, 60 bp, Artificial
  Synthetic oligonucleotide
tgaccgtggacgttgaggctgacagcccattccttaaggcccttcagaaggcgtttcccg

SEQ ID NO: 133211 - DNA, 60 bp, Artificial
  Synthetic oligonucleotide
ccgagtaccggcaacaccactaccaacaatgcgtcgaccattcaatgcgcctgcagatgc

SEQ ID NO: 133212 - DNA, 60 bp, Artificial
  Synthetic oligonucleotide
tcatcgcgctggtgagaccgtcaggtaaggtagtactgtgcggcgaccctaagcagtgtg

SEQ ID NO: 133213 - DNA, 60 bp, Artificial
  Synthetic oligonucleotide
gcatctgccccatgaaaagcgcggaagacccagagaggctggcgaattacgctcgaaagc

SEQ ID NO: 133214 - DNA, 60 bp, Artificial
  Synthetic oligonucleotide
cgagatttgcactcgttactacggcgttgacctagacagcggcctattctcagcgcagtc

SEQ ID NO: 133215 - DNA, 60 bp, Artificial
  Synthetic oligonucleotide
acctgttacggcgatcgtgtccaccttgcactaccaagggaagatgagaacgacgaaccg

SEQ ID NO: 133216 - DNA, 60 bp, Artificial
  Synthetic oligonucleotide
cctttccattgccgaagtacaggatagaaggcgtgcagaaggtgaagtgtgaccgagtgc

SEQ ID NO: 133217 - DNA, 60 bp, Artificial
  Synthetic oligonucleotide
gagctcaagataccaagtcagtggcatcggaaacatcactagagcgatgtccacgctgtc

SEQ ID NO: 133218 - DNA, 60 bp, Artificial
  Synthetic oligonucleotide
tgacagccctggctaggaaattctcggcgttccgtgtcctgagaccggcgtgtgtgacga

SEQ ID NO: 133219 - DNA, 60 bp, Artificial
  Synthetic oligonucleotide
aattggcatcacggtgcagtgcagtacagcggtggcaggttcacaatcccgacaggcgca

SEQ ID NO: 133220 - DNA, 60 bp, Artificial
  Synthetic oligonucleotide
gccggcacacgtcaaaggtgtgatcgacaaccccgacctagcgaagctcacctacaagaa

SEQ ID NO: 133221 - DNA, 60 bp, Artificial
  Synthetic oligonucleotide
cggcctacaaggcgcacactgcggcaatgaaagccaccatccgaataagctacgggaacc

SEQ ID NO: 133222 - DNA, 60 bp, Artificial
  Synthetic oligonucleotide
acgacagacatacgcgctatcccagtcccggcacggcgggccattacaatgccagtccca

SEQ ID NO: 133223 - DNA, 60 bp, Artificial
  Synthetic oligonucleotide
taccctagacctgtgtactcaccatcggtggatgacagcctgagcgatccggaggtggct

SEQ ID NO: 133224 - DNA, 60 bp, Artificial
  Synthetic oligonucleotide
ggtgtcacatacggaaagagagaactgacagtgaaactgcacccagatcatcccacgctg

SEQ ID NO: 133225 - DNA, 60 bp, Artificial
  Synthetic oligonucleotide
tgggattcccgtataaggctcacattgagaggaacggcttctccccgatgaccctacagc

SEQ ID NO: 133226 - DNA, 60 bp, Artificial
  Synthetic oligonucleotide
cggtaaactgtactcttaccttgagggcacgaggttccaccagacggcggtcgacatggc

SEQ ID NO: 133227 - DNA, 60 bp, Artificial
  Synthetic oligonucleotide
cctccaggggacgaactaaaggtccagttccaagatgcagaatcgcacacccaggcctgc

SEQ ID NO: 133228 - DNA, 60 bp, Artificial
  Synthetic oligonucleotide
aaattgcgccgttggcaacatcccagtctccatggacatcccggacaccgcgtttacgcg

SEQ ID NO: 133229 - DNA, 60 bp, Artificial
  Synthetic oligonucleotide
cctatgtgcctgcaaccatatgcgaccagatgacgggtatacttgccaccgacgtgacac

SEQ ID NO: 133230 - DNA, 60 bp, Artificial
  Synthetic oligonucleotide
taccagctgactaccgcaccgacggaggaagagatcgacatgcacaccccaccggatatc

SEQ ID NO: 133231 - DNA, 60 bp, Artificial
  Synthetic oligonucleotide
gccaagacgcataacctggtgccgcttcaggaggtgccaatggaccgcttcgtgatggat

SEQ ID NO: 133232 - DNA, 60 bp, Artificial
  Synthetic oligonucleotide
aattaccgtgggagccggaagacctagacatccaattcggtgacttggagccacgccgcc

SEQ ID NO: 133233 - DNA, 60 bp, Artificial
  Synthetic oligonucleotide
cacggcgtgaggtcagacccgctaatggcagaaaggtgcgcgagttgggtcaacatggaa

SEQ ID NO: 133234 - DNA, 60 bp, Artificial
  Synthetic oligonucleotide
cgaagatgggatcgagtacagatggggaaacaacccacccgtgcgcttgtgggcccagct

SEQ ID NO: 133235 - DNA, 60 bp, Artificial
  Synthetic oligonucleotide
gttgaacgagcgaccggcggaggttgatccattccaaaacaaggccaaagtgtgctgggc

SEQ ID NO: 133236 - DNA, 60 bp, Artificial
  Synthetic oligonucleotide
gcactagcgggcgcgtaccctgcgtactcgaccaactgggcagatgagcaagtgctgcag

SEQ ID NO: 133237 - DNA, 60 bp, Artificial
  Synthetic oligonucleotide
aagtacgacggacgggtattgatcccaacaggagcggccatcccagtgagtgagttccag

SEQ ID NO: 133238 - DNA, 60 bp, Artificial
  Synthetic oligonucleotide
gggtcgaccaagaactgctggaccttatcgaagctgcgtttggtgagatcacgagtgtgc

SEQ ID NO: 133239 - DNA, 60 bp, Artificial
  Synthetic oligonucleotide
gagcgatggagtgtgcagggcggtcgctaagaagtggccatcatcattcaaaggggctgc

SEQ ID NO: 133240 - DNA, 60 bp, Artificial
  Synthetic oligonucleotide
cgcagccaggtttccatttctacgtggcaacatgaactcggggctacaactaaacgtccc

SEQ ID NO: 133241 - DNA, 60 bp, Artificial
  Synthetic oligonucleotide
tgtcggaccgcgaaggacaatgccccgtgcactctcactcaagcacagcaacacttcagg

SEQ ID NO: 133242 - DNA, 60 bp, Artificial
  Synthetic oligonucleotide
ggggatcatcgctgcaataaacagcccaacccttcgtataaacccgttcagctgtaagac

SEQ ID NO: 133243 - DNA, 60 bp, Artificial
  Synthetic oligonucleotide
ccaagctgcagagccactagcgacggcatatttgtgcggaatccatcgcgagttggtgcg

SEQ ID NO: 133244 - DNA, 60 bp, Artificial
  Synthetic oligonucleotide
gaatgttgtgatcgcctgcagagtactagaggaaaggcttaagatgtcgagatgcgcggc

SEQ ID NO: 133245 - DNA, 60 bp, Artificial
  Synthetic oligonucleotide
tcgtttccgcgcagtgtaacttggtcccagtgaaccgtaacctcccgcacgctcttgtcc

SEQ ID NO: 133246 - DNA, 60 bp, Artificial
  Synthetic oligonucleotide
gcaccactatcactgcgtctgccctatgcggagccccgaagatcccgaccgtatgatgaa

SEQ ID NO: 133247 - DNA, 60 bp, Artificial
  Synthetic oligonucleotide
ccgcccggggacagcgtgacggtcagtatagtgagcagcagttcaactacatcatgcacg

SEQ ID NO: 133248 - DNA, 60 bp, Artificial
  Synthetic oligonucleotide
aagaagcgacagcccgcgaagccgaaacctggaaagaggcagcgcatggcgcttaagcta

SEQ ID NO: 133249 - DNA, 60 bp, Artificial
  Synthetic oligonucleotide
gtgctcctcgaccccgcttccaaaatataagattaagaacgtccagaaagtccagtgcac

SEQ ID NO: 133250 - DNA, 60 bp, Artificial
  Synthetic oligonucleotide
caagacgaagatagaaggcgagctttattggacgaaacaaaggcgtggttcagagtgggc

SEQ ID NO: 133251 - DNA, 60 bp, Artificial
  Synthetic oligonucleotide
ctctcgacgctgcacgcaaccagtaacggcgattgtttcaacacttcattacgacggaaa

SEQ ID NO: 133252 - DNA, 60 bp, Artificial
  Synthetic oligonucleotide
gacttccctgaatacggcgcaatgaaacctggagtgttcggagacatccaagctacctcc

SEQ ID NO: 133253 - DNA, 60 bp, Artificial
  Synthetic oligonucleotide
ccaaatgatgcccaccgaagccaataagagcaggtaccagtcccgcaaagtcgaaaatca

SEQ ID NO: 133254 - DNA, 60 bp, Artificial
  Synthetic oligonucleotide
cggcgactttgaagactctttcccgctcggctctgaattgcctcaaccctggaggcacct

SEQ ID NO: 133255 - DNA, 60 bp, Artificial
  Synthetic oligonucleotide
cctcgatatggtggatgggactgtcgcttgcctggacaccgcaacattctgcccggctaa

SEQ ID NO: 133256 - DNA, 60 bp, Artificial
  Synthetic oligonucleotide
acttggaaatgtaagcttcccttgcaaccgtccgcctacttgctacacccgcgaaccatc

SEQ ID NO: 133257 - DNA, 60 bp, Artificial
  Synthetic oligonucleotide
tgcacggcttcaaacacattagcctccaactggatacggaccacctgacactgctcacca

SEQ ID NO: 133258 - DNA, 60 bp, Artificial
  Synthetic oligonucleotide
gccgtctacaagcgttggccgagcagctttatggattccgccacagaaacgggtacggct

SEQ ID NO: 133259 - DNA, 60 bp, Artificial
  Synthetic oligonucleotide
caccgtatgccctagccccgaatgccgttgttccgacttcgatagcgctcctatgttgca

SEQ ID NO: 133260 - DNA, 60 bp, Artificial
  Synthetic oligonucleotide
gctggcacctcccatcagtgttccatctgaaaggaaagcaatcgtatacatgccgctgtg

SEQ ID NO: 133261 - DNA, 60 bp, Artificial
  Synthetic oligonucleotide
tcccgggagaactaactaacccaccgtatcatgaaatggcgcttgaggggctgaagactc

SEQ ID NO: 133262 - DNA, 60 bp, Artificial
  Synthetic oligonucleotide
tttaccgcccgcccggaacgcagaccagcgtgaaagtcccggcatcttttagcgcttttc

SEQ ID NO: 133263 - DNA, 60 bp, Artificial
  Synthetic oligonucleotide
cggcggcgaaacaaaccccagtagcacttaccgtatcgaatgatgtgggctcaatggatg

SEQ ID NO: 133264 - DNA, 23 bp, Artificial
  Synthetic oligonucleotide
ctatgaagtcagatgagggtggg

SEQ ID NO: 133265 - DNA, 23 bp, Artificial
  Synthetic oligonucleotide
gaacggaacaagcccataacata

SEQ ID NO: 133266 - DNA, 24 bp, Artificial
  Synthetic oligonucleotide
ggcaaatatggaaacatacgtgaa

SEQ ID NO: 133267 - DNA, 23 bp, Artificial
  Synthetic oligonucleotide
gactcgtagtgaaggtcctttgg

SEQ ID NO: 133268 - DNA, 23 bp, Artificial
  Synthetic oligonucleotide
agataccacgcttgtggacctta

SEQ ID NO: 133269 - DNA, 23 bp, Artificial
  Synthetic oligonucleotide
gggtttgttaaaccttggctttt

SEQ ID NO: 133270 - DNA, 20 bp, Artificial
  Synthetic oligonucleotide
cgtatctgcccgtatgcttg

SEQ ID NO: 133271 - DNA, 20 bp, Artificial
  Synthetic oligonucleotide
cgccccaaacaaagaatagc

SEQ ID NO: 133272 - DNA, 23 bp, Artificial
  Synthetic oligonucleotide
atccgtcatacggaacatcaact

SEQ ID NO: 133273 - DNA, 23 bp, Artificial
  Synthetic oligonucleotide
agagaaaacggaagagtatcgcc

SEQ ID NO: 133274 - DNA, 23 bp, Artificial
  Synthetic oligonucleotide
gctcccagttttgtgaatgaaga

SEQ ID NO: 133275 - DNA, 21 bp, Artificial
  Synthetic oligonucleotide
caccatcattagatggagcgg

SEQ ID NO: 133276 - DNA, 18 bp, Artificial
  Synthetic oligonucleotide
ttcacaaaactgggagcc

SEQ ID NO: 133277 - DNA, 17 bp, Artificial
  Synthetic oligonucleotide
atggacttttacgtgcc

SEQ ID NO: 133278 - DNA, 21 bp, Artificial
  Synthetic oligonucleotide
gttcaggccaccaacaagttc

SEQ ID NO: 133279 - DNA, 23 bp, Artificial
  Synthetic oligonucleotide
ttagctcgcttaccctgtactcg

SEQ ID NO: 133280 - DNA, 19 bp, Artificial
  Synthetic oligonucleotide
ccgcagatcctggctaaaa

SEQ ID NO: 133281 - DNA, 20 bp, Artificial
  Synthetic oligonucleotide
gccgaatcaacgaagcctac

SEQ ID NO: 133282 - DNA, 20 bp, Artificial
  Synthetic oligonucleotide
ccctgggtaaggtgaaaacg

SEQ ID NO: 133283 - DNA, 20 bp, Artificial
  Synthetic oligonucleotide
cccatagcaccgcttatcct

SEQ ID NO: 133284 - DNA, 23 bp, Artificial
  Synthetic oligonucleotide
catgcgtattgctattgagttgc

SEQ ID NO: 133285 - DNA, 20 bp, Artificial
  Synthetic oligonucleotide
atgcaaacgagtccaagcag

SEQ ID NO: 133286 - DNA, 20 bp, Artificial
  Synthetic oligonucleotide
cgtctgctggatggcttcta

SEQ ID NO: 133287 - DNA, 20 bp, Artificial
  Synthetic oligonucleotide
tctcttcttccggcaccatt

SEQ ID NO: 133288 - DNA, 20 bp, Artificial
  Synthetic oligonucleotide
gggtggaaaagttgggatca

SEQ ID NO: 133289 - DNA, 20 bp, Artificial
  Synthetic oligonucleotide
ggctctggagcaggaaaaga

SEQ ID NO: 133290 - DNA, 24 bp, Artificial
  Synthetic oligonucleotide
aggtgaccgtactttacacaatgg

SEQ ID NO: 133291 - DNA, 20 bp, Artificial
  Synthetic oligonucleotide
ttcgcttgtgttcgtccttg

SEQ ID NO: 133292 - DNA, 20 bp, Artificial
  Synthetic oligonucleotide
aacgagctgttgagggcaat

SEQ ID NO: 133293 - DNA, 20 bp, Artificial
  Synthetic oligonucleotide
tatgtacggcgtcaaggagc

SEQ ID NO: 133294 - DNA, 22 bp, Artificial
  Synthetic oligonucleotide
tggaaaattgcgtccttatttg

SEQ ID NO: 133295 - DNA, 20 bp, Artificial
  Synthetic oligonucleotide
tcgagggaactgggaatttg

SEQ ID NO: 133296 - DNA, 20 bp, Artificial
  Synthetic oligonucleotide
cggacggctactgaaccaat

SEQ ID NO: 133297 - DNA, 20 bp, Artificial
  Synthetic oligonucleotide
atgcctgctcaactccatca

SEQ ID NO: 133298 - DNA, 20 bp, Artificial
  Synthetic oligonucleotide
gcagaaatgaagctgatgcg

SEQ ID NO: 133299 - DNA, 18 bp, Artificial
  Synthetic oligonucleotide
ctgaaggccatcacccgt

SEQ ID NO: 133300 - DNA, 55 bp, Artificial
  Synthetic oligonucleotide
cgagtagaagaccgtcatgtaatagggaaagctaagccagaggttagttattatg

SEQ ID NO: 133301 - DNA, 55 bp, Artificial
  Synthetic oligonucleotide
gcggagtcccatagcctccgacaactatggccacgcttgcgtcaggcacgtcaac

SEQ ID NO: 133302 - DNA, 55 bp, Artificial
  Synthetic oligonucleotide
gctcgtcaccacagcgcctgagaacgtgtcaacggccgacttccctaccgagaag

SEQ ID NO: 133303 - DNA, 55 bp, Artificial
  Synthetic oligonucleotide
catgtagtccaggagggccgggtaatgtatgtagacggcgtccgaggggaagggc

SEQ ID NO: 133304 - DNA, 55 bp, Artificial
  Synthetic oligonucleotide
ggcccctgaggcctcgatatcagttgagggaaagcctgggtcgcccttcactgca

SEQ ID NO: 133305 - DNA, 55 bp, Artificial
  Synthetic oligonucleotide
ggtactcactgttcggcatagcactcgtctacggcataataatgttcctcatagc

SEQ ID NO: 133306 - DNA, 55 bp, Artificial
  Synthetic oligonucleotide
atggttgcgcacgccgtcttagctcagggagccgaagagaggcttaggtctgcag

SEQ ID NO: 133307 - DNA, 55 bp, Artificial
  Synthetic oligonucleotide
gttagaaccctatggtcaacgctactgtgatctggtttgtgttaaagctcttaac

SEQ ID NO: 133308 - DNA, 55 bp, Artificial
  Synthetic oligonucleotide
aacctagctcacctctacgactcacagagttagtgacagccagctaaattatagt

SEQ ID NO: 133309 - DNA, 55 bp, Artificial
  Synthetic oligonucleotide
gttgccaagggccattatcagtccctcaaagacccctaggaagctctcgtatggg

SEQ ID NO: 133310 - DNA, 55 bp, Artificial
  Synthetic oligonucleotide
tgcccttagcgtaggcctccagtagcctccttgtaattctatagctgccgcggac

SEQ ID NO: 133311 - DNA, 55 bp, Artificial
  Synthetic oligonucleotide
cgcctactcctgggacgccagcatgatgctttactacaggtacgacggcaggttc

SEQ ID NO: 133312 - DNA, 55 bp, Artificial
  Synthetic oligonucleotide
atgctgagcgactacatacattacttggttccacacgactgcgatggagttatgg

SEQ ID NO: 133313 - DNA, 54 bp, Artificial
  Synthetic oligonucleotide
acgcaaggaacgtagtgacgtgcgtgccctacatgacaatattaacggctgacc

SEQ ID NO: 133314 - DNA, 54 bp, Artificial
  Synthetic oligonucleotide
agcactcttagggctagggccttgttaaccggagtgatagcctcccttgtgtca

SEQ ID NO: 133315 - DNA, 54 bp, Artificial
  Synthetic oligonucleotide
ccccgtaactcttgaccaggtgctagggctagtgaggtatatagccacctcagg

SEQ ID NO: 133316 - DNA, 54 bp, Artificial
  Synthetic oligonucleotide
ttcctctacgaggccccaggctactaggtcgtcaagcgatatcctgaggatctg

SEQ ID NO: 133317 - DNA, 53 bp, Artificial
  Synthetic oligonucleotide
gcagctacccgctcatggttatgataaggggaagctacccgaggctacagtac

SEQ ID NO: 133318 - DNA, 53 bp, Artificial
  Synthetic oligonucleotide
ggacgaggccaacagcttcgttgggctcgccaggtcgctcgtccccagctaca

SEQ ID NO: 133319 - DNA, 52 bp, Artificial
  Synthetic oligonucleotide
ttatgagcacgtatagcgtcacgttggagttgggcagtagctcctgagggta

SEQ ID NO: 133320 - DNA, 51 bp, Artificial
  Synthetic oligonucleotide
gttaacgcttgggacgttagccgcgctgacagatggcatgtttgtcgcact

SEQ ID NO: 133321 - DNA, 50 bp, Artificial
  Synthetic oligonucleotide
ggggcgaggccgagacgtttgtagttatggcgcctcactttaagaagggc

SEQ ID NO: 133322 - DNA, 55 bp, Artificial
  Synthetic oligonucleotide
cggggtcactaacgtggccctgggtaagagctccttaactagcacgtctatggca

SEQ ID NO: 133323 - DNA, 50 bp, Artificial
  Synthetic oligonucleotide
aggggccacggacataacggttatatatggctccataggaagggttggca

SEQ ID NO: 133324 - DNA, 50 bp, Artificial
  Synthetic oligonucleotide
agatgggggcggtccttgcaatcctcaagggagttggcgcggacaccagt

SEQ ID NO: 133325 - DNA, 50 bp, Artificial
  Synthetic oligonucleotide
agaggtcctgcggagggtatgagtcgctggcgtcccgctccttcataact

SEQ ID NO: 133326 - DNA, 50 bp, Artificial
  Synthetic oligonucleotide
agagcccacgtaggcctggtgaggcgcatatgacgggtgttcgtggccca

SEQ ID NO: 133327 - DNA, 50 bp, Artificial
  Synthetic oligonucleotide
actgtccgctgcagctaaggctcccctcggcaagccctctgatcgcgtca

SEQ ID NO: 133328 - DNA, 50 bp, Artificial
  Synthetic oligonucleotide
aaagttcctggggtgccccctctgaggacatgtcagccgttccccacaac

SEQ ID NO: 133329 - DNA, 50 bp, Artificial
  Synthetic oligonucleotide
aacaggtgggccgagagggacctcataccgttcgcgaggcaggcgggggt

SEQ ID NO: 133330 - DNA, 50 bp, Artificial
  Synthetic oligonucleotide
aacatatcgccggcctccatacagccagtggtcctcggcatgcatggaga

SEQ ID NO: 133331 - DNA, 50 bp, Artificial
  Synthetic oligonucleotide
aaccacatggccgcggtcctaggcatctcaaggagggcctatgggtccaa

SEQ ID NO: 133332 - DNA, 50 bp, Artificial
  Synthetic oligonucleotide
aacctcaggggcgagtactatggggcctacgcggccagcttagcgcttat

SEQ ID NO: 133333 - DNA, 55 bp, Artificial
  Synthetic oligonucleotide
cgtgctagaagctataggctcgtggtataagtcgaggggaataacgataggcccc

SEQ ID NO: 133334 - DNA, 50 bp, Artificial
  Synthetic oligonucleotide
aacgatagccaggagggccggggagctcgggaggcctttagtggtcctag

SEQ ID NO: 133335 - DNA, 50 bp, Artificial
  Synthetic oligonucleotide
aacggaatgcaggtaggagaggcgccgcccatagggcaggtcttcgtatg

SEQ ID NO: 133336 - DNA, 50 bp, Artificial
  Synthetic oligonucleotide
aacgtagctttctaccaggtcaggcgaggagccgggaggtatggcgggag

SEQ ID NO: 133337 - DNA, 50 bp, Artificial
  Synthetic oligonucleotide
aacgtggagggcaggtcggtacttgacgtaggcgcgttcgtgggcgactc

SEQ ID NO: 133338 - DNA, 50 bp, Artificial
  Synthetic oligonucleotide
aacgtggccctcggaaccctcttaagcgacggtcttgcgggcatgactta

SEQ ID NO: 133339 - DNA, 50 bp, Artificial
  Synthetic oligonucleotide
aactacggccgttgagtgggacggaagcctaagcggtgccatgcccagag

SEQ ID NO: 133340 - DNA, 50 bp, Artificial
  Synthetic oligonucleotide
aagcgcagggcacatgtttggaccgtcaactggcgttgagggccttccag

SEQ ID NO: 133341 - DNA, 50 bp, Artificial
  Synthetic oligonucleotide
aaggcgcatcataagggccggggacacgctcatactttccgtggagaggg

SEQ ID NO: 133342 - DNA, 50 bp, Artificial
  Synthetic oligonucleotide
aaggggcggggccgcttggatcaggggctctaacacgttagctgggagcg

SEQ ID NO: 133343 - DNA, 50 bp, Artificial
  Synthetic oligonucleotide
aagggggtccgaccctcttaactccaatgcccgtatgctcccgtcgggag

SEQ ID NO: 133344 - DNA, 55 bp, Artificial
  Synthetic oligonucleotide
cgtttatcagcgatcccactaggacggcgtagcccacctccttaaggtcgctgag

SEQ ID NO: 133345 - DNA, 50 bp, Artificial
  Synthetic oligonucleotide
aagggttggcgacgtgataaggcttgcagggagcgcctgggaagtctcaa

SEQ ID NO: 133346 - DNA, 50 bp, Artificial
  Synthetic oligonucleotide
actcttccgcggatgctatctccggccactaacagcttgcggcctagcct

SEQ ID NO: 133347 - DNA, 50 bp, Artificial
  Synthetic oligonucleotide
actcaagttcccccaggacagggcgaggcttgacgtgagcccacacccgt

SEQ ID NO: 133348 - DNA, 50 bp, Artificial
  Synthetic oligonucleotide
acgtctggaacaccagaagcggaggcggggatgtcacagtaagggcctgc

SEQ ID NO: 133349 - DNA, 50 bp, Artificial
  Synthetic oligonucleotide
acgtcacgtccaacggaatgcaggtaggagaggcgccgcccatagggcag

SEQ ID NO: 133350 - DNA, 50 bp, Artificial
  Synthetic oligonucleotide
acggtgacccctcacctcgtggaggttaaggctatgacgcacccaggcgt

SEQ ID NO: 133351 - DNA, 50 bp, Artificial
  Synthetic oligonucleotide
acgggacctcccgaccgtagaggagcccctttgccacgcctacggagggg

SEQ ID NO: 133352 - DNA, 50 bp, Artificial
  Synthetic oligonucleotide
acggctataaacgtccccaagaggcacccagcggcctcgagggcccctga

SEQ ID NO: 133353 - DNA, 50 bp, Artificial
  Synthetic oligonucleotide
acggaggccgagccctcgttaaggtctactggggtgaagcccttcggctc

SEQ ID NO: 133354 - DNA, 50 bp, Artificial
  Synthetic oligonucleotide
acgctaagttgcagggacaggtgcccgcctaagtctcttggagctgcgga

SEQ ID NO: 133355 - DNA, 55 bp, Artificial
  Synthetic oligonucleotide
ctgaaaggtgcagcccaattgaagctagagccaaagataagcgaaacccgatggg

SEQ ID NO: 133356 - DNA, 50 bp, Artificial
  Synthetic oligonucleotide
acctcgtcacgcgcttggccccacgacacctagcctcggcagccctagcc

SEQ ID NO: 133357 - DNA, 50 bp, Artificial
  Synthetic oligonucleotide
accgcccaatacgtgcggggtttctctactagcgcctccgtcgcagacac

SEQ ID NO: 133358 - DNA, 50 bp, Artificial
  Synthetic oligonucleotide
accctcacgctgaagccccaggacctgaggacgtccgccaccctccaggc

SEQ ID NO: 133359 - DNA, 50 bp, Artificial
  Synthetic oligonucleotide
acaggtgcgccgtcaactgagcgcctgcttatgtcgccaaggctcgtgta

SEQ ID NO: 133360 - DNA, 50 bp, Artificial
  Synthetic oligonucleotide
acagggcgaggcttgacgtgagcccacacccgttcacgaccaacatgggg

SEQ ID NO: 133361 - DNA, 50 bp, Artificial
  Synthetic oligonucleotide
acagccatgacggaggcctcgggtgagcgggccttgtggagtgtgattga

SEQ ID NO: 133362 - DNA, 50 bp, Artificial
  Synthetic oligonucleotide
acaagcgcgggggcctcaactcgtgggttcgcactacggacgtcgctgca

SEQ ID NO: 133363 - DNA, 50 bp, Artificial
  Synthetic oligonucleotide
aagtctgaccacgccgttaggaagcctcaccctgtcgagcgttggggagg

SEQ ID NO: 133364 - DNA, 55 bp, Artificial
  Synthetic oligonucleotide
gacaaccctgtccttatctattactatcatcctgtagaaatggcctccatccctg

SEQ ID NO: 133365 - DNA, 55 bp, Artificial
  Synthetic oligonucleotide
catgttgtcggtgtacccataaaccatgggagtcgctccatagcgggagctcaga

SEQ ID NO: 133366 - DNA, 55 bp, Artificial
  Synthetic oligonucleotide
gcaggtgtccatagtgtatgaggtaagcggcctcgtaaaagtcggcgttcgcacc

SEQ ID NO: 133367 - DNA, 53 bp, Artificial
  Synthetic oligonucleotide
cccccttgaatgggagtaagctacgagacaatttaaagtttgccatttcgaaa

SEQ ID NO: 133368 - DNA, 60 bp, Artificial
  Synthetic oligonucleotide
taggattgtgtatgctaatccatgggctatgtcttccaaggaacatgttagctacattaa

SEQ ID NO: 133369 - DNA, 55 bp, Artificial
  Synthetic oligonucleotide
atgatgtagggcacttttgcgacagctaacaggaagagggccatacccacaagcg

SEQ ID NO: 133370 - DNA, 55 bp, Artificial
  Synthetic oligonucleotide
ccagtactcggctctttcaacatctgcacctaggtattcaaagaattcgattatc

SEQ ID NO: 133371 - DNA, 55 bp, Artificial
  Synthetic oligonucleotide
aattccacttaagccgggcacaaatggctatccaattcctggagttaggatggag

SEQ ID NO: 133372 - DNA, 55 bp, Artificial
  Synthetic oligonucleotide
attctgaggattgccgctgagcttaagccgtagggaattgccgtagagccgaggg

SEQ ID NO: 133373 - DNA, 55 bp, Artificial
  Synthetic oligonucleotide
caaagctccctctcacataccctataatgtcgaacttaagcgtgaagggcctgtc

SEQ ID NO: 133374 - DNA, 54 bp, Artificial
  Synthetic oligonucleotide
aacgtcctcgtaattcgtaacatccgctcttattccgtaagcctcacctccgga

SEQ ID NO: 133375 - DNA, 52 bp, Artificial
  Synthetic oligonucleotide
aacgaaccgtggctttcatggcgtggaggttaacggccactttgtaccggtc

SEQ ID NO: 133376 - DNA, 55 bp, Artificial
  Synthetic oligonucleotide
caagtagacgtcgcccggagacttgtgtccacaacacggtatcggtaacctgtgg

SEQ ID NO: 133377 - DNA, 55 bp, Artificial
  Synthetic oligonucleotide
cagctaccggattcagttcaattccgataacttccctcggcttggaaagtctcgc

SEQ ID NO: 133378 - DNA, 55 bp, Artificial
  Synthetic oligonucleotide
cactaactctgaagctgaggttcgttgactacggagaggttgagattggcaggta

SEQ ID NO: 133379 - DNA, 59 bp, Artificial
  Synthetic oligonucleotide
tgatgggaacactccttagacatcttagttcacctctaacctatctagctaaggttagc

SEQ ID NO: 133380 - DNA, 54 bp, Artificial
  Synthetic oligonucleotide
agccccgcgatgcatttcggacttgactgcggagcaatcgtaccgggctttaag

SEQ ID NO: 133381 - DNA, 54 bp, Artificial
  Synthetic oligonucleotide
gggtatttttgacggtaacgcttcctccaatctttccgctaaagatagagcaat

SEQ ID NO: 133382 - DNA, 54 bp, Artificial
  Synthetic oligonucleotide
tgaagaggtacgtgtgcaaataaggaagagcattatgcaggaaccactacttaa

SEQ ID NO: 133383 - DNA, 54 bp, Artificial
  Synthetic oligonucleotide
tttcagaactctcgcttcgtacttaactccgtaatcgaatgattcggcgcataa

SEQ ID NO: 133384 - DNA, 54 bp, Artificial
  Synthetic oligonucleotide
tttgtccacataagctacggtgaaccgggagtttacggtatcataacaaacgct

SEQ ID NO: 133385 - DNA, 53 bp, Artificial
  Synthetic oligonucleotide
aggagggtgacactgttctgttcacgtacatggatgctccacttgccatgttt

SEQ ID NO: 133386 - DNA, 53 bp, Artificial
  Synthetic oligonucleotide
aggaactcggtaaggacatacctttcgttcaagtgtcagcgagtgagttctac

SEQ ID NO: 133387 - DNA, 53 bp, Artificial
  Synthetic oligonucleotide
agtaaaccccgcaacgatgtaccttctcgagtttgttgctgtcggcacgcagc

SEQ ID NO: 133388 - DNA, 53 bp, Artificial
  Synthetic oligonucleotide
gtaagctgtgcctgccgatagcccgcttaaagttatcatgggactgtctgtgc

SEQ ID NO: 133389 - DNA, 53 bp, Artificial
  Synthetic oligonucleotide
tccggagcagaaacatttaaacggaaccgatgcttggataccctacgacagga

SEQ ID NO: 133390 - DNA, 54 bp, Artificial
  Synthetic oligonucleotide
ttcagaaaactatgatgttggggtatttttgacggtaacgcttcctccaatctt

SEQ ID NO: 133391 - DNA, 53 bp, Artificial
  Synthetic oligonucleotide
aacaagcccgcaacagtgcaatacgccatgggtgctacccagcatccttacgg

SEQ ID NO: 133392 - DNA, 52 bp, Artificial
  Synthetic oligonucleotide
agaggccagggtggttcgctaggcccgcctttcggctcgtgaccccttattg

SEQ ID NO: 133393 - DNA, 52 bp, Artificial
  Synthetic oligonucleotide
agaacaggcccggtgtcctcgcaagagttgcatcgctcttcaggaggagggg

SEQ ID NO: 133394 - DNA, 52 bp, Artificial
  Synthetic oligonucleotide
cagcttcccgcgagaattccaacccgcggtactcaggtaactccccacaccc

SEQ ID NO: 133395 - DNA, 52 bp, Artificial
  Synthetic oligonucleotide
tacgctgactactatgttgatgacagggccgtggaattcaaaggagactggc

SEQ ID NO: 133396 - DNA, 52 bp, Artificial
  Synthetic oligonucleotide
tccctgggtaaaggatccgagagatccggatggaagctacgggaaatttatc

SEQ ID NO: 133397 - DNA, 52 bp, Artificial
  Synthetic oligonucleotide
aatcgccggtggcactgcattgagcggtttgataggtcaggcacagcccggt

SEQ ID NO: 133398 - DNA, 52 bp, Artificial
  Synthetic oligonucleotide
aagcttccttaaaccctatcttgtggatcatgtacggcaatcctaacggtag

SEQ ID NO: 133399 - DNA, 51 bp, Artificial
  Synthetic oligonucleotide
acaatcgcttgctgtatcggagctgcctcccacggcggacatgcgaggcac

SEQ ID NO: 133400 - DNA, 51 bp, Artificial
  Synthetic oligonucleotide
agtgtggttgaggtcagaccaccaacagtctccctctcaccgccaggaggc

SEQ ID NO: 133401 - DNA, 55 bp, Artificial
  Synthetic oligonucleotide
aaagatcaccttgaagaagccgtagttttactaaggcttagagaggagcttacag

SEQ ID NO: 133402 - DNA, 51 bp, Artificial
  Synthetic oligonucleotide
agtatacgctttcgatgatgtaggggcaaccccgacaccgcacaaccccga

SEQ ID NO: 133403 - DNA, 51 bp, Artificial
  Synthetic oligonucleotide
gtttccctcaatatccccggaactctatcgaactttctcgcatgaatgaca

SEQ ID NO: 133404 - DNA, 51 bp, Artificial
  Synthetic oligonucleotide
gtggttgggctggaggtggacggttaccccttccctctcattcacgcacac

SEQ ID NO: 133405 - DNA, 51 bp, Artificial
  Synthetic oligonucleotide
accgagcttccgggcttcataccacctgtggtcgtttgcacatcgtcattg

SEQ ID NO: 133406 - DNA, 51 bp, Artificial
  Synthetic oligonucleotide
cttaacgttgtcgacgctgtgggggcaagctacctgcggctccaagttgct

SEQ ID NO: 133407 - DNA, 51 bp, Artificial
  Synthetic oligonucleotide
ggggagccgcagagatgcttagcccagcactcggtgcattcgggaattctt

SEQ ID NO: 133408 - DNA, 51 bp, Artificial
  Synthetic oligonucleotide
gggcatcggcacggggacatttgctacataaccgcgactccggtcctcaat

SEQ ID NO: 133409 - DNA, 51 bp, Artificial
  Synthetic oligonucleotide
gaagggctctttagcgtgccttccgtgggtgtggggaacaactctcggctc

SEQ ID NO: 133410 - DNA, 51 bp, Artificial
  Synthetic oligonucleotide
gaccgcgctatcagggccatctgacagttaaggagcttgcgggagagggta

SEQ ID NO: 133411 - DNA, 51 bp, Artificial
  Synthetic oligonucleotide
gggagctttcacggagctcacgatgcggttctcgttaaagccggaagcgga

SEQ ID NO: 133412 - DNA, 60 bp, Artificial
  Synthetic oligonucleotide
tctttccgctaaagatagagcaatatcttcttagctatatcctccataggcttaggaatt

SEQ ID NO: 133413 - DNA, 51 bp, Artificial
  Synthetic oligonucleotide
acggactcgcgataggagctgacacgagccagagttctccgggggatgcgc

SEQ ID NO: 133414 - DNA, 51 bp, Artificial
  Synthetic oligonucleotide
acggctatctgggagtgcaagagctgcggttacaagttcgccgggggaacg

SEQ ID NO: 133415 - DNA, 51 bp, Artificial
  Synthetic oligonucleotide
agccggttgttgcgttcgtaaaggggtatgcgattggggctgggttcagca

SEQ ID NO: 133416 - DNA, 51 bp, Artificial
  Synthetic oligonucleotide
gccccacgttggtttgggaagcggaactcagataagtctggcggtggggaa

SEQ ID NO: 133417 - DNA, 51 bp, Artificial
  Synthetic oligonucleotide
agccagcttcaagttctctgctttctggcattaccctcggcggaccccagc

SEQ ID NO: 133418 - DNA, 51 bp, Artificial
  Synthetic oligonucleotide
agcatctccatgcgggtggtaatgacccagaacgtgacccacaaccctcgc

SEQ ID NO: 133419 - DNA, 51 bp, Artificial
  Synthetic oligonucleotide
agcaagctccgctgaatccctgcccgcagagatcggtcgtgtagccgagac

SEQ ID NO: 133420 - DNA, 51 bp, Artificial
  Synthetic oligonucleotide
cagcagcccatcgtgtgcggtaaacatatccgagctatcagcccgggccca

SEQ ID NO: 133421 - DNA, 51 bp, Artificial
  Synthetic oligonucleotide
atacggcccgctcacaattctttacgctgcagccggactggtgaggcttga

SEQ ID NO: 133422 - DNA, 51 bp, Artificial
  Synthetic oligonucleotide
cctgagtcatcgcaccactggaagctaaccccgctcccgcgattattgcga

SEQ ID NO: 133423 - DNA, 52 bp, Artificial
  Synthetic oligonucleotide
aaacaagggtagttgttaccaagccttacaggacacgttttaactcacctga

SEQ ID NO: 133424 - DNA, 51 bp, Artificial
  Synthetic oligonucleotide
tgccccggtcagagcgcctgtggtaaaaagggagccaacaaccatttcgct

SEQ ID NO: 133425 - DNA, 51 bp, Artificial
  Synthetic oligonucleotide
tatagtaatacacattccatggcccacgtaactataaatgttagcattgaa

SEQ ID NO: 133426 - DNA, 51 bp, Artificial
  Synthetic oligonucleotide
tcgaagacctccccattggggtcggccttgagaaactcgtaatgggcgagg

SEQ ID NO: 133427 - DNA, 51 bp, Artificial
  Synthetic oligonucleotide
tcgcatgggtaaggcgaagatgaaagacgtggttatcgagctccagaacgt

SEQ ID NO: 133428 - DNA, 51 bp, Artificial
  Synthetic oligonucleotide
aacaactcctccggcagagtgccaggcggtggagcatagaggatcagcctt

SEQ ID NO: 133429 - DNA, 50 bp, Artificial
  Synthetic oligonucleotide
aacgccggaaggtgggcaaggccctccgtaaccgtagaatccgaagtcgt

SEQ ID NO: 133430 - DNA, 50 bp, Artificial
  Synthetic oligonucleotide
acgagccttcccacgacggatggcagaaccggaacgaagccgaccaaaga

SEQ ID NO: 133431 - DNA, 50 bp, Artificial
  Synthetic oligonucleotide
acgctgtggggcgacccagaccgctatgtgaggcagtactggagcgcata

SEQ ID NO: 133432 - DNA, 50 bp, Artificial
  Synthetic oligonucleotide
acggacgatatcccgcaaccaccgaagtccatcaagccccatccgcacgg

SEQ ID NO: 133433 - DNA, 50 bp, Artificial
  Synthetic oligonucleotide
acggatgcgttctcacaataacgctccccctttcggcgtacctgcgccta

SEQ ID NO: 133434 - DNA, 56 bp, Artificial
  Synthetic oligonucleotide
atggttcgaaattgccattagactacttacaaagcccgttgagaggtttgagccga

SEQ ID NO: 133435 - DNA, 50 bp, Artificial
  Synthetic oligonucleotide
cccacgcgtcctgggagaatgcgaggctctactggtatgcgggggccctc

SEQ ID NO: 133436 - DNA, 50 bp, Artificial
  Synthetic oligonucleotide
acgtggtgctaccaccgcgtggtcaggggacttgaaccggcctgcgtgta

SEQ ID NO: 133437 - DNA, 50 bp, Artificial
  Synthetic oligonucleotide
ccggcccttaccatgtgcacgtctgcgattatcctgcagccatcccgcaa

SEQ ID NO: 133438 - DNA, 50 bp, Artificial
  Synthetic oligonucleotide
ttcgttccccgccccgtttccatagaggcttaccttccgattggtgggct

SEQ ID NO: 133439 - DNA, 50 bp, Artificial
  Synthetic oligonucleotide
acttcgacgagtgcccctacagccacttcccagtgagggctgctgtcagg

SEQ ID NO: 133440 - DNA, 50 bp, Artificial
  Synthetic oligonucleotide
aacaaccccactcgcgagtagcacaccctctgctccgagctccaatgctt

SEQ ID NO: 133441 - DNA, 50 bp, Artificial
  Synthetic oligonucleotide
cccacgtttaccagccctcccctaacgtaggggtcgtcgattggagccct

SEQ ID NO: 133442 - DNA, 50 bp, Artificial
  Synthetic oligonucleotide
aaacgcctgttgctttcgtggggcgagaagccatggtcttgcactgccac

SEQ ID NO: 133443 - DNA, 50 bp, Artificial
  Synthetic oligonucleotide
cccacggcggactaacgccccttgacgttaagcttgctttgaggccgaca

SEQ ID NO: 133444 - DNA, 50 bp, Artificial
  Synthetic oligonucleotide
cccgtgggaaaactcgacgaatcctgaccccgccctaaccggtgtggcaa

SEQ ID NO: 133445 - DNA, 50 bp, Artificial
  Synthetic oligonucleotide
ggacctgtaaattggataacaaaggtttacaaggacgaaaacggtaaatg

SEQ ID NO: 133446 - DNA, 50 bp, Artificial
  Synthetic oligonucleotide
tactcaccggaatgccgcttccgattaattccggcggctctacagccacg

SEQ ID NO: 133447 - DNA, 50 bp, Artificial
  Synthetic oligonucleotide
aatcgtggtcgaggcaatttatgcgggtctctgccccgcgtgtgggggcg

SEQ ID NO: 133448 - DNA, 50 bp, Artificial
  Synthetic oligonucleotide
cccgtcatcgttctccgatgcgaagctctgcaacctcagcgcaacgagca

SEQ ID NO: 133449 - DNA, 50 bp, Artificial
  Synthetic oligonucleotide
accacggcctcgaaagttgcgttgcgagaacccaagccgtcacggtgtgg

SEQ ID NO: 133450 - DNA, 50 bp, Artificial
  Synthetic oligonucleotide
accagccctcccctaacgtaggggtcgtcgattggagccctctcgccgta

SEQ ID NO: 133451 - DNA, 50 bp, Artificial
  Synthetic oligonucleotide
accgctctgttgtgagggccatcataccgctcatcagcatttctgtggct

SEQ ID NO: 133452 - DNA, 50 bp, Artificial
  Synthetic oligonucleotide
ccctacttcttgaggcttataggcacgcaggggaaatgccggacttatat

SEQ ID NO: 133453 - DNA, 50 bp, Artificial
  Synthetic oligonucleotide
tctcggttgctttaacaactcctccggcagagtgccaggcggtggagcat

SEQ ID NO: 133454 - DNA, 50 bp, Artificial
  Synthetic oligonucleotide
accggcagagactggggagggcacatcacagttgacttccccgactccaa

SEQ ID NO: 133455 - DNA, 50 bp, Artificial
  Synthetic oligonucleotide
ccctcgatcccccgcagaggtagcggaactcacatctgccacacttcccc

SEQ ID NO: 133456 - DNA, 55 bp, Artificial
  Synthetic oligonucleotide
cttgaagatagttccaccgtatagccgtgagaataagataaccgttaggttgccg

SEQ ID NO: 133457 - DNA, 50 bp, Artificial
  Synthetic oligonucleotide
acctcactccctgccttacccaaagcgcccccactcctttggggccgtaa

SEQ ID NO: 133458 - DNA, 50 bp, Artificial
  Synthetic oligonucleotide
aagacagggatacttccactcgacacgcagctaggcgggggaatgccagc

SEQ ID NO: 133459 - DNA, 50 bp, Artificial
  Synthetic oligonucleotide
cccgcagggcgcaattgacgtgagaggctacgtggactactccccgcttg

SEQ ID NO: 133460 - DNA, 50 bp, Artificial
  Synthetic oligonucleotide
ccatgccttgcttgtgccagccacgctctgcctggtagactcgatgttga

SEQ ID NO: 133461 - DNA, 50 bp, Artificial
  Synthetic oligonucleotide
ccgctgtcgaggcccacgtttaccagccctcccctaacgtaggggtcgtc

SEQ ID NO: 133462 - DNA, 50 bp, Artificial
  Synthetic oligonucleotide
gggaggaatcgtttaagcagagtctccttcgcatactcgaacttgtatcg

SEQ ID NO: 133463 - DNA, 50 bp, Artificial
  Synthetic oligonucleotide
ctcgtgagggcgacgaggaagcatgaggccgtggaagttggctccagtcc

SEQ ID NO: 133464 - DNA, 50 bp, Artificial
  Synthetic oligonucleotide
ctccgggcgcaatcggctggttgtaaaccctccagaccatgttgaggccc

SEQ ID NO: 133465 - DNA, 50 bp, Artificial
  Synthetic oligonucleotide
ataccgtcggacgccgagatactcagggctgcgaaagggacggagctcta

SEQ ID NO: 133466 - DNA, 50 bp, Artificial
  Synthetic oligonucleotide
cgttgggagacatcaagccagcggacactatcggccccaaagccgtcgca

SEQ ID NO: 133467 - DNA, 55 bp, Artificial
  Synthetic oligonucleotide
cgtacgttttatctccgatggggatatcgtcagacctcacattgggatctccgcc

SEQ ID NO: 133468 - DNA, 50 bp, Artificial
  Synthetic oligonucleotide
atcattctcgcccagaggagcgggccatccacgggaatggcgacctacac

SEQ ID NO: 133469 - DNA, 50 bp, Artificial
  Synthetic oligonucleotide
cgtggagacgtctgtggacacccggacaacccgccaacggttgcaagaga

SEQ ID NO: 133470 - DNA, 50 bp, Artificial
  Synthetic oligonucleotide
ccttccgccctacgacccgccggtgaaactcacgacaaaagacccgctaa

SEQ ID NO: 133471 - DNA, 50 bp, Artificial
  Synthetic oligonucleotide
cgtcaccatagcaagctccgctgaatccctgcccgcagagatcggtcgtg

SEQ ID NO: 133472 - DNA, 50 bp, Artificial
  Synthetic oligonucleotide
atggccagtcaacgatgccctacaggctccgcctggttactcctggctgg

SEQ ID NO: 133473 - DNA, 50 bp, Artificial
  Synthetic oligonucleotide
atggggcccctgcttcgacgcagtagctggtcttgccgttccaccttctc

SEQ ID NO: 133474 - DNA, 50 bp, Artificial
  Synthetic oligonucleotide
atgtgcggtgcgacgaccatgatgtatgaaggcgccccagacttccctga

SEQ ID NO: 133475 - DNA, 50 bp, Artificial
  Synthetic oligonucleotide
cggtgaagtatcggggaccggggattccgatcggaggttgcaaggctgta

SEQ ID NO: 133476 - DNA, 50 bp, Artificial
  Synthetic oligonucleotide
atgttgcaagcccgcaccttctcggatgggcaattccgctcccatcaacc

SEQ ID NO: 133477 - DNA, 50 bp, Artificial
  Synthetic oligonucleotide
attatcggctgcaacctcactccctgccttacccaaagcgcccccactcc

SEQ ID NO: 133478 - DNA, 58 bp, Artificial
  Synthetic oligonucleotide
cggaaacgcttccagaatggagcaagcaagccgaagttgacttgaacaataggctcgg

SEQ ID NO: 133479 - DNA, 55 bp, Artificial
  Synthetic oligonucleotide
cgtagaaggcgcgatatgaagaatccgcagcagtcgtgcaggtgaggccacgtcc

SEQ ID NO: 133480 - DNA, 50 bp, Artificial
  Synthetic oligonucleotide
attccggcggaggcacatgccattgcaactgcgacaacacctctaccgcc

SEQ ID NO: 133481 - DNA, 50 bp, Artificial
  Synthetic oligonucleotide
cgctgtccgctgttgtgaggcggaaaactgatagcacggccctcgcccct

SEQ ID NO: 133482 - DNA, 50 bp, Artificial
  Synthetic oligonucleotide
caggaacacaagtgtggctgagagatacgcagccctcacgcgagcacccc

SEQ ID NO: 133483 - DNA, 50 bp, Artificial
  Synthetic oligonucleotide
cgactcgcccggcggaatgtacagggagtccatcggccccagctcaattt

SEQ ID NO: 133484 - DNA, 50 bp, Artificial
  Synthetic oligonucleotide
cgcgtggtcaggggacttgaaccggcctgcgtgtatgtctgtccgacgaa

SEQ ID NO: 133485 - DNA, 50 bp, Artificial
  Synthetic oligonucleotide
cgccccctgatgctcgtgagagcagtagccaacggagaggagggcagcgt

SEQ ID NO: 133486 - DNA, 50 bp, Artificial
  Synthetic oligonucleotide
cgccccaccgggaagctacctcggctacgtggttgtgaaataccgggatg

SEQ ID NO: 133487 - DNA, 50 bp, Artificial
  Synthetic oligonucleotide
cgcaccgacgaaggccgtcactatgccaactggaatcatcacggggctga

SEQ ID NO: 133488 - DNA, 50 bp, Artificial
  Synthetic oligonucleotide
cgagttggggcagagcgtaaccatagcgaacgccgtcatacctcgcgagg

SEQ ID NO: 133489 - DNA, 50 bp, Artificial
  Synthetic oligonucleotide
cgagaaggccgggattttgcattgtccccacggggccgggattggcgaat

SEQ ID NO: 133490 - DNA, 55 bp, Artificial
  Synthetic oligonucleotide
cttacttcgtcatgcaagcttacacgtcctcgcttctcgaagacgtaaggagccg

SEQ ID NO: 133491 - DNA, 50 bp, Artificial
  Synthetic oligonucleotide
cagaattcgtccgcccgagtcccgatcctacgatagctgcgtgcgtggct

SEQ ID NO: 133492 - DNA, 50 bp, Artificial
  Synthetic oligonucleotide
agcattccgctgcccgtgcctgcatcgagtatgagggagtctgggctaag

SEQ ID NO: 133493 - DNA, 50 bp, Artificial
  Synthetic oligonucleotide
ccggctccgctttactcaccggaatgccgcttccgattaattccggcggc

SEQ ID NO: 133494 - DNA, 50 bp, Artificial
  Synthetic oligonucleotide
agcccgccgtcaaccctccagaactcctcgacaacgaggcaggagtccag

SEQ ID NO: 133495 - DNA, 50 bp, Artificial
  Synthetic oligonucleotide
agccctcacgcgagcaccccctcaacggctggcctcgtctgagccaggtg

SEQ ID NO: 133496 - DNA, 50 bp, Artificial
  Synthetic oligonucleotide
agccgtgtagctggccaatccgaagactgaggctgcgaaagtcccgacga

SEQ ID NO: 133497 - DNA, 50 bp, Artificial
  Synthetic oligonucleotide
agcgcgtggaaagcagcaatgcaatagcaacggctgacgtgagtgaggct

SEQ ID NO: 133498 - DNA, 50 bp, Artificial
  Synthetic oligonucleotide
agcgctcatcactgtagcccatcattccgccaccgtagcccatcatgggc

SEQ ID NO: 133499 - DNA, 50 bp, Artificial
  Synthetic oligonucleotide
agcgctcccactcctgactggggatttgagctcgcttcgggaaggccata

SEQ ID NO: 133500 - DNA, 50 bp, Artificial
  Synthetic oligonucleotide
agcgggagcgaggacgttcacagcaacatgctctcagggcctcattctga

SEQ ID NO: 133501 - DNA, 55 bp, Artificial
  Synthetic oligonucleotide
cgtcgctcgttagaagactttcgtatttcttcgcctgagccaaatataacgcatc

SEQ ID NO: 133502 - DNA, 50 bp, Artificial
  Synthetic oligonucleotide
agcgggctcgttctacccgtcaaatccggactccctgctcgcgatgcttg

SEQ ID NO: 133503 - DNA, 50 bp, Artificial
  Synthetic oligonucleotide
agcgtaagcgacacggcaaagtacggtgggatgacgaggggtaagcgcat

SEQ ID NO: 133504 - DNA, 50 bp, Artificial
  Synthetic oligonucleotide
agctacacgggagcgtttgacgacgcctccgcttctatgctcggcggatt

SEQ ID NO: 133505 - DNA, 50 bp, Artificial
  Synthetic oligonucleotide
ccggttgtagcgggctcgttctacccgtcaaatccggactccctgctcgc

SEQ ID NO: 133506 - DNA, 50 bp, Artificial
  Synthetic oligonucleotide
ccgtaatcggagcggtgcttggatacgttgtggcgagcgtaacggcgacg

SEQ ID NO: 133507 - DNA, 50 bp, Artificial
  Synthetic oligonucleotide
aggctggaagcggtgccacaacccacggcattcccaattctgcgggagtc

SEQ ID NO: 133508 - DNA, 50 bp, Artificial
  Synthetic oligonucleotide
aggctttccgacagtccagtgtgggttagcggtcttgggtggagcgctga

SEQ ID NO: 133509 - DNA, 50 bp, Artificial
  Synthetic oligonucleotide
agggcactggatgcaagggacccctcaaagcgtggtgctgcgatagaccc

SEQ ID NO: 133510 - DNA, 50 bp, Artificial
  Synthetic oligonucleotide
ctgggtcacagtcgcaagcaggcggaggggaccattctggcccacgttcc

SEQ ID NO: 133511 - DNA, 50 bp, Artificial
  Synthetic oligonucleotide
agggcccgtcaacccaccgcttggacacctctgcggggatagcgtacctg

SEQ ID NO: 133512 - DNA, 55 bp, Artificial
  Synthetic oligonucleotide
cgttagagagatgaacgccacgctgccagacttaactatgcacggcatacacgtc

SEQ ID NO: 133513 - DNA, 50 bp, Artificial
  Synthetic oligonucleotide
agggcctacgatccatgccttgcttgtgccagccacgctctgcctggtag

SEQ ID NO: 133514 - DNA, 50 bp, Artificial
  Synthetic oligonucleotide
agggggagggtgttcccgtagtacccatcccgtcatcgttctccgatgcg

SEQ ID NO: 133515 - DNA, 50 bp, Artificial
  Synthetic oligonucleotide
ctgcgtgcgttttgaagaacgagccagggagtgtacgggagtggcgaggc

SEQ ID NO: 133516 - DNA, 50 bp, Artificial
  Synthetic oligonucleotide
cctcgttggtgcttctgcagcgggagcgaggacgttcacagcaacatgct

SEQ ID NO: 133517 - DNA, 50 bp, Artificial
  Synthetic oligonucleotide
ctgagagatacgcagccctcacgcgagcaccccctcaacggctggcctcg

SEQ ID NO: 133518 - DNA, 50 bp, Artificial
  Synthetic oligonucleotide
agtagcactgcgggcaaatctgcctcggcgggacgacagtgtagctgcac

SEQ ID NO: 133519 - DNA, 55 bp, Artificial
  Synthetic oligonucleotide
cgtttctcgttaaaattggatcgtcgcatttgcctacataagctgggttctcgca

SEQ ID NO: 133520 - DNA, 55 bp, Artificial
  Synthetic oligonucleotide
ctacgagacaatttaaagtttgccatttcgaaagatcaccttgaagaagccgtag

SEQ ID NO: 133521 - DNA, 55 bp, Artificial
  Synthetic oligonucleotide
ctccggcgtgccaaacaaaatgtccgaaacttccgtagcaatcatcgatcctccg

SEQ ID NO: 133522 - DNA, 55 bp, Artificial
  Synthetic oligonucleotide
ctcgaccataatctctatagcctgatcagcgtatttggcagatcttttcaagccg

SEQ ID NO: 133523 - DNA, 55 bp, Artificial
  Synthetic oligonucleotide
gaaacctgctcagactcggaaggagtataccggaactctgtgatattgttgaacc

SEQ ID NO: 133524 - DNA, 55 bp, Artificial
  Synthetic oligonucleotide
ctcgtttctgcgatggttgccttctactcgctgccttacatgaagcacagattcg

SEQ ID NO: 133525 - DNA, 52 bp, Artificial
  Synthetic oligonucleotide
cttaggaattggcttaaaagacgttatggttttactccaccgtctattgtcg

SEQ ID NO: 133526 - DNA, 55 bp, Artificial
  Synthetic oligonucleotide
ctctcgccgctgcgaattatgcgatgaaacatctaccgctgttttctacggcagt

SEQ ID NO: 133527 - DNA, 55 bp, Artificial
  Synthetic oligonucleotide
ctgccctcgttgagaaaacgactccagcaactatgaacgccatctgtatgtacgg

SEQ ID NO: 133528 - DNA, 55 bp, Artificial
  Synthetic oligonucleotide
ctgctgcatcgatgttcgtcggaaacattggagctttaacaacgaatgaacccag

SEQ ID NO: 133529 - DNA, 55 bp, Artificial
  Synthetic oligonucleotide
ctggagaggctctcaagtatgaggacgttctgataatcgcggacttacacctcgg

SEQ ID NO: 133530 - DNA, 55 bp, Artificial
  Synthetic oligonucleotide
ctggctgtcgagacaaacgtagatttgacacaaatggaactcagggcgatagacg

SEQ ID NO: 133531 - DNA, 55 bp, Artificial
  Synthetic oligonucleotide
cccgaacctcatgctctgctgcgaagcagtgggaaggtactccccatacgttccg

SEQ ID NO: 133532 - DNA, 55 bp, Artificial
  Synthetic oligonucleotide
cccgttaccagaatcgaaggtcatcacggggttaggctgaaggtagaggatggtg

SEQ ID NO: 133533 - DNA, 55 bp, Artificial
  Synthetic oligonucleotide
ccgccgaccttgctaagatacgtgtcggctataacctccaccggatacctgtaca

SEQ ID NO: 133534 - DNA, 54 bp, Artificial
  Synthetic oligonucleotide
ccgtcaaatcctgcggaacgtacttgttgtagttcgtctcaaggccaatttggg

SEQ ID NO: 133535 - DNA, 55 bp, Artificial
  Synthetic oligonucleotide
ccgtctttgccgtaaagcacccctcccttctcatacgcctcctcattcgtatgct

SEQ ID NO: 133536 - DNA, 59 bp, Artificial
  Synthetic oligonucleotide
aggctcgggtgcacgaaacacctcatcaccaactatcgagcttcccgtgaatggttcga

SEQ ID NO: 133537 - DNA, 55 bp, Artificial
  Synthetic oligonucleotide
cctgcaggcttagcgatctaaatccctttggagcttgtggactgacgaaagctgg

SEQ ID NO: 133538 - DNA, 55 bp, Artificial
  Synthetic oligonucleotide
cgaatcgggattgtgcgtaacacccgacacttatataatcatgcacgatgggtgt

SEQ ID NO: 133539 - DNA, 55 bp, Artificial
  Synthetic oligonucleotide
cgagaacaccagcccctataaacagcctcgcgtccttataaacaaatcccgatgg

SEQ ID NO: 133540 - DNA, 55 bp, Artificial
  Synthetic oligonucleotide
cgagaaccacaagctcgttttcagaacatcgggaaacgtattctgtgattacgtc

SEQ ID NO: 133541 - DNA, 55 bp, Artificial
  Synthetic oligonucleotide
cgagaatgtcgtatggattacctatgcacgaaatccgacctttgtacagaatgac

SEQ ID NO: 133542 - DNA, 54 bp, Artificial
  Synthetic oligonucleotide
cgagattcaacgaaacgagtgttaaggggctttacgttgcaggagacgttgcgg

SEQ ID NO: 133543 - DNA, 55 bp, Artificial
  Synthetic oligonucleotide
cgaggtctatcgaatctccccattcgaatttaacgtgatcaacttcagcgtacct

SEQ ID NO: 133544 - DNA, 55 bp, Artificial
  Synthetic oligonucleotide
cgattctcgtggagcgcgggttaaaggtagcagtagttaagcatcactctcacgg

SEQ ID NO: 133545 - DNA, 55 bp, Artificial
  Synthetic oligonucleotide
cgctccgactaacgtttgtatagtcagcccggacagaccttccctgtgcggagct

SEQ ID NO: 133546 - DNA, 55 bp, Artificial
  Synthetic oligonucleotide
cgctcttgggtctaacaacagggcatacacgagacagcttgccatgtattcgaag

SEQ ID NO: 133547 - DNA, 60 bp, Artificial
  Synthetic oligonucleotide
gaacaataggctcgggtgcacgaaacacctcatcaccaactatcgagcttcccgtgaatg

SEQ ID NO: 133548 - DNA, 55 bp, Artificial
  Synthetic oligonucleotide
tttcgataacgttgcctagagatctgccaatagaagatgttccaaagctaacgct

SEQ ID NO: 133549 - DNA, 55 bp, Artificial
  Synthetic oligonucleotide
cgggagtcactctgctctacgcctttcagtttctcgctctgaagtacacaacggc

SEQ ID NO: 133550 - DNA, 54 bp, Artificial
  Synthetic oligonucleotide
cgggtgaaagggttactatttgaactctgagacggatgcctttacgagttaggc

SEQ ID NO: 133551 - DNA, 55 bp, Artificial
  Synthetic oligonucleotide
cggttctccagatactacccaagctttccagtatccacttccgctataggagcga

SEQ ID NO: 133552 - DNA, 55 bp, Artificial
  Synthetic oligonucleotide
tgtcgtgagtgtccgctgatgtgtataggtataaggcgagtgtgtggcccgagat

SEQ ID NO: 133553 - DNA, 55 bp, Artificial
  Synthetic oligonucleotide
gcttactacttcggacaaatcgcatacgactatatgtccctccttcgcaatcccg

SEQ ID NO: 133554 - DNA, 54 bp, Artificial
  Synthetic oligonucleotide
gcttcgatagccaacgctttaggtagaaacattcccatgacgggtttacctacg

SEQ ID NO: 133555 - DNA, 55 bp, Artificial
  Synthetic oligonucleotide
ggaagcgttggctcgacgaacttctacgtggatcacttacttagactgatactca

SEQ ID NO: 133556 - DNA, 55 bp, Artificial
  Synthetic oligonucleotide
ggaattctgactttgaggaatttccttgcgagagattccgaatagcgaaggctgc

SEQ ID NO: 133557 - DNA, 55 bp, Artificial
  Synthetic oligonucleotide
ggaggccacggtgggactgcttaagggcaagaggatagaggtcctcgactgggac

SEQ ID NO: 133558 - DNA, 60 bp, Artificial
  Synthetic oligonucleotide
gagtacatcaagctcctgttagccaagtatgacgaggcttggaagatagcttcagaaaac

SEQ ID NO: 133559 - DNA, 55 bp, Artificial
  Synthetic oligonucleotide
ggagggagaattgctgccatttccggtaagcaagctgtcgtggcttggcagtgcc

SEQ ID NO: 133560 - DNA, 55 bp, Artificial
  Synthetic oligonucleotide
ggctacgcgagaataattgcgtcgagggagtcgatagcggaggagttggggttag

SEQ ID NO: 133561 - DNA, 55 bp, Artificial
  Synthetic oligonucleotide
ggctgctatgggtgtcttggcaactccagcgacgaatgcagccatacctatgagg

SEQ ID NO: 133562 - DNA, 55 bp, Artificial
  Synthetic oligonucleotide
gggcaagcatgacgtcttcgctaacaaattggcctctttcgtcaacgaacgtcgc

SEQ ID NO: 133563 - DNA, 55 bp, Artificial
  Synthetic oligonucleotide
ggggcggagagaagcttgtaagatacgcgtgcgttacgacggagacctacagaca

SEQ ID NO: 133564 - DNA, 55 bp, Artificial
  Synthetic oligonucleotide
ggtgtcgattactacgttttcagattgggtgactactactccagaattcccgctg

SEQ ID NO: 133565 - DNA, 55 bp, Artificial
  Synthetic oligonucleotide
gtcggagcttgttgaaaccttcgcaacatatcacaggcagaactacggaggctgc

SEQ ID NO: 133566 - DNA, 55 bp, Artificial
  Synthetic oligonucleotide
gtctcgggtaatcaatttgctgttaaaggaccctttgaacgctattgcccttagc

SEQ ID NO: 133567 - DNA, 55 bp, Artificial
  Synthetic oligonucleotide
gtgtgtcggctccacggtaacatcgtatacccaatcagttctgtattcaccctcg

SEQ ID NO: 133568 - DNA, 55 bp, Artificial
  Synthetic oligonucleotide
gttaccaagccttacaggacacgttttaactcacctgagtacatcaagctcctgt

SEQ ID NO: 133569 - DNA, 52 bp, Artificial
  Synthetic oligonucleotide
agagttttgggtttgtcgaagtctcgggtaatcaatttgctgttaaaggacc

SEQ ID NO: 133570 - DNA, 55 bp, Artificial
  Synthetic oligonucleotide
tcgctgaaggattcgtcacagccacgatactcttttgcgtcggaccaatggctgt

SEQ ID NO: 133571 - DNA, 55 bp, Artificial
  Synthetic oligonucleotide
taggtgaagaggcgcacattctgctcgctttgagggtcatagtttcgtttgcaac

SEQ ID NO: 133572 - DNA, 54 bp, Artificial
  Synthetic oligonucleotide
tcctccctttccggagccaaaggtgttcttccaccgtaaatcgggctgaggtgc

SEQ ID NO: 133573 - DNA, 55 bp, Artificial
  Synthetic oligonucleotide
ttgaagtctctataccatctctcgacgtcaaaatctcccgaactgtctatgtaac

SEQ ID NO: 133574 - DNA, 55 bp, Artificial
  Synthetic oligonucleotide
ttccgatgcccacgtacatcgtgactccgtagccggggaacaccgcagccctcat

SEQ ID NO: 133575 - DNA, 55 bp, Artificial
  Synthetic oligonucleotide
gaccctgttacgcatgagacgctgatttacagatatgttgaggggtatgttggag

SEQ ID NO: 133576 - DNA, 55 bp, Artificial
  Synthetic oligonucleotide
gacgttatggttttactccaccgtctattgtcggaaatgagccacaggagagctt

SEQ ID NO: 133577 - DNA, 55 bp, Artificial
  Synthetic oligonucleotide
gagaagtacagcaacggtgaatacggcgtttacccggtcagcggttacataaagc

SEQ ID NO: 133578 - DNA, 55 bp, Artificial
  Synthetic oligonucleotide
gagaattatcgatgtaaaagagatcgacacgcctaaagttctaacaagcggctcg

SEQ ID NO: 133579 - DNA, 55 bp, Artificial
  Synthetic oligonucleotide
gagacagtaccgcatccggtttaaaggactacggccttgactggtctcacatcca

SEQ ID NO: 133580 - DNA, 56 bp, Artificial
  Synthetic oligonucleotide
agaccccaaattagcttggtattggcttgtcagagttccattttacactataagcc

SEQ ID NO: 133581 - DNA, 55 bp, Artificial
  Synthetic oligonucleotide
gagagtcctcacatcgtcccttgcaagatttgcctcgtatagtgcaggcggtctg

SEQ ID NO: 133582 - DNA, 55 bp, Artificial
  Synthetic oligonucleotide
gagcaagcaagccgaagttgacttgaacaataggctcgggtgcacgaaacacctc

SEQ ID NO: 133583 - DNA, 55 bp, Artificial
  Synthetic oligonucleotide
gagggagctaacgctttggttagacgataaagtcattagattccttgaaaacatg

SEQ ID NO: 133584 - DNA, 55 bp, Artificial
  Synthetic oligonucleotide
gattcttcaagtcgatggatacgtagtacttattcctgttgacccacgtagctcc

SEQ ID NO: 133585 - DNA, 55 bp, Artificial
  Synthetic oligonucleotide
gattcttgaggaaaatgtgcctgcacttgtaaacaacgtaggctaaaagggtggc

SEQ ID NO: 133586 - DNA, 55 bp, Artificial
  Synthetic oligonucleotide
gccaccctaagcatgtctaaagaagcgtctatgccaatagccgaaaatttctcgg

SEQ ID NO: 133587 - DNA, 55 bp, Artificial
  Synthetic oligonucleotide
gccgtagtaatgttctttctgctcatagggaacgtctacacgattctaaggcagc

SEQ ID NO: 133588 - DNA, 55 bp, Artificial
  Synthetic oligonucleotide
gccgtagttttactaaggcttagagaggagcttacaggattgacagtaactcagt

SEQ ID NO: 133589 - DNA, 55 bp, Artificial
  Synthetic oligonucleotide
gcctcatcagctctccaacaaggcttatgaggacctgcgtaaccctcccgctcac

SEQ ID NO: 133590 - DNA, 55 bp, Artificial
  Synthetic oligonucleotide
gcgagaagaaggttagagcgataatctacggcagcgaaatgtcccacctcgcagc

SEQ ID NO: 133591 - DNA, 59 bp, Artificial
  Synthetic oligonucleotide
gctacattaaacttgaagtctctataccatctctcgacgtcaaaatctcccgaactgtc

SEQ ID NO: 133592 - DNA, 55 bp, Artificial
  Synthetic oligonucleotide
gcgagtgtataagcgacgaggatgtggtgtggttcgatgagtgaagacatcgaag

SEQ ID NO: 133593 - DNA, 55 bp, Artificial
  Synthetic oligonucleotide
ttatggccaagcccaccatatagagtacgaaagttgggtcagcaatcattggagc

SEQ ID NO: 133594 - DNA, 55 bp, Artificial
  Synthetic oligonucleotide
gcggagtgaggattatcgacaggcttttgagggaatttaaggatgacaacgtcgt

SEQ ID NO: 133595 - DNA, 55 bp, Artificial
  Synthetic oligonucleotide
cataccagtcgaaaatgtgataacccacgaggactacgatttaacgtgctaaagt

SEQ ID NO: 133596 - DNA, 53 bp, Artificial
  Synthetic oligonucleotide
cataaacagggaaggtttcgacggaaaggatgacaccttgcctaaaagactgt

SEQ ID NO: 133597 - DNA, 55 bp, Artificial
  Synthetic oligonucleotide
ataggtgctttctacgagaaactagttgcgagggttttcgaggttctgtgcacgt

SEQ ID NO: 133598 - DNA, 55 bp, Artificial
  Synthetic oligonucleotide
acgttttgaggtctccatacatagcggagcctataaaagttctcgactcagctcc

SEQ ID NO: 133599 - DNA, 55 bp, Artificial
  Synthetic oligonucleotide
acgacgccacttccgttgtacgccacaactgcgtgaatctttaaagacttgagca

SEQ ID NO: 133600 - DNA, 55 bp, Artificial
  Synthetic oligonucleotide
catgtcgataggtccccttaggagtgaggcgaaagccttacgatgagtatggggc

SEQ ID NO: 133601 - DNA, 55 bp, Artificial
  Synthetic oligonucleotide
cagttggcacttgatattgtggaactgtgtgcaaagttgggaatgcacgcgacaa

SEQ ID NO: 133602 - DNA, 60 bp, Artificial
  Synthetic oligonucleotide
ctaactgatccatatatttctcgagcaactcattaattactattgtgaatccttctaggg

SEQ ID NO: 133603 - DNA, 55 bp, Artificial
  Synthetic oligonucleotide
cttaccagcgtgctcactgggtatcctaaccgctacataggctttcgcaaccttg

SEQ ID NO: 133604 - DNA, 55 bp, Artificial
  Synthetic oligonucleotide
acaaagcgtgggttcgcctccgctcacccttgctagctcaaagcccctctctcgg

SEQ ID NO: 133605 - DNA, 55 bp, Artificial
  Synthetic oligonucleotide
gtgggaggagagagacgcggcaaatctcctatacttaggagagggtagagtcctc

SEQ ID NO: 133606 - DNA, 55 bp, Artificial
  Synthetic oligonucleotide
gtggcttcaaaccacctacgtggagtctgtcagcgaggatcaattgctcggcacc

SEQ ID NO: 133607 - DNA, 55 bp, Artificial
  Synthetic oligonucleotide
gtgccatgtacgcggataacgagtcctctcttgacatgcagcataagtagcctag

SEQ ID NO: 133608 - DNA, 55 bp, Artificial
  Synthetic oligonucleotide
gtgaagaatcctttgagtgcgcctgacccgttaactaaggctagctaggctaggc

SEQ ID NO: 133609 - DNA, 53 bp, Artificial
  Synthetic oligonucleotide
gtctctcggtattatcccaccgaatttctcgttcactcctcctggttttaccc

SEQ ID NO: 133610 - DNA, 55 bp, Artificial
  Synthetic oligonucleotide
gtctacatgcctcacctaggcctcgtgcagaacgcaggttgctaactaacgctta

SEQ ID NO: 133611 - DNA, 55 bp, Artificial
  Synthetic oligonucleotide
gtagggcggctgaggtaagggtggatgactcaatctacgactacgctgcgtcaat

SEQ ID NO: 133612 - DNA, 55 bp, Artificial
  Synthetic oligonucleotide
gtagaaccttttagccacgtagtttgtgattgggtagagggcagacatcatacct

SEQ ID NO: 133613 - DNA, 54 bp, Artificial
  Synthetic oligonucleotide
gtaagtcgtcccaactactaactggttgttccactggtttcacataatacgttg

SEQ ID NO: 133614 - DNA, 55 bp, Artificial
  Synthetic oligonucleotide
ctgtagcttcaacgcatgagtggaattcccaagaatcatatacgctgtacttcgc

SEQ ID NO: 133615 - DNA, 55 bp, Artificial
  Synthetic oligonucleotide
ggtaggccctctgtaaggagggccactcctataggacggctctggggctggatag

SEQ ID NO: 133616 - DNA, 52 bp, Artificial
  Synthetic oligonucleotide
gggttgtcgtgaacttgttttataggtacttccttgcgggtaagtatagtag

SEQ ID NO: 133617 - DNA, 55 bp, Artificial
  Synthetic oligonucleotide
gggttctccccgttgaaacataggtggtcatgacgagtagcactatgagtggcac

SEQ ID NO: 133618 - DNA, 55 bp, Artificial
  Synthetic oligonucleotide
gggtgaaccagtctttagcgtcgtcatgaagaagagtgaggcagcatccctcggc

SEQ ID NO: 133619 - DNA, 55 bp, Artificial
  Synthetic oligonucleotide
gggtctgacgccctcataggctgaggcgtgtttcaaggcctccactatgcttatg

SEQ ID NO: 133620 - DNA, 55 bp, Artificial
  Synthetic oligonucleotide
gggtagcggtgtccacaggtactcgtttcccagcctgaagcctattagtgctgtg

SEQ ID NO: 133621 - DNA, 55 bp, Artificial
  Synthetic oligonucleotide
ggggcaagcctgaggctgtcgtaaacatgaggctatagacccgggtgacgggatg

SEQ ID NO: 133622 - DNA, 55 bp, Artificial
  Synthetic oligonucleotide
ggggagaaatttatcgcggagaactcgtaatgaagctttcaccaagtgagatcgc

SEQ ID NO: 133623 - DNA, 55 bp, Artificial
  Synthetic oligonucleotide
gggcttcagctcgcgacattgtggagctatacagcgccccagctcccctcttagg

SEQ ID NO: 133624 - DNA, 55 bp, Artificial
  Synthetic oligonucleotide
gggctcaatatcaatagcatggtggcgttcgtaaacttggcccgactcattgttc

SEQ ID NO: 133625 - DNA, 55 bp, Artificial
  Synthetic oligonucleotide
aggaggcgcttgtgaagggctgtatgacgactagcacagaggccaggctccccac

SEQ ID NO: 133626 - DNA, 55 bp, Artificial
  Synthetic oligonucleotide
ttgtaccccttgcacccacatatagtgttctacgcaatagactctctaggagggg

SEQ ID NO: 133627 - DNA, 55 bp, Artificial
  Synthetic oligonucleotide
ttgctggacagtcatggtagcaactatttagcgcaccccacaaaccgtaaacggc

SEQ ID NO: 133628 - DNA, 55 bp, Artificial
  Synthetic oligonucleotide
ttccgagctccctaagagccttcacgctttcgtagtccaagcccgctcccgtctc

SEQ ID NO: 133629 - DNA, 55 bp, Artificial
  Synthetic oligonucleotide
tgtctcctcccctcgtcttggccaacccgtatagtgtctcactgaacgaccacgg

SEQ ID NO: 133630 - DNA, 54 bp, Artificial
  Synthetic oligonucleotide
tgggccctctcgtccagccaggttattatcggtgttaactcgtaattgtcccgg

SEQ ID NO: 133631 - DNA, 55 bp, Artificial
  Synthetic oligonucleotide
tggctggtacactatacgccttcacactgttgaagacgaacctacactcgtcgac

SEQ ID NO: 133632 - DNA, 55 bp, Artificial
  Synthetic oligonucleotide
aacctagcactcaaatacctgcagatgaagggctccaagtggtctatgtggagcc

SEQ ID NO: 133633 - DNA, 55 bp, Artificial
  Synthetic oligonucleotide
tgagcttagaggtgcaagtgcaggtaaagctttctggggaacagaatttagtcga

SEQ ID NO: 133634 - DNA, 55 bp, Artificial
  Synthetic oligonucleotide
tgagaagtctattgaacttgcgggtgatatagcgtctaccgccgacagcgaggct

SEQ ID NO: 133635 - DNA, 55 bp, Artificial
  Synthetic oligonucleotide
tctacaagttcccattactaggcaaccatgtaatttactatgttgtcgcgacccc

SEQ ID NO: 133636 - DNA, 55 bp, Artificial
  Synthetic oligonucleotide
aggcggggtgtttaggcctgaagtaatggagatcctgggagcgcctggtgttaga

SEQ ID NO: 133637 - DNA, 55 bp, Artificial
  Synthetic oligonucleotide
tcgtattggaagaccattgcatcccatttaagcaccgggtaggctcctgtctcag

SEQ ID NO: 133638 - DNA, 55 bp, Artificial
  Synthetic oligonucleotide
tccacccatgctgacgggttgatcccagtacaaatacgagtaggggcttccaccg

SEQ ID NO: 133639 - DNA, 55 bp, Artificial
  Synthetic oligonucleotide
tagactcctcgggagcagcgtgaacctagccccgcttgaagtagtggaggctggc

SEQ ID NO: 133640 - DNA, 55 bp, Artificial
  Synthetic oligonucleotide
tacctgagttaggcctgccaggcactagttcgcctgatatgagggcgaatccgta

SEQ ID NO: 133641 - DNA, 55 bp, Artificial
  Synthetic oligonucleotide
taagcttgtgagagccaacgaggagttaaccagggcgaagatagtcctagtcggt

SEQ ID NO: 133642 - DNA, 55 bp, Artificial
  Synthetic oligonucleotide
taacagcgtaaggcttgctctcggttccaaaccatactgcccctatctcccgggg

SEQ ID NO: 133643 - DNA, 54 bp, Artificial
  Synthetic oligonucleotide
gtttgcttatttgtcgaggaaaacaatggtaacgggtaatcctggtctggacag

SEQ ID NO: 133644 - DNA, 55 bp, Artificial
  Synthetic oligonucleotide
gtttgcgaatgtctccctatactcagccagcttctttcgtgcaagctcctcgggg

SEQ ID NO: 133645 - DNA, 55 bp, Artificial
  Synthetic oligonucleotide
gtttaaaccttgctgacaagtaaagaacagtgatatcccggcttagagatgcctc

SEQ ID NO: 133646 - DNA, 55 bp, Artificial
  Synthetic oligonucleotide
gttagtcaagcctggtatggcgttcctcacggcctgaggtataacgacgcccttc

SEQ ID NO: 133647 - DNA, 55 bp, Artificial
  Synthetic oligonucleotide
aggctcccctccgtgtagaacatgtggattaactgtggaatgtagatcaggcgac

SEQ ID NO: 133648 - DNA, 55 bp, Artificial
  Synthetic oligonucleotide
gttaagcgactgcacagagtacagtagtgaaggaaagcccacatctaggtatggg

SEQ ID NO: 133649 - DNA, 55 bp, Artificial
  Synthetic oligonucleotide
ggactagatatacctacgcttaaacccgtagtagctagagcagaggatacctcga

SEQ ID NO: 133650 - DNA, 55 bp, Artificial
  Synthetic oligonucleotide
ggaaagcctccgctctcaaccctttctcacgtagcaactcaacgatcctctcagc

SEQ ID NO: 133651 - DNA, 55 bp, Artificial
  Synthetic oligonucleotide
ggaggtctaatcccaacttggatcttccggaacccaccatgggtgaagcaatcgc

SEQ ID NO: 133652 - DNA, 55 bp, Artificial
  Synthetic oligonucleotide
ggagtacccggctagatgggttgcggtcaggctcctggaaggggacagtgtgctt

SEQ ID NO: 133653 - DNA, 55 bp, Artificial
  Synthetic oligonucleotide
acctgtgaagctcattactgctacaaccatgttctgaccagcgggtctctcattg

SEQ ID NO: 133654 - DNA, 54 bp, Artificial
  Synthetic oligonucleotide
ggagtggcctcgaaggggagggtagtaacgaccgcttgtaagctgtacacgtcc

SEQ ID NO: 133655 - DNA, 55 bp, Artificial
  Synthetic oligonucleotide
gcttgcaactatcatggctatagcgaagacaggattatagttgaagagcgcctcg

SEQ ID NO: 133656 - DNA, 55 bp, Artificial
  Synthetic oligonucleotide
ggcagtagtcaggctacttaagctcgatcaccctgagcatgctttccctatcgag

SEQ ID NO: 133657 - DNA, 55 bp, Artificial
  Synthetic oligonucleotide
ggccaggttgtcgagcctagtgagtatagtgttcacggtgttctgtatgctgcct

SEQ ID NO: 133658 - DNA, 55 bp, Artificial
  Synthetic oligonucleotide
ctgaactagcaatcataaggttctcttctgatatgcccctcgaactagaatttag

SEQ ID NO: 133659 - DNA, 55 bp, Artificial
  Synthetic oligonucleotide
gcttccatgcttcatcctcgtgtggagcaccttttggtattgctagtccagctac

SEQ ID NO: 133660 - DNA, 53 bp, Artificial
  Synthetic oligonucleotide
ggcgtcctaaggtcctcgctaccgtaggcaaaccctatcggcgccacaaacct

SEQ ID NO: 133661 - DNA, 55 bp, Artificial
  Synthetic oligonucleotide
ggctcatggacccggcaattgttgatagggcctataggctagacgtggagtggag

SEQ ID NO: 133662 - DNA, 53 bp, Artificial
  Synthetic oligonucleotide
gggaactatatgctaggctcgtggagtcctccccggttttaaaggggaagctg

SEQ ID NO: 133663 - DNA, 55 bp, Artificial
  Synthetic oligonucleotide
gctggggctttacagagaagccgcctacggccttttagacctcgcggtgctcgga

SEQ ID NO: 133664 - DNA, 51 bp, Artificial
  Synthetic oligonucleotide
gggacccgttaatccaacccagtgggcgaactcgactggtttcttcccgaa

SEQ ID NO: 133665 - DNA, 55 bp, Artificial
  Synthetic oligonucleotide
gctcgacatgaggtataggggacaggcgtatgacttatccataccctacagaggc

SEQ ID NO: 133666 - DNA, 55 bp, Artificial
  Synthetic oligonucleotide
gggcaggtacccatatagtggcctatagtcgaataatgtgcttgcaccaacgctt

SEQ ID NO: 133667 - DNA, 55 bp, Artificial
  Synthetic oligonucleotide
gcgatacaatttaattaggaggggtgatcgtgtactacttggattatcaggcgga

SEQ ID NO: 133668 - DNA, 55 bp, Artificial
  Synthetic oligonucleotide
gcgagttgtatccatccttgctccacgctaaaggcagctcgtaccccgagcgcgc

SEQ ID NO: 133669 - DNA, 55 bp, Artificial
  Synthetic oligonucleotide
ctcgccggttctacgtatggttgtttatagtcgtggaaaactagtctattgcagg

SEQ ID NO: 133670 - DNA, 54 bp, Artificial
  Synthetic oligonucleotide
gggatttccgtggtttagacactttcttcgaaacagcggtattctatggcgccg

SEQ ID NO: 133671 - DNA, 55 bp, Artificial
  Synthetic oligonucleotide
gcctttctgatagtacccagagaggatggtggaactatagtggtgctacccgccc

SEQ ID NO: 133672 - DNA, 55 bp, Artificial
  Synthetic oligonucleotide
gccttctctagccccgatgcttgataggtacgtggttaaagagttcgacctatcg

SEQ ID NO: 133673 - DNA, 55 bp, Artificial
  Synthetic oligonucleotide
gggacgcgccagagggttcctagtagagttttcacgcgaatggcccgagaacgcg

SEQ ID NO: 133674 - DNA, 55 bp, Artificial
  Synthetic oligonucleotide
gctagtgtgaaggggtatctcgatagtagagcgcctacataggcgaaggggaggc

SEQ ID NO: 133675 - DNA, 54 bp, Artificial
  Synthetic oligonucleotide
cagtcgactacagtggttacgctatccatgtgcatgctaagggcgtgggtaagg

SEQ ID NO: 133676 - DNA, 54 bp, Artificial
  Synthetic oligonucleotide
agagaggttttggtatgactgttgaggagtggcttctagctgcagagtatatac

SEQ ID NO: 133677 - DNA, 54 bp, Artificial
  Synthetic oligonucleotide
tattctgtgtcgggtgggccagctaggaattctggtgatccgtagccggcaacg

SEQ ID NO: 133678 - DNA, 54 bp, Artificial
  Synthetic oligonucleotide
gtgctccaagcattgcggtgttcacaacaggccaccccgctatgaccagtttca

SEQ ID NO: 133679 - DNA, 54 bp, Artificial
  Synthetic oligonucleotide
agcttcttaattaactctatgtactggcccctccattccaaggtgttcaccagt

SEQ ID NO: 133680 - DNA, 55 bp, Artificial
  Synthetic oligonucleotide
agtatatgcccgcgtgagctccagcgaccagaggagcgacctagaaaggcaagtg

SEQ ID NO: 133681 - DNA, 54 bp, Artificial
  Synthetic oligonucleotide
tgtaggctgacagctattctaggagctaagcctgaatcctctagtatggcgagc

SEQ ID NO: 133682 - DNA, 54 bp, Artificial
  Synthetic oligonucleotide
cacaaacactacgtgagagtcccagaggaagtacctaacggcgttcaaggtctc

SEQ ID NO: 133683 - DNA, 54 bp, Artificial
  Synthetic oligonucleotide
ggggcccctatcactggcaggcctatacggcctcctcattgataacccgggatt

SEQ ID NO: 133684 - DNA, 54 bp, Artificial
  Synthetic oligonucleotide
tccaagcgtcgcagtcgggtgtttgccttcgggcaagtcatattcgtacctgct

SEQ ID NO: 133685 - DNA, 54 bp, Artificial
  Synthetic oligonucleotide
tggacccctagtcggacgggtgaggcgtaagtattatgctagcgccctctctcg

SEQ ID NO: 133686 - DNA, 54 bp, Artificial
  Synthetic oligonucleotide
tctgcatcatacgcgtcgatactgctcctagcgtagacttcagcatggtcgctt

SEQ ID NO: 133687 - DNA, 54 bp, Artificial
  Synthetic oligonucleotide
ccgcgacgataggggtttacgcgactaaggcagctggggatctggacagaaggt

SEQ ID NO: 133688 - DNA, 54 bp, Artificial
  Synthetic oligonucleotide
tgccgtggagcgaagtggcttctaggtgggttagaaatattcgcgacgttatac

SEQ ID NO: 133689 - DNA, 54 bp, Artificial
  Synthetic oligonucleotide
gtatctcgcctacgtgaacagggctagagaactcgggtatgagccgctgactca

SEQ ID NO: 133690 - DNA, 54 bp, Artificial
  Synthetic oligonucleotide
gctaaatagtatgtcgatgaacaccccgcttaccatatagtgaaagacatttag

SEQ ID NO: 133691 - DNA, 55 bp, Artificial
  Synthetic oligonucleotide
agtcttggtctgcgaggacaagggccccaaccagccggtagtctgcaagcccaag

SEQ ID NO: 133692 - DNA, 54 bp, Artificial
  Synthetic oligonucleotide
ctcgttagcaagttttgatatcggttctccctcaggttcgaaaactattattgg

SEQ ID NO: 133693 - DNA, 52 bp, Artificial
  Synthetic oligonucleotide
tcccccattataggggtttacactcgaaccgggtcaaggggctccgcctcaa

SEQ ID NO: 133694 - DNA, 54 bp, Artificial
  Synthetic oligonucleotide
tcccttgactacaccggtcttcacgggaaaccataggttgctgaacaatactct

SEQ ID NO: 133695 - DNA, 53 bp, Artificial
  Synthetic oligonucleotide
tacgcattctggtcaatcgtaatagtgctcccagatgtactagtgccatttac

SEQ ID NO: 133696 - DNA, 53 bp, Artificial
  Synthetic oligonucleotide
agaaggattcctccgaatgatgaaggaatctcgtttggacaggtgatcgcggg

SEQ ID NO: 133697 - DNA, 53 bp, Artificial
  Synthetic oligonucleotide
gcggagagtgcacgggaagtcaagtccggagctagagtgttgtggttgacgcc

SEQ ID NO: 133698 - DNA, 53 bp, Artificial
  Synthetic oligonucleotide
tcaccttatgtattcgtgcgacaggggtcaggagggttctgtgaggcctggtt

SEQ ID NO: 133699 - DNA, 53 bp, Artificial
  Synthetic oligonucleotide
ccccgggcactgcttaaggatcacgccgtgctctctcgcaatagcctccgcct

SEQ ID NO: 133700 - DNA, 53 bp, Artificial
  Synthetic oligonucleotide
cccctacagtcttgacgagttcaaggcttctatacccatagctgctttgcata

SEQ ID NO: 133701 - DNA, 53 bp, Artificial
  Synthetic oligonucleotide
tccatgggctcctagccaccagcctaaacctctcgacgagcctcctaaagagg

SEQ ID NO: 133702 - DNA, 55 bp, Artificial
  Synthetic oligonucleotide
ctccgagccacaggagcagatagtgttcgacttccttagtggtagaattgggagg

SEQ ID NO: 133703 - DNA, 53 bp, Artificial
  Synthetic oligonucleotide
cccctcctgtccacgggctcaagtgttgatcctaggagtgttttatggagccg

SEQ ID NO: 133704 - DNA, 53 bp, Artificial
  Synthetic oligonucleotide
ccccttcaggtatcctacgaaccagggtttatgcctgcccatcccactatcac

SEQ ID NO: 133705 - DNA, 53 bp, Artificial
  Synthetic oligonucleotide
cccgtaccctggcagctctattatcgcctccgatacggctctccggatcacgg

SEQ ID NO: 133706 - DNA, 53 bp, Artificial
  Synthetic oligonucleotide
accccgcttagggggatgcacgagcccactccgcagatcccctggttgaaatg

SEQ ID NO: 133707 - DNA, 53 bp, Artificial
  Synthetic oligonucleotide
ggggacgctttgtgctccatcagcaacgactattgcgtccacctcgtgtgcta

SEQ ID NO: 133708 - DNA, 53 bp, Artificial
  Synthetic oligonucleotide
gaaccctccctgtataagtgggtagtcctgcgattgtatagcgccccacaaca

SEQ ID NO: 133709 - DNA, 53 bp, Artificial
  Synthetic oligonucleotide
gaagtgttgccatccgtggccactgaatagcggtcttaggatgtctacctcgg

SEQ ID NO: 133710 - DNA, 53 bp, Artificial
  Synthetic oligonucleotide
agggcatgctacgggggttcacgccgggctccaaagtgatggtgctagcttaa

SEQ ID NO: 133711 - DNA, 53 bp, Artificial
  Synthetic oligonucleotide
agggtaccagggcatgctacgggggttcacgccgggctccaaagtgatggtgc

SEQ ID NO: 133712 - DNA, 53 bp, Artificial
  Synthetic oligonucleotide
ggtgaaacgctcagctcgctccccaatacaagcgttttaacgctaagctccct

SEQ ID NO: 133713 - DNA, 57 bp, Artificial
  Synthetic oligonucleotide
cttaccgacgatgattaccggattataatgtattagtttcttctcgagatattcagc

SEQ ID NO: 133714 - DNA, 55 bp, Artificial
  Synthetic oligonucleotide
ctcaacgcgtctaccagcggctcccggaagtacgttgtcgcgaggaatgttgcag

SEQ ID NO: 133715 - DNA, 53 bp, Artificial
  Synthetic oligonucleotide
ctagtagtatgctgtctacagttggcggctctccaagcgaacacggcgtatac

SEQ ID NO: 133716 - DNA, 53 bp, Artificial
  Synthetic oligonucleotide
atgattgcattgcccgggacattgaggcggagccccttgacccggttcgagtg

SEQ ID NO: 133717 - DNA, 53 bp, Artificial
  Synthetic oligonucleotide
atgctccgcgagtacgtctatatgcacggcaggctcgtgggtgtgattgccta

SEQ ID NO: 133718 - DNA, 53 bp, Artificial
  Synthetic oligonucleotide
atgtgacattcgctctcggagggtaccagggcatgctacgggggttcacgccg

SEQ ID NO: 133719 - DNA, 53 bp, Artificial
  Synthetic oligonucleotide
cgtggaagttatcctcattaccgttatgttcctcaggtacacgtagtccaagt

SEQ ID NO: 133720 - DNA, 53 bp, Artificial
  Synthetic oligonucleotide
catcaagcttcgtcactatgatggatcctatcggtgttgcctcatggaacctc

SEQ ID NO: 133721 - DNA, 52 bp, Artificial
  Synthetic oligonucleotide
ctttaaccgtgagctctttaaaacccgtgggcaacactatatcctcttagcc

SEQ ID NO: 133722 - DNA, 52 bp, Artificial
  Synthetic oligonucleotide
ggggaatactttatcactatacaggcgagcctcggagacatggtagtccaag

SEQ ID NO: 133723 - DNA, 52 bp, Artificial
  Synthetic oligonucleotide
aatgcactctttacacggcttctcctcgtagaggactgatgcgtgctcgctg

SEQ ID NO: 133724 - DNA, 52 bp, Artificial
  Synthetic oligonucleotide
tgggtctgacgaggggtcgaagccgaggagaacaatacaactccctccccgg

SEQ ID NO: 133725 - DNA, 55 bp, Artificial
  Synthetic oligonucleotide
atagcggaagaggtcccggaggcctcccacgtagtggctagggtagtggacgaga

SEQ ID NO: 133726 - DNA, 52 bp, Artificial
  Synthetic oligonucleotide
actacccctagaagcctgactatgctgccagatataatgggttcctcgataa

SEQ ID NO: 133727 - DNA, 52 bp, Artificial
  Synthetic oligonucleotide
tctgtgtggagccccgatagccccctccgtgaagggatgaaaacccgacaca

SEQ ID NO: 133728 - DNA, 52 bp, Artificial
  Synthetic oligonucleotide
gaccttgtgtaggatattcaagtatctttggtgtagggatctgtggagatag

SEQ ID NO: 133729 - DNA, 52 bp, Artificial
  Synthetic oligonucleotide
tctcgctgtgctgggacggcttactggatgattcagaggagtgcgttgtcct

SEQ ID NO: 133730 - DNA, 52 bp, Artificial
  Synthetic oligonucleotide
tctataaccctactatatggtgttttcacgtactccgtggtgatgtcgcctg

SEQ ID NO: 133731 - DNA, 52 bp, Artificial
  Synthetic oligonucleotide
gttccgtgtgaagggcgcgagcccccgattgcctagatcccctgtgattcaa

SEQ ID NO: 133732 - DNA, 52 bp, Artificial
  Synthetic oligonucleotide
ctagacccccggggtgaatctaggcttgcacgatcctacgttgagcctccga

SEQ ID NO: 133733 - DNA, 52 bp, Artificial
  Synthetic oligonucleotide
taggaatgatccagccttcaatgatccaacaaagtacataggtccatggtat

SEQ ID NO: 133734 - DNA, 52 bp, Artificial
  Synthetic oligonucleotide
tcacggagggggctatcggggctccacatagaccacctagagcccttcatcc

SEQ ID NO: 133735 - DNA, 52 bp, Artificial
  Synthetic oligonucleotide
cccatgtggggcgggatgaaaacgggtcccccacacagcggacaccccttta

SEQ ID NO: 133736 - DNA, 55 bp, Artificial
  Synthetic oligonucleotide
atcaacattactcttaaacagggcctcgttgggtatcctagccataacaccgtcc

SEQ ID NO: 133737 - DNA, 52 bp, Artificial
  Synthetic oligonucleotide
gagcaatgtgactacagttggcaggatagctatatcccctcccgagagactg

SEQ ID NO: 133738 - DNA, 51 bp, Artificial
  Synthetic oligonucleotide
gaggcaataggggctactcgtaacacgccggtaacgataactctgtctccc

SEQ ID NO: 133739 - DNA, 51 bp, Artificial
  Synthetic oligonucleotide
gcttagccctcagcccgtggaccactatctcccctaggtcctcgaaaaccc

SEQ ID NO: 133740 - DNA, 51 bp, Artificial
  Synthetic oligonucleotide
tcctcaacccttcctcgtataagtctagtaatgcatcatatgggtgctcct

SEQ ID NO: 133741 - DNA, 51 bp, Artificial
  Synthetic oligonucleotide
atacccagccttctacacgatactccacgatgtctacttaccctacgtggc

SEQ ID NO: 133742 - DNA, 51 bp, Artificial
  Synthetic oligonucleotide
accctgagggtggagaagtcgaattgtatttgcgagtccctaacctcatag

SEQ ID NO: 133743 - DNA, 51 bp, Artificial
  Synthetic oligonucleotide
ggatagtgtgggctataggcatggtgaagtactctgctgcgaaggctaaca

SEQ ID NO: 133744 - DNA, 51 bp, Artificial
  Synthetic oligonucleotide
atgggtttcgacgagatgatgaacagtggggaaggcgagtaaaccgggtca

SEQ ID NO: 133745 - DNA, 50 bp, Artificial
  Synthetic oligonucleotide
cgtgagcactacggggacccagggtacgctactgtagttggggagggggt

SEQ ID NO: 133746 - DNA, 50 bp, Artificial
  Synthetic oligonucleotide
ttaggattaccaagcgatgtacgcgagtattatcagagagaaggacgtaa

SEQ ID NO: 133747 - DNA, 55 bp, Artificial
  Synthetic oligonucleotide
atccgccgatgagatggtttaagcacccattaaccaaaggcccgtttgcaggcgt

SEQ ID NO: 133748 - DNA, 50 bp, Artificial
  Synthetic oligonucleotide
cgttaaccccgggtacatcgcctgcccccacgtacacatagcgtggcaac

SEQ ID NO: 133749 - DNA, 50 bp, Artificial
  Synthetic oligonucleotide
gagggcggcagaaggggtgccggacgacccaaccacgcttaccttgtcta

SEQ ID NO: 133750 - DNA, 50 bp, Artificial
  Synthetic oligonucleotide
ctgtacctgcctttctaggtcgctcctctggtcgctggagctcacgcggg

SEQ ID NO: 133751 - DNA, 50 bp, Artificial
  Synthetic oligonucleotide
cgcgctggggagtgttgaactagcgaaggcgggggtcattgttaggaggc

SEQ ID NO: 133752 - DNA, 50 bp, Artificial
  Synthetic oligonucleotide
tacgactcagagattcctgagagacatagatttaactgaagtctgtaagc

SEQ ID NO: 133753 - DNA, 50 bp, Artificial
  Synthetic oligonucleotide
cggggaggagactcaacgcagaatcatgcaaacctagacccccggggtga

SEQ ID NO: 133754 - DNA, 50 bp, Artificial
  Synthetic oligonucleotide
ctcggatccggccctagcacatcctcgttcagctcgctctagcacgcggt

SEQ ID NO: 133755 - DNA, 50 bp, Artificial
  Synthetic oligonucleotide
gacccggttaacccatcctactcagcgacgggcattgtgacccctggtgg

SEQ ID NO: 133756 - DNA, 50 bp, Artificial
  Synthetic oligonucleotide
ctcctcaccgcgctcttctcagtcaccgcatacctcggcgtgaagcccat

SEQ ID NO: 133757 - DNA, 50 bp, Artificial
  Synthetic oligonucleotide
accatgcaaccgtggtctcacccgttgacccgggcctcctcagggccgtt

SEQ ID NO: 133758 - DNA, 55 bp, Artificial
  Synthetic oligonucleotide
ctaaggtaacgccgttgaacgctattagaactgccctggcaccctctatcacccc

SEQ ID NO: 133759 - DNA, 50 bp, Artificial
  Synthetic oligonucleotide
accatcccggttgacacaactaggagcgaggcgaggtctctcacgggggt

SEQ ID NO: 133760 - DNA, 50 bp, Artificial
  Synthetic oligonucleotide
accaggcctgtgcttcagggcgccaggcttaacgtgtgggagcttaggaa

SEQ ID NO: 133761 - DNA, 50 bp, Artificial
  Synthetic oligonucleotide
accacgcgttcacgggagtcgacttggttagccgggttgagtggtctccc

SEQ ID NO: 133762 - DNA, 50 bp, Artificial
  Synthetic oligonucleotide
accaatatgacgtcctccacgtccgaaggggccagcccggtctcgcttag

SEQ ID NO: 133763 - DNA, 50 bp, Artificial
  Synthetic oligonucleotide
acatgtgtgccgccctgaacacctctcgctggtggtaggccctcgcctcc

SEQ ID NO: 133764 - DNA, 50 bp, Artificial
  Synthetic oligonucleotide
acaggtccggggcctcgtgatgtgacggcggacgctgtttcgagactagc

SEQ ID NO: 133765 - DNA, 50 bp, Artificial
  Synthetic oligonucleotide
acaggtactgagacgcccactgagacacagcctgcccagactaccccggc

SEQ ID NO: 133766 - DNA, 50 bp, Artificial
  Synthetic oligonucleotide
acagcgaacgcaacggtcttcgagtagccgcccccgtagagccctgtgag

SEQ ID NO: 133767 - DNA, 50 bp, Artificial
  Synthetic oligonucleotide
acagcccgggggttgcttagggttgaagaggttgcttcaagcgaggggct

SEQ ID NO: 133768 - DNA, 50 bp, Artificial
  Synthetic oligonucleotide
acactctggcgcccttagtgggcttgtgtaagcctatgtccgggaccgcg

SEQ ID NO: 133769 - DNA, 55 bp, Artificial
  Synthetic oligonucleotide
gcctctatatgtgtaagcctagtctcaacagagctcatcctaccttcgagtgaac

SEQ ID NO: 133770 - DNA, 50 bp, Artificial
  Synthetic oligonucleotide
acactcatcctcccaagctatggagccggcgggggagtcacagtggcatc

SEQ ID NO: 133771 - DNA, 50 bp, Artificial
  Synthetic oligonucleotide
acacgtgctctcactagtggcgtcaggcgaggcctcaagcaccagggagg

SEQ ID NO: 133772 - DNA, 50 bp, Artificial
  Synthetic oligonucleotide
acacgtcccagacgccttggtcgtgctaaaggaaggccacgcgcccaggt

SEQ ID NO: 133773 - DNA, 50 bp, Artificial
  Synthetic oligonucleotide
acaccggtagggcacgactcgctcctgggatacttcgccttggcatccct

SEQ ID NO: 133774 - DNA, 50 bp, Artificial
  Synthetic oligonucleotide
acaccgatgcttgcgcgtaaggcctcgctcgccgctctacatgcaaactc

SEQ ID NO: 133775 - DNA, 50 bp, Artificial
  Synthetic oligonucleotide
acacccgggttcgccagtcccacagcgttgagcagccccttgttcctcag

SEQ ID NO: 133776 - DNA, 50 bp, Artificial
  Synthetic oligonucleotide
acacccgacgtggcgttagcggtggacgtcactattgcgagcgacgtacc

SEQ ID NO: 133777 - DNA, 50 bp, Artificial
  Synthetic oligonucleotide
acacccccgtggcgcctccggaatgccctctagccttcagaccgccgcta

SEQ ID NO: 133778 - DNA, 50 bp, Artificial
  Synthetic oligonucleotide
acaacggttctagccgtcagggctggggcagtcgagcttaaccccctggt

SEQ ID NO: 133779 - DNA, 50 bp, Artificial
  Synthetic oligonucleotide
acgcactagccggctcccccttctacgtggtgccatccgatgacaaggtg

SEQ ID NO: 133780 - DNA, 55 bp, Artificial
  Synthetic oligonucleotide
gccgggttcaaatgcgtagactacaagccaccacaacataagggagacaccagcg

SEQ ID NO: 133781 - DNA, 50 bp, Artificial
  Synthetic oligonucleotide
acgaccagcatgtgagcctccaaatcgcggggccagcgtaaagcgacggg

SEQ ID NO: 133782 - DNA, 50 bp, Artificial
  Synthetic oligonucleotide
accttgtacgggacccttgccaacttgctcgcccggaaagggaggctcga

SEQ ID NO: 133783 - DNA, 49 bp, Artificial
  Synthetic oligonucleotide
accttcttagctagggcgttggccctttcggccctcccggggaagtttg

SEQ ID NO: 133784 - DNA, 50 bp, Artificial
  Synthetic oligonucleotide
acctcgctactcctcttcaggctctcgctggccacgtttagcgccgcctc

SEQ ID NO: 133785 - DNA, 50 bp, Artificial
  Synthetic oligonucleotide
acctcccaggatggtgccgcagtatgcctgccagggtcttgcttagcctt

SEQ ID NO: 133786 - DNA, 50 bp, Artificial
  Synthetic oligonucleotide
acctcagcacccacgcgtcaacccagaactcgtggagcctcgaagacacg

SEQ ID NO: 133787 - DNA, 50 bp, Artificial
  Synthetic oligonucleotide
acctcaagaatgccaccccgagggggcactacaggctgctccactggtac

SEQ ID NO: 133788 - DNA, 50 bp, Artificial
  Synthetic oligonucleotide
accgggcagacgagctctacgttagcagcgttaggttcgccgcgagggag

SEQ ID NO: 133789 - DNA, 50 bp, Artificial
  Synthetic oligonucleotide
accgacccatccctcgggtctaccgtgacaagcctggcctccctagctgt

SEQ ID NO: 133790 - DNA, 50 bp, Artificial
  Synthetic oligonucleotide
accctgatgtcaggcctgagggccacgaacgccatgagaggcttcacacc

SEQ ID NO: 133791 - DNA, 55 bp, Artificial
  Synthetic oligonucleotide
gccgacatcatgggattagtgctaacgccctgtaggacacatggcaagaaccgcc

SEQ ID NO: 133792 - DNA, 50 bp, Artificial
  Synthetic oligonucleotide
accctccttcaagcccgggggctcggcagcctagagtggcttcaagacta

SEQ ID NO: 133793 - DNA, 50 bp, Artificial
  Synthetic oligonucleotide
accctcctagcgtacgtgacaagcctgtcgagggcgcctaggtcactgct

SEQ ID NO: 133794 - DNA, 50 bp, Artificial
  Synthetic oligonucleotide
acccgggctccctcccagtctagggtcaccctgacaataccgtctagggc

SEQ ID NO: 133795 - DNA, 50 bp, Artificial
  Synthetic oligonucleotide
accccttcgtgcgctttgtacggcgaggaaccccgggtcatcttcctcac

SEQ ID NO: 133796 - DNA, 50 bp, Artificial
  Synthetic oligonucleotide
accccgagctggcagggctaacaggctcctgggcagtcttcgccgaagat

SEQ ID NO: 133797 - DNA, 50 bp, Artificial
  Synthetic oligonucleotide
acccccttgagggagttcgaagtaggcgtggcccccaactgggtcttgtt

SEQ ID NO: 133798 - DNA, 50 bp, Artificial
  Synthetic oligonucleotide
acccccttagtagtcgtcgacgtgatgagggcgggtcccagcacgggtgt

SEQ ID NO: 133799 - DNA, 50 bp, Artificial
  Synthetic oligonucleotide
accccacccaagaggcctccggcatagtccacgactcgttgacttgcggg

SEQ ID NO: 133800 - DNA, 50 bp, Artificial
  Synthetic oligonucleotide
acccacccgaagtagcgaggaacaagctcttccgagccctgaccggggga

SEQ ID NO: 133801 - DNA, 50 bp, Artificial
  Synthetic oligonucleotide
aagagcaacaacgcgtctgttggcgacatgccgagggcttgtacggcctc

SEQ ID NO: 133802 - DNA, 55 bp, Artificial
  Synthetic oligonucleotide
gcccctgccagggctcggcttgtctacatccatgtatctaagcggcttcgactca

SEQ ID NO: 133803 - DNA, 50 bp, Artificial
  Synthetic oligonucleotide
aagacgcactcgagccccctgcaccccctacgcaagaggaccgtagccgg

SEQ ID NO: 133804 - DNA, 50 bp, Artificial
  Synthetic oligonucleotide
aacttaccgtccgcgctcaacctcagtcgcgtgcaccccgcgcagaagta

SEQ ID NO: 133805 - DNA, 50 bp, Artificial
  Synthetic oligonucleotide
aactccgcgtgaacctgtagcactccctcgtcaggcctgtcagcgaaggg

SEQ ID NO: 133806 - DNA, 50 bp, Artificial
  Synthetic oligonucleotide
aacgcgttgtggagtgcgagagggtccctcaccggcttagacagcttgta

SEQ ID NO: 133807 - DNA, 50 bp, Artificial
  Synthetic oligonucleotide
aacgcgttgccccacatgcgggccttgttgattgagcccctgcccaacgg

SEQ ID NO: 133808 - DNA, 50 bp, Artificial
  Synthetic oligonucleotide
aacgcgggcgtcctcagcgtctagcagactcgtcacaaccctccccagct

SEQ ID NO: 133809 - DNA, 50 bp, Artificial
  Synthetic oligonucleotide
aacgccttaccctgtcccgtatgcccctccgcctaagccacgctcgatag

SEQ ID NO: 133810 - DNA, 50 bp, Artificial
  Synthetic oligonucleotide
aacctggggcagacccagccttacagccacactgctggcgagtagaaggg

SEQ ID NO: 133811 - DNA, 50 bp, Artificial
  Synthetic oligonucleotide
aacctatctggcctgtcgaccccaatacgagtacccggggcatgcctcca

SEQ ID NO: 133812 - DNA, 50 bp, Artificial
  Synthetic oligonucleotide
aacccggggtgtagaggcagtagcccgtgtagcacccggagttgccgtcc

SEQ ID NO: 133813 - DNA, 55 bp, Artificial
  Synthetic oligonucleotide
actatgtcaacgttgtagcctgctatgaacctcgttaactcggcgaggactcccg

SEQ ID NO: 133814 - DNA, 50 bp, Artificial
  Synthetic oligonucleotide
aacccctcggcaacttgtacatccgccgtgacggctaccctcacgtcgaa

SEQ ID NO: 133815 - DNA, 50 bp, Artificial
  Synthetic oligonucleotide
aacccaggggaagccaggcgtctgcctagtcgacaaggagtgcatagtgc

SEQ ID NO: 133816 - DNA, 50 bp, Artificial
  Synthetic oligonucleotide
aacccagctgcgttttccacaccgggtagcgacttgaagaggaccgcgtt

SEQ ID NO: 133817 - DNA, 50 bp, Artificial
  Synthetic oligonucleotide
aacagctacccccacactctcccaggtcgcaggaggctcggcaagaggga

SEQ ID NO: 133818 - DNA, 50 bp, Artificial
  Synthetic oligonucleotide
aacagagaccacgccgcctaacgtaatagtacacctcgtgccccgggcca

SEQ ID NO: 133819 - DNA, 50 bp, Artificial
  Synthetic oligonucleotide
aaagtatagtagtccccgctgagccctgtacgatcccccgcctccggagc

SEQ ID NO: 133820 - DNA, 50 bp, Artificial
  Synthetic oligonucleotide
aaagacgctagtggtcgattcggcgctctccctctcagcgctgcttcccc

SEQ ID NO: 133821 - DNA, 50 bp, Artificial
  Synthetic oligonucleotide
aaacaagttcgtggggaacatggcgtggtactccgcggaagggggctacc

SEQ ID NO: 133822 - DNA, 50 bp, Artificial
  Synthetic oligonucleotide
aaaacgctgtagtatttgccgcgggccgttggaaacccgcagcaccctac

SEQ ID NO: 133823 - DNA, 50 bp, Artificial
  Synthetic oligonucleotide
aatgctgctcgcggtctcctacctcttcgagctccctacggctgcgttcc

SEQ ID NO: 133824 - DNA, 55 bp, Artificial
  Synthetic oligonucleotide
gacgtcccagctaatgttcactagtgccgtcgccgtgaataaagcgtaatccgtg

SEQ ID NO: 133825 - DNA, 55 bp, Artificial
  Synthetic oligonucleotide
gcccacttgtcttcacacctgtctccatatatgctaggatccctagttgtccacg

SEQ ID NO: 133826 - DNA, 50 bp, Artificial
  Synthetic oligonucleotide
aatgctaggaacaggcctgcggttagaaggaggcccgacccgaaagcctc

SEQ ID NO: 133827 - DNA, 50 bp, Artificial
  Synthetic oligonucleotide
aatgcgcgaggcccggggtgttaggcttagctgctcctgtccactattcg

SEQ ID NO: 133828 - DNA, 50 bp, Artificial
  Synthetic oligonucleotide
aatgccgcgccctagcagctaccctcgagaggttagtggaggtcctcggc

SEQ ID NO: 133829 - DNA, 50 bp, Artificial
  Synthetic oligonucleotide
aatgccctctagccttcagaccgccgctagcgttgactgtgggtccctcg

SEQ ID NO: 133830 - DNA, 50 bp, Artificial
  Synthetic oligonucleotide
aatcgggaccctcttcgcaaggctccgcgaggtcgtagctcactacctcc

SEQ ID NO: 133831 - DNA, 50 bp, Artificial
  Synthetic oligonucleotide
aatcctcctagccccgcggcgcctagcagcctcgacggcagagtctatgt

SEQ ID NO: 133832 - DNA, 50 bp, Artificial
  Synthetic oligonucleotide
aagtgtggagcaagtctacgaacgggccctcgtctaccctctcggcggtt

SEQ ID NO: 133833 - DNA, 50 bp, Artificial
  Synthetic oligonucleotide
aagtccgccccgggtggggatacagcgcccattatggtgaggctgcccag

SEQ ID NO: 133834 - DNA, 50 bp, Artificial
  Synthetic oligonucleotide
aagggtagggaagtgctcgtcccggagtgtgagggggcgaaggtgtacta

SEQ ID NO: 133835 - DNA, 50 bp, Artificial
  Synthetic oligonucleotide
aaggggacgcgcaagcgaaggtgttctccggtactgcgacaatcctagcc

SEQ ID NO: 133836 - DNA, 55 bp, Artificial
  Synthetic oligonucleotide
gccattcacaggcgcgaacccgaggagggagcgcaaccctttggacaggctttac

SEQ ID NO: 133837 - DNA, 50 bp, Artificial
  Synthetic oligonucleotide
aaggctggtctaggttaggcgagggccttggagggtagggacgggtcgta

SEQ ID NO: 133838 - DNA, 50 bp, Artificial
  Synthetic oligonucleotide
aaggcctcaccgtgagcatagggggtggaggcaggtacgatgggttgaca

SEQ ID NO: 133839 - DNA, 50 bp, Artificial
  Synthetic oligonucleotide
aaggcagatagcagactcggcgtacgtggccatcgaggggttcagacggg

SEQ ID NO: 133840 - DNA, 50 bp, Artificial
  Synthetic oligonucleotide
aagctatgggaactggcgcgaccaacgctaagctcggcgggacttggtga

SEQ ID NO: 133841 - DNA, 50 bp, Artificial
  Synthetic oligonucleotide
aagcggtgggctcgactcctcggtaaccctgaggctactcgtggacgccc

SEQ ID NO: 133842 - DNA, 50 bp, Artificial
  Synthetic oligonucleotide
aagcgggtctgctcccggtggaacgagatcccataggagtctcacagcga

SEQ ID NO: 133843 - DNA, 50 bp, Artificial
  Synthetic oligonucleotide
aagcctgctggctccgttgggtagtgtgggtgtccagcggtgacactagg

SEQ ID NO: 133844 - DNA, 50 bp, Artificial
  Synthetic oligonucleotide
aagatcgcgcctggaacgctggccacaagggatgcgctggcgtacattgc

SEQ ID NO: 133845 - DNA, 50 bp, Artificial
  Synthetic oligonucleotide
aagagtagcaggtttgccccgatagccgccaggagggtgagcacctctgt

SEQ ID NO: 133846 - DNA, 50 bp, Artificial
  Synthetic oligonucleotide
aagaggtttgccgggggaatggatcccgttgcctttaacggtgccagggg

SEQ ID NO: 133847 - DNA, 55 bp, Artificial
  Synthetic oligonucleotide
gcatccgtagttagtgcattctccaccgatcaagtgttcctctacgactgcaacc

SEQ ID NO: 133848 - DNA, 50 bp, Artificial
  Synthetic oligonucleotide
caaccccttgctcggagtcccctcgccagggtgtcctacacggagtttca

SEQ ID NO: 133849 - DNA, 50 bp, Artificial
  Synthetic oligonucleotide
atcgaggctcctacccccgtggaggtcgagtacagagccaacgccggcat

SEQ ID NO: 133850 - DNA, 50 bp, Artificial
  Synthetic oligonucleotide
atagttaaccccggtagcgttggacagccaagggacggcgatccgagggc

SEQ ID NO: 133851 - DNA, 50 bp, Artificial
  Synthetic oligonucleotide
atacacagctttcgccagggctccgggcatgcttctcctcggtggccacc

SEQ ID NO: 133852 - DNA, 50 bp, Artificial
  Synthetic oligonucleotide
atacaagggagccccctggtaaccggtatcgctgccccggtacctaggaa

SEQ ID NO: 133853 - DNA, 50 bp, Artificial
  Synthetic oligonucleotide
agtttagccatgaccgctgccgtcctaaccttgttctcccctgcgggacc

SEQ ID NO: 133854 - DNA, 50 bp, Artificial
  Synthetic oligonucleotide
agtgcagggcagaggccggattctcacacccaacgcatggagtggcagtc

SEQ ID NO: 133855 - DNA, 50 bp, Artificial
  Synthetic oligonucleotide
aggttcgttgtaagcgctaggaagggtcacatagcgttcccgcccacccc

SEQ ID NO: 133856 - DNA, 50 bp, Artificial
  Synthetic oligonucleotide
agggtatggcagactcccgcttcgtgttaggtcgtagcggcccccagtac

SEQ ID NO: 133857 - DNA, 50 bp, Artificial
  Synthetic oligonucleotide
aggggcttccacctcgcccacaggtcacgcgctatcaccgtgggttcatg

SEQ ID NO: 133858 - DNA, 55 bp, Artificial
  Synthetic oligonucleotide
gcatagtcagtggtcccaccgcctgggagggcttcgctacttatgatcccggggt

SEQ ID NO: 133859 - DNA, 50 bp, Artificial
  Synthetic oligonucleotide
agggagcccccaggctacaccctgcagcattgaacgtggtcctagttgtc

SEQ ID NO: 133860 - DNA, 50 bp, Artificial
  Synthetic oligonucleotide
aggagggattaccccgtagaccgcgggaccccacgaggactggcctaccc

SEQ ID NO: 133861 - DNA, 50 bp, Artificial
  Synthetic oligonucleotide
agctcgctccccgtaaaaaccctgtgtactacaggcctccccaatggccg

SEQ ID NO: 133862 - DNA, 50 bp, Artificial
  Synthetic oligonucleotide
agctcgaccgcgtattcaactaaacgcctagcgacgccttgccccctgaa

SEQ ID NO: 133863 - DNA, 50 bp, Artificial
  Synthetic oligonucleotide
agctaggccgagaggtgttgtcgcgttgaagtcaacccatggctccccgg

SEQ ID NO: 133864 - DNA, 50 bp, Artificial
  Synthetic oligonucleotide
agctacgttgaccccttcgtgcgctttgtacggcgaggaaccccgggtca

SEQ ID NO: 133865 - DNA, 50 bp, Artificial
  Synthetic oligonucleotide
agcgttggacagccaagggacggcgatccgagggcctcctgcggcctact

SEQ ID NO: 133866 - DNA, 50 bp, Artificial
  Synthetic oligonucleotide
agcggtatgccgttgatccaaaccctccctatccccggcttgacgactgc

SEQ ID NO: 133867 - DNA, 50 bp, Artificial
  Synthetic oligonucleotide
agcgctaggaagggtcacatagcgttcccgcccacccctgacagagtgct

SEQ ID NO: 133868 - DNA, 50 bp, Artificial
  Synthetic oligonucleotide
cgccccgttacgcgggggtgttacatgggcaccggggtcacatcacttag

SEQ ID NO: 133869 - DNA, 55 bp, Artificial
  Synthetic oligonucleotide
gcatagctgtgctgtgacactccaccgactcatgtatcccgaggagactagcaca

SEQ ID NO: 133870 - DNA, 50 bp, Artificial
  Synthetic oligonucleotide
cgagtggtgggacacgttccccataggcttgactagggtagacgagtggg

SEQ ID NO: 133871 - DNA, 50 bp, Artificial
  Synthetic oligonucleotide
cctgtggtgggggtatagaggagcacccccagtgtatccgtactcggcga

SEQ ID NO: 133872 - DNA, 50 bp, Artificial
  Synthetic oligonucleotide
ccggtgaaattcccatgcgccctaagcctgagatacggtctcggcgcgat

SEQ ID NO: 133873 - DNA, 50 bp, Artificial
  Synthetic oligonucleotide
cccctgtgggaacggagcctgggttgactgcctgtaaaagagtcccggtt

SEQ ID NO: 133874 - DNA, 50 bp, Artificial
  Synthetic oligonucleotide
cccctcagcaacattgcccggggagcgttaaacctcagctcagccctgca

SEQ ID NO: 133875 - DNA, 50 bp, Artificial
  Synthetic oligonucleotide
ccccgtgctgtgaaccgtggctctccatcccacgaatggccctagactcg

SEQ ID NO: 133876 - DNA, 50 bp, Artificial
  Synthetic oligonucleotide
ccccgtctagaggtaggctagggcgggctccgaccatgtaaccgcggtag

SEQ ID NO: 133877 - DNA, 50 bp, Artificial
  Synthetic oligonucleotide
cccacgtaggctatacgccttaaaccccttaccgcggagctccctcgcta

SEQ ID NO: 133878 - DNA, 50 bp, Artificial
  Synthetic oligonucleotide
cccacatgggcagggttcaaccaatacctgtggggaagcccgaggtggtt

SEQ ID NO: 133879 - DNA, 50 bp, Artificial
  Synthetic oligonucleotide
ccattcttcgccaggcttgggcttagggagtggagccccgcagttagtgc

SEQ ID NO: 133880 - DNA, 54 bp, Artificial
  Synthetic oligonucleotide
gcaaccttcttggaggggataatcttaaggcctaaatcgtccttccaaccgcca

SEQ ID NO: 133881 - DNA, 50 bp, Artificial
  Synthetic oligonucleotide
ccatagtgcgatacagccacggcataattcgaggctgccccaccaggcct

SEQ ID NO: 133882 - DNA, 50 bp, Artificial
  Synthetic oligonucleotide
ccagttgttcgtagaagtttatcgcgtctagctcggctatgattccccag

SEQ ID NO: 133883 - DNA, 50 bp, Artificial
  Synthetic oligonucleotide
ccacgctgtttccacacgctgagagctctccccggctagccagctcgaat

SEQ ID NO: 133884 - DNA, 50 bp, Artificial
  Synthetic oligonucleotide
ccaagggtctccacgcctcggcaatgggtggggctgcttaccagttcaac

SEQ ID NO: 133885 - DNA, 50 bp, Artificial
  Synthetic oligonucleotide
cagtgtcgagaccagtagtacccacgccgagagcggtaagccggccacta

SEQ ID NO: 133886 - DNA, 50 bp, Artificial
  Synthetic oligonucleotide
cagtagcccgcgtgtgcctggtggctccaccgtagagcctcgaccgcaac

SEQ ID NO: 133887 - DNA, 50 bp, Artificial
  Synthetic oligonucleotide
cagcgcctcacttgcagctctacacgcgaactccaggtctgtcgccatgg

SEQ ID NO: 133888 - DNA, 50 bp, Artificial
  Synthetic oligonucleotide
cacacgccgccagggtacactgagacgagcgccccgtaacctgtatggtt

SEQ ID NO: 133889 - DNA, 50 bp, Artificial
  Synthetic oligonucleotide
acttacagcccggagagaaggccggggtatgctcgttcccaccaacgccc

SEQ ID NO: 133890 - DNA, 50 bp, Artificial
  Synthetic oligonucleotide
actcggtagcctagtgaacgggttaacggggctcggcgtctcaggctcta

SEQ ID NO: 133891 - DNA, 55 bp, Artificial
  Synthetic oligonucleotide
gattagtggtagagtcatatagtatagccatgtccgtatatagtcgaagacatag

SEQ ID NO: 133892 - DNA, 50 bp, Artificial
  Synthetic oligonucleotide
actcggagccatccgggcactgctccttcgtcgtgtaggcgtcaggcgtg

SEQ ID NO: 133893 - DNA, 50 bp, Artificial
  Synthetic oligonucleotide
actccgcttgggtggcccacgtgaggacctacgtcccgcctttcgaagcc

SEQ ID NO: 133894 - DNA, 50 bp, Artificial
  Synthetic oligonucleotide
actacaccgtagggggtgacgcctgagctaacggcctccgcgaagacctt

SEQ ID NO: 133895 - DNA, 50 bp, Artificial
  Synthetic oligonucleotide
acgtgtgggtgctcgaggctgaccttatatggacggggctcacgaggcct

SEQ ID NO: 133896 - DNA, 50 bp, Artificial
  Synthetic oligonucleotide
acgtcaggctcaaatatggggagctcgggaacccagcctatgagtttgga

SEQ ID NO: 133897 - DNA, 50 bp, Artificial
  Synthetic oligonucleotide
acgtcagcagtcgagatgccgccgtagaacctcgtcccccggaacctata

SEQ ID NO: 133898 - DNA, 50 bp, Artificial
  Synthetic oligonucleotide
acgtcagcaacgggcttgtcaacgccaccctgaggctaccggatgctgta

SEQ ID NO: 133899 - DNA, 50 bp, Artificial
  Synthetic oligonucleotide
acggtgtaagttgccaccaggcctgtgaaggccccgatgtagagctggga

SEQ ID NO: 133900 - DNA, 50 bp, Artificial
  Synthetic oligonucleotide
acggtcttcgagtagccgcccccgtagagccctgtgagctcgtcgtagag

SEQ ID NO: 133901 - DNA, 50 bp, Artificial
  Synthetic oligonucleotide
acgggtatggcggctaacgccctggtcgagggaggcagcgcggaggttag

SEQ ID NO: 133902 - DNA, 55 bp, Artificial
  Synthetic oligonucleotide
gatacttgacgccgtctacagctccaacgcgttcacacttatagcgggagggcac

SEQ ID NO: 133903 - DNA, 50 bp, Artificial
  Synthetic oligonucleotide
acgggtactggttacgccgcccctcaacagctggttcgcacccgataagg

SEQ ID NO: 133904 - DNA, 50 bp, Artificial
  Synthetic oligonucleotide
acggggtgtggacgtatccagggtgaagaccgttgataggccctcgggtg

SEQ ID NO: 133905 - DNA, 50 bp, Artificial
  Synthetic oligonucleotide
acgcgggtcctcagcgccccagaagtctatccaatcccccggcagtacct

SEQ ID NO: 133906 - DNA, 50 bp, Artificial
  Synthetic oligonucleotide
acgcgcttaaaggggttacggctagctttccggcaggggtagtgacggct

SEQ ID NO: 133907 - DNA, 50 bp, Artificial
  Synthetic oligonucleotide
acgcctattaatcggctcccgcgccactaggctgcctcgcaccgtgagag

SEQ ID NO: 133908 - DNA, 50 bp, Artificial
  Synthetic oligonucleotide
acgccgtgctccgacacaggcgccttcaacatagccgcgtaggcaagcct

SEQ ID NO: 133909 - DNA, 50 bp, Artificial
  Synthetic oligonucleotide
acgccgcacgtgtccctgcacagcatagattccgaccccctggggaacta

SEQ ID NO: 133910 - DNA, 50 bp, Artificial
  Synthetic oligonucleotide
agcctgtagacatcagcctcgacgcatgggttgctgggtcaaccagcact

SEQ ID NO: 133911 - DNA, 50 bp, Artificial
  Synthetic oligonucleotide
agcctaaggatccagcaatccaggtgggcctacggggcaacagacgtggc

SEQ ID NO: 133912 - DNA, 50 bp, Artificial
  Synthetic oligonucleotide
agccgtcgaataaaacagtgtagggcccctgatgcaaccggaagccccgc

SEQ ID NO: 133913 - DNA, 55 bp, Artificial
  Synthetic oligonucleotide
gaggcgtgtaagcatctctattctctcaccggctgtgaaagggtttctacaggtg

SEQ ID NO: 133914 - DNA, 50 bp, Artificial
  Synthetic oligonucleotide
agccgccgcacaccagttgcagagcgagcacttccctctatcgatcacga

SEQ ID NO: 133915 - DNA, 50 bp, Artificial
  Synthetic oligonucleotide
agccctgatgcccacggtggctggctccacgaagaggcttctccgtatga

SEQ ID NO: 133916 - DNA, 50 bp, Artificial
  Synthetic oligonucleotide
agccctgagcccgtgggggagccccttctcttaagcctacttaggaggta

SEQ ID NO: 133917 - DNA, 50 bp, Artificial
  Synthetic oligonucleotide
agccctagagcagctagcgttgcctctagtgcagccgaccccattacccg

SEQ ID NO: 133918 - DNA, 50 bp, Artificial
  Synthetic oligonucleotide
agccagtgcctatagactcaaggacgagaaagtatctagagatgcttgcc

SEQ ID NO: 133919 - DNA, 50 bp, Artificial
  Synthetic oligonucleotide
agcagctagcgttgcctctagtgcagccgaccccattacccgcagcttga

SEQ ID NO: 133920 - DNA, 50 bp, Artificial
  Synthetic oligonucleotide
agatgtgcctgcagcgatcacggggagggctgataacgcgagcactgaga

SEQ ID NO: 133921 - DNA, 50 bp, Artificial
  Synthetic oligonucleotide
agagtgtacgcgaccgagacaaggccagtcctccaaggggcgaggctaac

SEQ ID NO: 133922 - DNA, 50 bp, Artificial
  Synthetic oligonucleotide
agaggggacgagcagactactgcgggagtccggtacacacccgttcaagc

SEQ ID NO: 133923 - DNA, 50 bp, Artificial
  Synthetic oligonucleotide
agaggcgggtgcatgagtccgagtaagtagggcgtgacggagtcccagcc

SEQ ID NO: 133924 - DNA, 55 bp, Artificial
  Synthetic oligonucleotide
gaggcataccgcattatccaggctcatcggtgaactcttacatggtgagtcaggg

SEQ ID NO: 133925 - DNA, 50 bp, Artificial
  Synthetic oligonucleotide
agagctcaagtgatgtgaccccggtgcccatgcaacacccccgcgtaacg

SEQ ID NO: 133926 - DNA, 50 bp, Artificial
  Synthetic oligonucleotide
agaccctggcctctttcactacgtgccggctctcctcagaaaccgcgaca

SEQ ID NO: 133927 - DNA, 50 bp, Artificial
  Synthetic oligonucleotide
agaagctagtgccgagagagctcgcgcctactagcgccctgaacgaccta

SEQ ID NO: 133928 - DNA, 50 bp, Artificial
  Synthetic oligonucleotide
agaagccgcctacggccttttagacctcgcggtgctcggaaagggctgta

SEQ ID NO: 133929 - DNA, 50 bp, Artificial
  Synthetic oligonucleotide
agaagaaggtaggcccaacgaacttgaaggagcgcttggggtgggagggc

SEQ ID NO: 133930 - DNA, 50 bp, Artificial
  Synthetic oligonucleotide
agaacgtgcctcggcccagaacgttcatcgcgtacgacttggagagcgcc

SEQ ID NO: 133931 - DNA, 50 bp, Artificial
  Synthetic oligonucleotide
acttgctgtggggagtgggcgaccccaagtggtgcaacttcgcaacgcgg

SEQ ID NO: 133932 - DNA, 50 bp, Artificial
  Synthetic oligonucleotide
acttgctcctccaagccaagggcataccgctgggcgagagggtaccggcc

SEQ ID NO: 133933 - DNA, 55 bp, Artificial
  Synthetic oligonucleotide
gaccagatactagctaaagcctccactaatatggtcaagacagtgagtctagacg

SEQ ID NO: 133934 - DNA, 55 bp, Artificial
  Synthetic oligonucleotide
agacctcaggagtatgaccgtggagactagtgttgtaatagacgagtatagtgta

SEQ ID NO: 133935 - DNA, 55 bp, Artificial
  Synthetic oligonucleotide
agacgagtaggagtactagtggtagagtctccttgaacacgtgtctgcacccttg

SEQ ID NO: 133936 - DNA, 55 bp, Artificial
  Synthetic oligonucleotide
agacgccttggtcgtgctaaaggaaggccacgcgcccaggttcatcggtagaggg

SEQ ID NO: 133937 - DNA, 55 bp, Artificial
  Synthetic oligonucleotide
gaggattcttctatctgagtagtcttcccatgcacagctagggcatctattgatc

SEQ ID NO: 133938 - DNA, 55 bp, Artificial
  Synthetic oligonucleotide
gaggagggcagcgggctctgcgagtaaacaactattacaccacgacacttgtgct

SEQ ID NO: 133939 - DNA, 55 bp, Artificial
  Synthetic oligonucleotide
gaggacggggcagacaaatctagcccttgtcgctattagtgattcagccgggagg

SEQ ID NO: 133940 - DNA, 55 bp, Artificial
  Synthetic oligonucleotide
gagaagcttggagacatagagctaagacgcctatggagaacagctaacaccctcc

SEQ ID NO: 133941 - DNA, 55 bp, Artificial
  Synthetic oligonucleotide
agccaaatggattcgcaatgaacagtatttcacgatccttcgccgacatacgtgg

SEQ ID NO: 133942 - DNA, 55 bp, Artificial
  Synthetic oligonucleotide
gagaagactgtagagcgtttatcctcagtaaatccacgcctgatatagagaacaa

SEQ ID NO: 133943 - DNA, 55 bp, Artificial
  Synthetic oligonucleotide
gactggattagactacattctcagggacctaggggttgacacggtaatcctgacg

SEQ ID NO: 133944 - DNA, 52 bp, Artificial
  Synthetic oligonucleotide
gacacacgtcttaactattgctggttaaaccgggttataaaggtttggacac

SEQ ID NO: 133945 - DNA, 55 bp, Artificial
  Synthetic oligonucleotide
cggaaccaggtggataataggataaagcactgccgggctctacccgtagtcatct

SEQ ID NO: 133946 - DNA, 55 bp, Artificial
  Synthetic oligonucleotide
cgctcttgctaagcctccttctagcggtatgtaggtgagctgtatgcccaatgac

SEQ ID NO: 133947 - DNA, 55 bp, Artificial
  Synthetic oligonucleotide
cgctatggctgttacagctgttgtctctatatttgggtctcctacaaggtttagg

SEQ ID NO: 133948 - DNA, 55 bp, Artificial
  Synthetic oligonucleotide
cccgcgttcaagacccctaacgacatgaatatgtaccctgtattcatgacagtcg

SEQ ID NO: 133949 - DNA, 55 bp, Artificial
  Synthetic oligonucleotide
cccgcttatatttgcgctagtacctgtaatgaatccaccgttgagttcggctagt

SEQ ID NO: 133950 - DNA, 55 bp, Artificial
  Synthetic oligonucleotide
ccgacgagacgcgtgtgccagggtcgtaaaagccgatgaggacccgtgtttcagc

SEQ ID NO: 133951 - DNA, 55 bp, Artificial
  Synthetic oligonucleotide
ccgccgcttctaagtgttataccatagaatggcttagcgatcaccatatacggct

SEQ ID NO: 133952 - DNA, 55 bp, Artificial
  Synthetic oligonucleotide
ccgggtcaaggggctccgcctcaatgtcccgggcaatgcaatcattattttgccc

SEQ ID NO: 133953 - DNA, 55 bp, Artificial
  Synthetic oligonucleotide
cgctaaccatagaggttctaggttacggcatctccacaacagtgtactacggcta

SEQ ID NO: 133954 - DNA, 55 bp, Artificial
  Synthetic oligonucleotide
ccggtgtcccctcgaagaagaatactggctcatacccgtgttcaaccagcagggg

SEQ ID NO: 133955 - DNA, 54 bp, Artificial
  Synthetic oligonucleotide
agcgaaccctatcagagcggcccctacagacttcgtgagccggaacggtacccc

SEQ ID NO: 133956 - DNA, 54 bp, Artificial
  Synthetic oligonucleotide
cctaatctcgtcaggtgaaagtatcccgaacttcacacgggttatcctgttggt

SEQ ID NO: 133957 - DNA, 55 bp, Artificial
  Synthetic oligonucleotide
cctattcgcagacctttatctgtacactgaaggatacgctactccattagctggg

SEQ ID NO: 133958 - DNA, 55 bp, Artificial
  Synthetic oligonucleotide
cctccattgttggcagagttactgttactattctcgacaagtcaagcccagacca

SEQ ID NO: 133959 - DNA, 55 bp, Artificial
  Synthetic oligonucleotide
cctccttaccgagcactctcgcctgcctaactatttgcgcggctatcctgttatg

SEQ ID NO: 133960 - DNA, 55 bp, Artificial
  Synthetic oligonucleotide
cctcgtcatctcttggactcccatccttattccgctggggttcgctatggcgtct

SEQ ID NO: 133961 - DNA, 55 bp, Artificial
  Synthetic oligonucleotide
cctggtacgatcctggttccggcactacctttaatggcctcgtaagcttggctca

SEQ ID NO: 133962 - DNA, 50 bp, Artificial
  Synthetic oligonucleotide
ccttgaggaaaccggagttaatcccggatcgttaaaggtatcgtgggtgg

SEQ ID NO: 133963 - DNA, 55 bp, Artificial
  Synthetic oligonucleotide
cgaagcaagcagtagggtagtgtatggtttactatggcttacagacacgaatgaa

SEQ ID NO: 133964 - DNA, 55 bp, Artificial
  Synthetic oligonucleotide
cgacccgggtacagctaagtcgcagctactccagttcacatcgaggctagcgccg

SEQ ID NO: 133965 - DNA, 54 bp, Artificial
  Synthetic oligonucleotide
cgacctttaaggggcggctcgaattaacgctcggggtctaacgtgcagaccgca

SEQ ID NO: 133966 - DNA, 55 bp, Artificial
  Synthetic oligonucleotide
cttcgaatcttaatgctagggtaccgaatttcttatatacatctacgaatcccgc

SEQ ID NO: 133967 - DNA, 55 bp, Artificial
  Synthetic oligonucleotide
cgagcagcctcaaactatgcctagtatactctatcctatacaccctccttttcgg

SEQ ID NO: 133968 - DNA, 55 bp, Artificial
  Synthetic oligonucleotide
cgccttgctggggacgcaaccgtagttagtgcactcccctcctattaagtgctcc

SEQ ID NO: 133969 - DNA, 55 bp, Artificial
  Synthetic oligonucleotide
cgcagtaaccaccgcctctatagatgggtcgacatagggtccttcctgcccgggc

SEQ ID NO: 133970 - DNA, 55 bp, Artificial
  Synthetic oligonucleotide
cgcatccaggatcctcgtaggctggtcgacgcgtagatgcataccggcagtactc

SEQ ID NO: 133971 - DNA, 55 bp, Artificial
  Synthetic oligonucleotide
cgccctgaaatgcaactgcgtgtaggtggtgagggcgtcttgggcgcaaggttct

SEQ ID NO: 133972 - DNA, 55 bp, Artificial
  Synthetic oligonucleotide
atggagaccgggatacggattatgtacatatagtccagagtttctaaaccccaga

SEQ ID NO: 133973 - DNA, 55 bp, Artificial
  Synthetic oligonucleotide
caagcaacagatgtagcaacgccaaagctatttatgagtcttagctgtatttgga

SEQ ID NO: 133974 - DNA, 55 bp, Artificial
  Synthetic oligonucleotide
cacctgtatactaccctagaccccttgcctctacccctgatcctcacgctcaggg

SEQ ID NO: 133975 - DNA, 55 bp, Artificial
  Synthetic oligonucleotide
cacgagctcgttaaccatggcctcgtatatctgggacgcgtatcctgagagctca

SEQ ID NO: 133976 - DNA, 55 bp, Artificial
  Synthetic oligonucleotide
cactgtggccaggagggtgccgctgcttatgagccgcagagggtctatgcctagt

SEQ ID NO: 133977 - DNA, 55 bp, Artificial
  Synthetic oligonucleotide
cttagttgaggatagggtggggcatccagtttaattctccatagatcatctatta

SEQ ID NO: 133978 - DNA, 54 bp, Artificial
  Synthetic oligonucleotide
cgtggaaaactgccgggagctaaacaattatatcgtagaagaccaggcctaaac

SEQ ID NO: 133979 - DNA, 55 bp, Artificial
  Synthetic oligonucleotide
cgtgccaggggactgggtgcgcgtagagtcattgtcaccgaggttgaccctgttc

SEQ ID NO: 133980 - DNA, 55 bp, Artificial
  Synthetic oligonucleotide
cgtgatgagcgattaactgctttaaaggagtagagtgtctccgttcacagctttg

SEQ ID NO: 133981 - DNA, 55 bp, Artificial
  Synthetic oligonucleotide
cagtgttaaaggggagttcctagcctaccagttcgggcttatcgcatcctccatg

SEQ ID NO: 133982 - DNA, 52 bp, Artificial
  Synthetic oligonucleotide
cataaagactccgcggtggtcctctctagttttaccgggtccgataccgtcc

SEQ ID NO: 133983 - DNA, 55 bp, Artificial
  Synthetic oligonucleotide
catagttgggattcttcagacataggttcatctcgacttgcatgattccctccgc

SEQ ID NO: 133984 - DNA, 55 bp, Artificial
  Synthetic oligonucleotide
catcaaagtttagagctagatggggtaatatggcagcaaagttgaggagagtggg

SEQ ID NO: 133985 - DNA, 55 bp, Artificial
  Synthetic oligonucleotide
catgtgtggagtcaaccaccctaaccctgttgtccccgatgcttccagccgcttc

SEQ ID NO: 133986 - DNA, 55 bp, Artificial
  Synthetic oligonucleotide
cgggttgctgaatcatccttgaagcattgaggaacaccggtattgttacgcatct

SEQ ID NO: 133987 - DNA, 55 bp, Artificial
  Synthetic oligonucleotide
cgggtacactggagcccgtgtatcttgaattaagggatagggtagcatgccaccc

SEQ ID NO: 133988 - DNA, 55 bp, Artificial
  Synthetic oligonucleotide
agctcccggcggtctctggagaatgtgtgctaggaattctcccctagcgctctca

SEQ ID NO: 133989 - DNA, 55 bp, Artificial
  Synthetic oligonucleotide
ccactagcctggaagcttaaggtataacttttagccacggtattctcttgttgct

SEQ ID NO: 133990 - DNA, 55 bp, Artificial
  Synthetic oligonucleotide
ccactcctcgacagggtaggggcttgacttagccctcattatctcatgtgccagc

SEQ ID NO: 133991 - DNA, 55 bp, Artificial
  Synthetic oligonucleotide
ccagcatcatatgtaggagcagtaacactctcatgctgggctcttcgaagaggct

SEQ ID NO: 133992 - DNA, 55 bp, Artificial
  Synthetic oligonucleotide
cggggagcctgagataaggaggttatacgaggctggattagagtacaggttcagg

SEQ ID NO: 133993 - DNA, 55 bp, Artificial
  Synthetic oligonucleotide
ccattatcctaagtatcgtgtctagatcgtctgaaacactcaccgctatagggtg

SEQ ID NO: 133994 - DNA, 55 bp, Artificial
  Synthetic oligonucleotide
cgggagagtgctgagccatgactaataggtccaggggttttcaacacgagaggga

SEQ ID NO: 133995 - DNA, 55 bp, Artificial
  Synthetic oligonucleotide
ccatttctactaggtgtctgtattcctttggttttctagcgtcgcctagtatggg

SEQ ID NO: 133996 - DNA, 55 bp, Artificial
  Synthetic oligonucleotide
cgggaagaccagtgactccatctaaggttgcgatcgttattctcggctacaacgc

SEQ ID NO: 133997 - DNA, 55 bp, Artificial
  Synthetic oligonucleotide
cggcaagtacagcgcggactacgacagcatactaccgactatagacaagctcagg

SEQ ID NO: 133998 - DNA, 55 bp, Artificial
  Synthetic oligonucleotide
cggatccacaccctcttgagcagagcccgggtttcaagggccgctggccatatca

SEQ ID NO: 133999 - DNA, 55 bp, Artificial
  Synthetic oligonucleotide
gggattataaataactactacgtttccatttcgcctatcactgtctaagtagtat

SEQ ID NO: 134000 - DNA, 55 bp, Artificial
  Synthetic oligonucleotide
ggggagcaggttgctgtccctggccagatagtatagcatccttgtgagagaattg

SEQ ID NO: 134001 - DNA, 55 bp, Artificial
  Synthetic oligonucleotide
ggatatcagtggccgaagactgggcatttatgctccggctcgtcgaattatctaa

SEQ ID NO: 134002 - DNA, 55 bp, Artificial
  Synthetic oligonucleotide
gcccttacccaataaactggatgaaacaggcaaacttgcattgccatggcacagg

SEQ ID NO: 134003 - DNA, 55 bp, Artificial
  Synthetic oligonucleotide
gccaatctgacttcttccatgctcctatgtgattcgtattgcctgtcaactgtat

SEQ ID NO: 134004 - DNA, 55 bp, Artificial
  Synthetic oligonucleotide
gcagcaatgtttctcgaaaatattccggtgtccgctcgtggaaaatggtctatag

SEQ ID NO: 134005 - DNA, 55 bp, Artificial
  Synthetic oligonucleotide
gcacgctgggtgttggattcatggaaaatgttaccagtaagttccctgaattgag

SEQ ID NO: 134006 - DNA, 55 bp, Artificial
  Synthetic oligonucleotide
cttagaagtgcaataagcacttacgggattgccggcatggaggaatggggctctc

SEQ ID NO: 134007 - DNA, 55 bp, Artificial
  Synthetic oligonucleotide
aggaaggatggtgtattaaaattgagagcgttttgcatgaaagatacgcgtcccg

SEQ ID NO: 134008 - DNA, 55 bp, Artificial
  Synthetic oligonucleotide
attaacaagctcatatcggatgtactgggttcatgctttaccagaagtatggatc

SEQ ID NO: 134009 - DNA, 55 bp, Artificial
  Synthetic oligonucleotide
cacttgcatttcaattcctatatggaattattttaaccgtgcctcaatgccaagg

SEQ ID NO: 134010 - DNA, 52 bp, Artificial
  Synthetic oligonucleotide
ccggtatactttcccaccatgcgtatgtggttatttccaacgtttcttttag

SEQ ID NO: 134011 - DNA, 55 bp, Artificial
  Synthetic oligonucleotide
ccagacgttctaggatatcttcgcggtaaattgaagtcccaccgccaagttcacg

SEQ ID NO: 134012 - DNA, 52 bp, Artificial
  Synthetic oligonucleotide
cccgctttccgggacaggtatttcagggtagggcacatgggatgggtaaaac

SEQ ID NO: 134013 - DNA, 55 bp, Artificial
  Synthetic oligonucleotide
cccggcgatgaggtacacgaaacaatgaaatattcgattttccaggaacaacgga

SEQ ID NO: 134014 - DNA, 55 bp, Artificial
  Synthetic oligonucleotide
cccgtgggaatccacagaagatccagagcatccctgtaactggatttgctatcat

SEQ ID NO: 134015 - DNA, 55 bp, Artificial
  Synthetic oligonucleotide
cgcagaacacattacagctgaggctgcatagtcgcctattccgggtagagatgca

SEQ ID NO: 134016 - DNA, 55 bp, Artificial
  Synthetic oligonucleotide
ctcacccatcgtattaaatagaaatacggcccattctaattccgctctgtgtggc

SEQ ID NO: 134017 - DNA, 55 bp, Artificial
  Synthetic oligonucleotide
ctcacgtagaatatccagtgcaaagccatgaattgttccggtaaacatgtcaccg

SEQ ID NO: 134018 - DNA, 55 bp, Artificial
  Synthetic oligonucleotide
ctctaagctgtcgagaaatatcgttaatttcgttgatcaaaccgcggaaatttca

SEQ ID NO: 134019 - DNA, 55 bp, Artificial
  Synthetic oligonucleotide
ctggccactccttctcccatacagtggggacttatacgacagtacattattctcc

SEQ ID NO: 134020 - DNA, 55 bp, Artificial
  Synthetic oligonucleotide
ctggctagtgatactccacctgctttccagacataataatctggattacactcct

SEQ ID NO: 134021 - DNA, 56 bp, Artificial
  Synthetic oligonucleotide
ccattacatctaggggtccgtcaacgtatagaatatgtttgaatgtttcatacatg

SEQ ID NO: 134022 - DNA, 54 bp, Artificial
  Synthetic oligonucleotide
gggaattagcacaagcagccatccgtaaattatagctttcccgattaccttctt

SEQ ID NO: 134023 - DNA, 52 bp, Artificial
  Synthetic oligonucleotide
agtggggatatacacagggagtaagtccctttatgggatatggcgaagcttt

SEQ ID NO: 134024 - DNA, 51 bp, Artificial
  Synthetic oligonucleotide
ggctatggagtggcgtaccatagatacacggataaggcatatagttaatca

SEQ ID NO: 134025 - DNA, 51 bp, Artificial
  Synthetic oligonucleotide
tggaaatgaaaggctttccgatccatcatcacgcaggaaagcggtcgggct

SEQ ID NO: 134026 - DNA, 50 bp, Artificial
  Synthetic oligonucleotide
cacagaacaatgacttcgagttggcagtggaaatggccctagaattcagt

SEQ ID NO: 134027 - DNA, 55 bp, Artificial
  Synthetic oligonucleotide
tttgctgttaaacacggatgcacctccagaatctatagtagcattcacattcacc

SEQ ID NO: 134028 - DNA, 55 bp, Artificial
  Synthetic oligonucleotide
tcatattcagcacgttatgtatatttgtcccgtagccgaatccagcgggcactcc

SEQ ID NO: 134029 - DNA, 55 bp, Artificial
  Synthetic oligonucleotide
gtacagaaaatttgtaaaattcaccggtggaaccagaattgaatatcacaggccg

SEQ ID NO: 134030 - DNA, 55 bp, Artificial
  Synthetic oligonucleotide
ggtatattaccggagcagccgattcttacacaccctttatacttccgggcagcgg

SEQ ID NO: 134031 - DNA, 55 bp, Artificial
  Synthetic oligonucleotide
ggtacagagctcttgttcttagagttgctgaagcgtatttatccatctcgacctg

SEQ ID NO: 134032 - DNA, 55 bp, Artificial
  Synthetic oligonucleotide
gggtgggtttgtgtaattgttatactccattttatcactcactgctaatagcatc

SEQ ID NO: 134033 - DNA, 57 bp, Artificial
  Synthetic oligonucleotide
ataatctcgttcgcctcgtcacgagtccgtttcgcggcctcctgagcgtagccttcg

SEQ ID NO: 134034 - DNA, 57 bp, Artificial
  Synthetic oligonucleotide
aggtgtaactcgagaccgagaacacacgaaatccactctctccgtctcaccaaataa

SEQ ID NO: 134035 - DNA, 58 bp, Artificial
  Synthetic oligonucleotide
actgaggactatcgtcattaatcggttctcaagtgaggccagaaacagtacgttttga

SEQ ID NO: 134036 - DNA, 55 bp, Artificial
  Synthetic oligonucleotide
atgagcgtacgcatgcacaacgtcaccacgcgcataaagcccaccaacagcatcg

SEQ ID NO: 134037 - DNA, 55 bp, Artificial
  Synthetic oligonucleotide
atgagattggtcaccgacggaaagcctgcttcacggaactactcccgactgcggg

SEQ ID NO: 134038 - DNA, 55 bp, Artificial
  Synthetic oligonucleotide
atctgtctaatactggcggctgtcctctcgttcgtgtattccccaccacggggca

SEQ ID NO: 134039 - DNA, 55 bp, Artificial
  Synthetic oligonucleotide
atctgggtcggcataccgctgaagcggtccatcaggcctcttggcattcggttga

SEQ ID NO: 134040 - DNA, 55 bp, Artificial
  Synthetic oligonucleotide
gggccttctgacaaccggcggagagtctcgactcgataccgtgaactgattacgt

SEQ ID NO: 134041 - DNA, 55 bp, Artificial
  Synthetic oligonucleotide
gggcgactaacgatccccgaggaccgagaacagagaccagatacctctcgaagag

SEQ ID NO: 134042 - DNA, 55 bp, Artificial
  Synthetic oligonucleotide
atctcgaacgatttctcttttcgcgatgacctctccccgaaagtcaagagttcac

SEQ ID NO: 134043 - DNA, 54 bp, Artificial
  Synthetic oligonucleotide
gggcgagtcgccccacaagaacaggttgtcccgtgaaccctaatatcccaacgc

SEQ ID NO: 134044 - DNA, 55 bp, Artificial
  Synthetic oligonucleotide
ggtcctcgtccatattttggactccggcgtcataaccgtgatcgtctgtctgggg

SEQ ID NO: 134045 - DNA, 55 bp, Artificial
  Synthetic oligonucleotide
agtcgacatcaacgggaccgccaacgaggggactgacgacgtcgtgctgtacgct

SEQ ID NO: 134046 - DNA, 60 bp, Artificial
  Synthetic oligonucleotide
gtgcgtacctcgcggcgtatatggcgggagagtacggtgttgaggcgctcgctatgccgg

SEQ ID NO: 134047 - DNA, 55 bp, Artificial
  Synthetic oligonucleotide
ggtccgttcgattcatcgccatgtaccactcgttcggcatcgtagggtccccatg

SEQ ID NO: 134048 - DNA, 55 bp, Artificial
  Synthetic oligonucleotide
tctgtccacgtctcagaagtacgttcgtcggtcgggagaagcaacggcccgggca

SEQ ID NO: 134049 - DNA, 55 bp, Artificial
  Synthetic oligonucleotide
agtctcgtgcgtatcggcgtccacggttcgctttggacactcaccacccgtcagc

SEQ ID NO: 134050 - DNA, 55 bp, Artificial
  Synthetic oligonucleotide
agtgacgctgacgcgaaagcgtggtctagcgaacctacgaggctccggaatgggg

SEQ ID NO: 134051 - DNA, 55 bp, Artificial
  Synthetic oligonucleotide
ggtcatacactccgtttgacgcgatgggttaggggttttgggatccgtctgtcag

SEQ ID NO: 134052 - DNA, 55 bp, Artificial
  Synthetic oligonucleotide
ggtcaaacgccggtaatcagacacattcagcgtttaacggcggctactcgttcgc

SEQ ID NO: 134053 - DNA, 55 bp, Artificial
  Synthetic oligonucleotide
ggtcaaacgatacgtaaggagtacatcgcagcaagcagtgaccggctgttgaccc

SEQ ID NO: 134054 - DNA, 55 bp, Artificial
  Synthetic oligonucleotide
agtgcgtccgacaaccgcccacacgaccagctcgaacccgattactcatcccgtc

SEQ ID NO: 134055 - DNA, 55 bp, Artificial
  Synthetic oligonucleotide
ggtagcaccggacgacttcagcacaaacgggaatcagacgctcaccgtccgtgtg

SEQ ID NO: 134056 - DNA, 55 bp, Artificial
  Synthetic oligonucleotide
ggtactgggagccggtagtatgggtcacggaatcgcacagagctccgcgatggct

SEQ ID NO: 134057 - DNA, 58 bp, Artificial
  Synthetic oligonucleotide
gtgctgaggaacccttatccattaggccgtcggggttctcacccgactatcgctgcta

SEQ ID NO: 134058 - DNA, 55 bp, Artificial
  Synthetic oligonucleotide
ggtaccctcggactcatcataccagaagacctcttcagaggactctaaggtcttg

SEQ ID NO: 134059 - DNA, 52 bp, Artificial
  Synthetic oligonucleotide
tatcgtctttgaatcggtcggcagttcgaacggggttaacttccggtcggga

SEQ ID NO: 134060 - DNA, 55 bp, Artificial
  Synthetic oligonucleotide
agtggtgattcggacgactgttagaatctcactcagtgtggttacacgtcaaggt

SEQ ID NO: 134061 - DNA, 55 bp, Artificial
  Synthetic oligonucleotide
atcaagttccgggtttaaatcaggagtccatctcgtctttacattcaccgagccc

SEQ ID NO: 134062 - DNA, 55 bp, Artificial
  Synthetic oligonucleotide
gggtcaaccgctgagtcaagttgaggaccagtggaaccggtcagaagtcatcgcc

SEQ ID NO: 134063 - DNA, 55 bp, Artificial
  Synthetic oligonucleotide
gggtcgtctcaagcagtccctcgctcgtctcgtataagtaggaccatcgtggagg

SEQ ID NO: 134064 - DNA, 54 bp, Artificial
  Synthetic oligonucleotide
tgacgtacgaggacatcccgtcggagcgccgtcccggggtactccaagcgttgg

SEQ ID NO: 134065 - DNA, 55 bp, Artificial
  Synthetic oligonucleotide
atactcgctctactacccgaattcgtccaaatcgttattcggacatctccacgcg

SEQ ID NO: 134066 - DNA, 55 bp, Artificial
  Synthetic oligonucleotide
tgaatctgcggttcgtccgtcgagcggtcacagcgtcactcggcgtggtcccgtt

SEQ ID NO: 134067 - DNA, 55 bp, Artificial
  Synthetic oligonucleotide
tgaaccgatcccagccatcgtgtgtccaccattctccctcgtagccgtcgatact

SEQ ID NO: 134068 - DNA, 59 bp, Artificial
  Synthetic oligonucleotide
gtgggccggcacaaggattagttacctcaactggtgtcgaccgtgacagcgatacgcta

SEQ ID NO: 134069 - DNA, 55 bp, Artificial
  Synthetic oligonucleotide
atacgggcctctttgcggcaacgagcggcaccctcactgaagttcggtacgaccc

SEQ ID NO: 134070 - DNA, 53 bp, Artificial
  Synthetic oligonucleotide
atacggagtacggacccgtcgggagttgcacccgacatccccgtgtggggata

SEQ ID NO: 134071 - DNA, 55 bp, Artificial
  Synthetic oligonucleotide
accacatcgaggacgcgattcaggaaccggacgtcgtctcgactgagcccgcgtt

SEQ ID NO: 134072 - DNA, 55 bp, Artificial
  Synthetic oligonucleotide
aatcgccgtgaaacagtcccgtttcccaccccgactcagcgatggtatcaaccaa

SEQ ID NO: 134073 - DNA, 55 bp, Artificial
  Synthetic oligonucleotide
tatctatgggtgggactcacacggctggtcgaaaacggccctgtaccggaaatcg

SEQ ID NO: 134074 - DNA, 55 bp, Artificial
  Synthetic oligonucleotide
ataatcggtcgctaccgtccgaaactacgcgaatgccggctatcggtttatggaa

SEQ ID NO: 134075 - DNA, 54 bp, Artificial
  Synthetic oligonucleotide
ataagaactatcgtgggttaagcgtttcccgaatcccacgctgaggcacgggga

SEQ ID NO: 134076 - DNA, 55 bp, Artificial
  Synthetic oligonucleotide
gggttgggattgttgacagtccccggacagtgctccagtcgttccaacgtagtac

SEQ ID NO: 134077 - DNA, 55 bp, Artificial
  Synthetic oligonucleotide
ggtaccaacccaacgtacatccgtaaggtgacgacaatgtcataccaatcgagca

SEQ ID NO: 134078 - DNA, 55 bp, Artificial
  Synthetic oligonucleotide
acagtaacacggcaaatccgtgggtcgcgctccgtcgtggcgaggtttcggcgga

SEQ ID NO: 134079 - DNA, 58 bp, Artificial
  Synthetic oligonucleotide
gtggggtcacgtcggcgtgtggtctgtggattcgcgggatttcatggggttgcgtgga

SEQ ID NO: 134080 - DNA, 55 bp, Artificial
  Synthetic oligonucleotide
acggtgctaacgaatcttgtgcggcgaacgtgagatgatcgatcggaaggtggca

SEQ ID NO: 134081 - DNA, 55 bp, Artificial
  Synthetic oligonucleotide
acaggtgcgccgcacgtcattgtaggctgttcagcattttgtgtagcagccgttg

SEQ ID NO: 134082 - DNA, 55 bp, Artificial
  Synthetic oligonucleotide
gttggttagtcgagaagcgattggttgctgcccggcgttcgtttgtcacgagctc

SEQ ID NO: 134083 - DNA, 52 bp, Artificial
  Synthetic oligonucleotide
acgtaaaccgtcggtctgtagtttaagtgcgaagccgggaccagagggcgta

SEQ ID NO: 134084 - DNA, 55 bp, Artificial
  Synthetic oligonucleotide
gttgcggacgacgctattagtcctcgcaggcactggcgggttcggtgcgagtctg

SEQ ID NO: 134085 - DNA, 55 bp, Artificial
  Synthetic oligonucleotide
acgtcccaattcagtcacagcgagcgtcaagcacacgcctgctgggctcgtgctc

SEQ ID NO: 134086 - DNA, 55 bp, Artificial
  Synthetic oligonucleotide
gttctgtaaagcttggtggcaactagctgctagcacgggcgagcgaggacactgg

SEQ ID NO: 134087 - DNA, 55 bp, Artificial
  Synthetic oligonucleotide
gttctaatcgggagatagtactcttcgcagtgcaatatccgatgaccagtcgatc

SEQ ID NO: 134088 - DNA, 55 bp, Artificial
  Synthetic oligonucleotide
gttcgtcccaatgagatagcagctgacactgcctgtcgcgcctgtcacgttaacg

SEQ ID NO: 134089 - DNA, 55 bp, Artificial
  Synthetic oligonucleotide
gttccaaccgaaagatgtcgaagcatcacctctgccgagatagttcatggggtag

SEQ ID NO: 134090 - DNA, 60 bp, Artificial
  Synthetic oligonucleotide
gtgtgaagtcgtcagggtgtaagtcgtaatcgaacgctcgtgcacacatctgtgctattg

SEQ ID NO: 134091 - DNA, 55 bp, Artificial
  Synthetic oligonucleotide
gttatgccgctgtacccgcgtagttgctgtaacaccctcgcctctatccctaccc

SEQ ID NO: 134092 - DNA, 53 bp, Artificial
  Synthetic oligonucleotide
gttactctaacgaaacgagaacaagcggaagttacgaaccacgttcgtgtgga

SEQ ID NO: 134093 - DNA, 55 bp, Artificial
  Synthetic oligonucleotide
gttacgtgcgtactcgtcccgttgctcagtgatcgtatccggacgttccccttgg

SEQ ID NO: 134094 - DNA, 55 bp, Artificial
  Synthetic oligonucleotide
acaggattcgtcgtaacgattcggaacctcactgagcgttgaatcaaccacgacg

SEQ ID NO: 134095 - DNA, 55 bp, Artificial
  Synthetic oligonucleotide
gtgggcctacgagtcccaccctatccatactttggtcagcggccggatacgtcgc

SEQ ID NO: 134096 - DNA, 55 bp, Artificial
  Synthetic oligonucleotide
tcggtgagcgctcggttgagcaaccgcggtgaggctaacgccgtcgcgagactca

SEQ ID NO: 134097 - DNA, 55 bp, Artificial
  Synthetic oligonucleotide
gtgtataggttatcgctcatccgtctcactccgttgggactgcacgtgtcgggtc

SEQ ID NO: 134098 - DNA, 55 bp, Artificial
  Synthetic oligonucleotide
actcatcaggtggactgccgactatgaactattgtagtcctcttggcgtgctgcg

SEQ ID NO: 134099 - DNA, 55 bp, Artificial
  Synthetic oligonucleotide
gtgtatgaccgccacctcccgccgtaacattcactcatcgacttgggtgtgactg

SEQ ID NO: 134100 - DNA, 55 bp, Artificial
  Synthetic oligonucleotide
gtgtcccacctgtggtggagaggacgtcgcctgctaccagttctgagggctttcg

SEQ ID NO: 134101 - DNA, 53 bp, Artificial
  Synthetic oligonucleotide
acgtttctctcggaattctggtacttcccctagtaacagttattacagttata

SEQ ID NO: 134102 - DNA, 55 bp, Artificial
  Synthetic oligonucleotide
gtgtcgagagggtccgaacgggaatatgtcgtttgtagaggatagcgagcatcag

SEQ ID NO: 134103 - DNA, 55 bp, Artificial
  Synthetic oligonucleotide
gtgtcgagatcagtgagcgacgccacaatgctcgcgttcggttcgagttccaccg

SEQ ID NO: 134104 - DNA, 55 bp, Artificial
  Synthetic oligonucleotide
acagcgtgtggtcgcgttacccgagaggattcggccacgaaatcccggccgtcaa

SEQ ID NO: 134105 - DNA, 55 bp, Artificial
  Synthetic oligonucleotide
gtgtgagtcgtcggactcgacagaacgcttggggagagtgacactgaggacgccg

SEQ ID NO: 134106 - DNA, 55 bp, Artificial
  Synthetic oligonucleotide
actactcgtcttcgtcctctgtagcatcgggatagtagacctgtgcttggtcccc

SEQ ID NO: 134107 - DNA, 55 bp, Artificial
  Synthetic oligonucleotide
gtgtgatcgaagtctgtcatatctgagtttcgtgtgtgtgcgtgatttgtaatcg

SEQ ID NO: 134108 - DNA, 55 bp, Artificial
  Synthetic oligonucleotide
gtgtgtgcgtctgaaattcgatgcgccactccgtttcggtctcatcgacgtcggt

SEQ ID NO: 134109 - DNA, 55 bp, Artificial
  Synthetic oligonucleotide
actaaagacgaatgctggcgatgcattgtgaggtactgaaggttacttggagcgg

SEQ ID NO: 134110 - DNA, 55 bp, Artificial
  Synthetic oligonucleotide
tcggtgaccgaataggaatcgaaggcaacgcgtgtgttgatagcgagacgggacg

SEQ ID NO: 134111 - DNA, 52 bp, Artificial
  Synthetic oligonucleotide
acgttcgtctggggtggccgacggtaccgctgggacgatacgttcgacgtta

SEQ ID NO: 134112 - DNA, 58 bp, Artificial
  Synthetic oligonucleotide
gtgttgcagtaaaagtccccggtcctgatgcaacagctatccccggccatacaggaac

SEQ ID NO: 134113 - DNA, 55 bp, Artificial
  Synthetic oligonucleotide
gtgttcggcattagcggcgaggtacacggctgtccccactgtatgaccaatcgag

SEQ ID NO: 134114 - DNA, 55 bp, Artificial
  Synthetic oligonucleotide
tcgaggtgtgagcgatcaggttggagcatggtctcagcgggtacaactctgtcgg

SEQ ID NO: 134115 - DNA, 55 bp, Artificial
  Synthetic oligonucleotide
acgaggattacgatagcttcgagctcacgtgggaggaccaggaagactggctcct

SEQ ID NO: 134116 - DNA, 55 bp, Artificial
  Synthetic oligonucleotide
acgagtccgtttcgcggcctcctgagcgtagccttcgtgggttgtctcgatggat

SEQ ID NO: 134117 - DNA, 55 bp, Artificial
  Synthetic oligonucleotide
tcgatgcccttaagtaataacgggcgttacgaggaattgcgaacgacaatgtggc

SEQ ID NO: 134118 - DNA, 55 bp, Artificial
  Synthetic oligonucleotide
acatgcgagatgctgactgggcaattgtagacgtgcttcgtgaagggagagcgaa

SEQ ID NO: 134119 - DNA, 55 bp, Artificial
  Synthetic oligonucleotide
acgagcgagcctagttcctgaacggagacccgctgctcacgatcgttgagtgagt

SEQ ID NO: 134120 - DNA, 55 bp, Artificial
  Synthetic oligonucleotide
tagcctcctacccgtcggcaagcactgtatacagcagtggaccacctcgcgccgt

SEQ ID NO: 134121 - DNA, 55 bp, Artificial
  Synthetic oligonucleotide
tcgatggattcgtcaatcgctctgtcgacggtctcttgaatctcatcgcgggccc

SEQ ID NO: 134122 - DNA, 55 bp, Artificial
  Synthetic oligonucleotide
tcgcaggccgggatttggacggcctaagggcctctacggtgcctttggcttcaca

SEQ ID NO: 134123 - DNA, 60 bp, Artificial
  Synthetic oligonucleotide
acgtgccgacggatcacccctctcgagcttggcggtatgacgactgtcccgagcgagcga

SEQ ID NO: 134124 - DNA, 55 bp, Artificial
  Synthetic oligonucleotide
acatcgcgttgatactgactgcgctgtacgtcctgaagtggctaattcgtggaga

SEQ ID NO: 134125 - DNA, 55 bp, Artificial
  Synthetic oligonucleotide
acgcgtctttacacgtgtacacggctgagtacgcactctgaaccaagatccagcg

SEQ ID NO: 134126 - DNA, 55 bp, Artificial
  Synthetic oligonucleotide
tactggacgtatccttgcgagtattgctgaagagctcccgagaacacccctttcg

SEQ ID NO: 134127 - DNA, 55 bp, Artificial
  Synthetic oligonucleotide
tactctcgaagaacgcatggagtgggttctggaagttgagaaggctcgattgata

SEQ ID NO: 134128 - DNA, 55 bp, Artificial
  Synthetic oligonucleotide
acgctcttgcgtaggagattgttgatactggagagcagtagctgcggagtcgaag

SEQ ID NO: 134129 - DNA, 54 bp, Artificial
  Synthetic oligonucleotide
tactctccgtcggggccgacccatgttccttcggtaccgcactcggttgttagc

SEQ ID NO: 134130 - DNA, 55 bp, Artificial
  Synthetic oligonucleotide
acgctgtcggtatcagtctctagagccgcactctccgtctcgatagtctcccagc

SEQ ID NO: 134131 - DNA, 55 bp, Artificial
  Synthetic oligonucleotide
tcgggctactacagccatcggtatcgcctgagtaatacagccacgctcccggtag

SEQ ID NO: 134132 - DNA, 55 bp, Artificial
  Synthetic oligonucleotide
gtttagaggttcgcatcgaatcctgaacgcttatagtcgtggggtggcgactccc

SEQ ID NO: 134133 - DNA, 55 bp, Artificial
  Synthetic oligonucleotide
gtttgacaaggtatgaaggaccagaagaccgacccagaagagacgacaagccagt

SEQ ID NO: 134134 - DNA, 57 bp, Artificial
  Synthetic oligonucleotide
acgtctgacgcaacctgttgcaatagccgacgtatttaacacacagccgaccaaacc

SEQ ID NO: 134135 - DNA, 55 bp, Artificial
  Synthetic oligonucleotide
gtttgggctcgacgatgatagcgtcgcgggtggacaactgtgttccgttgaccag

SEQ ID NO: 134136 - DNA, 55 bp, Artificial
  Synthetic oligonucleotide
tcggactcgaacgcccatcgaacgaatcacgactgagtcgagccagcgagtgccg

SEQ ID NO: 134137 - DNA, 55 bp, Artificial
  Synthetic oligonucleotide
taagacgaccgttctccgggatcatgcaggattcgaagtctgaacgacgcacgtc

SEQ ID NO: 134138 - DNA, 55 bp, Artificial
  Synthetic oligonucleotide
tataaacagagttttcatacctctgtcggcggtgtaaagatagagcgtccggaac

SEQ ID NO: 134139 - DNA, 53 bp, Artificial
  Synthetic oligonucleotide
tacccctacccgaaggacggtccgagtatctcccaatcggtggcccatgtggg

SEQ ID NO: 134140 - DNA, 55 bp, Artificial
  Synthetic oligonucleotide
acggcctatatccttattcgtcggtttcagcgctcgagaggtgcgatattagggg

SEQ ID NO: 134141 - DNA, 55 bp, Artificial
  Synthetic oligonucleotide
acatagactcttggataggcgttctatgacgttctcagagactgaacgaccgata

SEQ ID NO: 134142 - DNA, 55 bp, Artificial
  Synthetic oligonucleotide
acgagcacgagcaccaagccactgatcaggagaaccggatcgcgggcacgaaacg

SEQ ID NO: 134143 - DNA, 54 bp, Artificial
  Synthetic oligonucleotide
acggcaaaacgggtactggaaagtcgttgtgtgctaagtacgtctcgagccgac

SEQ ID NO: 134144 - DNA, 55 bp, Artificial
  Synthetic oligonucleotide
acggacgaggcactctacgtgaaacgcggcgtgttgacccggtctgtcacacagg

SEQ ID NO: 134145 - DNA, 60 bp, Artificial
  Synthetic oligonucleotide
aggtccatgcatgatcttacgttactgttttacatgcagcggtgcattaaattcctatgg

SEQ ID NO: 134146 - DNA, 60 bp, Artificial
  Synthetic oligonucleotide
gttggaccttcgatactgaccccgtgactctcaatgccattcgtgaggtcgtgcatgtcc

SEQ ID NO: 134147 - DNA, 55 bp, Artificial
  Synthetic oligonucleotide
tactactggaacacttacccaacaaccacaccgatcattggtggctcaccctcgc

SEQ ID NO: 134148 - DNA, 55 bp, Artificial
  Synthetic oligonucleotide
tactagagggtgtcatagaaagcgtcacacacgaagacgcaggatgttggaactg

SEQ ID NO: 134149 - DNA, 55 bp, Artificial
  Synthetic oligonucleotide
tactcgcgtagcttatacgaccgacaatgtcagaggataccaccgtcgttgcgtg

SEQ ID NO: 134150 - DNA, 55 bp, Artificial
  Synthetic oligonucleotide
gtcgttgcttggttgcgggaagcgttgcgaacctattatatccgagatctacagg

SEQ ID NO: 134151 - DNA, 55 bp, Artificial
  Synthetic oligonucleotide
agagacacgactaccggtctctacggtacggagttgaatctctcgatttgtgata

SEQ ID NO: 134152 - DNA, 55 bp, Artificial
  Synthetic oligonucleotide
gtcgtctgccgctgatcgagacagtagtttcgaggcaatcgtctgtagccatcgc

SEQ ID NO: 134153 - DNA, 55 bp, Artificial
  Synthetic oligonucleotide
gtcgtcaagtgcaaacaggacggactaacccaccgcgagacggctcaatacgtcc

SEQ ID NO: 134154 - DNA, 55 bp, Artificial
  Synthetic oligonucleotide
gtcgggtgagaattccgacggccgaacgagcaagggttcctcagcactgttcgtc

SEQ ID NO: 134155 - DNA, 55 bp, Artificial
  Synthetic oligonucleotide
tcgttaccgcctctgacggatgagttattccgcgtgacaaatccgtcctcgctca

SEQ ID NO: 134156 - DNA, 55 bp, Artificial
  Synthetic oligonucleotide
gtcggactcgattatcgcataacagctatcggggtcgtactcagtggtgcagccg

SEQ ID NO: 134157 - DNA, 60 bp, Artificial
  Synthetic oligonucleotide
acggtggagagccaataagcgagtcggtcgctcgagacctagatctagactcggcgatgg

SEQ ID NO: 134158 - DNA, 55 bp, Artificial
  Synthetic oligonucleotide
agaggttgctgaggggcgcgcatatagcttccccaaacgaatcgcgcccggtccg

SEQ ID NO: 134159 - DNA, 55 bp, Artificial
  Synthetic oligonucleotide
tcgttcgtaaaggtggacgtggaagtccgaacgctgaacggcggttggatgctgc

SEQ ID NO: 134160 - DNA, 55 bp, Artificial
  Synthetic oligonucleotide
gtcgctcggtgtcaattaccatgaatggacgggatgttcaccgctacagtccact

SEQ ID NO: 134161 - DNA, 55 bp, Artificial
  Synthetic oligonucleotide
acactcccaactgtccgaacagcgatcagagaacgtgaccgatacgacgtgatcc

SEQ ID NO: 134162 - DNA, 55 bp, Artificial
  Synthetic oligonucleotide
gtcgccgtatgtcacagaaggcggaccgcgattcgtacgcagctatcgactctgg

SEQ ID NO: 134163 - DNA, 55 bp, Artificial
  Synthetic oligonucleotide
gtcgagtgaccgaacaataattgcggttggagacgactactgagtgttcctgacc

SEQ ID NO: 134164 - DNA, 55 bp, Artificial
  Synthetic oligonucleotide
agatgcgttcagctcttaccccgtgtcgcgtagctactcggcatctgccctttcg

SEQ ID NO: 134165 - DNA, 53 bp, Artificial
  Synthetic oligonucleotide
gtcgaaccaacaggagtccacctgggttgggtaacccctatcgttcagttaga

SEQ ID NO: 134166 - DNA, 55 bp, Artificial
  Synthetic oligonucleotide
gtcgaaatgctacgatccaaccgatgaagagtactactacggctacggctgtacg

SEQ ID NO: 134167 - DNA, 55 bp, Artificial
  Synthetic oligonucleotide
gtattcgttactcgacgggatacagatctctgtcgttgccgacagctttcgtccg

SEQ ID NO: 134168 - DNA, 60 bp, Artificial
  Synthetic oligonucleotide
acggtgccagtcttactcacgagacgggcaccagcatagactgctgtcccgagggtggct

SEQ ID NO: 134169 - DNA, 55 bp, Artificial
  Synthetic oligonucleotide
gtcaaccctcggaatcgggtcgaagacgcatcgagaagacgttcggttcgaggcg

SEQ ID NO: 134170 - DNA, 55 bp, Artificial
  Synthetic oligonucleotide
agccggcttatttgcagaccgtccgatagtcggtgctacccgccgccttccaaac

SEQ ID NO: 134171 - DNA, 55 bp, Artificial
  Synthetic oligonucleotide
gtcaagtgagataaccatgcagatgccacgccgattcaatacgtactgtccgcac

SEQ ID NO: 134172 - DNA, 55 bp, Artificial
  Synthetic oligonucleotide
gtcaagtttcgacgacggacagacgtcttcgagtgcacagtccccacagtccgga

SEQ ID NO: 134173 - DNA, 55 bp, Artificial
  Synthetic oligonucleotide
gtcagatcacgtgccaggcccgaatcgttgactgtttgtgcctctgacatagtcg

SEQ ID NO: 134174 - DNA, 55 bp, Artificial
  Synthetic oligonucleotide
tctccggtgcgcctcggaactccagagggtcatcacacggacactgatcaggtgc

SEQ ID NO: 134175 - DNA, 55 bp, Artificial
  Synthetic oligonucleotide
gtcagggtgttcgccatccgcctccacacgactggttgttcgcttcgggagacac

SEQ ID NO: 134176 - DNA, 55 bp, Artificial
  Synthetic oligonucleotide
gtcaggtccagggtcgaggcttcgtcattgggtcgtctcgaacacgaagctcaga

SEQ ID NO: 134177 - DNA, 55 bp, Artificial
  Synthetic oligonucleotide
tctacattcccgacaaaggaattagcacggcgacgtactacaagcgtctctggcg

SEQ ID NO: 134178 - DNA, 55 bp, Artificial
  Synthetic oligonucleotide
tctaaccgtgcaggcgaccaaaacggaagcctcggggcctctaccgtgccgatga

SEQ ID NO: 134179 - DNA, 60 bp, Artificial
  Synthetic oligonucleotide
gttgtctcaagaagcgacaccgagagagattcggagtagcgaagtacggctttcactcgc

SEQ ID NO: 134180 - DNA, 55 bp, Artificial
  Synthetic oligonucleotide
gtcagtttcctcgagttggtcgtacatgtcgtcggggaatgggaggcttccatag

SEQ ID NO: 134181 - DNA, 55 bp, Artificial
  Synthetic oligonucleotide
gtcatactcattttggtgtgacgcccttccgtcacaatagtatttctcccgtact

SEQ ID NO: 134182 - DNA, 55 bp, Artificial
  Synthetic oligonucleotide
gtccgatatcgagatctggatactagctaactctccatctgtagacacacgagga

SEQ ID NO: 134183 - DNA, 55 bp, Artificial
  Synthetic oligonucleotide
agatgtgtccgcgtcacacgtactgttcacggcgcgaggggaagtgcactccgac

SEQ ID NO: 134184 - DNA, 55 bp, Artificial
  Synthetic oligonucleotide
gtgggagatcctgaattgcatcgcgcaactctgtcgacgattctgtccggggttc

SEQ ID NO: 134185 - DNA, 55 bp, Artificial
  Synthetic oligonucleotide
actcgagtcgaacaccgattcctgggacgatattctcatcacgaacgtccggaca

SEQ ID NO: 134186 - DNA, 55 bp, Artificial
  Synthetic oligonucleotide
gtggctcgatgtccagagtcgcttccacgactactcgtatcggaacacgctcctc

SEQ ID NO: 134187 - DNA, 55 bp, Artificial
  Synthetic oligonucleotide
gtggacccaatataaaccgcgagtgccagagaatgtcggactgaaaccctacttc

SEQ ID NO: 134188 - DNA, 54 bp, Artificial
  Synthetic oligonucleotide
gtgctttaacgccgtgaaaccgtgagttaccgaccctaccccgagctgtcttgc

SEQ ID NO: 134189 - DNA, 55 bp, Artificial
  Synthetic oligonucleotide
gtgcttcgtgggttccgacgcatctcccagcgcggtcggttccagtggagacgaa

SEQ ID NO: 134190 - DNA, 55 bp, Artificial
  Synthetic oligonucleotide
gttgttgttgcgtcttagggtgttagggccgtttctcacggataccgttgcgatc

SEQ ID NO: 134191 - DNA, 55 bp, Artificial
  Synthetic oligonucleotide
tcgtaaagtcgtccttgaaggagagagtcgaggaccgcacactgttgaacgatac

SEQ ID NO: 134192 - DNA, 55 bp, Artificial
  Synthetic oligonucleotide
tcgtccatacttggaaaagtggtcccgagggtatagtggatcgtatcgttaccac

SEQ ID NO: 134193 - DNA, 55 bp, Artificial
  Synthetic oligonucleotide
actgatctcaatggggacaagaaactcgccaaacgcactgtacaaccggtcgcaa

SEQ ID NO: 134194 - DNA, 55 bp, Artificial
  Synthetic oligonucleotide
tcgtcttctcagtctcgacacccgccctctctagcacttcgtcctcgtttggatc

SEQ ID NO: 134195 - DNA, 55 bp, Artificial
  Synthetic oligonucleotide
gtgccatctcacgacggttctcgtatcaatcatccagcgtcgctcgacgtgcgac

SEQ ID NO: 134196 - DNA, 55 bp, Artificial
  Synthetic oligonucleotide
actggcacgacggttgcagtgcttccgtgatacaccaacttaaccgtctcaccga

SEQ ID NO: 134197 - DNA, 55 bp, Artificial
  Synthetic oligonucleotide
gtgatcgggttcgcctatacatgagtccgctatactgagtagaggaagccatggc

SEQ ID NO: 134198 - DNA, 55 bp, Artificial
  Synthetic oligonucleotide
gtgaggactcacgatgacacgactcactcgcagacggttgatcgcactgagcggt

SEQ ID NO: 134199 - DNA, 55 bp, Artificial
  Synthetic oligonucleotide
gtgagcgtgcctcgcgggtcggactgcggtctgcgtgctaaacacaacggttatg

SEQ ID NO: 134200 - DNA, 55 bp, Artificial
  Synthetic oligonucleotide
gtctaatcggtctgaagaccaaattgaacgggcggacaccgcacttgcaggcgtc

SEQ ID NO: 134201 - DNA, 58 bp, Artificial
  Synthetic oligonucleotide
gtttctgttgagtggcctgagaccgtggctaaacgcttatatccgaggataggcaatt

SEQ ID NO: 134202 - DNA, 55 bp, Artificial
  Synthetic oligonucleotide
agactgcgctccctgtggatacgcccgtatctgcaaagcacgtcgtggaaacagg

SEQ ID NO: 134203 - DNA, 55 bp, Artificial
  Synthetic oligonucleotide
gtctccacaggcgttgattcgaagtatcccactcctacgttttcgaggccgcgag

SEQ ID NO: 134204 - DNA, 53 bp, Artificial
  Synthetic oligonucleotide
agacgccgtccaactccacagcaaggccacgaaccgaacgccggtggtcgttt

SEQ ID NO: 134205 - DNA, 55 bp, Artificial
  Synthetic oligonucleotide
gtctcggcgtacctcgtggcgcttctataccgtttcgacggttcagaatcatagg

SEQ ID NO: 134206 - DNA, 55 bp, Artificial
  Synthetic oligonucleotide
gtctctcgatactcctcgaagttttctaaacaccgctatacactcccgcagcacg

SEQ ID NO: 134207 - DNA, 55 bp, Artificial
  Synthetic oligonucleotide
gtctctctttatcatgtgtgactaacgacgctctgcgaccaactgtcggctcatg

SEQ ID NO: 134208 - DNA, 55 bp, Artificial
  Synthetic oligonucleotide
gtctgcgaccagtgcgggatgacggcgaacgcagatgtgaacggtgcggagaaca

SEQ ID NO: 134209 - DNA, 54 bp, Artificial
  Synthetic oligonucleotide
gtgaacccgtggtcttcgacgtaggtcgcggccgtgagaaccgtatctacgtcc

SEQ ID NO: 134210 - DNA, 55 bp, Artificial
  Synthetic oligonucleotide
agaaggcggttaaggagacgggagaaagcggcgaggaggaggcgatagcaggacc

SEQ ID NO: 134211 - DNA, 55 bp, Artificial
  Synthetic oligonucleotide
gtgaacgtcttccgtaccgaactgagtcaatctgggcggcgtgattgtacgactg

SEQ ID NO: 134212 - DNA, 60 bp, Artificial
  Synthetic oligonucleotide
taacagcagttctagcgcagtttgtttattcagaatagagcttgaactcacgcgatcgaa

SEQ ID NO: 134213 - DNA, 55 bp, Artificial
  Synthetic oligonucleotide
agaacccgcacgtgaagatcccgcctcgtcaagagtgtacgctcggtcgcgggaa

SEQ ID NO: 134214 - DNA, 55 bp, Artificial
  Synthetic oligonucleotide
agaaaccagtgcccagagtgatcaaacaccgctggagcgaatttgtggactcccc

SEQ ID NO: 134215 - DNA, 55 bp, Artificial
  Synthetic oligonucleotide
gtgacgtgttctcgttgggacccacgctcattgacgtacactgtcacatcttccg

SEQ ID NO: 134216 - DNA, 55 bp, Artificial
  Synthetic oligonucleotide
acttctcgtgtctcggcgagactccgtcgaatatccgtccgatcccaacccaagg

SEQ ID NO: 134217 - DNA, 55 bp, Artificial
  Synthetic oligonucleotide
acttatcgaagctacgcatcacatcgaggcgggttcttaccagcgaattcggggt

SEQ ID NO: 134218 - DNA, 55 bp, Artificial
  Synthetic oligonucleotide
caggtactgatttctgacacaaatgctaagcacggactaataacggcagaacgac

SEQ ID NO: 134219 - DNA, 55 bp, Artificial
  Synthetic oligonucleotide
cagtacttcgaaaccgctatgagtttcgtcataatggttatccgcgtcgcacgat

SEQ ID NO: 134220 - DNA, 55 bp, Artificial
  Synthetic oligonucleotide
ggatataactctcatgttggagtgccgagagttagaaacgttccggcgctgtagg

SEQ ID NO: 134221 - DNA, 55 bp, Artificial
  Synthetic oligonucleotide
cagtcgcacgtctcggtgattaggcacacgcggtacactgagccgctctcgctgt

SEQ ID NO: 134222 - DNA, 55 bp, Artificial
  Synthetic oligonucleotide
cagtcgttgggtcggtcgtctcgaactgtgattcgtattccgtccactgcgcttc

SEQ ID NO: 134223 - DNA, 60 bp, Artificial
  Synthetic oligonucleotide
tacagacagtcagaggagtctatatataagacgcgcgtagccggtacagagcttctaccg

SEQ ID NO: 134224 - DNA, 55 bp, Artificial
  Synthetic oligonucleotide
ggatagcgaacgctgtcccctcctctcgtccgttctatcgcaactaatcggtagg

SEQ ID NO: 134225 - DNA, 55 bp, Artificial
  Synthetic oligonucleotide
cagttctcatatagtctgtttcgttcctcagtgggtgttccgggctcgttcacac

SEQ ID NO: 134226 - DNA, 55 bp, Artificial
  Synthetic oligonucleotide
cagttgggagggcactacaaccggagagaacgacgaaggcgactatcgcaaagtg

SEQ ID NO: 134227 - DNA, 55 bp, Artificial
  Synthetic oligonucleotide
tcacgagacactgctcacggagaccaacaaactcgacgatccgactatcgagatg

SEQ ID NO: 134228 - DNA, 55 bp, Artificial
  Synthetic oligonucleotide
catacacgagttaatatgccgccggacggtaaaagtctaccgtctcgttgacaga

SEQ ID NO: 134229 - DNA, 55 bp, Artificial
  Synthetic oligonucleotide
catacgccaatcccgccctcccagcgacttgattgtatccacttcgataccgata

SEQ ID NO: 134230 - DNA, 55 bp, Artificial
  Synthetic oligonucleotide
catcaagtgcctgtccgagcgtgcgagggagtcgattgacaccgcggtcagtccg

SEQ ID NO: 134231 - DNA, 55 bp, Artificial
  Synthetic oligonucleotide
ggagttccgagaggagatggcagtgacttcgtggtccgtacgtttgattccggga

SEQ ID NO: 134232 - DNA, 54 bp, Artificial
  Synthetic oligonucleotide
ggagttccagaacgaagtcaaccgagtcacggtacggacgttgaccgaagcgtc

SEQ ID NO: 134233 - DNA, 55 bp, Artificial
  Synthetic oligonucleotide
catcctgacgtacgctggtaagtccccgacgataaatgtgcctttgggtcccgga

SEQ ID NO: 134234 - DNA, 54 bp, Artificial
  Synthetic oligonucleotide
taccccgcagtacaggaccctgcctactacgccccttcgcggggtcaatacggc

SEQ ID NO: 134235 - DNA, 55 bp, Artificial
  Synthetic oligonucleotide
ggagtgtccgatatcccggccaaactagtcacgatacctgaatactgttgggtgg

SEQ ID NO: 134236 - DNA, 55 bp, Artificial
  Synthetic oligonucleotide
ggagtgcatatgcaaggaggctaccaacccagacgagatgtcctgtaccctcgcg

SEQ ID NO: 134237 - DNA, 55 bp, Artificial
  Synthetic oligonucleotide
catcgttccgtgcaactccgcaaatagatcgttgagggactccgccaactgagcc

SEQ ID NO: 134238 - DNA, 55 bp, Artificial
  Synthetic oligonucleotide
tggtggaccaaggagcgacaagatcgcgtcgtccgtcggcgtcatccactcgact

SEQ ID NO: 134239 - DNA, 55 bp, Artificial
  Synthetic oligonucleotide
catctcacaccacgcggtcgcggttcgaaatgagcacgaaggtcggatccgtcgc

SEQ ID NO: 134240 - DNA, 55 bp, Artificial
  Synthetic oligonucleotide
ggaggctctcgtgttgacgatagtgtgtgatagtggacgctagatgccatttcgg

SEQ ID NO: 134241 - DNA, 54 bp, Artificial
  Synthetic oligonucleotide
catgtacgtaccgcacgtttgggacgaaggtgtattgtcttccgtacgtctggg

SEQ ID NO: 134242 - DNA, 55 bp, Artificial
  Synthetic oligonucleotide
catgtatcaggaatccagtgcctgtacgtcgggctattggatgacggtggatcag

SEQ ID NO: 134243 - DNA, 55 bp, Artificial
  Synthetic oligonucleotide
catgtgagttagttcgtcagtcacggctactagctcgttcgcgtcggtaaaatgt

SEQ ID NO: 134244 - DNA, 55 bp, Artificial
  Synthetic oligonucleotide
tggtttcataccctcaaaatgcgagtcgaccgcttccataattcgtgggtgggca

SEQ ID NO: 134245 - DNA, 60 bp, Artificial
  Synthetic oligonucleotide
ctaaccctgtggaatcgacgcagtcgtctttcatcggacaggcagctagtggttcagcag

SEQ ID NO: 134246 - DNA, 55 bp, Artificial
  Synthetic oligonucleotide
aagctagcccgctgcaggcttacgtcccgttctcggcttcagccgtattctcccg

SEQ ID NO: 134247 - DNA, 55 bp, Artificial
  Synthetic oligonucleotide
tcacgcagcgtgaacgtccactcgtcggaggcatcgttcgacgaccagtcctctg

SEQ ID NO: 134248 - DNA, 55 bp, Artificial
  Synthetic oligonucleotide
ccaaccgcagtaggtgtctcgaatggctcggaaagcaccgtgtgaccgaagaaga

SEQ ID NO: 134249 - DNA, 55 bp, Artificial
  Synthetic oligonucleotide
ggagaattcaacgtcgctattcgcgtccggttcgatagtagctcgcacactatag

SEQ ID NO: 134250 - DNA, 55 bp, Artificial
  Synthetic oligonucleotide
ccaagcaggcgagtacggactggtctgtccacccgtaacggacggaacattggtc

SEQ ID NO: 134251 - DNA, 55 bp, Artificial
  Synthetic oligonucleotide
tcacggccgattgcatcaacttctgccggcgaaaatatatcgcaccaggtcagga

SEQ ID NO: 134252 - DNA, 55 bp, Artificial
  Synthetic oligonucleotide
cactccgtcccgtcggttgtgaggagaatttcgtcgtacatcgtcccgtgtcact

SEQ ID NO: 134253 - DNA, 55 bp, Artificial
  Synthetic oligonucleotide
cactcctcggtacagtgttcgcgggctttcggacaccgcgtctggaacgaacagc

SEQ ID NO: 134254 - DNA, 55 bp, Artificial
  Synthetic oligonucleotide
ggcagtaacatacccacgaacatcgtcatcaaagcgattgcgccacgttcgagag

SEQ ID NO: 134255 - DNA, 55 bp, Artificial
  Synthetic oligonucleotide
tcacagtcatctcgacgctcgctcgagagccgcacgaaacgttaccgccgctgct

SEQ ID NO: 134256 - DNA, 55 bp, Artificial
  Synthetic oligonucleotide
agggcgagtagtactttccagagaggttgtttctgcgttcgaaatcgagagttaa

SEQ ID NO: 134257 - DNA, 60 bp, Artificial
  Synthetic oligonucleotide
ctaacagagaggtagagagtctgactaaagcgtatacgctggatagcgggtagtacagcg

SEQ ID NO: 134258 - DNA, 55 bp, Artificial
  Synthetic oligonucleotide
ggcacttctcggattcgctgtacagaacgcaccagatccccgagaggtagacgtt

SEQ ID NO: 134259 - DNA, 55 bp, Artificial
  Synthetic oligonucleotide
ggcacctttattagcgtcatgtagcaaccaatccgtaactgcgatgggccgactc

SEQ ID NO: 134260 - DNA, 55 bp, Artificial
  Synthetic oligonucleotide
ggcacctaactcaagagggcctccagttacagagcggttgcgaaagccacgctca

SEQ ID NO: 134261 - DNA, 55 bp, Artificial
  Synthetic oligonucleotide
cagacagtctgtgagcgcattgatagtcgatacatccgagtttgaggagcggtga

SEQ ID NO: 134262 - DNA, 55 bp, Artificial
  Synthetic oligonucleotide
ggcaagactcgaccctaggcctttagggatgggaacaactgacgcacaatcattc

SEQ ID NO: 134263 - DNA, 55 bp, Artificial
  Synthetic oligonucleotide
cagaccctatagacctcgaaccgactggtgatgggaataccccggctcaacaggt

SEQ ID NO: 134264 - DNA, 55 bp, Artificial
  Synthetic oligonucleotide
ggatttatcgactccggagtgatcgcctcgggacggctccgctccccaacgctcg

SEQ ID NO: 134265 - DNA, 55 bp, Artificial
  Synthetic oligonucleotide
ggattctgtgagggtggacacgtcgctctcggccgttcctcgtgcgatacccgct

SEQ ID NO: 134266 - DNA, 55 bp, Artificial
  Synthetic oligonucleotide
cagagaaggcgattagacagacattccgaaaagcacgacaggttagtccgactgt

SEQ ID NO: 134267 - DNA, 55 bp, Artificial
  Synthetic oligonucleotide
ggattctctggtaggattcaacgctcgttgctggtcatatctcggtgcgagagga

SEQ ID NO: 134268 - DNA, 60 bp, Artificial
  Synthetic oligonucleotide
cgtttcgaggtatggtaactgcgattcgatcacgaacgcgagagtcacaagatcggagag

SEQ ID NO: 134269 - DNA, 55 bp, Artificial
  Synthetic oligonucleotide
cagatcacccgagagataccatttcccgtctggaccgtcgataaatgcccgctgg

SEQ ID NO: 134270 - DNA, 55 bp, Artificial
  Synthetic oligonucleotide
cagccccaacgtccaatggcgatgatcgctcgagtacgtagcggagcggacagtc

SEQ ID NO: 134271 - DNA, 55 bp, Artificial
  Synthetic oligonucleotide
cagccctgataaggaggacttagaacagtttccgctacacgatgtgtatgagcgt

SEQ ID NO: 134272 - DNA, 55 bp, Artificial
  Synthetic oligonucleotide
ggattcgtcagcttgggtcgaggtctcgtcaatcgcttataaatggtgttcgtgg

SEQ ID NO: 134273 - DNA, 55 bp, Artificial
  Synthetic oligonucleotide
cagcggtcaatcgttggactcaaccaacccttgtgcctcttcggttgagacgggg

SEQ ID NO: 134274 - DNA, 55 bp, Artificial
  Synthetic oligonucleotide
ggattattcagacggagggccaattgctcctaatcgatggcgtgtgtacacgaca

SEQ ID NO: 134275 - DNA, 55 bp, Artificial
  Synthetic oligonucleotide
cagcgtctgtgaaccgtacgtgcgtgttgaaagtagtgcccgtaaattccgtcgt

SEQ ID NO: 134276 - DNA, 55 bp, Artificial
  Synthetic oligonucleotide
cagcgttggttgtagtcctcgttcatccgggcgtggtgagccttctgcaacggtg

SEQ ID NO: 134277 - DNA, 55 bp, Artificial
  Synthetic oligonucleotide
cagctaacgcggcctgctggtaatcacggggttcgatagcaacagcaggcgtgag

SEQ ID NO: 134278 - DNA, 55 bp, Artificial
  Synthetic oligonucleotide
cagctacgtgcaacgggcccgatcgttgttcgaggagccctgacaccgagaagga

SEQ ID NO: 134279 - DNA, 60 bp, Artificial
  Synthetic oligonucleotide
gactgtacgactcgcggagtctgacgtagggctacgctcttcagtaggagattgttgata

SEQ ID NO: 134280 - DNA, 55 bp, Artificial
  Synthetic oligonucleotide
cagctatctccgtcagtgatgccccttcgaggtctcgtattgcctcaatcgtgag

SEQ ID NO: 134281 - DNA, 55 bp, Artificial
  Synthetic oligonucleotide
cagctattgactgattcggtcgatacgtttatcctagttactcggtaagtatctg

SEQ ID NO: 134282 - DNA, 55 bp, Artificial
  Synthetic oligonucleotide
ggatggtatagctcttgaaacactcactaacgagcgacactatttccgtctaatc

SEQ ID NO: 134283 - DNA, 54 bp, Artificial
  Synthetic oligonucleotide
caggcccaattacggttaattgagacgccaacaaacggtatcgacttactacga

SEQ ID NO: 134284 - DNA, 55 bp, Artificial
  Synthetic oligonucleotide
cagggcgcgagacggtcgaaagaccgagttgaccgacttcgaatcgacgccggaa

SEQ ID NO: 134285 - DNA, 55 bp, Artificial
  Synthetic oligonucleotide
ggatatcgctgtcatacgtgagtgaccccgcgggcgttctgagtagcgttgcaac

SEQ ID NO: 134286 - DNA, 55 bp, Artificial
  Synthetic oligonucleotide
cagggtgtaagtcgtaatcgaacgctcgtgcacacatctgtgctattgcacacgc

SEQ ID NO: 134287 - DNA, 55 bp, Artificial
  Synthetic oligonucleotide
ggaaccaacgaaacttacagcgtcgtaagaagcgttcgagtctagctgtgagccc

SEQ ID NO: 134288 - DNA, 55 bp, Artificial
  Synthetic oligonucleotide
ggaacatgctagtctgtgccgcgtcagtgagttcaacacggacgtcccgggacag

SEQ ID NO: 134289 - DNA, 55 bp, Artificial
  Synthetic oligonucleotide
ggaacaacgaaccagtagcgagtagtcccggattccccagtctcagcaggacgga

SEQ ID NO: 134290 - DNA, 60 bp, Artificial
  Synthetic oligonucleotide
gagaacgcaatgccgggtagctacgcgacacggggtaagagctgaacgcatctaagctcg

SEQ ID NO: 134291 - DNA, 52 bp, Artificial
  Synthetic oligonucleotide
ggaaagtccagttaagcctgacgggaataccaaacgccgaaccgactcggaa

SEQ ID NO: 134292 - DNA, 55 bp, Artificial
  Synthetic oligonucleotide
ccatggcggtaccctcttatgaccgaccactcgaactcacatatgattgggctgg

SEQ ID NO: 134293 - DNA, 55 bp, Artificial
  Synthetic oligonucleotide
aagaacgcgctgctgaggctgtaggcgtcccgatggaggaaatgcgggacggtga

SEQ ID NO: 134294 - DNA, 55 bp, Artificial
  Synthetic oligonucleotide
gctttgggcagcctactcatcgacgagacacctgacgagcgcaaaggtcctatcg

SEQ ID NO: 134295 - DNA, 55 bp, Artificial
  Synthetic oligonucleotide
tgtctcgtgtgcggtgaatactatcaggcgattacggaaccgcacttacagaccc

SEQ ID NO: 134296 - DNA, 55 bp, Artificial
  Synthetic oligonucleotide
gcttgggtgggaccgaacagacattcgacgggaactcgcagagacacaagagacg

SEQ ID NO: 134297 - DNA, 55 bp, Artificial
  Synthetic oligonucleotide
gcttcggtcgagtgaacgtccgatcaaaaccgactgattctaaggccctcgtctc

SEQ ID NO: 134298 - DNA, 55 bp, Artificial
  Synthetic oligonucleotide
gcttcgatgataactgtcgggagcccttcgtgtactgacgacatggctagcacgg

SEQ ID NO: 134299 - DNA, 55 bp, Artificial
  Synthetic oligonucleotide
cccatatgctgagatttgtgttcgttgttgtgagcgaagcacaaccgtacgctgt

SEQ ID NO: 134300 - DNA, 55 bp, Artificial
  Synthetic oligonucleotide
cccatccatcgatacggacaactcttcgagatgagcagtttcgaacgcaaaggag

SEQ ID NO: 134301 - DNA, 59 bp, Artificial
  Synthetic oligonucleotide
cgtggtatctctcgagacagtacgttcatgattagagtagggtcgacgaactctgaacc

SEQ ID NO: 134302 - DNA, 55 bp, Artificial
  Synthetic oligonucleotide
gctgttcttgagaaccggtcaggaaaatttgcggagctcgggacctcaaagtggc

SEQ ID NO: 134303 - DNA, 55 bp, Artificial
  Synthetic oligonucleotide
ccccagtacgcggacggtggtcttatggtttggtggctgctaacacctcacatct

SEQ ID NO: 134304 - DNA, 55 bp, Artificial
  Synthetic oligonucleotide
ccccgaaaacaccgcaatgaaaggcgacacgcaccgatatttcgtcagttgaccg

SEQ ID NO: 134305 - DNA, 55 bp, Artificial
  Synthetic oligonucleotide
ccccgaaatattcgggacgctggtttcagcgcgtctcgtactcccgcgcaagtgc

SEQ ID NO: 134306 - DNA, 55 bp, Artificial
  Synthetic oligonucleotide
gctgtcggtgaaggttcgttacccattagtaccgccagcggctagactgtcgtaa

SEQ ID NO: 134307 - DNA, 55 bp, Artificial
  Synthetic oligonucleotide
ccccggtcctgatgcaacagctatccccggccatacaggaaccggagtcaggcta

SEQ ID NO: 134308 - DNA, 55 bp, Artificial
  Synthetic oligonucleotide
gctgctcactcacctcgacgagattggtgtacaatgttcgtatccctctcacgcc

SEQ ID NO: 134309 - DNA, 55 bp, Artificial
  Synthetic oligonucleotide
gctgagaggtctgtggcgagtaccgctttcattactacccgtacgttccgatagc

SEQ ID NO: 134310 - DNA, 55 bp, Artificial
  Synthetic oligonucleotide
ccccttagtcggcggattgatgttcgtactggatgcgtgctgttgcctcgaagta

SEQ ID NO: 134311 - DNA, 55 bp, Artificial
  Synthetic oligonucleotide
cccgaccgttggatggctctggtgggcgctcccgcatctgtacacgataaatagg

SEQ ID NO: 134312 - DNA, 60 bp, Artificial
  Synthetic oligonucleotide
cgtgacggctcactactactgggtccgctcacatacccagcgatccctcctctggtacgc

SEQ ID NO: 134313 - DNA, 55 bp, Artificial
  Synthetic oligonucleotide
gctctggtaatacgatcggaacaggagcatacagatcgggatcccgtaggcgacg

SEQ ID NO: 134314 - DNA, 54 bp, Artificial
  Synthetic oligonucleotide
cccgactgagtcgctatcgtttcctcccgagtttaccgactcgatccaactccg

SEQ ID NO: 134315 - DNA, 55 bp, Artificial
  Synthetic oligonucleotide
gctctggagaggcagcacaagctgtgcttgaccgtaagaacgcgttcgatgtccg

SEQ ID NO: 134316 - DNA, 55 bp, Artificial
  Synthetic oligonucleotide
cccgagaggacgatattcagcgagatcagacacgggctatcagcgaattcgctcc

SEQ ID NO: 134317 - DNA, 55 bp, Artificial
  Synthetic oligonucleotide
gctcgttccattcatgctgttcgtctcgtacgtccttcgcatcgtcaccatagcg

SEQ ID NO: 134318 - DNA, 55 bp, Artificial
  Synthetic oligonucleotide
cccgcgctagcgggccaccgagtcaacagtgaaatactacccgtcggtgactgcg

SEQ ID NO: 134319 - DNA, 55 bp, Artificial
  Synthetic oligonucleotide
ccaatcgaacgtcttacacaacgtggacggcgcggggaggatcggcctcagtgtg

SEQ ID NO: 134320 - DNA, 55 bp, Artificial
  Synthetic oligonucleotide
ccaatcggaagcgaaacacaatggacaaccgaagcgagacgaacagcaaacgctc

SEQ ID NO: 134321 - DNA, 55 bp, Artificial
  Synthetic oligonucleotide
tgtagggtcccgggcggtgccaacccgttcaacacggatccggcttggtatcaga

SEQ ID NO: 134322 - DNA, 55 bp, Artificial
  Synthetic oligonucleotide
ccaattggacgagacagtcaaatcgaagatactcccgtttgacaggacaatacga

SEQ ID NO: 134323 - DNA, 60 bp, Artificial
  Synthetic oligonucleotide
gagaggcgtctcacgcacagctattgcacacacctgtacatccttgcgtgtgcaaggtgg

SEQ ID NO: 134324 - DNA, 55 bp, Artificial
  Synthetic oligonucleotide
ccacacgtggattgtgtatatatcgagtaaaggagtacagtacagggttcgatat

SEQ ID NO: 134325 - DNA, 55 bp, Artificial
  Synthetic oligonucleotide
ggaccgtccgagtcacaacatgatactgtaacgcacagaccgcagcccagcctcg

SEQ ID NO: 134326 - DNA, 55 bp, Artificial
  Synthetic oligonucleotide
ccacagatgggcgaaccacgtacttcggattcctttgtcagccgatcggaccgac

SEQ ID NO: 134327 - DNA, 55 bp, Artificial
  Synthetic oligonucleotide
ggaccgaacggacaaaagttggtacggtcaggcgagcagtcgctatcggagactg

SEQ ID NO: 134328 - DNA, 55 bp, Artificial
  Synthetic oligonucleotide
ggacccgtgtgaatacgcacgtcaccgagcgagccacctatccgataacccgtta

SEQ ID NO: 134329 - DNA, 54 bp, Artificial
  Synthetic oligonucleotide
ccacccgtacgctgggcaatagcaagaaaccgtgattttcggggacaccgacca

SEQ ID NO: 134330 - DNA, 55 bp, Artificial
  Synthetic oligonucleotide
ggacccattcaagacgcgagcgttcgagtacggggaggaagcgacacagttcccg

SEQ ID NO: 134331 - DNA, 53 bp, Artificial
  Synthetic oligonucleotide
ccaccgagcactgaagctaccgaaaaccgaccccgccaaggtacaatccgtta

SEQ ID NO: 134332 - DNA, 55 bp, Artificial
  Synthetic oligonucleotide
ggacccagggacactcgctaaacttcgacaggaggtcaaaacacaccttgactcc

SEQ ID NO: 134333 - DNA, 55 bp, Artificial
  Synthetic oligonucleotide
ccacgcgagattgcagaccggactgacatcaacgagtccagcgtagcgaagacga

SEQ ID NO: 134334 - DNA, 60 bp, Artificial
  Synthetic oligonucleotide
gagatatccgagtggcaaaacaccacgttagagagttgagtaccacgaaaatccgcatga

SEQ ID NO: 134335 - DNA, 55 bp, Artificial
  Synthetic oligonucleotide
ggacagctaccagtgaatcagactgacgacgtgaccaagtcgtggctactgcccc

SEQ ID NO: 134336 - DNA, 55 bp, Artificial
  Synthetic oligonucleotide
ggacacacgagcggtgtacgtgtcgagatcagtgagcgacgccacaatgctcgcg

SEQ ID NO: 134337 - DNA, 55 bp, Artificial
  Synthetic oligonucleotide
ccacgtggcttcgaccgtgcacccgcaaagcgagttccgatgttaccgctgctct

SEQ ID NO: 134338 - DNA, 55 bp, Artificial
  Synthetic oligonucleotide
ccacgttgtctagtggtttctcgtcgttgagggactagagaagctagatcgtgcg

SEQ ID NO: 134339 - DNA, 55 bp, Artificial
  Synthetic oligonucleotide
ccactcgctattgacgaaacgtgacagctcggacggctaagtgagaattaacctg

SEQ ID NO: 134340 - DNA, 55 bp, Artificial
  Synthetic oligonucleotide
ggaatttcgagtgcctgtacgcgctcggaaaggtcgacactcgctgtggtgccgc

SEQ ID NO: 134341 - DNA, 55 bp, Artificial
  Synthetic oligonucleotide
ccagcccagtagctctcgctgtctacttgttggcaagagtctgaaacgcgggctg

SEQ ID NO: 134342 - DNA, 55 bp, Artificial
  Synthetic oligonucleotide
ccagccgagtagtcagcgattcacatcggatcgctcatagctgaacacgacccgg

SEQ ID NO: 134343 - DNA, 55 bp, Artificial
  Synthetic oligonucleotide
ccagcgattttactcccagtagctggacgtgtcctatggaatacacgacgctcgg

SEQ ID NO: 134344 - DNA, 55 bp, Artificial
  Synthetic oligonucleotide
ccagcgctcgttggcacttcgaacgctggtatagtagattctcgaatctatcgcg

SEQ ID NO: 134345 - DNA, 59 bp, Artificial
  Synthetic oligonucleotide
cgtatcgagcaaacagcgagcatcaacggtatggaacgaactgtctttcgttgcccgta

SEQ ID NO: 134346 - DNA, 55 bp, Artificial
  Synthetic oligonucleotide
ggaatccgctggacaagtcatgaaggtagactccgggctgtgccaaccagccggt

SEQ ID NO: 134347 - DNA, 54 bp, Artificial
  Synthetic oligonucleotide
ccaggggttactcgtcggcgttatctcgaagctctaagttcgggaacgctccga

SEQ ID NO: 134348 - DNA, 55 bp, Artificial
  Synthetic oligonucleotide
ccagtagcgccgccacgaggagcgtgtggaacttcaacgaggtgtacgggtgata

SEQ ID NO: 134349 - DNA, 55 bp, Artificial
  Synthetic oligonucleotide
tgtcgacagtaagctcgccggcgacgtatcgttcgccgaagtctgtgagtccgta

SEQ ID NO: 134350 - DNA, 55 bp, Artificial
  Synthetic oligonucleotide
ccagttcgctgtgtattctcaagctttagatggatatcagcacctgtcatggaac

SEQ ID NO: 134351 - DNA, 55 bp, Artificial
  Synthetic oligonucleotide
ggaatatggttgtcgcgaaaggaagccactgagccgagaatgtggagagacgtgc

SEQ ID NO: 134352 - DNA, 55 bp, Artificial
  Synthetic oligonucleotide
ggaacctcagagttgatttggaagcgtaccccatcgagctcctcagtctgtatgt

SEQ ID NO: 134353 - DNA, 55 bp, Artificial
  Synthetic oligonucleotide
tgctactagaggtgggtagggatgatgacgtacacaaccataccgtcggggagcc

SEQ ID NO: 134354 - DNA, 55 bp, Artificial
  Synthetic oligonucleotide
ggcgtcacgtgatagcctgtacaccaacgagtatagcatcacgaacctccgtaga

SEQ ID NO: 134355 - DNA, 55 bp, Artificial
  Synthetic oligonucleotide
caaccctctgcattgggcgatcccggggctagtcaattggtaaggcctaccgtgc

SEQ ID NO: 134356 - DNA, 53 bp, Artificial
  Synthetic oligonucleotide
gagattcctgaggaaaccgggcggtgggcgttcctacgggaggtttctgagga

SEQ ID NO: 134357 - DNA, 55 bp, Artificial
  Synthetic oligonucleotide
tggaccagtttggcgtagacagaacatatatcacgagagagctagaacactcact

SEQ ID NO: 134358 - DNA, 55 bp, Artificial
  Synthetic oligonucleotide
caactggaaggtcccgctttcttcagttccctgcgcgtttagtccgccgagcaag

SEQ ID NO: 134359 - DNA, 55 bp, Artificial
  Synthetic oligonucleotide
caatcatcattgattcgccgctctctatagcgtcccacagaggcgttcgtccgcg

SEQ ID NO: 134360 - DNA, 55 bp, Artificial
  Synthetic oligonucleotide
ggcgtcaaagggcgtctagtgtgggcatagtcggaccctgtgcgattggtctctc

SEQ ID NO: 134361 - DNA, 55 bp, Artificial
  Synthetic oligonucleotide
cacaagttggtggttgaatctcggcagtctcacgctgtgtcagaccggacgattc

SEQ ID NO: 134362 - DNA, 55 bp, Artificial
  Synthetic oligonucleotide
cacacggggtatggcgactgctttcacgattgtacctgggatgggcgttcctctg

SEQ ID NO: 134363 - DNA, 55 bp, Artificial
  Synthetic oligonucleotide
tcacaactcgtctacgctgagtcggtctaaagtctgacttctcttattgatcgga

SEQ ID NO: 134364 - DNA, 55 bp, Artificial
  Synthetic oligonucleotide
cacagcccgattccgttcgatcaatgcttgatcttcgagcgtcacaccgcgttcc

SEQ ID NO: 134365 - DNA, 55 bp, Artificial
  Synthetic oligonucleotide
cacaggtgtgcgaatcgaagcgatcggagacgacacgcacgaccagcgacccact

SEQ ID NO: 134366 - DNA, 55 bp, Artificial
  Synthetic oligonucleotide
cacatcgacgttcatcgccaagcgtacaactacactcggtacgaatacgagaacg

SEQ ID NO: 134367 - DNA, 58 bp, Artificial
  Synthetic oligonucleotide
agggagatcgtctgcgcgagttcgtccggaacgtagtgccactcgttgtctctgaacc

SEQ ID NO: 134368 - DNA, 51 bp, Artificial
  Synthetic oligonucleotide
cggttcgcggtccatcgtaccccagcggtttaaccgggttcctcacctcga

SEQ ID NO: 134369 - DNA, 55 bp, Artificial
  Synthetic oligonucleotide
ggcgggagtgaatccgacacttcctacgcagtccaccgtcgatggcaggctggat

SEQ ID NO: 134370 - DNA, 55 bp, Artificial
  Synthetic oligonucleotide
cacatggcgaccacagagaacagcggcggagttagggcatgggattcagcgaagc

SEQ ID NO: 134371 - DNA, 51 bp, Artificial
  Synthetic oligonucleotide
caccaaagttgcggaacgattacgagggcagtaaaccgtccgaaacctggt

SEQ ID NO: 134372 - DNA, 55 bp, Artificial
  Synthetic oligonucleotide
ggcggagggagttcgtgtgtgaactgtcaatgagtacggcacagtccggtcggat

SEQ ID NO: 134373 - DNA, 53 bp, Artificial
  Synthetic oligonucleotide
cacccactaccgactccccgattggaaaagacgaggttctctgtgtttctccc

SEQ ID NO: 134374 - DNA, 55 bp, Artificial
  Synthetic oligonucleotide
cacccgaaagtagaagtcgcctatcagacaagccggactgacgacacactgcatc

SEQ ID NO: 134375 - DNA, 54 bp, Artificial
  Synthetic oligonucleotide
cacccggttcctgagtgactcaaactcaccgttgtcgggtatggcgggtcggaa

SEQ ID NO: 134376 - DNA, 55 bp, Artificial
  Synthetic oligonucleotide
caccctgatcgtgcgtacgtgactcattacccgagccgtagcccatggtcgggga

SEQ ID NO: 134377 - DNA, 55 bp, Artificial
  Synthetic oligonucleotide
caccgactgcatctctaagtgtctcagtcgttaccgtaatgcgatcagccgagtg

SEQ ID NO: 134378 - DNA, 55 bp, Artificial
  Synthetic oligonucleotide
caccgcagacacacgcagtcaaagaagagcccaaccgcggtggacgtgcctactc

SEQ ID NO: 134379 - DNA, 59 bp, Artificial
  Synthetic oligonucleotide
gagcatctacgcgatcaggggtactggcccccggaggaatagagaaatgccacctaatc

SEQ ID NO: 134380 - DNA, 52 bp, Artificial
  Synthetic oligonucleotide
tcaaacggggacggggacgcacgaagtacccttggcgcatttgggacggttc

SEQ ID NO: 134381 - DNA, 55 bp, Artificial
  Synthetic oligonucleotide
atgtattccgcggtgacacggtcttctgtagttgatagcgtgcagtggtcgtcgt

SEQ ID NO: 134382 - DNA, 55 bp, Artificial
  Synthetic oligonucleotide
gggacgatatgcagagcaccaatacagcgctctcccggtgagacgttgagcattc

SEQ ID NO: 134383 - DNA, 55 bp, Artificial
  Synthetic oligonucleotide
tcctgtcgcaacgcgtcgaattcttctagcagtcgctgcgtgaacagtcgcctgt

SEQ ID NO: 134384 - DNA, 55 bp, Artificial
  Synthetic oligonucleotide
attagcatgcacgtcagtccgtgagccgtccagtggtcctcgagcacgtaatcgt

SEQ ID NO: 134385 - DNA, 55 bp, Artificial
  Synthetic oligonucleotide
attcaggtacgtacagtcgatgtagacgggaaactcgacggtccagctgtgaccg

SEQ ID NO: 134386 - DNA, 55 bp, Artificial
  Synthetic oligonucleotide
gggaacgtcccgcatctaaatggtggtctcttcagccagagtcctatcgaagggg

SEQ ID NO: 134387 - DNA, 55 bp, Artificial
  Synthetic oligonucleotide
aagtgggtcggagagcggaggcgatgagactgctgtcggtgtgccacagcctgtt

SEQ ID NO: 134388 - DNA, 55 bp, Artificial
  Synthetic oligonucleotide
gggaacgcagtctgtgacgacggcctcgttatcgacctttctgagatgaccggcg

SEQ ID NO: 134389 - DNA, 54 bp, Artificial
  Synthetic oligonucleotide
attcgccttctgtgttgtttacggggcattccttagagaattgacacccacccc

SEQ ID NO: 134390 - DNA, 60 bp, Artificial
  Synthetic oligonucleotide
gagcggctcagtgtaccgcgtgtgcctaatcaccgaaacgtgcgactgtcccagcgacac

SEQ ID NO: 134391 - DNA, 55 bp, Artificial
  Synthetic oligonucleotide
aagtgggccgaagacagtgaagctagcgaaggaatggaacgtacccttggacagc

SEQ ID NO: 134392 - DNA, 55 bp, Artificial
  Synthetic oligonucleotide
ggcttcccatctgctactgacgctctcaaatgggccgatgagtggccctacgacg

SEQ ID NO: 134393 - DNA, 55 bp, Artificial
  Synthetic oligonucleotide
ggctgccatatcacgcctctcggcgggaacactcctcagtagtcggtgcatagcg

SEQ ID NO: 134394 - DNA, 55 bp, Artificial
  Synthetic oligonucleotide
ggctctcattcaatcgatgtcagcctaatccacgaaccgagtggaaatgcagtct

SEQ ID NO: 134395 - DNA, 55 bp, Artificial
  Synthetic oligonucleotide
attggagcaaaggtcggcagctacgtcaaatcgggtatcactcagacagccgtcg

SEQ ID NO: 134396 - DNA, 55 bp, Artificial
  Synthetic oligonucleotide
ggctcggaatcactcgacaaggtgtccacagcgcgttatcaccgctcaagcaccg

SEQ ID NO: 134397 - DNA, 55 bp, Artificial
  Synthetic oligonucleotide
attgttgtcccggttcacgggccctgaggcagtcactactccagtagtgtcaggc

SEQ ID NO: 134398 - DNA, 55 bp, Artificial
  Synthetic oligonucleotide
ggctcgactggccggcccatctcctccgtctgttacgatatgcgtagaaacgtcc

SEQ ID NO: 134399 - DNA, 54 bp, Artificial
  Synthetic oligonucleotide
attttacaccgaaccaatcgttatctagccacggactgtaagcctcttacttcc

SEQ ID NO: 134400 - DNA, 55 bp, Artificial
  Synthetic oligonucleotide
tgcggcgaaaggagtctttccgacagttgatgattggtaccggaacggcgaacga

SEQ ID NO: 134401 - DNA, 56 bp, Artificial
  Synthetic oligonucleotide
gaggatattcgcgcgcgcgtagcacaggactggtagggagttatcccggggggagg

SEQ ID NO: 134402 - DNA, 55 bp, Artificial
  Synthetic oligonucleotide
ggcgtggctttcgttgttcgcattcgaaccagactccgaacgagcgcgaacactc

SEQ ID NO: 134403 - DNA, 55 bp, Artificial
  Synthetic oligonucleotide
caaatctcgtcaggtcggatctcaatcggtgatggtactccactcccctgatagg

SEQ ID NO: 134404 - DNA, 55 bp, Artificial
  Synthetic oligonucleotide
ggcgtcctttgcaggccagacggtgggagttatctgtctgtcctcggtggccgat

SEQ ID NO: 134405 - DNA, 54 bp, Artificial
  Synthetic oligonucleotide
caccttacggaatcactctcaaccggacttcctacgcggtttcaaacgactgac

SEQ ID NO: 134406 - DNA, 55 bp, Artificial
  Synthetic oligonucleotide
cacgaaaacgattcttcgggaccagcaacgctgacggtcccattctcaagtgcgt

SEQ ID NO: 134407 - DNA, 55 bp, Artificial
  Synthetic oligonucleotide
ggccttcctgttgtacggtgaaacgcgatgtcaaactccgattacgcgaaggacg

SEQ ID NO: 134408 - DNA, 55 bp, Artificial
  Synthetic oligonucleotide
ggcctcgaagacgtaggagtgggatactccgaatcaacgcctgtggagactgcgc

SEQ ID NO: 134409 - DNA, 55 bp, Artificial
  Synthetic oligonucleotide
tgggtctatcggtcggttccacaccactttcacattcgagagatcaacgccacgg

SEQ ID NO: 134410 - DNA, 55 bp, Artificial
  Synthetic oligonucleotide
tcctggttcgaggagttatcaccgtcgtcgttttgactcgaagagtcgtcaccac

SEQ ID NO: 134411 - DNA, 55 bp, Artificial
  Synthetic oligonucleotide
ggccgatagagcgcccatagtcccggatagaacgatctgaatgtgtctacatcgg

SEQ ID NO: 134412 - DNA, 58 bp, Artificial
  Synthetic oligonucleotide
cggctttcagttgggttattgcttgcacgttgccaacttcgccacttttgcgggctga

SEQ ID NO: 134413 - DNA, 55 bp, Artificial
  Synthetic oligonucleotide
ggccgagttccggtgtccgaacgatgactgccacgtttcgacgtttcaggccgac

SEQ ID NO: 134414 - DNA, 55 bp, Artificial
  Synthetic oligonucleotide
cacgctgtagatccgttttccccgtcttgctcgtagacatattgccataacactt

SEQ ID NO: 134415 - DNA, 55 bp, Artificial
  Synthetic oligonucleotide
cacgcttacagacctgagtgataaggaggcggcgctcattgaggcgttcgttcct

SEQ ID NO: 134416 - DNA, 55 bp, Artificial
  Synthetic oligonucleotide
ggccgaacatattaagtgtgttgacgtcctgagtcaacatagactatgggagacc

SEQ ID NO: 134417 - DNA, 55 bp, Artificial
  Synthetic oligonucleotide
cacggaaccgccatcagatggactgagtcatcctgttcaatatccgttcgctggg

SEQ ID NO: 134418 - DNA, 55 bp, Artificial
  Synthetic oligonucleotide
ggccctctgatggcgattctgtcaaccttagatactttcgaaggcaaataggtta

SEQ ID NO: 134419 - DNA, 55 bp, Artificial
  Synthetic oligonucleotide
ggcatcgctcgattctacatcaagatgagcggtacccgcctcgggctggcctacg

SEQ ID NO: 134420 - DNA, 55 bp, Artificial
  Synthetic oligonucleotide
cacggctgaaatacctatcgcgggtgaccgtcaattgtctcaccacacagagagc

SEQ ID NO: 134421 - DNA, 55 bp, Artificial
  Synthetic oligonucleotide
cacggtagtgtaagctttactctctatctgcacagagatgaacacgttcgtggac

SEQ ID NO: 134422 - DNA, 55 bp, Artificial
  Synthetic oligonucleotide
cacggtcctgagtggcgtgcgttcacttcagaggaacgcgatgaaaagagtcggg

SEQ ID NO: 134423 - DNA, 60 bp, Artificial
  Synthetic oligonucleotide
cggctggttgttcagttaacgtctctctttatcatgtgtgactaacgacgctctgcgacc

SEQ ID NO: 134424 - DNA, 55 bp, Artificial
  Synthetic oligonucleotide
cactaaatctgatacttccgtagttccgctaactctgtgacggcccctcggcctg

SEQ ID NO: 134425 - DNA, 55 bp, Artificial
  Synthetic oligonucleotide
tggtacagcggacagtatcgaaataccagaggacattttcaagcaattggtaggg

SEQ ID NO: 134426 - DNA, 55 bp, Artificial
  Synthetic oligonucleotide
ggcgaactaagcgtcttactacggttcagtcagcgttcgacgtctgtgagatcag

SEQ ID NO: 134427 - DNA, 55 bp, Artificial
  Synthetic oligonucleotide
caccggtagtatcaaccgagcggtgattcagatcggaagccaacatatggagtgg

SEQ ID NO: 134428 - DNA, 55 bp, Artificial
  Synthetic oligonucleotide
caccggatcgagaccagtcatcgcagactgtgggatcatcgagatttcgtcccac

SEQ ID NO: 134429 - DNA, 54 bp, Artificial
  Synthetic oligonucleotide
tgagagactgaatctctgattcgatggcgaccgtgtccaccggccgcatcagaa

SEQ ID NO: 134430 - DNA, 54 bp, Artificial
  Synthetic oligonucleotide
agggagaataggggattaggattactggaacgcgtgtgtgggcggagtcggccc

SEQ ID NO: 134431 - DNA, 54 bp, Artificial
  Synthetic oligonucleotide
ggatgtactgaggcacaaaaccgccccttcaacccgccagaacccgtccgttgc

SEQ ID NO: 134432 - DNA, 54 bp, Artificial
  Synthetic oligonucleotide
ctgtgcgctgttctttgggactttcgagagagcgtggtgactccgaccattcgt

SEQ ID NO: 134433 - DNA, 54 bp, Artificial
  Synthetic oligonucleotide
ggaacatattcactgcaagctcccgacagtctaagattgtccctgtgtgacggt

SEQ ID NO: 134434 - DNA, 58 bp, Artificial
  Synthetic oligonucleotide
cggccggtataccatgctgaaagtgccgagtacggtactttcggagatgttactcaga

SEQ ID NO: 134435 - DNA, 54 bp, Artificial
  Synthetic oligonucleotide
gttcattacagtggtgtcggggttgcgggcatttgaaccttgtagatgcgcccg

SEQ ID NO: 134436 - DNA, 54 bp, Artificial
  Synthetic oligonucleotide
cgcggattgggtcggttgcagtcgagacggactgaaaacccagaacgggattga

SEQ ID NO: 134437 - DNA, 54 bp, Artificial
  Synthetic oligonucleotide
atcggacgagttcagcctcaggtgggactgcccgtactgcaaccagaccagtca

SEQ ID NO: 134438 - DNA, 54 bp, Artificial
  Synthetic oligonucleotide
ggatttgcaagactgcgagcgtaagtatagcattgactcgtgtgaccaagttgt

SEQ ID NO: 134439 - DNA, 54 bp, Artificial
  Synthetic oligonucleotide
ccagccatatcgacccacgcacccatcagtggattgccctccgggactgcaccc

SEQ ID NO: 134440 - DNA, 54 bp, Artificial
  Synthetic oligonucleotide
ccactctgaacttattggaacgggtgtgcgtctgacgcatatatttgtatcacc

SEQ ID NO: 134441 - DNA, 54 bp, Artificial
  Synthetic oligonucleotide
ggacagcgttggcgatcatcgctcacacggttcggactgagcgggtaccgggct

SEQ ID NO: 134442 - DNA, 54 bp, Artificial
  Synthetic oligonucleotide
gtgctctaaacagtcgacgactacaggtcttcacacgcctcctgtagagcgtcc

SEQ ID NO: 134443 - DNA, 54 bp, Artificial
  Synthetic oligonucleotide
ccgctcgatccgagcggtcacgtcctcgtactccgactcgatctcttgggtctc

SEQ ID NO: 134444 - DNA, 54 bp, Artificial
  Synthetic oligonucleotide
agcctgttgtgcggcgtgttgtgacgggtcggcaaaggtcggccactggtctgt

SEQ ID NO: 134445 - DNA, 50 bp, Artificial
  Synthetic oligonucleotide
cggatcggccgctaacaaggggtactaccctcctaacctcaaaatcccgt

SEQ ID NO: 134446 - DNA, 54 bp, Artificial
  Synthetic oligonucleotide
gactaacgatcgcagtgtaaaggtgcccgtgtccgggcgaagactgacgggagc

SEQ ID NO: 134447 - DNA, 54 bp, Artificial
  Synthetic oligonucleotide
ctcatctggatcaaatgtgacatcgtgatactccggctgtatatcaggaccacg

SEQ ID NO: 134448 - DNA, 54 bp, Artificial
  Synthetic oligonucleotide
tccatcccatcatgattcgaagcaggaacaacgagtagccgatccatcgttcgg

SEQ ID NO: 134449 - DNA, 54 bp, Artificial
  Synthetic oligonucleotide
acttggtggcaaccccccgatgacggccttctcacactcgagtttcgacatcat

SEQ ID NO: 134450 - DNA, 54 bp, Artificial
  Synthetic oligonucleotide
gccgagagaggagtttctcccggcggatctagcgacgctgtatcggtgtcgatg

SEQ ID NO: 134451 - DNA, 54 bp, Artificial
  Synthetic oligonucleotide
gtgacactactgtcaattctggcgttttgctataaaagcatttgcctactgggg

SEQ ID NO: 134452 - DNA, 54 bp, Artificial
  Synthetic oligonucleotide
tgcactgaccttgtccagtcgcaacgatattgatagctgtgcgctgagcctcac

SEQ ID NO: 134453 - DNA, 52 bp, Artificial
  Synthetic oligonucleotide
gacagtattgtttagtacgtccaaaacccttaactacgagagtcgcctacgg

SEQ ID NO: 134454 - DNA, 54 bp, Artificial
  Synthetic oligonucleotide
tgcgacgcccagaatattcgatgtactgttgggacgtcgaaagatccgtatgtc

SEQ ID NO: 134455 - DNA, 54 bp, Artificial
  Synthetic oligonucleotide
gacacaacagtgtcggaccgtaacacgtggtgagcgctgtgagtactgagacgg

SEQ ID NO: 134456 - DNA, 60 bp, Artificial
  Synthetic oligonucleotide
cggagtctggaactagctcgcagtagcgtgcgattactcgagaatgcgcgaacaactgtg

SEQ ID NO: 134457 - DNA, 54 bp, Artificial
  Synthetic oligonucleotide
acatgagtacgagtcacccgacctcagagacgaggataagagcgcatgaatgcc

SEQ ID NO: 134458 - DNA, 54 bp, Artificial
  Synthetic oligonucleotide
gatttcatggggttgcgtggagcccctgacacaacgtgaacacccctggaaggg

SEQ ID NO: 134459 - DNA, 54 bp, Artificial
  Synthetic oligonucleotide
gaatcgacgacggagtctatcacggacttcgtcttcttcagtcatcgtcgatcg

SEQ ID NO: 134460 - DNA, 54 bp, Artificial
  Synthetic oligonucleotide
cgccacgacaatgggaaaccggtggagcgatgtcgcagagatggtcggtgggaa

SEQ ID NO: 134461 - DNA, 54 bp, Artificial
  Synthetic oligonucleotide
aatacgtaggcgaatacgaatgaaggtaaccactctacgcctccctgagtcgat

SEQ ID NO: 134462 - DNA, 54 bp, Artificial
  Synthetic oligonucleotide
tacttcgcgctctacgacaagctccgcaccgagcaacggctccgcacctacctg

SEQ ID NO: 134463 - DNA, 54 bp, Artificial
  Synthetic oligonucleotide
tcgaaatgaacaccagagctaatacggacgagcgaattggtagtaccgacatgc

SEQ ID NO: 134464 - DNA, 54 bp, Artificial
  Synthetic oligonucleotide
gaagcctcgatacggtcgccaaccaaatcgcgggccttctgatggggttcgaag

SEQ ID NO: 134465 - DNA, 54 bp, Artificial
  Synthetic oligonucleotide
gctaggtggatcgccttctcagtaaaacggagaatctgcgacttcgggagggtc

SEQ ID NO: 134466 - DNA, 54 bp, Artificial
  Synthetic oligonucleotide
tactgcgacgagagcccgttcccgactgtacagttctcggtcgttcgagacgga

SEQ ID NO: 134467 - DNA, 57 bp, Artificial
  Synthetic oligonucleotide
gagtccggtgagtagggcggtgagaatcggtgaggatagggaggggaggaatcgcaa

SEQ ID NO: 134468 - DNA, 54 bp, Artificial
  Synthetic oligonucleotide
gggattgaaacatcagttttggatacctataggaataggttagttaggtcgaga

SEQ ID NO: 134469 - DNA, 54 bp, Artificial
  Synthetic oligonucleotide
gaacgcgactaaacgttcatcgaaaagcaagaacgctgtacgcctgtattgggg

SEQ ID NO: 134470 - DNA, 54 bp, Artificial
  Synthetic oligonucleotide
tccgtcagataacgtgggagaagtgggtaaggtgcatcaaaggtaaccgttacc

SEQ ID NO: 134471 - DNA, 54 bp, Artificial
  Synthetic oligonucleotide
gaacaacctcacgccttgcagctcgacggtgtaaccgtcggatacgggagcgac

SEQ ID NO: 134472 - DNA, 54 bp, Artificial
  Synthetic oligonucleotide
gccagacatagcttgattccacggctacagagtctccttgatgttgtgaacgac

SEQ ID NO: 134473 - DNA, 54 bp, Artificial
  Synthetic oligonucleotide
atgcaacattcgacggcgatagtgcgtctgtctcagagatcgacgccacttcgt

SEQ ID NO: 134474 - DNA, 54 bp, Artificial
  Synthetic oligonucleotide
gattcgcgggatttcatggggttgcgtggagcccctgacacaacgtgaacaccc

SEQ ID NO: 134475 - DNA, 54 bp, Artificial
  Synthetic oligonucleotide
taatcagcgtctgcgtctgtggatagaatgtgccggatgctgagtgagggagcg

SEQ ID NO: 134476 - DNA, 54 bp, Artificial
  Synthetic oligonucleotide
cttgtaggaaacgtcgatctctgcgtctaactgcctgatactcgtgtttaagcg

SEQ ID NO: 134477 - DNA, 54 bp, Artificial
  Synthetic oligonucleotide
tatacactcccgcagcacgttgttctactgtgtctcaaagttcggaagaacacg

SEQ ID NO: 134478 - DNA, 55 bp, Artificial
  Synthetic oligonucleotide
agggagaggcgctgtaagcgttcgtaacgagccttcgttacgaagcggcctatac

SEQ ID NO: 134479 - DNA, 53 bp, Artificial
  Synthetic oligonucleotide
cggaccaaacaagataggacggaaccaacgaaacttacagcgtcgtaagaagc

SEQ ID NO: 134480 - DNA, 54 bp, Artificial
  Synthetic oligonucleotide
acatgttaacgagcactttctcgggagtctgtgatgcgatattacgtatcacgg

SEQ ID NO: 134481 - DNA, 54 bp, Artificial
  Synthetic oligonucleotide
tctgaggcaggtgacgtagcctcaaactcaaggtacccttcctcgttgatggat

SEQ ID NO: 134482 - DNA, 54 bp, Artificial
  Synthetic oligonucleotide
ggagaccgacctcaagtaatcggacgattaacagactctcgagcgactgaatcg

SEQ ID NO: 134483 - DNA, 54 bp, Artificial
  Synthetic oligonucleotide
gtctacaagcgaattaatttgtgttgtccgataattcacgaccggcattaggga

SEQ ID NO: 134484 - DNA, 54 bp, Artificial
  Synthetic oligonucleotide
cggacaggaatcagtatcaataggagagtaataaggactggggctgtttcgagt

SEQ ID NO: 134485 - DNA, 54 bp, Artificial
  Synthetic oligonucleotide
gcagagcgacttgacgggacaggtctccggctgggactttacacgggtgacaca

SEQ ID NO: 134486 - DNA, 54 bp, Artificial
  Synthetic oligonucleotide
agagcacgatggtacgggttagtgcgtcgatactgcggggtcgtacggcgatgc

SEQ ID NO: 134487 - DNA, 54 bp, Artificial
  Synthetic oligonucleotide
tatcaattcgtggagtcaccccaacgaagcttgataaatcacaagtcggtgtac

SEQ ID NO: 134488 - DNA, 54 bp, Artificial
  Synthetic oligonucleotide
cgtttgctcccgcgtgagtggatcgccgttcatagattatccatgtcgtatttt

SEQ ID NO: 134489 - DNA, 54 bp, Artificial
  Synthetic oligonucleotide
agtctgttcgctcgtgagtgggaccttccccgaaaccagattatcccgattgtt

SEQ ID NO: 134490 - DNA, 53 bp, Artificial
  Synthetic oligonucleotide
cggaaccctgggaggacagcgccgggaagctcctcttccgggttctcgactac

SEQ ID NO: 134491 - DNA, 54 bp, Artificial
  Synthetic oligonucleotide
agatcattataccagtgtagacccatggaaagagtactggcgcagtagatttgc

SEQ ID NO: 134492 - DNA, 54 bp, Artificial
  Synthetic oligonucleotide
agtgaagatctgcagttgagaggctacatacccactacacgtaatattagaaaa

SEQ ID NO: 134493 - DNA, 54 bp, Artificial
  Synthetic oligonucleotide
cgtcgttccagattcgccgaagaacaagataccaggcgctgccccgctcgaggg

SEQ ID NO: 134494 - DNA, 54 bp, Artificial
  Synthetic oligonucleotide
acgaatccccttagaagttcgttcggcgaatccgtactgcttaagatactcgaa

SEQ ID NO: 134495 - DNA, 54 bp, Artificial
  Synthetic oligonucleotide
cgtgcttttcgaaactactgcatcagtctgctgtcggaggttctgagataactt

SEQ ID NO: 134496 - DNA, 54 bp, Artificial
  Synthetic oligonucleotide
gcgaatcgcacccgtgtcccgctcgtgaattacggaccggaacgtcccgaagag

SEQ ID NO: 134497 - DNA, 54 bp, Artificial
  Synthetic oligonucleotide
cggccaagtcacgggtgggctgttctactacctcgcgcccatctacagtccgaa

SEQ ID NO: 134498 - DNA, 54 bp, Artificial
  Synthetic oligonucleotide
gagacgcctgtagtgactcgtgttcgttcagaacgtccgctcggtataccgacg

SEQ ID NO: 134499 - DNA, 54 bp, Artificial
  Synthetic oligonucleotide
caagaggagcgcaccaccgctcctcttggactgaaccgacctttgggacgggtc

SEQ ID NO: 134500 - DNA, 53 bp, Artificial
  Synthetic oligonucleotide
tcgcgtggactcaaatcgacggcaatgtggtagcaggcacgaacgaaggccga

SEQ ID NO: 134501 - DNA, 60 bp, Artificial
  Synthetic oligonucleotide
gagtctccatattcatgagagttcagatcacactaacgggcgagaaagcggctgagtaca

SEQ ID NO: 134502 - DNA, 53 bp, Artificial
  Synthetic oligonucleotide
tacactcggttgctccttgctaggatgttcccgccatctctccaaatactgtt

SEQ ID NO: 134503 - DNA, 53 bp, Artificial
  Synthetic oligonucleotide
cgtacgaacttcctccaacagagggaacgcactctctgttagtccgaactgca

SEQ ID NO: 134504 - DNA, 53 bp, Artificial
  Synthetic oligonucleotide
ctatcatcctcgtatgtttcaacgtagtggaacgagaaatctccggtcgtgaa

SEQ ID NO: 134505 - DNA, 53 bp, Artificial
  Synthetic oligonucleotide
gcgtgcgtccgtagcttctcttttaacccgttccagttgtctcttcggaagaa

SEQ ID NO: 134506 - DNA, 53 bp, Artificial
  Synthetic oligonucleotide
atgatggaactgtgcgtggcgaaggctagcgtcatggaatcctgctcttggaa

SEQ ID NO: 134507 - DNA, 52 bp, Artificial
  Synthetic oligonucleotide
tttccgactcattgactcggttgtaccccgttcctttgaccgagagtccctt

SEQ ID NO: 134508 - DNA, 53 bp, Artificial
  Synthetic oligonucleotide
cccagcacaaacgacgattaaccactcgacgaacaatgatacttgatacacta

SEQ ID NO: 134509 - DNA, 53 bp, Artificial
  Synthetic oligonucleotide
cgttggcacgtctcgttggaaccttactcgggtcgcgggcgtggagtaagatt

SEQ ID NO: 134510 - DNA, 53 bp, Artificial
  Synthetic oligonucleotide
acggtcgttatcggtagccacggtcgggagggcgtatcacgaatcctactcgg

SEQ ID NO: 134511 - DNA, 53 bp, Artificial
  Synthetic oligonucleotide
gatgcgtgactgactaaaggatacacacgcctaccgagcagttgttctaggtg

SEQ ID NO: 134512 - DNA, 57 bp, Artificial
  Synthetic oligonucleotide
gagtctctaccgtctggtttcggcccttctgtccggggtgttgcaagtgctgttgtg

SEQ ID NO: 134513 - DNA, 53 bp, Artificial
  Synthetic oligonucleotide
gcttgtttcctcataacggaggtatagcttggtaagacaagtcccgaacatca

SEQ ID NO: 134514 - DNA, 53 bp, Artificial
  Synthetic oligonucleotide
tctctcggtgaggtatcatcgaatacgtgaaatcagcctaaaattcgaccaca

SEQ ID NO: 134515 - DNA, 53 bp, Artificial
  Synthetic oligonucleotide
acgtccaggagtgagcgggcgcgactacccgtcgtcggggtgacaccagttga

SEQ ID NO: 134516 - DNA, 53 bp, Artificial
  Synthetic oligonucleotide
aacccctcggcaaacacgtagccgcgtttgtgccggagaaccccagttgaaca

SEQ ID NO: 134517 - DNA, 53 bp, Artificial
  Synthetic oligonucleotide
accctacgctccaaaacctcgtcaacgacaatgggactctgcggttagctgaa

SEQ ID NO: 134518 - DNA, 53 bp, Artificial
  Synthetic oligonucleotide
gttctacgcgacgatgtgggcgagtgggcggcagtggttccgtccgagcaacg

SEQ ID NO: 134519 - DNA, 53 bp, Artificial
  Synthetic oligonucleotide
gagacgagctactcgacatgacgcggtcacttgcacatgaggactacgagtgt

SEQ ID NO: 134520 - DNA, 53 bp, Artificial
  Synthetic oligonucleotide
gactcccaacgtgatgacggtaattcgtggttccataagcggactcgcctgtt

SEQ ID NO: 134521 - DNA, 53 bp, Artificial
  Synthetic oligonucleotide
ttaagcatcaacgagttacgctatccctgcaagaacggtcggcactccactca

SEQ ID NO: 134522 - DNA, 53 bp, Artificial
  Synthetic oligonucleotide
gacacgcgtacgtttcaattcacacatcggggaaggagccccgtgtttctggt

SEQ ID NO: 134523 - DNA, 60 bp, Artificial
  Synthetic oligonucleotide
cgctgacgacaagtatcttactgagaacgtcagtcagtcgaataccagtcgtataacgtc

SEQ ID NO: 134524 - DNA, 53 bp, Artificial
  Synthetic oligonucleotide
gcggagcctgattcgtcgatggatatcgccagacccacgcaccgaccgttccc

SEQ ID NO: 134525 - DNA, 53 bp, Artificial
  Synthetic oligonucleotide
cgacttcagcaggcgttaggccttcgtctggagcataccagaacggaggctcg

SEQ ID NO: 134526 - DNA, 53 bp, Artificial
  Synthetic oligonucleotide
cggccccagacgactgtaacagtggatacggccggacaatcactaccgtggct

SEQ ID NO: 134527 - DNA, 53 bp, Artificial
  Synthetic oligonucleotide
caccataccccgactcccccgacagagatgaatccaagcgcagcaagagtcgc

SEQ ID NO: 134528 - DNA, 53 bp, Artificial
  Synthetic oligonucleotide
acttgcatagctatttgacatgggttgcgatggtttccgagactattcctgac

SEQ ID NO: 134529 - DNA, 53 bp, Artificial
  Synthetic oligonucleotide
ccccgtgtaagcgttccaactactacaccgctgaaccgtcacgtacttttcac

SEQ ID NO: 134530 - DNA, 53 bp, Artificial
  Synthetic oligonucleotide
tactctcaggtaatacgagtgtggccaaaggtttccgcaagttatagaaccgc

SEQ ID NO: 134531 - DNA, 53 bp, Artificial
  Synthetic oligonucleotide
tccgtgtgactctcggcgcgaggaagccacagcgtgacggtgcttccgcgggg

SEQ ID NO: 134532 - DNA, 53 bp, Artificial
  Synthetic oligonucleotide
ctcattcgtcgggacggatgtgctcactgtcgccaaggacgccgttaaggcta

SEQ ID NO: 134533 - DNA, 53 bp, Artificial
  Synthetic oligonucleotide
tcgcctctactgaccgttcgctcctcctcgtgaatccgccttcggcttatggc

SEQ ID NO: 134534 - DNA, 56 bp, Artificial
  Synthetic oligonucleotide
cgccggtcgcggctcctggtcggtggggagccccttctgaatccggctcgggatca

SEQ ID NO: 134535 - DNA, 53 bp, Artificial
  Synthetic oligonucleotide
aatatctctcgcacgtacctctccagccgcgagagtgccacgctgacgattcc

SEQ ID NO: 134536 - DNA, 53 bp, Artificial
  Synthetic oligonucleotide
ttactcgttaccttcgcgtcggtctcgcgacagaactcgacatagacgttgta

SEQ ID NO: 134537 - DNA, 53 bp, Artificial
  Synthetic oligonucleotide
gataaactcgtcgggcgaccacccctacaaacccctacaatccacatacagac

SEQ ID NO: 134538 - DNA, 53 bp, Artificial
  Synthetic oligonucleotide
agactcaacctcgacagttgagaaacggttaacgaggagcatgcaaaagtcgg

SEQ ID NO: 134539 - DNA, 53 bp, Artificial
  Synthetic oligonucleotide
ccagacagtgtagatcagaatcccttcgacgaggaccgtaatcgggagagcga

SEQ ID NO: 134540 - DNA, 53 bp, Artificial
  Synthetic oligonucleotide
ccgcagagggacgcccaagcgggagtacataccggcaccggtttgactcatgg

SEQ ID NO: 134541 - DNA, 53 bp, Artificial
  Synthetic oligonucleotide
tgtcgaacgtcccatcgagagaaacgacgttgtgttgttcaccgtgacccgtc

SEQ ID NO: 134542 - DNA, 53 bp, Artificial
  Synthetic oligonucleotide
tgctgagactcggaacgagttacaatcgttgagagcattcgctgatgacctgt

SEQ ID NO: 134543 - DNA, 53 bp, Artificial
  Synthetic oligonucleotide
tccccaactctagtcgttcgcagagtgcgggatggctatcgaggtactcgagg

SEQ ID NO: 134544 - DNA, 53 bp, Artificial
  Synthetic oligonucleotide
gtctacactgcactcgtggtgatcgttctgagtgcagtgctctatcccctctc

SEQ ID NO: 134545 - DNA, 60 bp, Artificial
  Synthetic oligonucleotide
gattgcaccatgatacgcaataaccaagagaacgcccgactccggacgtactgatggcta

SEQ ID NO: 134546 - DNA, 53 bp, Artificial
  Synthetic oligonucleotide
gtgggtctaacccttaatggcgattccggagccaactacgattacactaccta

SEQ ID NO: 134547 - DNA, 53 bp, Artificial
  Synthetic oligonucleotide
ctctccggtatgaacttcacggatactgacctctccggtgtagatctgtacaa

SEQ ID NO: 134548 - DNA, 53 bp, Artificial
  Synthetic oligonucleotide
tgttcagcaagtttgtggacttatcattacgatgggacgcgctctgttgacgg

SEQ ID NO: 134549 - DNA, 53 bp, Artificial
  Synthetic oligonucleotide
ggagatgcgttcgcggatatgtgtcagtttctcgaatgcgatgtgcgtacagt

SEQ ID NO: 134550 - DNA, 53 bp, Artificial
  Synthetic oligonucleotide
agctgacagggcgagttaggagagtggtcggcatgatcgtatactacgtgagt

SEQ ID NO: 134551 - DNA, 53 bp, Artificial
  Synthetic oligonucleotide
ggcgttcaaacccgattccatcgcccaacagtagttggtagtgtccacaagaa

SEQ ID NO: 134552 - DNA, 53 bp, Artificial
  Synthetic oligonucleotide
ggggtgcggtagagttctcgtactgagttggaacgctcggagatactgtgtga

SEQ ID NO: 134553 - DNA, 53 bp, Artificial
  Synthetic oligonucleotide
actggacagctgcctcagcatatgatcgcttgaccgcaaagtacgacgaagtg

SEQ ID NO: 134554 - DNA, 53 bp, Artificial
  Synthetic oligonucleotide
ctcgtatttaaatgatcgattgcgggatggttccgtcgaacttgctctacatg

SEQ ID NO: 134555 - DNA, 53 bp, Artificial
  Synthetic oligonucleotide
ggggtgtgtacagacagtcagaggagtctatatataagacgcgcgtagccggt

SEQ ID NO: 134556 - DNA, 60 bp, Artificial
  Synthetic oligonucleotide
gcactggtcccttagtctcacttgcgcacgtattggagaacgaccgtgagggctatcgga

SEQ ID NO: 134557 - DNA, 53 bp, Artificial
  Synthetic oligonucleotide
cgctccgatgtgctccgtctgagggtggacatgcggacgtgagttgacaatcc

SEQ ID NO: 134558 - DNA, 53 bp, Artificial
  Synthetic oligonucleotide
gagagggcactgaatcggggaatcgagaccatacgcacgtatgtaagacggct

SEQ ID NO: 134559 - DNA, 53 bp, Artificial
  Synthetic oligonucleotide
ccgctcaccacaagcccggtttcgaggaaccgtcgtcggttgagcttcatagc

SEQ ID NO: 134560 - DNA, 53 bp, Artificial
  Synthetic oligonucleotide
tcgtcctcctgtgccagaacgaagataatcggcgagaggtttgccagttccgt

SEQ ID NO: 134561 - DNA, 53 bp, Artificial
  Synthetic oligonucleotide
ggatgcagcgattcgacatcccacgtcgagacgcacgagcagcggcctcgaac

SEQ ID NO: 134562 - DNA, 53 bp, Artificial
  Synthetic oligonucleotide
cgatgacagaacggagcagtctcacacggcaacagagggactacccgatacga

SEQ ID NO: 134563 - DNA, 53 bp, Artificial
  Synthetic oligonucleotide
cacggcaggatgagaacgtgactgaggtccaccctatcgcgctcacagacatt

SEQ ID NO: 134564 - DNA, 53 bp, Artificial
  Synthetic oligonucleotide
cgatagttcttcccgacgagcatactattttgcgacggaacagggcatagagc

SEQ ID NO: 134565 - DNA, 53 bp, Artificial
  Synthetic oligonucleotide
tcggtacgtcgaactgacgtcgtaccggatcgcgcgatctacgtccccgcttc

SEQ ID NO: 134566 - DNA, 53 bp, Artificial
  Synthetic oligonucleotide
cctccacatcacagtcgccgtattagtcctcctcgcaggctgtaacggcgcgt

SEQ ID NO: 134567 - DNA, 54 bp, Artificial
  Synthetic oligonucleotide
gacgaaaacgtcgtcgcgactccgaaatggacgcgcaaccggtccggacaggac

SEQ ID NO: 134568 - DNA, 53 bp, Artificial
  Synthetic oligonucleotide
gatgaatccaagcgcagcaagagtcgctagtcctccaatctgtcccccgggct

SEQ ID NO: 134569 - DNA, 53 bp, Artificial
  Synthetic oligonucleotide
tttccctgtcggacttccgtggctccggcccactggtcgcacagcgggaggct

SEQ ID NO: 134570 - DNA, 53 bp, Artificial
  Synthetic oligonucleotide
gagggagaatggtggacacacgatggctgggatcggttcaacgacgcccaaac

SEQ ID NO: 134571 - DNA, 52 bp, Artificial
  Synthetic oligonucleotide
ttgcgaccaccaccataccccgactcccccgacagagatgaatccaagcgca

SEQ ID NO: 134572 - DNA, 52 bp, Artificial
  Synthetic oligonucleotide
gctatcgcagaacagagaatcccgcacagtatgttggcaccggtcgatcgat

SEQ ID NO: 134573 - DNA, 52 bp, Artificial
  Synthetic oligonucleotide
tcacacaccacagcgtcaaacgccgtgtttgggactacaccgggatgtcccc

SEQ ID NO: 134574 - DNA, 52 bp, Artificial
  Synthetic oligonucleotide
tgacagccagtcacgaggcagcgcttacaattgccactcgtcagaacgcaga

SEQ ID NO: 134575 - DNA, 52 bp, Artificial
  Synthetic oligonucleotide
tctgagtggaaacagtccagcggcgcctgtctctccggcgttcacgagggga

SEQ ID NO: 134576 - DNA, 52 bp, Artificial
  Synthetic oligonucleotide
gcacggtctgtctatccgactcttgtcaagacctgcgtgcaagatacacagc

SEQ ID NO: 134577 - DNA, 52 bp, Artificial
  Synthetic oligonucleotide
gtaccgcgtgtgcctaatcaccgaaacgtgcgactgtcccagcgacacgtat

SEQ ID NO: 134578 - DNA, 55 bp, Artificial
  Synthetic oligonucleotide
gaatttcgtcgagtaactcctgtttcccttccgattttacaccctgatgatcgaa

SEQ ID NO: 134579 - DNA, 52 bp, Artificial
  Synthetic oligonucleotide
ttcccgcagttgagtgttcaccattgcgaggatgatccgaacgagttatata

SEQ ID NO: 134580 - DNA, 52 bp, Artificial
  Synthetic oligonucleotide
ggagctcccagagtaacccaccatttgtctctgagcgattctctggtgcgga

SEQ ID NO: 134581 - DNA, 52 bp, Artificial
  Synthetic oligonucleotide
tagccgtactgcccaagatggtccgcacgaagcgcatcaaccgttatgagga

SEQ ID NO: 134582 - DNA, 52 bp, Artificial
  Synthetic oligonucleotide
gctctgatgcaacgctgtacgctctcgacgccgctacgggcgacatactgtg

SEQ ID NO: 134583 - DNA, 52 bp, Artificial
  Synthetic oligonucleotide
ttgtgtcagcatcgccggctctcgagtacagggagagtggtgcgaccgatga

SEQ ID NO: 134584 - DNA, 52 bp, Artificial
  Synthetic oligonucleotide
ggagcctaaccaggtcgagacagaccggttgcggcaggtcgtagagactgcc

SEQ ID NO: 134585 - DNA, 52 bp, Artificial
  Synthetic oligonucleotide
tagcgtgtacctccgcacatggtggtatcacgtctctgagagacctcacccc

SEQ ID NO: 134586 - DNA, 52 bp, Artificial
  Synthetic oligonucleotide
gagattccgcgccccaaacgcatcggtataggtagcttcgtctccggacact

SEQ ID NO: 134587 - DNA, 52 bp, Artificial
  Synthetic oligonucleotide
gacgactcgagccgtctgtatgaacgagtcggacgatactatcgagaccgaa

SEQ ID NO: 134588 - DNA, 52 bp, Artificial
  Synthetic oligonucleotide
ggtagcacgcgaagtggccgttgtacgtcgactggatagccgccgcgtaact

SEQ ID NO: 134589 - DNA, 56 bp, Artificial
  Synthetic oligonucleotide
aggctattcgtcgagggcgctgctgaagtcgggtgtttcacccggtgcgtaatccc

SEQ ID NO: 134590 - DNA, 57 bp, Artificial
  Synthetic oligonucleotide
gaatgtctcctatacgaaggtcagggtagggttcaaccggcagttgcttgacgctct

SEQ ID NO: 134591 - DNA, 52 bp, Artificial
  Synthetic oligonucleotide
ttacgtttaccgccaccgcgataagtcggagtatccccttgagttcgtcaaa

SEQ ID NO: 134592 - DNA, 52 bp, Artificial
  Synthetic oligonucleotide
tgacgagagcgggtgtaagtgagtcccgtacagttcctgatacacgttgttt

SEQ ID NO: 134593 - DNA, 52 bp, Artificial
  Synthetic oligonucleotide
gcccccgggagcagtacggggtgtgcgtctgctacgtagtgccacgacaact

SEQ ID NO: 134594 - DNA, 52 bp, Artificial
  Synthetic oligonucleotide
gttcggagaaaccgccggacgttgatccccgtgtacgtatcgagcagcgtcc

SEQ ID NO: 134595 - DNA, 52 bp, Artificial
  Synthetic oligonucleotide
tagtacgccgtcgccaagatggtcacgagcgatgtgggggacagacgcgcag

SEQ ID NO: 134596 - DNA, 52 bp, Artificial
  Synthetic oligonucleotide
gagtcgaagtggggactctctatcgaagtctccgaggagtcaccaacggcgg

SEQ ID NO: 134597 - DNA, 52 bp, Artificial
  Synthetic oligonucleotide
tggagacgtgcctctgacagagtgtagcgtttcgaataccgcgctgactaca

SEQ ID NO: 134598 - DNA, 52 bp, Artificial
  Synthetic oligonucleotide
gggccgtcaattcggcccaattccggtgttggctgtctacaaatcagcgagg

SEQ ID NO: 134599 - DNA, 52 bp, Artificial
  Synthetic oligonucleotide
tccactcctgaatcgtccgttggtactgacatcgctgtcacctggtgatact

SEQ ID NO: 134600 - DNA, 52 bp, Artificial
  Synthetic oligonucleotide
taacggatcgtaggcacgaaatccatcggtgtagacagtcagtggctccttc

SEQ ID NO: 134601 - DNA, 58 bp, Artificial
  Synthetic oligonucleotide
gaatggggaattacagtcggcagttcttcgctagatccgagactggccctcgagtttc

SEQ ID NO: 134602 - DNA, 52 bp, Artificial
  Synthetic oligonucleotide
gcggtatgacgactgtcccgagcgagcgaggaatccccgtctcggaacggag

SEQ ID NO: 134603 - DNA, 52 bp, Artificial
  Synthetic oligonucleotide
gttgtttcattcgtaactggtcaccgggtaactcgtgaaactctcgcttatt

SEQ ID NO: 134604 - DNA, 52 bp, Artificial
  Synthetic oligonucleotide
gagttctcggttcgacgtccgctgtttcagccggacagctagtagtcggcct

SEQ ID NO: 134605 - DNA, 52 bp, Artificial
  Synthetic oligonucleotide
tgttcagcccctgtctcgcgctgggtatcatgggacgctggtacatcgtcgt

SEQ ID NO: 134606 - DNA, 52 bp, Artificial
  Synthetic oligonucleotide
tcgagagactcacggcaaattctcgaaggtaccgaccacgaaacgacggtgt

SEQ ID NO: 134607 - DNA, 52 bp, Artificial
  Synthetic oligonucleotide
gagatagcgcaagtcagccgtacatagggcccgtgaaaagacaagcacgatg

SEQ ID NO: 134608 - DNA, 52 bp, Artificial
  Synthetic oligonucleotide
ttacgcaagacgcgctggattcgattcgtcgtgttatcccgccgggtcacct

SEQ ID NO: 134609 - DNA, 52 bp, Artificial
  Synthetic oligonucleotide
gacgtacggtactcggtacgtcctcgtcacgtcgtgggcggagacggactac

SEQ ID NO: 134610 - DNA, 52 bp, Artificial
  Synthetic oligonucleotide
ttggaaactggccaaggaatgtgcgttgagtacgcaactaggattcagtgac

SEQ ID NO: 134611 - DNA, 52 bp, Artificial
  Synthetic oligonucleotide
gcgttgcacgagctatacatcgagacgaaagacttgtcgccggacgctcgac

SEQ ID NO: 134612 - DNA, 60 bp, Artificial
  Synthetic oligonucleotide
gaagacctgctatcgtcgtgggaggccgtcaggcgcgcgctgtaccgagttctggacggc

SEQ ID NO: 134613 - DNA, 52 bp, Artificial
  Synthetic oligonucleotide
tacgtcggtagctctgatgcaacgctgtacgctctcgacgccgctacgggcg

SEQ ID NO: 134614 - DNA, 52 bp, Artificial
  Synthetic oligonucleotide
gctgtattctaagcttgagagtaagcgggtgaacccgttaatcgcgcgtttt

SEQ ID NO: 134615 - DNA, 52 bp, Artificial
  Synthetic oligonucleotide
tcagtccccgacgccgagacatgttcgtatcgctttgacccgtcaaacgaga

SEQ ID NO: 134616 - DNA, 52 bp, Artificial
  Synthetic oligonucleotide
tgaaaaccgtcgagacggactgaaaacccagaacgggattgaaactcgctag

SEQ ID NO: 134617 - DNA, 52 bp, Artificial
  Synthetic oligonucleotide
tcaagtaaccacagtcgccagcgcttttgtagtcacggcacgtaccgcgaaa

SEQ ID NO: 134618 - DNA, 52 bp, Artificial
  Synthetic oligonucleotide
tccggtgctcaggacaacctgctcccacgcaaggaggcccagagcatgccaa

SEQ ID NO: 134619 - DNA, 52 bp, Artificial
  Synthetic oligonucleotide
gggaccgtgtacgtcggtagctctgatgcaacgctgtacgctctcgacgccg

SEQ ID NO: 134620 - DNA, 52 bp, Artificial
  Synthetic oligonucleotide
tcgtgttgcgggaagattcgggatagcaaccgtgtggagcgtgggttgtacg

SEQ ID NO: 134621 - DNA, 52 bp, Artificial
  Synthetic oligonucleotide
atacgtcgatagcgtcgattcgctttgcccggtgaaagtctcgtagatgccg

SEQ ID NO: 134622 - DNA, 52 bp, Artificial
  Synthetic oligonucleotide
atactatgacaaacgcgagaatcggtgacgggagttacgtagcaccggaggc

SEQ ID NO: 134623 - DNA, 60 bp, Artificial
  Synthetic oligonucleotide
gaacgcctggactcgtgcaacgcaatgagtcacagtgcaatgagtgtgtggcttcggtcg

SEQ ID NO: 134624 - DNA, 52 bp, Artificial
  Synthetic oligonucleotide
atcgcgtccgccacgataccgcctacgaattatccgagtgggaagtcgaaag

SEQ ID NO: 134625 - DNA, 52 bp, Artificial
  Synthetic oligonucleotide
atcggtcggaggagtactagtctgaaaggacgaatccctgtccgtttccgat

SEQ ID NO: 134626 - DNA, 52 bp, Artificial
  Synthetic oligonucleotide
atgggatccatacgggtagatgggttgacgaaatcgtacggggacgttcagg

SEQ ID NO: 134627 - DNA, 52 bp, Artificial
  Synthetic oligonucleotide
attggagaacgaccgtgagggctatcggaaactcgtgcaaaacgacagcaac

SEQ ID NO: 134628 - DNA, 52 bp, Artificial
  Synthetic oligonucleotide
cacgactgtcgccatcgctgacacggagagcatacctccctgcgttggtcgc

SEQ ID NO: 134629 - DNA, 52 bp, Artificial
  Synthetic oligonucleotide
cactttaattcgaacatcagatcttggaacaccgattcgagctagttgtgtt

SEQ ID NO: 134630 - DNA, 52 bp, Artificial
  Synthetic oligonucleotide
cagaacgaaacgtggccgagcccaagtcaccgactacgagtaagacgcgaaa

SEQ ID NO: 134631 - DNA, 52 bp, Artificial
  Synthetic oligonucleotide
caggccaccagtatcgcagcgggaatcagtcccgcagtaacgatgtcgaggt

SEQ ID NO: 134632 - DNA, 52 bp, Artificial
  Synthetic oligonucleotide
catcggaagtgtacgcctctcgcaaagagcagcggtatcccatctcatcgta

SEQ ID NO: 134633 - DNA, 52 bp, Artificial
  Synthetic oligonucleotide
catgtctcacgtggccgttcgagtagccgatcccggtcgctatttcgtgtac

SEQ ID NO: 134634 - DNA, 58 bp, Artificial
  Synthetic oligonucleotide
gaacagtgctgaggaacccttgctcgttcggccgtcggaattctcacccgactatcgc

SEQ ID NO: 134635 - DNA, 52 bp, Artificial
  Synthetic oligonucleotide
ccaagcgtttacgagacgaggaggggtcagtcgtggtcgccagtcgagttcc

SEQ ID NO: 134636 - DNA, 52 bp, Artificial
  Synthetic oligonucleotide
ccaccgagagcgggcgttcgttcgagaggtcactcgtggttccacacggttc

SEQ ID NO: 134637 - DNA, 52 bp, Artificial
  Synthetic oligonucleotide
ccatcgctgacacggagagcatacctccctgcgttggtcgcattgggaacgc

SEQ ID NO: 134638 - DNA, 52 bp, Artificial
  Synthetic oligonucleotide
cccggggtggcaaaggctacgcaaccaaggtaggctaaccgcacgacgtgcc

SEQ ID NO: 134639 - DNA, 52 bp, Artificial
  Synthetic oligonucleotide
ccctctgtcagaagagtgcccaaacctatgtactttcttcgccagggtccga

SEQ ID NO: 134640 - DNA, 52 bp, Artificial
  Synthetic oligonucleotide
cccttcgagtgaacgactcgacggactccatcgaacttccctttacggagta

SEQ ID NO: 134641 - DNA, 52 bp, Artificial
  Synthetic oligonucleotide
cctgggtcgcgcttcgaacggcgattcacgctatgtacttgggaccggacgg

SEQ ID NO: 134642 - DNA, 52 bp, Artificial
  Synthetic oligonucleotide
cgagcgatgtgggggacagacgcgcagtcaggtgtgcgctcccagtaggagt

SEQ ID NO: 134643 - DNA, 52 bp, Artificial
  Synthetic oligonucleotide
cgctccgcaagtggttgttctcgatttacgcgttcttgcggttcaacacgag

SEQ ID NO: 134644 - DNA, 52 bp, Artificial
  Synthetic oligonucleotide
cggagctggtgtaggtacctgtacatcgtcacaccaggtgggagtagattcg

SEQ ID NO: 134645 - DNA, 57 bp, Artificial
  Synthetic oligonucleotide
gaaagtacgtataagcgacgattcgagtcctggaccagcgcaattgaggaggcgggt

SEQ ID NO: 134646 - DNA, 52 bp, Artificial
  Synthetic oligonucleotide
cggccgactcagaccagttgtgcgcgaacgcgttgttgtacgcgtcactcga

SEQ ID NO: 134647 - DNA, 52 bp, Artificial
  Synthetic oligonucleotide
cggcgtaaccgcttatcggcatcactccagtggggcaatgtgcagatcgtaa

SEQ ID NO: 134648 - DNA, 52 bp, Artificial
  Synthetic oligonucleotide
cgtactcgataaagaaacccggtaaagcggacattttgtattcctctcgatt

SEQ ID NO: 134649 - DNA, 52 bp, Artificial
  Synthetic oligonucleotide
aaaaacacgagaactcgcgtgaatcaaaggatccagacctcgtgagaggtcc

SEQ ID NO: 134650 - DNA, 52 bp, Artificial
  Synthetic oligonucleotide
aaaacacggctccgttcggattggtcgagtacccggatgcgatacagcgcga

SEQ ID NO: 134651 - DNA, 50 bp, Artificial
  Synthetic oligonucleotide
aaaagtagccgacagaacggggcgataaccgggacgagcgttcccgaacg

SEQ ID NO: 134652 - DNA, 52 bp, Artificial
  Synthetic oligonucleotide
aaaggccagtcccgacacaagaccgaacccgagagtgcagggacgccaacgc

SEQ ID NO: 134653 - DNA, 52 bp, Artificial
  Synthetic oligonucleotide
aacagggtgtatctcgcacattctcatccactagtataactgctgctgacag

SEQ ID NO: 134654 - DNA, 52 bp, Artificial
  Synthetic oligonucleotide
aacgcgagagcactggtagcggttcataggcgtggtgagacaacccacgggg

SEQ ID NO: 134655 - DNA, 52 bp, Artificial
  Synthetic oligonucleotide
aagtccctcgggcgtgacatccggtgtttccgttcgatcagacgtgaacact

SEQ ID NO: 134656 - DNA, 57 bp, Artificial
  Synthetic oligonucleotide
ctttgagtaaccgtgcaggcccggagaacgacggccttagcgcctcacacgtgccga

SEQ ID NO: 134657 - DNA, 52 bp, Artificial
  Synthetic oligonucleotide
acaaaaggtccgtcacgaaaagtacggaattggcgtggtagaacgctccaac

SEQ ID NO: 134658 - DNA, 52 bp, Artificial
  Synthetic oligonucleotide
acagctgacgaacgcacagcacaggagcagcccgctccgtccgaacggaatt

SEQ ID NO: 134659 - DNA, 52 bp, Artificial
  Synthetic oligonucleotide
acccgcgatctgggacacgtacgaagcagttggcttgaccacgattcagggc

SEQ ID NO: 134660 - DNA, 52 bp, Artificial
  Synthetic oligonucleotide
acccgctcatcgcagggcccatacaaatgtctcgggccgcaactgtgtgcca

SEQ ID NO: 134661 - DNA, 52 bp, Artificial
  Synthetic oligonucleotide
accgacctctccgaatcggacgtatacgacattgaggaaagtgagtatgtgc

SEQ ID NO: 134662 - DNA, 52 bp, Artificial
  Synthetic oligonucleotide
accggaactaccgggtcatcggttactcggtcgctccccatgaccgggaatc

SEQ ID NO: 134663 - DNA, 52 bp, Artificial
  Synthetic oligonucleotide
accggtagatctgcgctaaatccgccggaaagaactcctctcgcgacagatt

SEQ ID NO: 134664 - DNA, 52 bp, Artificial
  Synthetic oligonucleotide
acgatccgcccgatatctgaggtgcaatggcagtccaacagatcggtctgag

SEQ ID NO: 134665 - DNA, 52 bp, Artificial
  Synthetic oligonucleotide
acgcggcgaggaacttgtggcagggttccgtgtcctacccttctgcgtccgt

SEQ ID NO: 134666 - DNA, 52 bp, Artificial
  Synthetic oligonucleotide
actccctttgggttacgaatagaacactaagacgaggcgattcatatggagc

SEQ ID NO: 134667 - DNA, 60 bp, Artificial
  Synthetic oligonucleotide
cttgcgtcaacttgcgcaaggttgcaccgtactgtgtcaacttgcacggtactgtgtaag

SEQ ID NO: 134668 - DNA, 52 bp, Artificial
  Synthetic oligonucleotide
actgaccgatgagtgctccgtacgtgggaaacttaactcgattatagaataa

SEQ ID NO: 134669 - DNA, 52 bp, Artificial
  Synthetic oligonucleotide
acttgagtaactcggcaccgtcggcattactcaagttgcccgtgcgtaccga

SEQ ID NO: 134670 - DNA, 52 bp, Artificial
  Synthetic oligonucleotide
agactgtctcaccgagagggccgatggagcactgttcagggcacgggtgtct

SEQ ID NO: 134671 - DNA, 52 bp, Artificial
  Synthetic oligonucleotide
aggacgacagctgactgtcccgtccgactagctgtctcggtcggtagatatg

SEQ ID NO: 134672 - DNA, 52 bp, Artificial
  Synthetic oligonucleotide
aggcgtgccctgcatccgacacggctctcagaatagccctctgagctaggag

SEQ ID NO: 134673 - DNA, 52 bp, Artificial
  Synthetic oligonucleotide
agggtcgattctctatccggactcgttacgtttgattcgtatctctctaatt

SEQ ID NO: 134674 - DNA, 52 bp, Artificial
  Synthetic oligonucleotide
agtagacgatcaccggtaagcaactacaataaaccgtatgagacggtctgtg

SEQ ID NO: 134675 - DNA, 52 bp, Artificial
  Synthetic oligonucleotide
agtatccgtgctcgttccgaacgaactcgtgatcagtcgggtcacacgcccg

SEQ ID NO: 134676 - DNA, 52 bp, Artificial
  Synthetic oligonucleotide
agtatgttacaggattcaacggatgatgcttcagtgactcccgagctatctt

SEQ ID NO: 134677 - DNA, 52 bp, Artificial
  Synthetic oligonucleotide
gaaggaggaacgtctcctcgaaccccagacggaacctcttcgcggtctggag

SEQ ID NO: 134678 - DNA, 60 bp, Artificial
  Synthetic oligonucleotide
cttgcggattacttgctgtgaaagttggcatagagctcactcaaaatcactacgtgtcag

SEQ ID NO: 134679 - DNA, 52 bp, Artificial
  Synthetic oligonucleotide
cgtcgcaactacccggttgaagaacccggtggatgatgtgtactcaccaccg

SEQ ID NO: 134680 - DNA, 52 bp, Artificial
  Synthetic oligonucleotide
cgtcccgagtaaattgcatagcagtcgttggctactcgtagcaccctattaa

SEQ ID NO: 134681 - DNA, 52 bp, Artificial
  Synthetic oligonucleotide
ctatcgcttgatcctactgatgtcagctgtggggtcgatatcgaatgggtcc

SEQ ID NO: 134682 - DNA, 51 bp, Artificial
  Synthetic oligonucleotide
cacatgacgcacattcctttgtcgtgtcttccgggtcaacctccacgaagt

SEQ ID NO: 134683 - DNA, 51 bp, Artificial
  Synthetic oligonucleotide
tcggaagtttaccgacgacgcgggtgacatcactggaagtgagtgggtata

SEQ ID NO: 134684 - DNA, 51 bp, Artificial
  Synthetic oligonucleotide
ccatcaggggatcgtccgccgaacccgtgtttcagacggacccttgggcgg

SEQ ID NO: 134685 - DNA, 51 bp, Artificial
  Synthetic oligonucleotide
acatcgaccctgagcaggggtccgcgaccgtgtagcatactctcccatccg

SEQ ID NO: 134686 - DNA, 51 bp, Artificial
  Synthetic oligonucleotide
cgtgagagcggtcaatacccagtaaatcaaggactgcgacgacctctcgaa

SEQ ID NO: 134687 - DNA, 51 bp, Artificial
  Synthetic oligonucleotide
ggactagtttaattggcgcgacgtgatggacggacagatttcgaccgtgga

SEQ ID NO: 134688 - DNA, 51 bp, Artificial
  Synthetic oligonucleotide
ccaagagttgacgacgtgttctttcagtcataagtgaacaccatcccgaag

SEQ ID NO: 134689 - DNA, 59 bp, Artificial
  Synthetic oligonucleotide
cttgagccgatttctcagtaacctcgcgtctgtgtataacatattatgtggttagtggt

SEQ ID NO: 134690 - DNA, 51 bp, Artificial
  Synthetic oligonucleotide
ggagctcaggaaccagtacgccggtcgcgtgccgctaggagtgcacgagat

SEQ ID NO: 134691 - DNA, 51 bp, Artificial
  Synthetic oligonucleotide
accagccctcgtcaagtccggtcccacgtagcaacaagacagccgtctcgt

SEQ ID NO: 134692 - DNA, 51 bp, Artificial
  Synthetic oligonucleotide
cacgctacgctcgtgactacatggcggagtgcatggacgcttcaaccccac

SEQ ID NO: 134693 - DNA, 51 bp, Artificial
  Synthetic oligonucleotide
tccgtcgatgcgggaactcacgcgaatccccgtgttcaacagggagtgcgc

SEQ ID NO: 134694 - DNA, 51 bp, Artificial
  Synthetic oligonucleotide
cagtcaccgatcgtcgtcgcggactgtcgccgacccaacgtgaagtctttt

SEQ ID NO: 134695 - DNA, 51 bp, Artificial
  Synthetic oligonucleotide
tccgggtcccgatacaggccgtgtcaatccctgatgcgttgagtcttcccg

SEQ ID NO: 134696 - DNA, 49 bp, Artificial
  Synthetic oligonucleotide
cgtggggtcccaaaaggtccggtcctttcacgacggtaccccgggcata

SEQ ID NO: 134697 - DNA, 51 bp, Artificial
  Synthetic oligonucleotide
tccgcatcgtgcacgtacagatacatctccggcgtgtcgctttcttctgtc

SEQ ID NO: 134698 - DNA, 51 bp, Artificial
  Synthetic oligonucleotide
tccgagacagagactttcgtgacgcattgaagccaggaacgatgctcacac

SEQ ID NO: 134699 - DNA, 51 bp, Artificial
  Synthetic oligonucleotide
accccgcttcgggaccgagaggagatttaccgggagcgagagcccgcgaca

SEQ ID NO: 134700 - DNA, 56 bp, Artificial
  Synthetic oligonucleotide
ggttgtacacaccccctttaggggggtgtgtacagacagtcagaggagtctatata

SEQ ID NO: 134701 - DNA, 59 bp, Artificial
  Synthetic oligonucleotide
gacggtcgggtatgagtaaatagcagagagagtatactatagttagtcacgcggtaggc

SEQ ID NO: 134702 - DNA, 51 bp, Artificial
  Synthetic oligonucleotide
cgtgtttcagacggacccttgggcggttgaagtccgacgaacggcccgatt

SEQ ID NO: 134703 - DNA, 51 bp, Artificial
  Synthetic oligonucleotide
cttccaacacggtcaacaacccgttaaatttggataggttaccagtttcga

SEQ ID NO: 134704 - DNA, 51 bp, Artificial
  Synthetic oligonucleotide
tccccgggctgggatggtgtgcaatgttcgagcgttgttgagtgatgatgc

SEQ ID NO: 134705 - DNA, 51 bp, Artificial
  Synthetic oligonucleotide
cacgtggaggcctgttagtgttggtgtcctacaataccctcacgtgaccta

SEQ ID NO: 134706 - DNA, 51 bp, Artificial
  Synthetic oligonucleotide
cacggacacgttgggttcgggactgggacatgcgcgagtagtaggactcga

SEQ ID NO: 134707 - DNA, 51 bp, Artificial
  Synthetic oligonucleotide
tccatcgcttccggtacatacgttgccggggtcaatcaatcagtacgtatc

SEQ ID NO: 134708 - DNA, 51 bp, Artificial
  Synthetic oligonucleotide
tggatctactcgatcggtcgatttccccattacgttctcccagtgggactt

SEQ ID NO: 134709 - DNA, 51 bp, Artificial
  Synthetic oligonucleotide
gcctgcggtccttgatgggaccgtgtacgtcggtagctctgatgcaacgct

SEQ ID NO: 134710 - DNA, 51 bp, Artificial
  Synthetic oligonucleotide
aagtaggtatgaggatgtctcgttcgccgatgtctcctgtccgacgggagc

SEQ ID NO: 134711 - DNA, 51 bp, Artificial
  Synthetic oligonucleotide
aagtcgacgagtcgggaggaagccgtcaaagcggggactaccctcgcgttt

SEQ ID NO: 134712 - DNA, 56 bp, Artificial
  Synthetic oligonucleotide
ctgcgttaagacctgctgaaacgccggttccgagagtaacgccgcacaaagacgga

SEQ ID NO: 134713 - DNA, 51 bp, Artificial
  Synthetic oligonucleotide
gcgcactcctcgttgtacgttgccatcttcttaccgctttgggtagcgagc

SEQ ID NO: 134714 - DNA, 51 bp, Artificial
  Synthetic oligonucleotide
ccggtcaacggacccggacagtgacgacgccaacggaggcgatcacgaatg

SEQ ID NO: 134715 - DNA, 51 bp, Artificial
  Synthetic oligonucleotide
ccgggaacacccgtcgacggtggcttccgagccgggtcagaactatacgga

SEQ ID NO: 134716 - DNA, 51 bp, Artificial
  Synthetic oligonucleotide
ccggaggcctttccgtgcatcgtcgtttctgtcgcgaaagagttcggcccc

SEQ ID NO: 134717 - DNA, 51 bp, Artificial
  Synthetic oligonucleotide
aatagatagcgtcccgaagaccaccgggaggataccatgggcgggtgtcgc

SEQ ID NO: 134718 - DNA, 51 bp, Artificial
  Synthetic oligonucleotide
tgagttccaacttaattgcgtcacgaacggagcccgctaaaaggtagtctc

SEQ ID NO: 134719 - DNA, 51 bp, Artificial
  Synthetic oligonucleotide
aatcccccagcgacgatcaacggcaagtgctacgctccgcatccatctcgg

SEQ ID NO: 134720 - DNA, 51 bp, Artificial
  Synthetic oligonucleotide
aatccgaccctccgtcattggtgttgtgacgtccctaggtgggttgtggcc

SEQ ID NO: 134721 - DNA, 51 bp, Artificial
  Synthetic oligonucleotide
gcggcgggtactaacaccgagcctgctgaaggagggtgtagtaactcagac

SEQ ID NO: 134722 - DNA, 51 bp, Artificial
  Synthetic oligonucleotide
gcggggccccgcgccagtttatgttgccgctagatgcaaaaccgaggcata

SEQ ID NO: 134723 - DNA, 60 bp, Artificial
  Synthetic oligonucleotide
ctgatacgtgtcgctgggacagtcgcacgtctcggtgattaggcacacgcggtacactga

SEQ ID NO: 134724 - DNA, 51 bp, Artificial
  Synthetic oligonucleotide
aatgttgggttgacaggtcgtccctcccgtccccggtctccgacccacaac

SEQ ID NO: 134725 - DNA, 51 bp, Artificial
  Synthetic oligonucleotide
acaccactacgctcgtcggatgcactgagtctacacctcgtgccgccctca

SEQ ID NO: 134726 - DNA, 51 bp, Artificial
  Synthetic oligonucleotide
tcgttatgaggggtggattcgatacccaactatggatcgctcgcatccacc

SEQ ID NO: 134727 - DNA, 51 bp, Artificial
  Synthetic oligonucleotide
gctcccgagctggattggactcggtggccgggccgtgtttgcttagatccc

SEQ ID NO: 134728 - DNA, 51 bp, Artificial
  Synthetic oligonucleotide
gctctattcagtccgtgctaagtctggcgacctccagtggtcctttgactt

SEQ ID NO: 134729 - DNA, 51 bp, Artificial
  Synthetic oligonucleotide
tcgtactctgtggatcgagcgtgagtacgatggagtcagagatcctgggac

SEQ ID NO: 134730 - DNA, 51 bp, Artificial
  Synthetic oligonucleotide
tcggttcaactcaagcttcaaacccacgaggggttcggctgaaaggcggcc

SEQ ID NO: 134731 - DNA, 51 bp, Artificial
  Synthetic oligonucleotide
ccccgtaacgaggatgacaaagtacgctatcccgaagggaaaagccaaccc

SEQ ID NO: 134732 - DNA, 51 bp, Artificial
  Synthetic oligonucleotide
gctggttcggtgagtgccaccggacccgacatgggtgcatttgcgctcgct

SEQ ID NO: 134733 - DNA, 51 bp, Artificial
  Synthetic oligonucleotide
ccccgctcgggtgcggggacaattagcctcgttggttcgcccgtcgaatca

SEQ ID NO: 134734 - DNA, 60 bp, Artificial
  Synthetic oligonucleotide
ctcttcgcccttcgtatcgaggcagactcggcggtaggtggcactcattgctctgcttca

SEQ ID NO: 134735 - DNA, 51 bp, Artificial
  Synthetic oligonucleotide
tcgggaagacaggccactcgtcagtcggcggctcgaggtagtcataccatc

SEQ ID NO: 134736 - DNA, 51 bp, Artificial
  Synthetic oligonucleotide
acagtcctactagatggactgaaacagtcttagacgtgtcctcccctgtca

SEQ ID NO: 134737 - DNA, 51 bp, Artificial
  Synthetic oligonucleotide
ctcgacgtggcattcagttccgtttgagtgacatttacagtacgaattcac

SEQ ID NO: 134738 - DNA, 51 bp, Artificial
  Synthetic oligonucleotide
gtaaagaacgccgatagccctcgctcgattggtacgacaaacgtcagcgat

SEQ ID NO: 134739 - DNA, 51 bp, Artificial
  Synthetic oligonucleotide
taagaggcccatcggtcaccttctactcttcgtcggtaccggcctttcgga

SEQ ID NO: 134740 - DNA, 51 bp, Artificial
  Synthetic oligonucleotide
aggagatactcggaagtgggtactttgcatcatacccggcactgccttctg

SEQ ID NO: 134741 - DNA, 51 bp, Artificial
  Synthetic oligonucleotide
taaccgaacacggatgctctggagaggcagcacaagctgtgcttgaccgta

SEQ ID NO: 134742 - DNA, 51 bp, Artificial
  Synthetic oligonucleotide
agcggggcgaaggaccgccatcggccaaccatttacttccgatcggcgcaa

SEQ ID NO: 134743 - DNA, 51 bp, Artificial
  Synthetic oligonucleotide
agcgagcgccgtagcgcgcctcgctgcctacagagagaacgccgagggatg

SEQ ID NO: 134744 - DNA, 51 bp, Artificial
  Synthetic oligonucleotide
gtatatccccataacgtatacagatattctcgttggatagccgttacatac

SEQ ID NO: 134745 - DNA, 60 bp, Artificial
  Synthetic oligonucleotide
ctctgcgaccaactgtcggctcatgaggagctcgtgtcgagtattcggctttctccgcgt

SEQ ID NO: 134746 - DNA, 51 bp, Artificial
  Synthetic oligonucleotide
gtatctcctgacatgtacttgagagtcggtgccgtcttcgattctatttcc

SEQ ID NO: 134747 - DNA, 51 bp, Artificial
  Synthetic oligonucleotide
agccgcacgaaacgttaccgccgctgctcgaggggacgaaaccaccgctcg

SEQ ID NO: 134748 - DNA, 51 bp, Artificial
  Synthetic oligonucleotide
gttcaacgtgcggtgctgttgcgtacggcagtcgctttgggggttcgcgcc

SEQ ID NO: 134749 - DNA, 51 bp, Artificial
  Synthetic oligonucleotide
agcacgcccagagcgtaaccgcggaggacatgttctaacgatggcacaagc

SEQ ID NO: 134750 - DNA, 51 bp, Artificial
  Synthetic oligonucleotide
gtccggccgtgtccaatagagtggcactgtcccgaaccggtcagtacaaag

SEQ ID NO: 134751 - DNA, 51 bp, Artificial
  Synthetic oligonucleotide
agatgggacaccacgtttcgagtgtaacgcggggagaccacccctcgtgtc

SEQ ID NO: 134752 - DNA, 51 bp, Artificial
  Synthetic oligonucleotide
gtcgaggtcccattccagatgggcgaagtagtttgtcgagtagttccagtc

SEQ ID NO: 134753 - DNA, 51 bp, Artificial
  Synthetic oligonucleotide
agatcggagcgagtacgaagctgactgcatctttcgccgacctgtcttcgt

SEQ ID NO: 134754 - DNA, 51 bp, Artificial
  Synthetic oligonucleotide
agagtgttcggtcataggtagcgggagtgcgttggacgtccgctcacagtt

SEQ ID NO: 134755 - DNA, 51 bp, Artificial
  Synthetic oligonucleotide
ctcttggccgagagtcaccagcggctatcctcgaaggtagatggtcttggg

SEQ ID NO: 134756 - DNA, 59 bp, Artificial
  Synthetic oligonucleotide
ctctccactacacgaagggaagcggactcacgaacgcgagtctcgccagtctgcgtggg

SEQ ID NO: 134757 - DNA, 51 bp, Artificial
  Synthetic oligonucleotide
gtggcataccgtcggcttcccatctgctactgacgctctcaaatgggccga

SEQ ID NO: 134758 - DNA, 51 bp, Artificial
  Synthetic oligonucleotide
agacatcggagaaaccgccctcatcacgggctgtgccctcaaggacggttc

SEQ ID NO: 134759 - DNA, 51 bp, Artificial
  Synthetic oligonucleotide
gacgtgaaggccgtgttcgagtcagaggacggccagaccgcccgaggatcg

SEQ ID NO: 134760 - DNA, 51 bp, Artificial
  Synthetic oligonucleotide
actggacaagtccggtaatctcaatttgtcgtcggggcaatatctcagcgg

SEQ ID NO: 134761 - DNA, 51 bp, Artificial
  Synthetic oligonucleotide
gtgacgactggatagaacgaaccctcctttggactaccctcctcgagatcc

SEQ ID NO: 134762 - DNA, 51 bp, Artificial
  Synthetic oligonucleotide
gacgtggagaatcccccagcgacgatcaacggcaagtgctacgctccgcat

SEQ ID NO: 134763 - DNA, 51 bp, Artificial
  Synthetic oligonucleotide
actggcccgctcgacggcctaacggtccttgacgcctcccgcgtactcgtc

SEQ ID NO: 134764 - DNA, 51 bp, Artificial
  Synthetic oligonucleotide
caaccccacaagggtccgtctgaaaccggctgactccggtgtgagcgtgca

SEQ ID NO: 134765 - DNA, 51 bp, Artificial
  Synthetic oligonucleotide
tcacgtcgcctgtgtactcgctcatggtgtgaatcggtccgttagatgcta

SEQ ID NO: 134766 - DNA, 51 bp, Artificial
  Synthetic oligonucleotide
attggactgtcgaaagacgtggtctttgagaacgcggaaccgacagggccg

SEQ ID NO: 134767 - DNA, 58 bp, Artificial
  Synthetic oligonucleotide
ctcgtgtagcaatatcctatttaaagaagtgcctcgggaatccctgattcgcgtgtcc

SEQ ID NO: 134768 - DNA, 51 bp, Artificial
  Synthetic oligonucleotide
accgctcgcgggtgttcgcttgggttcggtagttctgggtccgtcactcga

SEQ ID NO: 134769 - DNA, 51 bp, Artificial
  Synthetic oligonucleotide
tcacccctggctgtcacaagctcgcgaactagcaagcgactgcctcctcga

SEQ ID NO: 134770 - DNA, 51 bp, Artificial
  Synthetic oligonucleotide
attaccattatcgatgggtatatacgggatagtcataatgggtactgtgtg

SEQ ID NO: 134771 - DNA, 51 bp, Artificial
  Synthetic oligonucleotide
gggactcgagttgtgacggcgaagacgggagacccacaccggatttcagat

SEQ ID NO: 134772 - DNA, 51 bp, Artificial
  Synthetic oligonucleotide
accgggtcgcacacagtgtacgcgcttcagtaccacttcgtgactgtcacg

SEQ ID NO: 134773 - DNA, 51 bp, Artificial
  Synthetic oligonucleotide
tcaagagtccggacctcgcggaacgatacggggaccctacgttcacgtacg

SEQ ID NO: 134774 - DNA, 51 bp, Artificial
  Synthetic oligonucleotide
accggtgtctaacggcccgcttcgaattttcggataaccgtcgttagcatt

SEQ ID NO: 134775 - DNA, 51 bp, Artificial
  Synthetic oligonucleotide
acctcgctcagccccgtaagtagccggtcgagttctggcgtccgaagcgaa

SEQ ID NO: 134776 - DNA, 51 bp, Artificial
  Synthetic oligonucleotide
tatcggctttcccagcaattacttacgtgcgtacatctgtaacgttcgcaa

SEQ ID NO: 134777 - DNA, 51 bp, Artificial
  Synthetic oligonucleotide
acctggataagccgttaccgacggaaggtcacttctacgaacttcatccct

SEQ ID NO: 134778 - DNA, 56 bp, Artificial
  Synthetic oligonucleotide
ctcgggtaccatattcacgggccttgtcgttgaataactctcccttcttagagaga

SEQ ID NO: 134779 - DNA, 51 bp, Artificial
  Synthetic oligonucleotide
acgagcgagcgaagcggatccgtgtgtcccacaacgaggaccgctgtgatg

SEQ ID NO: 134780 - DNA, 51 bp, Artificial
  Synthetic oligonucleotide
atcacatagccctctctggggactctcctctctgtaaggggtttaacccta

SEQ ID NO: 134781 - DNA, 51 bp, Artificial
  Synthetic oligonucleotide
atcaaaggttccccacatagtctcgtgcccgaaacgaatccgatgactaaa

SEQ ID NO: 134782 - DNA, 51 bp, Artificial
  Synthetic oligonucleotide
ctcacgggcttgtagctgaggcaaggcaaatcgtcctcgaagagcgagagt

SEQ ID NO: 134783 - DNA, 51 bp, Artificial
  Synthetic oligonucleotide
agtgtcgttttctttcgtggtgggtgttccgcgaagggtcgcggaggattc

SEQ ID NO: 134784 - DNA, 51 bp, Artificial
  Synthetic oligonucleotide
acgcgctgattaatcggccgtacatcctcgacttgcaaccgaaccggagcg

SEQ ID NO: 134785 - DNA, 51 bp, Artificial
  Synthetic oligonucleotide
agtcccgccttcgtaaagtctgtgagtggacccgagacgggggtgccacgt

SEQ ID NO: 134786 - DNA, 51 bp, Artificial
  Synthetic oligonucleotide
aggtgttctggcctacttgtcgccctcgagtgtctcgcgaaagccctcagc

SEQ ID NO: 134787 - DNA, 51 bp, Artificial
  Synthetic oligonucleotide
tacggactcatttacgctcgtcgacaacgatacgagtgcctccggtgataa

SEQ ID NO: 134788 - DNA, 51 bp, Artificial
  Synthetic oligonucleotide
aggtaatctgtccggcacaggagacacactgcccctgtcggcacgcgtacg

SEQ ID NO: 134789 - DNA, 60 bp, Artificial
  Synthetic oligonucleotide
ctcgcagccggagctccacggctggaacaccgaggagaccgacatccgtctcgccgtcca

SEQ ID NO: 134790 - DNA, 51 bp, Artificial
  Synthetic oligonucleotide
ggtgcttcggagtctccgaccaactcctgatcgggcaactgctaaacgcgg

SEQ ID NO: 134791 - DNA, 51 bp, Artificial
  Synthetic oligonucleotide
gagcctcgattcactctccggacgcgtaatggttgcggcttgacacacggg

SEQ ID NO: 134792 - DNA, 51 bp, Artificial
  Synthetic oligonucleotide
aagctcccgtaccaaacccctgataggcgtctcgtctctctgtgtaggtat

SEQ ID NO: 134793 - DNA, 51 bp, Artificial
  Synthetic oligonucleotide
tgtacaactggttcggatccgggaacagccgtagctactggtacgctcgat

SEQ ID NO: 134794 - DNA, 51 bp, Artificial
  Synthetic oligonucleotide
ttattgtttggactcgaggtggctccgtcgctcataacggtgaattacggg

SEQ ID NO: 134795 - DNA, 51 bp, Artificial
  Synthetic oligonucleotide
aacgggcgctcgaccccacaactgatgtggaccagtccgatgttctgcttg

SEQ ID NO: 134796 - DNA, 51 bp, Artificial
  Synthetic oligonucleotide
gatagggcgttggattatgagatgagcggataacgtctacactggagcccc

SEQ ID NO: 134797 - DNA, 51 bp, Artificial
  Synthetic oligonucleotide
aaagttcactgcttcatacgtcgcaccgccaacatatgccttgtggtacct

SEQ ID NO: 134798 - DNA, 51 bp, Artificial
  Synthetic oligonucleotide
cggcagtcgctttgggggttcgcgccgactcgcaccagtatcggtcggttt

SEQ ID NO: 134799 - DNA, 51 bp, Artificial
  Synthetic oligonucleotide
cgagcttggcggtatgacgactgtcccgagcgagcgaggaatccccgtctc

SEQ ID NO: 134800 - DNA, 53 bp, Artificial
  Synthetic oligonucleotide
gactaataacggcagaacgactaagaacccgggaacacgatgggggagtaaca

SEQ ID NO: 134801 - DNA, 51 bp, Artificial
  Synthetic oligonucleotide
aagccgacatttctccgcgaactaccgtccggatcgactgagcacgggcgg

SEQ ID NO: 134802 - DNA, 51 bp, Artificial
  Synthetic oligonucleotide
cgtccgccgaacccgtgtttcagacggacccttgggcggttgaagtccgac

SEQ ID NO: 134803 - DNA, 51 bp, Artificial
  Synthetic oligonucleotide
cgactcgccacaggacagtcggcacacgcgcttggactcacgagcgtcgtt

SEQ ID NO: 134804 - DNA, 51 bp, Artificial
  Synthetic oligonucleotide
cgaacgcgagtctcgccagtctgcgtgggggaaagcttaagaccaacgccc

SEQ ID NO: 134805 - DNA, 51 bp, Artificial
  Synthetic oligonucleotide
gatgaacggtttgtgtgcgtccatatagtgggcccagaggaattccggagg

SEQ ID NO: 134806 - DNA, 51 bp, Artificial
  Synthetic oligonucleotide
gagcagtgagagataccccagcggcacgcggtcagtcgtgtacgtctcggt

SEQ ID NO: 134807 - DNA, 51 bp, Artificial
  Synthetic oligonucleotide
cgcgaggaaacaatggcctatgcgaaccaaaccacgccaagcggcgaccgg

SEQ ID NO: 134808 - DNA, 51 bp, Artificial
  Synthetic oligonucleotide
cctccaagcgtacgaagatgatgtacctcgactgttcgtcccgacgctatt

SEQ ID NO: 134809 - DNA, 51 bp, Artificial
  Synthetic oligonucleotide
cctccacccacgcagcgattcgggtgcgctctttgtcaccttgacacccgc

SEQ ID NO: 134810 - DNA, 51 bp, Artificial
  Synthetic oligonucleotide
aacgaggccccgcatactccggcgtggagtaccgccgacacaacgcaattc

SEQ ID NO: 134811 - DNA, 60 bp, Artificial
  Synthetic oligonucleotide
ggtttgctgagtgttggctccttctcgatgtgttcgtctagtgtgatgttatagacgtgc

SEQ ID NO: 134812 - DNA, 60 bp, Artificial
  Synthetic oligonucleotide
ctcatggttcggaatcctctattgccaggggagcacgaactatcgcgcgtcatgccctaa

SEQ ID NO: 134813 - DNA, 51 bp, Artificial
  Synthetic oligonucleotide
ttcattgtagggaagtcccgagcactgagtccgcgagcgaccatcgagagg

SEQ ID NO: 134814 - DNA, 51 bp, Artificial
  Synthetic oligonucleotide
cggttactcggtcgctccccatgaccgggaatcgagagccaacggacggga

SEQ ID NO: 134815 - DNA, 50 bp, Artificial
  Synthetic oligonucleotide
acgccacttctgtcagattccgaggaacgcaacggagccgagacgcgctc

SEQ ID NO: 134816 - DNA, 50 bp, Artificial
  Synthetic oligonucleotide
acgccctccaaccacgaacgcgactcactcggacgacggttcaaaccgaa

SEQ ID NO: 134817 - DNA, 50 bp, Artificial
  Synthetic oligonucleotide
acgccgtacggtcgtcgcagttgatggaatccgcagattccgggggctca

SEQ ID NO: 134818 - DNA, 50 bp, Artificial
  Synthetic oligonucleotide
acgcctacttccgggcactaccggccactcgcgactgaagtcgtgacttg

SEQ ID NO: 134819 - DNA, 50 bp, Artificial
  Synthetic oligonucleotide
acgcgacgcgtgtgcagtgttgctaagtagttcctcgcggaacggcccca

SEQ ID NO: 134820 - DNA, 50 bp, Artificial
  Synthetic oligonucleotide
acgcagtgcgttcgcgatctcttctccgactcccgctcgctattcgcagc

SEQ ID NO: 134821 - DNA, 50 bp, Artificial
  Synthetic oligonucleotide
aaccatcatgtcgatgtagtccggattgtagaccgtcaccgactcaggga

SEQ ID NO: 134822 - DNA, 50 bp, Artificial
  Synthetic oligonucleotide
tagccggcaaatcaagaacgggagtggtcctacacgaaaccgtgtgggcg

SEQ ID NO: 134823 - DNA, 59 bp, Artificial
  Synthetic oligonucleotide
gactattgattcaacggggggttctgataccagctcattcgagtaaccaacagacagcc

SEQ ID NO: 134824 - DNA, 50 bp, Artificial
  Synthetic oligonucleotide
accggcacccctgtggcggatcgattagctccggaactgtcccttcgata

SEQ ID NO: 134825 - DNA, 50 bp, Artificial
  Synthetic oligonucleotide
acgcgaggcggaacaggcaatcctacgcggtaacctcatctcggcagtcc

SEQ ID NO: 134826 - DNA, 50 bp, Artificial
  Synthetic oligonucleotide
acgcgccatctgggtgccatcgtgaccgcactagttgggtgccgtcttgt

SEQ ID NO: 134827 - DNA, 50 bp, Artificial
  Synthetic oligonucleotide
aaccagtgcccggagtgcgagaactcgccgagctaccacaagaacagcga

SEQ ID NO: 134828 - DNA, 50 bp, Artificial
  Synthetic oligonucleotide
aacccacgaggggttcggctgaaagtggcgagtgccttagacgacaccat

SEQ ID NO: 134829 - DNA, 50 bp, Artificial
  Synthetic oligonucleotide
acggattccgtcgcctcagcggcaaacacggacacggattctgtcgacgc

SEQ ID NO: 134830 - DNA, 50 bp, Artificial
  Synthetic oligonucleotide
aaccagagttcttgctccggaccgaactgcggaatccagcccggtacctg

SEQ ID NO: 134831 - DNA, 50 bp, Artificial
  Synthetic oligonucleotide
acggaggcatagcgggtcaaaatgtgttcctcagtcccttgttgtgcggt

SEQ ID NO: 134832 - DNA, 50 bp, Artificial
  Synthetic oligonucleotide
aaccaggggtgggtgccagacgtgctcagagacacgccgtaacgctaccc

SEQ ID NO: 134833 - DNA, 50 bp, Artificial
  Synthetic oligonucleotide
acggactactggtacccgctgtggcccgactctcccgagaagcatccctg

SEQ ID NO: 134834 - DNA, 60 bp, Artificial
  Synthetic oligonucleotide
gactcatccagtatatacgaccaaccactatccttgtcaatagagcctgctaccgctaac

SEQ ID NO: 134835 - DNA, 50 bp, Artificial
  Synthetic oligonucleotide
acggaccagctcccggagttgcgtcgtgagggggagtcgaactgcctcgg

SEQ ID NO: 134836 - DNA, 50 bp, Artificial
  Synthetic oligonucleotide
acgcttcaagtcggcgttctcggctaccgattcatgggcaaggcacacgc

SEQ ID NO: 134837 - DNA, 50 bp, Artificial
  Synthetic oligonucleotide
acgctgtttctgggttcctgtgtacgcgttgagcggcggccttctcatga

SEQ ID NO: 134838 - DNA, 50 bp, Artificial
  Synthetic oligonucleotide
acgctgtcacagagtccctcgggattgctcggggaacccttgagtggcac

SEQ ID NO: 134839 - DNA, 50 bp, Artificial
  Synthetic oligonucleotide
acgctgacaccatcaaacaggatcgcagtacgtgcgtcgcggccccctca

SEQ ID NO: 134840 - DNA, 50 bp, Artificial
  Synthetic oligonucleotide
acgctctcacggagcggtttggaacgggattcatcggctggccgacaacg

SEQ ID NO: 134841 - DNA, 50 bp, Artificial
  Synthetic oligonucleotide
acgctccgcgttgctcgctgcttcaattccctcgggccgcatctcttcac

SEQ ID NO: 134842 - DNA, 50 bp, Artificial
  Synthetic oligonucleotide
accggacagtcaactgggcgtgcaacggaagacgcgggaggtacagcaac

SEQ ID NO: 134843 - DNA, 50 bp, Artificial
  Synthetic oligonucleotide
aaccagtaggccggcagtgagaggacgagttgcccgaagttgcgtccata

SEQ ID NO: 134844 - DNA, 50 bp, Artificial
  Synthetic oligonucleotide
acgcggtgcacgaatccaaaatagcaatcgcgggctgttacgcgggctct

SEQ ID NO: 134845 - DNA, 58 bp, Artificial
  Synthetic oligonucleotide
ctcactcaacacgcagtcgctccacggcaaccgtgcatgggagccggaccggggggac

SEQ ID NO: 134846 - DNA, 50 bp, Artificial
  Synthetic oligonucleotide
ctgataccgacatattatctcgactcaaccgtgtcgaaatcgattatcag

SEQ ID NO: 134847 - DNA, 50 bp, Artificial
  Synthetic oligonucleotide
acgaacggtgctcgctacgttgacaccgagcggttcaccccacgaggtcc

SEQ ID NO: 134848 - DNA, 50 bp, Artificial
  Synthetic oligonucleotide
acgaacggggatcccgcgactggtacggtacacaccatcacgggaggcga

SEQ ID NO: 134849 - DNA, 50 bp, Artificial
  Synthetic oligonucleotide
aaccgctcgtacatcaacacgcgactgccgattctcgcggactacggcct

SEQ ID NO: 134850 - DNA, 50 bp, Artificial
  Synthetic oligonucleotide
acgaacaaccgatcgaacgcgcgattacacgcgggacatcgcagttcccg

SEQ ID NO: 134851 - DNA, 50 bp, Artificial
  Synthetic oligonucleotide
accggtcacctggaccttgcgtgtctccatgtgtcgcggttctaacggga

SEQ ID NO: 134852 - DNA, 50 bp, Artificial
  Synthetic oligonucleotide
aaccggccttggtacggactccgcgggccattctctgactcttcgtttgg

SEQ ID NO: 134853 - DNA, 50 bp, Artificial
  Synthetic oligonucleotide
aaccggtgtccgctcgtctacggcccgcgatctgaccgcttatcggcccc

SEQ ID NO: 134854 - DNA, 50 bp, Artificial
  Synthetic oligonucleotide
acctctccgtgggtgccagcggaacggtcgcactccagacctcgaagggc

SEQ ID NO: 134855 - DNA, 50 bp, Artificial
  Synthetic oligonucleotide
ttcgagcacgaccgtttctcccacgcgaattgcgacccacgaccaaggtt

SEQ ID NO: 134856 - DNA, 59 bp, Artificial
  Synthetic oligonucleotide
ctcacagtcctcgaacccgtaccctgccagcgtgtctctatcatttgggtcctcatcgg

SEQ ID NO: 134857 - DNA, 50 bp, Artificial
  Synthetic oligonucleotide
aaccgtcaaaacggtacggatgaccgtccatcgaggggccgggattcaga

SEQ ID NO: 134858 - DNA, 50 bp, Artificial
  Synthetic oligonucleotide
tatcgttccctcgtaactcattgtctaaagtcgaggtgtcgcagtaataa

SEQ ID NO: 134859 - DNA, 50 bp, Artificial
  Synthetic oligonucleotide
acctcccagcaacgacgctgtcagtttctcgccccctccgtcgtagttcc

SEQ ID NO: 134860 - DNA, 50 bp, Artificial
  Synthetic oligonucleotide
acctcatcgaagtggtttcacacgttcaaaatgagagtcgaccgtttcca

SEQ ID NO: 134861 - DNA, 50 bp, Artificial
  Synthetic oligonucleotide
acctatacccgcgttatccgggccctgctactgctggggtgacgctacgg

SEQ ID NO: 134862 - DNA, 50 bp, Artificial
  Synthetic oligonucleotide
tatgcgacgaccgatggggagagcagagacgggattcaggcagctgcacg

SEQ ID NO: 134863 - DNA, 50 bp, Artificial
  Synthetic oligonucleotide
accgtctctcgcactccttcggacgtggtccgtcccagtggaccgttgct

SEQ ID NO: 134864 - DNA, 50 bp, Artificial
  Synthetic oligonucleotide
accgtttagccgtgatctgaagagcgggagccgatacccacgcggctcgc

SEQ ID NO: 134865 - DNA, 50 bp, Artificial
  Synthetic oligonucleotide
acgcagagcgtggaatcctaaccgtccgtcgtccgtgccccgtccacttc

SEQ ID NO: 134866 - DNA, 50 bp, Artificial
  Synthetic oligonucleotide
aaccccagtgacggccgaaggaatgaactcagcgcgcataagcgccagcc

SEQ ID NO: 134867 - DNA, 58 bp, Artificial
  Synthetic oligonucleotide
ctatccccggccatacaggaaccggagtcaggctatatgccgtcccatattcaacggc

SEQ ID NO: 134868 - DNA, 50 bp, Artificial
  Synthetic oligonucleotide
aaccccgatggagagacgcagtggacgcccgtccccgaactccgtgatgc

SEQ ID NO: 134869 - DNA, 50 bp, Artificial
  Synthetic oligonucleotide
accggcgtgacccgtccttgctgtgttccagccgggacctctgggtgcgt

SEQ ID NO: 134870 - DNA, 50 bp, Artificial
  Synthetic oligonucleotide
acgcaatctcggagtgagcccgggtggcttagctggacatagcgccgcac

SEQ ID NO: 134871 - DNA, 50 bp, Artificial
  Synthetic oligonucleotide
accggctactcgggacgggaacactctccctttcgggcgttgactccgcg

SEQ ID NO: 134872 - DNA, 50 bp, Artificial
  Synthetic oligonucleotide
aacgacagtcaccccagccgagaggtcggtccgagcgcgacgtacggaag

SEQ ID NO: 134873 - DNA, 50 bp, Artificial
  Synthetic oligonucleotide
ctgcgtgacccattatgcctggtcccgatcctcacgacgacacgagtcgc

SEQ ID NO: 134874 - DNA, 50 bp, Artificial
  Synthetic oligonucleotide
accggggagacacacccgacaacgagtgacgttcggaccatcgaggcccc

SEQ ID NO: 134875 - DNA, 50 bp, Artificial
  Synthetic oligonucleotide
aaccgtgggggtctcagcagtcgttctgcaaacggagcgagcagtccact

SEQ ID NO: 134876 - DNA, 50 bp, Artificial
  Synthetic oligonucleotide
acgagtctaaactcgtacaactagcatggctaaatcggactccaatagca

SEQ ID NO: 134877 - DNA, 50 bp, Artificial
  Synthetic oligonucleotide
acgagtcgtcacccttgcaccgagtgcttcccaggtcgtgtgggaactcg

SEQ ID NO: 134878 - DNA, 59 bp, Artificial
  Synthetic oligonucleotide
ctagtcgaccacaaagaggcggagagtaagactctcaaagagattgcgtgggaagccga

SEQ ID NO: 134879 - DNA, 50 bp, Artificial
  Synthetic oligonucleotide
aaccgcggcaatgtcctcgtatgagcgcgccactcccgaatgggaccgga

SEQ ID NO: 134880 - DNA, 50 bp, Artificial
  Synthetic oligonucleotide
acgagaggtccgagcgatccgcgtagtagttgtcgagcgggacgtgcgtt

SEQ ID NO: 134881 - DNA, 50 bp, Artificial
  Synthetic oligonucleotide
acgaccgaatccagactctcatcgctcccggctcgcggttgtcccacgcg

SEQ ID NO: 134882 - DNA, 50 bp, Artificial
  Synthetic oligonucleotide
acgacccgccgttcgatttaactcggtctcgggagtgagcacaggcgacc

SEQ ID NO: 134883 - DNA, 50 bp, Artificial
  Synthetic oligonucleotide
acgacaccgttgctcgtcgcgtcaggttactcgtgggagacccacagcga

SEQ ID NO: 134884 - DNA, 50 bp, Artificial
  Synthetic oligonucleotide
actcagaacgtgggttggggcggattcgaacctcggtcgctcactccgtt

SEQ ID NO: 134885 - DNA, 50 bp, Artificial
  Synthetic oligonucleotide
actatgcacggagacgatcgggacacgatctacaagacgaattataggga

SEQ ID NO: 134886 - DNA, 50 bp, Artificial
  Synthetic oligonucleotide
actatctgaacactcgctcagtgtcggtgcaaggcgaggagcggccagcg

SEQ ID NO: 134887 - DNA, 50 bp, Artificial
  Synthetic oligonucleotide
actagtgggtgtgcctgcgaggggctgcgagcgtacacactccgagttga

SEQ ID NO: 134888 - DNA, 50 bp, Artificial
  Synthetic oligonucleotide
aaacccaaccgtttgttcggaaggtgagcctgtctgggtcggggcgttct

SEQ ID NO: 134889 - DNA, 58 bp, Artificial
  Synthetic oligonucleotide
ctactacgtaaaagggctctgcagcgtctcgaatgcggttatcgagaaccacggtgga

SEQ ID NO: 134890 - DNA, 50 bp, Artificial
  Synthetic oligonucleotide
actacttggtcgcgggatccgtacgcactcgcatgagcaccgacgtgggt

SEQ ID NO: 134891 - DNA, 50 bp, Artificial
  Synthetic oligonucleotide
actaccgggtcgtagaacccccagacccgcgtgtcgatagtcggccgctc

SEQ ID NO: 134892 - DNA, 50 bp, Artificial
  Synthetic oligonucleotide
aaacgagggccgagccaactacttggccgactcgcggtgcagtctctcaa

SEQ ID NO: 134893 - DNA, 50 bp, Artificial
  Synthetic oligonucleotide
aaacggcgtgctcacagcgactgttgaaccgacaaccctccggtggctct

SEQ ID NO: 134894 - DNA, 50 bp, Artificial
  Synthetic oligonucleotide
gaatcatcgtcaggcgtacggccctccacccacgcagcgattcgggtgcg

SEQ ID NO: 134895 - DNA, 50 bp, Artificial
  Synthetic oligonucleotide
aaaggggttcaacgtcgcgtgaccgacctctgagttagcccgccgtcgag

SEQ ID NO: 134896 - DNA, 50 bp, Artificial
  Synthetic oligonucleotide
acgttcagtagctccgacatgtaggtgggtgtgaaccggtctcggggccc

SEQ ID NO: 134897 - DNA, 50 bp, Artificial
  Synthetic oligonucleotide
acgtggagaccacgcgggctgaaaggtgactgctgaccgtgccgtctacc

SEQ ID NO: 134898 - DNA, 50 bp, Artificial
  Synthetic oligonucleotide
aaagggtgagccggcggtcaaagggcgagtcggcggttaaatcgtgagtc

SEQ ID NO: 134899 - DNA, 50 bp, Artificial
  Synthetic oligonucleotide
acgtgcccggtacaccgcagacacacgcagtcaaagaagagcccaaccgc

SEQ ID NO: 134900 - DNA, 60 bp, Artificial
  Synthetic oligonucleotide
ctaccaatcccatcctcataccgtgagatcgacacttcatcgtagtcgtctcgtgactcg

SEQ ID NO: 134901 - DNA, 50 bp, Artificial
  Synthetic oligonucleotide
acgtgacagcgttaggccccgaccgactcacgaacccgctctgtcgcatg

SEQ ID NO: 134902 - DNA, 50 bp, Artificial
  Synthetic oligonucleotide
aaagggtgcggtactgtgagtcggtgagcccgaactgtgattcgccctcg

SEQ ID NO: 134903 - DNA, 50 bp, Artificial
  Synthetic oligonucleotide
acgtctcgctacgtacggggagggtttatggatgcgcttcttcggccgga

SEQ ID NO: 134904 - DNA, 50 bp, Artificial
  Synthetic oligonucleotide
acgtctcgagacagccggccgacagtcctgcgaggagggagctaccggtc

SEQ ID NO: 134905 - DNA, 50 bp, Artificial
  Synthetic oligonucleotide
gtgccatcgtgaccgcactagttgggtgccgtcttgtgcgaaacaccgcg

SEQ ID NO: 134906 - DNA, 50 bp, Artificial
  Synthetic oligonucleotide
gacagcacccagtcagtcccctcacggacgtaggtggtctcctggactgc

SEQ ID NO: 134907 - DNA, 50 bp, Artificial
  Synthetic oligonucleotide
gacacacgtcgaaacgtggctcaacgaggccccgcatactccggcgtgga

SEQ ID NO: 134908 - DNA, 50 bp, Artificial
  Synthetic oligonucleotide
aaaaccgttttaccgcgctcggtccacctcgtggcatggagacgctcgtt

SEQ ID NO: 134909 - DNA, 50 bp, Artificial
  Synthetic oligonucleotide
actctttgcggtgtgggccgtcggaaccttcggcttctggggactaagcg

SEQ ID NO: 134910 - DNA, 50 bp, Artificial
  Synthetic oligonucleotide
actcttcacatcagttccgtcccatggccctccgtcgagggcgctgtcct

SEQ ID NO: 134911 - DNA, 58 bp, Artificial
  Synthetic oligonucleotide
ccctcacggaagtggaacgtacaggctccgagccgcgggttctctgctacgagtgcgc

SEQ ID NO: 134912 - DNA, 50 bp, Artificial
  Synthetic oligonucleotide
actctcatccgggggttcgaccgggggagatgggtccgaaatcgcgtgga

SEQ ID NO: 134913 - DNA, 50 bp, Artificial
  Synthetic oligonucleotide
actcgctcggatgcgtcgtgaacagactcggggtcgctggcggtcgaaag

SEQ ID NO: 134914 - DNA, 50 bp, Artificial
  Synthetic oligonucleotide
gacgatggtgattgccaatctgtatgaccgacgcacgaatcttcacagcg

SEQ ID NO: 134915 - DNA, 50 bp, Artificial
  Synthetic oligonucleotide
actcgcgcctctcggaaggctggactcagcccattagcctggcaagatga

SEQ ID NO: 134916 - DNA, 50 bp, Artificial
  Synthetic oligonucleotide
aaaatcggagcctgccttcgtccaagaaggggacaccgtccgaatgcggg

SEQ ID NO: 134917 - DNA, 50 bp, Artificial
  Synthetic oligonucleotide
actcgccacgacgggcgttcgaagcgtttatcactccaccgcgggtaccg

SEQ ID NO: 134918 - DNA, 50 bp, Artificial
  Synthetic oligonucleotide
actcgaccgcgcgactcatgcaacggataacggcaccggtcgctctctat

SEQ ID NO: 134919 - DNA, 50 bp, Artificial
  Synthetic oligonucleotide
actcgaactcgaatcgccatacgaggttccgggcgctgatgaggagcgga

SEQ ID NO: 134920 - DNA, 50 bp, Artificial
  Synthetic oligonucleotide
actccgtcaacctcgcttcgctcggttgccgcaaggttctcccgccctct

SEQ ID NO: 134921 - DNA, 50 bp, Artificial
  Synthetic oligonucleotide
aaacagtccatgcagcccaggttcggaaacgagagacggcacacggcggt

SEQ ID NO: 134922 - DNA, 60 bp, Artificial
  Synthetic oligonucleotide
aggcactcgcactcgcctattccgagcaagggtgcagtgaacgcgggattgctgataata

SEQ ID NO: 134923 - DNA, 59 bp, Artificial
  Synthetic oligonucleotide
gctcccaccgagtagctcagttgggttcagcaacctgtttgcgttcgtgccaaacacaa

SEQ ID NO: 134924 - DNA, 50 bp, Artificial
  Synthetic oligonucleotide
actcccgaggatgtggttgatcccacctcggatgcgggatccaacggcct

SEQ ID NO: 134925 - DNA, 50 bp, Artificial
  Synthetic oligonucleotide
actcccaccaacaagtttgctccacgggatgcgtccgctctgggttccgg

SEQ ID NO: 134926 - DNA, 50 bp, Artificial
  Synthetic oligonucleotide
actcaggcgcacatgcggaaaagtgggccgccaaagggactcatcgccta

SEQ ID NO: 134927 - DNA, 50 bp, Artificial
  Synthetic oligonucleotide
aaatgccgtacgagaactctgctctcgcggacgtcggggagcctggaacg

SEQ ID NO: 134928 - DNA, 50 bp, Artificial
  Synthetic oligonucleotide
acgggctcctgaacgctctccgtcgatgggtcaaccaacccccatcggtc

SEQ ID NO: 134929 - DNA, 50 bp, Artificial
  Synthetic oligonucleotide
acgggccgtcctaagccatcgtcgaacgtccgtgtcgaccaacagtcaga

SEQ ID NO: 134930 - DNA, 50 bp, Artificial
  Synthetic oligonucleotide
acgggatttgaacctcggtcgctttgctcactccgttcgcgtcgctccct

SEQ ID NO: 134931 - DNA, 50 bp, Artificial
  Synthetic oligonucleotide
acgggacggctcgctcgcgttgcatggacggtggatttttcagaatccga

SEQ ID NO: 134932 - DNA, 50 bp, Artificial
  Synthetic oligonucleotide
taatccttcttgagcggtaatctgttgcttctatgaatatttgaggctcc

SEQ ID NO: 134933 - DNA, 50 bp, Artificial
  Synthetic oligonucleotide
taatcgaagcatgactgcaagcgctagtctgttcaatcgggtcctttgta

SEQ ID NO: 134934 - DNA, 60 bp, Artificial
  Synthetic oligonucleotide
gctggtggaccagactcacggctcaatctctctgccgcgactgtcagggtcgtttacatt

SEQ ID NO: 134935 - DNA, 50 bp, Artificial
  Synthetic oligonucleotide
aacacttacgcccgaccccgtcgtggggtgagtcgcgatggtaaaagagc

SEQ ID NO: 134936 - DNA, 50 bp, Artificial
  Synthetic oligonucleotide
acgggacccgtagtacgtcccctggaacccgaagtcagtcgcttcctcga

SEQ ID NO: 134937 - DNA, 50 bp, Artificial
  Synthetic oligonucleotide
acggctgcagtcgggataagccttcagcggtctcctgccgggatttcgtg

SEQ ID NO: 134938 - DNA, 50 bp, Artificial
  Synthetic oligonucleotide
aacagcagtcgaccctgatccgcggggtttttgcacggaccgccagtaga

SEQ ID NO: 134939 - DNA, 50 bp, Artificial
  Synthetic oligonucleotide
acggctaggagcctcatgaccccgcgcaggctgtagacttcagtagcgca

SEQ ID NO: 134940 - DNA, 50 bp, Artificial
  Synthetic oligonucleotide
acggcgctagacgactgatcgttgccgacgctaccttgcgttgctgggac

SEQ ID NO: 134941 - DNA, 50 bp, Artificial
  Synthetic oligonucleotide
acggcgcacaacacggtcgtaagcgagtacgcaacgcgcctctttcgggg

SEQ ID NO: 134942 - DNA, 50 bp, Artificial
  Synthetic oligonucleotide
acggcctatccgtaatgggggcgactcacgcgaaaccgtccgggggaact

SEQ ID NO: 134943 - DNA, 50 bp, Artificial
  Synthetic oligonucleotide
acggccgtccccgtagcttgtggtttagctggctgcaatgcgttgagtcc

SEQ ID NO: 134944 - DNA, 50 bp, Artificial
  Synthetic oligonucleotide
aacaggccgagtccgctcaccgactgtactctctcccccgccgatgattc

SEQ ID NO: 134945 - DNA, 56 bp, Artificial
  Synthetic oligonucleotide
cccacgtagagtcttctttgaccggttcaataccgaggacgattggtgcgtgatcc

SEQ ID NO: 134946 - DNA, 50 bp, Artificial
  Synthetic oligonucleotide
acggccccggtgggctcgttgtcctcggattcctgccgattgcttacgga

SEQ ID NO: 134947 - DNA, 50 bp, Artificial
  Synthetic oligonucleotide
ttggggagcgatttgatcgcgatatgagggaggaccgcgatgaactgttt

SEQ ID NO: 134948 - DNA, 50 bp, Artificial
  Synthetic oligonucleotide
aacatggcagatatcgggattaacgttgagctgaatcctcagacgtgggg

SEQ ID NO: 134949 - DNA, 50 bp, Artificial
  Synthetic oligonucleotide
aaagtgccgcctcccggattgtgaacaacgcccagaaatgctcgcttcgc

SEQ ID NO: 134950 - DNA, 50 bp, Artificial
  Synthetic oligonucleotide
acgtcgtacccttggtcggcggcccaccggattccctctgcgatgtcacc

SEQ ID NO: 134951 - DNA, 50 bp, Artificial
  Synthetic oligonucleotide
acgtcggtccagtcgccacgctacggtgagacgaatcgaatgcccgacct

SEQ ID NO: 134952 - DNA, 50 bp, Artificial
  Synthetic oligonucleotide
acgtcgatgacccgatactggaacgaggtgttccgatcacccggtggcga

SEQ ID NO: 134953 - DNA, 50 bp, Artificial
  Synthetic oligonucleotide
gttcgtatccgacttttttcattagtaagcgacttctccgagaaatcgga

SEQ ID NO: 134954 - DNA, 50 bp, Artificial
  Synthetic oligonucleotide
acgtcgacctgagcgttgcaggtgccaccccagcgatgtccgcaacctcg

SEQ ID NO: 134955 - DNA, 50 bp, Artificial
  Synthetic oligonucleotide
acgtcctgatacgtcgacctgagcgttgcaggtgccaccccagcgatgtc

SEQ ID NO: 134956 - DNA, 49 bp, Artificial
  Synthetic oligonucleotide
ggaaaccaccccagttacgccggaactggaccgggagaaggttcggccc

SEQ ID NO: 134957 - DNA, 50 bp, Artificial
  Synthetic oligonucleotide
aaatccgaggtagacgggacgaacacgaactggcgcgaggagctacgcgg

SEQ ID NO: 134958 - DNA, 50 bp, Artificial
  Synthetic oligonucleotide
acgtccgtgatgataactcctccccggggccctaaacgagtgcacctcgg

SEQ ID NO: 134959 - DNA, 50 bp, Artificial
  Synthetic oligonucleotide
acgtccgggattactcccagaacgtcaacccacctccccacaggcgacgg

SEQ ID NO: 134960 - DNA, 50 bp, Artificial
  Synthetic oligonucleotide
acgtcatcgggggactcagtgtgctaacggccgccctcatactgctggat

SEQ ID NO: 134961 - DNA, 50 bp, Artificial
  Synthetic oligonucleotide
acggttgctctggggaagcatggacgcgctcggtatctcgggttcggtcg

SEQ ID NO: 134962 - DNA, 50 bp, Artificial
  Synthetic oligonucleotide
acggtgttgggtttctcgactgggaactctcgcacgtcggggacccggta

SEQ ID NO: 134963 - DNA, 50 bp, Artificial
  Synthetic oligonucleotide
acggtcttactcgacgcggagacggccatcgagcgtgcaaactgggacac

SEQ ID NO: 134964 - DNA, 50 bp, Artificial
  Synthetic oligonucleotide
acggtcggtcgacctcgcatgctttatcccacccgggacccacccatcgt

SEQ ID NO: 134965 - DNA, 50 bp, Artificial
  Synthetic oligonucleotide
acggtcgataatgagcgcgcaagtacaaccgccgactgcccgcgtctgcg

SEQ ID NO: 134966 - DNA, 50 bp, Artificial
  Synthetic oligonucleotide
acggtagtcggcctcgggatagacaccgtgcccactacgcttccggtgag

SEQ ID NO: 134967 - DNA, 60 bp, Artificial
  Synthetic oligonucleotide
ccagtgatgtcgaccgagagtggtacgatggcgcaccagaatcgcgcgacgagccacacg

SEQ ID NO: 134968 - DNA, 50 bp, Artificial
  Synthetic oligonucleotide
acgggttcatgaacgaaggtagcgtgcgctccgtccagtagctcgtcccg

SEQ ID NO: 134969 - DNA, 50 bp, Artificial
  Synthetic oligonucleotide
acgggtccgccgtggtgaacgtttcgatcgcccgaacgtctgacgcagat

SEQ ID NO: 134970 - DNA, 50 bp, Artificial
  Synthetic oligonucleotide
acgggggacccagcatgaacggagatgacacgtccgaagcggactgcggg

SEQ ID NO: 134971 - DNA, 50 bp, Artificial
  Synthetic oligonucleotide
acgggggaaggaagttctcgcaagtgacggactgcgacacgggtatcgga

SEQ ID NO: 134972 - DNA, 50 bp, Artificial
  Synthetic oligonucleotide
acagacgagagtgactcacacgacggccagcgaacgcgacgaaccgtgct

SEQ ID NO: 134973 - DNA, 50 bp, Artificial
  Synthetic oligonucleotide
acactcgtacgactgttacactatctctcggcgttgcactgtgattgtcc

SEQ ID NO: 134974 - DNA, 50 bp, Artificial
  Synthetic oligonucleotide
tcgttgtttacgacgctgtaactttcggtgtcccctccgccaatcacgtt

SEQ ID NO: 134975 - DNA, 50 bp, Artificial
  Synthetic oligonucleotide
acacgggactgctgtgggggtgaccgtccgatccgagtgtcgcgacgtgg

SEQ ID NO: 134976 - DNA, 50 bp, Artificial
  Synthetic oligonucleotide
acacgctccccagcggagagtggatcgcccaactcccgagtccatcattc

SEQ ID NO: 134977 - DNA, 50 bp, Artificial
  Synthetic oligonucleotide
acacctccgagtgcgaatcggggtcgataagtccctccggaaccgctcga

SEQ ID NO: 134978 - DNA, 57 bp, Artificial
  Synthetic oligonucleotide
ccagaacggcttggccggcacgttctgtactcagcccttctcactccggcgacaaag

SEQ ID NO: 134979 - DNA, 50 bp, Artificial
  Synthetic oligonucleotide
tctcaggtacggtcggttcgtgtcaccgagccaccgacggaggaatcgaa

SEQ ID NO: 134980 - DNA, 50 bp, Artificial
  Synthetic oligonucleotide
acaccggcgttcacgggatgcacgtcgcctggatcgttcgtcggttgaag

SEQ ID NO: 134981 - DNA, 50 bp, Artificial
  Synthetic oligonucleotide
acaccagcgccggtcgtacaagtgttgccgtcgtttgcacgcagctaact

SEQ ID NO: 134982 - DNA, 50 bp, Artificial
  Synthetic oligonucleotide
aagcggttctccgtcgcaccgcttgcagcactctcccgatcacagcgtga

SEQ ID NO: 134983 - DNA, 50 bp, Artificial
  Synthetic oligonucleotide
acacactcgtggcagggctatcggacgcggggctctcgacgtatcaggcg

SEQ ID NO: 134984 - DNA, 50 bp, Artificial
  Synthetic oligonucleotide
acaagcgagcgtaacccgggtgcgtaactgcacacctgcgaagcgacgta

SEQ ID NO: 134985 - DNA, 50 bp, Artificial
  Synthetic oligonucleotide
gacgcgttgctctcgcttctgatcggatcgaatgcggccgtccgagtggg

SEQ ID NO: 134986 - DNA, 50 bp, Artificial
  Synthetic oligonucleotide
aattcgccggggtcacgaatcgcgagggctgttgagtcgcgtctcggttc

SEQ ID NO: 134987 - DNA, 50 bp, Artificial
  Synthetic oligonucleotide
aattcgccagtagcagccgtcagcgggccagcgacacgatagctaacctc

SEQ ID NO: 134988 - DNA, 50 bp, Artificial
  Synthetic oligonucleotide
aagcgttcgaggagcgagacgacgggtaagacgacccctgttcagtcgga

SEQ ID NO: 134989 - DNA, 60 bp, Artificial
  Synthetic oligonucleotide
ccactgtttccccagtgcatccgtatttaatgccttactgagcatccgattgctgaataa

SEQ ID NO: 134990 - DNA, 50 bp, Artificial
  Synthetic oligonucleotide
aatgggccaccgatcctccagtcacaaaacgcacgccgttgaccgatgct

SEQ ID NO: 134991 - DNA, 50 bp, Artificial
  Synthetic oligonucleotide
aatgctggtgcccgacacagacgacccagcagcgatcgaggacagggatg

SEQ ID NO: 134992 - DNA, 50 bp, Artificial
  Synthetic oligonucleotide
aatgagtttcgctcccggagagttccgtcgtgcgtgggtgtccgtggcgc

SEQ ID NO: 134993 - DNA, 50 bp, Artificial
  Synthetic oligonucleotide
aatctgccgacacaatgcgctaacgggccagcatgagacggccagtgagc

SEQ ID NO: 134994 - DNA, 50 bp, Artificial
  Synthetic oligonucleotide
acaggggagaacgtatcaccgcgcatggcagacaaaccgagctccggaga

SEQ ID NO: 134995 - DNA, 50 bp, Artificial
  Synthetic oligonucleotide
tcggggatatgcggggccacgaacaaccgaggggagccgtgcaaactccc

SEQ ID NO: 134996 - DNA, 50 bp, Artificial
  Synthetic oligonucleotide
aactgcggacaacacatagtggccgggagtgcaccgcgagcaatgcgagc

SEQ ID NO: 134997 - DNA, 50 bp, Artificial
  Synthetic oligonucleotide
acaggccgcatacagcgtactcgtggccacaccctcgattgagcgtcctc

SEQ ID NO: 134998 - DNA, 50 bp, Artificial
  Synthetic oligonucleotide
aactggttcacgacgccaccatggctatcccacgagaggttgagtgggcc

SEQ ID NO: 134999 - DNA, 50 bp, Artificial
  Synthetic oligonucleotide
aactgtctggacgggccgttcgaggatgtgcgagcgcgtgaggcactgca

SEQ ID NO: 135000 - DNA, 60 bp, Artificial
  Synthetic oligonucleotide
ggaccaacgagcggggtgatatgctgtttgagacggctgttgagtccggtgagattcctg

SEQ ID NO: 135001 - DNA, 50 bp, Artificial
  Synthetic oligonucleotide
acaggacgcgactcacgagtgagggaacaaacgccggtagccggttcgaa

SEQ ID NO: 135002 - DNA, 50 bp, Artificial
  Synthetic oligonucleotide
cttgccggcacgataggggtctggtcgcaaacgtctcgtctcggttccca

SEQ ID NO: 135003 - DNA, 50 bp, Artificial
  Synthetic oligonucleotide
tgtgaacgtacgagagatgctatccggcactcgcaatatacgagtcgaga

SEQ ID NO: 135004 - DNA, 50 bp, Artificial
  Synthetic oligonucleotide
acagcgtcggacggtccatccccgacacgacaatggaactcgccgctagc

SEQ ID NO: 135005 - DNA, 50 bp, Artificial
  Synthetic oligonucleotide
acagcgtcgatgctgcctccgtctgtggtcacgtccgtagggggcactcg

SEQ ID NO: 135006 - DNA, 50 bp, Artificial
  Synthetic oligonucleotide
aagaacagttcagcgacgtatcgctcgtgtcccgtgggcgcacaccgatc

SEQ ID NO: 135007 - DNA, 50 bp, Artificial
  Synthetic oligonucleotide
acagcggagagcgtactcccgaggatgtggttgatcccacctcggatgcg

SEQ ID NO: 135008 - DNA, 50 bp, Artificial
  Synthetic oligonucleotide
aagagtgtcggctccatcaggcgaccaccccggttgcgatcgattcccca

SEQ ID NO: 135009 - DNA, 50 bp, Artificial
  Synthetic oligonucleotide
aagcaagggtcgttgtaacacgagcgtaggatctcggccgcgcgtcctgg

SEQ ID NO: 135010 - DNA, 50 bp, Artificial
  Synthetic oligonucleotide
acagcctgacccgcgagcgaacgaagtcagtgagaaccgcggatgacgag

SEQ ID NO: 135011 - DNA, 58 bp, Artificial
  Synthetic oligonucleotide
ccaattgacccactttccggctccgtgatctgtcgtctcgtatcccgcttgtgaggcg

SEQ ID NO: 135012 - DNA, 50 bp, Artificial
  Synthetic oligonucleotide
acagatcggtgtcctcctcagatagcggtgttgcactccgcagcgagcga

SEQ ID NO: 135013 - DNA, 50 bp, Artificial
  Synthetic oligonucleotide
acagaggacggtgggggacggtaacacaacccgtgtacgcggctcgtcgt

SEQ ID NO: 135014 - DNA, 50 bp, Artificial
  Synthetic oligonucleotide
aagcacgtgctccgggttgctgagttccgctaactcctctggggagcgtt

SEQ ID NO: 135015 - DNA, 50 bp, Artificial
  Synthetic oligonucleotide
acagagacctcgcacgacgttctcggttgccctcactgccgttcggtcga

SEQ ID NO: 135016 - DNA, 50 bp, Artificial
  Synthetic oligonucleotide
aaggccccgttgcacttcacagtgagttcgacgaggctccacagcccatt

SEQ ID NO: 135017 - DNA, 50 bp, Artificial
  Synthetic oligonucleotide
aatacgccggtcaaccaggcaccctgcgtccgcgaacggggctatgactg

SEQ ID NO: 135018 - DNA, 50 bp, Artificial
  Synthetic oligonucleotide
aaggccggacggaggatgtctggtgactacggaggacgtcccactccatt

SEQ ID NO: 135019 - DNA, 50 bp, Artificial
  Synthetic oligonucleotide
aataaccacactgccgtccgacttgacgttgaggaacgcgtacagtacgt

SEQ ID NO: 135020 - DNA, 50 bp, Artificial
  Synthetic oligonucleotide
aataacacgccggcatctgatcgggggtggttagtaacgacggtgcggga

SEQ ID NO: 135021 - DNA, 50 bp, Artificial
  Synthetic oligonucleotide
aagttgagcccgggtggcttagctggacatagcgccgcactcatagggtt

SEQ ID NO: 135022 - DNA, 60 bp, Artificial
  Synthetic oligonucleotide
ggacctacactggactcatctcacgcacgcgagactctcgtctcccactgcaaaaacacg

SEQ ID NO: 135023 - DNA, 50 bp, Artificial
  Synthetic oligonucleotide
tgcgctccactccgttggcccacagtcgaaaatgagcgagcgaggatcgt

SEQ ID NO: 135024 - DNA, 50 bp, Artificial
  Synthetic oligonucleotide
aaggcgcgagataatgaccgatcgcacgttcgaggtggggacgcacagtt

SEQ ID NO: 135025 - DNA, 50 bp, Artificial
  Synthetic oligonucleotide
aagtgacggacactcctcggtacagtgttcgcgggctttcggacaccgcg

SEQ ID NO: 135026 - DNA, 50 bp, Artificial
  Synthetic oligonucleotide
aagtctgacagtcatctccgtcccggattccagcgtggtctccccggtga

SEQ ID NO: 135027 - DNA, 50 bp, Artificial
  Synthetic oligonucleotide
aaggcgtacggtgagcccggatagtccatccccggtaggctcgagtaacg

SEQ ID NO: 135028 - DNA, 50 bp, Artificial
  Synthetic oligonucleotide
tgctcagacaaccgatagctcgactcgataccgaaccgtttcgagtagtg

SEQ ID NO: 135029 - DNA, 50 bp, Artificial
  Synthetic oligonucleotide
aagtccgttccgtgacgggtcgtttttcatcccgccgtccctacggctcg

SEQ ID NO: 135030 - DNA, 50 bp, Artificial
  Synthetic oligonucleotide
aaggctgtcgcatcagcgtagtcagtcgcgagcgaaaaggcagtccccgg

SEQ ID NO: 135031 - DNA, 50 bp, Artificial
  Synthetic oligonucleotide
tggatagcgcgttagtgaaccaggaagttctagaatcgggtagaagacaa

SEQ ID NO: 135032 - DNA, 50 bp, Artificial
  Synthetic oligonucleotide
aagggatgggtacgctggctcgggtcctacgacaccgaacacgtcctgta

SEQ ID NO: 135033 - DNA, 59 bp, Artificial
  Synthetic oligonucleotide
aggaggcgatagcaggaccggcggagtgtccagaagacggttgtgaggcggccactgtg

SEQ ID NO: 135034 - DNA, 60 bp, Artificial
  Synthetic oligonucleotide
cattctctttgtaggtaccctcggactcatcataccagaagacctcttcagaggactcta

SEQ ID NO: 135035 - DNA, 50 bp, Artificial
  Synthetic oligonucleotide
aagggtgtcgtcgaggtagagtaccggacggttccgacgttccgactggc

SEQ ID NO: 135036 - DNA, 50 bp, Artificial
  Synthetic oligonucleotide
aatctcccccgcgagcacactcccatcctccggtgcgtagaattgacggc

SEQ ID NO: 135037 - DNA, 50 bp, Artificial
  Synthetic oligonucleotide
aatcgcttgccgactgttgcccatcgttggtcggagtttgtggctcggcc

SEQ ID NO: 135038 - DNA, 50 bp, Artificial
  Synthetic oligonucleotide
aatcgcccgccacttgcggtccgttgctccccggtcaacaggaactatca

SEQ ID NO: 135039 - DNA, 50 bp, Artificial
  Synthetic oligonucleotide
tcttgttcgaggccgattcgagtgacgagtccacagcggctggtccgtcc

SEQ ID NO: 135040 - DNA, 50 bp, Artificial
  Synthetic oligonucleotide
aatcgatctcgcgggtcggacggcgatgcgaactcaggttcgggagtttg

SEQ ID NO: 135041 - DNA, 50 bp, Artificial
  Synthetic oligonucleotide
aatcgaccgccaaaaacgatggtcgcttgctgtcgtttcgcgaccgggga

SEQ ID NO: 135042 - DNA, 50 bp, Artificial
  Synthetic oligonucleotide
aatcctcggggtcgcacctacaaacccccggtatgttgccgatcgaacgg

SEQ ID NO: 135043 - DNA, 50 bp, Artificial
  Synthetic oligonucleotide
aatccgtggactcaatcgtccctgcttgctgtgccccatccccttcgctg

SEQ ID NO: 135044 - DNA, 50 bp, Artificial
  Synthetic oligonucleotide
tgtacacgcccgatggcgacgtactggacaagcacctccacgtcttgcgc

SEQ ID NO: 135045 - DNA, 60 bp, Artificial
  Synthetic oligonucleotide
cattccagaagagtgtgtcgacgtgccgactgctgaaagcgagcaccacgatacccccga

SEQ ID NO: 135046 - DNA, 50 bp, Artificial
  Synthetic oligonucleotide
aatccgagcgacataacccgacgccggcctacgtgacgcacgtgtctccc

SEQ ID NO: 135047 - DNA, 50 bp, Artificial
  Synthetic oligonucleotide
aatcccttccatccgacaggccgcatacagcgtactcgtggccacaccct

SEQ ID NO: 135048 - DNA, 50 bp, Artificial
  Synthetic oligonucleotide
aatcattggggccgccgcacttcgtacggacgttctcagcggggagaaga

SEQ ID NO: 135049 - DNA, 50 bp, Artificial
  Synthetic oligonucleotide
tgagcgcggcgttaacgtctgcttggtactccgaaacccaacacgccgag

SEQ ID NO: 135050 - DNA, 50 bp, Artificial
  Synthetic oligonucleotide
aagctgttaaaagcgggcgcagtcatagcaggcgcactcgggatgctccc

SEQ ID NO: 135051 - DNA, 50 bp, Artificial
  Synthetic oligonucleotide
aaggaaccggttgccacctctttgcccccgtcttgtccgcgtaaaccgaa

SEQ ID NO: 135052 - DNA, 50 bp, Artificial
  Synthetic oligonucleotide
aatcacaacggctgagtgtcacccgtcggaacgcgcgcctatggagtcgg

SEQ ID NO: 135053 - DNA, 50 bp, Artificial
  Synthetic oligonucleotide
aatagatgggccgccggacggagagagcccgatatcgacggaaacggcta

SEQ ID NO: 135054 - DNA, 50 bp, Artificial
  Synthetic oligonucleotide
aaggactcccgcgggcgtacaatcgggatcttcaacgtgcaacgccgcac

SEQ ID NO: 135055 - DNA, 50 bp, Artificial
  Synthetic oligonucleotide
aatacgcggtctgactcatggtttcgggtgggtggcccgcgctcaaaacc

SEQ ID NO: 135056 - DNA, 60 bp, Artificial
  Synthetic oligonucleotide
cattacccgctcacaaggcattcgatgcacctgcgacaaccgggattgtgagcgagtggg

SEQ ID NO: 135057 - DNA, 50 bp, Artificial
  Synthetic oligonucleotide
aacgcgagtcagggctcgttgctgaccgtgttgactccggtgttcatgct

SEQ ID NO: 135058 - DNA, 50 bp, Artificial
  Synthetic oligonucleotide
acccgtccttgctgtgttccagccgggacctctgggtgcgtcgacggaat

SEQ ID NO: 135059 - DNA, 50 bp, Artificial
  Synthetic oligonucleotide
acccgtcacgccacgttggtgaaccgtagagtccgtcacggtcggtaagc

SEQ ID NO: 135060 - DNA, 50 bp, Artificial
  Synthetic oligonucleotide
aacgcgccgcttttagacgcctgtcccctgcggaaacccaatgacgcgat

SEQ ID NO: 135061 - DNA, 50 bp, Artificial
  Synthetic oligonucleotide
tcccaactcggttcccaccgatactcctttgccggtttgcccggtatccc

SEQ ID NO: 135062 - DNA, 50 bp, Artificial
  Synthetic oligonucleotide
ctgtagagggccctcggctgcactcacggctgtcgaaccgagtacaagcc

SEQ ID NO: 135063 - DNA, 50 bp, Artificial
  Synthetic oligonucleotide
acccgctacggagaattggcgcgttcgttactgcccaaccacgcgaacgc

SEQ ID NO: 135064 - DNA, 50 bp, Artificial
  Synthetic oligonucleotide
aacggaagacgcgggaggtacagcaacgtgagggcgatggcgtacgctcc

SEQ ID NO: 135065 - DNA, 50 bp, Artificial
  Synthetic oligonucleotide
aacggagccgacgggttcctcggtcgcagggtcgattacgtccatggact

SEQ ID NO: 135066 - DNA, 50 bp, Artificial
  Synthetic oligonucleotide
tcccggattcgcattcgtctttagttaagagcgaaaccgccacatggcgt

SEQ ID NO: 135067 - DNA, 60 bp, Artificial
  Synthetic oligonucleotide
catctatacgtgacaaatctgtcgcgagaggagttctttccggcggatttagcgcagatc

SEQ ID NO: 135068 - DNA, 50 bp, Artificial
  Synthetic oligonucleotide
aacggccgctcgggaactcgcagaccagaagtatggatcggaggcgtgga

SEQ ID NO: 135069 - DNA, 50 bp, Artificial
  Synthetic oligonucleotide
acccgagccgaaaactgttaagcaacgagacgggacggcgtcggctttgg

SEQ ID NO: 135070 - DNA, 50 bp, Artificial
  Synthetic oligonucleotide
acccctgagcccgaacgttgagaacagtccgttagtccggcaggtaccga

SEQ ID NO: 135071 - DNA, 50 bp, Artificial
  Synthetic oligonucleotide
acccctccgaacgaacgcggtagcgattcccagtcaacgtccgccatggg

SEQ ID NO: 135072 - DNA, 50 bp, Artificial
  Synthetic oligonucleotide
tccgaccgacgtggtacgtatgatcgcctactcgtgtatgcataccagtc

SEQ ID NO: 135073 - DNA, 50 bp, Artificial
  Synthetic oligonucleotide
ttagcgacctcccagtagctccgtgtcccgattcgaggttcggctgacgc

SEQ ID NO: 135074 - DNA, 50 bp, Artificial
  Synthetic oligonucleotide
aacggccggcggagagcgctttcgaggggtcgataacgaaacgtcttcaa

SEQ ID NO: 135075 - DNA, 46 bp, Artificial
  Synthetic oligonucleotide
acccccggacggggagggggtagccgaaaagtccgttgttcgcggt

SEQ ID NO: 135076 - DNA, 50 bp, Artificial
  Synthetic oligonucleotide
tccggcgggcacaagaccgactcgtccggcacactgtcgcctcagataaa

SEQ ID NO: 135077 - DNA, 50 bp, Artificial
  Synthetic oligonucleotide
accccatgcgggactgtccttcccgtggtcggtggcgtacaacagcgcac

SEQ ID NO: 135078 - DNA, 60 bp, Artificial
  Synthetic oligonucleotide
ggagttctcgatatgcacgagaaagtccgggtatacgcctgacagtgccgcgccctcgcg

SEQ ID NO: 135079 - DNA, 50 bp, Artificial
  Synthetic oligonucleotide
ctggctactggatctggtgagccggaatgaagtggtgtccgagtgccggc

SEQ ID NO: 135080 - DNA, 50 bp, Artificial
  Synthetic oligonucleotide
accgccccgggtgaacgtcagcgtatggcacgagaaaacctcgaagacgc

SEQ ID NO: 135081 - DNA, 50 bp, Artificial
  Synthetic oligonucleotide
accgccccagggtgcagacgcgccgtctagctaacggtcagtaccgggat

SEQ ID NO: 135082 - DNA, 50 bp, Artificial
  Synthetic oligonucleotide
tcacgctctgcgagcggggttcctgattcgactgcgtccgacgacttcga

SEQ ID NO: 135083 - DNA, 50 bp, Artificial
  Synthetic oligonucleotide
accgcaccagtgcagtcatccccgccccgccaaggacaactataaccagg

SEQ ID NO: 135084 - DNA, 50 bp, Artificial
  Synthetic oligonucleotide
accgcacacccccgctccagtttcacgcatgagctacaagtgctcccgat

SEQ ID NO: 135085 - DNA, 50 bp, Artificial
  Synthetic oligonucleotide
accgcaaccgagcccgcgagtgcgatagactcggaatccacaaagggtcc

SEQ ID NO: 135086 - DNA, 50 bp, Artificial
  Synthetic oligonucleotide
aacgagtcggccggcgaggatggagaaacgacactgtcgcagaaaggcag

SEQ ID NO: 135087 - DNA, 50 bp, Artificial
  Synthetic oligonucleotide
tcacgtctctctcaggtacggtcggttcgtgtcaccgagccaccgacgga

SEQ ID NO: 135088 - DNA, 50 bp, Artificial
  Synthetic oligonucleotide
accgatttgttgggtgcgaaagcctgtgaggccgtacgccgtagtgacgc

SEQ ID NO: 135089 - DNA, 59 bp, Artificial
  Synthetic oligonucleotide
cagtatcctgccactacgcccaccgttgcccccctacggagccactcaccggcatatca

SEQ ID NO: 135090 - DNA, 50 bp, Artificial
  Synthetic oligonucleotide
aacgcccacagaatcgggggtcgtcgggcgaatccgactgcaacgtctgc

SEQ ID NO: 135091 - DNA, 50 bp, Artificial
  Synthetic oligonucleotide
accgatcaggggatgagtaagaccgccggcagttgggacgctctcagtgg

SEQ ID NO: 135092 - DNA, 50 bp, Artificial
  Synthetic oligonucleotide
accgagtgtgcaagcggggtcaaaaggctacgcgtcgcggcgaaggttaa

SEQ ID NO: 135093 - DNA, 50 bp, Artificial
  Synthetic oligonucleotide
accgagcacacctctcatcgtggcaacgtggaatcgccacaccctcccca

SEQ ID NO: 135094 - DNA, 50 bp, Artificial
  Synthetic oligonucleotide
gaaccagtaggacgaaccgtgccaacgaccgggctagcgggtccaatcag

SEQ ID NO: 135095 - DNA, 50 bp, Artificial
  Synthetic oligonucleotide
ctgtacgagcgtcgatgttgtctcagctacgcccgacggacaggccccgg

SEQ ID NO: 135096 - DNA, 50 bp, Artificial
  Synthetic oligonucleotide
accctggagtcgaagcacccaaagcggccctctgccgaccaatccgagac

SEQ ID NO: 135097 - DNA, 50 bp, Artificial
  Synthetic oligonucleotide
accctgatccgcggggtttttgcacggaccgccagtagaactgcgcagtg

SEQ ID NO: 135098 - DNA, 50 bp, Artificial
  Synthetic oligonucleotide
accctcggctggaacatggtgtttgcgatgcaccgcggcatacccagttg

SEQ ID NO: 135099 - DNA, 50 bp, Artificial
  Synthetic oligonucleotide
tcgagcgaatccggacgcgaagtccgcgaaacagacactgtcccatcgcg

SEQ ID NO: 135100 - DNA, 56 bp, Artificial
  Synthetic oligonucleotide
cactgtcactcccctaatagtgttcgatttctgtacggaaatcgaacccatttagc

SEQ ID NO: 135101 - DNA, 50 bp, Artificial
  Synthetic oligonucleotide
acatgttcgccaagcgtctcaatcgcgctcatccggccaccatctcacgg

SEQ ID NO: 135102 - DNA, 50 bp, Artificial
  Synthetic oligonucleotide
acatggaacgcacggacgatctgggggccttactctccgagacgggtccg

SEQ ID NO: 135103 - DNA, 50 bp, Artificial
  Synthetic oligonucleotide
tcgataacggccactccgggatctgcttcgagtgggtttccggtctgacg

SEQ ID NO: 135104 - DNA, 50 bp, Artificial
  Synthetic oligonucleotide
acatgcgtcgtaccactctcgccgacgccatacgcttgggggtaccagtg

SEQ ID NO: 135105 - DNA, 50 bp, Artificial
  Synthetic oligonucleotide
acatctcggaccgaaaagcacgcgagcgggacctccgggagacgaaacga

SEQ ID NO: 135106 - DNA, 50 bp, Artificial
  Synthetic oligonucleotide
acatctcagcccccggtactcctgtcctccatcgtgttcggactcccgga

SEQ ID NO: 135107 - DNA, 50 bp, Artificial
  Synthetic oligonucleotide
tcgcagtagcgggacagaccacagccgtggcgacgggacgaagtgaagaa

SEQ ID NO: 135108 - DNA, 50 bp, Artificial
  Synthetic oligonucleotide
aactcaccgttgtcgggtatggcgggtcggaacgcgtttcggttgggtca

SEQ ID NO: 135109 - DNA, 50 bp, Artificial
  Synthetic oligonucleotide
acatcccggtacggtcgtctgcaagagatgcggctacgcacccgatcacg

SEQ ID NO: 135110 - DNA, 50 bp, Artificial
  Synthetic oligonucleotide
acatagccgctccctcgacgggttaactgccgtcccttacggggtggttc

SEQ ID NO: 135111 - DNA, 58 bp, Artificial
  Synthetic oligonucleotide
ggcagcgtactacgtccactggcgaggcggtgtttacatcgggaactacaatgaggcg

SEQ ID NO: 135112 - DNA, 50 bp, Artificial
  Synthetic oligonucleotide
acatacgccgacacacgacgaggccgtctgttcgcacaccgttgatcccg

SEQ ID NO: 135113 - DNA, 50 bp, Artificial
  Synthetic oligonucleotide
aactcaggacgccgactccgcggggacgagatcgctagccttcgcccgtg

SEQ ID NO: 135114 - DNA, 50 bp, Artificial
  Synthetic oligonucleotide
acagtgagtcgctcctgagagcgttcgagcagtcgacgctgtgttcgggc

SEQ ID NO: 135115 - DNA, 50 bp, Artificial
  Synthetic oligonucleotide
acagtgagtccgccccacctcgaggcgaccacacagagcgtccggttcgt

SEQ ID NO: 135116 - DNA, 50 bp, Artificial
  Synthetic oligonucleotide
aactcgccctccaccgaggactcagccatgacgaactcagtcacgggacg

SEQ ID NO: 135117 - DNA, 50 bp, Artificial
  Synthetic oligonucleotide
aactcgtgacacgcgagcgtaaccgtcttcatgacggctcaccccgttcg

SEQ ID NO: 135118 - DNA, 50 bp, Artificial
  Synthetic oligonucleotide
tcgggagggaacgcctggttcacagaaagggcgctgtaagttccacggtg

SEQ ID NO: 135119 - DNA, 50 bp, Artificial
  Synthetic oligonucleotide
acagtagacagaaagccactgattgcgctgaatagtccgagctgctcgta

SEQ ID NO: 135120 - DNA, 50 bp, Artificial
  Synthetic oligonucleotide
aacgggtgtaaatgcgacccgtgtggacttgcagtcaacgcagcacgtga

SEQ ID NO: 135121 - DNA, 50 bp, Artificial
  Synthetic oligonucleotide
acccagtgcctcaaccgacgcattcctgacgcggcgacactccgaacgga

SEQ ID NO: 135122 - DNA, 60 bp, Artificial
  Synthetic oligonucleotide
cactgacttgtccagtgcttaccttcttgacgcagatttgacgggtgcctctctctctgg

SEQ ID NO: 135123 - DNA, 50 bp, Artificial
  Synthetic oligonucleotide
aacggtcactcctccgagcgccgctaatcgagtcgcaagcagtgttcggg

SEQ ID NO: 135124 - DNA, 50 bp, Artificial
  Synthetic oligonucleotide
tccggtgtaggaagattgcactgctcccacggagtactttccccgccgac

SEQ ID NO: 135125 - DNA, 50 bp, Artificial
  Synthetic oligonucleotide
tccggttcccggttgagttcaggcgcagggaagtcagtacgataggacgc

SEQ ID NO: 135126 - DNA, 50 bp, Artificial
  Synthetic oligonucleotide
acccacaacgtcgcgattggtccccgcctcagtacttctccgaccgaaga

SEQ ID NO: 135127 - DNA, 50 bp, Artificial
  Synthetic oligonucleotide
aacggtctcgggttccaccgggacggacccagcgtgtacttccgattgcg

SEQ ID NO: 135128 - DNA, 50 bp, Artificial
  Synthetic oligonucleotide
aacggttccgaactgactgcctcgagacggcttccgatcgtcgaagcggc

SEQ ID NO: 135129 - DNA, 50 bp, Artificial
  Synthetic oligonucleotide
accatacgcgagtctcgccgcggaaacaaaaggacctaccggtgcggtct

SEQ ID NO: 135130 - DNA, 50 bp, Artificial
  Synthetic oligonucleotide
aacggtttactgggtggccgacggagtcctctccatgtaccgcgtcaccc

SEQ ID NO: 135131 - DNA, 50 bp, Artificial
  Synthetic oligonucleotide
aacgtccgactgcgtttattcgacgggtcagtgaacggccacccgaccat

SEQ ID NO: 135132 - DNA, 50 bp, Artificial
  Synthetic oligonucleotide
accactgtcgatgccgagaaaccgcgaccaccgcttccctcagtagcgga

SEQ ID NO: 135133 - DNA, 58 bp, Artificial
  Synthetic oligonucleotide
cactataacgtaaattgtaggctatgagtgattcatcggagtccggaaattcacgtta

SEQ ID NO: 135134 - DNA, 50 bp, Artificial
  Synthetic oligonucleotide
aacgtcggcgttacgcgagccagccgtgtagacgatgacactcgagaggc

SEQ ID NO: 135135 - DNA, 50 bp, Artificial
  Synthetic oligonucleotide
accactcgacgcccttggtacgcgtcccgacaaaccgggagaggataccg

SEQ ID NO: 135136 - DNA, 50 bp, Artificial
  Synthetic oligonucleotide
accaccgtcccgcgagcatactcggacgccgtcattcctcggccgcaccg

SEQ ID NO: 135137 - DNA, 50 bp, Artificial
  Synthetic oligonucleotide
accacagtgagggcgcgtgtgcctcgatgggtcgtcgaatgctgggactc

SEQ ID NO: 135138 - DNA, 50 bp, Artificial
  Synthetic oligonucleotide
accacaacaccgtgtctctatcgtcgcccgtctggactcggggaccgcgt

SEQ ID NO: 135139 - DNA, 50 bp, Artificial
  Synthetic oligonucleotide
aactaagtgtgacccgacgctatcgagcgacgtggcacatgacagccgcc

SEQ ID NO: 135140 - DNA, 50 bp, Artificial
  Synthetic oligonucleotide
accaactggcagacacacgtcgaaacgtggctcaacgaggccccgcatac

SEQ ID NO: 135141 - DNA, 50 bp, Artificial
  Synthetic oligonucleotide
aactcaccgtctcgcagaatgcgccgtcggacgagtttagcgtcgtcggt

SEQ ID NO: 135142 - DNA, 50 bp, Artificial
  Synthetic oligonucleotide
accaaccagcgtgcggtctgtggagtcaggcgattccgtgccccctcaaa

SEQ ID NO: 135143 - DNA, 50 bp, Artificial
  Synthetic oligonucleotide
ccgcttacgtgccgaaccgctacggtgccagtcttactcacgagacgggc

SEQ ID NO: 135144 - DNA, 60 bp, Artificial
  Synthetic oligonucleotide
agtgggactgtatccaagaacgcgctgctgaggctgtaggcgtcccgatggaggaaatgc

SEQ ID NO: 135145 - DNA, 59 bp, Artificial
  Synthetic oligonucleotide
aggagaccctctcagagtcgttcgtcgagtatgtgacagaggagtatccggaaatcgtc

SEQ ID NO: 135146 - DNA, 55 bp, Artificial
  Synthetic oligonucleotide
ggccgttcctcgtgcgatacccgctactgccccgaccactacctcggatgggtcc

SEQ ID NO: 135147 - DNA, 50 bp, Artificial
  Synthetic oligonucleotide
ccgctggaccggctctccactcgtgcattcctcacgctatcggacacagc

SEQ ID NO: 135148 - DNA, 50 bp, Artificial
  Synthetic oligonucleotide
ccgctctatcggctcaactgcgacgcggacagaaagcactgcttcgccac

SEQ ID NO: 135149 - DNA, 50 bp, Artificial
  Synthetic oligonucleotide
ccgcgaaccacattcggcgcacccatcgcaacggccaagtttaactcggt

SEQ ID NO: 135150 - DNA, 50 bp, Artificial
  Synthetic oligonucleotide
ccgccggaacgaacgtgcccggtacaccgcagacacacgcagtcaaagaa

SEQ ID NO: 135151 - DNA, 50 bp, Artificial
  Synthetic oligonucleotide
ccgcaagtgcgacggtgtgccgaccgaatgtgttaccccacagggtttgt

SEQ ID NO: 135152 - DNA, 50 bp, Artificial
  Synthetic oligonucleotide
gcgggagccaccttcacagtcatctcgacgctcgctcgagagccgcacga

SEQ ID NO: 135153 - DNA, 50 bp, Artificial
  Synthetic oligonucleotide
ccgattcacccgctcatacccggaagacctcgggaggcgtccgtttggcg

SEQ ID NO: 135154 - DNA, 50 bp, Artificial
  Synthetic oligonucleotide
ccgatggggagagcagagacgggattcaggcagctgcacgggtggtccag

SEQ ID NO: 135155 - DNA, 50 bp, Artificial
  Synthetic oligonucleotide
gcgggtattcatgcggctcgtaccctggagtcgaagcacccaaagcggcc

SEQ ID NO: 135156 - DNA, 50 bp, Artificial
  Synthetic oligonucleotide
ccgatatactgcggacaccgggaagcaaaccggcacccctgtggcggatc

SEQ ID NO: 135157 - DNA, 60 bp, Artificial
  Synthetic oligonucleotide
cacgcaatcaacggctctcgaacaagtcgttgctcttccagacgacgttgctactgagaa

SEQ ID NO: 135158 - DNA, 50 bp, Artificial
  Synthetic oligonucleotide
ccgagtgtgtggctcggctcgctacgggcccagtctcaagtagccccagt

SEQ ID NO: 135159 - DNA, 50 bp, Artificial
  Synthetic oligonucleotide
ccgagtgacgaagtgagtgaggggtcacgtcgtctggggaccctcgtcca

SEQ ID NO: 135160 - DNA, 50 bp, Artificial
  Synthetic oligonucleotide
ccgaggcgcgtctgtgccgagagagtagggtggggtagcttacctgtgtc

SEQ ID NO: 135161 - DNA, 50 bp, Artificial
  Synthetic oligonucleotide
ccgaggaaacgtgagacgaacggggagtccgaatccgcgaccccgcttct

SEQ ID NO: 135162 - DNA, 50 bp, Artificial
  Synthetic oligonucleotide
ccgagcgaatgccgttctcgtacgtcttgtcggaagccccgccagttagg

SEQ ID NO: 135163 - DNA, 50 bp, Artificial
  Synthetic oligonucleotide
ccgactgacgatccagcggtggtgacgtgtggactcccgtatgcgaacgg

SEQ ID NO: 135164 - DNA, 50 bp, Artificial
  Synthetic oligonucleotide
ccgaatccgcgaccccgcttctcggaatagcgcgactgccgtcgggtcac

SEQ ID NO: 135165 - DNA, 50 bp, Artificial
  Synthetic oligonucleotide
ccgaagagacgttcgcggtcgctcccgaggggtactcgaagagtgcgttc

SEQ ID NO: 135166 - DNA, 50 bp, Artificial
  Synthetic oligonucleotide
gcctgcccaactgatactcgtgaacacgtggcgcggctacctaccgagca

SEQ ID NO: 135167 - DNA, 50 bp, Artificial
  Synthetic oligonucleotide
ccgtgcactctgccgttcactgacgtccggtctgtcacttgctcgcgcac

SEQ ID NO: 135168 - DNA, 54 bp, Artificial
  Synthetic oligonucleotide
caccgaccaataactgtcaaccacggcagaacgactaagaacccggggacacga

SEQ ID NO: 135169 - DNA, 50 bp, Artificial
  Synthetic oligonucleotide
gcgaagattccgtggagaatcggcgcccagtcatctggggtgcccgtgac

SEQ ID NO: 135170 - DNA, 50 bp, Artificial
  Synthetic oligonucleotide
ccgtgagcggacagcgtggaacgagaggagcgatcgttctcagacggaga

SEQ ID NO: 135171 - DNA, 50 bp, Artificial
  Synthetic oligonucleotide
ccgtgactcggtcaccgttcgtgtcgaattcagcccacccgccggggtag

SEQ ID NO: 135172 - DNA, 50 bp, Artificial
  Synthetic oligonucleotide
ccgtcgttttagctggcggatacgcaactcgcctgtggccgatcacgagg

SEQ ID NO: 135173 - DNA, 50 bp, Artificial
  Synthetic oligonucleotide
gcgacgcccgtagctgggacgcaaagagctacgtgcaacgagcccgctcg

SEQ ID NO: 135174 - DNA, 50 bp, Artificial
  Synthetic oligonucleotide
ccgtcgagacagaccggatttatttggacggcgatgtccccagcgcgcgt

SEQ ID NO: 135175 - DNA, 50 bp, Artificial
  Synthetic oligonucleotide
ccgtcctcgtctcgcggaaacagctctgggaactcgcttcaaacccacga

SEQ ID NO: 135176 - DNA, 50 bp, Artificial
  Synthetic oligonucleotide
gcgaggctaacgccgtcgcaagactcaccacatactgcaggggcccactt

SEQ ID NO: 135177 - DNA, 50 bp, Artificial
  Synthetic oligonucleotide
gcgatccgacgtccccgttctcaccgttcggacccgtgacgacggcaatg

SEQ ID NO: 135178 - DNA, 50 bp, Artificial
  Synthetic oligonucleotide
ccgtacgggagagacaaactccgcgagatactccggtcacgggcggacgc

SEQ ID NO: 135179 - DNA, 60 bp, Artificial
  Synthetic oligonucleotide
cacagatatggtacacatggcgaccacagagaacagcggcggagttagggcatgggattc

SEQ ID NO: 135180 - DNA, 50 bp, Artificial
  Synthetic oligonucleotide
ccgtacgggaacagagacacgttcgacgcgcctagggaccatcggcggag

SEQ ID NO: 135181 - DNA, 50 bp, Artificial
  Synthetic oligonucleotide
ccggttgccgactgccgagttacattccctcggcgttctggagggcccat

SEQ ID NO: 135182 - DNA, 50 bp, Artificial
  Synthetic oligonucleotide
ccgggggaaacgcggagcgaatcgatgactgaccacaactcagaccgaga

SEQ ID NO: 135183 - DNA, 50 bp, Artificial
  Synthetic oligonucleotide
ccggcggactgaatggagtcaggggtcgcaggccgtcactgcttgaacgg

SEQ ID NO: 135184 - DNA, 50 bp, Artificial
  Synthetic oligonucleotide
ccggatacgtgatgctcccgtcggggtatcggaacgccttcatcggaggc

SEQ ID NO: 135185 - DNA, 50 bp, Artificial
  Synthetic oligonucleotide
gcggagacggccatcgagcgtgcaaactgggacactctcgtagatgggta

SEQ ID NO: 135186 - DNA, 50 bp, Artificial
  Synthetic oligonucleotide
ccggaccactaccgtcgtacggtacgagaacgcgcgcccccatatctgat

SEQ ID NO: 135187 - DNA, 50 bp, Artificial
  Synthetic oligonucleotide
ccggacaggggaaccacccagacgaaccgcacagtgtgagtcatgtggtc

SEQ ID NO: 135188 - DNA, 50 bp, Artificial
  Synthetic oligonucleotide
ccggaacccttcgtgcagaacgactgtcgagtccaccacgctacggcacg

SEQ ID NO: 135189 - DNA, 50 bp, Artificial
  Synthetic oligonucleotide
ccgcttgcacgcagcgaataccggacagtgctcacctccaagggggcgtg

SEQ ID NO: 135190 - DNA, 60 bp, Artificial
  Synthetic oligonucleotide
cacacgagaccgtctcagtaatctcgaatgggacgcacaccactgcacatacaaccccga

SEQ ID NO: 135191 - DNA, 50 bp, Artificial
  Synthetic oligonucleotide
ccgcttcaggcgagtcgacctcactgtagattcgacggacctgcgacgcc

SEQ ID NO: 135192 - DNA, 50 bp, Artificial
  Synthetic oligonucleotide
ccccgctcaacagtccccgttgggagtgcccagcgttcattgtcagctcg

SEQ ID NO: 135193 - DNA, 50 bp, Artificial
  Synthetic oligonucleotide
cccatgtcgagccctatcgaaacgttacaggagcggaccgggacagcaga

SEQ ID NO: 135194 - DNA, 50 bp, Artificial
  Synthetic oligonucleotide
cccagcatcgggaagccgcctttgtactcccgaacgctcccgtcctcgaa

SEQ ID NO: 135195 - DNA, 50 bp, Artificial
  Synthetic oligonucleotide
gcttcgcgagtacccgatgcgccgacactagcagcggcccggagttcaaa

SEQ ID NO: 135196 - DNA, 50 bp, Artificial
  Synthetic oligonucleotide
cccactcgccggtgggtagctggctccgttcttgggttttagcgtcagtt

SEQ ID NO: 135197 - DNA, 50 bp, Artificial
  Synthetic oligonucleotide
cccacgtgtctcccagtccgacttggaacgagcaccggccgtgtccgtcg

SEQ ID NO: 135198 - DNA, 50 bp, Artificial
  Synthetic oligonucleotide
cccaaggcactgaaagccacgactggcgagcggaactgagcagggactat

SEQ ID NO: 135199 - DNA, 50 bp, Artificial
  Synthetic oligonucleotide
ccattacgggttccaccactgtcgatgccgagaaaccgcgaccaccgctt

SEQ ID NO: 135200 - DNA, 50 bp, Artificial
  Synthetic oligonucleotide
ccatgggcccacggtggaagcacagccgacagtgacgtactacctgcgac

SEQ ID NO: 135201 - DNA, 58 bp, Artificial
  Synthetic oligonucleotide
caatcctctacccaagagcgtagatagttaagattgtagagtatttcgagtggtagcg

SEQ ID NO: 135202 - DNA, 50 bp, Artificial
  Synthetic oligonucleotide
ccatgctgtcgtttcgcgtcttgcctgcggtggttcgcgggttatggatg

SEQ ID NO: 135203 - DNA, 50 bp, Artificial
  Synthetic oligonucleotide
ccatccccgacacgacaatggaactcgccgctagcgcagccacgaacagt

SEQ ID NO: 135204 - DNA, 50 bp, Artificial
  Synthetic oligonucleotide
ccatccactcgttcgtgacagcaaaccccctcacggggttcgaggaccag

SEQ ID NO: 135205 - DNA, 50 bp, Artificial
  Synthetic oligonucleotide
ccatcaaacgtcacaacgtcgtccggagagtacggtccccacgcgggatg

SEQ ID NO: 135206 - DNA, 50 bp, Artificial
  Synthetic oligonucleotide
ccatacagtcacgctctgcgagcggggttcctgattcgactgcgtccgac

SEQ ID NO: 135207 - DNA, 50 bp, Artificial
  Synthetic oligonucleotide
ccagcggaacccgtcgtggatcgttttgcggtgtgactcggttggttgga

SEQ ID NO: 135208 - DNA, 50 bp, Artificial
  Synthetic oligonucleotide
ccagagccgcgccgcaagtcgagatggtagggacgagaccgttgcatgga

SEQ ID NO: 135209 - DNA, 50 bp, Artificial
  Synthetic oligonucleotide
ccacggtactcctcagcgaccgtacgggaacagagacacgttcgacgcgc

SEQ ID NO: 135210 - DNA, 50 bp, Artificial
  Synthetic oligonucleotide
ccacggagctctgttcgagtagcggggcgacgttcgggtacgtcagagag

SEQ ID NO: 135211 - DNA, 50 bp, Artificial
  Synthetic oligonucleotide
ggacagtcggcacacgcgcttggactcacgagcgtcgttcgggccctcaa

SEQ ID NO: 135212 - DNA, 54 bp, Artificial
  Synthetic oligonucleotide
caacctggcgtacagaagtaagtgttaaatgggtggatcgaccgaacccgacga

SEQ ID NO: 135213 - DNA, 50 bp, Artificial
  Synthetic oligonucleotide
ccaccggcgggaatttcgtcggaggaaggctgttcggtcgtatcccctgc

SEQ ID NO: 135214 - DNA, 50 bp, Artificial
  Synthetic oligonucleotide
ccaccggaccagtgtcgtccgaacttttgctcccgcttggtctggtcagc

SEQ ID NO: 135215 - DNA, 50 bp, Artificial
  Synthetic oligonucleotide
cgtgaacacgtggcgcggctacctaccgagcacaacgtcccattgatgct

SEQ ID NO: 135216 - DNA, 50 bp, Artificial
  Synthetic oligonucleotide
ccgaaatcgcgaccgtgacgcagtccgactcgggatcgaactgggggttt

SEQ ID NO: 135217 - DNA, 50 bp, Artificial
  Synthetic oligonucleotide
ccgaaaccgcatcccgagcggggtaacatcgtgaaggcgtatgtcgtcct

SEQ ID NO: 135218 - DNA, 50 bp, Artificial
  Synthetic oligonucleotide
ccctttcgaatcgagggtcgtgaacgccgtctgcacagcgtccgctgtcg

SEQ ID NO: 135219 - DNA, 50 bp, Artificial
  Synthetic oligonucleotide
cgtcgtaatggtgcccggcctcgggttgtcaccgtacatttaccggacga

SEQ ID NO: 135220 - DNA, 50 bp, Artificial
  Synthetic oligonucleotide
ccctggaactcgcagtcaaaggcagaaaccgccaacgggcaatcggtggg

SEQ ID NO: 135221 - DNA, 50 bp, Artificial
  Synthetic oligonucleotide
cgtcgtcgagcaatcctaccgagtcctcgccaccgttcgctcgtgccatc

SEQ ID NO: 135222 - DNA, 50 bp, Artificial
  Synthetic oligonucleotide
ccctcgtacggaagcggtgcggactggccgacccaccagttagtgagatc

SEQ ID NO: 135223 - DNA, 56 bp, Artificial
  Synthetic oligonucleotide
caacccggatgcagaacccctcagggtgcgaaatatgcaaccgtcccgagtcgacg

SEQ ID NO: 135224 - DNA, 50 bp, Artificial
  Synthetic oligonucleotide
gctactacgaacagccgcgacagacatcgcttcgggatctggcctcgcag

SEQ ID NO: 135225 - DNA, 50 bp, Artificial
  Synthetic oligonucleotide
ccctcggttgcggcggcgttaggaatccccgtggataccgatacagacgg

SEQ ID NO: 135226 - DNA, 50 bp, Artificial
  Synthetic oligonucleotide
ccctcggtatggtgggtgcaagcgctgtctcggctggcctcgggttggtg

SEQ ID NO: 135227 - DNA, 50 bp, Artificial
  Synthetic oligonucleotide
gctagttaattgttctacacgaaccttattctcctcgaaatcctctgtga

SEQ ID NO: 135228 - DNA, 50 bp, Artificial
  Synthetic oligonucleotide
ccctcgcagatcgtgtccgagaggcaagcgggtcggtaatcctggttccg

SEQ ID NO: 135229 - DNA, 50 bp, Artificial
  Synthetic oligonucleotide
ccctcactgtcccgcaaaacgtctcgccacgaggcattctcacagcgtta

SEQ ID NO: 135230 - DNA, 50 bp, Artificial
  Synthetic oligonucleotide
cccgtcgtccgtgcatctccgaacgctgctggctaggattctcgccaagg

SEQ ID NO: 135231 - DNA, 50 bp, Artificial
  Synthetic oligonucleotide
cgtctccgcaactgcgacgtcccgttcgataaccgctgtggcgttccggg

SEQ ID NO: 135232 - DNA, 50 bp, Artificial
  Synthetic oligonucleotide
cccgatatgatcacgttcgcaaagggcgtggccagttcgtacgtgccgca

SEQ ID NO: 135233 - DNA, 50 bp, Artificial
  Synthetic oligonucleotide
cccgatagaccgacggttccagtgattcccgccgcctgtacgaaccgccg

SEQ ID NO: 135234 - DNA, 59 bp, Artificial
  Synthetic oligonucleotide
caaccagggaaccgctgatctaagcgcctgttacgcacattcccatcgtttatgtgtta

SEQ ID NO: 135235 - DNA, 50 bp, Artificial
  Synthetic oligonucleotide
cccgagaggcactagacgcggggttcgatgtgctcaagacgaaagcgggc

SEQ ID NO: 135236 - DNA, 50 bp, Artificial
  Synthetic oligonucleotide
cccgagacgaacgtgctacccgaggtcgagggaatgaaaggcccgctgtc

SEQ ID NO: 135237 - DNA, 50 bp, Artificial
  Synthetic oligonucleotide
cccgacggaggattcccgcccgtgttacgtggtgcgaagcatggctccta

SEQ ID NO: 135238 - DNA, 50 bp, Artificial
  Synthetic oligonucleotide
cccctgatattggtccaccctgcgtccactccggggtcgtatgcactgcg

SEQ ID NO: 135239 - DNA, 50 bp, Artificial
  Synthetic oligonucleotide
ccccgtgtgagaagtctcccgcgtggtttgtcgcggcagagaacaggtta

SEQ ID NO: 135240 - DNA, 50 bp, Artificial
  Synthetic oligonucleotide
ccccggtcgtgttacaacagtacgtcgaggtgtgccacaagcacgccacg

SEQ ID NO: 135241 - DNA, 50 bp, Artificial
  Synthetic oligonucleotide
ccccggtcgcagtacacggagttgtcagggacttcgccgagagagtcgac

SEQ ID NO: 135242 - DNA, 50 bp, Artificial
  Synthetic oligonucleotide
cgtcgccgtgtgctttgggtacgttgagtggcgaacggtccggaaacctg

SEQ ID NO: 135243 - DNA, 50 bp, Artificial
  Synthetic oligonucleotide
cgctccgaatcaacgcctgtggagactgcgctccctgtggatacctcggt

SEQ ID NO: 135244 - DNA, 50 bp, Artificial
  Synthetic oligonucleotide
gagttcgcacaatctgctggctatcagcgtctcatagaacagctcacagg

SEQ ID NO: 135245 - DNA, 58 bp, Artificial
  Synthetic oligonucleotide
cgagagtcatcatcgccgggatacagcgcgtacagttcggagtacgtgaaaatcccgg

SEQ ID NO: 135246 - DNA, 50 bp, Artificial
  Synthetic oligonucleotide
cgcgttcacgaatccatccgagagaggacacgaggcaggagccccggacc

SEQ ID NO: 135247 - DNA, 50 bp, Artificial
  Synthetic oligonucleotide
cgcgtgttccatccgtggatccgtagctggcgagtcggtgagatccggga

SEQ ID NO: 135248 - DNA, 50 bp, Artificial
  Synthetic oligonucleotide
gatacatcgtctcggtccgttgcgtcctcgggatccggtaggagggggtc

SEQ ID NO: 135249 - DNA, 50 bp, Artificial
  Synthetic oligonucleotide
cgcgtgctcgaaggggaatcggtccccgagggtgtccccgaacttctcgc

SEQ ID NO: 135250 - DNA, 50 bp, Artificial
  Synthetic oligonucleotide
cgcgtcacagaccggcgagcgactctccctgctgtactatctgggggcgc

SEQ ID NO: 135251 - DNA, 50 bp, Artificial
  Synthetic oligonucleotide
cgcgtcacacagcgttggaaaagaactcgcagcggtcaaagacgaccgcg

SEQ ID NO: 135252 - DNA, 50 bp, Artificial
  Synthetic oligonucleotide
cgcgtatccgagagtgcacgagatgcaagcagcgcaccacagaggacgtt

SEQ ID NO: 135253 - DNA, 50 bp, Artificial
  Synthetic oligonucleotide
gatccagtccatgagtcggcgtatcacacgtctcaggtcccctctcgggg

SEQ ID NO: 135254 - DNA, 50 bp, Artificial
  Synthetic oligonucleotide
cgcggggtgactggaccgctccgagaccggctgacgtgggaactcgcggg

SEQ ID NO: 135255 - DNA, 50 bp, Artificial
  Synthetic oligonucleotide
cgcggcggtcgaacggtcgggttagtcctaccctggtcgggcgatagtaa

SEQ ID NO: 135256 - DNA, 52 bp, Artificial
  Synthetic oligonucleotide
gtaccccacagtaactagacctagtttacaaccatcgggagggtcggaacaa

SEQ ID NO: 135257 - DNA, 57 bp, Artificial
  Synthetic oligonucleotide
cgagagctgtcgctttgagcgtctgaacccggtaattcgtccggcggcagtagtgtt

SEQ ID NO: 135258 - DNA, 50 bp, Artificial
  Synthetic oligonucleotide
gatcgctgccggctattacgacgatgggatcagcgacgcccgtagctggg

SEQ ID NO: 135259 - DNA, 50 bp, Artificial
  Synthetic oligonucleotide
gatctaactccagtcgtgggtatcaatcccctcatagtgttttaatcgcg

SEQ ID NO: 135260 - DNA, 50 bp, Artificial
  Synthetic oligonucleotide
cgcggaggctatcgactccgacggggcataatcgacggatcgtacggtcg

SEQ ID NO: 135261 - DNA, 50 bp, Artificial
  Synthetic oligonucleotide
cgcggaaacagctctgggaactcgcttcaaacccacgaggggttcggctg

SEQ ID NO: 135262 - DNA, 50 bp, Artificial
  Synthetic oligonucleotide
gatggaaatgtccccgtagtggagttcccaatactattggcaccgaaaag

SEQ ID NO: 135263 - DNA, 50 bp, Artificial
  Synthetic oligonucleotide
gatggcggggtgtcgtccgtaccggttacacttcgacgagggggagagaa

SEQ ID NO: 135264 - DNA, 50 bp, Artificial
  Synthetic oligonucleotide
cgcctcgagaatagcgttcaccgttcgaccgacatccgttctgcgccggt

SEQ ID NO: 135265 - DNA, 50 bp, Artificial
  Synthetic oligonucleotide
cgccggttggagcgtcaaccccatcccgagcatgattagcccgagcagtg

SEQ ID NO: 135266 - DNA, 50 bp, Artificial
  Synthetic oligonucleotide
gattgacgaggaaccctggaacttgtattggcacgaattcaagagtggct

SEQ ID NO: 135267 - DNA, 50 bp, Artificial
  Synthetic oligonucleotide
cgcccgtacactcgccgggactggaaccactgtctgaatcgcgtgacgat

SEQ ID NO: 135268 - DNA, 60 bp, Artificial
  Synthetic oligonucleotide
cgagaatgaacgacctcgtgacacacacctacggcgaggtctcattgaagtccacatata

SEQ ID NO: 135269 - DNA, 50 bp, Artificial
  Synthetic oligonucleotide
cgtcattctacccttgcatatttgttcctctattcgggcgtctgttacta

SEQ ID NO: 135270 - DNA, 50 bp, Artificial
  Synthetic oligonucleotide
cgtatgtgcccccgacaatcccctctgacgtttgagcgcgagcaagtcgc

SEQ ID NO: 135271 - DNA, 50 bp, Artificial
  Synthetic oligonucleotide
cgtcccacgtgtatccccagccgtatcgtgcgatcacaccagtgaaggcg

SEQ ID NO: 135272 - DNA, 50 bp, Artificial
  Synthetic oligonucleotide
cggtggaacgggatcggtacgacgagctagagacgcccgagcatcggctc

SEQ ID NO: 135273 - DNA, 50 bp, Artificial
  Synthetic oligonucleotide
cggtcggttcgtgtcaccgagccaccgacggaggaatcgaacgggtccac

SEQ ID NO: 135274 - DNA, 50 bp, Artificial
  Synthetic oligonucleotide
cggggtccgctactggttacacgcaagtctcggcgcacctacctctgacg

SEQ ID NO: 135275 - DNA, 50 bp, Artificial
  Synthetic oligonucleotide
cggggcgggaacagggggtgtgggtaacgcaccgtgacatcgccaagtcc

SEQ ID NO: 135276 - DNA, 50 bp, Artificial
  Synthetic oligonucleotide
cgggatcggtacgacgagctagagacgcccgagcatcggctcgcaaaggc

SEQ ID NO: 135277 - DNA, 50 bp, Artificial
  Synthetic oligonucleotide
gaggaaacggcggacccattcaagacgcgagcgttcgagtacggggagga

SEQ ID NO: 135278 - DNA, 50 bp, Artificial
  Synthetic oligonucleotide
cgggacacgaatagaggtcgaggggagcatcgcagtcccacggatcgctg

SEQ ID NO: 135279 - DNA, 60 bp, Artificial
  Synthetic oligonucleotide
gcatctagtgcccactcgtacgcattcctgaacgttggctcaccacaccagaaagcgctt

SEQ ID NO: 135280 - DNA, 50 bp, Artificial
  Synthetic oligonucleotide
cgtcccatgtagccgcgggggcatgcgttgaaatgtcccgggtgtcacag

SEQ ID NO: 135281 - DNA, 50 bp, Artificial
  Synthetic oligonucleotide
cggcgacctcctttcgtccgagtaaggtccgcgccagacactggacgctt

SEQ ID NO: 135282 - DNA, 50 bp, Artificial
  Synthetic oligonucleotide
cggccgtctaccggcgtgcagatgagaccgtgtgtacgtgtagtccaggc

SEQ ID NO: 135283 - DNA, 50 bp, Artificial
  Synthetic oligonucleotide
cggcagtggcgtcatgttagctgggtcccggagctatatcgcgcacaacg

SEQ ID NO: 135284 - DNA, 50 bp, Artificial
  Synthetic oligonucleotide
cggaggctggcccacccgtctgctagtcccagagcgtcgcgtttgctgct

SEQ ID NO: 135285 - DNA, 50 bp, Artificial
  Synthetic oligonucleotide
cggaggagtcgacgtcgctctaccttcacctgtcgccgggcgaacactcc

SEQ ID NO: 135286 - DNA, 50 bp, Artificial
  Synthetic oligonucleotide
cggagaacgttctcagtgacgctcccgaggaggaccctctcgagtcccgt

SEQ ID NO: 135287 - DNA, 50 bp, Artificial
  Synthetic oligonucleotide
cggacacgcaggcatcatggagagtaacaagcgtagggagccgccctacg

SEQ ID NO: 135288 - DNA, 50 bp, Artificial
  Synthetic oligonucleotide
cgcttggactcacgagcgtcgttcgggccctcaatggtgtggttagcgac

SEQ ID NO: 135289 - DNA, 50 bp, Artificial
  Synthetic oligonucleotide
cgcttgcacgaccagggacgtgacacgtgggacagctgatccgggtgcta

SEQ ID NO: 135290 - DNA, 59 bp, Artificial
  Synthetic oligonucleotide
cgaaccagtctgtaggcgacaacctgacatggtgattctcgtatgaccactaacccaac

SEQ ID NO: 135291 - DNA, 50 bp, Artificial
  Synthetic oligonucleotide
cgctgtagcgtccgtgttgttgttcgcgcatcccacgcatcaacgtacgc

SEQ ID NO: 135292 - DNA, 50 bp, Artificial
  Synthetic oligonucleotide
cgctgatcggactccgcggttcccgttcatttcactcgcgggtcacgttg

SEQ ID NO: 135293 - DNA, 50 bp, Artificial
  Synthetic oligonucleotide
gccatttgctgcgaggtcctccgcccgacctaccagtgtctcggcgttcc

SEQ ID NO: 135294 - DNA, 50 bp, Artificial
  Synthetic oligonucleotide
cgtcggtgggtgtgtaggctatggtccgcttgacccccgcctaaagacgg

SEQ ID NO: 135295 - DNA, 50 bp, Artificial
  Synthetic oligonucleotide
gcccactctaccggccaacgactcaatacgactggctctcgcctccgtga

SEQ ID NO: 135296 - DNA, 50 bp, Artificial
  Synthetic oligonucleotide
cctggcggagtcgccatcctctgggggtagacgtggtggtgtgccaactg

SEQ ID NO: 135297 - DNA, 50 bp, Artificial
  Synthetic oligonucleotide
gccccaattgcccgacgcgtgagtatgaattgtcccgttccgacgtgcat

SEQ ID NO: 135298 - DNA, 50 bp, Artificial
  Synthetic oligonucleotide
cctgctcaagcgtgctgcccagtcctcaagtgaggggccgtatattcccg

SEQ ID NO: 135299 - DNA, 50 bp, Artificial
  Synthetic oligonucleotide
cctgcactacttgacgctggggtgactgttgcactcggaacagacggggc

SEQ ID NO: 135300 - DNA, 50 bp, Artificial
  Synthetic oligonucleotide
cctgatccgttgaaggctttccgcgctgttcgtccgggttggtcgagtgc

SEQ ID NO: 135301 - DNA, 60 bp, Artificial
  Synthetic oligonucleotide
cgaaattaccgagatgacagacttcgagaccgtctcgcacgtctgtcttgagtgccggtc

SEQ ID NO: 135302 - DNA, 50 bp, Artificial
  Synthetic oligonucleotide
cctgagtgcgactgtgagcgatggcgagtgaactcccggcctatcgacgc

SEQ ID NO: 135303 - DNA, 50 bp, Artificial
  Synthetic oligonucleotide
cctctgggttggggagacgctaacctctactcggcaaccaaccagcaggc

SEQ ID NO: 135304 - DNA, 50 bp, Artificial
  Synthetic oligonucleotide
gccgaagtacccgccgccccacgacgtgaggaactcgttgaatacgcagc

SEQ ID NO: 135305 - DNA, 50 bp, Artificial
  Synthetic oligonucleotide
cctctctccgagcactcttcgtccaccggtccaactgggaacgcgctccg

SEQ ID NO: 135306 - DNA, 50 bp, Artificial
  Synthetic oligonucleotide
cctcggctggcgtctgtccgttgagtgattggtgcggtcgttgtgtgtta

SEQ ID NO: 135307 - DNA, 50 bp, Artificial
  Synthetic oligonucleotide
gccgcctgaggacgcaccggacgacggaccagcgaacgacttcgagtcgg

SEQ ID NO: 135308 - DNA, 50 bp, Artificial
  Synthetic oligonucleotide
cctcgagtttcgagcacgaccgtttctcccacgcgaattgcgacccacga

SEQ ID NO: 135309 - DNA, 50 bp, Artificial
  Synthetic oligonucleotide
gccggaagtgcggtgtcgtgtgaatcgtcccgcttgtacgcggctgcaaa

SEQ ID NO: 135310 - DNA, 50 bp, Artificial
  Synthetic oligonucleotide
gccggttgctagtacctccgctgggcccctaagacgccacgaccacccga

SEQ ID NO: 135311 - DNA, 50 bp, Artificial
  Synthetic oligonucleotide
cctcagcggcaaacacggacacggattctgtcgacgcggggcgaggtgca

SEQ ID NO: 135312 - DNA, 60 bp, Artificial
  Synthetic oligonucleotide
gccatcgtaccactcccggtcgacagtctcagggtcgaacgattctccacacatcgtcag

SEQ ID NO: 135313 - DNA, 50 bp, Artificial
  Synthetic oligonucleotide
cctacgacgcgaaccaactccgcgcgatactaggtcaccggcgggatgca

SEQ ID NO: 135314 - DNA, 50 bp, Artificial
  Synthetic oligonucleotide
cctaccgaaccgattcccgcgtcacagaccggcgagcgactctccctgct

SEQ ID NO: 135315 - DNA, 50 bp, Artificial
  Synthetic oligonucleotide
ccgttgccgtcttgggggccaccccgggtgaggtatattccatcgtcaac

SEQ ID NO: 135316 - DNA, 50 bp, Artificial
  Synthetic oligonucleotide
ccgtgccacgtgccgtctcgggtagatcccgctgggtcctgaaatctgac

SEQ ID NO: 135317 - DNA, 50 bp, Artificial
  Synthetic oligonucleotide
cgccaggtccgtatcgaaggacggccacggccggtactcatggagcagat

SEQ ID NO: 135318 - DNA, 50 bp, Artificial
  Synthetic oligonucleotide
cgccacgttggtgaaccgtagagtccgtcacggtcggtaagcggtcgggg

SEQ ID NO: 135319 - DNA, 50 bp, Artificial
  Synthetic oligonucleotide
cgcactcattcagcgaggggtactaccggtcgagcgaacgcgtcaggacc

SEQ ID NO: 135320 - DNA, 50 bp, Artificial
  Synthetic oligonucleotide
gcacaaagaatgttgggttgacaggtcgtccctcccgtccccggtctccg

SEQ ID NO: 135321 - DNA, 50 bp, Artificial
  Synthetic oligonucleotide
cgattgacgccacctcgccttcggtccagtcgaacgagggactccggagc

SEQ ID NO: 135322 - DNA, 50 bp, Artificial
  Synthetic oligonucleotide
cgatgttgtctcagctacgcccgacggacaggccccggtcgtggttgtcc

SEQ ID NO: 135323 - DNA, 60 bp, Artificial
  Synthetic oligonucleotide
cctgtcgatatgcttggttagggtggtctcgtaaaaatgcaaggactctcttgtgcaatc

SEQ ID NO: 135324 - DNA, 50 bp, Artificial
  Synthetic oligonucleotide
cgatgagttcgtgcggacgggccctgtagctcggtatcagcgtcgatgcg

SEQ ID NO: 135325 - DNA, 50 bp, Artificial
  Synthetic oligonucleotide
cgatagtacggatcgtggctgagtccgctgtgtgcgtccagctcggctgg

SEQ ID NO: 135326 - DNA, 50 bp, Artificial
  Synthetic oligonucleotide
cgaggacgagtgtaacttcgcctgggctgaccgcgttgcacagttcgcca

SEQ ID NO: 135327 - DNA, 50 bp, Artificial
  Synthetic oligonucleotide
cgagcgtcggctgtacacctcacctggttttcgcgagaatggggacgtga

SEQ ID NO: 135328 - DNA, 50 bp, Artificial
  Synthetic oligonucleotide
cgtcggtcaccgtgcaagcccgatggacgggactagagggacgaacactg

SEQ ID NO: 135329 - DNA, 50 bp, Artificial
  Synthetic oligonucleotide
cgagagcaccagtgaggtgccagtatcgacgcgccatctgggtgccatcg

SEQ ID NO: 135330 - DNA, 50 bp, Artificial
  Synthetic oligonucleotide
cgagactggccgtcgcgagggaccgattgattcgcccgtcgctgacagat

SEQ ID NO: 135331 - DNA, 50 bp, Artificial
  Synthetic oligonucleotide
cgacttcgacatgccgtcggacgttcccgaactctgagcctcgaaccgga

SEQ ID NO: 135332 - DNA, 50 bp, Artificial
  Synthetic oligonucleotide
gcagtgccgcatcgcacgctgcacaaggaaccgtttggtggtcgtcctct

SEQ ID NO: 135333 - DNA, 50 bp, Artificial
  Synthetic oligonucleotide
gcataagtggcggccagacgagggacttggcgctgcttttagtcagggct

SEQ ID NO: 135334 - DNA, 60 bp, Artificial
  Synthetic oligonucleotide
gcccagacgacacgacattgaccggacacagtacgcgactcgacaggagatttacgccca

SEQ ID NO: 135335 - DNA, 50 bp, Artificial
  Synthetic oligonucleotide
cgacgtaccgcgagcctacgccgagtaaccgacgttttccatcggtccga

SEQ ID NO: 135336 - DNA, 50 bp, Artificial
  Synthetic oligonucleotide
cgaccaccgcttccctcagtagcggaactcgaactgtgccccgccagcag

SEQ ID NO: 135337 - DNA, 50 bp, Artificial
  Synthetic oligonucleotide
cgacagcgagtgtcggagcactcgtcactcacgggaacaacgggggactc

SEQ ID NO: 135338 - DNA, 50 bp, Artificial
  Synthetic oligonucleotide
cgaacgctctgggcacagcaccccgagtcactttcattctccgacctccg

SEQ ID NO: 135339 - DNA, 50 bp, Artificial
  Synthetic oligonucleotide
cgaacgaagtcagtgagaaccgcggatgacgagcggggaacagcctgacc

SEQ ID NO: 135340 - DNA, 50 bp, Artificial
  Synthetic oligonucleotide
cctgtctctacaaagcggggcgggaacagggggtgtgggtaacgcaccgt

SEQ ID NO: 135341 - DNA, 50 bp, Artificial
  Synthetic oligonucleotide
agggttacatcccacgcggggtgactggaccgctccgagaccggctgacg

SEQ ID NO: 135342 - DNA, 50 bp, Artificial
  Synthetic oligonucleotide
agggtgctctccaggcataccttcgggattggtcgcgcagcggcttagtg

SEQ ID NO: 135343 - DNA, 50 bp, Artificial
  Synthetic oligonucleotide
ggtggttgtcgtctgcgtccataccccgagtagcgagcgggcgggtaaat

SEQ ID NO: 135344 - DNA, 50 bp, Artificial
  Synthetic oligonucleotide
ggtgtgtagaaatcagtacgaccaaatgaagtacaacctcgaaactgggt

SEQ ID NO: 135345 - DNA, 60 bp, Artificial
  Synthetic oligonucleotide
cctgcctaccgccgttagtaacagtcaatctcggacctccgatgcaatctgagacacgcg

SEQ ID NO: 135346 - DNA, 50 bp, Artificial
  Synthetic oligonucleotide
ctcctcagtccgtgccacattcgcgctctgagttcagcacgtcccgctca

SEQ ID NO: 135347 - DNA, 50 bp, Artificial
  Synthetic oligonucleotide
ggttgcgacccgccagtctctgtcgctacgctcggtcagacactcgagac

SEQ ID NO: 135348 - DNA, 50 bp, Artificial
  Synthetic oligonucleotide
agggcggcgaaccagccagctatgaatgtgtctgcgtaccgcctggcttt

SEQ ID NO: 135349 - DNA, 50 bp, Artificial
  Synthetic oligonucleotide
aggcgtagccgcgggactcgactgcactctctcctgtctgcgctcggtag

SEQ ID NO: 135350 - DNA, 50 bp, Artificial
  Synthetic oligonucleotide
aggcggttggagacacgctcctccaacgagatgcgcttgagacactcccg

SEQ ID NO: 135351 - DNA, 50 bp, Artificial
  Synthetic oligonucleotide
aggcgctcacgacacctccgttccagacaccggtaaccgcacacctccgg

SEQ ID NO: 135352 - DNA, 50 bp, Artificial
  Synthetic oligonucleotide
gtaaccagtgtgaatcggaccggagcacgatcccggcgtcagggggtcga

SEQ ID NO: 135353 - DNA, 50 bp, Artificial
  Synthetic oligonucleotide
aggcgagggtacaccgggaccgtaatgtcgcactcgaggggcccagtcgt

SEQ ID NO: 135354 - DNA, 50 bp, Artificial
  Synthetic oligonucleotide
aggcgaataggagcggaagaaaggccacaccaagccgcggactgagttgc

SEQ ID NO: 135355 - DNA, 50 bp, Artificial
  Synthetic oligonucleotide
aggcaacgccggcagaggtgtcccttcgccgtggggtttcggggagtcat

SEQ ID NO: 135356 - DNA, 54 bp, Artificial
  Synthetic oligonucleotide
gcccccctgatattggtccaccctgcgtccgcttcggggtcgtatacaccgccc

SEQ ID NO: 135357 - DNA, 50 bp, Artificial
  Synthetic oligonucleotide
aggagcccgacgcactacactcgtacccgtcagggtcgacacccaccgtc

SEQ ID NO: 135358 - DNA, 50 bp, Artificial
  Synthetic oligonucleotide
aggagcactcccagcgccaacctccttggcactcagcgacgatctcatct

SEQ ID NO: 135359 - DNA, 50 bp, Artificial
  Synthetic oligonucleotide
aggagaagatatcgagggtggcccatgtcacgtcctcgctccgctcggtg

SEQ ID NO: 135360 - DNA, 50 bp, Artificial
  Synthetic oligonucleotide
ctcgcagcgacgggtctcgtccctaccgaaccgattcccgcgtcacagac

SEQ ID NO: 135361 - DNA, 50 bp, Artificial
  Synthetic oligonucleotide
aggaatcgggaatggactggggccggaacgaacaaaacgggtcgctgctc

SEQ ID NO: 135362 - DNA, 50 bp, Artificial
  Synthetic oligonucleotide
agctattgctggggacggccatgctgtcgtttcgcgtcttgcctgcggtg

SEQ ID NO: 135363 - DNA, 50 bp, Artificial
  Synthetic oligonucleotide
agcgtgcaaactgggacactctcgtagatgggtacgcggacggccgatcg

SEQ ID NO: 135364 - DNA, 50 bp, Artificial
  Synthetic oligonucleotide
agcgtgactgttacgggttcccagatttgggtcgcttctcggagcgcgtt

SEQ ID NO: 135365 - DNA, 50 bp, Artificial
  Synthetic oligonucleotide
agcgtccaaggaccgagcctgtcgtcgtgtgcgtgtttcgcaagcgagta

SEQ ID NO: 135366 - DNA, 50 bp, Artificial
  Synthetic oligonucleotide
agtggatcgcccaactcccgagtccatcattcggggagaccggcccagcc

SEQ ID NO: 135367 - DNA, 56 bp, Artificial
  Synthetic oligonucleotide
agcgttcggtcgtgagaatcgaccgatgacgaagccggttccggacgtcgtacagc

SEQ ID NO: 135368 - DNA, 60 bp, Artificial
  Synthetic oligonucleotide
cctgatgcaacagctatccccggccatacaggaaccggagtcaggctatatgccgtccca

SEQ ID NO: 135369 - DNA, 50 bp, Artificial
  Synthetic oligonucleotide
agtgctcacgcggtcggctgatcgtctgcacagttcgcgccggagaccat

SEQ ID NO: 135370 - DNA, 50 bp, Artificial
  Synthetic oligonucleotide
agtgctaccggctgctaatccggccgcgagacttccccgtttacccgaga

SEQ ID NO: 135371 - DNA, 50 bp, Artificial
  Synthetic oligonucleotide
agtgcgggatgacggcgaacgcagatgtgaacggtgcggagaacattcga

SEQ ID NO: 135372 - DNA, 50 bp, Artificial
  Synthetic oligonucleotide
ggtagcacggagagtcacgtcctcgcattcgatctggcatgacccgcgcg

SEQ ID NO: 135373 - DNA, 50 bp, Artificial
  Synthetic oligonucleotide
agtgccaacggtccacccgtgatggcgatagcaaccgctaacccgtacga

SEQ ID NO: 135374 - DNA, 50 bp, Artificial
  Synthetic oligonucleotide
agtgactgccgactcgattctcccaaggcgctcgtcaatcgctgcgagtg

SEQ ID NO: 135375 - DNA, 50 bp, Artificial
  Synthetic oligonucleotide
agtgaacgtcccaccgccggaacgaacgtgcccggtacaccgcagacaca

SEQ ID NO: 135376 - DNA, 50 bp, Artificial
  Synthetic oligonucleotide
agtctatcatttcacgcgccaggtccgtatcgaaggacggccacggccgg

SEQ ID NO: 135377 - DNA, 50 bp, Artificial
  Synthetic oligonucleotide
agtcggccgctcctcatcgtgtgctgtcagtgtgatccccggagtcgtaa

SEQ ID NO: 135378 - DNA, 50 bp, Artificial
  Synthetic oligonucleotide
agtccgatcccagcatcgggaagccgcctttgtactcccgaacgctcccg

SEQ ID NO: 135379 - DNA, 60 bp, Artificial
  Synthetic oligonucleotide
cctctaccactcagaggcaaagcgtggaaccacagcgttccacgcctatgcgacactcta

SEQ ID NO: 135380 - DNA, 50 bp, Artificial
  Synthetic oligonucleotide
agtccgaacgctgaacggcggttggatgctgcccccgtgtttaccgaccc

SEQ ID NO: 135381 - DNA, 50 bp, Artificial
  Synthetic oligonucleotide
agtccacaccgtcgacagagcccaccctggaggcattcgagaccgatgac

SEQ ID NO: 135382 - DNA, 50 bp, Artificial
  Synthetic oligonucleotide
ctcagcgaccgtacgggaacagagacacgttcgacgcgcctagggaccat

SEQ ID NO: 135383 - DNA, 50 bp, Artificial
  Synthetic oligonucleotide
ctcatccgtagtgttggtcgcgagcgttggccccagcacgaagcatcgcc

SEQ ID NO: 135384 - DNA, 50 bp, Artificial
  Synthetic oligonucleotide
agtagccactgaacgtcagtacacacccactcgcacggaggcgacgcgat

SEQ ID NO: 135385 - DNA, 50 bp, Artificial
  Synthetic oligonucleotide
ctccagcgaggcctgggtcgtcttgagccgtcgcccggtcacgttctcaa

SEQ ID NO: 135386 - DNA, 50 bp, Artificial
  Synthetic oligonucleotide
agtacagcatcccgaactcggttggctcctcacacggtgactcccggctc

SEQ ID NO: 135387 - DNA, 50 bp, Artificial
  Synthetic oligonucleotide
agtaagagcgaagacctaacggcagggtgcaactcccagcgtcgccctga

SEQ ID NO: 135388 - DNA, 50 bp, Artificial
  Synthetic oligonucleotide
agtaaccgtccctgccggctggttgtggctaccgtccccgaagaacttgg

SEQ ID NO: 135389 - DNA, 50 bp, Artificial
  Synthetic oligonucleotide
aggtgccagtatcgacgcgccatctgggtgccatcgtgaccgcactagtt

SEQ ID NO: 135390 - DNA, 57 bp, Artificial
  Synthetic oligonucleotide
cctcggtcagtgtacaccctatacttagcatctcaacccgttcactctaattggaaa

SEQ ID NO: 135391 - DNA, 50 bp, Artificial
  Synthetic oligonucleotide
ggtgagttgggactcaacccacggttcgaggggttcatctgcgtcaggga

SEQ ID NO: 135392 - DNA, 50 bp, Artificial
  Synthetic oligonucleotide
aggtcgcgtgccgtgtggtcttcatccgtgctgcacactatggtccgttg

SEQ ID NO: 135393 - DNA, 50 bp, Artificial
  Synthetic oligonucleotide
agagtcgtggtcgcaacgagttcgctcaccggcgtacactacgcgacgct

SEQ ID NO: 135394 - DNA, 50 bp, Artificial
  Synthetic oligonucleotide
agaggcacttgacgccctcgtcgggggattcaaccgtcaccgatctccct

SEQ ID NO: 135395 - DNA, 50 bp, Artificial
  Synthetic oligonucleotide
agaggacgctcacgccctctaccccgatctggtcgctcccgaaacccaga

SEQ ID NO: 135396 - DNA, 50 bp, Artificial
  Synthetic oligonucleotide
agagcgttgcttccccggtgaaaaccccgtcatcgtcagcggttagctct

SEQ ID NO: 135397 - DNA, 50 bp, Artificial
  Synthetic oligonucleotide
agagcgactactctgggttcgtgcccccgtacgttggtcccacgcagaca

SEQ ID NO: 135398 - DNA, 50 bp, Artificial
  Synthetic oligonucleotide
agagccctcgcgtacggagacgggacaatctatgcgctcaccgcagacgg

SEQ ID NO: 135399 - DNA, 50 bp, Artificial
  Synthetic oligonucleotide
agagacaaactccgcgagatactccggtcacgggcggacgcgttccagac

SEQ ID NO: 135400 - DNA, 50 bp, Artificial
  Synthetic oligonucleotide
ctcgccgacgaagggttgtgctcgacgtacgcccactcgcacgatctgat

SEQ ID NO: 135401 - DNA, 57 bp, Artificial
  Synthetic oligonucleotide
cctcgctcgagccttcttcctccgaccgcgtaagcgtttcgacgtacagcgcgagtc

SEQ ID NO: 135402 - DNA, 50 bp, Artificial
  Synthetic oligonucleotide
agacgtagatcaggtgcatcgcgacgatacgagcgacgggagcccgttcg

SEQ ID NO: 135403 - DNA, 50 bp, Artificial
  Synthetic oligonucleotide
agacggctattttggggacggtgccctgctaccgacagatgccaaccgtt

SEQ ID NO: 135404 - DNA, 50 bp, Artificial
  Synthetic oligonucleotide
agacgcgtaaaagcgtgcgtccgttggccgtgttcccgatcgcactcctc

SEQ ID NO: 135405 - DNA, 50 bp, Artificial
  Synthetic oligonucleotide
agacgcaggcgactacacgtggggtgactctcaccacccgagcttatccg

SEQ ID NO: 135406 - DNA, 50 bp, Artificial
  Synthetic oligonucleotide
agaccggctcggaatcactcgacaaggtgtccacagcgcgttatcaccgc

SEQ ID NO: 135407 - DNA, 50 bp, Artificial
  Synthetic oligonucleotide
agacccccagtgcctcagcgttacgatccacagctgccatgcgtgcactt

SEQ ID NO: 135408 - DNA, 50 bp, Artificial
  Synthetic oligonucleotide
agacaccctgcggtgaacacccaccgatctggggttgtgtatgccagcgc

SEQ ID NO: 135409 - DNA, 50 bp, Artificial
  Synthetic oligonucleotide
agacaaccgtcagacacgacggggcagtcggtttcccggtgacgacgtgt

SEQ ID NO: 135410 - DNA, 50 bp, Artificial
  Synthetic oligonucleotide
agaattgcgtttccagggcatgggtatcacagtgatcgaccaagcagaat

SEQ ID NO: 135411 - DNA, 50 bp, Artificial
  Synthetic oligonucleotide
agaatcgggggtcgtcgggcgaatccgactgcaacgtctgcccagtcgcg

SEQ ID NO: 135412 - DNA, 60 bp, Artificial
  Synthetic oligonucleotide
gccgtgctagaagtatatgtgcatggagccatctagtcagaacacagtccggtccaaccg

SEQ ID NO: 135413 - DNA, 50 bp, Artificial
  Synthetic oligonucleotide
agaacgctgtcgacgctcccagagtcactgaccgcctcggtctactccgc

SEQ ID NO: 135414 - DNA, 50 bp, Artificial
  Synthetic oligonucleotide
gtgaatcgtcagtcatagaacgtaacccagtatgctaacacctactgaca

SEQ ID NO: 135415 - DNA, 50 bp, Artificial
  Synthetic oligonucleotide
ctcggtaaggcgcggtgtcgtcgccatttctacacgcctgaggtccctcg

SEQ ID NO: 135416 - DNA, 50 bp, Artificial
  Synthetic oligonucleotide
gtgaccgcactagttgggtgccgtcttgtgcgaaacaccgcggttccagt

SEQ ID NO: 135417 - DNA, 50 bp, Artificial
  Synthetic oligonucleotide
actgggtggccgacggagtcctctccatgtaccgcgtcacccttgacacc

SEQ ID NO: 135418 - DNA, 50 bp, Artificial
  Synthetic oligonucleotide
agcgtatgcagcactgtgggatgcgcaagtcgaagccaacacggctgacg

SEQ ID NO: 135419 - DNA, 50 bp, Artificial
  Synthetic oligonucleotide
agcggttgcgaggacgattggaatccgaccggtgtccccctgttgaactc

SEQ ID NO: 135420 - DNA, 50 bp, Artificial
  Synthetic oligonucleotide
agcgggtcttggttatctggcaggtgacacggcaatgggtacaagcgggg

SEQ ID NO: 135421 - DNA, 50 bp, Artificial
  Synthetic oligonucleotide
agcggcggagtcactgagctgtagctgggtctcctgtaacgggtcgagtt

SEQ ID NO: 135422 - DNA, 50 bp, Artificial
  Synthetic oligonucleotide
agcgcgggacgtgctgtctcgaaaagagtgggcgtgagctactatcgcga

SEQ ID NO: 135423 - DNA, 60 bp, Artificial
  Synthetic oligonucleotide
cctaccagatttccatcattcgaagagtgtgtgatttccatggagtgtagccacctgaac

SEQ ID NO: 135424 - DNA, 50 bp, Artificial
  Synthetic oligonucleotide
agcgccactagctttccgccacagtcactcccgacacgaaccgcctacta

SEQ ID NO: 135425 - DNA, 50 bp, Artificial
  Synthetic oligonucleotide
agcgaccgggactgcgaacggtcatcgctgacacgagcgcccttgttggt

SEQ ID NO: 135426 - DNA, 50 bp, Artificial
  Synthetic oligonucleotide
agcctttcggactgcttccggaccgtatcgggcaccaggtctgttgcttg

SEQ ID NO: 135427 - DNA, 50 bp, Artificial
  Synthetic oligonucleotide
agcctcaccgtgtgcagtgagtgttgacccccgccgtcccttatgtgcaa

SEQ ID NO: 135428 - DNA, 50 bp, Artificial
  Synthetic oligonucleotide
agccgtaatctctgcgagtcccactcccgcttcgtcgccagtgagtgcag

SEQ ID NO: 135429 - DNA, 50 bp, Artificial
  Synthetic oligonucleotide
agccggtgtgtcgcttccggtcgcatccgacttgtcagtcgcgcctttgt

SEQ ID NO: 135430 - DNA, 50 bp, Artificial
  Synthetic oligonucleotide
agccgcatgaggtggtcagagccagtcagtcttcccagcgggatagcatg

SEQ ID NO: 135431 - DNA, 50 bp, Artificial
  Synthetic oligonucleotide
agcccggaaagatacagtcgcaagcgcacgtggatgggtatggtccgagc

SEQ ID NO: 135432 - DNA, 50 bp, Artificial
  Synthetic oligonucleotide
agcccgcgagtgcgatagactcggaatccacaaagggtccccgtccgaac

SEQ ID NO: 135433 - DNA, 50 bp, Artificial
  Synthetic oligonucleotide
agcccaccggattcggtcatagttgaccggattcaaagagcgtttccctc

SEQ ID NO: 135434 - DNA, 60 bp, Artificial
  Synthetic oligonucleotide
ccgtggcggtctgctgttatgtatcacctacacgcacgcctacttattgattgtccttac

SEQ ID NO: 135435 - DNA, 50 bp, Artificial
  Synthetic oligonucleotide
agccactccgtcaggagcccgacgcactacactcgtacccgtcagggtcg

SEQ ID NO: 135436 - DNA, 50 bp, Artificial
  Synthetic oligonucleotide
agccaccggggtcgtccgagagctgtgaggtgctcacacacggaacgagg

SEQ ID NO: 135437 - DNA, 50 bp, Artificial
  Synthetic oligonucleotide
agcatggaccgtctggccgcgggttcgtatataaatcctcgtccgggggt

SEQ ID NO: 135438 - DNA, 50 bp, Artificial
  Synthetic oligonucleotide
agcacaagaccgggataccagtaactgcgccaaggtggcagagttcggcc

SEQ ID NO: 135439 - DNA, 50 bp, Artificial
  Synthetic oligonucleotide
agcaacggttcgtatcgggagagactcgcccacggccccgcttcgtggat

SEQ ID NO: 135440 - DNA, 50 bp, Artificial
  Synthetic oligonucleotide
agatggtcacgagcgatgtgggggacagacgcgcagtcaggtgtgcgctc

SEQ ID NO: 135441 - DNA, 50 bp, Artificial
  Synthetic oligonucleotide
agatcgcgattctcctgacgcgcccgtattgcggacccggtatcacggct

SEQ ID NO: 135442 - DNA, 50 bp, Artificial
  Synthetic oligonucleotide
agatactccggtcacgggcggacgcgttccagacggatacgctctcgaac

SEQ ID NO: 135443 - DNA, 50 bp, Artificial
  Synthetic oligonucleotide
agagtgaatcgtcttggggtcaagccttgaggcactcggcctaccccgcc

SEQ ID NO: 135444 - DNA, 50 bp, Artificial
  Synthetic oligonucleotide
cagacgggacggtcttactcgacgcggagacggccatcgagcgtgcaaac

SEQ ID NO: 135445 - DNA, 54 bp, Artificial
  Synthetic oligonucleotide
ccgtatagcggtttcggcgactagatgggacaccacgtttcgagtgtaacgcgg

SEQ ID NO: 135446 - DNA, 50 bp, Artificial
  Synthetic oligonucleotide
cagacgccacacaatactgcagggtcgtcaagtcgctctgccggccacgg

SEQ ID NO: 135447 - DNA, 50 bp, Artificial
  Synthetic oligonucleotide
cagacgacgggtcactccggctcacggcgcacaacacggtcgtaagcgag

SEQ ID NO: 135448 - DNA, 50 bp, Artificial
  Synthetic oligonucleotide
cagacccgcgtgtcgatagtcggccgctcctcatcgtgtgctgtcagtgt

SEQ ID NO: 135449 - DNA, 50 bp, Artificial
  Synthetic oligonucleotide
cgtgtcttcgccccgttgggcagacatggcgttatttgtgtcggctccac

SEQ ID NO: 135450 - DNA, 50 bp, Artificial
  Synthetic oligonucleotide
cactggggatgccggtcgagaaagtccggttcgctatcgcggggatcggc

SEQ ID NO: 135451 - DNA, 50 bp, Artificial
  Synthetic oligonucleotide
cactgcgggcaagtgagtcgctcgacggtcacggacgcacaacacgtctc

SEQ ID NO: 135452 - DNA, 50 bp, Artificial
  Synthetic oligonucleotide
cactgatgacggacgcacccaaccacggtacacccgcagttgtgaccgat

SEQ ID NO: 135453 - DNA, 50 bp, Artificial
  Synthetic oligonucleotide
ggcataagtgtttcgcgatcggctgtctagtcaagcaccacgaccatcac

SEQ ID NO: 135454 - DNA, 50 bp, Artificial
  Synthetic oligonucleotide
ggccagacgagggacttggcgctgcttttagtcagggctgggtctcctgt

SEQ ID NO: 135455 - DNA, 50 bp, Artificial
  Synthetic oligonucleotide
cacgcttctccgcgtcacgtcgacagacaatccgggcttgtcctgtctcg

SEQ ID NO: 135456 - DNA, 60 bp, Artificial
  Synthetic oligonucleotide
gcgcgtctgtgcccgctgtaccgagattcactcgcgggacgatctctactgttcgaggtg

SEQ ID NO: 135457 - DNA, 50 bp, Artificial
  Synthetic oligonucleotide
cacgccggtagccgctaatgcacttcgtaacaccacttccccgacagcgg

SEQ ID NO: 135458 - DNA, 50 bp, Artificial
  Synthetic oligonucleotide
cacgcacagccgcagttaccgggatcggattactcccgaacggaacgcac

SEQ ID NO: 135459 - DNA, 50 bp, Artificial
  Synthetic oligonucleotide
cgttaatttccctactctcggaagaactgagaacgatgttcaagcagtgt

SEQ ID NO: 135460 - DNA, 50 bp, Artificial
  Synthetic oligonucleotide
cacgaacccaccgattgcccgttggcggtttctgcctttgactgcgagtt

SEQ ID NO: 135461 - DNA, 50 bp, Artificial
  Synthetic oligonucleotide
caccgcgtcccgccatacgtcgacctcgctagcgtactttccgctttgaa

SEQ ID NO: 135462 - DNA, 50 bp, Artificial
  Synthetic oligonucleotide
caccgacagatccgtagccgctcactgtagccggtgtgtcgcttccggtc

SEQ ID NO: 135463 - DNA, 50 bp, Artificial
  Synthetic oligonucleotide
ggcgcgtttgtcgtggattgccggtgagactcccatcgttgagcgcgttc

SEQ ID NO: 135464 - DNA, 50 bp, Artificial
  Synthetic oligonucleotide
cacaacgaccgcaccaatcactcaacggacaaacgccaaccgaggtgcta

SEQ ID NO: 135465 - DNA, 50 bp, Artificial
  Synthetic oligonucleotide
caacatctccccgcggttcccgaatatgcgtcactgggagagcggtgacc

SEQ ID NO: 135466 - DNA, 50 bp, Artificial
  Synthetic oligonucleotide
ccacccctcccagtcgagattgcagacggctcttacgccgacccctcagt

SEQ ID NO: 135467 - DNA, 57 bp, Artificial
  Synthetic oligonucleotide
gcgctgaaacggggcgctggacgttcctccggcggttcgcaggcggtgactgggaga

SEQ ID NO: 135468 - DNA, 50 bp, Artificial
  Synthetic oligonucleotide
ccacatggagtacgtgctctgggacccgacgcacaccgaacgctggcagt

SEQ ID NO: 135469 - DNA, 50 bp, Artificial
  Synthetic oligonucleotide
ccacagactcccaccgcgaaccacattcggcgcacccatcgcaacggcca

SEQ ID NO: 135470 - DNA, 50 bp, Artificial
  Synthetic oligonucleotide
ccaactccgcgaccctgcaaacgtacacgcactaaacggtccgcggcgac

SEQ ID NO: 135471 - DNA, 50 bp, Artificial
  Synthetic oligonucleotide
ccaaatggcgatactggcccgctcgacggcctaacggtccttgacgcctc

SEQ ID NO: 135472 - DNA, 50 bp, Artificial
  Synthetic oligonucleotide
cattgatcgcagtgacgaccctctggggtaccgaggcgcgaaccggagat

SEQ ID NO: 135473 - DNA, 50 bp, Artificial
  Synthetic oligonucleotide
cgtgctgcccagtcctcaagtgaggggccgtatattcccgccctgatgag

SEQ ID NO: 135474 - DNA, 50 bp, Artificial
  Synthetic oligonucleotide
catgtcggggaactcgcgaactgggcggacgcaacgatccacctcttgtt

SEQ ID NO: 135475 - DNA, 50 bp, Artificial
  Synthetic oligonucleotide
catgccgtcggacgttcccgaactctgagcctcgaaccggacaggtcgca

SEQ ID NO: 135476 - DNA, 50 bp, Artificial
  Synthetic oligonucleotide
ggagggaacgtttggccagcactgaacccctggcgagggatcgtctcgct

SEQ ID NO: 135477 - DNA, 50 bp, Artificial
  Synthetic oligonucleotide
catcgggcccgtcccacagactcccaccgcgaaccacattcggcgcaccc

SEQ ID NO: 135478 - DNA, 60 bp, Artificial
  Synthetic oligonucleotide
agcgttcgagtctagctgtgagcccgaaatctcaactcagaacgcctacagcactacatt

SEQ ID NO: 135479 - DNA, 58 bp, Artificial
  Synthetic oligonucleotide
gcggactgatgtgttcaacgttacgttgtatacactgttaacagcgtaacaggccctc

SEQ ID NO: 135480 - DNA, 50 bp, Artificial
  Synthetic oligonucleotide
cgtggacgtactcggcgcacgcactctcgttccccggtgggttctcagat

SEQ ID NO: 135481 - DNA, 50 bp, Artificial
  Synthetic oligonucleotide
catccgggtggacgtaggacagcaacggcgttccatccatttgctcggga

SEQ ID NO: 135482 - DNA, 50 bp, Artificial
  Synthetic oligonucleotide
catccaaaacgacccggccgtgcggagcggtagtgagtggcgaatcgtcg

SEQ ID NO: 135483 - DNA, 50 bp, Artificial
  Synthetic oligonucleotide
cataaggacatcgcggatacaatcaatgtagaaggggccagcgaactgca

SEQ ID NO: 135484 - DNA, 50 bp, Artificial
  Synthetic oligonucleotide
cagtgaagccgccaccacagaccgtgcattcgggtaggtgatcgggagcg

SEQ ID NO: 135485 - DNA, 50 bp, Artificial
  Synthetic oligonucleotide
caggggcacacgctgcgatctccgttcgcgtttgtctgagaccgagacac

SEQ ID NO: 135486 - DNA, 50 bp, Artificial
  Synthetic oligonucleotide
cagggaacggagctcaggaaccagtacgccggtcgcgtgccgctaggagt

SEQ ID NO: 135487 - DNA, 50 bp, Artificial
  Synthetic oligonucleotide
caggcaccctcaccacaaccggattcacgggttcagacgggagcgggctc

SEQ ID NO: 135488 - DNA, 50 bp, Artificial
  Synthetic oligonucleotide
cagcgtagtcagtcgcgagcgaaaaggcagtccccggcaggagaacgggc

SEQ ID NO: 135489 - DNA, 50 bp, Artificial
  Synthetic oligonucleotide
ggattcgggactcgattcgcgattgggatgtgcactcgcccgtggacctc

SEQ ID NO: 135490 - DNA, 53 bp, Artificial
  Synthetic oligonucleotide
ccggacggcggttcaggaggggaacctgagcgctgaaacggggcgctggacgt

SEQ ID NO: 135491 - DNA, 50 bp, Artificial
  Synthetic oligonucleotide
cagccgagtgagtcccctcccgcgcgtctgggcacggaaacaccttatcc

SEQ ID NO: 135492 - DNA, 50 bp, Artificial
  Synthetic oligonucleotide
cagagaggtgtgcgagaatcgccttcccaggtgcggtcactggaagcggg

SEQ ID NO: 135493 - DNA, 50 bp, Artificial
  Synthetic oligonucleotide
atgagtcgccaccgtcagtagacacagtggtcgcagcctccacaggcgtt

SEQ ID NO: 135494 - DNA, 50 bp, Artificial
  Synthetic oligonucleotide
atctggcaggtgacacggcaatgggtacaagcgggggcctgtagaatgcc

SEQ ID NO: 135495 - DNA, 50 bp, Artificial
  Synthetic oligonucleotide
atctgcgtatgtgcggtggtgtcgctgcctacggacgcggtgacattcat

SEQ ID NO: 135496 - DNA, 50 bp, Artificial
  Synthetic oligonucleotide
atctgacatatggcgtcagagtgtcgccggtagccaacgcggagaccgct

SEQ ID NO: 135497 - DNA, 50 bp, Artificial
  Synthetic oligonucleotide
atctccgaagcgagattctgagtgacgacacgatcccgcttgccgcggcg

SEQ ID NO: 135498 - DNA, 50 bp, Artificial
  Synthetic oligonucleotide
atcggttcgactggccgtctgatggagcgatccgccgttctcaacggacg

SEQ ID NO: 135499 - DNA, 50 bp, Artificial
  Synthetic oligonucleotide
gggcgtatcgacaggtctggtttacgtgtgcatttccattgggtgttcga

SEQ ID NO: 135500 - DNA, 50 bp, Artificial
  Synthetic oligonucleotide
ctagtacctccgctgggcccctaagacgccacgaccacccgaacccacgg

SEQ ID NO: 135501 - DNA, 58 bp, Artificial
  Synthetic oligonucleotide
gcggatttgaaaccagtccgggtcccgatacaggccgtgtcaatccctgatgcgttga

SEQ ID NO: 135502 - DNA, 50 bp, Artificial
  Synthetic oligonucleotide
atcggggacccgtcctgccgcgattgttgcaaccccggttggatttatta

SEQ ID NO: 135503 - DNA, 50 bp, Artificial
  Synthetic oligonucleotide
atcggcaccgctcgactctgcaagcatcacccggcttacggtaccccaga

SEQ ID NO: 135504 - DNA, 50 bp, Artificial
  Synthetic oligonucleotide
atcgcgtgtaccgactgaacggcgggataaatagctgcccccgaaagcgg

SEQ ID NO: 135505 - DNA, 50 bp, Artificial
  Synthetic oligonucleotide
gactctggcacggacagcgttggcgatcatcgctcacacggttcggactg

SEQ ID NO: 135506 - DNA, 50 bp, Artificial
  Synthetic oligonucleotide
atccgtagccgctcactgtagccggtgtgtcgcttccggtcgcatccgac

SEQ ID NO: 135507 - DNA, 50 bp, Artificial
  Synthetic oligonucleotide
atccgcccgctgttggaaatctcccgggcgcgtcgaatcgaagtgctttc

SEQ ID NO: 135508 - DNA, 50 bp, Artificial
  Synthetic oligonucleotide
atccgaggggctccacagggtgacgtcatctcgagagagcgttgcttccc

SEQ ID NO: 135509 - DNA, 50 bp, Artificial
  Synthetic oligonucleotide
atccgagactggccctcgagtttcgagcacgaccgtttctcccacgcgaa

SEQ ID NO: 135510 - DNA, 50 bp, Artificial
  Synthetic oligonucleotide
gggtacgacgaatgggggtgtcaacagcatgcacaacagctggaccgcac

SEQ ID NO: 135511 - DNA, 50 bp, Artificial
  Synthetic oligonucleotide
gggtagatgcgacgcgacccttgagccgacttccgtgacgaggcgacgtt

SEQ ID NO: 135512 - DNA, 60 bp, Artificial
  Synthetic oligonucleotide
ccgccgttagtaacagtcaatctcggacctccgatgcaatctgagacacgcgtccacgcg

SEQ ID NO: 135513 - DNA, 50 bp, Artificial
  Synthetic oligonucleotide
gggtagattcctgggccccgtcttcactcgtcaccatcgaatcctgcgcc

SEQ ID NO: 135514 - DNA, 50 bp, Artificial
  Synthetic oligonucleotide
gactcgagtgtaaacgtgtagagaccggggcccttcgggggcgtcacata

SEQ ID NO: 135515 - DNA, 50 bp, Artificial
  Synthetic oligonucleotide
atcaaattatccagtgagacgattgactcactcaacagcatcgcggaggc

SEQ ID NO: 135516 - DNA, 50 bp, Artificial
  Synthetic oligonucleotide
atcaaaaccgggcttcgtgagctgccaccggtgctgtttgctggcctccg

SEQ ID NO: 135517 - DNA, 50 bp, Artificial
  Synthetic oligonucleotide
agtgttgcccggcttaacgccagtcatggcacacctgaccatcgacggtt

SEQ ID NO: 135518 - DNA, 50 bp, Artificial
  Synthetic oligonucleotide
caaactatgccccggtaagctggcgcattgacccgtgcttgcgtaccagc

SEQ ID NO: 135519 - DNA, 50 bp, Artificial
  Synthetic oligonucleotide
caaacggtgttaacctccctggctgggcgacggaagtcgacgctcgagag

SEQ ID NO: 135520 - DNA, 50 bp, Artificial
  Synthetic oligonucleotide
atttcgtcggaggaaggctgttcggtcgtatcccctgcggtcgagccact

SEQ ID NO: 135521 - DNA, 50 bp, Artificial
  Synthetic oligonucleotide
attggtgagccaggcgaataggagcggaagaaaggccacaccaagccgcg

SEQ ID NO: 135522 - DNA, 50 bp, Artificial
  Synthetic oligonucleotide
cgttgatgggatggtgacaccctcacccctcggtgtgaatggtcccccat

SEQ ID NO: 135523 - DNA, 59 bp, Artificial
  Synthetic oligonucleotide
ccgatcgaaactgtgattaaactggcacgacggttgcagtgcttccgtgatacaccaac

SEQ ID NO: 135524 - DNA, 50 bp, Artificial
  Synthetic oligonucleotide
attgccacagcgacactcggtcagtattggggtggatcgtcggcccacga

SEQ ID NO: 135525 - DNA, 50 bp, Artificial
  Synthetic oligonucleotide
attcgtcgagaatcccttggaggttcccgattgcgggtccaccgtcagga

SEQ ID NO: 135526 - DNA, 50 bp, Artificial
  Synthetic oligonucleotide
attcgctgatggctccgaaccccttcgtgcgacccgagacgcagttcgtg

SEQ ID NO: 135527 - DNA, 50 bp, Artificial
  Synthetic oligonucleotide
attcgattgccgagcggacaagccgtttggggtgctcgttcaagcccgat

SEQ ID NO: 135528 - DNA, 50 bp, Artificial
  Synthetic oligonucleotide
attcctgcacgagtggggcaccgatgtacgacttccccaaaccgacgctg

SEQ ID NO: 135529 - DNA, 50 bp, Artificial
  Synthetic oligonucleotide
attccagcgaacaatccagccgcgctagcaagcagccctcctctcgcagt

SEQ ID NO: 135530 - DNA, 50 bp, Artificial
  Synthetic oligonucleotide
atgtgcggttttcaacacgacgcggtcaggcggcacgatctcgtcaggtg

SEQ ID NO: 135531 - DNA, 50 bp, Artificial
  Synthetic oligonucleotide
atgtcgggactgagtgctgccgtcacgttgagttcgccacttccctgcgt

SEQ ID NO: 135532 - DNA, 50 bp, Artificial
  Synthetic oligonucleotide
gggacggtcaaacgtcccccttcctcagccgagtcatcgccatccgtgtg

SEQ ID NO: 135533 - DNA, 50 bp, Artificial
  Synthetic oligonucleotide
ctacccggcgacagccgtcggaagcaccctaccccatttttcgccgtctc

SEQ ID NO: 135534 - DNA, 56 bp, Artificial
  Synthetic oligonucleotide
ccgactcgtgcgttctccggtagttttatgatataccgtaactaagctacgattga

SEQ ID NO: 135535 - DNA, 50 bp, Artificial
  Synthetic oligonucleotide
atggacccccggtttggactcgacgtgggaacgcacttgctcagtaaccg

SEQ ID NO: 135536 - DNA, 50 bp, Artificial
  Synthetic oligonucleotide
atggaactacacccgttcgctgcagacgagcttccggcgaccgatcggta

SEQ ID NO: 135537 - DNA, 50 bp, Artificial
  Synthetic oligonucleotide
atgcggtgtgtttggtctggcgactggactctacggtcccgcccgtggta

SEQ ID NO: 135538 - DNA, 50 bp, Artificial
  Synthetic oligonucleotide
gggccaacggctgataccacgaccgggggaacggcatcgaactcgcagta

SEQ ID NO: 135539 - DNA, 50 bp, Artificial
  Synthetic oligonucleotide
atgcggggacggctactgccgtcgtggagttaccggagacagctgacgtc

SEQ ID NO: 135540 - DNA, 50 bp, Artificial
  Synthetic oligonucleotide
atgcctcgcgttgcaagaggagactcactgtcgcgccacgcttgtcagta

SEQ ID NO: 135541 - DNA, 50 bp, Artificial
  Synthetic oligonucleotide
gggccggagtgggggcagaagcactacgtcgcgttcaacaagggccgaaa

SEQ ID NO: 135542 - DNA, 60 bp, Artificial
  Synthetic oligonucleotide
ccgaccaagtggctgaagaatctcgacggacgagaagggcgcattattcgcgcggcagtg

SEQ ID NO: 135543 - DNA, 56 bp, Artificial
  Synthetic oligonucleotide
gcgtgactgaagacttagagtttgcggtcgagacggactgaaaacccagaacggga

SEQ ID NO: 135544 - DNA, 54 bp, Artificial
  Synthetic oligonucleotide
ccgaattagttactaaaatcgaaccccccgaaccagtcgatgagatgggctcta

SEQ ID NO: 135545 - DNA, 59 bp, Artificial
  Synthetic oligonucleotide
gctagcaatcggtactaatcgcaagactgcggtacgatacgtactaatcaatacgtacg

SEQ ID NO: 135546 - DNA, 54 bp, Artificial
  Synthetic oligonucleotide
gtactggttttgtccactcacgccggtcaccctttgacgaagtactcctctggg

SEQ ID NO: 135547 - DNA, 60 bp, Artificial
  Synthetic oligonucleotide
tggtacgccggccgatcagcggagagcctgactcgttcagtcgaagccgtcgaaccgtga

SEQ ID NO: 135548 - DNA, 55 bp, Artificial
  Synthetic oligonucleotide
tgggtgggctcccgccgacatcgcgcggaagttccaaaccgacgcggccaccgtc

SEQ ID NO: 135549 - DNA, 55 bp, Artificial
  Synthetic oligonucleotide
tgggagtataaaggcaaggcctgaaccctcggtgaaacggagggcgagaggcctc

SEQ ID NO: 135550 - DNA, 50 bp, Artificial
  Synthetic oligonucleotide
tggccgccccccggcggggggcggtaatcgtgtgcgggggggtggcggtc

SEQ ID NO: 135551 - DNA, 59 bp, Artificial
  Synthetic oligonucleotide
aagtataccgtgcctctctcggatattactggattcgaggcgtcagtccctcagaggtc

SEQ ID NO: 135552 - DNA, 60 bp, Artificial
  Synthetic oligonucleotide
tgcgagaacaaacacagggagcttatcctcagcgtatgttccacgtccgcgcgtggacag

SEQ ID NO: 135553 - DNA, 60 bp, Artificial
  Synthetic oligonucleotide
tgcgactcaccggactcgctgttaggggtgtgcctaagggcacaacatcaaaacacatac

SEQ ID NO: 135554 - DNA, 58 bp, Artificial
  Synthetic oligonucleotide
tgccactacgcccaccgttgcccccctacggagccactcaccggcatatcaaccgctc

SEQ ID NO: 135555 - DNA, 60 bp, Artificial
  Synthetic oligonucleotide
tgcaaggtgggctcgagatttgcagggatcgctgttatcactctttcttgccggagtagt

SEQ ID NO: 135556 - DNA, 56 bp, Artificial
  Synthetic oligonucleotide
tgatgttgaatcggtttggtcggctgtgtgttaagtacgtcggctattgtaacggg

SEQ ID NO: 135557 - DNA, 56 bp, Artificial
  Synthetic oligonucleotide
gtagattttaggctatcctaaaatcgaaggccatttatcactttaggatggactaa

SEQ ID NO: 135558 - DNA, 59 bp, Artificial
  Synthetic oligonucleotide
aatccagtgatccggctcgtatggatctggagcgaccgagtggacgtgatccgggaccc

SEQ ID NO: 135559 - DNA, 55 bp, Artificial
  Synthetic oligonucleotide
aatcccggtgaagcatttccccgtagccgtcgagagtgtggtcaagacggccgta

SEQ ID NO: 135560 - DNA, 54 bp, Artificial
  Synthetic oligonucleotide
aatcgaggcgttctacgatttcggggacgtattggagtttgtggaccgctacac

SEQ ID NO: 135561 - DNA, 60 bp, Artificial
  Synthetic oligonucleotide
tctgttttactcatatgagtcgtgtcagtgtcggttatcggtctctgcggctcggaagcg

SEQ ID NO: 135562 - DNA, 60 bp, Artificial
  Synthetic oligonucleotide
tctgtggtgagttctgagctcgcttcgagtgatggttcgcgatatataatatcgtaagtc

SEQ ID NO: 135563 - DNA, 60 bp, Artificial
  Synthetic oligonucleotide
tctggtcccgtccatgctcgcactggtcccttagtctcacttgcgcacgtattggagaac

SEQ ID NO: 135564 - DNA, 60 bp, Artificial
  Synthetic oligonucleotide
acatgatagtccctgtcccgacagcaaatccggttacagtccctatcagcgagggcgcga

SEQ ID NO: 135565 - DNA, 58 bp, Artificial
  Synthetic oligonucleotide
tcgcgggacggaacaacgtgaggaagcagggtacgacgcggtggagatagatgccgac

SEQ ID NO: 135566 - DNA, 60 bp, Artificial
  Synthetic oligonucleotide
tcgctccagcagcgcttgtgacacggctcccctcgggcgttcggtatcgctcggtcgaaa

SEQ ID NO: 135567 - DNA, 57 bp, Artificial
  Synthetic oligonucleotide
tcggcgggtcataacgaaccaccgattttcggattccggtgtgatgcgtctagagta

SEQ ID NO: 135568 - DNA, 60 bp, Artificial
  Synthetic oligonucleotide
agcctgctaatcgtagcaggtactgatttctgacacaaatgctaagcacggactaataac

SEQ ID NO: 135569 - DNA, 56 bp, Artificial
  Synthetic oligonucleotide
tcggctatctttgtctaaccgtgcaggcgaccaaaacggaagcctcggggcctcta

SEQ ID NO: 135570 - DNA, 56 bp, Artificial
  Synthetic oligonucleotide
tcgggtggccccatctgggctgtcgtttacatccaacccaacgagaacgagatttg

SEQ ID NO: 135571 - DNA, 60 bp, Artificial
  Synthetic oligonucleotide
acaggacgtgagtgggacgaattgattcggcggtgtgtcactgcctcacgtgatgatctg

SEQ ID NO: 135572 - DNA, 60 bp, Artificial
  Synthetic oligonucleotide
tcggtgggatatacgattcatcagtgttggagtatcagaccggcacacagaccgttactg

SEQ ID NO: 135573 - DNA, 56 bp, Artificial
  Synthetic oligonucleotide
acactcgagttggataatacggctcccgagctggattggactcggtggccgggccg

SEQ ID NO: 135574 - DNA, 59 bp, Artificial
  Synthetic oligonucleotide
tcgtttccgtcactgtccacgcggcgaaacctcgtgcaacacgtagtacagagtctcta

SEQ ID NO: 135575 - DNA, 54 bp, Artificial
  Synthetic oligonucleotide
acaccagcacccgtcctaacgcggccgtccgattcggctcacgtcggcgggtcc

SEQ ID NO: 135576 - DNA, 60 bp, Artificial
  Synthetic oligonucleotide
tctcgagggtgcatttggctgttgcacggggtgacgtgtagatgagtagcgatctagacc

SEQ ID NO: 135577 - DNA, 60 bp, Artificial
  Synthetic oligonucleotide
tctcgctctgggtaccgcctgttccgtcacctagacaggctagcctatcgaagcgatgac

SEQ ID NO: 135578 - DNA, 57 bp, Artificial
  Synthetic oligonucleotide
acaaatccgtgagtttcgcatccgtgtcgaggctcaggacgagctcggagaaaaaaa

SEQ ID NO: 135579 - DNA, 60 bp, Artificial
  Synthetic oligonucleotide
gtcaccccgatataccccatccgcttgactaggtatgcgctaaatgcggacatgctacat

SEQ ID NO: 135580 - DNA, 60 bp, Artificial
  Synthetic oligonucleotide
aatttctcgagcgcttggtctcgaagacggcgattgaccgagtgatcctcgtcgatatta

SEQ ID NO: 135581 - DNA, 59 bp, Artificial
  Synthetic oligonucleotide
aatggtctcactcgttacagcgatgactctcttgggtgtagtcggagggactccctgaa

SEQ ID NO: 135582 - DNA, 58 bp, Artificial
  Synthetic oligonucleotide
tctggacggccgagagtgggagtacctcgccatcctcgaaccgcacgagagcgggtac

SEQ ID NO: 135583 - DNA, 58 bp, Artificial
  Synthetic oligonucleotide
ttttcacttccgctgtggtgccggcaatttaaatactcacatcgaccaacaggtagcg

SEQ ID NO: 135584 - DNA, 60 bp, Artificial
  Synthetic oligonucleotide
tttgtgccgatcaaagtccgatatcgagatctggatactagctaactctccatctgtaga

SEQ ID NO: 135585 - DNA, 60 bp, Artificial
  Synthetic oligonucleotide
tttgcgtccggacccgttctcgcgtcacggatccaatgcgatatgtatgaatgtgtggct

SEQ ID NO: 135586 - DNA, 60 bp, Artificial
  Synthetic oligonucleotide
aaacatcactcttcgagacgataatctcgcagcactgttcgtcggactcgagaagtctga

SEQ ID NO: 135587 - DNA, 55 bp, Artificial
  Synthetic oligonucleotide
aaagacctcgaaagaggcgtcagcgaggagttcgggaaacggctccacacggcca

SEQ ID NO: 135588 - DNA, 60 bp, Artificial
  Synthetic oligonucleotide
tttatacggtcgaaagtatcctatgggtctcttgagtgcccacagtcgataatctgcaaa

SEQ ID NO: 135589 - DNA, 60 bp, Artificial
  Synthetic oligonucleotide
tttatacagtcaagtgcggtcttgaatttgtcatctccgagtgactcgacttggttagac

SEQ ID NO: 135590 - DNA, 60 bp, Artificial
  Synthetic oligonucleotide
gtcactgtctccgaaagagacgccgggctgtcagccgttgttgtcacagcaaacccgagc

SEQ ID NO: 135591 - DNA, 60 bp, Artificial
  Synthetic oligonucleotide
tttagtagcctattactccccggtaagccacgcatattcggtgatgtaccatcacaagca

SEQ ID NO: 135592 - DNA, 57 bp, Artificial
  Synthetic oligonucleotide
aaattctccgcccgcacccaaacatattaatcggtgtgttcacatgatgtaaaacga

SEQ ID NO: 135593 - DNA, 54 bp, Artificial
  Synthetic oligonucleotide
aaccaacgagcgacgacgtggcgatctcgggaacggagcttacaacggaaacga

SEQ ID NO: 135594 - DNA, 56 bp, Artificial
  Synthetic oligonucleotide
ttgagcgtctgaacccggtaattcgtccggcggcagtagtgtttgctagcgttttc

SEQ ID NO: 135595 - DNA, 60 bp, Artificial
  Synthetic oligonucleotide
ttctccgatttcgaacacatcgggagcactgctatcgagggaatcccagcgaaaccgata

SEQ ID NO: 135596 - DNA, 59 bp, Artificial
  Synthetic oligonucleotide
ttctaagttaggccagtagctgccgacgcgcctatcactcacccgttcatacgccgtta

SEQ ID NO: 135597 - DNA, 60 bp, Artificial
  Synthetic oligonucleotide
ttcgacctaccagatttccatcattcgatgagtgtgtgatttcgatggagtgtagctacc

SEQ ID NO: 135598 - DNA, 52 bp, Artificial
  Synthetic oligonucleotide
aacctttgactaacgtcgcaggccgggatttggacggcctaagggcctctac

SEQ ID NO: 135599 - DNA, 57 bp, Artificial
  Synthetic oligonucleotide
tggtaggtacagtcgatgtagacgggaaactcgacggtccagctgtgaccgtcgagt

SEQ ID NO: 135600 - DNA, 60 bp, Artificial
  Synthetic oligonucleotide
tggtcagtaggcttgcctattgacaatggaatgttctatcagtctacatgggtctaatag

SEQ ID NO: 135601 - DNA, 58 bp, Artificial
  Synthetic oligonucleotide
agccatcgcaaccgggtccacacggcactttcatcttgtagacgttcaccgagacgcc

SEQ ID NO: 135602 - DNA, 50 bp, Artificial
  Synthetic oligonucleotide
aagcttctgagtttcggggggttcggctgttgcccccagttttcacgggg

SEQ ID NO: 135603 - DNA, 58 bp, Artificial
  Synthetic oligonucleotide
tgtagatccgtcccgatttctttaggcgtcgtggttatccacgcgccgacagtagctg

SEQ ID NO: 135604 - DNA, 60 bp, Artificial
  Synthetic oligonucleotide
tgtagcgattgccacgaggcaactactacatcgcatgctgtggactcagagctatcttac

SEQ ID NO: 135605 - DNA, 54 bp, Artificial
  Synthetic oligonucleotide
aagaaactcgagcctgtccttcggtcggaaccggagacacttctcgaccggaca

SEQ ID NO: 135606 - DNA, 54 bp, Artificial
  Synthetic oligonucleotide
aacttgatggactaatcgaagatgggacgtacgttcgtgggtctcgaaacctcg

SEQ ID NO: 135607 - DNA, 60 bp, Artificial
  Synthetic oligonucleotide
tgtgaggactgtgttgaagtgtgggaccgaattcagtcggaatgatagacggcggggtga

SEQ ID NO: 135608 - DNA, 57 bp, Artificial
  Synthetic oligonucleotide
tgttgcggaaatctgtccgacgtagctttttatgcccggggtggcaaaggctacgca

SEQ ID NO: 135609 - DNA, 58 bp, Artificial
  Synthetic oligonucleotide
aacgtggccgttgcttggctttactcgacattgttctcctccgtgtctcgtgatcgga

SEQ ID NO: 135610 - DNA, 60 bp, Artificial
  Synthetic oligonucleotide
tgttgtcactcggctggtgaagttcgttggagctcatgggtgattgaatcgggagtggtt

SEQ ID NO: 135611 - DNA, 56 bp, Artificial
  Synthetic oligonucleotide
ttacgtccagctcatccctattcgggacatccaattccagtgggcgcccctcgttt

SEQ ID NO: 135612 - DNA, 60 bp, Artificial
  Synthetic oligonucleotide
ggtccgcgatggagcagcgagcgccgtagcgcgcctcgctgcctacagagagaacgccga

SEQ ID NO: 135613 - DNA, 60 bp, Artificial
  Synthetic oligonucleotide
gtcagtcaggcgtctaacggtatcctgagccgtgagcagtaccagcggacaatcgaggcg

SEQ ID NO: 135614 - DNA, 60 bp, Artificial
  Synthetic oligonucleotide
ttcagttgtctaaatttcggatgagagtgtgcatgacgaatctacctagccgacctcagc

SEQ ID NO: 135615 - DNA, 56 bp, Artificial
  Synthetic oligonucleotide
aacgacggcaagcacgggtgtgagcgtgtcgaatggcgacattccggggggtggga

SEQ ID NO: 135616 - DNA, 56 bp, Artificial
  Synthetic oligonucleotide
ttccccagcccgaaaccggggattcagacctatgataggaccattttcgactgaca

SEQ ID NO: 135617 - DNA, 60 bp, Artificial
  Synthetic oligonucleotide
accccacaagggtccgtctgaaacacgctacgctcgtgactacatggcggagtgcatgga

SEQ ID NO: 135618 - DNA, 60 bp, Artificial
  Synthetic oligonucleotide
tccggcaggcggtcccatcgtgtgcggtcccagcatcgcgcgagtgccggatgggtgaaa

SEQ ID NO: 135619 - DNA, 57 bp, Artificial
  Synthetic oligonucleotide
tccgacactctgaccgccaatccaccgactacactccaaccggatattcaacgtccg

SEQ ID NO: 135620 - DNA, 59 bp, Artificial
  Synthetic oligonucleotide
tcgagcggatgtcaattaatcaactcccattggttagtcattcctccatagacacggtt

SEQ ID NO: 135621 - DNA, 59 bp, Artificial
  Synthetic oligonucleotide
tcaatccctcgtactcttgtgaacgaacacgacgccatgaacgtccgcgtctcagggtc

SEQ ID NO: 135622 - DNA, 59 bp, Artificial
  Synthetic oligonucleotide
tcgaatgcggttatcgagaaccacggtggagagccaataagcgagtcggtcgctcgaga

SEQ ID NO: 135623 - DNA, 59 bp, Artificial
  Synthetic oligonucleotide
tcttgaggcaagagacaaacacggaccacatgaacccccatgagtagtaagatgaatta

SEQ ID NO: 135624 - DNA, 58 bp, Artificial
  Synthetic oligonucleotide
caacacgagttatcaatccctcgtactcttgtgaacgaacacgacgccatgaacgtcc

SEQ ID NO: 135625 - DNA, 59 bp, Artificial
  Synthetic oligonucleotide
aaccggttcacgccagagtaccgtgagatgctctacgcgaagtctcagagcctcgaacg

SEQ ID NO: 135626 - DNA, 55 bp, Artificial
  Synthetic oligonucleotide
accttactcgggtcgcgggcgtggagtaagattctccgtcggagtcgtctgggca

SEQ ID NO: 135627 - DNA, 59 bp, Artificial
  Synthetic oligonucleotide
gagcggagaagcgactaagccacatcgtagcctcaccaccgcaggaccggagctactcg

SEQ ID NO: 135628 - DNA, 59 bp, Artificial
  Synthetic oligonucleotide
gtacaatcacttgaccggtagtggagagttcttcgtagtctgatccagtaatcggatga

SEQ ID NO: 135629 - DNA, 55 bp, Artificial
  Synthetic oligonucleotide
taacgggcgagaaagcggctgagtacaccgaacggaaggaacgactcgagaagag

SEQ ID NO: 135630 - DNA, 59 bp, Artificial
  Synthetic oligonucleotide
tcgagaactttcgtactctgtgtagcgccgcagtcctcggtagccagacagtctgcata

SEQ ID NO: 135631 - DNA, 59 bp, Artificial
  Synthetic oligonucleotide
gtagacgctgtggtgggaaataatagttgtagcttggcaattgtcggctgtatctgctt

SEQ ID NO: 135632 - DNA, 56 bp, Artificial
  Synthetic oligonucleotide
cgtagctacggtcgggagcgggaacagtcgtatcccgggatccagaactgctcaat

SEQ ID NO: 135633 - DNA, 57 bp, Artificial
  Synthetic oligonucleotide
cttctctcgaagtgaagcacctcaatcggtcgctctaccccacgaactacctcggcg

SEQ ID NO: 135634 - DNA, 58 bp, Artificial
  Synthetic oligonucleotide
acggtgcccctgatccgatcgcagatgacctcgtgcttctctgccggggtcgtggggt

SEQ ID NO: 135635 - DNA, 60 bp, Artificial
  Synthetic oligonucleotide
attttcccataactgagatagagcgaatagatccatgtttgagaaaatgccggtatagcg

SEQ ID NO: 135636 - DNA, 58 bp, Artificial
  Synthetic oligonucleotide
gtcgcggtttggtcactacatcgtactgcgaatctgttcggctagaaattcgtactgt

SEQ ID NO: 135637 - DNA, 59 bp, Artificial
  Synthetic oligonucleotide
actactcctcacactggatctagttgagccagttgaggggaccacaccaacccgctatc

SEQ ID NO: 135638 - DNA, 58 bp, Artificial
  Synthetic oligonucleotide
gcgggctatgaggccacattacggcacctcggtagctgttcttattccaaactaggtg

SEQ ID NO: 135639 - DNA, 59 bp, Artificial
  Synthetic oligonucleotide
aacggagcttggtgcgtctattgccgactacgtcgacgctaagggatctgtgcagaacc

SEQ ID NO: 135640 - DNA, 59 bp, Artificial
  Synthetic oligonucleotide
tagtacaggacgcgcttggtgggatggatacgcttcttgtagacacgagcgaagcctct

SEQ ID NO: 135641 - DNA, 55 bp, Artificial
  Synthetic oligonucleotide
tagtacagcgtccctacgtaggaattaagtgggcgggggagcgatggactggtaa

SEQ ID NO: 135642 - DNA, 55 bp, Artificial
  Synthetic oligonucleotide
cggctattgtagggtccgttccatgcgtgtttagttccgccccatcagaaagacc

SEQ ID NO: 135643 - DNA, 58 bp, Artificial
  Synthetic oligonucleotide
caggagtgagagtcgcagtcaccatcgggtagtatttcaaatgatgcctcggtggccc

SEQ ID NO: 135644 - DNA, 56 bp, Artificial
  Synthetic oligonucleotide
gaggaaatgcgggacggtgagggcgcgaaagaggaacggacgtgcgaggtcgacga

SEQ ID NO: 135645 - DNA, 58 bp, Artificial
  Synthetic oligonucleotide
tctcggtctccgcgacattgaagaacgactctaccgaaggctcattctgcagggtcgc

SEQ ID NO: 135646 - DNA, 53 bp, Artificial
  Synthetic oligonucleotide
attcttttataaactgtacgggggccggttgtgacgagtgtcgtattctatgt

SEQ ID NO: 135647 - DNA, 58 bp, Artificial
  Synthetic oligonucleotide
cttgtcaacagtgtcgtctactttatcggctgtcttgtcgaccgtgtcatccacttta

SEQ ID NO: 135648 - DNA, 58 bp, Artificial
  Synthetic oligonucleotide
cagtttgatccggtagagtgtgctcccgctcgatttgtccagtggaagttgctctgca

SEQ ID NO: 135649 - DNA, 58 bp, Artificial
  Synthetic oligonucleotide
gacgccgcgaatccatgagcaacgggtaacgaactactttcagagtcgagatacgaat

SEQ ID NO: 135650 - DNA, 58 bp, Artificial
  Synthetic oligonucleotide
ggagagtaatcagtaaagtcgagtgagacttggccagccgatggcgtcacactggtac

SEQ ID NO: 135651 - DNA, 56 bp, Artificial
  Synthetic oligonucleotide
cttctgacgggtgtcaaatggacgcccaccctcagggaaacgaagttcgctctgac

SEQ ID NO: 135652 - DNA, 58 bp, Artificial
  Synthetic oligonucleotide
ttcttcacacgcgcgtagagtgtggcgtaggcgtggaatgcggtggttcctcgcttcg

SEQ ID NO: 135653 - DNA, 56 bp, Artificial
  Synthetic oligonucleotide
agatcacactaacgggcgagaaagcggctgagtacaccgaacggaaggaacgactc

SEQ ID NO: 135654 - DNA, 54 bp, Artificial
  Synthetic oligonucleotide
aagcacccactacgttctacgatggggacgtacagatacccggttatgggacgc

SEQ ID NO: 135655 - DNA, 58 bp, Artificial
  Synthetic oligonucleotide
agagtcgcagtcaccatcgggtagtattttcaatgctggctcggtggcccgctagcgc

SEQ ID NO: 135656 - DNA, 58 bp, Artificial
  Synthetic oligonucleotide
acagagacgaattctggcaccacgccagtgtctgagtccgcatctgatgcactcaccg

SEQ ID NO: 135657 - DNA, 56 bp, Artificial
  Synthetic oligonucleotide
gggaaactcggtctcgcggaggatcgcccgtaccatcgtctcccactcaccgagcg

SEQ ID NO: 135658 - DNA, 56 bp, Artificial
  Synthetic oligonucleotide
gctgagtacaccgaacggaaggaacgactcgagaagaggctcggttacgaaatgtc

SEQ ID NO: 135659 - DNA, 58 bp, Artificial
  Synthetic oligonucleotide
atgcaccgaatcgacagatgacgtaaatactgactgatcaattcgatacctgtcgaaa

SEQ ID NO: 135660 - DNA, 58 bp, Artificial
  Synthetic oligonucleotide
gcagtagacaccccaatgcgacggggattgtccggttattgtctctaacccatcctca

SEQ ID NO: 135661 - DNA, 58 bp, Artificial
  Synthetic oligonucleotide
tgatgctcgtggtgcgtatgagagctaaaaaacgaaccgtgattcggatgattgagac

SEQ ID NO: 135662 - DNA, 58 bp, Artificial
  Synthetic oligonucleotide
tcgccgaagaacaagataccaggcgctgccccgctcgagggggcatagacataccctt

SEQ ID NO: 135663 - DNA, 58 bp, Artificial
  Synthetic oligonucleotide
gatcgaccgagtgtacttgcacaactactacggcgatattctcccatcgagtgttacg

SEQ ID NO: 135664 - DNA, 57 bp, Artificial
  Synthetic oligonucleotide
ggcttctgcgaggcgggccacacgatactcgggcggtcgtcgtgtggcacccggtac

SEQ ID NO: 135665 - DNA, 57 bp, Artificial
  Synthetic oligonucleotide
gggccaccgagtcaacagtgaaatactacccgtcggtgactgcgactctcactccgg

SEQ ID NO: 135666 - DNA, 57 bp, Artificial
  Synthetic oligonucleotide
atggacgttacttgtataaaaatcgaggcttatgagcatcaggagcatgtgattcta

SEQ ID NO: 135667 - DNA, 54 bp, Artificial
  Synthetic oligonucleotide
tctcgactttcaactgtaccgctttcctcgagtcgtttcaaccgtccgtaggcc

SEQ ID NO: 135668 - DNA, 59 bp, Artificial
  Synthetic oligonucleotide
gggaacgggagatctccaggatcgtcgcgacctcgcgagtgctccgcggctcgtgggag

SEQ ID NO: 135669 - DNA, 56 bp, Artificial
  Synthetic oligonucleotide
cgttgatagtagcgtactggcgtccataccgacggttgactgggtataatagggcc

SEQ ID NO: 135670 - DNA, 57 bp, Artificial
  Synthetic oligonucleotide
agagtcgcagtcaccgacgggtagtatttcactgttgactcggtggcccgctagcgc

SEQ ID NO: 135671 - DNA, 57 bp, Artificial
  Synthetic oligonucleotide
cacctaatccccgagattgtccgatttgtggggagcgagtcggtgtactgccgaatc

SEQ ID NO: 135672 - DNA, 57 bp, Artificial
  Synthetic oligonucleotide
ggcggtaccttggatgccgccagaatcctccatgctcgtccagtcggatgagactcc

SEQ ID NO: 135673 - DNA, 57 bp, Artificial
  Synthetic oligonucleotide
cacaaggcattcgatgcacctgcgacaaccgggattgtgagcgagtgggttgggaca

SEQ ID NO: 135674 - DNA, 57 bp, Artificial
  Synthetic oligonucleotide
ctgcagtcgtccgcggtacacaggtcgacgagagtgcatacgacgacaagcgtcgta

SEQ ID NO: 135675 - DNA, 57 bp, Artificial
  Synthetic oligonucleotide
cccggagtgagagtcgcagtcaccgacgggtagtatttcactgttgactcggtggcc

SEQ ID NO: 135676 - DNA, 57 bp, Artificial
  Synthetic oligonucleotide
acgacgctctgcgaccaactgtcggctcatgaggagctcgtgtcgagtattcggctt

SEQ ID NO: 135677 - DNA, 57 bp, Artificial
  Synthetic oligonucleotide
ttcacccggcgttagtgttcgcacaaaagcgacactaaatgtacgatacggacgata

SEQ ID NO: 135678 - DNA, 57 bp, Artificial
  Synthetic oligonucleotide
ccggccgtatacgatgatacggtcacatggcgaagaagaacgtaagcgcgagggtgc

SEQ ID NO: 135679 - DNA, 57 bp, Artificial
  Synthetic oligonucleotide
gggaagcaaacaggtacgtcagcggcacagtccggactgactggacaaaaaggcgcg

SEQ ID NO: 135680 - DNA, 57 bp, Artificial
  Synthetic oligonucleotide
aatcccagtgaacctactgtactacgctcatcagagagagcacaaggtccacccccg

SEQ ID NO: 135681 - DNA, 57 bp, Artificial
  Synthetic oligonucleotide
agcgtgcctcaagtcggtcgagtaggtcggtcgtcagatcacggtacgcttcgcgtg

SEQ ID NO: 135682 - DNA, 57 bp, Artificial
  Synthetic oligonucleotide
cgtaatgcgtatcgaatcgactgctggaaacgagcataaggtgtggctcaccgacag

SEQ ID NO: 135683 - DNA, 57 bp, Artificial
  Synthetic oligonucleotide
ttcgtcactaagccagtatactttggttgtaccaacagtccgcacgttcagcaaacc

SEQ ID NO: 135684 - DNA, 55 bp, Artificial
  Synthetic oligonucleotide
tcaccgggacgaatcaaagcgtcggcacggttcgctcttacaaaggacgggcaaa

SEQ ID NO: 135685 - DNA, 53 bp, Artificial
  Synthetic oligonucleotide
ttcggcccgaagcacccactacgttctacgatggggacgtacagatacccggt

SEQ ID NO: 135686 - DNA, 52 bp, Artificial
  Synthetic oligonucleotide
gggttcaaggttggagtgttttcttacgcgggatatttcttaggtagtgaag

SEQ ID NO: 135687 - DNA, 55 bp, Artificial
  Synthetic oligonucleotide
ttcaaccccacaagggtccgtctgaaacaccgagttgatagttgaccctcgattg

SEQ ID NO: 135688 - DNA, 57 bp, Artificial
  Synthetic oligonucleotide
ggtcgccgacagtcccatcagacgacacaccgatatggcgataccgagacctctcgc

SEQ ID NO: 135689 - DNA, 57 bp, Artificial
  Synthetic oligonucleotide
tagacgaactgagaggtttgagttccatatagtcgcatttggtttacgagggttcgc

SEQ ID NO: 135690 - DNA, 56 bp, Artificial
  Synthetic oligonucleotide
atgttcggccccgacgagtcgacgtggagaatcccccagcgacgatcaacggcaag

SEQ ID NO: 135691 - DNA, 56 bp, Artificial
  Synthetic oligonucleotide
attacggcgtcaacgagagttattcggcggaaggcgactatgccgaactctcgacg

SEQ ID NO: 135692 - DNA, 56 bp, Artificial
  Synthetic oligonucleotide
ctcggcagtctcacgctgtgtcagaccggacgattcatctgcgagagagcgctgtc

SEQ ID NO: 135693 - DNA, 56 bp, Artificial
  Synthetic oligonucleotide
gggtgcctaactccatgcaggaacactggagccggagaggctacctcggtagcgtc

SEQ ID NO: 135694 - DNA, 54 bp, Artificial
  Synthetic oligonucleotide
tgaagtcgggtgtttcacccggtgcgtaatcccggtgaagcatttccccgtagc

SEQ ID NO: 135695 - DNA, 56 bp, Artificial
  Synthetic oligonucleotide
ccagtaaacgaggtctcgataatgccacgagtgcctttgttgcatggtgtgaacga

SEQ ID NO: 135696 - DNA, 56 bp, Artificial
  Synthetic oligonucleotide
actggcacgaaatttacttaccgatgcgtctattctattctgacatgatgacccaa

SEQ ID NO: 135697 - DNA, 56 bp, Artificial
  Synthetic oligonucleotide
acttccgttattgcggcacgtcatcatctatgcgcgagcgtgactgagattcgact

SEQ ID NO: 135698 - DNA, 56 bp, Artificial
  Synthetic oligonucleotide
cgaggggtggggtagcgaaaaataccggagcaatctgaatatcacgcccattccta

SEQ ID NO: 135699 - DNA, 56 bp, Artificial
  Synthetic oligonucleotide
tgcgtcgctatgaggctctactacaccggtgcgtcgcccgataacctgcgaaaagc

SEQ ID NO: 135700 - DNA, 56 bp, Artificial
  Synthetic oligonucleotide
ttgtcccgtatcggccggagtgaacccagtgtttgattagggacctgcctgtacgc

SEQ ID NO: 135701 - DNA, 60 bp, Artificial
  Synthetic oligonucleotide
atgtctcaggacgtgtacgtgatttcaagcagattccaagctcgctgcaatcaggggcgc

SEQ ID NO: 135702 - DNA, 56 bp, Artificial
  Synthetic oligonucleotide
gtctggttacatcgtcgttttccccaaagtatcataatcattacgcccgtcagcac

SEQ ID NO: 135703 - DNA, 56 bp, Artificial
  Synthetic oligonucleotide
aacgcaccgagtgaggagattatcgaccaagcttttgctgagatcaagctttgact

SEQ ID NO: 135704 - DNA, 54 bp, Artificial
  Synthetic oligonucleotide
ctacacgggacagctccactcgtaagcctccaacggtcacgggttatcccaacc

SEQ ID NO: 135705 - DNA, 56 bp, Artificial
  Synthetic oligonucleotide
tcggggacggacacacgagcggtgtacgtgtcgagatcagtgagcgacgccacaat

SEQ ID NO: 135706 - DNA, 56 bp, Artificial
  Synthetic oligonucleotide
ggagcatagctcacatgaggtgactttcggcatccggaatgggttccctaataaaa

SEQ ID NO: 135707 - DNA, 56 bp, Artificial
  Synthetic oligonucleotide
cggctttcgatgctacacgggacagctccactcgtaagcctccaacggtcacgggt

SEQ ID NO: 135708 - DNA, 55 bp, Artificial
  Synthetic oligonucleotide
aggggcgctacgttaggaaagaccgcctctgttccagagtggttagatgggggca

SEQ ID NO: 135709 - DNA, 56 bp, Artificial
  Synthetic oligonucleotide
cgggtcatctaatgcgtcgagattcggaaaggcaacccgttgcacatcgttgtatg

SEQ ID NO: 135710 - DNA, 56 bp, Artificial
  Synthetic oligonucleotide
tccgaacttctagggtgatagaagccgactatttcatatagctacatgaactttat

SEQ ID NO: 135711 - DNA, 56 bp, Artificial
  Synthetic oligonucleotide
ttacacggtcattacacggttctacacggtcacatgtctgtggcgcctgctcacaa

SEQ ID NO: 135712 - DNA, 59 bp, Artificial
  Synthetic oligonucleotide
atgtagcgtagttagacaagacagtagcatctaacactgtcgtttgggggagacggcca

SEQ ID NO: 135713 - DNA, 56 bp, Artificial
  Synthetic oligonucleotide
gccggttgtgacgagtgtcgtattctatgttattctgcgacactcgcctgacttat

SEQ ID NO: 135714 - DNA, 56 bp, Artificial
  Synthetic oligonucleotide
tcagtcggcctacattcgtgcgagagtcggtagtcgccacgaccgcggaaatgaac

SEQ ID NO: 135715 - DNA, 56 bp, Artificial
  Synthetic oligonucleotide
gattccggaccatctgtacgcgacggcgcatatcgtgaatcatccgccgtggcgct

SEQ ID NO: 135716 - DNA, 50 bp, Artificial
  Synthetic oligonucleotide
ctggaagggtgttccgaccccgtcaggggtgggggtaagacgtcgaagac

SEQ ID NO: 135717 - DNA, 55 bp, Artificial
  Synthetic oligonucleotide
gaactcagccaatgcacacctatacccgcatgcatgataacgaggtcagtaaccg

SEQ ID NO: 135718 - DNA, 55 bp, Artificial
  Synthetic oligonucleotide
cgacaagtcaatccacgcgataccttcgctgaggcggtcgaattctgccatagac

SEQ ID NO: 135719 - DNA, 55 bp, Artificial
  Synthetic oligonucleotide
cgacaattctgaactcgtccacgcagtgatagccgattggaaatttgataatccg

SEQ ID NO: 135720 - DNA, 55 bp, Artificial
  Synthetic oligonucleotide
cgacagaaccactacgtcagacgattctcgcttagagacgcactagagacgggca

SEQ ID NO: 135721 - DNA, 55 bp, Artificial
  Synthetic oligonucleotide
cgacagatccggtcaatgctggagtggagcgaatctgctctctaccgtagtaagc

SEQ ID NO: 135722 - DNA, 55 bp, Artificial
  Synthetic oligonucleotide
gccaaatgctcacatccatacagccgtagtggaatccgctggctactccggcgtg

SEQ ID NO: 135723 - DNA, 56 bp, Artificial
  Synthetic oligonucleotide
ggtccgtctaccgggtgctgaacgcatggcgggactggttcgatggctaccggaac

SEQ ID NO: 135724 - DNA, 54 bp, Artificial
  Synthetic oligonucleotide
atgggtgggtcgtgaagaacgtccgttcgttctcccggttcgagaagcgagaca

SEQ ID NO: 135725 - DNA, 55 bp, Artificial
  Synthetic oligonucleotide
cgacatcgagtttgcgatttccgatatcacgtctccggattcggacgcgaacacg

SEQ ID NO: 135726 - DNA, 55 bp, Artificial
  Synthetic oligonucleotide
ttcagcgtcatgtcgatgggcgacgggatgtgagccgccttcactggcgggtact

SEQ ID NO: 135727 - DNA, 55 bp, Artificial
  Synthetic oligonucleotide
cgacccggtcactcttatatgacctgccgcagaatcactttcgtaccgaatttca

SEQ ID NO: 135728 - DNA, 55 bp, Artificial
  Synthetic oligonucleotide
cgaccgaacaccgttgcgaagagggcaaacgtagagacggccatactgtgtcgcg

SEQ ID NO: 135729 - DNA, 55 bp, Artificial
  Synthetic oligonucleotide
cgacgactctgatactgcaccgaaatctgtgagtggtataacgcgtgtattagtg

SEQ ID NO: 135730 - DNA, 55 bp, Artificial
  Synthetic oligonucleotide
cgacggctggcacgaggttaaagagccatctcattgctgcagtaaatgcgatcag

SEQ ID NO: 135731 - DNA, 55 bp, Artificial
  Synthetic oligonucleotide
cgacgggcggtcacaacaggaccgattggcgtcgataaattcgtccagattccgg

SEQ ID NO: 135732 - DNA, 55 bp, Artificial
  Synthetic oligonucleotide
gcatacgaaaatgatcacgaaccagaggagaccctgcacaatcggactctgtccg

SEQ ID NO: 135733 - DNA, 55 bp, Artificial
  Synthetic oligonucleotide
gaagtgattgtgagtcagcgaggaacaacgaatatgcgatgagatcgaccttggt

SEQ ID NO: 135734 - DNA, 55 bp, Artificial
  Synthetic oligonucleotide
cgacgtgaactgccatgtatccagtctcgagcccaatgaggaccggagcgatcag

SEQ ID NO: 135735 - DNA, 58 bp, Artificial
  Synthetic oligonucleotide
atggcgcagggaccgagaatgccaacactgggccgaccctccccgacacaactagtga

SEQ ID NO: 135736 - DNA, 55 bp, Artificial
  Synthetic oligonucleotide
cgactagccagagtgccgcatgcagtgcgaatataacgtagtagggaagtcgacg

SEQ ID NO: 135737 - DNA, 55 bp, Artificial
  Synthetic oligonucleotide
ttcattgtggttgtgtctgcgttggcactcgtactgcttgataccctgtgtcagg

SEQ ID NO: 135738 - DNA, 55 bp, Artificial
  Synthetic oligonucleotide
cgactcgcaccagtatcggtcggtttggcgagttttgaaccgaatacgtcgcata

SEQ ID NO: 135739 - DNA, 55 bp, Artificial
  Synthetic oligonucleotide
gcataagggcgtagtctcggaggtagaacacgcgaaacgcactcccgattcagcc

SEQ ID NO: 135740 - DNA, 55 bp, Artificial
  Synthetic oligonucleotide
cgactcgtaagcttgaattgaacggttgccaactatctggtatgcgtgcaacgat

SEQ ID NO: 135741 - DNA, 55 bp, Artificial
  Synthetic oligonucleotide
cgactctccgagcaaacgattgcgacgactacgacacagaatccggtcgtacggc

SEQ ID NO: 135742 - DNA, 55 bp, Artificial
  Synthetic oligonucleotide
cgactgagcgtcggaacactcgtcactcacgggaagggcgggattctctcgctga

SEQ ID NO: 135743 - DNA, 55 bp, Artificial
  Synthetic oligonucleotide
cgactggagggcagttgcgacccgtctatcgattgggttgttcatgcgacaacat

SEQ ID NO: 135744 - DNA, 55 bp, Artificial
  Synthetic oligonucleotide
cgcccggttcagaatagacgaacgcggacgtggcacttcactcgccgtacagacg

SEQ ID NO: 135745 - DNA, 55 bp, Artificial
  Synthetic oligonucleotide
cgactgtatcgctacaccgggagcatgtccatcgcatacccaaacagaggttcgg

SEQ ID NO: 135746 - DNA, 52 bp, Artificial
  Synthetic oligonucleotide
atggaccgggggtcgagaggcgtaaccccaagggttggtgcagggagaatag

SEQ ID NO: 135747 - DNA, 55 bp, Artificial
  Synthetic oligonucleotide
cgactgtcgcgtctccgggcgattgatccgcgatatgcaagagatttcgaccgtg

SEQ ID NO: 135748 - DNA, 55 bp, Artificial
  Synthetic oligonucleotide
gcagtcggaagtccgaacgtatcgttaggtcgtacgcagtgtgctgtaccattac

SEQ ID NO: 135749 - DNA, 55 bp, Artificial
  Synthetic oligonucleotide
cgagaacccacggattgcgaacctcagcggggccgaaacatacggggcacataac

SEQ ID NO: 135750 - DNA, 55 bp, Artificial
  Synthetic oligonucleotide
cgcctgcccatctgtgtgtctctcgaggtcgtaccctcttgggtgagcctgagtt

SEQ ID NO: 135751 - DNA, 55 bp, Artificial
  Synthetic oligonucleotide
cctctgtcgacgagaacagtacaccgatcggatatacgacggcgagagtaccccg

SEQ ID NO: 135752 - DNA, 55 bp, Artificial
  Synthetic oligonucleotide
cctcttctcgtctggcagaatttccggagagatcgtgatttcagcgacatatccg

SEQ ID NO: 135753 - DNA, 55 bp, Artificial
  Synthetic oligonucleotide
gccccgttgggcagacatggcgttatttgtgtcggctccactcgagtcaacacgt

SEQ ID NO: 135754 - DNA, 55 bp, Artificial
  Synthetic oligonucleotide
cctgcacatccatcgagggtgcaatagacacctcaggagtacgcccgacagcggt

SEQ ID NO: 135755 - DNA, 55 bp, Artificial
  Synthetic oligonucleotide
ttattatgccgcagtatagactacgtggtaagcacggaaactggccgtcctcaga

SEQ ID NO: 135756 - DNA, 52 bp, Artificial
  Synthetic oligonucleotide
gccccacctcaggtacgtagtccgaatcgtacggtcaagtccccgtaacgac

SEQ ID NO: 135757 - DNA, 57 bp, Artificial
  Synthetic oligonucleotide
atgctgaccttcgcaaagacccctgttgtaaaccgcggacaggcgcgtagcgccgtc

SEQ ID NO: 135758 - DNA, 54 bp, Artificial
  Synthetic oligonucleotide
cctggatacggtcactctttccgcttcgaaaagagggtcgcgctggttcgtggt

SEQ ID NO: 135759 - DNA, 55 bp, Artificial
  Synthetic oligonucleotide
aacggccacgatacggacgactgtacagccaccgaaccgaactgggagagcgtcg

SEQ ID NO: 135760 - DNA, 53 bp, Artificial
  Synthetic oligonucleotide
gcccacgttgtcgtgaacggttcccatccacttccgttcagaggaaaacggga

SEQ ID NO: 135761 - DNA, 51 bp, Artificial
  Synthetic oligonucleotide
gaatcgtacctccggccttataaagcgacccgttataaaccgacttcaacg

SEQ ID NO: 135762 - DNA, 55 bp, Artificial
  Synthetic oligonucleotide
gacgattcgaagatccgtctatcgacgtctctcgtccgaatcagcggagaaaccg

SEQ ID NO: 135763 - DNA, 52 bp, Artificial
  Synthetic oligonucleotide
ccttccccaccaacgggtactcccaggcgtaaaacgtcgagtacatgtggtc

SEQ ID NO: 135764 - DNA, 55 bp, Artificial
  Synthetic oligonucleotide
ccttccgctctactggcccgtagccataccagtctcacagggagtatctcgtacg

SEQ ID NO: 135765 - DNA, 55 bp, Artificial
  Synthetic oligonucleotide
cgaaaacgtgagtgaccggaccggcctatcgagcgccgtcagtcaatcggatgaa

SEQ ID NO: 135766 - DNA, 51 bp, Artificial
  Synthetic oligonucleotide
cgaaacgggacgaacgttaaaggacgcaggacggattcctccggacgaaca

SEQ ID NO: 135767 - DNA, 55 bp, Artificial
  Synthetic oligonucleotide
cgccgtaggaaacatcgtagtcgaaccatcgataggcgagcccgtgaactagttc

SEQ ID NO: 135768 - DNA, 60 bp, Artificial
  Synthetic oligonucleotide
gggcccgtcgtaacactgggacgtctgtgtggtgccttattcagcaatcggatgctcagt

SEQ ID NO: 135769 - DNA, 55 bp, Artificial
  Synthetic oligonucleotide
cgaacactagtttcgattgtggacgactttgatccgggtgtcgtcctagtgctgg

SEQ ID NO: 135770 - DNA, 55 bp, Artificial
  Synthetic oligonucleotide
ttcacggcgcggcactgaaaggatgcgacgagtgcgctgacttcaccggttactg

SEQ ID NO: 135771 - DNA, 55 bp, Artificial
  Synthetic oligonucleotide
aacgagcagcgcagtccgcgtagcggacaagcagcgttaacgagagcggagctct

SEQ ID NO: 135772 - DNA, 55 bp, Artificial
  Synthetic oligonucleotide
cgaacccctgagtggtccgagtaagatagctctgagtccacagcatgcgatgtag

SEQ ID NO: 135773 - DNA, 55 bp, Artificial
  Synthetic oligonucleotide
gaactcactcggcttagcatccacggggctgttcgtgtagtcccatcggacgtgg

SEQ ID NO: 135774 - DNA, 55 bp, Artificial
  Synthetic oligonucleotide
gccatcccgagtcggagggtgaatcaaatacctggttggctgtactcacgaaggc

SEQ ID NO: 135775 - DNA, 55 bp, Artificial
  Synthetic oligonucleotide
gccaactacactcgatgtgttgagcagcggggaccgatatcgtaccgtgaagaac

SEQ ID NO: 135776 - DNA, 55 bp, Artificial
  Synthetic oligonucleotide
cgaactgagacgtggggatatgtctgggattcgttgagtacgttcctgcagtggg

SEQ ID NO: 135777 - DNA, 55 bp, Artificial
  Synthetic oligonucleotide
cgccgagtcatctggcgatcaggtgtgcagtgacttgcagtggctactataccag

SEQ ID NO: 135778 - DNA, 55 bp, Artificial
  Synthetic oligonucleotide
cgaaggtcctcctcattgggactggagcgttggggagtacacttgcggagtgtct

SEQ ID NO: 135779 - DNA, 60 bp, Artificial
  Synthetic oligonucleotide
atgaatcgtggatcattcgtaattgcagcgacggatacgtgtcctccaatccgaccaagg

SEQ ID NO: 135780 - DNA, 55 bp, Artificial
  Synthetic oligonucleotide
cgaagtgtccctctcagctaacgcagttcagtcggtgtctctcaactggacgacg

SEQ ID NO: 135781 - DNA, 55 bp, Artificial
  Synthetic oligonucleotide
cgaatcgactagtataactgaatattcgagcgtgaacgagatacacgacagcact

SEQ ID NO: 135782 - DNA, 53 bp, Artificial
  Synthetic oligonucleotide
cgccgacgatattacggatacgtcggactcggagaaccgtctcagtaaccccg

SEQ ID NO: 135783 - DNA, 55 bp, Artificial
  Synthetic oligonucleotide
cgaatgagagggtgtgggtgagttcagacgactgcatcggattctattacagtct

SEQ ID NO: 135784 - DNA, 55 bp, Artificial
  Synthetic oligonucleotide
cgcattcctgaacgttggctcaccacaccagaaagcgcttggttgctctggaggg

SEQ ID NO: 135785 - DNA, 55 bp, Artificial
  Synthetic oligonucleotide
cgagtacgacggctggcggacgaaacacggcgactgtgcgtactgggtggatcta

SEQ ID NO: 135786 - DNA, 55 bp, Artificial
  Synthetic oligonucleotide
cgagtctgtctcgtctcggttaacgcttagttatgggctgtattccaggttaggg

SEQ ID NO: 135787 - DNA, 55 bp, Artificial
  Synthetic oligonucleotide
cgagtgttctcctaacgtgactccgacgagagatttcatctgatgcaattccgcc

SEQ ID NO: 135788 - DNA, 55 bp, Artificial
  Synthetic oligonucleotide
cgagttccactccaacgacgcccgttggtcagtcaccgccaccgctcagttactg

SEQ ID NO: 135789 - DNA, 55 bp, Artificial
  Synthetic oligonucleotide
cgatagctcaatgttcgtgctacccacgtacgccgaaaatctccccatcgcactg

SEQ ID NO: 135790 - DNA, 59 bp, Artificial
  Synthetic oligonucleotide
gggccgtgtggccgagagtcgttgctcaatctgcgttagcgaggagacgagggtcgaaa

SEQ ID NO: 135791 - DNA, 55 bp, Artificial
  Synthetic oligonucleotide
cgcatactccggcgtggagtaccgccgacacaacgcaattcgtactcgaaacggg

SEQ ID NO: 135792 - DNA, 55 bp, Artificial
  Synthetic oligonucleotide
cgcagttggggtatgctccggtcgagatagacggaggtggaaacagcaatgatac

SEQ ID NO: 135793 - DNA, 55 bp, Artificial
  Synthetic oligonucleotide
gcacctcactcgtctcgttgaactccgacggtgggaccacctgcagtgatccctc

SEQ ID NO: 135794 - DNA, 55 bp, Artificial
  Synthetic oligonucleotide
cgcagttggcccatcagagactcgagaacgatctcgaactcgggacattgctccc

SEQ ID NO: 135795 - DNA, 55 bp, Artificial
  Synthetic oligonucleotide
cgcagtcggctgttttaaacggaacaagagttgtcccagcgtcccatctgaatcg

SEQ ID NO: 135796 - DNA, 55 bp, Artificial
  Synthetic oligonucleotide
gcaccgctgagttgagatattaagatctgcactttaccacttgttcctgcggttg

SEQ ID NO: 135797 - DNA, 55 bp, Artificial
  Synthetic oligonucleotide
cgatggttgcagttgcctcgtatgattatattagcgctcagcaatacaaggctga

SEQ ID NO: 135798 - DNA, 55 bp, Artificial
  Synthetic oligonucleotide
cgatgtctaaactgtgtgagaatcatcgaaatacagtaacggcttttacagccga

SEQ ID NO: 135799 - DNA, 55 bp, Artificial
  Synthetic oligonucleotide
gcacagggagcgcatttgaagactctcaatgggagatgaatcgttagaggtggtc

SEQ ID NO: 135800 - DNA, 55 bp, Artificial
  Synthetic oligonucleotide
cgcaggacatcgagactcacggtatccctgctcattgttcccgcgtgagaccaga

SEQ ID NO: 135801 - DNA, 56 bp, Artificial
  Synthetic oligonucleotide
atctctttgaataggcacttcccggcctcgtaatggttggcgtattgtctggggcc

SEQ ID NO: 135802 - DNA, 55 bp, Artificial
  Synthetic oligonucleotide
tccgacggtacagttgacgacacgctaaccacttctgacttcaatagtggtgtca

SEQ ID NO: 135803 - DNA, 55 bp, Artificial
  Synthetic oligonucleotide
cgattcaatcctttcgtcactcattttgactgcattacctgtgagtcattggtcc

SEQ ID NO: 135804 - DNA, 55 bp, Artificial
  Synthetic oligonucleotide
gcacagaagcggtagtcgtaccacatcgccgtaccgtgattattggcatatttcg

SEQ ID NO: 135805 - DNA, 55 bp, Artificial
  Synthetic oligonucleotide
cgattgagccggacctcccaacgcacgtcgcaaccacgttcgaagacgtgtgcca

SEQ ID NO: 135806 - DNA, 55 bp, Artificial
  Synthetic oligonucleotide
cgcaagaacgattgcgttgctcgtaaatattgaatgccatctcggagaaaggggc

SEQ ID NO: 135807 - DNA, 55 bp, Artificial
  Synthetic oligonucleotide
cgcaagagttgtatgtcggaagacagaacgtgtacccgatgacggaccctagtaa

SEQ ID NO: 135808 - DNA, 55 bp, Artificial
  Synthetic oligonucleotide
cgcacagctattgcacacacctgtacatccttgcgtgtgcaaggtgggctcgaga

SEQ ID NO: 135809 - DNA, 55 bp, Artificial
  Synthetic oligonucleotide
cgcacgtctcgtcctattcacggtcattgttaccgtgtatctcgagagcgtatga

SEQ ID NO: 135810 - DNA, 55 bp, Artificial
  Synthetic oligonucleotide
cgcaggaatcgacaccagagtgcagaactggcggtatagagggcgtgggaacgct

SEQ ID NO: 135811 - DNA, 55 bp, Artificial
  Synthetic oligonucleotide
gaagaattatactacacgaacgtatagcatttgtatatgtctgatgcagacagcg

SEQ ID NO: 135812 - DNA, 56 bp, Artificial
  Synthetic oligonucleotide
atctcagaccgttccaacttcggcgacgaatcctccgcaaaccgggacgagaagca

SEQ ID NO: 135813 - DNA, 55 bp, Artificial
  Synthetic oligonucleotide
gcaaacgcgtcctcaggagagatcgcctcagtcgaagcaccatccatgctcgtct

SEQ ID NO: 135814 - DNA, 55 bp, Artificial
  Synthetic oligonucleotide
cgcagattctccgttttactgagaaggcgatccacctagcacgccgagcagtctc

SEQ ID NO: 135815 - DNA, 55 bp, Artificial
  Synthetic oligonucleotide
gatttctaccgcaatagcatccgaaccgacgatctcgtcatttctgtccgaaggc

SEQ ID NO: 135816 - DNA, 55 bp, Artificial
  Synthetic oligonucleotide
cgagaactgcctgcgcgaagtccgtacagtgagattcgtgctgcccagcatactc

SEQ ID NO: 135817 - DNA, 55 bp, Artificial
  Synthetic oligonucleotide
cgagaagcgctaaaagccggtcgctctgagaacctcattacaggtatccccggtg

SEQ ID NO: 135818 - DNA, 54 bp, Artificial
  Synthetic oligonucleotide
ttcaggaggggaacctgagcgctgaaacggggcgctggacgttcctccggcggt

SEQ ID NO: 135819 - DNA, 55 bp, Artificial
  Synthetic oligonucleotide
cgagactgcacactcacagattagacagattatctgtggagatacagcactatgg

SEQ ID NO: 135820 - DNA, 55 bp, Artificial
  Synthetic oligonucleotide
cgcccgcgcgtgcgagtctttaagggacgggctatcctaggcctgttcagatgtc

SEQ ID NO: 135821 - DNA, 55 bp, Artificial
  Synthetic oligonucleotide
gaagtagcgtcgctgagagagtcaatacaacacgccatacagccatatcaagccg

SEQ ID NO: 135822 - DNA, 55 bp, Artificial
  Synthetic oligonucleotide
gcaggcgagtactgacagggaatacggtaactacgtcacctgtactgaccggatg

SEQ ID NO: 135823 - DNA, 56 bp, Artificial
  Synthetic oligonucleotide
atccccgtcagacgttctacccttgtcaaacatccaccgaactaacagcatccaac

SEQ ID NO: 135824 - DNA, 55 bp, Artificial
  Synthetic oligonucleotide
ttcagtatgaacgtcaccgaacactccgaaacggaccgtacagtcgagcttcgaa

SEQ ID NO: 135825 - DNA, 55 bp, Artificial
  Synthetic oligonucleotide
cgagaggcttgtttctcgggcaagcgttcccactctaactcgacgcctaaattcg

SEQ ID NO: 135826 - DNA, 55 bp, Artificial
  Synthetic oligonucleotide
cgagaggtcgtagtcggaaacaccctcctcagagataccgatcatatcacggatg

SEQ ID NO: 135827 - DNA, 55 bp, Artificial
  Synthetic oligonucleotide
cgcccagcacgccattgttccacgacaccggtcatacgacgaggtcgtgtaggca

SEQ ID NO: 135828 - DNA, 55 bp, Artificial
  Synthetic oligonucleotide
gacgattcgagtcctggaccagcgcaattgaggaggcgggttttgactcgggtcg

SEQ ID NO: 135829 - DNA, 55 bp, Artificial
  Synthetic oligonucleotide
gaagcgtggaaccaccgcattccacgcctacgccacactctacgcgcgtgtgaag

SEQ ID NO: 135830 - DNA, 55 bp, Artificial
  Synthetic oligonucleotide
gaagccgagaacgcagaataggatgtgtacggccgctagggcgcgaccgctacag

SEQ ID NO: 135831 - DNA, 55 bp, Artificial
  Synthetic oligonucleotide
cgagcgcagacgtatcatcagcggtgtcgatattggtctctcgtttagcagccac

SEQ ID NO: 135832 - DNA, 55 bp, Artificial
  Synthetic oligonucleotide
gaagacgacatttccgattcagctatcgacattaggcgctgaggggtctacagag

SEQ ID NO: 135833 - DNA, 55 bp, Artificial
  Synthetic oligonucleotide
cgagcgtaacgatgaggcctgctgtcccctctccgatagagaagacggagatgag

SEQ ID NO: 135834 - DNA, 60 bp, Artificial
  Synthetic oligonucleotide
agtatgctattgcagttgcggatgctaaacgctggggacggaagcttgacacccgtggga

SEQ ID NO: 135835 - DNA, 56 bp, Artificial
  Synthetic oligonucleotide
atcactaaacgtgtcgaagttcagttcaagcggttttgggtcatcgactgttgctt

SEQ ID NO: 135836 - DNA, 55 bp, Artificial
  Synthetic oligonucleotide
gattgggactactgatgaatcgtatgaacactatcatgaccgcatgaaaactgtc

SEQ ID NO: 135837 - DNA, 55 bp, Artificial
  Synthetic oligonucleotide
gcacgtagtagggttgtgacagaagaatccgggcgccggaacctccgtatgccca

SEQ ID NO: 135838 - DNA, 55 bp, Artificial
  Synthetic oligonucleotide
cgagctagcctgaataaagaaatcgcgctagcaactacggatagtctcggtggtt

SEQ ID NO: 135839 - DNA, 55 bp, Artificial
  Synthetic oligonucleotide
cgagcttagatgcgttcagctcttaccccgtgtcgcgtggctacccggcattgcg

SEQ ID NO: 135840 - DNA, 55 bp, Artificial
  Synthetic oligonucleotide
gcacgagtgagtgcaaatctgcgagggacgtgcgcatgagtgcgaaccctcacag

SEQ ID NO: 135841 - DNA, 55 bp, Artificial
  Synthetic oligonucleotide
cgaggatgtctcggctgaacttctgtgcagcgttcacgctatgttggtagtagag

SEQ ID NO: 135842 - DNA, 55 bp, Artificial
  Synthetic oligonucleotide
cgaggcaactactacatcgcatgctgtggactcagagctatcttactcggaccac

SEQ ID NO: 135843 - DNA, 55 bp, Artificial
  Synthetic oligonucleotide
cgaggcttttcgacggcacatcaccctcacttattgtttcatacgcgcgtatcgg

SEQ ID NO: 135844 - DNA, 55 bp, Artificial
  Synthetic oligonucleotide
cgccagcgttcttctccttgtcacggaagccccagtcatcgtagattcggcctcg

SEQ ID NO: 135845 - DNA, 55 bp, Artificial
  Synthetic oligonucleotide
cgagggcgctgctgaagtcgggtgtttcacccggtgcgtaatcccggtgaagcat

SEQ ID NO: 135846 - DNA, 57 bp, Artificial
  Synthetic oligonucleotide
ataggcagtcacggactcgcctggccggagggaactaagaggccacaggacaattat

SEQ ID NO: 135847 - DNA, 53 bp, Artificial
  Synthetic oligonucleotide
gaactcgggcttgaaaatactgagtgcgacccgagaaatttccccaggggtag

SEQ ID NO: 135848 - DNA, 55 bp, Artificial
  Synthetic oligonucleotide
gattgtcaatacgaggcagtgtcgttctgatctagtgagagaccacttcgagtgg

SEQ ID NO: 135849 - DNA, 53 bp, Artificial
  Synthetic oligonucleotide
cgaggtttaattccccgatccgaacgtgttcgatactagattgaagggtaggc

SEQ ID NO: 135850 - DNA, 55 bp, Artificial
  Synthetic oligonucleotide
ccgacgtcgtgtctgaacccacggcgaacgattcggaagacactcttggtaccac

SEQ ID NO: 135851 - DNA, 55 bp, Artificial
  Synthetic oligonucleotide
ccgactacgcagaatcgagcgtatagttaggctcaaaggtacgcaatcctaaggc

SEQ ID NO: 135852 - DNA, 55 bp, Artificial
  Synthetic oligonucleotide
ccgactcgcggtgattatcctttactcagcgtgtcatagaattattctcaaccaa

SEQ ID NO: 135853 - DNA, 55 bp, Artificial
  Synthetic oligonucleotide
gcgtcagtcatggaactcgagagtacacacagagtatcgaacgggaggctaaaag

SEQ ID NO: 135854 - DNA, 55 bp, Artificial
  Synthetic oligonucleotide
gcgtcaagttggaatccaggctgacgtcgagttgtgagtaatgcaaccagtcgcg

SEQ ID NO: 135855 - DNA, 55 bp, Artificial
  Synthetic oligonucleotide
gcgtatagcgtcaagactagtggtcagctggtcacgcgttgcaagtccagtctga

SEQ ID NO: 135856 - DNA, 55 bp, Artificial
  Synthetic oligonucleotide
ccgaggatgatctggtttacccggatacgctctacggggcgactaaggagtacaa

SEQ ID NO: 135857 - DNA, 58 bp, Artificial
  Synthetic oligonucleotide
atagcggtaatcttgtcatgatagtccatacctaacaggtaggccatcgtaccggttg

SEQ ID NO: 135858 - DNA, 55 bp, Artificial
  Synthetic oligonucleotide
gcgtagtcactacagccgctcacttgtcgttgggaagccctctttggtgggcgga

SEQ ID NO: 135859 - DNA, 54 bp, Artificial
  Synthetic oligonucleotide
ccgagtcaggagaaggggtgaaattcggatcccagtttagaaaatacagtgacc

SEQ ID NO: 135860 - DNA, 55 bp, Artificial
  Synthetic oligonucleotide
ccgagtcttgtgaataggttgcttacatattcgaactatagtgttctccgaagac

SEQ ID NO: 135861 - DNA, 55 bp, Artificial
  Synthetic oligonucleotide
gcggtgagaatcggtgaggatagggaggggaggaatcgcaagagggcgtggggtt

SEQ ID NO: 135862 - DNA, 55 bp, Artificial
  Synthetic oligonucleotide
gcggtcagcattatcatcgtgttccccttcagcagatggaggtttgcgtgccgtc

SEQ ID NO: 135863 - DNA, 55 bp, Artificial
  Synthetic oligonucleotide
ccgatagctggctctcgttggaacgcatgcaatcagcgtgtgaatcgaaatcgcc

SEQ ID NO: 135864 - DNA, 55 bp, Artificial
  Synthetic oligonucleotide
tgtgttcgaccaagttacggtcctttaatcgtgagagcgcagtgctcactgcccc

SEQ ID NO: 135865 - DNA, 55 bp, Artificial
  Synthetic oligonucleotide
gaccggacgttgaatatccggttggagtgtagtcggtggattggcggtcagagtg

SEQ ID NO: 135866 - DNA, 55 bp, Artificial
  Synthetic oligonucleotide
gcgggcaagtgttcgtggatcacttccggcgatagtgacaggcacgatcttggtc

SEQ ID NO: 135867 - DNA, 55 bp, Artificial
  Synthetic oligonucleotide
ccgcgtctgacattagttcgacccaggctatgcggtcgcatatatcccagtagaa

SEQ ID NO: 135868 - DNA, 60 bp, Artificial
  Synthetic oligonucleotide
atagacgagtacgcggaagcgtggaatctgaaccgtacagaggctatgacggcacttctc

SEQ ID NO: 135869 - DNA, 55 bp, Artificial
  Synthetic oligonucleotide
ccgcgtctacaacttttaatccgcgtcgtgcagtcgagtgtgtgaggactcacag

SEQ ID NO: 135870 - DNA, 54 bp, Artificial
  Synthetic oligonucleotide
ccgcgtcgcgtaggtcgatcccctctaaaactgttgagaactcctcgccgggga

SEQ ID NO: 135871 - DNA, 55 bp, Artificial
  Synthetic oligonucleotide
ccgcgccctatctcccgattcattaccaactagtccagggtatgagtaaaccact

SEQ ID NO: 135872 - DNA, 55 bp, Artificial
  Synthetic oligonucleotide
ccgcgatcggtcctactaccgtcacttccagtatcatcaggagtatcaggacctc

SEQ ID NO: 135873 - DNA, 55 bp, Artificial
  Synthetic oligonucleotide
ccgcgagggattagccggtctcagacacgccgtgggttctttgctcgacaatccg

SEQ ID NO: 135874 - DNA, 55 bp, Artificial
  Synthetic oligonucleotide
gcggcgttcagagacgcgaattcggtgtgcgagctttgtgatactgatatagaag

SEQ ID NO: 135875 - DNA, 51 bp, Artificial
  Synthetic oligonucleotide
ccgcctaccctccggtatgtacgtacgggacgccaagaaccgcgaagaggt

SEQ ID NO: 135876 - DNA, 55 bp, Artificial
  Synthetic oligonucleotide
ccgcctaaataagcagattcagccgaattcctcgtggagaacctctcgtagatcg

SEQ ID NO: 135877 - DNA, 55 bp, Artificial
  Synthetic oligonucleotide
gcggctgattctgatctcgattgagaagcggtgtgtagtcagcatcccagccgaa

SEQ ID NO: 135878 - DNA, 55 bp, Artificial
  Synthetic oligonucleotide
ccgccgaggtagttcgtggggtagagcgaccgattgaggtgcttcacttcgagag

SEQ ID NO: 135879 - DNA, 57 bp, Artificial
  Synthetic oligonucleotide
atactcgagtttgaacaccgactgtcgagttgtgggtttgacgtcgatgggtcagtc

SEQ ID NO: 135880 - DNA, 55 bp, Artificial
  Synthetic oligonucleotide
gaccgactctacggtagccgggtcgtcgaacctcgtaatcgctcgactcagatcg

SEQ ID NO: 135881 - DNA, 55 bp, Artificial
  Synthetic oligonucleotide
ccgcattggcatgaacggcacacgctaatgattgccacattcgtggattgatctc

SEQ ID NO: 135882 - DNA, 55 bp, Artificial
  Synthetic oligonucleotide
gcgggagatgcgtctgctgtagggagacgtagacgctcttgtagaggttgttcgg

SEQ ID NO: 135883 - DNA, 54 bp, Artificial
  Synthetic oligonucleotide
ccgcaaatacgggcattttagacccgtaaaccacgtctgatagttcgacttcga

SEQ ID NO: 135884 - DNA, 55 bp, Artificial
  Synthetic oligonucleotide
ccgcaaaatgagtgtctcgatttgccatgtaaatcggtcggtcctactcggaacg

SEQ ID NO: 135885 - DNA, 55 bp, Artificial
  Synthetic oligonucleotide
ccgattcgaatagcgccctctactgccgagaaaggactatttcgaactcagggct

SEQ ID NO: 135886 - DNA, 55 bp, Artificial
  Synthetic oligonucleotide
ccctggagttaccgccgctgtacgaaacgatcgatacgaacgcactgaatcggct

SEQ ID NO: 135887 - DNA, 55 bp, Artificial
  Synthetic oligonucleotide
gctaagaccgcaaatttcggctatcgtagcacttggtggcccgtcttgcaaagag

SEQ ID NO: 135888 - DNA, 55 bp, Artificial
  Synthetic oligonucleotide
gaccggggcttcgcaggcaactcacaacgcagcgcagattgcggtcagcagtaga

SEQ ID NO: 135889 - DNA, 55 bp, Artificial
  Synthetic oligonucleotide
gctaatcacgtagcggaatactcagcgagccgccactcgtcactgcggccggaac

SEQ ID NO: 135890 - DNA, 55 bp, Artificial
  Synthetic oligonucleotide
atacgtacgtggatacgaaatgcggcggttctcaccggaagaatagtacgaatac

SEQ ID NO: 135891 - DNA, 55 bp, Artificial
  Synthetic oligonucleotide
gctacagatgagacatcgacgacgctagactcgttctgattctgtcgtgatccgg

SEQ ID NO: 135892 - DNA, 55 bp, Artificial
  Synthetic oligonucleotide
tgtggcgtttgcgagtcgagtactaagaacttcggcactctcctcagtagacaat

SEQ ID NO: 135893 - DNA, 55 bp, Artificial
  Synthetic oligonucleotide
gctcatgagaggagacggatacggagaactcgattaatcgtaacagacggctggc

SEQ ID NO: 135894 - DNA, 55 bp, Artificial
  Synthetic oligonucleotide
ccctcactaagatcgttgatgagcgtccgaactgccttctcgtttggttccgctg

SEQ ID NO: 135895 - DNA, 55 bp, Artificial
  Synthetic oligonucleotide
tcacggtccgactctcgcaagcacagcggctacccgactcgagtacctccattcg

SEQ ID NO: 135896 - DNA, 55 bp, Artificial
  Synthetic oligonucleotide
ccctcaaaccagaacctaccacggcggctcgttctcgtgggttcacaggcagttc

SEQ ID NO: 135897 - DNA, 55 bp, Artificial
  Synthetic oligonucleotide
tcacggtatcgagtcgagactctccgccggttgtcagaaggccctgcgacaccgt

SEQ ID NO: 135898 - DNA, 51 bp, Artificial
  Synthetic oligonucleotide
cccggttaatgcgagttgattgggaacgtaaaaccggttgaagcggcttaa

SEQ ID NO: 135899 - DNA, 55 bp, Artificial
  Synthetic oligonucleotide
cccggtcggtagttgcagcggtaattcacaccgctcattgacctgttccccatcg

SEQ ID NO: 135900 - DNA, 55 bp, Artificial
  Synthetic oligonucleotide
cccggtagatttcctctaacgctgttccatcctgtaacgatccttcgacgtatat

SEQ ID NO: 135901 - DNA, 60 bp, Artificial
  Synthetic oligonucleotide
atacgggttttctccacgcgagattgcagaccggactgacatcaacgagtccagcgtagc

SEQ ID NO: 135902 - DNA, 55 bp, Artificial
  Synthetic oligonucleotide
gctcgcgtcggagatacacatctgccacgttcttggcagcgttgtagtcagcgtg

SEQ ID NO: 135903 - DNA, 55 bp, Artificial
  Synthetic oligonucleotide
cccggcgataggatacgaagatcgaaaccgaatttcgaatgtcgtaatgtggtgg

SEQ ID NO: 135904 - DNA, 55 bp, Artificial
  Synthetic oligonucleotide
ccgacgatgtgcaatgtatgccgaaattgcgtcgcccgtccaactggatggttca

SEQ ID NO: 135905 - DNA, 55 bp, Artificial
  Synthetic oligonucleotide
ccgacgacgcgtaatccactcacggtgcgtgttcgtgcgcagaaacgccctcaga

SEQ ID NO: 135906 - DNA, 55 bp, Artificial
  Synthetic oligonucleotide
ccgaccgtagattcacatgggatgcatccgtaggcgggtgtatggaggacaaacg

SEQ ID NO: 135907 - DNA, 54 bp, Artificial
  Synthetic oligonucleotide
ccgacccctcggaacgaggaggcccgaaagatatggcacgattgaaccgtcacc

SEQ ID NO: 135908 - DNA, 55 bp, Artificial
  Synthetic oligonucleotide
tgtgtagacagcagcgtttccataggtgaatagcgccctctgagccacactgaga

SEQ ID NO: 135909 - DNA, 55 bp, Artificial
  Synthetic oligonucleotide
ccgacatcgcgcggaagttccaaaccgacgcggccaccgtccgagaagaactgaa

SEQ ID NO: 135910 - DNA, 55 bp, Artificial
  Synthetic oligonucleotide
ccgaattgtggcgaggagcataagtggcggccagacgagggacttggcgctgctt

SEQ ID NO: 135911 - DNA, 55 bp, Artificial
  Synthetic oligonucleotide
aactctatcagttgccgttagaccgcttccacgactatcccgcacagaagttccc

SEQ ID NO: 135912 - DNA, 59 bp, Artificial
  Synthetic oligonucleotide
ataccgtcccgaatacggtgctaacgaatcttgtgcggcgaacgtgagatgatcgatcg

SEQ ID NO: 135913 - DNA, 55 bp, Artificial
  Synthetic oligonucleotide
tgtggctcctgtcgataccacttgacggtcagttccggtgaatcagggcccgtcg

SEQ ID NO: 135914 - DNA, 55 bp, Artificial
  Synthetic oligonucleotide
ccgaatggttaccatactcacgtgagcagcgttactcaccgtctcctgtgtcaac

SEQ ID NO: 135915 - DNA, 55 bp, Artificial
  Synthetic oligonucleotide
ccgaatacgctcgctactgtatcggccttcccgtagcttggactgtaaccgggcg

SEQ ID NO: 135916 - DNA, 55 bp, Artificial
  Synthetic oligonucleotide
gcgtggaatatccagcctgccatcgacggtggactgcgtaggaagtgtcggattc

SEQ ID NO: 135917 - DNA, 55 bp, Artificial
  Synthetic oligonucleotide
ccgaaccgaagaggggtacagggacacgaccgtcgggcgaatgcgtctcagtgat

SEQ ID NO: 135918 - DNA, 55 bp, Artificial
  Synthetic oligonucleotide
gcgtgtcccgcagtcctgacagcgaatatcgatgctcacgaacactcggtactcg

SEQ ID NO: 135919 - DNA, 55 bp, Artificial
  Synthetic oligonucleotide
gcgtgtggtctgtggattcgcgggatttcatggggttgcgtggagcccctgacac

SEQ ID NO: 135920 - DNA, 55 bp, Artificial
  Synthetic oligonucleotide
cccttatccattaggccgtcggggttctcacccgactatcgctgctactatggcc

SEQ ID NO: 135921 - DNA, 55 bp, Artificial
  Synthetic oligonucleotide
ccctgttcgatcactcgtaagctctcggcgtgagtgcgcttggagaactcctctg

SEQ ID NO: 135922 - DNA, 55 bp, Artificial
  Synthetic oligonucleotide
gccgtgacgcgctacaccgttctcgtcatatcgtccgttcaggtacgtacagtcg

SEQ ID NO: 135923 - DNA, 60 bp, Artificial
  Synthetic oligonucleotide
atacccgtcaggtctccatcgatggattcgtcaatcgctctgtcgacggtctcttgaatc

SEQ ID NO: 135924 - DNA, 55 bp, Artificial
  Synthetic oligonucleotide
cctaccgctgtcacgcgatttcttaactaaagacgaatggcttccccagtagtcg

SEQ ID NO: 135925 - DNA, 54 bp, Artificial
  Synthetic oligonucleotide
ttacaaacgcgagggtggtctctcggaggccgagttacaaacgcgagtgtaccc

SEQ ID NO: 135926 - DNA, 55 bp, Artificial
  Synthetic oligonucleotide
ccgttgcgtgccatagtagtgtcctaatcattcaatatacccggtgacgatagcc

SEQ ID NO: 135927 - DNA, 55 bp, Artificial
  Synthetic oligonucleotide
gccgtggtagaaactgtcaaacgggttcccagcgtacgctctgtgatggacgacg

SEQ ID NO: 135928 - DNA, 55 bp, Artificial
  Synthetic oligonucleotide
ccgttgatagagagtctcgaattggtcccgtttgagtggaatagtagtgtcttgc

SEQ ID NO: 135929 - DNA, 55 bp, Artificial
  Synthetic oligonucleotide
ccgtgtccacgactcgaatattggcagtctccacaacagcgggctgcgtggtccc

SEQ ID NO: 135930 - DNA, 55 bp, Artificial
  Synthetic oligonucleotide
gcctcttctaaattcgctgtataagagacgtaatcagaagaaatcgtctctgtga

SEQ ID NO: 135931 - DNA, 55 bp, Artificial
  Synthetic oligonucleotide
gcgaaacctcgcgggtgtcgctctcggaaagagaatcgctcgtgttcgtgttcat

SEQ ID NO: 135932 - DNA, 55 bp, Artificial
  Synthetic oligonucleotide
ttttagacacaccttctgcaagcagaccttctaactaaacggctttgtgaagtac

SEQ ID NO: 135933 - DNA, 55 bp, Artificial
  Synthetic oligonucleotide
gcgacaatttcacctgtcaaacacccggttgcgagaggacccaaagagcacatcg

SEQ ID NO: 135934 - DNA, 60 bp, Artificial
  Synthetic oligonucleotide
atacagctagactagaggctccgagacctaccggaaacctgacacagcagaccaccgcaa

SEQ ID NO: 135935 - DNA, 55 bp, Artificial
  Synthetic oligonucleotide
ccgtctgagggtggacatgcggacgtgagttgacaatccccgagccgtatagcgg

SEQ ID NO: 135936 - DNA, 55 bp, Artificial
  Synthetic oligonucleotide
gacacagaatgattgtattcactgtcatcgtattcctgagacccacaatactgga

SEQ ID NO: 135937 - DNA, 55 bp, Artificial
  Synthetic oligonucleotide
ccgtcgtagagagtggcaatgaagctcggtattctatcagacgttcacggaaacg

SEQ ID NO: 135938 - DNA, 55 bp, Artificial
  Synthetic oligonucleotide
ccgtcggccgacacggattcactacgacatgaacgctcgaacacacactcacggg

SEQ ID NO: 135939 - DNA, 55 bp, Artificial
  Synthetic oligonucleotide
gcgactcagtaacatgtgaaaccattgttgagtcaatgtccgcgagcgccgattc

SEQ ID NO: 135940 - DNA, 55 bp, Artificial
  Synthetic oligonucleotide
gcgaggagagttttcgacaggtaatctgagatggcaacccgggtcgagtgaccct

SEQ ID NO: 135941 - DNA, 55 bp, Artificial
  Synthetic oligonucleotide
cctctcaatttgaacactacggaatcgataaacgaccaagtaggatatacatcgg

SEQ ID NO: 135942 - DNA, 55 bp, Artificial
  Synthetic oligonucleotide
cctcgtatttacgttcagcatgaaagtcgtttagttaatcaaatacccgctctca

SEQ ID NO: 135943 - DNA, 55 bp, Artificial
  Synthetic oligonucleotide
gccgagcaatccggtcgaactgtgctagcgtttcgatttcgtaatctcgtcgctg

SEQ ID NO: 135944 - DNA, 55 bp, Artificial
  Synthetic oligonucleotide
ttacagcgatgactctcttgggtgtagtcggagggactccctgaatctgggagcc

SEQ ID NO: 135945 - DNA, 56 bp, Artificial
  Synthetic oligonucleotide
ggtcggaacgagtcgcacgcccccgggagcagtacggggtgtgcgtctgctacgta

SEQ ID NO: 135946 - DNA, 54 bp, Artificial
  Synthetic oligonucleotide
atacactacacttacgagaccgtgaggggtgtccgtaagacgcccccgacagcc

SEQ ID NO: 135947 - DNA, 55 bp, Artificial
  Synthetic oligonucleotide
cctcgccctttcgggcaaatcagtcgaacggcgaaagttagcccactgctaccag

SEQ ID NO: 135948 - DNA, 55 bp, Artificial
  Synthetic oligonucleotide
cctcgattcggagacgcacccgacgccatcaatactgacgacctcgatagcctac

SEQ ID NO: 135949 - DNA, 55 bp, Artificial
  Synthetic oligonucleotide
gccgcgagtgccgtcgatgtgagtgcacatcacttccgcgagtcataccgacacg

SEQ ID NO: 135950 - DNA, 55 bp, Artificial
  Synthetic oligonucleotide
cctcgagaaagcccaagcacacgatctcaccacgattggggcacccgaacagcag

SEQ ID NO: 135951 - DNA, 55 bp, Artificial
  Synthetic oligonucleotide
cctcctgggaactgcggaccatgatgtttgacgaaggatctcggaccccgcctcc

SEQ ID NO: 135952 - DNA, 55 bp, Artificial
  Synthetic oligonucleotide
cctccgaccgcgtaagcgtttcgacgtacagcgcgagtcggctggttcatctggt

SEQ ID NO: 135953 - DNA, 55 bp, Artificial
  Synthetic oligonucleotide
cctccgaccgactcaagaccgcatctcgctactacaggtagtagtcagttcgccg

SEQ ID NO: 135954 - DNA, 54 bp, Artificial
  Synthetic oligonucleotide
aaaacgctacggtccgtggcctactgggagctgtctcaccgtcggaacgaccgc

SEQ ID NO: 135955 - DNA, 55 bp, Artificial
  Synthetic oligonucleotide
cctccctactgcgtcctcaaaacgcaaagcgttctgatgtgcgaacgagagctcc

SEQ ID NO: 135956 - DNA, 55 bp, Artificial
  Synthetic oligonucleotide
gccgtagccgtagtagtactcttcatcggttggatcgtagcatttcgacgcatct

SEQ ID NO: 135957 - DNA, 55 bp, Artificial
  Synthetic oligonucleotide
tacgggtggcccgcctcatcgtctctaaaaagtaaacctctgtcgacgagaacag

SEQ ID NO: 135958 - DNA, 55 bp, Artificial
  Synthetic oligonucleotide
gccgtcctctcctaccgtccggtctcactctcaacgagcgtttactctcctcaag

SEQ ID NO: 135959 - DNA, 54 bp, Artificial
  Synthetic oligonucleotide
gccgtcgttacgtctgtagcacggccccagaccaacctttagggccgtatcgga

SEQ ID NO: 135960 - DNA, 55 bp, Artificial
  Synthetic oligonucleotide
cctattcggcgactctcggttcttcgagaaccctcgtacctgctaggagttactg

SEQ ID NO: 135961 - DNA, 55 bp, Artificial
  Synthetic oligonucleotide
gacacgtatacggctgcgctagaccacgcagctatcgacggtcgcctactgagtg

SEQ ID NO: 135962 - DNA, 55 bp, Artificial
  Synthetic oligonucleotide
gcggacgaggctggattgagtaaagcggcacttcactaccacttcgactgcaaac

SEQ ID NO: 135963 - DNA, 55 bp, Artificial
  Synthetic oligonucleotide
tcagcgaggagttcgggaaacggctccacacggccatgctgacgttcacagcgtc

SEQ ID NO: 135964 - DNA, 55 bp, Artificial
  Synthetic oligonucleotide
ccggagctgctacccggatttctgaacattgtcacaatcgacgtacaagacggag

SEQ ID NO: 135965 - DNA, 52 bp, Artificial
  Synthetic oligonucleotide
ccggacgtccttttcgggtacctgatcgtcatcggtcggtcgacctcgaccg

SEQ ID NO: 135966 - DNA, 54 bp, Artificial
  Synthetic oligonucleotide
gcggagactcgtgttaaaccgtaagaacgcgtaaatcgagaacaaccacttgcg

SEQ ID NO: 135967 - DNA, 55 bp, Artificial
  Synthetic oligonucleotide
gcggagggtctccaattgttggctaacgtcctgcgtcatatcggatttagcccag

SEQ ID NO: 135968 - DNA, 60 bp, Artificial
  Synthetic oligonucleotide
tacgtgcgatccagtgaacgcctggactcgtgcaacgcaatgagtcacagtgcaatgagt

SEQ ID NO: 135969 - DNA, 53 bp, Artificial
  Synthetic oligonucleotide
gcggagtcaacgcccgaaagggagagtgttcccgtcccgagtagccggtccga

SEQ ID NO: 135970 - DNA, 51 bp, Artificial
  Synthetic oligonucleotide
ccgcttccgaaccgcgaggtttgtcgtccccggtgactatttctcccgtcc

SEQ ID NO: 135971 - DNA, 55 bp, Artificial
  Synthetic oligonucleotide
gcggagtgtccagaagacggttgtgaggcggccactgtggacgtgtactacctcg

SEQ ID NO: 135972 - DNA, 55 bp, Artificial
  Synthetic oligonucleotide
ccgctgtcacgcgatttcttaactaaagacgaatggtgagctaacttactcgtcg

SEQ ID NO: 135973 - DNA, 55 bp, Artificial
  Synthetic oligonucleotide
ccgctgtcacgcgatttcttaactaaagacgaatgcttcacgatcaatcccgtct

SEQ ID NO: 135974 - DNA, 53 bp, Artificial
  Synthetic oligonucleotide
ccgctgtaaccctgtacggccgtcaccggcctctataacctcgtattcttccg

SEQ ID NO: 135975 - DNA, 55 bp, Artificial
  Synthetic oligonucleotide
gcggccggtctcttcgttcctatccggcatctattgaaatagacgggcagcgagg

SEQ ID NO: 135976 - DNA, 55 bp, Artificial
  Synthetic oligonucleotide
ccgctgatctaagcgcctgttacgcacattcccatcgtttatgtgttaccgtgga

SEQ ID NO: 135977 - DNA, 55 bp, Artificial
  Synthetic oligonucleotide
gcggccgtgagctaattttcgtcacaggggcacacgctgcgatctccgttcgcgt

SEQ ID NO: 135978 - DNA, 55 bp, Artificial
  Synthetic oligonucleotide
gcgatcccactcggcgtgcttcaatcccacaagggtccgtctgaaacagcccttg

SEQ ID NO: 135979 - DNA, 60 bp, Artificial
  Synthetic oligonucleotide
tactgtatcgcgcacccatatcggacctcggacgctgctgatgagctgttccggacggcg

SEQ ID NO: 135980 - DNA, 55 bp, Artificial
  Synthetic oligonucleotide
gcgatggagcgacagggcatacaaggtcccggacataatgaatcaggtgcaaacc

SEQ ID NO: 135981 - DNA, 55 bp, Artificial
  Synthetic oligonucleotide
gcgcacagttgctgtccttgcacatagggagagaaacgtatatgaaatcctgcct

SEQ ID NO: 135982 - DNA, 55 bp, Artificial
  Synthetic oligonucleotide
gcgcaccctgcatctttagaaggcgttcagattgatagcgctgaccttcattcgt

SEQ ID NO: 135983 - DNA, 55 bp, Artificial
  Synthetic oligonucleotide
gcgcccttcattatagtcttgaacagcgcgaacattcccgtgattgttctgggcg

SEQ ID NO: 135984 - DNA, 53 bp, Artificial
  Synthetic oligonucleotide
ccggtacagagcttctaccggccggtttcgtcgtttccgtcactgtccacgcg

SEQ ID NO: 135985 - DNA, 55 bp, Artificial
  Synthetic oligonucleotide
ccgggtgatgtcgtgccgttgtggggtctgaacgacccgtctgtggcgatgtaga

SEQ ID NO: 135986 - DNA, 55 bp, Artificial
  Synthetic oligonucleotide
gcgcgcatttcgcgcatatacgcgcgttaggtgttatactactggaatactggag

SEQ ID NO: 135987 - DNA, 54 bp, Artificial
  Synthetic oligonucleotide
ccgggagaacttcccgagtcctacgagtcacgtgaggcgttcgaagcggattgg

SEQ ID NO: 135988 - DNA, 55 bp, Artificial
  Synthetic oligonucleotide
acccatatcggacctcggacgctgctgatgagctgttccggacggcggttcagga

SEQ ID NO: 135989 - DNA, 53 bp, Artificial
  Synthetic oligonucleotide
aacgttctcagtgacgctcccgaggaggaccctctcgagtcccgttcgtccct

SEQ ID NO: 135990 - DNA, 60 bp, Artificial
  Synthetic oligonucleotide
tagaactcgcttttgagtgcgattgcgcacctgagacaaccatgggttcccgcgagcagg

SEQ ID NO: 135991 - DNA, 55 bp, Artificial
  Synthetic oligonucleotide
gacaccgatagtgagggatttgccgactgcggagtcctcagagccgatcggagcg

SEQ ID NO: 135992 - DNA, 55 bp, Artificial
  Synthetic oligonucleotide
ccggcacgttctgtactcagcccttctcactccggcgacaaaggctttcggcctg

SEQ ID NO: 135993 - DNA, 55 bp, Artificial
  Synthetic oligonucleotide
ccggcacagagattggttcgcgctcatgatgtgcgtacaagcacggatcgtcggg

SEQ ID NO: 135994 - DNA, 55 bp, Artificial
  Synthetic oligonucleotide
ccggattctatacatttacgccagcaattttccacgcctgtcatctcgtccagcc

SEQ ID NO: 135995 - DNA, 55 bp, Artificial
  Synthetic oligonucleotide
gcgcttaaatcccattcatctacgttcagggtcgacggtgtcagactctcctcat

SEQ ID NO: 135996 - DNA, 55 bp, Artificial
  Synthetic oligonucleotide
ccggagtgtatcgggagcggctacttatcccattgggttcactcattcaccgcca

SEQ ID NO: 135997 - DNA, 55 bp, Artificial
  Synthetic oligonucleotide
cgtggaatcggaaccagttgactagtgcgttcgaaatctttcgtttgctcccctc

SEQ ID NO: 135998 - DNA, 55 bp, Artificial
  Synthetic oligonucleotide
gagacatgtagtcttcaccaattgcgggtagtgcaactggacgatgtgtgaggtc

SEQ ID NO: 135999 - DNA, 55 bp, Artificial
  Synthetic oligonucleotide
cgtggatatccccgaacacaaccgcttgcgatggccgagtctcttccatgctacg

SEQ ID NO: 136000 - DNA, 55 bp, Artificial
  Synthetic oligonucleotide
gagaatctcgaggaccaagccaaagacatcgagcggaagttagacgacctcacga

SEQ ID NO: 136001 - DNA, 54 bp, Artificial
  Synthetic oligonucleotide
tagaggctgtgagaacctactgtactgggggtgtaataaatgacccccccggaa

SEQ ID NO: 136002 - DNA, 55 bp, Artificial
  Synthetic oligonucleotide
cgtggtttctcgtcgtggtatggctgttccctgtatttagcaagagagcgggtcg

SEQ ID NO: 136003 - DNA, 55 bp, Artificial
  Synthetic oligonucleotide
ttgcggacttcccgcgaaaactgttcactgcgtaactaccgatgaccacgacacc

SEQ ID NO: 136004 - DNA, 55 bp, Artificial
  Synthetic oligonucleotide
gacttgcggccgtgtaggactcggattcgatgaagacgtccatctccgagttgcc

SEQ ID NO: 136005 - DNA, 54 bp, Artificial
  Synthetic oligonucleotide
cgttaaccgtgggccaaccgatagacgaccccgagcccagtgaggacgacacta

SEQ ID NO: 136006 - DNA, 55 bp, Artificial
  Synthetic oligonucleotide
gacttgaagaactgaaccggacccaactcgaggctcgctacacgactcaccgacc

SEQ ID NO: 136007 - DNA, 55 bp, Artificial
  Synthetic oligonucleotide
cgttcccgaggcaaacgtcgatctatataccgatcaggcacccgacggtggggag

SEQ ID NO: 136008 - DNA, 55 bp, Artificial
  Synthetic oligonucleotide
cgttccgcgggccagatggtactgcacactcgccgacacgaccgaactaacacac

SEQ ID NO: 136009 - DNA, 55 bp, Artificial
  Synthetic oligonucleotide
cgttcgacatacgagatggtttcactcccgtacagtatatatccaaccgaccatg

SEQ ID NO: 136010 - DNA, 55 bp, Artificial
  Synthetic oligonucleotide
cgttcgtctgtgttcgcgactctgaatcgcggttgtgaaatactcatcgtaagga

SEQ ID NO: 136011 - DNA, 55 bp, Artificial
  Synthetic oligonucleotide
cttcgaggagtatcgagagactgctcggcgtgctaggtggatcgccttctcagta

SEQ ID NO: 136012 - DNA, 60 bp, Artificial
  Synthetic oligonucleotide
tagcgctgtcaagagtgcatccgagagttgcgtatcgggctcccagagagcgcgattgag

SEQ ID NO: 136013 - DNA, 55 bp, Artificial
  Synthetic oligonucleotide
cgttcgttgatccgggagacatcgctacccgagggcccaaactgtctccgattgg

SEQ ID NO: 136014 - DNA, 54 bp, Artificial
  Synthetic oligonucleotide
cttcgaccctgtactcgatgtctttcgggtcgtcggtgtttcgcgcgttgtacg

SEQ ID NO: 136015 - DNA, 55 bp, Artificial
  Synthetic oligonucleotide
ctacttcgggtaacagacgatccactctctccacgctgaccacagacgaactcca

SEQ ID NO: 136016 - DNA, 55 bp, Artificial
  Synthetic oligonucleotide
ctactagagactcgcgtctcggtcgttactcgacggaccttgtatgctctgtcgc

SEQ ID NO: 136017 - DNA, 55 bp, Artificial
  Synthetic oligonucleotide
ttgtaagtcacgaaatcggacgtataagcgatccggcgggagtgataccgagaga

SEQ ID NO: 136018 - DNA, 55 bp, Artificial
  Synthetic oligonucleotide
ctaccgctgtcacgcgatttcttaactaaagacgaatggtcgtatcccatccgtc

SEQ ID NO: 136019 - DNA, 55 bp, Artificial
  Synthetic oligonucleotide
gactggagaccgttatcggtggaggggtggatacgagtggtcgtgtctcggatgt

SEQ ID NO: 136020 - DNA, 55 bp, Artificial
  Synthetic oligonucleotide
aacagcgagcatcaacggtatggaacgaactgtctttcgttgcccgtaccggagc

SEQ ID NO: 136021 - DNA, 55 bp, Artificial
  Synthetic oligonucleotide
ctacatccggctctagtgggtcgcctccctgagtctcgcgtgccactgttacacc

SEQ ID NO: 136022 - DNA, 55 bp, Artificial
  Synthetic oligonucleotide
ctaactcgtggctggagccacgtgcggtgatgttccgaaatgaggtctccccggt

SEQ ID NO: 136023 - DNA, 59 bp, Artificial
  Synthetic oligonucleotide
acgccctacagcgctctgccgagcgtttagagggtgagatgtgggaaacggtcagtcag

SEQ ID NO: 136024 - DNA, 55 bp, Artificial
  Synthetic oligonucleotide
ctaacgaccgacagggcacacgaggccgctcacccgatcgctaccgacggacgtt

SEQ ID NO: 136025 - DNA, 55 bp, Artificial
  Synthetic oligonucleotide
ctaaccgagtacacaagtgacggccgctggtctggaccactacgatgggttcgac

SEQ ID NO: 136026 - DNA, 55 bp, Artificial
  Synthetic oligonucleotide
ttggtgtgcttgaacttcactggcttgcactcgatggatcgggtatcgagacgac

SEQ ID NO: 136027 - DNA, 55 bp, Artificial
  Synthetic oligonucleotide
ttggaccaacttgaggtaaatcgcccttcgctcttgggaagtagatgggcgtgtt

SEQ ID NO: 136028 - DNA, 55 bp, Artificial
  Synthetic oligonucleotide
cgttttcgtattcgatgacgactcagacgcttccgttctcggctatcgtcgggca

SEQ ID NO: 136029 - DNA, 55 bp, Artificial
  Synthetic oligonucleotide
cgtttcgtgatgcaccgacccaacgagacccgctaccacaggtcgtactcgggaa

SEQ ID NO: 136030 - DNA, 55 bp, Artificial
  Synthetic oligonucleotide
cttcccgataacgtgagagttggacgacaccggtataggacgcctttgatgcatg

SEQ ID NO: 136031 - DNA, 55 bp, Artificial
  Synthetic oligonucleotide
cttccgaactttgagacacagtagaacaacgtgctgcgggagtgtatagcggtgt

SEQ ID NO: 136032 - DNA, 55 bp, Artificial
  Synthetic oligonucleotide
cgttgaatcacaagacagcgtcggggtagggaagactattcgcagtttcacagcg

SEQ ID NO: 136033 - DNA, 55 bp, Artificial
  Synthetic oligonucleotide
cttctctatcgaggacgaacaacagagctactacggaggtcctgcagcggggaca

SEQ ID NO: 136034 - DNA, 58 bp, Artificial
  Synthetic oligonucleotide
taggccgtcggggttctcacccgactatcgctgctactatggccaggattttcgtcac

SEQ ID NO: 136035 - DNA, 55 bp, Artificial
  Synthetic oligonucleotide
cgtccgtggcaggtggtagttgctgacggggcgttcgagaaagctagtcccgaga

SEQ ID NO: 136036 - DNA, 55 bp, Artificial
  Synthetic oligonucleotide
gagagtctgactaaagcgtatacgctggatagcgggtagtacagcgtccctacgt

SEQ ID NO: 136037 - DNA, 55 bp, Artificial
  Synthetic oligonucleotide
gagatacgcggtttcaaactcgcggtcaagcacattaacaacggtggtgggtggg

SEQ ID NO: 136038 - DNA, 55 bp, Artificial
  Synthetic oligonucleotide
cttgacgcacttcatggaccgtttcatccaaagattgtgtcgtcccaagagcaaa

SEQ ID NO: 136039 - DNA, 55 bp, Artificial
  Synthetic oligonucleotide
gagatcctaccgctgtcacgcgatttcttaactaaagacgaatgattgcccctgg

SEQ ID NO: 136040 - DNA, 55 bp, Artificial
  Synthetic oligonucleotide
gagatcctaccgctgtcacgcgatttcttaactaaagacgaatgcctccgcgagt

SEQ ID NO: 136041 - DNA, 55 bp, Artificial
  Synthetic oligonucleotide
gagatcgcgctaaacgcgtatatgagtgcatctaccgcttgattagtgatcgggt

SEQ ID NO: 136042 - DNA, 55 bp, Artificial
  Synthetic oligonucleotide
cgtcagattcctcgacaccaatcaactcccagaccgtcactgcaaccagtagcgg

SEQ ID NO: 136043 - DNA, 55 bp, Artificial
  Synthetic oligonucleotide
cgtattatgctgtacacgcacgtcagatctcattcaccagatccaaattcagtgg

SEQ ID NO: 136044 - DNA, 55 bp, Artificial
  Synthetic oligonucleotide
accctcaccacaaccggattcacgggttcagacgggagcgggctcgttgatgacg

SEQ ID NO: 136045 - DNA, 56 bp, Artificial
  Synthetic oligonucleotide
tagtcctcgacggcaagagaacccttgtaccacttggttctcgtgggcccatgacc

SEQ ID NO: 136046 - DNA, 53 bp, Artificial
  Synthetic oligonucleotide
aaacgtgagacgaacggggagtccgaatccgcgaccccgcttctcggaatagc

SEQ ID NO: 136047 - DNA, 55 bp, Artificial
  Synthetic oligonucleotide
cttgagtctaatagacagatcccgtatatgattttcgcggttcgattcggaggtc

SEQ ID NO: 136048 - DNA, 55 bp, Artificial
  Synthetic oligonucleotide
gacgctggagtgccgatacagacccatcggaggtctaatcagccgctcatcgctg

SEQ ID NO: 136049 - DNA, 55 bp, Artificial
  Synthetic oligonucleotide
cgtagatagttaagattgtagagtatttcgagtggtagcggcgttcagagacgcg

SEQ ID NO: 136050 - DNA, 55 bp, Artificial
  Synthetic oligonucleotide
tttccgtgccgtagcgtggtggactcgacagtcgttctgcacgaagggttccggg

SEQ ID NO: 136051 - DNA, 55 bp, Artificial
  Synthetic oligonucleotide
cgtggaagcagaaaggtatccgacacgatgccaacaacgggcgagtgcgcctctc

SEQ ID NO: 136052 - DNA, 55 bp, Artificial
  Synthetic oligonucleotide
cgtgcttactgatcgagatccggttgtatcagtactgtcaatgaatctgcgtcgc

SEQ ID NO: 136053 - DNA, 55 bp, Artificial
  Synthetic oligonucleotide
cgtgctgcgatcctgacacctccgctggctctgctctcacttgccacgtacggaa

SEQ ID NO: 136054 - DNA, 55 bp, Artificial
  Synthetic oligonucleotide
gagaccgattattgattgggtttcacttcagaaccgagttcgaaacgacgcgctc

SEQ ID NO: 136055 - DNA, 55 bp, Artificial
  Synthetic oligonucleotide
cgtgccgagccacgcgaggcaggtccactcatccccactcgatgttatcgaacac

SEQ ID NO: 136056 - DNA, 60 bp, Artificial
  Synthetic oligonucleotide
agtatcatgcgggaatgataccagataggcaaagaagtaactcaaaacttgaaagcatcc

SEQ ID NO: 136057 - DNA, 59 bp, Artificial
  Synthetic oligonucleotide
tagttctgaactcctagacctgcgttcttctgtctgaaaggatccgagaagcgactaac

SEQ ID NO: 136058 - DNA, 55 bp, Artificial
  Synthetic oligonucleotide
cgtgcatacgtattatcccatacatgacgggtaatccgacattctcgggtagcgg

SEQ ID NO: 136059 - DNA, 55 bp, Artificial
  Synthetic oligonucleotide
cttcgtcacgggatccacctgatggttgctacggggacgcgtgcgggtatgttcc

SEQ ID NO: 136060 - DNA, 55 bp, Artificial
  Synthetic oligonucleotide
ttgaggacttggtcgcaggggatagctgacgcttctccagatataggcctactct

SEQ ID NO: 136061 - DNA, 55 bp, Artificial
  Synthetic oligonucleotide
gagacgggcaccagcatagactgctgtcccgagggtggctagacctgcagtagtc

SEQ ID NO: 136062 - DNA, 55 bp, Artificial
  Synthetic oligonucleotide
cgtctgattcgaggtaacacgctcccgtctggtgattctgcctcgtggaaggtac

SEQ ID NO: 136063 - DNA, 55 bp, Artificial
  Synthetic oligonucleotide
gagacggtgtcgactaatagacgcatagaagattccacatggtgcagtcacgctc

SEQ ID NO: 136064 - DNA, 55 bp, Artificial
  Synthetic oligonucleotide
cgtctcagaatatgaggacatgttgtagacgtcatccgtctttagttagtcgagg

SEQ ID NO: 136065 - DNA, 55 bp, Artificial
  Synthetic oligonucleotide
gagactcatacgccgcctactcggtccactcgtatcaacgtatctacaacagttt

SEQ ID NO: 136066 - DNA, 55 bp, Artificial
  Synthetic oligonucleotide
gagagcagtcgtgtctcaactgatacgccgtgatagttggcgtgtcatgaatggg

SEQ ID NO: 136067 - DNA, 55 bp, Artificial
  Synthetic oligonucleotide
gagagctcctcgaacggatataagagtacgttactggcccgcctcgttgtgatca

SEQ ID NO: 136068 - DNA, 56 bp, Artificial
  Synthetic oligonucleotide
acgacggtggagcaacagctacgcaacgtgactgagtgccccggagaaggccgggg

SEQ ID NO: 136069 - DNA, 55 bp, Artificial
  Synthetic oligonucleotide
cgtcggcgcaacgtgattcgaatccgcgtcagttgtgggctgtagaccagctttc

SEQ ID NO: 136070 - DNA, 55 bp, Artificial
  Synthetic oligonucleotide
cgtcggatccggtgtaactaccgtcacggcaaacgcactcgagtacagtgagcgg

SEQ ID NO: 136071 - DNA, 55 bp, Artificial
  Synthetic oligonucleotide
ctgcagttcgatgatggcgactcgtgggaatctctcggtctggatgggtcggagg

SEQ ID NO: 136072 - DNA, 55 bp, Artificial
  Synthetic oligonucleotide
ctgtttggaagagactggacgaggccgtcattgacaaagggacggagtaggtacg

SEQ ID NO: 136073 - DNA, 55 bp, Artificial
  Synthetic oligonucleotide
cttataccgagttggtgtcgttcagttatcatgccctcgttcacactgacgtata

SEQ ID NO: 136074 - DNA, 55 bp, Artificial
  Synthetic oligonucleotide
ctgcaacgtgagaaaacagcggttcgagatactactgacgtcctcttggtactct

SEQ ID NO: 136075 - DNA, 55 bp, Artificial
  Synthetic oligonucleotide
ctgatctgtggcggtcgatcttcgatccctggtcagactccaccaagctgcccgg

SEQ ID NO: 136076 - DNA, 55 bp, Artificial
  Synthetic oligonucleotide
cttataccgctgtaggttccttgttgtactgttgcacacatgcgagatgcatacg

SEQ ID NO: 136077 - DNA, 55 bp, Artificial
  Synthetic oligonucleotide
gacgtaagacaccaggtagcatggtgtccgtcggagcgatagcatgacagaccac

SEQ ID NO: 136078 - DNA, 55 bp, Artificial
  Synthetic oligonucleotide
ctgagcggcgtctaaacacggcccgcgctgtctattcagcacgagttctgaaacc

SEQ ID NO: 136079 - DNA, 57 bp, Artificial
  Synthetic oligonucleotide
tatacactcgttccttctcgccccggtgtgataacttttgcgcctcaaagagaggcg

SEQ ID NO: 136080 - DNA, 55 bp, Artificial
  Synthetic oligonucleotide
ctgaaacgtcgaaacgtggcagtcatcgttcggacaccggaactcggcctgcgag

SEQ ID NO: 136081 - DNA, 55 bp, Artificial
  Synthetic oligonucleotide
ctctttgtcctcgtgatccataccattcaagtaggagtcgattagctggtcacgg

SEQ ID NO: 136082 - DNA, 55 bp, Artificial
  Synthetic oligonucleotide
acccgtacaccggctgacccatgcaacaaggttcaaacagcccggggcgcaagca

SEQ ID NO: 136083 - DNA, 55 bp, Artificial
  Synthetic oligonucleotide
ctctctagctttgtattcgacgtactcatagaggcgacggaacgcccacagatga

SEQ ID NO: 136084 - DNA, 55 bp, Artificial
  Synthetic oligonucleotide
aaagtgacctgtcgaggccgcaaccatagatggaattgtccggcagggatccgca

SEQ ID NO: 136085 - DNA, 55 bp, Artificial
  Synthetic oligonucleotide
ctctcattgcgaaggcgataaccaattagtctacgctgaggcaggcgaagtcagc

SEQ ID NO: 136086 - DNA, 55 bp, Artificial
  Synthetic oligonucleotide
ctctattcggcggagacgttgaatacatacaggatgccccggttggggaggtgac

SEQ ID NO: 136087 - DNA, 55 bp, Artificial
  Synthetic oligonucleotide
ctcgttgctccggttcaacacgagtatccgccagttagacgctgaaattgacgtg

SEQ ID NO: 136088 - DNA, 55 bp, Artificial
  Synthetic oligonucleotide
ctcgtggctgatcgtaactgactcggtgtttagcatggacggggatgtcgctccg

SEQ ID NO: 136089 - DNA, 55 bp, Artificial
  Synthetic oligonucleotide
ctgtctgcgtcgtgttagatgatcacttggctttcggtcggcagagactctcaga

SEQ ID NO: 136090 - DNA, 55 bp, Artificial
  Synthetic oligonucleotide
tatatataagacgcgcgtagccggtacagagcttctaccggccggtttcgtcgtt

SEQ ID NO: 136091 - DNA, 55 bp, Artificial
  Synthetic oligonucleotide
gacgggatgaggatgtccgaaagtcccacagatagaacccgttcatacgtctctc

SEQ ID NO: 136092 - DNA, 52 bp, Artificial
  Synthetic oligonucleotide
gacggggccgacgggtctggtctgaaacggtcgaatagaaaacacttacacg

SEQ ID NO: 136093 - DNA, 55 bp, Artificial
  Synthetic oligonucleotide
ctggctctccgtgtttgtgctcgagattcagcgatagttagtgtcgacagcgacg

SEQ ID NO: 136094 - DNA, 54 bp, Artificial
  Synthetic oligonucleotide
gacggtacgttccgagagtcagaaccggaatactggagagcgtttctccggccc

SEQ ID NO: 136095 - DNA, 55 bp, Artificial
  Synthetic oligonucleotide
ctggatgctttcgggtcggaagtcgtgacatcttcttcgtacgctgttgtagcgc

SEQ ID NO: 136096 - DNA, 55 bp, Artificial
  Synthetic oligonucleotide
ctgtggtgtcagtgccgtatgactgtggcttcggtctgttagtgctcgtggactc

SEQ ID NO: 136097 - DNA, 55 bp, Artificial
  Synthetic oligonucleotide
ctggagtatggcggatttaggtggcagttcgtacgacgacacgtatacacgtgtt

SEQ ID NO: 136098 - DNA, 55 bp, Artificial
  Synthetic oligonucleotide
ctggaggaagcatcgaaggatctcggagcgaactcgattacgacgttccgtcggg

SEQ ID NO: 136099 - DNA, 55 bp, Artificial
  Synthetic oligonucleotide
ctgcttccctcgaaccaaacgcgactgggtgagagtcgcggtggtgaactcggga

SEQ ID NO: 136100 - DNA, 55 bp, Artificial
  Synthetic oligonucleotide
ctgttactgggaattcgtgtgtctctctacgtcacacgcgtcgggctcgtgtcgc

SEQ ID NO: 136101 - DNA, 60 bp, Artificial
  Synthetic oligonucleotide
tatcagcttgcgccatatttcagtgtagtggataatcgagtataaaccttctcccgacta

SEQ ID NO: 136102 - DNA, 55 bp, Artificial
  Synthetic oligonucleotide
tcccgggagtgacgaagagttacagactccggacgttcgtggctacgacttccgc

SEQ ID NO: 136103 - DNA, 55 bp, Artificial
  Synthetic oligonucleotide
ctgctcattacggcaggtcttggattgagtattcttgaggcatttgcccctggtg

SEQ ID NO: 136104 - DNA, 55 bp, Artificial
  Synthetic oligonucleotide
gacggtcgttcggtctgagtatgggactggtgatgcagttccccggacaggtccg

SEQ ID NO: 136105 - DNA, 55 bp, Artificial
  Synthetic oligonucleotide
ctgcgtccggctgagtatcactctaaacgcactccctgatgcctgtctgggcagt

SEQ ID NO: 136106 - DNA, 55 bp, Artificial
  Synthetic oligonucleotide
ctgcgcgctggcgactcgttactgccgagtcagtgatcacgatatacgacctgcc

SEQ ID NO: 136107 - DNA, 55 bp, Artificial
  Synthetic oligonucleotide
ctgcctacgctccgatagcaacggacgatacccttacaagactattgctgtacgc

SEQ ID NO: 136108 - DNA, 55 bp, Artificial
  Synthetic oligonucleotide
ttgtggcatggattcggaaccgttttgtcccgcgactcgcatcgttcgactatgc

SEQ ID NO: 136109 - DNA, 55 bp, Artificial
  Synthetic oligonucleotide
ctccagatgatcgtcagtgacagaacggacacctgagacaataccagcgcgtccg

SEQ ID NO: 136110 - DNA, 55 bp, Artificial
  Synthetic oligonucleotide
ttgtcgtctgcgtccataccccgagtagcgagcgggcgggtaaatgttccgcgga

SEQ ID NO: 136111 - DNA, 55 bp, Artificial
  Synthetic oligonucleotide
ttgtccgggtggcgaatgggaatccagcagcggcggagtcactgagctgtagctg

SEQ ID NO: 136112 - DNA, 56 bp, Artificial
  Synthetic oligonucleotide
acgaaaatcctggccatagtagcagcgatagtcgggtgagaaccccgacggcctaa

SEQ ID NO: 136113 - DNA, 55 bp, Artificial
  Synthetic oligonucleotide
ctcacgacgctactcgcgctcccaattaccgttctaattctggcagtcgtttggt

SEQ ID NO: 136114 - DNA, 55 bp, Artificial
  Synthetic oligonucleotide
aacacttattgccatcaatagaccgaagtcacctaaaacaggtgtgatagcgagt

SEQ ID NO: 136115 - DNA, 55 bp, Artificial
  Synthetic oligonucleotide
ctcaattatggagaagtgccgttgatacgctttccgagatgcgaactgtcctgaa

SEQ ID NO: 136116 - DNA, 55 bp, Artificial
  Synthetic oligonucleotide
ctcaatcgggcactgagaattgcgccgatatatcccttgtagtgcgcattgaatc

SEQ ID NO: 136117 - DNA, 55 bp, Artificial
  Synthetic oligonucleotide
gacgggacaggtctccggctgggactttacacgggtgacacaccgcacaaccctg

SEQ ID NO: 136118 - DNA, 55 bp, Artificial
  Synthetic oligonucleotide
gactcccgccggggagttcggggaacacctgcgccatcgagatgaaaagcaggtt

SEQ ID NO: 136119 - DNA, 55 bp, Artificial
  Synthetic oligonucleotide
aacagaacctgaagacagcggcttcccactccctcttatcttgggcgtgttcgtc

SEQ ID NO: 136120 - DNA, 55 bp, Artificial
  Synthetic oligonucleotide
ctataccggaccttctcgatatccgcgctcaggtcctcagcccgtcgctcccgat

SEQ ID NO: 136121 - DNA, 55 bp, Artificial
  Synthetic oligonucleotide
ctataacgtagaaacccgttctctctggtcagatacgcgaatatagttcgtcggg

SEQ ID NO: 136122 - DNA, 55 bp, Artificial
  Synthetic oligonucleotide
tccgggccgcgctgaaccggcaggacggcccgatcagccccgactcgatcagctg

SEQ ID NO: 136123 - DNA, 53 bp, Artificial
  Synthetic oligonucleotide
tatccaagactaaccgtacaaccgccgaaaacgaaggatgggaaccgtcagac

SEQ ID NO: 136124 - DNA, 55 bp, Artificial
  Synthetic oligonucleotide
gactgacgaaggtaatcgcacgttacgctgctctccactctggaaaagcagcccg

SEQ ID NO: 136125 - DNA, 55 bp, Artificial
  Synthetic oligonucleotide
ctaggacagcaaccgtctccctaatcgatagccccgcagtatggagacgcacccc

SEQ ID NO: 136126 - DNA, 55 bp, Artificial
  Synthetic oligonucleotide
ctagcacgacgcgagacgatcagacgaccggacggatgagtcgagaacgccttag

SEQ ID NO: 136127 - DNA, 55 bp, Artificial
  Synthetic oligonucleotide
ctcgtcacaagtccgtttcgcagcctcctgagcgtagccttcgtgggttgtctcg

SEQ ID NO: 136128 - DNA, 54 bp, Artificial
  Synthetic oligonucleotide
gacgtgttccgggacgttttgccccatattccgcatcctggtttcaccgtactc

SEQ ID NO: 136129 - DNA, 55 bp, Artificial
  Synthetic oligonucleotide
ctcggggacggagacggataacttatcggatactcgtgatagcaaatgtcacggc

SEQ ID NO: 136130 - DNA, 55 bp, Artificial
  Synthetic oligonucleotide
ctcgctggtatcatcggagagaccgacatcaagcccgatttctaggagcacatca

SEQ ID NO: 136131 - DNA, 55 bp, Artificial
  Synthetic oligonucleotide
ctcgctacccactgttaggtaggtgtttacagccatggatagacgtacattcgta

SEQ ID NO: 136132 - DNA, 55 bp, Artificial
  Synthetic oligonucleotide
ctcgcgtcgggaaattccgcgttcagtcatcacccaccctatggactgcccgtgc

SEQ ID NO: 136133 - DNA, 55 bp, Artificial
  Synthetic oligonucleotide
gacgttcgataacgtccagattacgccgcacaacgcgggacacacgccgcagtac

SEQ ID NO: 136134 - DNA, 60 bp, Artificial
  Synthetic oligonucleotide
tatgatggacctcagatacgtggtttctcgtcgtggtatggctgttccctgtatttagca

SEQ ID NO: 136135 - DNA, 55 bp, Artificial
  Synthetic oligonucleotide
ctcgccctagaccgacggactcatcgtcaatagtgcggtacggcccggtatggaa

SEQ ID NO: 136136 - DNA, 55 bp, Artificial
  Synthetic oligonucleotide
gacgttctcaaccatacgcgtcgctaccgggcggaggaatgaaacggtgtcggcc

SEQ ID NO: 136137 - DNA, 55 bp, Artificial
  Synthetic oligonucleotide
aaataaacttcaccctgataccgacttccgacaggggcactcatactccgctctg

SEQ ID NO: 136138 - DNA, 55 bp, Artificial
  Synthetic oligonucleotide
ctcgagctgcatggtgtccactcacaaaccttcgaaacgcgatgttctctctccg

SEQ ID NO: 136139 - DNA, 55 bp, Artificial
  Synthetic oligonucleotide
ctcgagccggtcgcctcgagcactgatcaacgactttaagagaatggtcgtcggg

SEQ ID NO: 136140 - DNA, 55 bp, Artificial
  Synthetic oligonucleotide
gacgtttacgtagtcaggcggttagcatccggtatgccacgaccgaagacggagt

SEQ ID NO: 136141 - DNA, 53 bp, Artificial
  Synthetic oligonucleotide
ctcgaatccaaccggggaaactgtaccagtcactatagaggtcgaaacggacg

SEQ ID NO: 136142 - DNA, 55 bp, Artificial
  Synthetic oligonucleotide
ctcccgcaaataacgcgccgacgggcttgagactgacgtgcgacgaatctgtcgt

SEQ ID NO: 136143 - DNA, 55 bp, Artificial
  Synthetic oligonucleotide
ctcccacgcaaaatgcgtcgacagacgcgttagcagtgaatatagaccatagggc

SEQ ID NO: 136144 - DNA, 55 bp, Artificial
  Synthetic oligonucleotide
ctcccaaacgtaccagcgggatctacttaacgatactcgataatcgtatccaggc

SEQ ID NO: 136145 - DNA, 59 bp, Artificial
  Synthetic oligonucleotide
tatggcgagtcaaacacattctcctgtcgtttgcaaggggagcgaataccgcgtagaaa

SEQ ID NO: 136146 - DNA, 55 bp, Artificial
  Synthetic oligonucleotide
cgctgttagcgtcgttggtccgactccgtggacagcgtgattggcaatcgacgag

SEQ ID NO: 136147 - DNA, 55 bp, Artificial
  Synthetic oligonucleotide
cgcttgacgaactacgtcgaagagaactacggtgatagctaatggcgacaggacc

SEQ ID NO: 136148 - DNA, 55 bp, Artificial
  Synthetic oligonucleotide
gagtcgtccgtgtacgggtcgcaggtgaacccttctgattcgaggtagtctcccc

SEQ ID NO: 136149 - DNA, 54 bp, Artificial
  Synthetic oligonucleotide
gagtcgtccaaaaccggcggtctcgagaacggacacggcggttagagaataaga

SEQ ID NO: 136150 - DNA, 53 bp, Artificial
  Synthetic oligonucleotide
aacgaatcttacggcccgagggcggaaacacaaggctcgggcactagtcggcg

SEQ ID NO: 136151 - DNA, 52 bp, Artificial
  Synthetic oligonucleotide
cggaactggaccgggagaaggttcggcccgaagcacccactacgttctacga

SEQ ID NO: 136152 - DNA, 55 bp, Artificial
  Synthetic oligonucleotide
cggaagcgtggaatctgaaccgtacagaggctatgacggcacttctcggattcgc

SEQ ID NO: 136153 - DNA, 55 bp, Artificial
  Synthetic oligonucleotide
cggaagtgacactcgcatggttactctgttatattacagtctcagtcacgcacga

SEQ ID NO: 136154 - DNA, 55 bp, Artificial
  Synthetic oligonucleotide
gacgatttaactcgtcgctgaacgagtccaggcgcaaactggatcgcacgtaatc

SEQ ID NO: 136155 - DNA, 55 bp, Artificial
  Synthetic oligonucleotide
cggacaaatcgtcccacctcgggtcgacacgagcatcgacattacagatcaccta

SEQ ID NO: 136156 - DNA, 60 bp, Artificial
  Synthetic oligonucleotide
tattccctgatcatgccttgcccgtcgagtgcaaacactactacgctcgcgaggcgcact

SEQ ID NO: 136157 - DNA, 55 bp, Artificial
  Synthetic oligonucleotide
accctgcctactacgccccttcgcggggtcaatacggccagaatcgggcagtaga

SEQ ID NO: 136158 - DNA, 55 bp, Artificial
  Synthetic oligonucleotide
cggacgcgatgagatgactgtcggtgggctacagcaagattgggtgtcgagaggc

SEQ ID NO: 136159 - DNA, 55 bp, Artificial
  Synthetic oligonucleotide
cggactacgagggcctcgggactcccgattactccacgctcgacttggagatgta

SEQ ID NO: 136160 - DNA, 55 bp, Artificial
  Synthetic oligonucleotide
cggactcgcctggccggagggaactaagaggccacaggacaattattgaaacgcg

SEQ ID NO: 136161 - DNA, 55 bp, Artificial
  Synthetic oligonucleotide
gaaccaactagagatagagatcggactctcctgcgttgtaccttccggcgttggt

SEQ ID NO: 136162 - DNA, 55 bp, Artificial
  Synthetic oligonucleotide
gagtcagtcatcagcgttggttgtctgcctgaggcttgttactgcggatgtatga

SEQ ID NO: 136163 - DNA, 52 bp, Artificial
  Synthetic oligonucleotide
gaggggcgaacggatcgttttgtccggtcgttattgcttacgccggtccgaa

SEQ ID NO: 136164 - DNA, 55 bp, Artificial
  Synthetic oligonucleotide
cggccgaatcagtcactcaacggacagacgccagcggaggtgctaaactagacag

SEQ ID NO: 136165 - DNA, 55 bp, Artificial
  Synthetic oligonucleotide
gagggttcgaagatccctcaggcagtcgagcaacgtcgttcgaaagcgtttgccc

SEQ ID NO: 136166 - DNA, 55 bp, Artificial
  Synthetic oligonucleotide
gaggtcctcaactggttgatacagcgtcggagccatcttgtccgtagtccaactg

SEQ ID NO: 136167 - DNA, 55 bp, Artificial
  Synthetic oligonucleotide
agtagggccgcacccacggccctacacgcaaggaactgtgacgcggttccgtgcc

SEQ ID NO: 136168 - DNA, 60 bp, Artificial
  Synthetic oligonucleotide
tcaacaacgagtacagagagcctgtcacacaacggtctgtctgacggggcgacgatatcc

SEQ ID NO: 136169 - DNA, 55 bp, Artificial
  Synthetic oligonucleotide
cggcacgcatgtacgagagaccagctttcccggtgtagaaaccggttgcggggag

SEQ ID NO: 136170 - DNA, 55 bp, Artificial
  Synthetic oligonucleotide
cggcacaaccttggaggatggatttgatatgcgacttatttacagcgttggagag

SEQ ID NO: 136171 - DNA, 55 bp, Artificial
  Synthetic oligonucleotide
cggcaactgtgtgtgcatactgaccgctcggagtcaatcgatctcgtcaagaaag

SEQ ID NO: 136172 - DNA, 55 bp, Artificial
  Synthetic oligonucleotide
cggatgtgaatagaagtgtgctaaaagcataagaccatactagctactatgacgg

SEQ ID NO: 136173 - DNA, 55 bp, Artificial
  Synthetic oligonucleotide
cggatgagactataggtgacgcataccaatgcagtcagccgaggtgactgtctcg

SEQ ID NO: 136174 - DNA, 55 bp, Artificial
  Synthetic oligonucleotide
tcattaccaccgtagtcagaccgtagtcgcttagtaactagtcagccacgcgtct

SEQ ID NO: 136175 - DNA, 55 bp, Artificial
  Synthetic oligonucleotide
cggatatggaccgccgtaccgcgagactactgaacggtgtgctagcgctatgctg

SEQ ID NO: 136176 - DNA, 55 bp, Artificial
  Synthetic oligonucleotide
ttcctttctcatccggtcggaggaacgccccgcgcctggaagactgggcatccac

SEQ ID NO: 136177 - DNA, 55 bp, Artificial
  Synthetic oligonucleotide
gaggtgcaggcatctgacttgcagggacgtgggaaacgaacacgtcggttctata

SEQ ID NO: 136178 - DNA, 55 bp, Artificial
  Synthetic oligonucleotide
cggaggctacggctatttaactgctctcgctcggttagaattaagaagtcggctc

SEQ ID NO: 136179 - DNA, 57 bp, Artificial
  Synthetic oligonucleotide
tcacagctggaccgtcgagtttcccgtctacatcgactgtacctaccagaacggacg

SEQ ID NO: 136180 - DNA, 55 bp, Artificial
  Synthetic oligonucleotide
gagtacgtttcgtatgctttcgaccggtgagggagtcggaatacatcgagagtgg

SEQ ID NO: 136181 - DNA, 55 bp, Artificial
  Synthetic oligonucleotide
gagtagctcgtttggtcgaagatgtgtcccttatcggtgagttcgtagagagcgc

SEQ ID NO: 136182 - DNA, 55 bp, Artificial
  Synthetic oligonucleotide
cggagagtaagactctcaaagagattgcgtgggaagccgattcggagacgtacgc

SEQ ID NO: 136183 - DNA, 55 bp, Artificial
  Synthetic oligonucleotide
gatacttagataggaatctgtccatcacgatctctccggtagtgtcgtcggtacg

SEQ ID NO: 136184 - DNA, 55 bp, Artificial
  Synthetic oligonucleotide
cgcgtattttcgacgtgccgcttgagttcctgtttgcagacgtttgtcgtcgtga

SEQ ID NO: 136185 - DNA, 55 bp, Artificial
  Synthetic oligonucleotide
gatccagcgtgagacgttgctctacacgatggacaccgtgatcctcgctaccgcg

SEQ ID NO: 136186 - DNA, 55 bp, Artificial
  Synthetic oligonucleotide
gatcgaattccgtatagaacgcgcaaatgaggtagatatttggcacgatagagtg

SEQ ID NO: 136187 - DNA, 55 bp, Artificial
  Synthetic oligonucleotide
gaacccatccaacgtagtttgacactgggacatcatagaagataccaccgtctgg

SEQ ID NO: 136188 - DNA, 55 bp, Artificial
  Synthetic oligonucleotide
gatcgcacagctgtgatgcgatcaggtgtgcattggcttgcagtggctactatag

SEQ ID NO: 136189 - DNA, 55 bp, Artificial
  Synthetic oligonucleotide
gaaccggacagtcaccgggatggatcaacgtcggctgcgaggagtatgcaggtgc

SEQ ID NO: 136190 - DNA, 53 bp, Artificial
  Synthetic oligonucleotide
accggacgactgggtggtggagcggattcggacgctaaagccgttctacttcc

SEQ ID NO: 136191 - DNA, 55 bp, Artificial
  Synthetic oligonucleotide
gatgattatgcgctttgacgctgactggatgtcacgcgccgatgatcgcattctg

SEQ ID NO: 136192 - DNA, 55 bp, Artificial
  Synthetic oligonucleotide
cgcgcggacaagaaaacgaatgtttctgcaccgagtagtgtgtaaagcgtttcag

SEQ ID NO: 136193 - DNA, 55 bp, Artificial
  Synthetic oligonucleotide
tttctcgcggtctcgccaagctaggagtgggtcactccgaagcgacaacgcctgc

SEQ ID NO: 136194 - DNA, 55 bp, Artificial
  Synthetic oligonucleotide
cgcgcgagtccctgctgccgattacattctgcgcagccccgtaggcttagatagg

SEQ ID NO: 136195 - DNA, 55 bp, Artificial
  Synthetic oligonucleotide
cgcgcccgtattgcggacccggtatcacggctccgaaaccgtactcatcgctgtt

SEQ ID NO: 136196 - DNA, 55 bp, Artificial
  Synthetic oligonucleotide
cgcgcatgacgtgtccgtctcgtttgccaccagggtacggaaaccccagcatcac

SEQ ID NO: 136197 - DNA, 55 bp, Artificial
  Synthetic oligonucleotide
cgcgcactcgttgcgtacgaacgcacagacggacagtacacgctccactacagcc

SEQ ID NO: 136198 - DNA, 55 bp, Artificial
  Synthetic oligonucleotide
cgcgatcagtcatttataagcaagcagctggcactccgcccgtatctaccgacga

SEQ ID NO: 136199 - DNA, 55 bp, Artificial
  Synthetic oligonucleotide
gaacggtcgattcgtcagcggatttcgctggcacgacgtaccgctcgtccgaacc

SEQ ID NO: 136200 - DNA, 55 bp, Artificial
  Synthetic oligonucleotide
cgcgatagctggcagactgggctgtcgctgaacgtgggcaagtagtattcagtga

SEQ ID NO: 136201 - DNA, 60 bp, Artificial
  Synthetic oligonucleotide
tcacgggaagggcgggattctctcgctgaatcaagatagtactgccgcgacagtggtcag

SEQ ID NO: 136202 - DNA, 55 bp, Artificial
  Synthetic oligonucleotide
tcatcctacgttttcacgcctaattagaattatgtcgtctcaaccgaggtactcg

SEQ ID NO: 136203 - DNA, 55 bp, Artificial
  Synthetic oligonucleotide
cgctggtatcaaaccagataacactgtcggccgttactccgtgacggtcttcgcc

SEQ ID NO: 136204 - DNA, 55 bp, Artificial
  Synthetic oligonucleotide
gagtgacaactggcggcctcatacggattattgtagcgatttaccggtgattgtc

SEQ ID NO: 136205 - DNA, 55 bp, Artificial
  Synthetic oligonucleotide
cgctgagacaagatggtgagcccactcatcacgattattgatcggatctgcacct

SEQ ID NO: 136206 - DNA, 55 bp, Artificial
  Synthetic oligonucleotide
gagtggttccgcgtctgtactggcagcgtcgttctgtaccggagtgtcacgtgcc

SEQ ID NO: 136207 - DNA, 55 bp, Artificial
  Synthetic oligonucleotide
gaaccatttcaggtatagtactagcccggcagtcagtagaaggagaaagacgccc

SEQ ID NO: 136208 - DNA, 55 bp, Artificial
  Synthetic oligonucleotide
accccagcgtggggtctggaacgcgaacagacgattcacgcactgtccgatctcc

SEQ ID NO: 136209 - DNA, 55 bp, Artificial
  Synthetic oligonucleotide
cgctcttaactaaagacgaatgccgttgaaaagtatgttcgcaaaaccagcgtgg

SEQ ID NO: 136210 - DNA, 55 bp, Artificial
  Synthetic oligonucleotide
gagttcctcttgcgctgcccgatgctgttggatcgtctcgttgttcgagagttcg

SEQ ID NO: 136211 - DNA, 55 bp, Artificial
  Synthetic oligonucleotide
cgctcccagcagccgtcgtgttgcgtatcgtcgaataacatagatggcctccgac

SEQ ID NO: 136212 - DNA, 59 bp, Artificial
  Synthetic oligonucleotide
tcagatagaggcagagaaggcggttaaggagacgggagaaagcggcgaggaggaggcga

SEQ ID NO: 136213 - DNA, 55 bp, Artificial
  Synthetic oligonucleotide
cgctcccaacaatactctccataagctgcgcattgacgactgcgtagcaggtatc

SEQ ID NO: 136214 - DNA, 55 bp, Artificial
  Synthetic oligonucleotide
cgctaccgcagacttactcagcgtccggcccaaagaacggcagtgcgtcaaacac

SEQ ID NO: 136215 - DNA, 55 bp, Artificial
  Synthetic oligonucleotide
cgctaacgtctcggtctccgcgacattgaagaacgactctaccgaaggctcattc

SEQ ID NO: 136216 - DNA, 55 bp, Artificial
  Synthetic oligonucleotide
gatacgtagcgacgccccggaatcaatctgtggatcactactgtactgtagcgcg

SEQ ID NO: 136217 - DNA, 55 bp, Artificial
  Synthetic oligonucleotide
cgcgtctcattcctaccaatcagtacgtccgtccgtttcaaaagccttcggacga

SEQ ID NO: 136218 - DNA, 55 bp, Artificial
  Synthetic oligonucleotide
cggtgtcctcctcccggagtgagagtcgcagtcaccgacgggtagtatttcactg

SEQ ID NO: 136219 - DNA, 55 bp, Artificial
  Synthetic oligonucleotide
cggtggagatcggggactcaagcagaacacagtacaaacctattaccgctatatc

SEQ ID NO: 136220 - DNA, 55 bp, Artificial
  Synthetic oligonucleotide
cttttcgacccggcagttcagagtcacagagcccgaagtcgtcggtacgactcgg

SEQ ID NO: 136221 - DNA, 55 bp, Artificial
  Synthetic oligonucleotide
cggtgaatgatcagcaaccatcgaggctgtttcgagtaccagtatgatcaccagt

SEQ ID NO: 136222 - DNA, 52 bp, Artificial
  Synthetic oligonucleotide
gagccgtccgaaattagcctcttcagaggttcccgggtaactttcccagcgt

SEQ ID NO: 136223 - DNA, 60 bp, Artificial
  Synthetic oligonucleotide
tcaggactggctgcttgagaccggtcggatgtactccgatcactccaagcagacggggct

SEQ ID NO: 136224 - DNA, 55 bp, Artificial
  Synthetic oligonucleotide
cggtcgcgcggacactcggtatgccgacggaatcggacactgattatgaccccac

SEQ ID NO: 136225 - DNA, 55 bp, Artificial
  Synthetic oligonucleotide
cggtcctgactcgtatcgaactgggtctcgagtgtctcgcggagcgacgccttct

SEQ ID NO: 136226 - DNA, 55 bp, Artificial
  Synthetic oligonucleotide
cggtcccgtcttagttctgccgctgtcatgtttcgatcggaccgtaatcggtggg

SEQ ID NO: 136227 - DNA, 55 bp, Artificial
  Synthetic oligonucleotide
cggtagcttccagtatatccgtcgtcggactatcgcctccgtcgataaaggagtc

SEQ ID NO: 136228 - DNA, 55 bp, Artificial
  Synthetic oligonucleotide
cgggttgcctcgttgaatcacaagacagcgtcggggtagggaagactattcgcag

SEQ ID NO: 136229 - DNA, 52 bp, Artificial
  Synthetic oligonucleotide
cgggtgctacccgttgtatactagttggttttgacccgtggtttgccctgaa

SEQ ID NO: 136230 - DNA, 55 bp, Artificial
  Synthetic oligonucleotide
cgggtcaggcactcaacgtctccggcgggaaagtgacgtattgagtgctggagtg

SEQ ID NO: 136231 - DNA, 55 bp, Artificial
  Synthetic oligonucleotide
cgggtcaaagcgatacgaacatgtctcggcgtcggggactgagctcatacgtcgc

SEQ ID NO: 136232 - DNA, 55 bp, Artificial
  Synthetic oligonucleotide
gagcgaatagtattggcgttcatagggtattgtgcatacgttcgatatactgtgg

SEQ ID NO: 136233 - DNA, 55 bp, Artificial
  Synthetic oligonucleotide
cggggcgcgaatcttgcatgcgattcccaactgaaatcgttcgattgctcccgtg

SEQ ID NO: 136234 - DNA, 54 bp, Artificial
  Synthetic oligonucleotide
accgacacgcgatgtaaccgctcgcgggtgttcgcttgggttcggtagttctgg

SEQ ID NO: 136235 - DNA, 55 bp, Artificial
  Synthetic oligonucleotide
tcattcgatgagtgtgtgatttcgatggagtgtagctacctgaactggggtcgcg

SEQ ID NO: 136236 - DNA, 55 bp, Artificial
  Synthetic oligonucleotide
cttgcgtgtctcttcgacagctgccccaaggtcggttcccgtccatgacccgtag

SEQ ID NO: 136237 - DNA, 55 bp, Artificial
  Synthetic oligonucleotide
cgtactatcgtctgagcccgcctgttgcaaactggattgcgcagtcgaaatggcg

SEQ ID NO: 136238 - DNA, 55 bp, Artificial
  Synthetic oligonucleotide
cgtacgcctcaagcagcgttgtctcggtggcactaatgattcgtgcagggctacg

SEQ ID NO: 136239 - DNA, 55 bp, Artificial
  Synthetic oligonucleotide
cgtaccgtaaattgtgctaccgagtctcgggtaaggatatgcacgccagcggggc

SEQ ID NO: 136240 - DNA, 55 bp, Artificial
  Synthetic oligonucleotide
cttgggacgaaatgcctcacagcggacagtgacgtacttgtcaggtctgaaaacg

SEQ ID NO: 136241 - DNA, 55 bp, Artificial
  Synthetic oligonucleotide
cgtaagtagtcatagatgatagttcctgatagaccaatggacctcgaaaccgtca

SEQ ID NO: 136242 - DNA, 55 bp, Artificial
  Synthetic oligonucleotide
cgtaacgactcttggtatctcaaccatatcatacacgcccagtttggcttagccg

SEQ ID NO: 136243 - DNA, 54 bp, Artificial
  Synthetic oligonucleotide
cggtttcgggctgaccgttcatactcgtacgtagggaatcccctcataagccga

SEQ ID NO: 136244 - DNA, 55 bp, Artificial
  Synthetic oligonucleotide
cggttgagttcagggacgtcctatggaccgggctcgtctgtcgtcatcggtccag

SEQ ID NO: 136245 - DNA, 55 bp, Artificial
  Synthetic oligonucleotide
accgaaacgtagattcggtcgcatatatctctggaaacccgttcgcagaccaact

SEQ ID NO: 136246 - DNA, 53 bp, Artificial
  Synthetic oligonucleotide
cggttcggaatccgctccgttccgaccgattcctacccataagtatggtagcc

SEQ ID NO: 136247 - DNA, 55 bp, Artificial
  Synthetic oligonucleotide
cggttattatcatacctgtacgctcggacctcagagagtccgtgaggtattccct

SEQ ID NO: 136248 - DNA, 55 bp, Artificial
  Synthetic oligonucleotide
gagcagtgttacattcagcaagcacaggagccgtctttatcgtcttaaccaacaa

SEQ ID NO: 136249 - DNA, 55 bp, Artificial
  Synthetic oligonucleotide
cggtgtctgctcacgaagtcgtcgactgtggtcatgcctgttgtcaccagggctc

SEQ ID NO: 136250 - DNA, 55 bp, Artificial
  Synthetic oligonucleotide
cttgtaacacttgcagggtggtagaagcgtttataacggtacagtctatcatagt

SEQ ID NO: 136251 - DNA, 55 bp, Artificial
  Synthetic oligonucleotide
tttcgacggggacgtccagaatcgagtcctcgcttgcggtgtccaaaagcgcccg

SEQ ID NO: 136252 - DNA, 55 bp, Artificial
  Synthetic oligonucleotide
cggtgtctcatgcggtgatgggagtgaacgtatttatggttcgctcttgtggcgg

SEQ ID NO: 136253 - DNA, 55 bp, Artificial
  Synthetic oligonucleotide
gaggcgacgggtgcgtggtatacgtcgttcagcatagaccgagacgaaccagaga

SEQ ID NO: 136254 - DNA, 55 bp, Artificial
  Synthetic oligonucleotide
cggctgtcatgcctttcgttccgaaagttcgcatcttaactattgcgctcttacg

SEQ ID NO: 136255 - DNA, 55 bp, Artificial
  Synthetic oligonucleotide
ttcggaactgtccccgcgactcgtgttcagtagagggcgttactcagcgcacccc

SEQ ID NO: 136256 - DNA, 50 bp, Artificial
  Synthetic oligonucleotide
acccgtcccaatcccggctgtcgggggcgtcttacggacacccctcacgg

SEQ ID NO: 136257 - DNA, 55 bp, Artificial
  Synthetic oligonucleotide
cggctggaagtacactttcgtccatccctcgaaccagagatcttcgttgactctc

SEQ ID NO: 136258 - DNA, 55 bp, Artificial
  Synthetic oligonucleotide
cggctgcgtagagacgacgatgctagacgtactggagaccgtcgaactctcgacc

SEQ ID NO: 136259 - DNA, 55 bp, Artificial
  Synthetic oligonucleotide
cggctgagacagcgcacgacgtactccgcgaatatcgtgtcatggacgcgctaca

SEQ ID NO: 136260 - DNA, 55 bp, Artificial
  Synthetic oligonucleotide
cggctcgtatggatctggagcgaccgagtggacgtgatccgggacccctgtctct

SEQ ID NO: 136261 - DNA, 55 bp, Artificial
  Synthetic oligonucleotide
gaaatgctatacgagcgtcttggaacgctcgaaaccaatattgcgacgctccgag

SEQ ID NO: 136262 - DNA, 55 bp, Artificial
  Synthetic oligonucleotide
tttctccgcgaactaccgtccggatcgactgagcacgggcggagccacctctatc

SEQ ID NO: 136263 - DNA, 55 bp, Artificial
  Synthetic oligonucleotide
cggcgtgactgtctcaacgctctgttacctggagtttcgacccgtaatattcagt

SEQ ID NO: 136264 - DNA, 55 bp, Artificial
  Synthetic oligonucleotide
gaggcggtagcgacgtccgtgctacacagtcgccgagaacacggtgttgctatcg

SEQ ID NO: 136265 - DNA, 55 bp, Artificial
  Synthetic oligonucleotide
cggcggacgacaacggatatcacgtcgtcacccagtcctgtctttgctcgctcga

SEQ ID NO: 136266 - DNA, 55 bp, Artificial
  Synthetic oligonucleotide
cggcgatacgctctagtcgagaacctggttcgggcaattccgtgaacttggcatg

SEQ ID NO: 136267 - DNA, 57 bp, Artificial
  Synthetic oligonucleotide
tccccgctcgtaggtcgctattcaacagaggagcccggctaatttctagacccagga

SEQ ID NO: 136268 - DNA, 55 bp, Artificial
  Synthetic oligonucleotide
cggcgagagaggcgacagtgtgtccttcgatatccggaacgtatagcgtattctc

SEQ ID NO: 136269 - DNA, 55 bp, Artificial
  Synthetic oligonucleotide
cggcctacatatgtcttcgagtggtgacttactcgacgccctccacggaattgct

SEQ ID NO: 136270 - DNA, 55 bp, Artificial
  Synthetic oligonucleotide
gagggcacatttcaccgacggcttctccataatcgagcgatgaagccactcgtat

SEQ ID NO: 136271 - DNA, 55 bp, Artificial
  Synthetic oligonucleotide
gaacatatcttagctatgagttcagatttccagcccttactgggcgcggagttgg

SEQ ID NO: 136272 - DNA, 55 bp, Artificial
  Synthetic oligonucleotide
cgggcgcgagacggttacttacaaactggaggcctgaagtcatgccagatcaacc

SEQ ID NO: 136273 - DNA, 55 bp, Artificial
  Synthetic oligonucleotide
cgggcgactgtatccgaatctcgacacgttggtcgacagtggactcattacgaaa

SEQ ID NO: 136274 - DNA, 51 bp, Artificial
  Synthetic oligonucleotide
cgggattttcgggagttagataagaaaatacgaacgttacatacggagtac

SEQ ID NO: 136275 - DNA, 55 bp, Artificial
  Synthetic oligonucleotide
gagcgtcccgaagcagtagctctcacagagctcgcggactgcctgcggatccgat

SEQ ID NO: 136276 - DNA, 54 bp, Artificial
  Synthetic oligonucleotide
cgggatccgtttcgggaatcggtattttgtcgatgtatctggggctacttgtcg

SEQ ID NO: 136277 - DNA, 55 bp, Artificial
  Synthetic oligonucleotide
cgggagttgagcaatggcgacgaacactgatcaacctgggacaatgtacgatctc

SEQ ID NO: 136278 - DNA, 56 bp, Artificial
  Synthetic oligonucleotide
agtagcagcgatagtcgggtgagaaccccgacggcctaatggataagggttcctca

SEQ ID NO: 136279 - DNA, 57 bp, Artificial
  Synthetic oligonucleotide
acccgaatcaaatgggagtacgggaataaatctgacctctgtgtaagacatctctta

SEQ ID NO: 136280 - DNA, 55 bp, Artificial
  Synthetic oligonucleotide
gaaagtcgctcctcgatctattcttcgggatatctggtacgctctcggtaacgtc

SEQ ID NO: 136281 - DNA, 54 bp, Artificial
  Synthetic oligonucleotide
cgggagcccttcacgtttcccgtcggctgtctctctgattcagtaacccggtta

SEQ ID NO: 136282 - DNA, 55 bp, Artificial
  Synthetic oligonucleotide
cgggagcactgctatcgagggaatcccagcgaaaccgataatagacgtcatggcg

SEQ ID NO: 136283 - DNA, 55 bp, Artificial
  Synthetic oligonucleotide
cgggactgggacatgcgcgagtagtaggactcgagtcgaatcagcgtgtcggcct

SEQ ID NO: 136284 - DNA, 55 bp, Artificial
  Synthetic oligonucleotide
cgggactctcgagtcgggattcgattccgtcttgacaactgttgtgtcaccctac

SEQ ID NO: 136285 - DNA, 55 bp, Artificial
  Synthetic oligonucleotide
cgggaccgtgcaatgctcgccccacaagaccggaactatttgcgaggagtgtcgg

SEQ ID NO: 136286 - DNA, 53 bp, Artificial
  Synthetic oligonucleotide
cgggaagggacgttgcactgagttcgttcgaccggaccctagaaccgcgcgaa

SEQ ID NO: 136287 - DNA, 55 bp, Artificial
  Synthetic oligonucleotide
ttcggagtggactaaacgaaatccgactcaagccaggggacctgttgctcgtcca

SEQ ID NO: 136288 - DNA, 55 bp, Artificial
  Synthetic oligonucleotide
cggcttagtaatcgaccaagagcggtgtatcggctgtcacgcctgcgccgtgacg

SEQ ID NO: 136289 - DNA, 55 bp, Artificial
  Synthetic oligonucleotide
gaaatgcggcggttctcaccggaagaatagtacgaatactgagaagtgaggacgc

SEQ ID NO: 136290 - DNA, 60 bp, Artificial
  Synthetic oligonucleotide
gtcagttagggaacacctacacaacaccggatgggactagcgttacagcatcagatctcc

SEQ ID NO: 136291 - DNA, 55 bp, Artificial
  Synthetic oligonucleotide
aattggatcttctcaccgttgtctccgtgtaggtagaaacacgcagaccgacgtc

SEQ ID NO: 136292 - DNA, 55 bp, Artificial
  Synthetic oligonucleotide
agggacatttcagatgtgaccaccgatatcctgtatatcgtctctagattacggc

SEQ ID NO: 136293 - DNA, 55 bp, Artificial
  Synthetic oligonucleotide
aattccatgtgtcgatatttcgagtgcaatacggtacgttgatcgggaaatgtcg

SEQ ID NO: 136294 - DNA, 53 bp, Artificial
  Synthetic oligonucleotide
ggttggacacctacggcttctgtcggcaccgacgtaaacttaccgcctcgccc

SEQ ID NO: 136295 - DNA, 55 bp, Artificial
  Synthetic oligonucleotide
agggtacaccgggaccgtaatgtcgcactcgaggggcccagtcgtatcgtgacac

SEQ ID NO: 136296 - DNA, 55 bp, Artificial
  Synthetic oligonucleotide
ggtgtgtagtgagtgtggctgactgatatacgttgctagttcagagccgctgggt

SEQ ID NO: 136297 - DNA, 55 bp, Artificial
  Synthetic oligonucleotide
ggtgcgggtgcatattaccctgttggtttcggtcaccggactgaccgacacataa

SEQ ID NO: 136298 - DNA, 55 bp, Artificial
  Synthetic oligonucleotide
ggtgcgacgggccggaacttgggcaaataactcggacccagtcactagcgactcg

SEQ ID NO: 136299 - DNA, 55 bp, Artificial
  Synthetic oligonucleotide
ggtgatggctgtaaggggcgctacgttaggaaagaccgcctctgttccagagtgg

SEQ ID NO: 136300 - DNA, 55 bp, Artificial
  Synthetic oligonucleotide
ggtgatggaccgagtatcgggagagtcatcctcgcgtgctgttgcgttgtcgcgg

SEQ ID NO: 136301 - DNA, 53 bp, Artificial
  Synthetic oligonucleotide
agcacggactaataacggcagaacgactaagaacccgggaacacgatggggga

SEQ ID NO: 136302 - DNA, 55 bp, Artificial
  Synthetic oligonucleotide
ggtgaccggaattggatgaccgtctatatcgatgaattcggaatgctcgccccgg

SEQ ID NO: 136303 - DNA, 55 bp, Artificial
  Synthetic oligonucleotide
aggtctccggctgggactttacacgggtgacacaccgcacaaccctgacgaggca

SEQ ID NO: 136304 - DNA, 55 bp, Artificial
  Synthetic oligonucleotide
ggtctctcagggaatcaaatacagagcagcgcgaccgtagactcctatggatata

SEQ ID NO: 136305 - DNA, 55 bp, Artificial
  Synthetic oligonucleotide
aatgtgttcgacagctggcgtgtcagcgagcgtgttcgctacggtttcatcacta

SEQ ID NO: 136306 - DNA, 55 bp, Artificial
  Synthetic oligonucleotide
ggtctcgtgagcatccgctaagagccggagaatatcgtctgcagccccgatacgg

SEQ ID NO: 136307 - DNA, 55 bp, Artificial
  Synthetic oligonucleotide
ggtctcctatcaagtactgaactccttgtcgtacctccgtcgggtagtggtgcgg

SEQ ID NO: 136308 - DNA, 55 bp, Artificial
  Synthetic oligonucleotide
ggtccttctcatgctcatctggggatacgggaacccaatctggggtcgttcaatt

SEQ ID NO: 136309 - DNA, 55 bp, Artificial
  Synthetic oligonucleotide
ggtcgcgctcactacgattggaatttgggtcgcgcataacttagataaattgccg

SEQ ID NO: 136310 - DNA, 55 bp, Artificial
  Synthetic oligonucleotide
agtcatgatgtaacgtgattttctccgtatgcaacttgataccaccgtgtaaatc

SEQ ID NO: 136311 - DNA, 55 bp, Artificial
  Synthetic oligonucleotide
ggtcgctactgtgcagggtaggtaggagccgttacacaggtactcgcgctagcgg

SEQ ID NO: 136312 - DNA, 60 bp, Artificial
  Synthetic oligonucleotide
agatcgcagtatgatcggtcgaatgtccagcaaaaacgagtcgaggcgagacttgagtaa

SEQ ID NO: 136313 - DNA, 55 bp, Artificial
  Synthetic oligonucleotide
tatcggccactcgtgccgggaggatgcccacgatgggtaacgtgatcctccagac

SEQ ID NO: 136314 - DNA, 55 bp, Artificial
  Synthetic oligonucleotide
aatgcacgagaaccttagcagagacggccacgaggacctaacggcagctgcgagt

SEQ ID NO: 136315 - DNA, 55 bp, Artificial
  Synthetic oligonucleotide
tatcccggaactgaccacgcgtatcgaggagcacggacacgcacgacgccccgat

SEQ ID NO: 136316 - DNA, 55 bp, Artificial
  Synthetic oligonucleotide
tctgattgagtttctgtgtccagattagtgccccgagcatcttcccacgagccag

SEQ ID NO: 136317 - DNA, 53 bp, Artificial
  Synthetic oligonucleotide
ggtcgggagtcccttcgggccgctttgctagcctgtaaacgcggttagtgttc

SEQ ID NO: 136318 - DNA, 55 bp, Artificial
  Synthetic oligonucleotide
agtagacggatagttgtgataccgatagctgattcacgaagcggcgtactgactg

SEQ ID NO: 136319 - DNA, 55 bp, Artificial
  Synthetic oligonucleotide
ggtcggtaggtactcccgcgtagtccatatcggattgttcatcatactaactgcg

SEQ ID NO: 136320 - DNA, 55 bp, Artificial
  Synthetic oligonucleotide
agtactccgcctggcgcgtcctctgtgaaccccgcaccgagaagcgtcaggtgat

SEQ ID NO: 136321 - DNA, 55 bp, Artificial
  Synthetic oligonucleotide
agtacctcgccatcctcgaaccgcacgagagcgggtacgtacacatccacctcgg

SEQ ID NO: 136322 - DNA, 55 bp, Artificial
  Synthetic oligonucleotide
ggtcgtctctcgctgggagtagacattcgtatgtggggtacagtatcgaccctag

SEQ ID NO: 136323 - DNA, 52 bp, Artificial
  Synthetic oligonucleotide
gtcgcgaacggtttcagacggacccttgggcggttgaagtgacccccgcact

SEQ ID NO: 136324 - DNA, 55 bp, Artificial
  Synthetic oligonucleotide
agtacaacatgttgccatctgtcgaggagtgggacggatacgacgtgcaccaccc

SEQ ID NO: 136325 - DNA, 55 bp, Artificial
  Synthetic oligonucleotide
ggtctatgctgaacgacgtataccacgcacccgtcgcctcttgcttgacggtgac

SEQ ID NO: 136326 - DNA, 52 bp, Artificial
  Synthetic oligonucleotide
agccgtaggaaaacgatttcgttctctgttaatcggctcgaacggtcgggac

SEQ ID NO: 136327 - DNA, 55 bp, Artificial
  Synthetic oligonucleotide
gtatgcgccaattatcgatctagatacgcttgaaatgactgttcgcaaattcctg

SEQ ID NO: 136328 - DNA, 55 bp, Artificial
  Synthetic oligonucleotide
gtatatggcgggagagtacggtgttgaggcgctcgctatgccggcacacgtccgt

SEQ ID NO: 136329 - DNA, 55 bp, Artificial
  Synthetic oligonucleotide
gtagttccgaacgttcggcagagttgcctctgccgtggttacggttatcgcgcgg

SEQ ID NO: 136330 - DNA, 55 bp, Artificial
  Synthetic oligonucleotide
gtagcccacaactctcacaacactcatcttgcacagttgcaccctttggcagagg

SEQ ID NO: 136331 - DNA, 55 bp, Artificial
  Synthetic oligonucleotide
gtagcagttcttacgccactgtcgacgccaattctggcggttatgatcggtgcgg

SEQ ID NO: 136332 - DNA, 55 bp, Artificial
  Synthetic oligonucleotide
agcgcggaaatgcgtcgttacgctgggtgtgaggtcttgtagcggtcgattcgag

SEQ ID NO: 136333 - DNA, 55 bp, Artificial
  Synthetic oligonucleotide
agcgctctctcgagaaacactccccttcgaatgagccgtcgcacttcgataggcg

SEQ ID NO: 136334 - DNA, 60 bp, Artificial
  Synthetic oligonucleotide
gtcgcttggcgtgcggatcttgtgataccatggaatgactgccgtagggcgatatgaatc

SEQ ID NO: 136335 - DNA, 55 bp, Artificial
  Synthetic oligonucleotide
agcggaccagctgttcaaatcggcgcgactcgccataccgctagttagaacggcc

SEQ ID NO: 136336 - DNA, 54 bp, Artificial
  Synthetic oligonucleotide
gtagatcccgaagacggttcccatcgtgttgttcgacggtaggttcgaggtgcc

SEQ ID NO: 136337 - DNA, 55 bp, Artificial
  Synthetic oligonucleotide
agcgggaagtcgctcctccttgagacagtcgcggggttccactcacacgatgggt

SEQ ID NO: 136338 - DNA, 55 bp, Artificial
  Synthetic oligonucleotide
gtagagtgtggcgtaggcgtggaatgcggtggttcctcgcttcgcctcggagtga

SEQ ID NO: 136339 - DNA, 55 bp, Artificial
  Synthetic oligonucleotide
gtagagatgccagctggctatatcgtatagctataccgtctgactaatctttata

SEQ ID NO: 136340 - DNA, 55 bp, Artificial
  Synthetic oligonucleotide
gtagacgtgacgctcgagtaccggatagacgttacgactgctcgatcgagagcca

SEQ ID NO: 136341 - DNA, 55 bp, Artificial
  Synthetic oligonucleotide
gtacttcccctagtaacagttattacagttatacagctagactagaggctccgag

SEQ ID NO: 136342 - DNA, 55 bp, Artificial
  Synthetic oligonucleotide
gtacgtcacagacctaaacgagacggcaatactcgggccgtcgtcagtctcaaac

SEQ ID NO: 136343 - DNA, 55 bp, Artificial
  Synthetic oligonucleotide
tcgacaccgatacagcgtcgctagatccgccgggagaaactcctctctcggcaga

SEQ ID NO: 136344 - DNA, 55 bp, Artificial
  Synthetic oligonucleotide
ggttgtcagagacaggccgaactccaactcactatcgtcgctggtccactgtgcg

SEQ ID NO: 136345 - DNA, 56 bp, Artificial
  Synthetic oligonucleotide
gtcggggtctgtcgccggtcggattctgtgagggtggacacgtcgctctcggccgt

SEQ ID NO: 136346 - DNA, 55 bp, Artificial
  Synthetic oligonucleotide
gtaaagcagacggatcattggtattaaatccaagtcgggatcgcgcacacacgat

SEQ ID NO: 136347 - DNA, 54 bp, Artificial
  Synthetic oligonucleotide
gtaagtcggcgaaaatcctcctgtctcgggacagcggtaaacacgaattattac

SEQ ID NO: 136348 - DNA, 52 bp, Artificial
  Synthetic oligonucleotide
gtaatacgtttaacctcttggtcgctatccccgtcggtgtcctcttagcggg

SEQ ID NO: 136349 - DNA, 55 bp, Artificial
  Synthetic oligonucleotide
aggcacttcccggcctcgtaatggttggcgtattgtctggggccgtagtgtatcg

SEQ ID NO: 136350 - DNA, 55 bp, Artificial
  Synthetic oligonucleotide
aattttctgaggaggttcggtccgccgagatgcacagtcgtcccatccacggtag

SEQ ID NO: 136351 - DNA, 55 bp, Artificial
  Synthetic oligonucleotide
gtacaacacggatgaagaccacacggcacgcgacctacaacctcaactaccacct

SEQ ID NO: 136352 - DNA, 55 bp, Artificial
  Synthetic oligonucleotide
gtacaatgggtcgctcctgtggaggcattcgtctttagttaagagcgaaaccgcc

SEQ ID NO: 136353 - DNA, 55 bp, Artificial
  Synthetic oligonucleotide
gtaccatatagagaatcgttacggagacgactgacagaaccatcgtaagcgggat

SEQ ID NO: 136354 - DNA, 55 bp, Artificial
  Synthetic oligonucleotide
tcgacgaataaataccgacactcatctatacaccatccaatgacgcttgaagccg

SEQ ID NO: 136355 - DNA, 55 bp, Artificial
  Synthetic oligonucleotide
acaaccgatactgcgtgatcgctcgccgaaagtggcagctaccggccgtcagtcc

SEQ ID NO: 136356 - DNA, 60 bp, Artificial
  Synthetic oligonucleotide
gtctgtgaccgcgctgttgcttcggatctggaaatcgcaccgtctgcaaggtagctaacc

SEQ ID NO: 136357 - DNA, 55 bp, Artificial
  Synthetic oligonucleotide
agctgaagggagacttaaacgaacaaacgaagagcaggtacggtgggaagcagcg

SEQ ID NO: 136358 - DNA, 55 bp, Artificial
  Synthetic oligonucleotide
gtacggatccggatcaaccaccaggctccgtgcaccaatcttgtcgaacagtttg

SEQ ID NO: 136359 - DNA, 55 bp, Artificial
  Synthetic oligonucleotide
acaagaagtcgcacttgcccctggaccaatagtgactgcgccggaactagcagac

SEQ ID NO: 136360 - DNA, 55 bp, Artificial
  Synthetic oligonucleotide
acaagcctcagttcgaaagtcaaatagagcattccgagtcttgcagacactctcg

SEQ ID NO: 136361 - DNA, 55 bp, Artificial
  Synthetic oligonucleotide
gtacggcctaactcatgacgagcgtattcaaatcgccatcgacgtacgtacaggg

SEQ ID NO: 136362 - DNA, 55 bp, Artificial
  Synthetic oligonucleotide
gggtagcttcgattctgttctggtctcttggtgggctgaacgatggtgagcgtcg

SEQ ID NO: 136363 - DNA, 55 bp, Artificial
  Synthetic oligonucleotide
gggtagctgctccggtagcgccttcgcctgtattgaccgctcagagtgatcggtc

SEQ ID NO: 136364 - DNA, 55 bp, Artificial
  Synthetic oligonucleotide
tatgcacgagaaagtccgggtatacgcctgacagtgccgcgccctcgcgtgggta

SEQ ID NO: 136365 - DNA, 55 bp, Artificial
  Synthetic oligonucleotide
atcatagtgggtgattgcagagatcactcgactcccgctgaccaacgactgtgga

SEQ ID NO: 136366 - DNA, 55 bp, Artificial
  Synthetic oligonucleotide
tgactgtcacgcgagccacggccgagggaagcccaagccgggaaatcgtcgagta

SEQ ID NO: 136367 - DNA, 58 bp, Artificial
  Synthetic oligonucleotide
agaatccggtcgagctgtctcatcaaagtagggattatccacgttctcctgataaccc

SEQ ID NO: 136368 - DNA, 55 bp, Artificial
  Synthetic oligonucleotide
atcccctccttcgaaggggtcgggacggctgctatcgcgttcaactagcgcacac

SEQ ID NO: 136369 - DNA, 55 bp, Artificial
  Synthetic oligonucleotide
gggtacgcagtactcgatttcaactgaggtcatacctatactcttctcagggagg

SEQ ID NO: 136370 - DNA, 55 bp, Artificial
  Synthetic oligonucleotide
ggggtgagagcgacgttagttcatattgtggggtgcctctgacagggtcgctctc

SEQ ID NO: 136371 - DNA, 55 bp, Artificial
  Synthetic oligonucleotide
atcctcgggtgagtcccgctaatcccgtgattcggtgctttctaggaggtcgact

SEQ ID NO: 136372 - DNA, 55 bp, Artificial
  Synthetic oligonucleotide
atcgagacgactaacaccctctccatagaaatccgtgagagcggcgagtctcggg

SEQ ID NO: 136373 - DNA, 55 bp, Artificial
  Synthetic oligonucleotide
ggggctaggatcgttcctctcaggccgattggagacagaccccgagtcgaatttc

SEQ ID NO: 136374 - DNA, 55 bp, Artificial
  Synthetic oligonucleotide
ggggagttctagggtcgattctgaccgtcggttctgcctcgcttatatcccctcg

SEQ ID NO: 136375 - DNA, 55 bp, Artificial
  Synthetic oligonucleotide
gggctcgacacctcgctctgaatcccaaagactgtacgctggtagtagtccctcg

SEQ ID NO: 136376 - DNA, 55 bp, Artificial
  Synthetic oligonucleotide
gggctcacacttcgggtgaagatacccgctcttcggctgaagagacacagacaac

SEQ ID NO: 136377 - DNA, 55 bp, Artificial
  Synthetic oligonucleotide
gggcgtgcgaggatgtcaatcgacagtactaggctggtcagaaagaactggccag

SEQ ID NO: 136378 - DNA, 57 bp, Artificial
  Synthetic oligonucleotide
actggaacagggccatctcccgcttccggtcgtacatcgaagacaaggaagacgtga

SEQ ID NO: 136379 - DNA, 55 bp, Artificial
  Synthetic oligonucleotide
gggcgctcccgttgcgaccactaacagaagcataccgcgagtaactttcgagcgt

SEQ ID NO: 136380 - DNA, 55 bp, Artificial
  Synthetic oligonucleotide
atgtagatcacaaatagacccattgaccacgtgagtggcgacgcgatcataaccg

SEQ ID NO: 136381 - DNA, 55 bp, Artificial
  Synthetic oligonucleotide
gggacgccgtacatggtcaaggataggggtaacggccacttggcatggccagcag

SEQ ID NO: 136382 - DNA, 55 bp, Artificial
  Synthetic oligonucleotide
gggagatacatattgacgttcgtccgttctcggacggtcggcgtgctgtcgtaga

SEQ ID NO: 136383 - DNA, 55 bp, Artificial
  Synthetic oligonucleotide
atggcgcgtgagtgtcccgttgccgtggcttacacggacgtgaccggtactgaac

SEQ ID NO: 136384 - DNA, 55 bp, Artificial
  Synthetic oligonucleotide
gggatgaatccgacagtcaatgacacaacccaccgacgatagcacggcctgatat

SEQ ID NO: 136385 - DNA, 55 bp, Artificial
  Synthetic oligonucleotide
atgctgtttgagacggctgttgagtccggtgagattcctgaggaaaccgggcggt

SEQ ID NO: 136386 - DNA, 55 bp, Artificial
  Synthetic oligonucleotide
tattaccgctgagggcgaggtaagatgggtactcgaccacacgacacttgtctgg

SEQ ID NO: 136387 - DNA, 55 bp, Artificial
  Synthetic oligonucleotide
gggcacaaaacgcctgaatcccgctgaccggtctctctcggccttccgacctttc

SEQ ID NO: 136388 - DNA, 55 bp, Artificial
  Synthetic oligonucleotide
atgccggagagttgcttcgcaacacgaacgcacaagcgtgggacatctcgatgta

SEQ ID NO: 136389 - DNA, 60 bp, Artificial
  Synthetic oligonucleotide
caggcacttcctgatgtgacctgcaacccagtatataccatactgggaaatgggaaacac

SEQ ID NO: 136390 - DNA, 60 bp, Artificial
  Synthetic oligonucleotide
tacaagcctacgctgaccagttaatcaatgatgacagcatcgacatcctcgaatccatca

SEQ ID NO: 136391 - DNA, 55 bp, Artificial
  Synthetic oligonucleotide
gactgatgcccaaggtccttctatgacatgggctgatgcccgggatgattagaag

SEQ ID NO: 136392 - DNA, 55 bp, Artificial
  Synthetic oligonucleotide
gagggtatagtaacagggacatcaagcacatagttggacttgtgaaggccgtgac

SEQ ID NO: 136393 - DNA, 55 bp, Artificial
  Synthetic oligonucleotide
gcctcggataccgatgcaacaccaacggcaaccatgtccacatagtcaaggcccc

SEQ ID NO: 136394 - DNA, 55 bp, Artificial
  Synthetic oligonucleotide
gccgggcttccttgaggtcgggtggtatatcttgttgtagccactgtagctgtag

SEQ ID NO: 136395 - DNA, 55 bp, Artificial
  Synthetic oligonucleotide
gagaagtagctcacacagtatttacaggacacaaagtaacaacagattatgtacg

SEQ ID NO: 136396 - DNA, 55 bp, Artificial
  Synthetic oligonucleotide
taagggacagtgcatttcccaaatacttcgcctctacattataatccaccgaaat

SEQ ID NO: 136397 - DNA, 55 bp, Artificial
  Synthetic oligonucleotide
tacagaacgtaccaaggcagatgaactatttatacgaatggaagctctctccacc

SEQ ID NO: 136398 - DNA, 55 bp, Artificial
  Synthetic oligonucleotide
tacaggttcatgcccttgtccctgttacaagtagaaattcactctctgtctcccg

SEQ ID NO: 136399 - DNA, 55 bp, Artificial
  Synthetic oligonucleotide
tacagtacggtaaggctgcaaggagcagtaagggaagacacataggttcactggg

SEQ ID NO: 136400 - DNA, 55 bp, Artificial
  Synthetic oligonucleotide
tactgactatctgctgctatttaggatacacacaatgcctctacgaaacatcccc

SEQ ID NO: 136401 - DNA, 60 bp, Artificial
  Synthetic oligonucleotide
atgagagaggggagttatgtccgtgaaggtggccatgacattatcatcggcacagaggat

SEQ ID NO: 136402 - DNA, 55 bp, Artificial
  Synthetic oligonucleotide
taggaattggagtaagcttccaatctccaccgtctattcgtggagtatcagttcg

SEQ ID NO: 136403 - DNA, 55 bp, Artificial
  Synthetic oligonucleotide
taggccagaaatacaggggcagagacctctacgagtacttgttcatcaaggggag

SEQ ID NO: 136404 - DNA, 55 bp, Artificial
  Synthetic oligonucleotide
tatgactgataccccttcatcgatcatgtcatgaattgtagagatgagcttctca

SEQ ID NO: 136405 - DNA, 55 bp, Artificial
  Synthetic oligonucleotide
tatgatgtgttatctactagtttgatcattaatctgtcaaacatgtctgcactat

SEQ ID NO: 136406 - DNA, 55 bp, Artificial
  Synthetic oligonucleotide
tcaaggattatccttcctgtatggtgcttcttaacgtccagtgtaaccggtaggg

SEQ ID NO: 136407 - DNA, 55 bp, Artificial
  Synthetic oligonucleotide
tcatccgtacaagtccattctggtgaactacaaactaactttacattgcccaccc

SEQ ID NO: 136408 - DNA, 55 bp, Artificial
  Synthetic oligonucleotide
tccagtatggggaccctggcaccgaagccgtacctccctaccagtttctcctcga

SEQ ID NO: 136409 - DNA, 55 bp, Artificial
  Synthetic oligonucleotide
tccataagatcagccaccctgttcatggctcctgagaggggacccatccttgacg

SEQ ID NO: 136410 - DNA, 55 bp, Artificial
  Synthetic oligonucleotide
tcccacattcgtagttaatgttacctcaagcattgaaccctcaagagatgtgtag

SEQ ID NO: 136411 - DNA, 55 bp, Artificial
  Synthetic oligonucleotide
tctccctccactcgaaggtggggacctcatcaagccagggaactatcgggaagta

SEQ ID NO: 136412 - DNA, 51 bp, Artificial
  Synthetic oligonucleotide
gcagggggaatctggggggtttcctggtggagtacagtgaacgggttaagt

SEQ ID NO: 136413 - DNA, 55 bp, Artificial
  Synthetic oligonucleotide
tgagaggacgcgtgacatactggtcgaggctatcagccatcatggttatgccctc

SEQ ID NO: 136414 - DNA, 55 bp, Artificial
  Synthetic oligonucleotide
tgatataaacatcctcctcaggggagggttccatgatgataacaagacccctgag

SEQ ID NO: 136415 - DNA, 55 bp, Artificial
  Synthetic oligonucleotide
tgatgctccgaaactgagtagtactgtgtagagggcaactgacaggttgtccctg

SEQ ID NO: 136416 - DNA, 55 bp, Artificial
  Synthetic oligonucleotide
tggcggacacgccatgatagatcaaaatgccatggaatcaacagcacgtgatacc

SEQ ID NO: 136417 - DNA, 55 bp, Artificial
  Synthetic oligonucleotide
tgggactggatcaacttagatatatcacatatccacgataaacgttcccaaaggt

SEQ ID NO: 136418 - DNA, 55 bp, Artificial
  Synthetic oligonucleotide
tgttaaagtggaatccgcgtctaacgacttcggtgacacaggagcaagtccaggt

SEQ ID NO: 136419 - DNA, 55 bp, Artificial
  Synthetic oligonucleotide
tgttagatccctgtagacagcgaccacctctcctgaaggcaggcggtagacgaag

SEQ ID NO: 136420 - DNA, 55 bp, Artificial
  Synthetic oligonucleotide
ttgaagaccctagccttatcataaggacaagcggagaggaaaggcttagcggttt

SEQ ID NO: 136421 - DNA, 55 bp, Artificial
  Synthetic oligonucleotide
ttgggttgggtattgtaattcttggttcagtaattcccgcaatagctgctagtgc

SEQ ID NO: 136422 - DNA, 55 bp, Artificial
  Synthetic oligonucleotide
ggggacctcatctctttccattgatagaggatgctgaagttttgataaagggcat

SEQ ID NO: 136423 - DNA, 60 bp, Artificial
  Synthetic oligonucleotide
tatatgatatgatcataggaggtggattgtatggcgatggaggatgttggcgtgccattc

SEQ ID NO: 136424 - DNA, 55 bp, Artificial
  Synthetic oligonucleotide
ggggagtaaaccaatccacacagccacaggtaaaaccagcaacctctacgagatc

SEQ ID NO: 136425 - DNA, 55 bp, Artificial
  Synthetic oligonucleotide
ggggtacacaccttgcagaatggtaccctgcataagggttgtaaagccctggctt

SEQ ID NO: 136426 - DNA, 54 bp, Artificial
  Synthetic oligonucleotide
gggttaaggagcacctcggggaaagattagccctcgtggccccatcaaggaggc

SEQ ID NO: 136427 - DNA, 55 bp, Artificial
  Synthetic oligonucleotide
gggttccttcataggatttcacagggcgaagattaacatagaggtccagggctct

SEQ ID NO: 136428 - DNA, 55 bp, Artificial
  Synthetic oligonucleotide
ggtctaatgcagtttgggacggcagtcatggtatttcaccacaaggtgacgcatc

SEQ ID NO: 136429 - DNA, 55 bp, Artificial
  Synthetic oligonucleotide
ggtgattttcctatgttgaccttttccaccgtttctgtgcttatgtcaacccctg

SEQ ID NO: 136430 - DNA, 55 bp, Artificial
  Synthetic oligonucleotide
ggtggattgtatggcgatggaggatgttggcgtgccattcagtaacaggttaacc

SEQ ID NO: 136431 - DNA, 55 bp, Artificial
  Synthetic oligonucleotide
ggtgttgaactcgataagaacaacacgaagccagtgtataactcgacccttaggg

SEQ ID NO: 136432 - DNA, 55 bp, Artificial
  Synthetic oligonucleotide
ggttccacagaaaccacatttacgtatacatcctctggtggcatgtaaaatttga

SEQ ID NO: 136433 - DNA, 55 bp, Artificial
  Synthetic oligonucleotide
ggttctgtgaggttctccgctggcctatgggtaggtggcgccgtgtctccacttc

SEQ ID NO: 136434 - DNA, 60 bp, Artificial
  Synthetic oligonucleotide
gcacactggtcttggcaatccaccatttcgtgtggatatcttacggtgggacattgaaga

SEQ ID NO: 136435 - DNA, 55 bp, Artificial
  Synthetic oligonucleotide
gtacatccagtacgcactgtgtaagaacacttatgttatcaaggcttatgagggg

SEQ ID NO: 136436 - DNA, 55 bp, Artificial
  Synthetic oligonucleotide
gtactaggatgaatccttacgaacccgaagtgattaacatgggtgctggactcat

SEQ ID NO: 136437 - DNA, 55 bp, Artificial
  Synthetic oligonucleotide
gtactccgaataagcagcaggtatatggatgtagtgcacggctctgaaattatgc

SEQ ID NO: 136438 - DNA, 54 bp, Artificial
  Synthetic oligonucleotide
gtagtatgaatcctaggacagattgttccgggcccggtttgatttaatccccag

SEQ ID NO: 136439 - DNA, 55 bp, Artificial
  Synthetic oligonucleotide
gtctatcgcccctccattaattgcgctattattgcttagtgtggattcttatcta

SEQ ID NO: 136440 - DNA, 55 bp, Artificial
  Synthetic oligonucleotide
gtcttgtaatagcagaacgatccttcatcccggcaaaacctgtacgtttacgact

SEQ ID NO: 136441 - DNA, 55 bp, Artificial
  Synthetic oligonucleotide
gtgcgaggactggcttggaaaaccccttgggctgacctcagagataccacacgag

SEQ ID NO: 136442 - DNA, 55 bp, Artificial
  Synthetic oligonucleotide
gtggagtaaatagtgtatctgcagagttaggttcacaatttgaaacaggttctct

SEQ ID NO: 136443 - DNA, 55 bp, Artificial
  Synthetic oligonucleotide
gtggatatcttacggtgggacattgaagacagccgtcacagtatacaagggcggg

SEQ ID NO: 136444 - DNA, 55 bp, Artificial
  Synthetic oligonucleotide
gttccacagtgtgcccctccacaattgaggaattgaagtgcttcacgaggtgcct

SEQ ID NO: 136445 - DNA, 59 bp, Artificial
  Synthetic oligonucleotide
ataatcccttgtcatattagtatctgttgtacaatgtggacaaccaatttgtcctggtg

SEQ ID NO: 136446 - DNA, 55 bp, Artificial
  Synthetic oligonucleotide
gttccggaatatggctgaaagctgttcgtcttggagtataacgtttacagttgcc

SEQ ID NO: 136447 - DNA, 55 bp, Artificial
  Synthetic oligonucleotide
taaggacggagtacatccgctgcacagattacacaacagagtaccaggtcatagc

SEQ ID NO: 136448 - DNA, 55 bp, Artificial
  Synthetic oligonucleotide
cagccatccatagatcgcatgtcggaagtacagtccagtgaaattggagtgatgg

SEQ ID NO: 136449 - DNA, 55 bp, Artificial
  Synthetic oligonucleotide
ccggtttatcctcagtgccacgggccttacaatgtaggcgaatacggctccaagg

SEQ ID NO: 136450 - DNA, 55 bp, Artificial
  Synthetic oligonucleotide
cctaccacccaggtgccgtacccgaaatgaagggccaggtctacattgcagaggg

SEQ ID NO: 136451 - DNA, 55 bp, Artificial
  Synthetic oligonucleotide
cctatgcaacattagtactcctcggagctagcggaggagtagtgggagaaaacgg

SEQ ID NO: 136452 - DNA, 55 bp, Artificial
  Synthetic oligonucleotide
cagcacactattctttatgcaacgctataacgaaggaattgaaaccttacgtctt

SEQ ID NO: 136453 - DNA, 54 bp, Artificial
  Synthetic oligonucleotide
cacggctcggagcagtatcccttggaaaaccgggtaagagggctgagaaagtcg

SEQ ID NO: 136454 - DNA, 55 bp, Artificial
  Synthetic oligonucleotide
cctgaggggtctccatagtcgtagtcttgctgcaccgaccttcctgtagtaatta

SEQ ID NO: 136455 - DNA, 53 bp, Artificial
  Synthetic oligonucleotide
cacaataggactttcccttggttacggggttggtggtattgtaacagagtaca

SEQ ID NO: 136456 - DNA, 60 bp, Artificial
  Synthetic oligonucleotide
gcaacggtgacacctggattcacccttaccctaatggcagtatcttcattgactgtgtgg

SEQ ID NO: 136457 - DNA, 55 bp, Artificial
  Synthetic oligonucleotide
cctggattcacccttaccctaatggcagtatcttcattgactatgtgagcgacgg

SEQ ID NO: 136458 - DNA, 55 bp, Artificial
  Synthetic oligonucleotide
caagcgatgcaaccaaggtctctgtgaatggctccggcctatttgaaggacgaaa

SEQ ID NO: 136459 - DNA, 55 bp, Artificial
  Synthetic oligonucleotide
cctgtggtactgtcttaacgggacagataactccagtaacatcaccccgaggccc

SEQ ID NO: 136460 - DNA, 55 bp, Artificial
  Synthetic oligonucleotide
caactccgcagtgacgatcagggtcctcttatatgtgaccgtcaatgatcatggt

SEQ ID NO: 136461 - DNA, 55 bp, Artificial
  Synthetic oligonucleotide
ccttcttatctgcatttgagaggaaccttaacctcagccaggagtataccctgtc

SEQ ID NO: 136462 - DNA, 55 bp, Artificial
  Synthetic oligonucleotide
cgaaacaggtacctgggagattggtgatatcccagcatatgaggagaggtccctg

SEQ ID NO: 136463 - DNA, 55 bp, Artificial
  Synthetic oligonucleotide
cgaatgctcctgcaagggctgcattccacattccgcctaatattccttcgtgagc

SEQ ID NO: 136464 - DNA, 55 bp, Artificial
  Synthetic oligonucleotide
cgaccttggatcccatataaggatggtcgttataagcgtcactgaaggagacgac

SEQ ID NO: 136465 - DNA, 55 bp, Artificial
  Synthetic oligonucleotide
caaatgactgaaccaaatatgtcctgctgatttgaaagagaggactttcatcagt

SEQ ID NO: 136466 - DNA, 55 bp, Artificial
  Synthetic oligonucleotide
atcctggtgcgaatcatactcgattcgaacattccatcggagcaatgtacctatc

SEQ ID NO: 136467 - DNA, 60 bp, Artificial
  Synthetic oligonucleotide
agtgacactttacttcggtatatcattatattacgaagtcaaatcatggtactgtgccga

SEQ ID NO: 136468 - DNA, 55 bp, Artificial
  Synthetic oligonucleotide
cgaggcttagtattctctttaccacagttagggtcaagacatgcatgctgacgtg

SEQ ID NO: 136469 - DNA, 55 bp, Artificial
  Synthetic oligonucleotide
atagcggagcaactatttctgttggaaatccgtcttatgcacctcatcctagcgg

SEQ ID NO: 136470 - DNA, 55 bp, Artificial
  Synthetic oligonucleotide
ccaccactcaacgattcaatagcccgtagggtggagtggctgataaacaatgtta

SEQ ID NO: 136471 - DNA, 55 bp, Artificial
  Synthetic oligonucleotide
ccacgaagaagcgtttatggaagtcggaatagacaatgtaatcagtccggaagtt

SEQ ID NO: 136472 - DNA, 55 bp, Artificial
  Synthetic oligonucleotide
catggtactgtgccgatgttatggggttaattgtttatactgtgacacaccatag

SEQ ID NO: 136473 - DNA, 55 bp, Artificial
  Synthetic oligonucleotide
ccagttgagggttgtgctttctcctccaagtaggtctgtccagttgactgttagg

SEQ ID NO: 136474 - DNA, 55 bp, Artificial
  Synthetic oligonucleotide
catgagcgatatgataacctaccagtatgtgttggaataacaggtccatttacag

SEQ ID NO: 136475 - DNA, 55 bp, Artificial
  Synthetic oligonucleotide
ccatatgagttatagcccttgacccatacatagtccagtaggagtgtggccctgt

SEQ ID NO: 136476 - DNA, 55 bp, Artificial
  Synthetic oligonucleotide
ccatatggtttaataacaagggccgcaagtagcgatgttgtcagggaacgtgacg

SEQ ID NO: 136477 - DNA, 55 bp, Artificial
  Synthetic oligonucleotide
ccatgaggttctgctttactgtacattccggattttataatatggaacggaggca

SEQ ID NO: 136478 - DNA, 57 bp, Artificial
  Synthetic oligonucleotide
tcaccctgaaaaagaaactcaaggataagagtatcagtgccggggagaagatggaac

SEQ ID NO: 136479 - DNA, 55 bp, Artificial
  Synthetic oligonucleotide
catgaagcctgagaggtagtatatgttcttccttgcagttataagggccctttcg

SEQ ID NO: 136480 - DNA, 55 bp, Artificial
  Synthetic oligonucleotide
cccactcccatgtattcaaagcaagcctcagccccatcacggggcttgtggtgcc

SEQ ID NO: 136481 - DNA, 55 bp, Artificial
  Synthetic oligonucleotide
cccatattacccatcctttacttgtggacattttacgtccttcaagggagagata

SEQ ID NO: 136482 - DNA, 55 bp, Artificial
  Synthetic oligonucleotide
cccattggatatccgggcctgacagggagagcatagacgctgttatcgatgaact

SEQ ID NO: 136483 - DNA, 55 bp, Artificial
  Synthetic oligonucleotide
cataggagtggattgtatggcgatggaggatgttggcgtgccattcagtaacagg

SEQ ID NO: 136484 - DNA, 55 bp, Artificial
  Synthetic oligonucleotide
ccccaagccctcaagtactacacttctcatagtagctacagagtttgctcatccc

SEQ ID NO: 136485 - DNA, 55 bp, Artificial
  Synthetic oligonucleotide
caggttcagtagattgggaggaagtggcgttcttcttggatattggtggttcaaa

SEQ ID NO: 136486 - DNA, 55 bp, Artificial
  Synthetic oligonucleotide
ccctcgcagactatccagagtacccaggtcagtgatggacattatataggtgggt

SEQ ID NO: 136487 - DNA, 52 bp, Artificial
  Synthetic oligonucleotide
ccctttccagggacggggataagctcctctaccacctttccagggagccgaa

SEQ ID NO: 136488 - DNA, 55 bp, Artificial
  Synthetic oligonucleotide
caggccttagagatattcccagacttgcaacaccattactgtcagttgtcctgtg

SEQ ID NO: 136489 - DNA, 59 bp, Artificial
  Synthetic oligonucleotide
tcactatgactcccctgactggattgcctgttaggatgtccacaactccgagggccccg

SEQ ID NO: 136490 - DNA, 55 bp, Artificial
  Synthetic oligonucleotide
ccgcatctgtgttggcggatacactgcttatcccgagctccaccagtttctcaac

SEQ ID NO: 136491 - DNA, 55 bp, Artificial
  Synthetic oligonucleotide
caggacaggtgatctctctgactatgtttcagtgcgtgaggtggatgagggtgat

SEQ ID NO: 136492 - DNA, 55 bp, Artificial
  Synthetic oligonucleotide
ctcgtatccgttaacgtagagcccgaggcggtaccatccgctggcatccccgtag

SEQ ID NO: 136493 - DNA, 55 bp, Artificial
  Synthetic oligonucleotide
agcactatatacagcaagtacacaacgaatgagattgtcagggacatcaagaaga

SEQ ID NO: 136494 - DNA, 55 bp, Artificial
  Synthetic oligonucleotide
ctctcccgcataaggacaacctgcaaagtgcacatccatgcccttagccacaaca

SEQ ID NO: 136495 - DNA, 55 bp, Artificial
  Synthetic oligonucleotide
agaccgttatcatatttagtaccgccaacctacgcagtggatgcatgccgagcag

SEQ ID NO: 136496 - DNA, 55 bp, Artificial
  Synthetic oligonucleotide
acttaggaatgaaatgtactactgacgaccgtgaagcagtagctgacgctgactg

SEQ ID NO: 136497 - DNA, 55 bp, Artificial
  Synthetic oligonucleotide
actgcgttgcaggaattgcagtcaacaacgttggccacgcccatcctaaggtggc

SEQ ID NO: 136498 - DNA, 55 bp, Artificial
  Synthetic oligonucleotide
actcttcgtggtggttgtgaatgccacagttggcttcatacaggagtacagggcc

SEQ ID NO: 136499 - DNA, 55 bp, Artificial
  Synthetic oligonucleotide
ctgcaaggtagagtgcataggagggtgtgcatgttattattgtggtcccgaagtc

SEQ ID NO: 136500 - DNA, 59 bp, Artificial
  Synthetic oligonucleotide
cgtgccattcagtaacaggttaaccaggcaggggaacattaaggtgcctgctgacttga

SEQ ID NO: 136501 - DNA, 60 bp, Artificial
  Synthetic oligonucleotide
ggggacacattcacagaggatgatataaacatcctcctcaggggagggttccatgatgat

SEQ ID NO: 136502 - DNA, 55 bp, Artificial
  Synthetic oligonucleotide
ctgcacatccatgaggaacaccgatggggtgtacggaatagccagcttcaggatg

SEQ ID NO: 136503 - DNA, 55 bp, Artificial
  Synthetic oligonucleotide
actaatcaatcagcggtcttctttactggcaaatcactaagtaatactgtagctc

SEQ ID NO: 136504 - DNA, 55 bp, Artificial
  Synthetic oligonucleotide
acctacattatctgtgttcaggcaatatcaaaagacccgatcatccaccaataca

SEQ ID NO: 136505 - DNA, 55 bp, Artificial
  Synthetic oligonucleotide
accctgaacataggactcatacagggaggtcgtgcacccaacataattcccgacc

SEQ ID NO: 136506 - DNA, 55 bp, Artificial
  Synthetic oligonucleotide
ctgctgctacattgcagtttgcccctataattgaatctccgacgtatgaaaggtg

SEQ ID NO: 136507 - DNA, 55 bp, Artificial
  Synthetic oligonucleotide
acagcatcgacatcctcgaatccatcaccagagtcataggggaggcccattatgg

SEQ ID NO: 136508 - DNA, 55 bp, Artificial
  Synthetic oligonucleotide
ctgtgaccaatatgtccggtaggtattgaatcactataagcaggatctgcaaaca

SEQ ID NO: 136509 - DNA, 55 bp, Artificial
  Synthetic oligonucleotide
aataccactgttcagtctcacactactgttcagtcaacggttacaacgagtaaaa

SEQ ID NO: 136510 - DNA, 55 bp, Artificial
  Synthetic oligonucleotide
cttaaggcttatcttaggcagactggtgcctccattgattacgtcttgagtaacc

SEQ ID NO: 136511 - DNA, 55 bp, Artificial
  Synthetic oligonucleotide
aaggataagagtatcagtgccggggagaagatggaactcctcaaggaactgggag

SEQ ID NO: 136512 - DNA, 52 bp, Artificial
  Synthetic oligonucleotide
gggcgttacagggtcaattggaggcataagggtagcggtcccagggaaaaaa

SEQ ID NO: 136513 - DNA, 55 bp, Artificial
  Synthetic oligonucleotide
aacgtctttagggacgcctacattgttgaggcaacaccagatgacctccagagac

SEQ ID NO: 136514 - DNA, 55 bp, Artificial
  Synthetic oligonucleotide
cgcacatgtagaatacccagaattcctcttcagagttgatctgccagtagtggtt

SEQ ID NO: 136515 - DNA, 55 bp, Artificial
  Synthetic oligonucleotide
cgcaccaatcttccgttactcgctccagcggctgtgcggaaattctcgccctccg

SEQ ID NO: 136516 - DNA, 55 bp, Artificial
  Synthetic oligonucleotide
cgcggtaattgagtatatcgttgcggacggcactgcctaccaggtcgcaacgtcc

SEQ ID NO: 136517 - DNA, 55 bp, Artificial
  Synthetic oligonucleotide
cgctggtaggagcaagaactcctctttcgctgtcaagttctaatacggttacaga

SEQ ID NO: 136518 - DNA, 54 bp, Artificial
  Synthetic oligonucleotide
cggaaaggcaatattaaccggccgtgaaatggaacagtgcacaaacggtatcgg

SEQ ID NO: 136519 - DNA, 55 bp, Artificial
  Synthetic oligonucleotide
atactccacgaatagacggtggagattggaagcttactccaattcctaattggac

SEQ ID NO: 136520 - DNA, 55 bp, Artificial
  Synthetic oligonucleotide
cgggtctggaatcagactatgacaggtatgtagaaatgttcgaacacggcccact

SEQ ID NO: 136521 - DNA, 55 bp, Artificial
  Synthetic oligonucleotide
atacctccaacccaccatggtatggatgggaacagtagtactgccaccacaactc

SEQ ID NO: 136522 - DNA, 55 bp, Artificial
  Synthetic oligonucleotide
cgtttcaacaccgacggtatggctccattagtaaccagtagcgatcctgttaaaa

SEQ ID NO: 136523 - DNA, 50 bp, Artificial
  Synthetic oligonucleotide
ccctttttttacccgatttacaaggggcgttacagggtcgattggaggca

SEQ ID NO: 136524 - DNA, 55 bp, Artificial
  Synthetic oligonucleotide
agtaaccgcatagaatctgatgggcttaagagggcggtttaccagatcacaagga

SEQ ID NO: 136525 - DNA, 55 bp, Artificial
  Synthetic oligonucleotide
aggtcactggagagttattcacgtgccagcagagcatacctccgggcattatccc

SEQ ID NO: 136526 - DNA, 55 bp, Artificial
  Synthetic oligonucleotide
ctatgtttatgtcgtagggtgtttgcgtcttaggctctgcagttccaatgacgta

SEQ ID NO: 136527 - DNA, 53 bp, Artificial
  Synthetic oligonucleotide
ctcccggtacttgaagctgcaggccagggttacagggccgttataagggtaat

SEQ ID NO: 136528 - DNA, 55 bp, Artificial
  Synthetic oligonucleotide
agccgcattcgccacacttaagtaaaagctcgcgaatttccttagatttagcgtc

SEQ ID NO: 136529 - DNA, 55 bp, Artificial
  Synthetic oligonucleotide
ctcggttctacaaaacaggaaggtctgactgaaacaattctaacaccgcttgccc

SEQ ID NO: 136530 - DNA, 54 bp, Artificial
  Synthetic oligonucleotide
agttacacagcaagcaccagggagggcggtgatatcggggtaaccggggaggtg

SEQ ID NO: 136531 - DNA, 54 bp, Artificial
  Synthetic oligonucleotide
tgataccatgaacccttactcaaatcaacactggagaaactctgaagtgggacc

SEQ ID NO: 136532 - DNA, 54 bp, Artificial
  Synthetic oligonucleotide
tcatccattggtactatggaataacccattctatttattccacgtttatcgcca

SEQ ID NO: 136533 - DNA, 54 bp, Artificial
  Synthetic oligonucleotide
accaacatgacgctctggggaataaccctcgtcggagcactgggcaacctcctc

SEQ ID NO: 136534 - DNA, 59 bp, Artificial
  Synthetic oligonucleotide
cccggggatctactattggtccgcctgcagacatggaatacgctgtggaaccgcttgga

SEQ ID NO: 136535 - DNA, 54 bp, Artificial
  Synthetic oligonucleotide
acaatatccgtcatggcactgattctatggttaaccggggcactccagacaccc

SEQ ID NO: 136536 - DNA, 54 bp, Artificial
  Synthetic oligonucleotide
atggaactcctcaaggaactgggaggggtgctctcaactctaatgaggaaacca

SEQ ID NO: 136537 - DNA, 54 bp, Artificial
  Synthetic oligonucleotide
catggatgatatacatagcaagtgttggaggaatggttttaacattcctagcag

SEQ ID NO: 136538 - DNA, 54 bp, Artificial
  Synthetic oligonucleotide
aacccataaatctacattcgaatccctaatagacatgaagaaggaccatgaagc

SEQ ID NO: 136539 - DNA, 54 bp, Artificial
  Synthetic oligonucleotide
ctgagggatgcattggagttatggatgtccatagacaccctccaaaggtataag

SEQ ID NO: 136540 - DNA, 54 bp, Artificial
  Synthetic oligonucleotide
gcataatgaacattgacgcctgcgcaaagtacatgctgagggacgtggcaacag

SEQ ID NO: 136541 - DNA, 54 bp, Artificial
  Synthetic oligonucleotide
ccagtgctccgacgagggttattccccagagcgtcatgttggtgttaccctgcc

SEQ ID NO: 136542 - DNA, 54 bp, Artificial
  Synthetic oligonucleotide
cttggagaacgaagtcaaaagacttcagaacagggggattattgagatattgtt

SEQ ID NO: 136543 - DNA, 54 bp, Artificial
  Synthetic oligonucleotide
ggctgagaccaggaaccgttacaagctgcgatacagtagtcacatcctgatctc

SEQ ID NO: 136544 - DNA, 54 bp, Artificial
  Synthetic oligonucleotide
gccaagggtgtgtccttcagggttgggggtatgcaggctcgaagcgagtcccat

SEQ ID NO: 136545 - DNA, 59 bp, Artificial
  Synthetic oligonucleotide
ggtaatccaccagttcgtgtggatatcttacggtgggacattgaagacagccgtcacag

SEQ ID NO: 136546 - DNA, 54 bp, Artificial
  Synthetic oligonucleotide
gagtcataggggaggcccattatggtgatgagaaggccgtgaaattactcctat

SEQ ID NO: 136547 - DNA, 54 bp, Artificial
  Synthetic oligonucleotide
gctctaaatggtggtgctattagtataaacagtggaactaacgcatcaatattc

SEQ ID NO: 136548 - DNA, 54 bp, Artificial
  Synthetic oligonucleotide
cttcagggttgggggtatgcaggctcgaagcgagtcccatgaagagctcaggca

SEQ ID NO: 136549 - DNA, 53 bp, Artificial
  Synthetic oligonucleotide
ctgagcggtgcagagatcgagctcagtaaggaagtgggataccatgccatact

SEQ ID NO: 136550 - DNA, 53 bp, Artificial
  Synthetic oligonucleotide
cgaggaggttgcccagtgctccgacgagggttattccccagagcgtcatgttg

SEQ ID NO: 136551 - DNA, 53 bp, Artificial
  Synthetic oligonucleotide
atagtgccagatacatgaatatatgactgtccgctgtttgagtaattaccgcc

SEQ ID NO: 136552 - DNA, 53 bp, Artificial
  Synthetic oligonucleotide
atacgtggcgtcaagaccatttcgggtcaatgcagggccggtgcatgcttacg

SEQ ID NO: 136553 - DNA, 53 bp, Artificial
  Synthetic oligonucleotide
agggattacctgtctacagatgtccctgatatcacaaactggatcactgaatt

SEQ ID NO: 136554 - DNA, 53 bp, Artificial
  Synthetic oligonucleotide
tatggtgccttccggggcagatccacacacttacgaacccctacccaaccagc

SEQ ID NO: 136555 - DNA, 53 bp, Artificial
  Synthetic oligonucleotide
agtatcaaggggcatgtcatctgcaagacccctcatgagtgtcattgaaagat

SEQ ID NO: 136556 - DNA, 59 bp, Artificial
  Synthetic oligonucleotide
cccatgagttatgaatcaatgcgacccacggtaagggaggaaatagacatacagacaat

SEQ ID NO: 136557 - DNA, 53 bp, Artificial
  Synthetic oligonucleotide
ctacatttccatataacactgcaattccaccttctgttcttataggatcatct

SEQ ID NO: 136558 - DNA, 53 bp, Artificial
  Synthetic oligonucleotide
ccaataagttccggaggttctacagctactgcatcgggactgaaagtagctat

SEQ ID NO: 136559 - DNA, 53 bp, Artificial
  Synthetic oligonucleotide
gtatcagggttgccaagggtgtgtccttcagggttgggggtatgcaggctcga

SEQ ID NO: 136560 - DNA, 53 bp, Artificial
  Synthetic oligonucleotide
aaccgtgcacatggtcgggccgtgccacaggttagacccagaggcagactttg

SEQ ID NO: 136561 - DNA, 53 bp, Artificial
  Synthetic oligonucleotide
gaacctgaacgtgttgcattcatccactgtgttggttctagggatgaacaaat

SEQ ID NO: 136562 - DNA, 53 bp, Artificial
  Synthetic oligonucleotide
ggtactgcctgggtcctccccgttgaaatgggcgaggtagtacacgaaccatt

SEQ ID NO: 136563 - DNA, 53 bp, Artificial
  Synthetic oligonucleotide
aagagcggagagggtgttacaagcgccaccgtaaggctcactgtcaaggacga

SEQ ID NO: 136564 - DNA, 53 bp, Artificial
  Synthetic oligonucleotide
ggtaagatggaaatcgcatacctcgtcctgagggatattgcagctacctggcg

SEQ ID NO: 136565 - DNA, 53 bp, Artificial
  Synthetic oligonucleotide
gttctcaactcgggcgaacaagtattcagggtacttaaggatgtatcttcaac

SEQ ID NO: 136566 - DNA, 53 bp, Artificial
  Synthetic oligonucleotide
tggccttctgggtaattgccgtcaggctgtcttgggtcggtttccttaggctc

SEQ ID NO: 136567 - DNA, 57 bp, Artificial
  Synthetic oligonucleotide
ggaacaatggtcctgagaccgcccagaatgccagggtcaacctccagctaccgggta

SEQ ID NO: 136568 - DNA, 53 bp, Artificial
  Synthetic oligonucleotide
acctgaaaacagcggtaccagtgcaaggattgcagggttgtcaagtataaacg

SEQ ID NO: 136569 - DNA, 53 bp, Artificial
  Synthetic oligonucleotide
gaggccataaggaggtccctctgagactacttgggggcaactttctctgggtt

SEQ ID NO: 136570 - DNA, 52 bp, Artificial
  Synthetic oligonucleotide
tccttagggtcatgagggagcgtcctgcgcaatgcctgaacctgcttgctag

SEQ ID NO: 136571 - DNA, 52 bp, Artificial
  Synthetic oligonucleotide
aagcatacacacttccgatgcaattattgtggtagaaggtcgtagcgatgta

SEQ ID NO: 136572 - DNA, 52 bp, Artificial
  Synthetic oligonucleotide
tgaagatacaaatcgtacacacacagcaacaccatggggattatcctactat

SEQ ID NO: 136573 - DNA, 52 bp, Artificial
  Synthetic oligonucleotide
ctcctactcactctcagaacagggagcctacgagtacataaggaggacaatg

SEQ ID NO: 136574 - DNA, 52 bp, Artificial
  Synthetic oligonucleotide
acagacactacacagtagatgcaaggcgggagttcgcagaggactacatatt

SEQ ID NO: 136575 - DNA, 52 bp, Artificial
  Synthetic oligonucleotide
agcttcccggatcgaagccctgactctatcatcctcctctgatctgcaaggt

SEQ ID NO: 136576 - DNA, 52 bp, Artificial
  Synthetic oligonucleotide
acttccattcttaacgaatacagcccctcctgaatgggagacaaccttgcct

SEQ ID NO: 136577 - DNA, 52 bp, Artificial
  Synthetic oligonucleotide
ctatgagatacttgacagccttacagacaccataagaccagaggatgacccc

SEQ ID NO: 136578 - DNA, 54 bp, Artificial
  Synthetic oligonucleotide
gctttacgccgcaggttatcagtaagtcggtgggggtcgtggtaatttgaaatg

SEQ ID NO: 136579 - DNA, 52 bp, Artificial
  Synthetic oligonucleotide
ttgcactgggaccatggggtgcgtgttcatcgctgaaagactgccctcttgg

SEQ ID NO: 136580 - DNA, 52 bp, Artificial
  Synthetic oligonucleotide
catccattcaagacgaagtttgcaatgtgacctgtgtggtctgctattcttt

SEQ ID NO: 136581 - DNA, 52 bp, Artificial
  Synthetic oligonucleotide
gggtctttaccagtaggatcagtaataaccattacgttacaagtagcagcta

SEQ ID NO: 136582 - DNA, 52 bp, Artificial
  Synthetic oligonucleotide
cgactgagaagaatgtgtcctgcgccctctgacctgttatgagtgggacgtc

SEQ ID NO: 136583 - DNA, 52 bp, Artificial
  Synthetic oligonucleotide
tactagcggatcacttaataggccattgaatcgcctgctcgactttgactta

SEQ ID NO: 136584 - DNA, 52 bp, Artificial
  Synthetic oligonucleotide
tacccgagtggagcaatgcatgtaggacacggaagaacatacacggtacctg

SEQ ID NO: 136585 - DNA, 51 bp, Artificial
  Synthetic oligonucleotide
cacgaaccagctttccttgtggctgtgtgtattggaaatggagacctctaa

SEQ ID NO: 136586 - DNA, 51 bp, Artificial
  Synthetic oligonucleotide
gggaatacttggagtagaactacttggaataacactaactgtcataccacg

SEQ ID NO: 136587 - DNA, 51 bp, Artificial
  Synthetic oligonucleotide
ctgctaaaggaccgattactccccagttacctaatgctaaatctgcgttac

SEQ ID NO: 136588 - DNA, 51 bp, Artificial
  Synthetic oligonucleotide
accccacacccgagacacacctcatcagtgaccctgccgaggcgatggaga

SEQ ID NO: 136589 - DNA, 60 bp, Artificial
  Synthetic oligonucleotide
ccatcctaagcgataggtctgacgaggtcactgatattaagatacccctcatagtctttg

SEQ ID NO: 136590 - DNA, 51 bp, Artificial
  Synthetic oligonucleotide
gacctcttcactgcattgtaattccttccaaacttcatatcgttgaagcag

SEQ ID NO: 136591 - DNA, 51 bp, Artificial
  Synthetic oligonucleotide
gaccgggccccggataccatctatgagttcaatggcaccggcagggtcccc

SEQ ID NO: 136592 - DNA, 51 bp, Artificial
  Synthetic oligonucleotide
tgggcacagtattcattcatcaggtgcactgttcctgaagataggatgtac

SEQ ID NO: 136593 - DNA, 51 bp, Artificial
  Synthetic oligonucleotide
tggggcttccatgaacttgaagcgggaagggtcatagagagggccaggccc

SEQ ID NO: 136594 - DNA, 51 bp, Artificial
  Synthetic oligonucleotide
gacatggagctttatgctatagtgtctccggaaactgttatatgtcttcat

SEQ ID NO: 136595 - DNA, 51 bp, Artificial
  Synthetic oligonucleotide
aatgagacggggggatgactctggcaaggcggagccctgcttttgagaagg

SEQ ID NO: 136596 - DNA, 51 bp, Artificial
  Synthetic oligonucleotide
gttaaagaagatattcgtggacaaattataggagcattagcaggagccgat

SEQ ID NO: 136597 - DNA, 51 bp, Artificial
  Synthetic oligonucleotide
ttctccttgtattgctacgtttcttcctaggttgtcctctgataagtcgcc

SEQ ID NO: 136598 - DNA, 51 bp, Artificial
  Synthetic oligonucleotide
ccatgttcttccacgtataagtcttacataccaacgacttaagtcttctag

SEQ ID NO: 136599 - DNA, 51 bp, Artificial
  Synthetic oligonucleotide
aacaggataggactggatattaaaccggattcctccaaacttgatgactgg

SEQ ID NO: 136600 - DNA, 60 bp, Artificial
  Synthetic oligonucleotide
gctcgcttgggtcaccgcaccaatcttccgttactcgctccagcggctgtgcggaaattc

SEQ ID NO: 136601 - DNA, 51 bp, Artificial
  Synthetic oligonucleotide
aaatattacaggacaaggcaatgtaatctttgatggaagaggtcttggacg

SEQ ID NO: 136602 - DNA, 51 bp, Artificial
  Synthetic oligonucleotide
gcccagtgccatagttttgaaccacctggccagagacagactttaactccc

SEQ ID NO: 136603 - DNA, 51 bp, Artificial
  Synthetic oligonucleotide
tatcatctgcgtttgatatgttcagggaagtctccgcgtcatttgagatgt

SEQ ID NO: 136604 - DNA, 51 bp, Artificial
  Synthetic oligonucleotide
cggatctgataatatcctcatgtccaataactctctcaagcggatctttag

SEQ ID NO: 136605 - DNA, 51 bp, Artificial
  Synthetic oligonucleotide
tcccctatgaacccgttggtgaccatcccgaggatgaatgcccacacacca

SEQ ID NO: 136606 - DNA, 51 bp, Artificial
  Synthetic oligonucleotide
agcatattccatgtctgcaggaggtccgattgttgatccgaatgtaggagg

SEQ ID NO: 136607 - DNA, 51 bp, Artificial
  Synthetic oligonucleotide
gcaacaccgcacagactgattgtggtggagccatctgcaacggggatggta

SEQ ID NO: 136608 - DNA, 51 bp, Artificial
  Synthetic oligonucleotide
acgatgaagacaggcgttattatgtactaggagatcgttacgggcagagat

SEQ ID NO: 136609 - DNA, 51 bp, Artificial
  Synthetic oligonucleotide
ggcagtaagtttaatgcaactgttcttgacggtcagggaaaacccttagct

SEQ ID NO: 136610 - DNA, 51 bp, Artificial
  Synthetic oligonucleotide
taacctgcaggtccagaatgtgcaggtggacaggggcacctacagtaacgg

SEQ ID NO: 136611 - DNA, 60 bp, Artificial
  Synthetic oligonucleotide
cagaattatccttacatagacctgaagttgttagatggcaacaacgtatgcaactactca

SEQ ID NO: 136612 - DNA, 55 bp, Artificial
  Synthetic oligonucleotide
ccagtgttgacatggacttgggaacagcggaaaatgctcggatttggaaaaaaac

SEQ ID NO: 136613 - DNA, 51 bp, Artificial
  Synthetic oligonucleotide
ctgaggacaatataagattcggtgtagaatattctccggactccagacctc

SEQ ID NO: 136614 - DNA, 50 bp, Artificial
  Synthetic oligonucleotide
agtagaaattcactctctctgtcccaccgtgggcccatgtgcttatatag

SEQ ID NO: 136615 - DNA, 50 bp, Artificial
  Synthetic oligonucleotide
gtgcttactttgcaaccagcggtggatcaagtgacaatgtagtaagaatc

SEQ ID NO: 136616 - DNA, 50 bp, Artificial
  Synthetic oligonucleotide
tatgagttacaggtagcccaagtgatgttggcgctccaatagctgatgtt

SEQ ID NO: 136617 - DNA, 50 bp, Artificial
  Synthetic oligonucleotide
ccatacaatcaacataagtacatacaaaacctttacgcataaacacagcc

SEQ ID NO: 136618 - DNA, 50 bp, Artificial
  Synthetic oligonucleotide
ttctacataaaggagtcatcgttccccaggacggctgccatgccattcta

SEQ ID NO: 136619 - DNA, 50 bp, Artificial
  Synthetic oligonucleotide
ggaactgccataatcggatgtattctcataattggagcgtttagcggatt

SEQ ID NO: 136620 - DNA, 50 bp, Artificial
  Synthetic oligonucleotide
gggaggtcttgctgcaatatccaaccaggctaaattagatgttaccctac

SEQ ID NO: 136621 - DNA, 50 bp, Artificial
  Synthetic oligonucleotide
gaatggttaaaaccctcagaaatacctgacgtggttggtttcataggggg

SEQ ID NO: 136622 - DNA, 50 bp, Artificial
  Synthetic oligonucleotide
atgttcgcagtagtaagggtaaggggatcagcgggtgtccgaagggacat

SEQ ID NO: 136623 - DNA, 56 bp, Artificial
  Synthetic oligonucleotide
ccaccccacctgttgattgtagggcccccaggatctgggaagactgtcacgacgaa

SEQ ID NO: 136624 - DNA, 50 bp, Artificial
  Synthetic oligonucleotide
ctgacaaggttgaagatgcagttcgtgatcagggagacatcggacttgca

SEQ ID NO: 136625 - DNA, 50 bp, Artificial
  Synthetic oligonucleotide
tggtacgcaacactggtgaaacctttatgggcacctccgaactgggtttt

SEQ ID NO: 136626 - DNA, 50 bp, Artificial
  Synthetic oligonucleotide
tgaactgggaataatggagtccacaggtgaggaacctccacatgtacgcc

SEQ ID NO: 136627 - DNA, 50 bp, Artificial
  Synthetic oligonucleotide
atctaacatttcacatatgattgtatcggccttttctggaaattcatacc

SEQ ID NO: 136628 - DNA, 50 bp, Artificial
  Synthetic oligonucleotide
ccgctacgcttttcatatccaattcgcggcatgctctcataatacgtatg

SEQ ID NO: 136629 - DNA, 60 bp, Artificial
  Synthetic oligonucleotide
gtgccttgttaacaggacaggtgatctctctgactatgtttcagtgcgtgaggtggatga

SEQ ID NO: 136630 - DNA, 56 bp, Artificial
  Synthetic oligonucleotide
cgggcgtatcttcccatattttgcttgatttcatgactccaacgggctgccccttt

SEQ ID NO: 136631 - DNA, 55 bp, Artificial
  Synthetic oligonucleotide
gtgttgcgattaagtaccaggatgtaagggattacctcgacctgaaaacgggtca

SEQ ID NO: 136632 - DNA, 58 bp, Artificial
  Synthetic oligonucleotide
catagtctttgcgagctttatagcaatattaacctttgttaaggcgggctcgaccatc

SEQ ID NO: 136633 - DNA, 60 bp, Artificial
  Synthetic oligonucleotide
gttaacaggacgggtgagctctcagactatgtttcagtgcgtgaggtcgatgagggcgat

SEQ ID NO: 136634 - DNA, 60 bp, Artificial
  Synthetic oligonucleotide
caggggacgagtaaaagtgtagtgtgatgatagtggattccatctacctggggtgtcatc

SEQ ID NO: 136635 - DNA, 53 bp, Artificial
  Synthetic oligonucleotide
gttcattagggtcaaatcctattagttcttccaggttgaactctaaaaccctg

SEQ ID NO: 136636 - DNA, 60 bp, Artificial
  Synthetic oligonucleotide
tgagtacactgatgcaatggcacggggtgatgactcgatgataggtgaacttgaggcgag

SEQ ID NO: 136637 - DNA, 53 bp, Artificial
  Synthetic oligonucleotide
gttgctatcgcaggggacggggaagtcaactaccttttcatgttactcccctt

SEQ ID NO: 136638 - DNA, 58 bp, Artificial
  Synthetic oligonucleotide
ctgcagaaaatgtaggggtacacaccttgcagaatggtaccctgcataagggttgtaa

SEQ ID NO: 136639 - DNA, 60 bp, Artificial
  Synthetic oligonucleotide
acgagtgatggaggttcgcagagttgttgttctgcaaaacactcttatgacttgcggtta

SEQ ID NO: 136640 - DNA, 55 bp, Artificial
  Synthetic oligonucleotide
acgagtacttgttcatcaaggggagtaaaccaatccacacagccacaggtaaaac

SEQ ID NO: 136641 - DNA, 59 bp, Artificial
  Synthetic oligonucleotide
acgaagtcaaatcatggtactgtgccgatgttatggggttaattgtttatactgtgaca

SEQ ID NO: 136642 - DNA, 57 bp, Artificial
  Synthetic oligonucleotide
tgccattggagtacccacctccgcgggacttccagttacccacagaggagttgcaac

SEQ ID NO: 136643 - DNA, 60 bp, Artificial
  Synthetic oligonucleotide
tgccgtgtcaggaacaatggtcctgagaccgcccagaatgccagggtcaacctccagcta

SEQ ID NO: 136644 - DNA, 60 bp, Artificial
  Synthetic oligonucleotide
tgcctgcattgctgcccttagacccgtaagtcctcccccaaccaccaacagatcatgttg

SEQ ID NO: 136645 - DNA, 58 bp, Artificial
  Synthetic oligonucleotide
acacgctgattttgaattagtaggccagaaatacaggggcagagacctctacgagtac

SEQ ID NO: 136646 - DNA, 60 bp, Artificial
  Synthetic oligonucleotide
tggtaggtttgtgtctgttgggtgtgtcatgagggatgcccttaaacactacctgcagga

SEQ ID NO: 136647 - DNA, 58 bp, Artificial
  Synthetic oligonucleotide
tgtatgggttcgtatagtgagaggatccggtcacttgagtggaggtaccgtaacagta

SEQ ID NO: 136648 - DNA, 58 bp, Artificial
  Synthetic oligonucleotide
gttggaagtgtgggagtctcacagcatcctccaaccgcaagaaaaggagcaaccgtcg

SEQ ID NO: 136649 - DNA, 60 bp, Artificial
  Synthetic oligonucleotide
ctgggctgactgtgactgtttcgccgtatgccgcttcctctgcgcttatgctgattgcga

SEQ ID NO: 136650 - DNA, 57 bp, Artificial
  Synthetic oligonucleotide
ttataattcaatgtccttgttgggtggaatgtggaagtcaacaaaaccctcaagatc

SEQ ID NO: 136651 - DNA, 60 bp, Artificial
  Synthetic oligonucleotide
ttatgtccgtgaaggtggccatgacattatcatcggcactgaggatgacctgagggatgc

SEQ ID NO: 136652 - DNA, 60 bp, Artificial
  Synthetic oligonucleotide
ttgaggaccatgtctacatgcacctgaatgatgacgatgccctatctgctgtagtagaaa

SEQ ID NO: 136653 - DNA, 57 bp, Artificial
  Synthetic oligonucleotide
ttgagtggggtggaaataccgcacaccaaaaccccaccaacacagtcaccctgcaga

SEQ ID NO: 136654 - DNA, 55 bp, Artificial
  Synthetic oligonucleotide
aaagtcgcgcctatctgtattccaaaacgtaagtatggtgctaacgaagactttc

SEQ ID NO: 136655 - DNA, 59 bp, Artificial
  Synthetic oligonucleotide
agggctgtctatgagcgattgatagagggtgatgtcagggtttacaacccctacctcca

SEQ ID NO: 136656 - DNA, 57 bp, Artificial
  Synthetic oligonucleotide
gagtatgcgaaggaattgggtgaggttcggcgggagatagaggatatgcaggggggg

SEQ ID NO: 136657 - DNA, 55 bp, Artificial
  Synthetic oligonucleotide
agacatcgagggcttaaaggataaggggaataagggtcttgtcattatcaaacca

SEQ ID NO: 136658 - DNA, 60 bp, Artificial
  Synthetic oligonucleotide
tgaccagttaatcaatgatgacagcatcgacatcctcgaatccatcaccagagtcatagg

SEQ ID NO: 136659 - DNA, 53 bp, Artificial
  Synthetic oligonucleotide
caagtggctgactttttcgcgggactcagtgttttttctaaggagaagtttgg

SEQ ID NO: 136660 - DNA, 60 bp, Artificial
  Synthetic oligonucleotide
actgtgccgatgttctggggttaattgtttatactgtgacacaccatagttatatgatat

SEQ ID NO: 136661 - DNA, 59 bp, Artificial
  Synthetic oligonucleotide
ggatgacggagtccacctttcaggctcccgtgcattgggaattgtagctcaaggcgata

SEQ ID NO: 136662 - DNA, 54 bp, Artificial
  Synthetic oligonucleotide
ttaagtaccaggatgtaagggattacctcgacctgaaaacaggtcatagggtta

SEQ ID NO: 136663 - DNA, 58 bp, Artificial
  Synthetic oligonucleotide
tcccctgactggattgcctgttaggatgtccacaactccgagggccccgtacactatc

SEQ ID NO: 136664 - DNA, 59 bp, Artificial
  Synthetic oligonucleotide
tcccgggcctgcacgcattatgtccacaattacacatggtaattcagctccggctagga

SEQ ID NO: 136665 - DNA, 58 bp, Artificial
  Synthetic oligonucleotide
cattaaacacgctgattttgaattagtaggccagaaatacaggggcagagacctctac

SEQ ID NO: 136666 - DNA, 59 bp, Artificial
  Synthetic oligonucleotide
tgcgctcttcaagcagtacacctacaacaccaattacaggccaaggacagtatcctacg

SEQ ID NO: 136667 - DNA, 57 bp, Artificial
  Synthetic oligonucleotide
taaaatcttccctcgattctgcaccttgattctgcagggtgacaccaaaaacaaaag

SEQ ID NO: 136668 - DNA, 58 bp, Artificial
  Synthetic oligonucleotide
caatcaaacacttagttgacataccagttgtacaagtagatactcattggggcccata

SEQ ID NO: 136669 - DNA, 55 bp, Artificial
  Synthetic oligonucleotide
agtttaccatccgtctccctccactcgaaggtggggacctcatcaagccagggaa

SEQ ID NO: 136670 - DNA, 55 bp, Artificial
  Synthetic oligonucleotide
taaactctaagagttccttaaggtcggggcattcaaggtcatcaaatactgggag

SEQ ID NO: 136671 - DNA, 57 bp, Artificial
  Synthetic oligonucleotide
gttctggccaggtacttacacgaggtgtttctctagccactcttttacgaggactga

SEQ ID NO: 136672 - DNA, 55 bp, Artificial
  Synthetic oligonucleotide
gcacccgggaggtacttgggtatgtgctcctcgcggaccctcttgagttcggacc

SEQ ID NO: 136673 - DNA, 57 bp, Artificial
  Synthetic oligonucleotide
actatgacctcgaaacaggtacctgggagattggtgatatcccagcatatgaggaga

SEQ ID NO: 136674 - DNA, 57 bp, Artificial
  Synthetic oligonucleotide
gcgcagggccctccggcaatcacaagaggatcttggtcggttctttcctgtttctta

SEQ ID NO: 136675 - DNA, 57 bp, Artificial
  Synthetic oligonucleotide
ctatggtaaagactacgtagaaggtaaatatggtggattatgtcaagctgaagcaac

SEQ ID NO: 136676 - DNA, 57 bp, Artificial
  Synthetic oligonucleotide
ctcctcgcggaccctcttgagttcggacctcgggaggagtgatagcagttcccatcc

SEQ ID NO: 136677 - DNA, 57 bp, Artificial
  Synthetic oligonucleotide
gtgttgctgtgttcattaaagcacattcataacctaatgattgtaaccatacaccag

SEQ ID NO: 136678 - DNA, 57 bp, Artificial
  Synthetic oligonucleotide
tggaataatgcagctgtaccagacataattccactagtaccacaagttacaacatcc

SEQ ID NO: 136679 - DNA, 56 bp, Artificial
  Synthetic oligonucleotide
tgcaggtgtcccatctgtggtgccagctgaacctgtgagttggggttactctggga

SEQ ID NO: 136680 - DNA, 55 bp, Artificial
  Synthetic oligonucleotide
gaagagctctccgtgttcaggggtcctccgggagcctaatgcagtgagggacctc

SEQ ID NO: 136681 - DNA, 55 bp, Artificial
  Synthetic oligonucleotide
caacgtccattgccagggccccccgacgaggtcttgggttcctgaacattgtgga

SEQ ID NO: 136682 - DNA, 55 bp, Artificial
  Synthetic oligonucleotide
gatagagggtgatgtcagggtttacaacccctacctccacctactcgacctgcga

SEQ ID NO: 136683 - DNA, 52 bp, Artificial
  Synthetic oligonucleotide
ggctggaaggggtcttattttccagtccagggaaaacactttaaggggatgc

SEQ ID NO: 136684 - DNA, 55 bp, Artificial
  Synthetic oligonucleotide
ggccgctgtggatgcttgaagtggtgtgtgagtagatcaaaccttgatactgatc

SEQ ID NO: 136685 - DNA, 55 bp, Artificial
  Synthetic oligonucleotide
gagcttctctatatctgcagccgacagctctcccctggatgaggtcattccgtcc

SEQ ID NO: 136686 - DNA, 55 bp, Artificial
  Synthetic oligonucleotide
gaagggaagagtgttgcgattaagtaccaggatgtaagggattacctcgacctga

SEQ ID NO: 136687 - DNA, 55 bp, Artificial
  Synthetic oligonucleotide
gaggtttatacccaatatgacagaaccatgttagtaggagacccaagacgttccg

SEQ ID NO: 136688 - DNA, 55 bp, Artificial
  Synthetic oligonucleotide
ggaacctttcactcctgaggtggcccctctcatgggtcttgagttcaggtaccag

SEQ ID NO: 136689 - DNA, 55 bp, Artificial
  Synthetic oligonucleotide
gcaaacgtcccacaggagcactgctgactgaagacagtatgcctcatggtccaag

SEQ ID NO: 136690 - DNA, 55 bp, Artificial
  Synthetic oligonucleotide
gagggatctgatcatatcggctatgagtaacctcgcacccctcgggagggatccg

SEQ ID NO: 136691 - DNA, 55 bp, Artificial
  Synthetic oligonucleotide
gacacagtccttgacgtaggttctgaagtgacattctacgcactagaacagttcg

SEQ ID NO: 136692 - DNA, 59 bp, Artificial
  Synthetic oligonucleotide
ctacctccacctactcgacctgagagggtatagtaacagggacatcaagcacatagttg

SEQ ID NO: 136693 - DNA, 55 bp, Artificial
  Synthetic oligonucleotide
gctggggtcacacttaccaagggttatggtgtcaagaagaacagtgcaggccatt

SEQ ID NO: 136694 - DNA, 55 bp, Artificial
  Synthetic oligonucleotide
gctggactggttgtcaaggcactcataagtagtggaattgcaataagcatagcag

SEQ ID NO: 136695 - DNA, 55 bp, Artificial
  Synthetic oligonucleotide
gaggtacaagtatcccgttcaattggagacatgagggtttacgtggatccaaggg

SEQ ID NO: 136696 - DNA, 55 bp, Artificial
  Synthetic oligonucleotide
gccagagacagtccgatataaactgaagctatgtttattcccaatgcacgtcctc

SEQ ID NO: 136697 - DNA, 55 bp, Artificial
  Synthetic oligonucleotide
gcaccgttcacggtcaatgtacaggaacagagcaactctaatggtaacacagtga

SEQ ID NO: 136698 - DNA, 55 bp, Artificial
  Synthetic oligonucleotide
gctatagcctgacataggatgtggaatgttacaacatcctgtctgtataaactgc

SEQ ID NO: 136699 - DNA, 55 bp, Artificial
  Synthetic oligonucleotide
gcattgcggtagcaccgaattctcctaagccacgggcataagcaagaattccgcc

SEQ ID NO: 136700 - DNA, 55 bp, Artificial
  Synthetic oligonucleotide
gccctgaactaacgggcagttccatcggaggggctgtcctatcatctggtagggg

SEQ ID NO: 136701 - DNA, 55 bp, Artificial
  Synthetic oligonucleotide
gcgaagcttggatcacttagcagtgttatgtaggttgcagctcctgcgagtttcg

SEQ ID NO: 136702 - DNA, 55 bp, Artificial
  Synthetic oligonucleotide
gcctcgtcgagttttactgatgtgtccacaaggccgtatccacgttcaaccacgg

SEQ ID NO: 136703 - DNA, 58 bp, Artificial
  Synthetic oligonucleotide
atgcaatacaaggaagggcccctgtgtattgtaatacaataaggacaccctctataga

SEQ ID NO: 136704 - DNA, 55 bp, Artificial
  Synthetic oligonucleotide
ggacctactaaggagggatcccataaatgaatgaggatcccgaaatatacctaac

SEQ ID NO: 136705 - DNA, 55 bp, Artificial
  Synthetic oligonucleotide
tgttaaacttactcgcttgggcggctccatggtctttcataactaccttaagctt

SEQ ID NO: 136706 - DNA, 56 bp, Artificial
  Synthetic oligonucleotide
tcccagccgaggggcttatgggagatcctgcaaccccacatctccctaccctttcg

SEQ ID NO: 136707 - DNA, 55 bp, Artificial
  Synthetic oligonucleotide
taaacctcctactgcaaaggggtaccctaaccagccgtgggcttgcctcataagc

SEQ ID NO: 136708 - DNA, 55 bp, Artificial
  Synthetic oligonucleotide
gcctatatcgatagtcctcttgaaattggctttgggcagaccatttcagcaatcc

SEQ ID NO: 136709 - DNA, 55 bp, Artificial
  Synthetic oligonucleotide
gccacattatgaggtatccagctgtaaggataacgttcatcatagtatacataca

SEQ ID NO: 136710 - DNA, 55 bp, Artificial
  Synthetic oligonucleotide
gcatggcaccgtcaatcaatattttatccagccctgtcaagaattgggtagctcc

SEQ ID NO: 136711 - DNA, 55 bp, Artificial
  Synthetic oligonucleotide
gcataaagtcccatacattccaaagattaggggattatcgtatatgatcaatgcc

SEQ ID NO: 136712 - DNA, 55 bp, Artificial
  Synthetic oligonucleotide
gcctctctaattggagctactatgtactttgccaccctaacagaggttccaatag

SEQ ID NO: 136713 - DNA, 55 bp, Artificial
  Synthetic oligonucleotide
tctaagctctacactcataatcccactcctataaagatgccaaggtataaaagtc

SEQ ID NO: 136714 - DNA, 55 bp, Artificial
  Synthetic oligonucleotide
gctcccattaggatggttagatcagcttctcttgtggcggttgagccaaggacat

SEQ ID NO: 136715 - DNA, 60 bp, Artificial
  Synthetic oligonucleotide
atagctggatactccaactcatatcttggactctcaaagtagtatggagagcagtaaata

SEQ ID NO: 136716 - DNA, 55 bp, Artificial
  Synthetic oligonucleotide
gagatagtgcttgcgttattccgccacagacattgcctaaggagataatcgacac

SEQ ID NO: 136717 - DNA, 55 bp, Artificial
  Synthetic oligonucleotide
tttcaggctttaagtgtccatccctatttttatcccaatatatatgggatgatgc

SEQ ID NO: 136718 - DNA, 55 bp, Artificial
  Synthetic oligonucleotide
ttcctccttgaacatgccagtaaagaaggtatagagggcagattaatctacatgc

SEQ ID NO: 136719 - DNA, 55 bp, Artificial
  Synthetic oligonucleotide
gagcagctctcaacttaacgagcatgtcaattgggtctaatcctgagttctcagc

SEQ ID NO: 136720 - DNA, 55 bp, Artificial
  Synthetic oligonucleotide
ttaggaccatgtccaatgttgcatgacctgttatgcatgcaattaattgggctgg

SEQ ID NO: 136721 - DNA, 55 bp, Artificial
  Synthetic oligonucleotide
gaggcaatagcttttggtaatcacacacttggagagataaagaattacttgggct

SEQ ID NO: 136722 - DNA, 55 bp, Artificial
  Synthetic oligonucleotide
ttaacattacacatttccaacaatctggcaataatggattgtggtaacccagggg

SEQ ID NO: 136723 - DNA, 55 bp, Artificial
  Synthetic oligonucleotide
gatagagtgttattggtagaatctcagtgttcatataagaacctccagcgaggat

SEQ ID NO: 136724 - DNA, 55 bp, Artificial
  Synthetic oligonucleotide
tgtctgccaatatagtaacatccccacttatcaataaatcacttacatgccactc

SEQ ID NO: 136725 - DNA, 55 bp, Artificial
  Synthetic oligonucleotide
tggcttagctggttatagcgcccggctcatacggatatcccagccctacggctgg

SEQ ID NO: 136726 - DNA, 54 bp, Artificial
  Synthetic oligonucleotide
ggaagtcgaattatttgaatggtaagagggggaggaataagccaatattcaaaa

SEQ ID NO: 136727 - DNA, 55 bp, Artificial
  Synthetic oligonucleotide
gatggtccttacttcttaccaggatacaacgattcattaacctggacaggagtcg

SEQ ID NO: 136728 - DNA, 55 bp, Artificial
  Synthetic oligonucleotide
tgctctaattccgttagaggaataagtatgggaaaatagtagttatgcaagggga

SEQ ID NO: 136729 - DNA, 54 bp, Artificial
  Synthetic oligonucleotide
tgatctaaaccaaccctttgcccaggatacttaacagattttccccagactaag

SEQ ID NO: 136730 - DNA, 55 bp, Artificial
  Synthetic oligonucleotide
gattccactaacttctccgtctaaggttaattgctccactcctctaacaactatc

SEQ ID NO: 136731 - DNA, 55 bp, Artificial
  Synthetic oligonucleotide
gattgtattttaggtggcagtatgggaaaatgtaggcataatggagaggttagta

SEQ ID NO: 136732 - DNA, 55 bp, Artificial
  Synthetic oligonucleotide
tcttcccttgtagagagctatgacttcttagtgggcttaggagaggttggtaggc

SEQ ID NO: 136733 - DNA, 55 bp, Artificial
  Synthetic oligonucleotide
gcagattggaagctattccctttcagtaagttaccagactaacccattaatgttt

SEQ ID NO: 136734 - DNA, 55 bp, Artificial
  Synthetic oligonucleotide
gcagtgcatattgaggaatcctttagccagccctttcactataggaatatcgcat

SEQ ID NO: 136735 - DNA, 55 bp, Artificial
  Synthetic oligonucleotide
ggtatgactatcggagcattaattattcaccaacaatatgagacgttaccagcta

SEQ ID NO: 136736 - DNA, 55 bp, Artificial
  Synthetic oligonucleotide
ggtggtgttgataggaccacaaaagagccatctgagtaacgtatagtattgttaa

SEQ ID NO: 136737 - DNA, 57 bp, Artificial
  Synthetic oligonucleotide
ctaaagccgttattttgtccaatatagccaaatctctatatagcagaggtttaacta

SEQ ID NO: 136738 - DNA, 55 bp, Artificial
  Synthetic oligonucleotide
tatgttcccgatgaacccagagggaactgaggccgatgacatccaagtccaacgt

SEQ ID NO: 136739 - DNA, 55 bp, Artificial
  Synthetic oligonucleotide
tatggacgtaaatcccatactgctcaatatcgtatcttggagctaagcaggcaac

SEQ ID NO: 136740 - DNA, 55 bp, Artificial
  Synthetic oligonucleotide
gtctatagttgagggaacggtgttcccgatgaagctataggttgaggacaacccg

SEQ ID NO: 136741 - DNA, 55 bp, Artificial
  Synthetic oligonucleotide
gttaaacatcgcttcagaccctggggcacacttcccacaaaaggcagtgcaacat

SEQ ID NO: 136742 - DNA, 55 bp, Artificial
  Synthetic oligonucleotide
tatcgatgttggtagaggagattacgttagagttaggggctatataagggaaggt

SEQ ID NO: 136743 - DNA, 55 bp, Artificial
  Synthetic oligonucleotide
tatatgtgagtatagggctctaaatcgtttgtctaagcattcaacttccctatgc

SEQ ID NO: 136744 - DNA, 54 bp, Artificial
  Synthetic oligonucleotide
gttaatacgtggcacaacttatccacaacaggtatccgaaaaccttcgaatttc

SEQ ID NO: 136745 - DNA, 55 bp, Artificial
  Synthetic oligonucleotide
gttacatctcattaaagcccttaaggtaaaggacttatgccccttagatggagcc

SEQ ID NO: 136746 - DNA, 55 bp, Artificial
  Synthetic oligonucleotide
gttagagcttttccttgaggagagggttattaacactaagcccatgttgagattc

SEQ ID NO: 136747 - DNA, 55 bp, Artificial
  Synthetic oligonucleotide
gttagctctattttctctatactgtaaggatcttctggcttagccttggctacag

SEQ ID NO: 136748 - DNA, 57 bp, Artificial
  Synthetic oligonucleotide
ctaggaatactataccacgatattacctacatcgaggaactaccagagattaaccta

SEQ ID NO: 136749 - DNA, 55 bp, Artificial
  Synthetic oligonucleotide
tatagacagaggtttctggagtggcataggattgatcaaggagagtattaacctc

SEQ ID NO: 136750 - DNA, 55 bp, Artificial
  Synthetic oligonucleotide
gttccaaggagttcaaaatccaaagtttatgatttggttgttcaggcagtggatg

SEQ ID NO: 136751 - DNA, 55 bp, Artificial
  Synthetic oligonucleotide
tactcgcctattggcgattgccatactccagagcggggcttcactatgttcagcc

SEQ ID NO: 136752 - DNA, 55 bp, Artificial
  Synthetic oligonucleotide
taaaggttcggcttcgataagaatttctttgttaaatactgatactctataatca

SEQ ID NO: 136753 - DNA, 55 bp, Artificial
  Synthetic oligonucleotide
tacgctgcaacctatcgatgacatgccaagtattattcaacaaatacgatgacac

SEQ ID NO: 136754 - DNA, 55 bp, Artificial
  Synthetic oligonucleotide
taagggttcattttattgcgttcccgctgagtgtagtttcttatgtgcatgctat

SEQ ID NO: 136755 - DNA, 55 bp, Artificial
  Synthetic oligonucleotide
gctcttagagagatatcctccattctatatgccaatctgtgatttatgctgtctc

SEQ ID NO: 136756 - DNA, 53 bp, Artificial
  Synthetic oligonucleotide
gcttcggaaacgtaaccccaggacaacaaaacgtttcagcagaagagaacgta

SEQ ID NO: 136757 - DNA, 55 bp, Artificial
  Synthetic oligonucleotide
ggaaatgtatatagttctgttacaactgcgacggcagtaggacttacggcagcag

SEQ ID NO: 136758 - DNA, 55 bp, Artificial
  Synthetic oligonucleotide
tcgcatctaaatagttaatcccaccacataaagcgggcctatctggggttataac

SEQ ID NO: 136759 - DNA, 56 bp, Artificial
  Synthetic oligonucleotide
tctatagatatctaattaatgccccgaaattttgggcctcccttctctaggggtgc

SEQ ID NO: 136760 - DNA, 55 bp, Artificial
  Synthetic oligonucleotide
tccgtagttgtttgagtcattacttagatactttgccatgctaactaaaacaggc

SEQ ID NO: 136761 - DNA, 55 bp, Artificial
  Synthetic oligonucleotide
ggagatgttaagcactgtcctcttggaggtaagccacctttgggaactcctccac

SEQ ID NO: 136762 - DNA, 55 bp, Artificial
  Synthetic oligonucleotide
ggagtgaataaatcaactccactacaaacagctactaaaccagcacacataccgt

SEQ ID NO: 136763 - DNA, 55 bp, Artificial
  Synthetic oligonucleotide
ggagtgcatgacataaaagctcactatgtagggccaagaatccatgttgaactac

SEQ ID NO: 136764 - DNA, 55 bp, Artificial
  Synthetic oligonucleotide
ggagttagtagcatctccaaaccagataaaagagttgggtattggccatgcaata

SEQ ID NO: 136765 - DNA, 55 bp, Artificial
  Synthetic oligonucleotide
ggagttccaactgctatagcgaaaggaccatttaacatagcccctccataggtca

SEQ ID NO: 136766 - DNA, 55 bp, Artificial
  Synthetic oligonucleotide
ggcaaccggttttggatgctctgtcataatgtgtccagcagaggcgggaattgag

SEQ ID NO: 136767 - DNA, 55 bp, Artificial
  Synthetic oligonucleotide
ggcatggagtagcccaaactcttcctacaaagtttgaaacagccccatttacatc

SEQ ID NO: 136768 - DNA, 55 bp, Artificial
  Synthetic oligonucleotide
tccagtttcatactctaagatgtcattgtagtataagatggttgaagctacaccc

SEQ ID NO: 136769 - DNA, 54 bp, Artificial
  Synthetic oligonucleotide
ggggaacaagatttacaaacaaacggagctggagtagatttcttattagtccca

SEQ ID NO: 136770 - DNA, 55 bp, Artificial
  Synthetic oligonucleotide
gcctcccttaaaagggttcggcacatcgacagggacgttttgcaattactgccca

SEQ ID NO: 136771 - DNA, 54 bp, Artificial
  Synthetic oligonucleotide
ggggaggaactaagccggtatatcttctttagcctagttgatgaaacccacgcc

SEQ ID NO: 136772 - DNA, 55 bp, Artificial
  Synthetic oligonucleotide
ggggcaacaataggacaaaatccagagatgtcatataacgtatgtgctgcggtta

SEQ ID NO: 136773 - DNA, 55 bp, Artificial
  Synthetic oligonucleotide
ggggcatctgcaacaatgtcaagcgatgttcttccatactacgttaaggttggaa

SEQ ID NO: 136774 - DNA, 55 bp, Artificial
  Synthetic oligonucleotide
gggtggcatgtagaatgggctaagatgtatccggatgatagctttacaattggtg

SEQ ID NO: 136775 - DNA, 55 bp, Artificial
  Synthetic oligonucleotide
ggtagtgtagagaactcagtcattgcctatggaagtcaattaacggggctaattc

SEQ ID NO: 136776 - DNA, 55 bp, Artificial
  Synthetic oligonucleotide
ccattagcagcagagaagtgtcaaggagttaaagttaagttaatggatgcagtat

SEQ ID NO: 136777 - DNA, 54 bp, Artificial
  Synthetic oligonucleotide
cccaaacatggggaagagacttagatacctcaggttaaagctcggaataagtac

SEQ ID NO: 136778 - DNA, 55 bp, Artificial
  Synthetic oligonucleotide
ccctatattggcaatcgcctatgataacgttgttgagccaaaatctccagttaga

SEQ ID NO: 136779 - DNA, 55 bp, Artificial
  Synthetic oligonucleotide
cccttcgtcagttttccaaactctatggatgtatattgccttagtcgggcatata

SEQ ID NO: 136780 - DNA, 55 bp, Artificial
  Synthetic oligonucleotide
ccgagtgaaacgaggcagtgcatcccgggtataccaatagggcgaagccctatgg

SEQ ID NO: 136781 - DNA, 57 bp, Artificial
  Synthetic oligonucleotide
gccattacccacgacggctaccgccctcaggaataaacaatgcccccaatatatcga

SEQ ID NO: 136782 - DNA, 55 bp, Artificial
  Synthetic oligonucleotide
ccgctggaggactatacgaggtctatccaacagatcccctacaacctattggggc

SEQ ID NO: 136783 - DNA, 55 bp, Artificial
  Synthetic oligonucleotide
ccgggattgaagaggattccagtaagagaagatggaactaaggacttttcagagg

SEQ ID NO: 136784 - DNA, 55 bp, Artificial
  Synthetic oligonucleotide
ccggttctgttggtagtccagatggttggagcaccgtattcgtaagaactataag

SEQ ID NO: 136785 - DNA, 55 bp, Artificial
  Synthetic oligonucleotide
cctaagtatgcaacacacaaaagcccgtctatgcaatacaaggaagggcccctgt

SEQ ID NO: 136786 - DNA, 55 bp, Artificial
  Synthetic oligonucleotide
cctacatcgtgaatttgaggtctaacacagcagtttggacatccgctaattgcaa

SEQ ID NO: 136787 - DNA, 55 bp, Artificial
  Synthetic oligonucleotide
cctattattgtgtgaggtattctgtccattctcaagtttgcactaaagttggttg

SEQ ID NO: 136788 - DNA, 55 bp, Artificial
  Synthetic oligonucleotide
cctccctattataagctaattccattggctgagatgattagcctaactattggta

SEQ ID NO: 136789 - DNA, 55 bp, Artificial
  Synthetic oligonucleotide
cctctcttgtatggatggagttcaactgagtgtcatgctcaagcttatggagtag

SEQ ID NO: 136790 - DNA, 54 bp, Artificial
  Synthetic oligonucleotide
ccttaactattctcggtcctattgggcagaaggtatcgaacgatttagcccttg

SEQ ID NO: 136791 - DNA, 55 bp, Artificial
  Synthetic oligonucleotide
cgacaggggtagagacactcttgtgtggttgatgacgcccaagtccaatatgggt

SEQ ID NO: 136792 - DNA, 53 bp, Artificial
  Synthetic oligonucleotide
aggcttccaggaccacacggagtttttagagaactatggccttagccttcctt

SEQ ID NO: 136793 - DNA, 55 bp, Artificial
  Synthetic oligonucleotide
cggaaaatatccgcacggaaaattttcgcagtcagtagtatatacatcttccata

SEQ ID NO: 136794 - DNA, 55 bp, Artificial
  Synthetic oligonucleotide
cggagctacagtctataaagggatatgtggttatggagttagagggatagctgag

SEQ ID NO: 136795 - DNA, 53 bp, Artificial
  Synthetic oligonucleotide
cggcagtggagggaacgtttcggttagggaagaggacttggtctatgtaacac

SEQ ID NO: 136796 - DNA, 55 bp, Artificial
  Synthetic oligonucleotide
cgggtgaaatcttatggctgatgacttaaccaaattacccggtgttggacaatca

SEQ ID NO: 136797 - DNA, 54 bp, Artificial
  Synthetic oligonucleotide
cggtatggaaacttggggcaggcgggataataggcggtgtcgacgataggttaa

SEQ ID NO: 136798 - DNA, 54 bp, Artificial
  Synthetic oligonucleotide
cggttcatttaagagtaagctcctaaagtaagcccctacaattctctctttgcc

SEQ ID NO: 136799 - DNA, 55 bp, Artificial
  Synthetic oligonucleotide
aaactacttcattaaacgtcactgactgctgagctccataataaaacactgctcc

SEQ ID NO: 136800 - DNA, 55 bp, Artificial
  Synthetic oligonucleotide
aaccctcgaagcctcctcaaacatgatatgctcatactcacttccggggtatatg

SEQ ID NO: 136801 - DNA, 55 bp, Artificial
  Synthetic oligonucleotide
aagctatcatccggatacatcttagcccattctacatgccacccgtctaaggtgc

SEQ ID NO: 136802 - DNA, 55 bp, Artificial
  Synthetic oligonucleotide
accctaagcttgtatgggatagggataagtgcctattctgtggctcctgccttgt

SEQ ID NO: 136803 - DNA, 53 bp, Artificial
  Synthetic oligonucleotide
cattcgattaattccagagattccaaaggataagacttttaaacgggagttaa

SEQ ID NO: 136804 - DNA, 55 bp, Artificial
  Synthetic oligonucleotide
actgaatagctaataacgtgggtggtattactgcattatgatgtggaacattagg

SEQ ID NO: 136805 - DNA, 55 bp, Artificial
  Synthetic oligonucleotide
aggcattggcacttcctccccaacagctacaacatgtccaactctatgcctaccg

SEQ ID NO: 136806 - DNA, 55 bp, Artificial
  Synthetic oligonucleotide
atacaatcctttccgcagtagggacaagagtgcatatgatcacctctcagtgggc

SEQ ID NO: 136807 - DNA, 55 bp, Artificial
  Synthetic oligonucleotide
atagtggacggtaatatagtggggattaataacacttacgatttgacagatccgg

SEQ ID NO: 136808 - DNA, 55 bp, Artificial
  Synthetic oligonucleotide
atccaattaacctatattctgcagcttgcctataatagtccccttccatttcata

SEQ ID NO: 136809 - DNA, 55 bp, Artificial
  Synthetic oligonucleotide
atgagctaaaggcaactccagaccattgcttattggttttaagagacaatcaact

SEQ ID NO: 136810 - DNA, 55 bp, Artificial
  Synthetic oligonucleotide
attgtctccaaagcatggaatttatggctccaccaactactggattaagacctat

SEQ ID NO: 136811 - DNA, 55 bp, Artificial
  Synthetic oligonucleotide
atttagcatacactggggatatcaagtttgagacatcaagattgttagagccagc

SEQ ID NO: 136812 - DNA, 55 bp, Artificial
  Synthetic oligonucleotide
caaccttttagccaccaaatagacctttaatcttgcagtatccattatctctgct

SEQ ID NO: 136813 - DNA, 55 bp, Artificial
  Synthetic oligonucleotide
cacatacctccctcaatttgtcgccttctccttcatcaaagtttagccatacagc

SEQ ID NO: 136814 - DNA, 54 bp, Artificial
  Synthetic oligonucleotide
tcataacccaagaattctaaaattggttctataaccttctgcctcgtaaatggt

SEQ ID NO: 136815 - DNA, 59 bp, Artificial
  Synthetic oligonucleotide
catagtgtaataacacccattctaaaccattagtggctataccagtatctacgccataa

SEQ ID NO: 136816 - DNA, 55 bp, Artificial
  Synthetic oligonucleotide
cacgatattacctacatcgaggaactaccagagattaacctaaccagaggggagg

SEQ ID NO: 136817 - DNA, 55 bp, Artificial
  Synthetic oligonucleotide
cactgcgtatctaaccctctcgggcatgtctaagcccctaactaaaacaccatag

SEQ ID NO: 136818 - DNA, 55 bp, Artificial
  Synthetic oligonucleotide
catcacctttagcaagataaccaattataactccagccccaattcctaacatgat

SEQ ID NO: 136819 - DNA, 55 bp, Artificial
  Synthetic oligonucleotide
ccaaaacatgcttacttagacccagataggccaataacacaaggatgtgtcggag

SEQ ID NO: 136820 - DNA, 52 bp, Artificial
  Synthetic oligonucleotide
ccagagattccaaaggataagacttttaaacgggagttaaggagtatcctac

SEQ ID NO: 136821 - DNA, 55 bp, Artificial
  Synthetic oligonucleotide
ccagtagtgtttggaattacatctcttgggcagtggatagcacaagtttcacaag

SEQ ID NO: 136822 - DNA, 55 bp, Artificial
  Synthetic oligonucleotide
ccataaatgaatgaggatcccgaaatatacctaaccaggggagaagtcctagagc

SEQ ID NO: 136823 - DNA, 55 bp, Artificial
  Synthetic oligonucleotide
cttcgaatttcattaactctccttgctacgctcgaagatagggaggcggcgagac

SEQ ID NO: 136824 - DNA, 55 bp, Artificial
  Synthetic oligonucleotide
cttccccaaatctctccatacctacaacgaaagctccaactaaattatcagtcgt

SEQ ID NO: 136825 - DNA, 54 bp, Artificial
  Synthetic oligonucleotide
ctttgccctttaacctatcaacttcgttaatgtcaaattcaaagccctctggtg

SEQ ID NO: 136826 - DNA, 54 bp, Artificial
  Synthetic oligonucleotide
cagagattaaggggcattcacttgtaaaaaaagctgttttcttacaacaaatta

SEQ ID NO: 136827 - DNA, 55 bp, Artificial
  Synthetic oligonucleotide
ctggaagctcagtcacaacactacctctttgtatatgtagagtgtagaagctcta

SEQ ID NO: 136828 - DNA, 55 bp, Artificial
  Synthetic oligonucleotide
ctgctgaaccttgtgcagctaatcttgccttacctaagtaagggtctggcgtttt

SEQ ID NO: 136829 - DNA, 55 bp, Artificial
  Synthetic oligonucleotide
ctctgcatatacaaccattaggaagacaattattgttccgattataggggcgatg

SEQ ID NO: 136830 - DNA, 55 bp, Artificial
  Synthetic oligonucleotide
ctctcgacttaccagtcgaaggatctccaaccattaagatatggatattccaatt

SEQ ID NO: 136831 - DNA, 55 bp, Artificial
  Synthetic oligonucleotide
ctcccataagcatacagctgttcctgtcccactcttagcctatggtccaggagca

SEQ ID NO: 136832 - DNA, 55 bp, Artificial
  Synthetic oligonucleotide
ctattggaatagggtctgccgagtggtctttcatctctattggtgttgagtgatc

SEQ ID NO: 136833 - DNA, 55 bp, Artificial
  Synthetic oligonucleotide
ctatcgagtagttcattcattatctctctaacagtcctataagtggatggctttg

SEQ ID NO: 136834 - DNA, 55 bp, Artificial
  Synthetic oligonucleotide
ctatacttcctattcgacttctttattactccacagacgctacacttctgtgagg

SEQ ID NO: 136835 - DNA, 54 bp, Artificial
  Synthetic oligonucleotide
ctactggagagttgaagcctggaaagtagtttactcggggaaccctcaccacgc

SEQ ID NO: 136836 - DNA, 55 bp, Artificial
  Synthetic oligonucleotide
cgtctaagcatctaactctaaccctacttgctcccaacatctgctctataatccc

SEQ ID NO: 136837 - DNA, 56 bp, Artificial
  Synthetic oligonucleotide
taaatatataccttagtagattaaaagaatagtttccatcctccaagaggtctgat

SEQ ID NO: 136838 - DNA, 55 bp, Artificial
  Synthetic oligonucleotide
gacatttaggccggagagaatcgttcaaatggctgaagccttaggattagatggc

SEQ ID NO: 136839 - DNA, 55 bp, Artificial
  Synthetic oligonucleotide
cgttcttagccctattcaatgctcccctataagtttcctcaaagccaataggatg

SEQ ID NO: 136840 - DNA, 55 bp, Artificial
  Synthetic oligonucleotide
gaattctaaaattggttctataaccttctgcctcgtaaatggttctggaagttgc

SEQ ID NO: 136841 - DNA, 55 bp, Artificial
  Synthetic oligonucleotide
ctaaaggggcaatattaggcctccctcattttgtaaggatgaattgtgattcgcg

SEQ ID NO: 136842 - DNA, 55 bp, Artificial
  Synthetic oligonucleotide
ctaaccactctaacagaaatgtgaaataccccacacacttccaagacatgaaacg

SEQ ID NO: 136843 - DNA, 55 bp, Artificial
  Synthetic oligonucleotide
ctacactgtttataaccatcacccaactgttgtgcgtttgtctgcgttagtatgt

SEQ ID NO: 136844 - DNA, 54 bp, Artificial
  Synthetic oligonucleotide
tccaatccagtgcttcttacctgctccgacagttcttgaaattttctcgatcat

SEQ ID NO: 136845 - DNA, 54 bp, Artificial
  Synthetic oligonucleotide
atcctccaatctatatagtttgtcggttggcaattctgcccctaactcccataa

SEQ ID NO: 136846 - DNA, 54 bp, Artificial
  Synthetic oligonucleotide
catgcgggttgtttatagagccggagctaacctttccctctgcgtcatatccca

SEQ ID NO: 136847 - DNA, 54 bp, Artificial
  Synthetic oligonucleotide
cctctgccatacataaattaggagttcctgaggttgttatcactataacaaacc

SEQ ID NO: 136848 - DNA, 58 bp, Artificial
  Synthetic oligonucleotide
cactattgcaatgttaaacttactcgcttgggcggctccatggtctttcataactacc

SEQ ID NO: 136849 - DNA, 54 bp, Artificial
  Synthetic oligonucleotide
cactaatagcccttggggctttagcgttaagtggtgcattagctacaattgccg

SEQ ID NO: 136850 - DNA, 52 bp, Artificial
  Synthetic oligonucleotide
taaagggatgagttctctcgggaacccgtaagggaccgagaggacaaccgcc

SEQ ID NO: 136851 - DNA, 54 bp, Artificial
  Synthetic oligonucleotide
gattgatttgagcaattcatactctttttcagtatgagcagggattactctatg

SEQ ID NO: 136852 - DNA, 54 bp, Artificial
  Synthetic oligonucleotide
cttctaagctctcatccttacaaacaattcctgcaatcccacacatctttactc

SEQ ID NO: 136853 - DNA, 54 bp, Artificial
  Synthetic oligonucleotide
tggacgtgtggtatccacaccataaaggggctacgcccctcttgggatactccc

SEQ ID NO: 136854 - DNA, 54 bp, Artificial
  Synthetic oligonucleotide
gcaacaactaagaccaaacactctcccaaggtatcataagccctccagtcaaat

SEQ ID NO: 136855 - DNA, 54 bp, Artificial
  Synthetic oligonucleotide
ctcttctttatatctatcatatcctaatctatctatcaatttgtcctttaactc

SEQ ID NO: 136856 - DNA, 54 bp, Artificial
  Synthetic oligonucleotide
tggagttatcatattttgccccaccatatagagacgtggtgggtgtgcccaaaa

SEQ ID NO: 136857 - DNA, 49 bp, Artificial
  Synthetic oligonucleotide
acccatttattgttttgtcggttaattacttaggtttccatccccttag

SEQ ID NO: 136858 - DNA, 54 bp, Artificial
  Synthetic oligonucleotide
gtctcttcagacccatagggaaacccctattgagatacccgagtggggcttcac

SEQ ID NO: 136859 - DNA, 55 bp, Artificial
  Synthetic oligonucleotide
tactgttgttggtcccgagaagttggaaaggaagattaggctttctgcaagggat

SEQ ID NO: 136860 - DNA, 54 bp, Artificial
  Synthetic oligonucleotide
ggcggaacttcctccctcctaagttggagggacagccaccagccctcttactcc

SEQ ID NO: 136861 - DNA, 54 bp, Artificial
  Synthetic oligonucleotide
cctatcatgatcataggttagttatggcattcacagtagcaggattaaaggcgg

SEQ ID NO: 136862 - DNA, 53 bp, Artificial
  Synthetic oligonucleotide
tccctaatcaatgccctaatacccttaatcaacaatcccttattatccgcacc

SEQ ID NO: 136863 - DNA, 53 bp, Artificial
  Synthetic oligonucleotide
acacctgtttggttagggtagagagttcctatggtgtcacttttaactgggta

SEQ ID NO: 136864 - DNA, 53 bp, Artificial
  Synthetic oligonucleotide
tcctcggaattcctacaatatcctgttatcctcaagagttacttggagttgac

SEQ ID NO: 136865 - DNA, 53 bp, Artificial
  Synthetic oligonucleotide
ttgagttagttgaggcattgggagagtgtgattacagaatcgtggagggggca

SEQ ID NO: 136866 - DNA, 53 bp, Artificial
  Synthetic oligonucleotide
atgggaggacttttacctcggcaatcttaattgccgtctgtccaaatgaatta

SEQ ID NO: 136867 - DNA, 53 bp, Artificial
  Synthetic oligonucleotide
agcgggacgtgatagggcggcgctcgttatggagaagaccaccatgatgacgt

SEQ ID NO: 136868 - DNA, 53 bp, Artificial
  Synthetic oligonucleotide
tgatatgcaaaatacttgttcgcaccataaccaaacttctggaaatattgccc

SEQ ID NO: 136869 - DNA, 53 bp, Artificial
  Synthetic oligonucleotide
gtaagagcttactctggaagccattgaaaggaggaactccactgatagcaagc

SEQ ID NO: 136870 - DNA, 56 bp, Artificial
  Synthetic oligonucleotide
tagccccaacatcaaacaacccttcagctcctacccaaacagctttaattggcttc

SEQ ID NO: 136871 - DNA, 53 bp, Artificial
  Synthetic oligonucleotide
cgttccacgataacaactcgttcgttacgttcagtccataatagtctccatac

SEQ ID NO: 136872 - DNA, 53 bp, Artificial
  Synthetic oligonucleotide
acacatcctctaaaccagatgggtggagatatctaacagccttaggcattctg

SEQ ID NO: 136873 - DNA, 53 bp, Artificial
  Synthetic oligonucleotide
gtagccttaagtgtccctttgtggctccgattaaccgggttgaggaggcctta

SEQ ID NO: 136874 - DNA, 53 bp, Artificial
  Synthetic oligonucleotide
aatgcccactaacccattgggtggaacatcataaccttttgctatcctgccac

SEQ ID NO: 136875 - DNA, 53 bp, Artificial
  Synthetic oligonucleotide
cctctccagtcccatataacattgccaaacttccaacaactacctccttagct

SEQ ID NO: 136876 - DNA, 53 bp, Artificial
  Synthetic oligonucleotide
acagattaactggggatagaaagttcgttgagagatactggaacactatagag

SEQ ID NO: 136877 - DNA, 53 bp, Artificial
  Synthetic oligonucleotide
aaggatcggggtattggatatattccttggcagtcatcggaatgtttgtaaag

SEQ ID NO: 136878 - DNA, 53 bp, Artificial
  Synthetic oligonucleotide
ccgagttagaagcctacgccaggcaaatatggagaaaaccctataccccctgg

SEQ ID NO: 136879 - DNA, 52 bp, Artificial
  Synthetic oligonucleotide
ggggtaagaattacccaagttatggaggaacctacgtacctaaagcacaatc

SEQ ID NO: 136880 - DNA, 53 bp, Artificial
  Synthetic oligonucleotide
acatcccttactatatagacactatctaccctctctcacaacatgaggctcct

SEQ ID NO: 136881 - DNA, 53 bp, Artificial
  Synthetic oligonucleotide
gttatctactctcaattggttattacacaaaaagcctacccaatttacaaact

SEQ ID NO: 136882 - DNA, 52 bp, Artificial
  Synthetic oligonucleotide
gatattgccctattggaggagaggatgaattctatggatgagaagattttaa

SEQ ID NO: 136883 - DNA, 52 bp, Artificial
  Synthetic oligonucleotide
gaccaatcaaaggcatggactatgttcaaaaggcacttccaacttatgattg

SEQ ID NO: 136884 - DNA, 52 bp, Artificial
  Synthetic oligonucleotide
atgcgttatgtctctattaatggcaggattgtttatattggtagtcttagta

SEQ ID NO: 136885 - DNA, 52 bp, Artificial
  Synthetic oligonucleotide
tatgtctctccctaccttattaactttcgtaaaaccatcctccatggacgtg

SEQ ID NO: 136886 - DNA, 52 bp, Artificial
  Synthetic oligonucleotide
atgacttaattatctctagctacctttctgagctaaagttcggagctttgta

SEQ ID NO: 136887 - DNA, 52 bp, Artificial
  Synthetic oligonucleotide
aggttagcaaagaaccaattgacttctcttacgcatatctctacaacgacgt

SEQ ID NO: 136888 - DNA, 52 bp, Artificial
  Synthetic oligonucleotide
tgcatgccgaggtggcttagcgggttatagcgcccggctcatacggacatcc

SEQ ID NO: 136889 - DNA, 52 bp, Artificial
  Synthetic oligonucleotide
actgggactggaacagacaatatagttgttgttaagggattcggtagagggg

SEQ ID NO: 136890 - DNA, 52 bp, Artificial
  Synthetic oligonucleotide
gaaggagtccctacatttccaccagaagggttgatattggttgaggcaaaag

SEQ ID NO: 136891 - DNA, 52 bp, Artificial
  Synthetic oligonucleotide
ttgtcgagcgaagcgatgcaatgcatcccgagtataccaatagggctttgtc

SEQ ID NO: 136892 - DNA, 57 bp, Artificial
  Synthetic oligonucleotide
caaggttgcaatcagtttgtagctttctttgtgcgagaaacccaagatggggaagat

SEQ ID NO: 136893 - DNA, 52 bp, Artificial
  Synthetic oligonucleotide
ttggagagagacataggtgtgctttggcccaggtcttgataaaagagccgag

SEQ ID NO: 136894 - DNA, 52 bp, Artificial
  Synthetic oligonucleotide
aatatagtattatgtgattatccagaagagtttgagattagcatgagggaaa

SEQ ID NO: 136895 - DNA, 52 bp, Artificial
  Synthetic oligonucleotide
ttactgcctactacccattaatgtggcgcggggtaccgggcttggtagcccg

SEQ ID NO: 136896 - DNA, 52 bp, Artificial
  Synthetic oligonucleotide
gttattcttccgcttggacagctcccagtgcaggttccacattgatagcatg

SEQ ID NO: 136897 - DNA, 52 bp, Artificial
  Synthetic oligonucleotide
ggatgcccaagaaacgtttggagttaagcagtatattctcgtatctacactc

SEQ ID NO: 136898 - DNA, 52 bp, Artificial
  Synthetic oligonucleotide
tagctccatggaaatcaactgtttgtggatatcttcccataactgccgtttt

SEQ ID NO: 136899 - DNA, 52 bp, Artificial
  Synthetic oligonucleotide
cggatttctgctttgcgtcagctctgtaagcagttaaaacaacggccttagt

SEQ ID NO: 136900 - DNA, 52 bp, Artificial
  Synthetic oligonucleotide
cgcggcggggtacctggacacccaaaggtacgggggcttatgcgtggcccac

SEQ ID NO: 136901 - DNA, 52 bp, Artificial
  Synthetic oligonucleotide
taagccatcctatcttttgggttttctcccaaaggtatggctatttcagtgt

SEQ ID NO: 136902 - DNA, 52 bp, Artificial
  Synthetic oligonucleotide
gggttgaacgtagagttccctctgggtatcgcactatagaggggatatagcc

SEQ ID NO: 136903 - DNA, 57 bp, Artificial
  Synthetic oligonucleotide
gttagggaccttattaagccgtctagaatgaggctcccgccgtgcattgaggccttg

SEQ ID NO: 136904 - DNA, 52 bp, Artificial
  Synthetic oligonucleotide
cctccgagcatagcgaggaggtattagtgcgggatgcaacgacgcggcgttg

SEQ ID NO: 136905 - DNA, 51 bp, Artificial
  Synthetic oligonucleotide
gatttagccttttgtaaagtttgcggtgagacaattcctattggagagaga

SEQ ID NO: 136906 - DNA, 51 bp, Artificial
  Synthetic oligonucleotide
gttaattcggggtggacagcagatcgaatatcatggacccatgagttaccg

SEQ ID NO: 136907 - DNA, 51 bp, Artificial
  Synthetic oligonucleotide
actaacgttaaccttgacctctgtagcagtgataattggagcctgctgaac

SEQ ID NO: 136908 - DNA, 51 bp, Artificial
  Synthetic oligonucleotide
gaactccatcgtaacctgccccacttactgcttggagtgttgttacattaa

SEQ ID NO: 136909 - DNA, 51 bp, Artificial
  Synthetic oligonucleotide
ctcgctattccataaacaggtaggtaatagaccttagtaacttcgtagtgg

SEQ ID NO: 136910 - DNA, 51 bp, Artificial
  Synthetic oligonucleotide
tgtaacccaaagtgggggaaatttaatccagatgtctctatagctgagcag

SEQ ID NO: 136911 - DNA, 51 bp, Artificial
  Synthetic oligonucleotide
tgtcgggtatagcacttccaacaaatattgtgtccataattatcacactcc

SEQ ID NO: 136912 - DNA, 51 bp, Artificial
  Synthetic oligonucleotide
gtgtgctactttgatagacctgaagttcctaattgttaccttcgttaagtg

SEQ ID NO: 136913 - DNA, 51 bp, Artificial
  Synthetic oligonucleotide
ctcactctcctttatcactcttaacctcctaaaataaccctccatattaac

SEQ ID NO: 136914 - DNA, 55 bp, Artificial
  Synthetic oligonucleotide
gttaatacctctttatcgctgttaatactattaccgttttctgattcactgttaa

SEQ ID NO: 136915 - DNA, 51 bp, Artificial
  Synthetic oligonucleotide
ggtatggcagtctcctatgctaggatatatgagttgttacttaaatatgtt

SEQ ID NO: 136916 - DNA, 51 bp, Artificial
  Synthetic oligonucleotide
ttaacactgggttgtgtatgcaaacaggtgctttatagcccaaacttggca

SEQ ID NO: 136917 - DNA, 51 bp, Artificial
  Synthetic oligonucleotide
cctctaatctcctcctaattaaatcgtaggattcatccttagatagagggg

SEQ ID NO: 136918 - DNA, 51 bp, Artificial
  Synthetic oligonucleotide
gggtagggagatgtggggttgcaggatctcccataagcccctcggctggga

SEQ ID NO: 136919 - DNA, 51 bp, Artificial
  Synthetic oligonucleotide
aacggctcatatttcttctgcccaactaagtgtttaaccaacttatatgcc

SEQ ID NO: 136920 - DNA, 51 bp, Artificial
  Synthetic oligonucleotide
ctaaggctaacccacttataagggatagggttgaagataggctatacaaag

SEQ ID NO: 136921 - DNA, 51 bp, Artificial
  Synthetic oligonucleotide
ggacgaagattgctccaatatctaagagaccattcggtaagttatatactc

SEQ ID NO: 136922 - DNA, 51 bp, Artificial
  Synthetic oligonucleotide
cgtgatggaaaccggacacacaaccaacggcgggttcggagtaggcggata

SEQ ID NO: 136923 - DNA, 51 bp, Artificial
  Synthetic oligonucleotide
gatggaacaacccctctaacctataaagcactccaagaaatgtctaacaat

SEQ ID NO: 136924 - DNA, 51 bp, Artificial
  Synthetic oligonucleotide
tatcttagccgctgctcttgcgtctaagtagtttatccctccacataacgc

SEQ ID NO: 136925 - DNA, 56 bp, Artificial
  Synthetic oligonucleotide
tcatagagcttggccttattgctaaaaccctcaaagggtacgaactaagcccacta

SEQ ID NO: 136926 - DNA, 54 bp, Artificial
  Synthetic oligonucleotide
gttaatacacgttaatacctctttatcgctgttaatactattaccgttttctga

SEQ ID NO: 136927 - DNA, 51 bp, Artificial
  Synthetic oligonucleotide
caatataaacgttagcccctctaattgactgctgtccaatgtcctttggta

SEQ ID NO: 136928 - DNA, 51 bp, Artificial
  Synthetic oligonucleotide
tagcctttggatgcataggatgccagagaactaatgagttaaccctatact

SEQ ID NO: 136929 - DNA, 51 bp, Artificial
  Synthetic oligonucleotide
ctgtccctctaacctcttcattgggaagggttaatttaacatatctcccta

SEQ ID NO: 136930 - DNA, 51 bp, Artificial
  Synthetic oligonucleotide
catttatgcaacaggagaggcgtggattaaagtccctaaaacaattagagt

SEQ ID NO: 136931 - DNA, 51 bp, Artificial
  Synthetic oligonucleotide
ctggttccaaggagtgggggacgttccgggatttggtccaggccctactta

SEQ ID NO: 136932 - DNA, 51 bp, Artificial
  Synthetic oligonucleotide
gagtcaagggtagagtttataactgaagataggttagaggagcttaaggat

SEQ ID NO: 136933 - DNA, 51 bp, Artificial
  Synthetic oligonucleotide
agtgcttcatgtaaccttccgacatcttcaaagaatttaaaccatgcacag

SEQ ID NO: 136934 - DNA, 51 bp, Artificial
  Synthetic oligonucleotide
ccaacgtgcatatatgactttaactcaataaaatgggcattagccctctca

SEQ ID NO: 136935 - DNA, 51 bp, Artificial
  Synthetic oligonucleotide
tgcctataattgtccataaatgaccacgttgggaagaccccattaaatctg

SEQ ID NO: 136936 - DNA, 51 bp, Artificial
  Synthetic oligonucleotide
gagggttaagccagtatttagcttaacaaggttgagccagatttgtgccat

SEQ ID NO: 136937 - DNA, 57 bp, Artificial
  Synthetic oligonucleotide
tatcgtcaggacagttccaaggagttcaaaatccaaagtttatgatttggttgttca

SEQ ID NO: 136938 - DNA, 51 bp, Artificial
  Synthetic oligonucleotide
agctaactctactactaactgctctacttgctccggtgtgtattggaccca

SEQ ID NO: 136939 - DNA, 51 bp, Artificial
  Synthetic oligonucleotide
tgacagtattgcaagaggttctggattagttagtagagataaaggagcggc

SEQ ID NO: 136940 - DNA, 50 bp, Artificial
  Synthetic oligonucleotide
gttcaatcgatctaccactgtcccaccctaatgtaataataaactcttcg

SEQ ID NO: 136941 - DNA, 50 bp, Artificial
  Synthetic oligonucleotide
tttatgaagttattgtcttctctcaatctcttaactttgtaggtgtgtag

SEQ ID NO: 136942 - DNA, 50 bp, Artificial
  Synthetic oligonucleotide
gaaagccctaacaaagcaaggacgattgcaaatttcttcggaaagccgtc

SEQ ID NO: 136943 - DNA, 50 bp, Artificial
  Synthetic oligonucleotide
agccttaacctgtgtggttctaacatagctggatgtactggccctatagc

SEQ ID NO: 136944 - DNA, 50 bp, Artificial
  Synthetic oligonucleotide
gatggaatatgccttatctgttgagtattgatagatatatacggataaaa

SEQ ID NO: 136945 - DNA, 50 bp, Artificial
  Synthetic oligonucleotide
gttggttaaacacttggttgggcagaagagatatgagccgttagttgcat

SEQ ID NO: 136946 - DNA, 50 bp, Artificial
  Synthetic oligonucleotide
gattcatgaacgaggattttggagaggttagtatagaacactgcgaaccg

SEQ ID NO: 136947 - DNA, 50 bp, Artificial
  Synthetic oligonucleotide
gggagactaattaggagactaaactaggtacggaataagggatttcgtac

SEQ ID NO: 136948 - DNA, 55 bp, Artificial
  Synthetic oligonucleotide
attgcagaggaccgtaggggtggagcctaatgagtgaggcccttccggttacctc

SEQ ID NO: 136949 - DNA, 50 bp, Artificial
  Synthetic oligonucleotide
ttcccgtgcatgtagatttcccagaaacgtctgaatcgtcataaatatct

SEQ ID NO: 136950 - DNA, 50 bp, Artificial
  Synthetic oligonucleotide
ctttgaacacttagacagttggcttagggttaagttagatatcttcccca

SEQ ID NO: 136951 - DNA, 50 bp, Artificial
  Synthetic oligonucleotide
ccaccactgttggtctaatctgcgatgatgcagtaattttagcgactgat

SEQ ID NO: 136952 - DNA, 50 bp, Artificial
  Synthetic oligonucleotide
aattgttgttatctcatccattccactaccatgcactaccaaagcccctc

SEQ ID NO: 136953 - DNA, 50 bp, Artificial
  Synthetic oligonucleotide
aggataagttagaaattttcgaagtgcatgccactgttttatagagggta

SEQ ID NO: 136954 - DNA, 50 bp, Artificial
  Synthetic oligonucleotide
tgttagggacgatagagcaagaattacacacgaggcagcaattggtagcg

SEQ ID NO: 136955 - DNA, 50 bp, Artificial
  Synthetic oligonucleotide
aggtatccgcacgatgtcctaagctattgtgctttgctgaggatgtgaat

SEQ ID NO: 136956 - DNA, 55 bp, Artificial
  Synthetic oligonucleotide
attcaaaaggggcatattgttgctctaattccgttagaggaataagtatgggaaa

SEQ ID NO: 136957 - DNA, 54 bp, Artificial
  Synthetic oligonucleotide
gtccttaggaagtcccataggcttcctatcgtggtccaggctaaggccctaacg

SEQ ID NO: 136958 - DNA, 58 bp, Artificial
  Synthetic oligonucleotide
gtcatcattcccaacaagtgtggcactaaccttaaaaacagtagcttgttttgataca

SEQ ID NO: 136959 - DNA, 58 bp, Artificial
  Synthetic oligonucleotide
cctactacaatattccatactgctcttataatcctttgaatcttaccccattttgatg

SEQ ID NO: 136960 - DNA, 60 bp, Artificial
  Synthetic oligonucleotide
gtagttctaagttgtggttgtattggagatgaatgcactccacacccataggcactataa

SEQ ID NO: 136961 - DNA, 60 bp, Artificial
  Synthetic oligonucleotide
tgttcagtatatgtgaaataacataattatggtatatagtatattcgggacaatgaggag

SEQ ID NO: 136962 - DNA, 59 bp, Artificial
  Synthetic oligonucleotide
tgttcattaacaatactgcaaattttttcttgtccaattctgatgtattgggtggagct

SEQ ID NO: 136963 - DNA, 54 bp, Artificial
  Synthetic oligonucleotide
ggcgttttggctacaccgaggagagccttaaggggttctacgaggagatagtta

SEQ ID NO: 136964 - DNA, 58 bp, Artificial
  Synthetic oligonucleotide
acacagcaacttttaacaattcgttgtcaacaatgttcggaaacaaatcatcagctat

SEQ ID NO: 136965 - DNA, 57 bp, Artificial
  Synthetic oligonucleotide
aattttattggaaacaaatcaccactctggttctgtctttcactctcaacagtgtat

SEQ ID NO: 136966 - DNA, 55 bp, Artificial
  Synthetic oligonucleotide
gagttgcagttagtaagacacaacctccagccctgtctatacacttttttacccc

SEQ ID NO: 136967 - DNA, 60 bp, Artificial
  Synthetic oligonucleotide
ttaagaaataattacgctgcaacctatcgatgacatgccaagtattattcaacaaatacg

SEQ ID NO: 136968 - DNA, 52 bp, Artificial
  Synthetic oligonucleotide
gaacgcctccctcatcgacacccgctcccctttacggggacagaccccctac

SEQ ID NO: 136969 - DNA, 53 bp, Artificial
  Synthetic oligonucleotide
aagtagattatcgtagtatttgggaggctggttccaaggagtgggggacgttc

SEQ ID NO: 136970 - DNA, 52 bp, Artificial
  Synthetic oligonucleotide
gaacgccttaacttgggcttataacgtctattatcccaccaagggacctaag

SEQ ID NO: 136971 - DNA, 55 bp, Artificial
  Synthetic oligonucleotide
gaacgggaaactaagcacgcccaagaaacgagaagtagccagaaagctactagag

SEQ ID NO: 136972 - DNA, 55 bp, Artificial
  Synthetic oligonucleotide
gaatatcgtataactccctactggagagttgaagcctggaaagtagtttactcgg

SEQ ID NO: 136973 - DNA, 55 bp, Artificial
  Synthetic oligonucleotide
aagagtgttctaatagagattcacagtggtttattaaaaattttgcacgattacg

SEQ ID NO: 136974 - DNA, 60 bp, Artificial
  Synthetic oligonucleotide
atctacacctgaaattctcattcttgttccatatgcatcctcaatcgggctgagctttaa

SEQ ID NO: 136975 - DNA, 55 bp, Artificial
  Synthetic oligonucleotide
aactctctttaaaactctcgacttaccagtcgaaggatctccaaccattaagata

SEQ ID NO: 136976 - DNA, 60 bp, Artificial
  Synthetic oligonucleotide
gaatcgtatccttaataggtatgactatcggagcattaattattcaccaacaatatgaga

SEQ ID NO: 136977 - DNA, 60 bp, Artificial
  Synthetic oligonucleotide
ttgtggagtataatacttccaagatgtagaattaagaacatattggatatcactatcact

SEQ ID NO: 136978 - DNA, 60 bp, Artificial
  Synthetic oligonucleotide
aacagcaagacaattggaaggagctgtaagattggccgaggcacatgctaaggcaagatt

SEQ ID NO: 136979 - DNA, 48 bp, Artificial
  Synthetic oligonucleotide
aaagaggaaaactaaactcccaacggaaattgtattaacttataaagt

SEQ ID NO: 136980 - DNA, 58 bp, Artificial
  Synthetic oligonucleotide
tttccagccaatttaatattatccaatactgcaatatgtggttttataactaaccata

SEQ ID NO: 136981 - DNA, 56 bp, Artificial
  Synthetic oligonucleotide
gatttgtaacattatcaatgccccctaccataattccataatgagtttttggaggt

SEQ ID NO: 136982 - DNA, 57 bp, Artificial
  Synthetic oligonucleotide
tctgaaggacaatttgtattagatattctctctttttacgacattgtagttgaaccc

SEQ ID NO: 136983 - DNA, 55 bp, Artificial
  Synthetic oligonucleotide
tctgattttaacgcagttttacgatgtatttaatcaaaaggaattctagtttcca

SEQ ID NO: 136984 - DNA, 58 bp, Artificial
  Synthetic oligonucleotide
ctggagctaaccctactggacataggatccgagaaagtagtagatatcgccaacctaa

SEQ ID NO: 136985 - DNA, 56 bp, Artificial
  Synthetic oligonucleotide
ggccttccctaactttccaaaatcatatactccactttcagggtcatataatatag

SEQ ID NO: 136986 - DNA, 55 bp, Artificial
  Synthetic oligonucleotide
gattacaaatactacttcggaaaatatccgcacggaaaattttcgcagtcagtag

SEQ ID NO: 136987 - DNA, 54 bp, Artificial
  Synthetic oligonucleotide
agcccctacaattctctctttgccctttaacctatcaacttcgttaatgtcaaa

SEQ ID NO: 136988 - DNA, 57 bp, Artificial
  Synthetic oligonucleotide
agcccagcacgattaacatttgggagtattgtacgattacgttaggacacaagagtg

SEQ ID NO: 136989 - DNA, 60 bp, Artificial
  Synthetic oligonucleotide
actggttcaaggttatctggctctccaattagacagaatctatactgggctgtggattga

SEQ ID NO: 136990 - DNA, 59 bp, Artificial
  Synthetic oligonucleotide
tgcctggtggaatcgattcacacagccacgttgcaggggcaaaggttaacgtcggaaga

SEQ ID NO: 136991 - DNA, 60 bp, Artificial
  Synthetic oligonucleotide
cttataggatattataaaagcgtgtgcatactgtacattatctatggctacagctaatgg

SEQ ID NO: 136992 - DNA, 58 bp, Artificial
  Synthetic oligonucleotide
tggcaactaatgagatataaacctttactcctctaacggaattaaagcaacaatatgc

SEQ ID NO: 136993 - DNA, 55 bp, Artificial
  Synthetic oligonucleotide
cttcctaaaatcctatggttagtggattgtatttttatccatgtgttaatttcac

SEQ ID NO: 136994 - DNA, 56 bp, Artificial
  Synthetic oligonucleotide
tggggttcgtagtgggtcaaatcagaggaggcgatgataacaaccctcctatttag

SEQ ID NO: 136995 - DNA, 60 bp, Artificial
  Synthetic oligonucleotide
accatacttatgcacataatgactgttaggatgagttttagatctaattattgtcctatg

SEQ ID NO: 136996 - DNA, 58 bp, Artificial
  Synthetic oligonucleotide
cgtcttgggctttggacctacctaagtatgcaacacacaaaagcccgtctatgcaata

SEQ ID NO: 136997 - DNA, 56 bp, Artificial
  Synthetic oligonucleotide
accagacatacattacttggtttggattatctgggataggaactccccaacttata

SEQ ID NO: 136998 - DNA, 57 bp, Artificial
  Synthetic oligonucleotide
gatgcaattataagcccatcctactactctggatttattgccttaacattgggggtt

SEQ ID NO: 136999 - DNA, 59 bp, Artificial
  Synthetic oligonucleotide
acatccctataaacgtcattgcatactttccatactcactttttccaccataagtgcta

SEQ ID NO: 137000 - DNA, 55 bp, Artificial
  Synthetic oligonucleotide
gataagtcaatacccgtatctccttccttgccaacaaaatctaacaacttcctta

SEQ ID NO: 137001 - DNA, 52 bp, Artificial
  Synthetic oligonucleotide
ccattatttccccctacataatgcaaaggtgttagggtattaagcctttagg

SEQ ID NO: 137002 - DNA, 59 bp, Artificial
  Synthetic oligonucleotide
gttggctctctcgccgattttgttgcataggtcttcaatcatactattatcttgtatat

SEQ ID NO: 137003 - DNA, 59 bp, Artificial
  Synthetic oligonucleotide
gagcaaagcccctattggtataccaggatgcatcgcctcgctaacgcttggcaatgcct

SEQ ID NO: 137004 - DNA, 55 bp, Artificial
  Synthetic oligonucleotide
tctcagggtccctttcgggttccccctcgagttcatcctttggggcgctgatgat

SEQ ID NO: 137005 - DNA, 51 bp, Artificial
  Synthetic oligonucleotide
cgtagtatttgggaggctggttccaaggagtgggggacgttccgggatttg

SEQ ID NO: 137006 - DNA, 58 bp, Artificial
  Synthetic oligonucleotide
ccacttaatagagcatactttaccattcctatcatagagatacctaacttcataatct

SEQ ID NO: 137007 - DNA, 58 bp, Artificial
  Synthetic oligonucleotide
atcatctctatggcttcatacggttcatttaagagtaagctcctaaagtaagccccta

SEQ ID NO: 137008 - DNA, 53 bp, Artificial
  Synthetic oligonucleotide
ttccgggatttggtccaggccctacttaaggctaagaagggggaggagctaga

SEQ ID NO: 137009 - DNA, 57 bp, Artificial
  Synthetic oligonucleotide
ttaagccgtctagaatgaggctcccgccgtgcattgaggccttggcgtttaggcccc

SEQ ID NO: 137010 - DNA, 50 bp, Artificial
  Synthetic oligonucleotide
aaggagtgggggacgttccgggatttggtccaggccctacttaaggctaa

SEQ ID NO: 137011 - DNA, 58 bp, Artificial
  Synthetic oligonucleotide
gagcttgatatgcctttaccatatttgcatcataaacaataactgcagtttggttctc

SEQ ID NO: 137012 - DNA, 54 bp, Artificial
  Synthetic oligonucleotide
attagggcatatgagggccttaagagtggggagattgaccctaggaaccttccg

SEQ ID NO: 137013 - DNA, 57 bp, Artificial
  Synthetic oligonucleotide
ggttaattccagagattaaaggacatgaacatgttaagaaagctatattcttgcaac

SEQ ID NO: 137014 - DNA, 57 bp, Artificial
  Synthetic oligonucleotide
gcataaaataacattgttatagatttacctgtcccttgtgcatgccatacaataccg

SEQ ID NO: 137015 - DNA, 57 bp, Artificial
  Synthetic oligonucleotide
tctcgtcccattggatagtataacgattgtagtaaattggacacagccgagtaggat

SEQ ID NO: 137016 - DNA, 57 bp, Artificial
  Synthetic oligonucleotide
caacgcacacaactatagttctcgtcgcttcgctccgagatgaccccaagctccacc

SEQ ID NO: 137017 - DNA, 57 bp, Artificial
  Synthetic oligonucleotide
caatgtcggaatgggagagaattactacagatacaaccttgatgaaagttcttattg

SEQ ID NO: 137018 - DNA, 56 bp, Artificial
  Synthetic oligonucleotide
atcatcaaccttagcgtccaaaaccataatattaaacctatcctttgccttgacag

SEQ ID NO: 137019 - DNA, 57 bp, Artificial
  Synthetic oligonucleotide
gttattgtgtgataacctggctcatagaatacacactctacaatcccgtatacatca

SEQ ID NO: 137020 - DNA, 57 bp, Artificial
  Synthetic oligonucleotide
agttgtagaattctattctatcctctatgcttagttgtttgtaaatgtcaaagccat

SEQ ID NO: 137021 - DNA, 57 bp, Artificial
  Synthetic oligonucleotide
gctaccacggaatggataaaagattcttgtagctagaagctctgttgggtatccttc

SEQ ID NO: 137022 - DNA, 54 bp, Artificial
  Synthetic oligonucleotide
taactcattaaggtagctctccaactttaccttatttaatacaacttccttatc

SEQ ID NO: 137023 - DNA, 57 bp, Artificial
  Synthetic oligonucleotide
taattgcatattacatttataagttggttgtacattgtttttgaaattctcccactg

SEQ ID NO: 137024 - DNA, 56 bp, Artificial
  Synthetic oligonucleotide
atctggcaataaactgtctaatggtggtagcactcttacaatacaatgcccatacc

SEQ ID NO: 137025 - DNA, 54 bp, Artificial
  Synthetic oligonucleotide
ggcttatgaggcaagcccacggctggttagggtacccctttgcagtaggaggtt

SEQ ID NO: 137026 - DNA, 55 bp, Artificial
  Synthetic oligonucleotide
ccttagtagattaaaagaatagtttccatcctccaagaggtctgattttaacgca

SEQ ID NO: 137027 - DNA, 56 bp, Artificial
  Synthetic oligonucleotide
atgtctcccctctcataagctttgtctaattcctgccattgctgtttaaattgtct

SEQ ID NO: 137028 - DNA, 54 bp, Artificial
  Synthetic oligonucleotide
ggagtctaagtatccctccttatgcctattcccacgccaaaaatccccccttga

SEQ ID NO: 137029 - DNA, 55 bp, Artificial
  Synthetic oligonucleotide
cgcggacataaccggcaatgacgtatgcttgttaattactgaccccaatggggtt

SEQ ID NO: 137030 - DNA, 55 bp, Artificial
  Synthetic oligonucleotide
taagatcctggtcgagaagcttactgagatatatgactgggatgagtcggcctac

SEQ ID NO: 137031 - DNA, 55 bp, Artificial
  Synthetic oligonucleotide
tatacgtcgaccggtacgaccttgtcgactccgccgcagtggccgtagcatccct

SEQ ID NO: 137032 - DNA, 55 bp, Artificial
  Synthetic oligonucleotide
cccgagttaatgggacaccctatctgtgagggacaagacaacctcaacgcggtac

SEQ ID NO: 137033 - DNA, 55 bp, Artificial
  Synthetic oligonucleotide
ccagacgacccggtgcttgccagggccgttatagtcttttacgcagggcatgccg

SEQ ID NO: 137034 - DNA, 54 bp, Artificial
  Synthetic oligonucleotide
gttctacgagccattctcgggcatcacatacaacaacagcgctaaaacatatac

SEQ ID NO: 137035 - DNA, 54 bp, Artificial
  Synthetic oligonucleotide
ggggtcgacgagacgcttgtgtatagcccggcaatggacatcaccaatcgcgct

SEQ ID NO: 137036 - DNA, 54 bp, Artificial
  Synthetic oligonucleotide
tacgaacgactgcttcgagaggacctgccagagcacgaggcatagcaggccagt

SEQ ID NO: 137037 - DNA, 54 bp, Artificial
  Synthetic oligonucleotide
tgggcggggaaatcaagctcttacggcatttaagcgcttgcacagtaaatcgcc

SEQ ID NO: 137038 - DNA, 53 bp, Artificial
  Synthetic oligonucleotide
attctcccacccacgcgagtaacccggtgtggaatttaggggatggtagtgga

SEQ ID NO: 137039 - DNA, 53 bp, Artificial
  Synthetic oligonucleotide
catctcggatatcagtgtaacgtatggcctgctcgcgctcatgtgaactcctg

SEQ ID NO: 137040 - DNA, 55 bp, Artificial
  Synthetic oligonucleotide
cataggcaactattttatgtgaggggcgcctactatatgcgatgattttcgggag

SEQ ID NO: 137041 - DNA, 53 bp, Artificial
  Synthetic oligonucleotide
gtaggcacgataacgatggccgggctcgctaaggaaatggctttcatggcgac

SEQ ID NO: 137042 - DNA, 53 bp, Artificial
  Synthetic oligonucleotide
ttttatacctacgcgccacaagtatctctagatgccagagaaccgatgtgacg

SEQ ID NO: 137043 - DNA, 52 bp, Artificial
  Synthetic oligonucleotide
acgagcagaggcgttaattcgatgcccgtcttatcgtgcaaataataggcat

SEQ ID NO: 137044 - DNA, 52 bp, Artificial
  Synthetic oligonucleotide
acttagcgtcgcttcgttcatggttcgttgtcttattcgtttgccatcaggc

SEQ ID NO: 137045 - DNA, 52 bp, Artificial
  Synthetic oligonucleotide
aagggttctctatgtcgtaccgggccttgaggtatactagcgcgtcgttata

SEQ ID NO: 137046 - DNA, 52 bp, Artificial
  Synthetic oligonucleotide
aaggcgatggtcgtgcactgcgacggtgaaaatgtcagggatgagctcgtta

SEQ ID NO: 137047 - DNA, 52 bp, Artificial
  Synthetic oligonucleotide
tcttatttgctctacaggtacctgaaatacacgtgcgacatcccgcgaatac

SEQ ID NO: 137048 - DNA, 52 bp, Artificial
  Synthetic oligonucleotide
agtccatgacgtgccccgtaggattggccggtgagttaatgaggattgcctt

SEQ ID NO: 137049 - DNA, 51 bp, Artificial
  Synthetic oligonucleotide
cggacttagtatcgctcaccgtcataggcgtgctactcatcacggaagcct

SEQ ID NO: 137050 - DNA, 50 bp, Artificial
  Synthetic oligonucleotide
gcctatgcactatatgcaaaagacggccgctacatgaccgttgatggcac

SEQ ID NO: 137051 - DNA, 55 bp, Artificial
  Synthetic oligonucleotide
ggaatttgttcaacaagtgccgccgtaatgtagacagtggtcgtgcactgcctgg

SEQ ID NO: 137052 - DNA, 50 bp, Artificial
  Synthetic oligonucleotide
ttcgggtcatgggatagtatggcgttcgcgtatccgaccgtgagcacgca

SEQ ID NO: 137053 - DNA, 50 bp, Artificial
  Synthetic oligonucleotide
agtccagccacggtgtgagggagggctatcgggaggtcgttcgtgaggtt

SEQ ID NO: 137054 - DNA, 50 bp, Artificial
  Synthetic oligonucleotide
agtacaggacgcccagtgccgctatgagcagtgcccttgtcacgaccccc

SEQ ID NO: 137055 - DNA, 50 bp, Artificial
  Synthetic oligonucleotide
agggtccgcactatgtccaggctgccctcgtagttgggcatcacgagcac

SEQ ID NO: 137056 - DNA, 50 bp, Artificial
  Synthetic oligonucleotide
aggctgcccatcaacaagatccgaccccacggaaagccccaggtgcctga

SEQ ID NO: 137057 - DNA, 50 bp, Artificial
  Synthetic oligonucleotide
aaaggcggccgtgcccgagtatacgatgacctcagcattccgcggtatcg

SEQ ID NO: 137058 - DNA, 50 bp, Artificial
  Synthetic oligonucleotide
aacaggactgcctcgccgttcgtaaaggcggccgtgcccgagtatacgat

SEQ ID NO: 137059 - DNA, 50 bp, Artificial
  Synthetic oligonucleotide
aacatgccccgaaatgaacaggggcactccctgggctgaaaccgccggcg

SEQ ID NO: 137060 - DNA, 50 bp, Artificial
  Synthetic oligonucleotide
aacccctgagcgtatccgtgctttcgacgggaagtgaggccatgcccata

SEQ ID NO: 137061 - DNA, 50 bp, Artificial
  Synthetic oligonucleotide
aacgatcacaggctcgaactcccccttcgagtcccggggaacgtccaggc

SEQ ID NO: 137062 - DNA, 55 bp, Artificial
  Synthetic oligonucleotide
cgatcatatggtcccacccctagctggcccacggtccttcttgctatacacctcg

SEQ ID NO: 137063 - DNA, 50 bp, Artificial
  Synthetic oligonucleotide
aactcatgggcccgaaaggaccgtagagcccccagagtcctccaaagcca

SEQ ID NO: 137064 - DNA, 50 bp, Artificial
  Synthetic oligonucleotide
aactccgtgaaactcagcgctctccgtgcccctgtggttggaccactcaa

SEQ ID NO: 137065 - DNA, 50 bp, Artificial
  Synthetic oligonucleotide
aagatctttgccagggcagcgggcctgaaaactccggaggacatacgggg

SEQ ID NO: 137066 - DNA, 50 bp, Artificial
  Synthetic oligonucleotide
acccccgggccgcggtacgtgatgtgaacgatgacatctacgtgaccgaa

SEQ ID NO: 137067 - DNA, 50 bp, Artificial
  Synthetic oligonucleotide
accgcggaagtgggcgagaactgggcttactacatgagcggcgccccatg

SEQ ID NO: 137068 - DNA, 50 bp, Artificial
  Synthetic oligonucleotide
accttcctgaagcccaggtccttatacggggtgcccatcgcaaggtcgga

SEQ ID NO: 137069 - DNA, 50 bp, Artificial
  Synthetic oligonucleotide
acgatcaggagtgggtccacacggcccgtgcacatcaggcgtatcagcct

SEQ ID NO: 137070 - DNA, 50 bp, Artificial
  Synthetic oligonucleotide
acgcccagtgccgctatgagcagtgcccttgtcacgacccccgtgaactc

SEQ ID NO: 137071 - DNA, 50 bp, Artificial
  Synthetic oligonucleotide
acgcggacagggatggcaccatgagggatacggcccagcgaaggatgttt

SEQ ID NO: 137072 - DNA, 50 bp, Artificial
  Synthetic oligonucleotide
acgtgtatgctcctgatgccgctcgtactcagagggttcgtgctggcccg

SEQ ID NO: 137073 - DNA, 55 bp, Artificial
  Synthetic oligonucleotide
acgagaatagtgccccggtcgtaggtgaggtgtatcatcgttaccagaatgcggg

SEQ ID NO: 137074 - DNA, 50 bp, Artificial
  Synthetic oligonucleotide
acgttcccgccctctacggtgacggatgtatgccgggacttctgcacgaa

SEQ ID NO: 137075 - DNA, 50 bp, Artificial
  Synthetic oligonucleotide
acttggcgacgcaggtcagggtccgcactatgtccaggctgccctcgtag

SEQ ID NO: 137076 - DNA, 50 bp, Artificial
  Synthetic oligonucleotide
agcccggggagatgaattagccttgcggagcatactagcgggctgcccct

SEQ ID NO: 137077 - DNA, 50 bp, Artificial
  Synthetic oligonucleotide
agccctacgggctgccgataattgtattggccaccaggcgtcggacggga

SEQ ID NO: 137078 - DNA, 50 bp, Artificial
  Synthetic oligonucleotide
agccgtattgtccgtaactccacggcacacttcggccagctcgttcccaa

SEQ ID NO: 137079 - DNA, 50 bp, Artificial
  Synthetic oligonucleotide
agcctagctcgacggccctccccaacccggcctcttggctaagcttttca

SEQ ID NO: 137080 - DNA, 50 bp, Artificial
  Synthetic oligonucleotide
agcgacgttaccggcctcaaccctgtgttcaggatgcacccgccccgcaa

SEQ ID NO: 137081 - DNA, 50 bp, Artificial
  Synthetic oligonucleotide
agcgctctccgtgcccctgtggttggaccactcaacgacggcataacata

SEQ ID NO: 137082 - DNA, 50 bp, Artificial
  Synthetic oligonucleotide
agcgggcctgaaaactccggaggacatacgggggaagacggactacgacc

SEQ ID NO: 137083 - DNA, 50 bp, Artificial
  Synthetic oligonucleotide
agctccttgagcggtggaaacgcattacgggcagcgtcccgatggctctc

SEQ ID NO: 137084 - DNA, 55 bp, Artificial
  Synthetic oligonucleotide
ggggacgcgctaagaaagggccagcatatcctcacgaagtctcaggaggtcgccc

SEQ ID NO: 137085 - DNA, 50 bp, Artificial
  Synthetic oligonucleotide
agctgccaggtctgtcgtatggcgctcaacgaccgcgtatgtccgtacct

SEQ ID NO: 137086 - DNA, 50 bp, Artificial
  Synthetic oligonucleotide
aggacgcggtataactcatcgagggccttaccgggctccctccagtggtg

SEQ ID NO: 137087 - DNA, 50 bp, Artificial
  Synthetic oligonucleotide
aggatcgggggaacaagcagcgcgggagaatccttccaccggggattcgt

SEQ ID NO: 137088 - DNA, 55 bp, Artificial
  Synthetic oligonucleotide
cgatacattcatcatgttatgatagtagaccgagaatgcgttggataccgtggtc

SEQ ID NO: 137089 - DNA, 55 bp, Artificial
  Synthetic oligonucleotide
cgaggagagggacatgctggcatactggccgtccttcacgactttcgagacagta

SEQ ID NO: 137090 - DNA, 55 bp, Artificial
  Synthetic oligonucleotide
cgacccctgatcagccggaatactgaacatacgctccgaactgcatgaaacgcca

SEQ ID NO: 137091 - DNA, 54 bp, Artificial
  Synthetic oligonucleotide
ataaaatcacggtcgaaaactcttacaatcgaataacacttaggacatatttta

SEQ ID NO: 137092 - DNA, 60 bp, Artificial
  Synthetic oligonucleotide
atgtatttgaggtctatccgtattatcacatagacatccaggtctcattccatcccctaa

SEQ ID NO: 137093 - DNA, 55 bp, Artificial
  Synthetic oligonucleotide
ggtgcaacgatagtactctacgagggtgcaatagactaccctgaacccgacagat

SEQ ID NO: 137094 - DNA, 55 bp, Artificial
  Synthetic oligonucleotide
gtatcgtccactatcgtccggtcaagtttagtatcgtccactatcgtccggtcac

SEQ ID NO: 137095 - DNA, 55 bp, Artificial
  Synthetic oligonucleotide
gtccatatccgatgtcatttcccagctgatttaacgtactgctccagagaagagt

SEQ ID NO: 137096 - DNA, 53 bp, Artificial
  Synthetic oligonucleotide
gtcctaagtgttattcgattgtaagagttttcgaccgtgattttatcaacggg

SEQ ID NO: 137097 - DNA, 55 bp, Artificial
  Synthetic oligonucleotide
gtcggtaccatgagtggaggtcttttcgtaggacaggaacactctgcatcattaa

SEQ ID NO: 137098 - DNA, 55 bp, Artificial
  Synthetic oligonucleotide
gtctgcggaatggcatcaaatgcaacccatggcggatatagaatgggagctgtat

SEQ ID NO: 137099 - DNA, 55 bp, Artificial
  Synthetic oligonucleotide
gtgagtgtcagctccgtttcttaaaagtgcccttactctttcgatgttgtagggg

SEQ ID NO: 137100 - DNA, 55 bp, Artificial
  Synthetic oligonucleotide
gtgcaacttccattgcgtggtggtcgcttaaacaaacgctaccttcgagtaagat

SEQ ID NO: 137101 - DNA, 55 bp, Artificial
  Synthetic oligonucleotide
gtgcagtcactaaccaagtaaatagggttgccactaacgcaagaaataccggatg

SEQ ID NO: 137102 - DNA, 55 bp, Artificial
  Synthetic oligonucleotide
gtggtatagcgtatcgtagctgtccatccaaccacgtgaaggctgtggtgcaacg

SEQ ID NO: 137103 - DNA, 60 bp, Artificial
  Synthetic oligonucleotide
tccatgaacagggtggacttgcagtatgtccccacccatacagcccgatttgtgaggcaa

SEQ ID NO: 137104 - DNA, 55 bp, Artificial
  Synthetic oligonucleotide
cattacgatgatggctgcaagtgttggtcagcagtccgttaggggtggtagggtc

SEQ ID NO: 137105 - DNA, 55 bp, Artificial
  Synthetic oligonucleotide
cattctaacgccctggaacattattggatcaggcgggattgatcctgtatcgaca

SEQ ID NO: 137106 - DNA, 55 bp, Artificial
  Synthetic oligonucleotide
ccaaacacgtgtccaagttatgactcaaatgttgtccaatcgggtgtacccagtt

SEQ ID NO: 137107 - DNA, 55 bp, Artificial
  Synthetic oligonucleotide
ccaagagaatttccaactgcaatacctggtaaatgtgcataggatgcataaacgc

SEQ ID NO: 137108 - DNA, 55 bp, Artificial
  Synthetic oligonucleotide
ccaagcggtattgttgatgcgtcgtctaatgactcaagaccgattccaccttcga

SEQ ID NO: 137109 - DNA, 55 bp, Artificial
  Synthetic oligonucleotide
ccaattgacggtggattgatggatactagactcggtgtcattgaccctggattag

SEQ ID NO: 137110 - DNA, 53 bp, Artificial
  Synthetic oligonucleotide
ccacttcggggtatggattccctaaatctttaaaggtagtggcagtacgcaac

SEQ ID NO: 137111 - DNA, 55 bp, Artificial
  Synthetic oligonucleotide
ccatgatgcatggtatactactgaaactgcagtatcttcggggtatccgccttcg

SEQ ID NO: 137112 - DNA, 55 bp, Artificial
  Synthetic oligonucleotide
ccattgtaatgagtatacgggtcctttaggtgagtagataaatggaactacaccg

SEQ ID NO: 137113 - DNA, 55 bp, Artificial
  Synthetic oligonucleotide
cccatcttctatgggacccctcgcctcctagaaggacggctgtctgttttcagga

SEQ ID NO: 137114 - DNA, 58 bp, Artificial
  Synthetic oligonucleotide
gctgatgttcgtatgtgttattccgaactcatggcttagttaataggaaataaacgaa

SEQ ID NO: 137115 - DNA, 55 bp, Artificial
  Synthetic oligonucleotide
cccctatctgccataattgttgccctatatgtagctgtttcgggtgttgcgaatg

SEQ ID NO: 137116 - DNA, 55 bp, Artificial
  Synthetic oligonucleotide
cccctcgaactatgtatgacccggcttatgacgttgaatgtacgaatatgactga

SEQ ID NO: 137117 - DNA, 55 bp, Artificial
  Synthetic oligonucleotide
cccctttgaactatttctgattttacgtcgtgatctagatctggatagagtgctc

SEQ ID NO: 137118 - DNA, 55 bp, Artificial
  Synthetic oligonucleotide
ccctaagtaatgtcattggaatatgggtgtgtgcattgtataatccgggaatagc

SEQ ID NO: 137119 - DNA, 54 bp, Artificial
  Synthetic oligonucleotide
ccctttaaagggactcgtctgtattttgccccgcatttacatctaaatccctgc

SEQ ID NO: 137120 - DNA, 55 bp, Artificial
  Synthetic oligonucleotide
ccgcaattgatacaatatggccgtttccccattccataagtgcaatgatgtatcc

SEQ ID NO: 137121 - DNA, 55 bp, Artificial
  Synthetic oligonucleotide
ccgcagaacttactgtattgctaaccgttgaagcaactgagccaatagtatcaga

SEQ ID NO: 137122 - DNA, 55 bp, Artificial
  Synthetic oligonucleotide
ccgcttcgtgacatttcattgctgtgaggtcacggcataatataaatggtgcagc

SEQ ID NO: 137123 - DNA, 55 bp, Artificial
  Synthetic oligonucleotide
aaaacgactctagctccaccgtatacgcaggatctttgtgtaatcatgcccggag

SEQ ID NO: 137124 - DNA, 54 bp, Artificial
  Synthetic oligonucleotide
aatagaccttttgggtgggtatagtcaattaaccaaggattacacttggagctc

SEQ ID NO: 137125 - DNA, 53 bp, Artificial
  Synthetic oligonucleotide
gaatcgtttcattttcccgcccgtaggattgtttaaactcgggggctgttgca

SEQ ID NO: 137126 - DNA, 55 bp, Artificial
  Synthetic oligonucleotide
aatccactttctaaaccgtgtatgtaagctgctgatacaataccaccgtcttgtg

SEQ ID NO: 137127 - DNA, 55 bp, Artificial
  Synthetic oligonucleotide
aattggagttacaccacaagacattgtcgattatgacctacccacccatcctttg

SEQ ID NO: 137128 - DNA, 52 bp, Artificial
  Synthetic oligonucleotide
aattggtaacgccatggtgtttaaaaccctgcttggaaccattgtagggccc

SEQ ID NO: 137129 - DNA, 55 bp, Artificial
  Synthetic oligonucleotide
acagtagaccccaataacccatcaacatatcctacttcgatacctaagacctcgg

SEQ ID NO: 137130 - DNA, 55 bp, Artificial
  Synthetic oligonucleotide
acagtcgcatgttataggcaggtatatcgtactgacatctgggaaattagtccag

SEQ ID NO: 137131 - DNA, 55 bp, Artificial
  Synthetic oligonucleotide
acattccccaagagtgtcaaaacctctccaatcgaacagaactgccgttatcaag

SEQ ID NO: 137132 - DNA, 55 bp, Artificial
  Synthetic oligonucleotide
acgtgaccgatttaattaagcacttgcctggtgttgcaatggtaggggaccacgc

SEQ ID NO: 137133 - DNA, 55 bp, Artificial
  Synthetic oligonucleotide
actctgatatcgcccgttagatcttcaactgtcacggaacaaaattcttttgccg

SEQ ID NO: 137134 - DNA, 55 bp, Artificial
  Synthetic oligonucleotide
agaggtatgtattcagggcggactacgcaataatatagatgtggagctccaatcc

SEQ ID NO: 137135 - DNA, 55 bp, Artificial
  Synthetic oligonucleotide
agcaccagagatgcatgattacaatgcaatacccacaccagaggaactatatcac

SEQ ID NO: 137136 - DNA, 58 bp, Artificial
  Synthetic oligonucleotide
attggaaccttaaagtcattctctacattatctagtccgcagtatgcaataaaggaac

SEQ ID NO: 137137 - DNA, 55 bp, Artificial
  Synthetic oligonucleotide
aggattaggtttgcactatggcggtgagagactcggtgccacagttgtaccgata

SEQ ID NO: 137138 - DNA, 55 bp, Artificial
  Synthetic oligonucleotide
atggaggttgtatcttagcaaattctgttgggctggggaaaacagatgtagcatg

SEQ ID NO: 137139 - DNA, 55 bp, Artificial
  Synthetic oligonucleotide
caaactctcgtgccctagcttggcatattttaaccgcaatatcgttaagtgatgc

SEQ ID NO: 137140 - DNA, 55 bp, Artificial
  Synthetic oligonucleotide
caagaggtggcggtactaatctgctattcctgagtcctaaaacgtgtatgtctcc

SEQ ID NO: 137141 - DNA, 55 bp, Artificial
  Synthetic oligonucleotide
caatcctattctcataccgctgtgtttaccgaaaggtcttctccagctagttcca

SEQ ID NO: 137142 - DNA, 55 bp, Artificial
  Synthetic oligonucleotide
cacgatctcgaggacaatggctacggaagaagagtaaactgccagagatgtgacg

SEQ ID NO: 137143 - DNA, 55 bp, Artificial
  Synthetic oligonucleotide
cagagtattagcaggtttagctccgaaatatccttcaacagcctgccataagaac

SEQ ID NO: 137144 - DNA, 55 bp, Artificial
  Synthetic oligonucleotide
cagtaacaccgctgatgaagcttccgctaaataccgtcattgaaacgactcccgg

SEQ ID NO: 137145 - DNA, 55 bp, Artificial
  Synthetic oligonucleotide
ctatgtctaagtttgacgcccctaagcttttagcataaatagacataagtggagc

SEQ ID NO: 137146 - DNA, 55 bp, Artificial
  Synthetic oligonucleotide
ctacttgtgcagtatcttcgttagttactcccgtagcacttataactcgtgcaac

SEQ ID NO: 137147 - DNA, 56 bp, Artificial
  Synthetic oligonucleotide
tcgaagtttccccaccgcttgcgccgataacgacaccaagtgttgaaagggagcca

SEQ ID NO: 137148 - DNA, 55 bp, Artificial
  Synthetic oligonucleotide
cgttcaaggtgcatgtgacatgggtgcacttccaaacgtattcccaggataccag

SEQ ID NO: 137149 - DNA, 55 bp, Artificial
  Synthetic oligonucleotide
cgttaggttacagacttcagatacccgacaaccggtgtcccacaagagccgcata

SEQ ID NO: 137150 - DNA, 55 bp, Artificial
  Synthetic oligonucleotide
cgttacaaacacgtgataatttggctgctaaacataatccaacagctcctgcgcc

SEQ ID NO: 137151 - DNA, 55 bp, Artificial
  Synthetic oligonucleotide
cgtcgatagtatccaataatgtagggtcttggacaattacaaagttcggtgcgta

SEQ ID NO: 137152 - DNA, 55 bp, Artificial
  Synthetic oligonucleotide
cgtccatgtcaagattttggactgcatttccgccgtattctaaagacaggtatgt

SEQ ID NO: 137153 - DNA, 55 bp, Artificial
  Synthetic oligonucleotide
cgtagccttcagtacctgctatcacataatcgccactttgtattaacgaggcttc

SEQ ID NO: 137154 - DNA, 55 bp, Artificial
  Synthetic oligonucleotide
cgtagatggggtaagctacgactaatgcaagcgcgttgttgacgtctttaatagt

SEQ ID NO: 137155 - DNA, 55 bp, Artificial
  Synthetic oligonucleotide
cgggcggcactgacaccgcatttaaactctacaagggcagttggacttatattca

SEQ ID NO: 137156 - DNA, 50 bp, Artificial
  Synthetic oligonucleotide
cgggatttaaaatcggaaattagggccactagtcggttggtagttacaaa

SEQ ID NO: 137157 - DNA, 55 bp, Artificial
  Synthetic oligonucleotide
cgcccactgcatcaagggagaataacttagcaccatgaatagtatcatatcctcc

SEQ ID NO: 137158 - DNA, 56 bp, Artificial
  Synthetic oligonucleotide
ggataaccctataaactccacctttgcccttcctaattataaggtatgcatcataa

SEQ ID NO: 137159 - DNA, 55 bp, Artificial
  Synthetic oligonucleotide
cgcattttgtgctttcgatctacaatttgcctgacacgatcaaccaaaagagcgg

SEQ ID NO: 137160 - DNA, 55 bp, Artificial
  Synthetic oligonucleotide
cgcataaagcagtctttcagtaccctgcactactgaactagggaaagacagccaa

SEQ ID NO: 137161 - DNA, 55 bp, Artificial
  Synthetic oligonucleotide
cgcaggtgcaaaagagtgccacgtaacggttaatggacttggcgagcgtgcggga

SEQ ID NO: 137162 - DNA, 55 bp, Artificial
  Synthetic oligonucleotide
cgcaagtttgtctagttcggaaactccgttgaatataacgactcgtggtttgatg

SEQ ID NO: 137163 - DNA, 53 bp, Artificial
  Synthetic oligonucleotide
cgaacgaatgaaattactataacctcattttctcggccctgaaacccgtcaac

SEQ ID NO: 137164 - DNA, 55 bp, Artificial
  Synthetic oligonucleotide
cgagttattcgccaacaacgcctgtaattcacagggtaattgatacgtggactga

SEQ ID NO: 137165 - DNA, 55 bp, Artificial
  Synthetic oligonucleotide
cgataggcgttactccaacattaagtgcgccttttagcattaccttatattcact

SEQ ID NO: 137166 - DNA, 54 bp, Artificial
  Synthetic oligonucleotide
ccgtttggcggttttacaagttcatctagtgactttccaataccgatatcttta

SEQ ID NO: 137167 - DNA, 55 bp, Artificial
  Synthetic oligonucleotide
ccgtgaattcttgcagcgctccttgacatatgttctaccgagtaatactgattaa

SEQ ID NO: 137168 - DNA, 55 bp, Artificial
  Synthetic oligonucleotide
ccggtcgagctgatgcgaggtagcctactactattgcagtaattaatccttcgat

SEQ ID NO: 137169 - DNA, 60 bp, Artificial
  Synthetic oligonucleotide
ggaagtagaaaaagcaccagagatgcatgattacaatgcaatacccacaccagaggaact

SEQ ID NO: 137170 - DNA, 55 bp, Artificial
  Synthetic oligonucleotide
ccggatgttgaatcgagtaacattggaccgtcccatacttcggaaacgaaatcaa

SEQ ID NO: 137171 - DNA, 54 bp, Artificial
  Synthetic oligonucleotide
gttattaccactacgatggtgaagactactggaacgacgatgaaacagttaccc

SEQ ID NO: 137172 - DNA, 54 bp, Artificial
  Synthetic oligonucleotide
gttctcagacgataacggcaggatgtatttaactgcactcgacccttattacta

SEQ ID NO: 137173 - DNA, 54 bp, Artificial
  Synthetic oligonucleotide
atcctccattctgattctataatcattgtagaggggcgggcggatgtattaact

SEQ ID NO: 137174 - DNA, 54 bp, Artificial
  Synthetic oligonucleotide
aaatccctacattgacatgcttgaccattttctcggagtttcctaaattcctca

SEQ ID NO: 137175 - DNA, 54 bp, Artificial
  Synthetic oligonucleotide
cacttcccgtatagaatctgtccccatgacgcttgggatacctaaacgagatgc

SEQ ID NO: 137176 - DNA, 54 bp, Artificial
  Synthetic oligonucleotide
caggtaaagatattgagctcactgcggaaggatatacaacagactgctatccta

SEQ ID NO: 137177 - DNA, 54 bp, Artificial
  Synthetic oligonucleotide
cctaatgtggttccagcaacgctgtttacgatccagtttacgaggtctcttgtg

SEQ ID NO: 137178 - DNA, 54 bp, Artificial
  Synthetic oligonucleotide
agaccgcttgccatgactgccccaccggtaaatccgcttagcattgcaccgtaa

SEQ ID NO: 137179 - DNA, 54 bp, Artificial
  Synthetic oligonucleotide
gtagtggatgagattgtagagcttagggatggtagctattcaccacttgattat

SEQ ID NO: 137180 - DNA, 60 bp, Artificial
  Synthetic oligonucleotide
gtccgcagagcgaaagtgcaactgcgatatatcctccatccctgcaccagacgtgcctgt

SEQ ID NO: 137181 - DNA, 54 bp, Artificial
  Synthetic oligonucleotide
gccataacagtcagcagattcttcgtatcgttgaagaccataaagggattttcc

SEQ ID NO: 137182 - DNA, 54 bp, Artificial
  Synthetic oligonucleotide
acacagtttattacagggagctccttggtgggtagccggtaaagtagccagggc

SEQ ID NO: 137183 - DNA, 53 bp, Artificial
  Synthetic oligonucleotide
aacacgaggtagtttcctcgagtgtcaacttctattgctgatacatcatccac

SEQ ID NO: 137184 - DNA, 53 bp, Artificial
  Synthetic oligonucleotide
aggattgtaatttatacgccattcaacagatggactgccatcatagttataca

SEQ ID NO: 137185 - DNA, 51 bp, Artificial
  Synthetic oligonucleotide
tacggacttggtaaattagtaggtgcatttactaaaggtctaagggttacg

SEQ ID NO: 137186 - DNA, 53 bp, Artificial
  Synthetic oligonucleotide
tccaacgtatcctgttgcgacgagtttttctgcaagtgggcacggccctccaa

SEQ ID NO: 137187 - DNA, 53 bp, Artificial
  Synthetic oligonucleotide
ctgaacatgggctcgccttgatccatgcatatctccacgtagtggcttgtagt

SEQ ID NO: 137188 - DNA, 53 bp, Artificial
  Synthetic oligonucleotide
acggaactcccgtaaactttgatataacaggcgattattatctagtacccctg

SEQ ID NO: 137189 - DNA, 53 bp, Artificial
  Synthetic oligonucleotide
atggtctgctatgttttgaattgccgtgctaaatccaggttctgctccaatta

SEQ ID NO: 137190 - DNA, 53 bp, Artificial
  Synthetic oligonucleotide
tctccgggcatcattggaccgcctgtgacaacgataaatggtatatttagtct

SEQ ID NO: 137191 - DNA, 60 bp, Artificial
  Synthetic oligonucleotide
aaactcatggcaatatcattataacacaatcgtgacaactcagatacacgaagaccaaag

SEQ ID NO: 137192 - DNA, 53 bp, Artificial
  Synthetic oligonucleotide
ggtgtgggtcttactgcaggggtggtccaggaaaggaccgaaatcggggacag

SEQ ID NO: 137193 - DNA, 53 bp, Artificial
  Synthetic oligonucleotide
ggttgtgacgattaccactccgtcaatgtcggggatagcctgtagtgtcgtta

SEQ ID NO: 137194 - DNA, 53 bp, Artificial
  Synthetic oligonucleotide
gttagaaacaatatattctacatatagtagcttagatgacgacataaaaaaga

SEQ ID NO: 137195 - DNA, 53 bp, Artificial
  Synthetic oligonucleotide
cctgatctgttaaatctcgctcaatttctctcgctaaaatatacgactcgcta

SEQ ID NO: 137196 - DNA, 52 bp, Artificial
  Synthetic oligonucleotide
aaaggtcttcacagtagtatgaggaaacaattgacccataggtctgctattg

SEQ ID NO: 137197 - DNA, 52 bp, Artificial
  Synthetic oligonucleotide
gggagcaatacgaatggcaaaagttgcatccaatatattaaattgcccctac

SEQ ID NO: 137198 - DNA, 52 bp, Artificial
  Synthetic oligonucleotide
tgtgcgcagtagttaaaatacctcttgtaaatggtgctaaatggggcgtaaa

SEQ ID NO: 137199 - DNA, 52 bp, Artificial
  Synthetic oligonucleotide
acaacgagaagtatgaagctctcggctatacaataggtagtggttatccaag

SEQ ID NO: 137200 - DNA, 52 bp, Artificial
  Synthetic oligonucleotide
ggcagtatcttgtaataccacaggattatgtaggacgctatatgccataaac

SEQ ID NO: 137201 - DNA, 52 bp, Artificial
  Synthetic oligonucleotide
gaatggagttttggaaatgagggacgaaactgtccatattaaaggggagctc

SEQ ID NO: 137202 - DNA, 57 bp, Artificial
  Synthetic oligonucleotide
taaactgcggtcactgcggatacaactgcaagggttttgcgaacaagttagcctcgg

SEQ ID NO: 137203 - DNA, 53 bp, Artificial
  Synthetic oligonucleotide
tgataaaagacggtgcaacagcccccgagtttaaacaatcctacgggcgggaa

SEQ ID NO: 137204 - DNA, 52 bp, Artificial
  Synthetic oligonucleotide
gaatgggctacccaatattaggtcagtattcaaacggtacagcagtcagtgg

SEQ ID NO: 137205 - DNA, 51 bp, Artificial
  Synthetic oligonucleotide
aaacccgattggagaaatgaaggggacaactacgcacgaatgatggtaaga

SEQ ID NO: 137206 - DNA, 51 bp, Artificial
  Synthetic oligonucleotide
ttgccttagcgtgttctaatatacctgcaacatagttcatacaggttgcac

SEQ ID NO: 137207 - DNA, 51 bp, Artificial
  Synthetic oligonucleotide
ttgcattggtggtatttgaacctaagtactgtatactcccaccgtgatttt

SEQ ID NO: 137208 - DNA, 51 bp, Artificial
  Synthetic oligonucleotide
atgcgattcggtttattgtatgccgataaacgtcggaagcggaactgtaag

SEQ ID NO: 137209 - DNA, 51 bp, Artificial
  Synthetic oligonucleotide
tgtgcccgattaaactttcgataatttcaagacccttacttacgggagtcc

SEQ ID NO: 137210 - DNA, 51 bp, Artificial
  Synthetic oligonucleotide
gctaatacttcggggtttatctcgcctaaattctccaatttatacaaatag

SEQ ID NO: 137211 - DNA, 51 bp, Artificial
  Synthetic oligonucleotide
gctccctgtaattgatgatgattcatgtataacatgtgcgttatgtgtgga

SEQ ID NO: 137212 - DNA, 51 bp, Artificial
  Synthetic oligonucleotide
atctacgcaggataatttatgacgtccgtagcccgtagcaactattttatc

SEQ ID NO: 137213 - DNA, 51 bp, Artificial
  Synthetic oligonucleotide
caataccgcattaacaacacatcctgccagtgctaccgtagatagcgtaac

SEQ ID NO: 137214 - DNA, 58 bp, Artificial
  Synthetic oligonucleotide
aatctttcatccatacattccgtgtttttatgaagtccaggtataactattgcaggaa

SEQ ID NO: 137215 - DNA, 51 bp, Artificial
  Synthetic oligonucleotide
ggtgagtgccaatattatgggcataccttgtgattcagagttatatattgg

SEQ ID NO: 137216 - DNA, 51 bp, Artificial
  Synthetic oligonucleotide
ctggtaggagtccaatggtggcaattagggttagttctataaaaccacgag

SEQ ID NO: 137217 - DNA, 51 bp, Artificial
  Synthetic oligonucleotide
gacgagaacaactctattacattatccggctgtattagcccaagtccataa

SEQ ID NO: 137218 - DNA, 51 bp, Artificial
  Synthetic oligonucleotide
gtggttaatattggggcagaagattacttgaaagtagatacaaacgcgaga

SEQ ID NO: 137219 - DNA, 51 bp, Artificial
  Synthetic oligonucleotide
agcgcatacgtactctgcatcttaagtacattattatgcgttatatacggg

SEQ ID NO: 137220 - DNA, 51 bp, Artificial
  Synthetic oligonucleotide
cgctctaatagccctaatagcccttggcgctctctttgttgtaggtgattt

SEQ ID NO: 137221 - DNA, 51 bp, Artificial
  Synthetic oligonucleotide
gtcatggtaattacgcacgacccggttctcgcattaatgactacacggcgg

SEQ ID NO: 137222 - DNA, 51 bp, Artificial
  Synthetic oligonucleotide
cgtattctatatccgatatcccgttcaaaatcagtacatccatgtccgtta

SEQ ID NO: 137223 - DNA, 50 bp, Artificial
  Synthetic oligonucleotide
cggcctttccaataacgtcactatatcgttcgtcttcaggatgtaccact

SEQ ID NO: 137224 - DNA, 50 bp, Artificial
  Synthetic oligonucleotide
agtaccgagtaagtagtgcgtattctcaaaggtagctgtccagtttctca

SEQ ID NO: 137225 - DNA, 59 bp, Artificial
  Synthetic oligonucleotide
tgcaattacaaaacttgcacacaggtataatgcgcctattatcggaaccccttatacat

SEQ ID NO: 137226 - DNA, 50 bp, Artificial
  Synthetic oligonucleotide
gtttgtaagccacattccacccattgcggtactccaaattactcctgaaa

SEQ ID NO: 137227 - DNA, 50 bp, Artificial
  Synthetic oligonucleotide
gattatgaagcaacattttacacttataaaaccaatggatgcaaaagctg

SEQ ID NO: 137228 - DNA, 50 bp, Artificial
  Synthetic oligonucleotide
ttatccgaaggatgatggacgaaagtcaggcagtaactggtcttgcttca

SEQ ID NO: 137229 - DNA, 50 bp, Artificial
  Synthetic oligonucleotide
gttttcggtggtttcatgaacacgggcgctcaaatttacagaaatagtag

SEQ ID NO: 137230 - DNA, 50 bp, Artificial
  Synthetic oligonucleotide
aagaccgaaaatgtatatatgttggtagctccaacagcatccttggtagg

SEQ ID NO: 137231 - DNA, 50 bp, Artificial
  Synthetic oligonucleotide
agcatggacaaattaatggacggcccaagagccggccttcttgcagggga

SEQ ID NO: 137232 - DNA, 50 bp, Artificial
  Synthetic oligonucleotide
aagccccatcggatttcaagtccgacgcctttgaccaagctcaaccacct

SEQ ID NO: 137233 - DNA, 50 bp, Artificial
  Synthetic oligonucleotide
tggtgcaatggcgttagtaatgtccttggtaatgactctagtaaatcgag

SEQ ID NO: 137234 - DNA, 50 bp, Artificial
  Synthetic oligonucleotide
aagccccatttctataagtggagcgtctatgtctcctttcggcatattat

SEQ ID NO: 137235 - DNA, 50 bp, Artificial
  Synthetic oligonucleotide
aatgcgtggagtgatgtataactttgacccatacgttcagacgagtgaaa

SEQ ID NO: 137236 - DNA, 57 bp, Artificial
  Synthetic oligonucleotide
aatcaattaagaagatggataatatccaaagaaggacaaataaatacattaccaaga

SEQ ID NO: 137237 - DNA, 50 bp, Artificial
  Synthetic oligonucleotide
gggactaagtcccgcaatgtcaattggaactgtaattagtaatatgcggg

SEQ ID NO: 137238 - DNA, 50 bp, Artificial
  Synthetic oligonucleotide
tgaattacgttcttgcggtgattacccaatttaagtcaggggacgttagt

SEQ ID NO: 137239 - DNA, 50 bp, Artificial
  Synthetic oligonucleotide
ctgcaagcattaatgtggctccaaattcccctatactcctagcccatgca

SEQ ID NO: 137240 - DNA, 50 bp, Artificial
  Synthetic oligonucleotide
gtagtctaaccattctgatacgagtctttcgtacactcttacaatgtctc

SEQ ID NO: 137241 - DNA, 50 bp, Artificial
  Synthetic oligonucleotide
gagctttcccgtacataacgttcagcgccatgaaccacacagacaatacg

SEQ ID NO: 137242 - DNA, 50 bp, Artificial
  Synthetic oligonucleotide
tcggttaccactgcaacgggcgggggacttacggctaatgtggtgagaga

SEQ ID NO: 137243 - DNA, 50 bp, Artificial
  Synthetic oligonucleotide
gagctccatagcagcagatacatcctccccttttgatattcctgccccac

SEQ ID NO: 137244 - DNA, 50 bp, Artificial
  Synthetic oligonucleotide
taattccaaaccgtggtaattattgaataccaacccatgtattgagggcc

SEQ ID NO: 137245 - DNA, 50 bp, Artificial
  Synthetic oligonucleotide
gttcaatctgggttcttcccgcatctcttattaaactgcacggaagtcct

SEQ ID NO: 137246 - DNA, 50 bp, Artificial
  Synthetic oligonucleotide
acgctaattggaacgcatactgcaaacccgattacaggagacttctcagt

SEQ ID NO: 137247 - DNA, 59 bp, Artificial
  Synthetic oligonucleotide
gatgtagggttgagctcagaaggtgaagctaaaataatggtggggtatttgcgtcaatg

SEQ ID NO: 137248 - DNA, 56 bp, Artificial
  Synthetic oligonucleotide
tgccccacctctcgcttctggcccgtaactttgcgtttgaacggattctttctcac

SEQ ID NO: 137249 - DNA, 60 bp, Artificial
  Synthetic oligonucleotide
cgagcttggaattccattcagcgatcctgttgcagacggaccaacgattcaagcggcaga

SEQ ID NO: 137250 - DNA, 55 bp, Artificial
  Synthetic oligonucleotide
ggtcaggagtccttaaacaatgtttctaatacggtaaattctgcttattcagtac

SEQ ID NO: 137251 - DNA, 59 bp, Artificial
  Synthetic oligonucleotide
gcaacctatattaaaatacatacgggatattgtggttgccacaaggaatgataatcgta

SEQ ID NO: 137252 - DNA, 52 bp, Artificial
  Synthetic oligonucleotide
ctgccgcctaaaagttgcccttcgaggtctctttccgcttcccaccttaaaa

SEQ ID NO: 137253 - DNA, 60 bp, Artificial
  Synthetic oligonucleotide
tacgggccaggcattgcgcttgactgcgaataccatgaaggaatgcactactggtcagac

SEQ ID NO: 137254 - DNA, 60 bp, Artificial
  Synthetic oligonucleotide
ttaaaggtgagctcatgcaatctcttcaaactatccctatctataacaataaaccaggta

SEQ ID NO: 137255 - DNA, 60 bp, Artificial
  Synthetic oligonucleotide
ttacaattacgatttacaggattattcaaacttaattgatataatcatccctatgtgtga

SEQ ID NO: 137256 - DNA, 50 bp, Artificial
  Synthetic oligonucleotide
aaactccgggctttatgacccaggtactgtccccgatttcggtcctttcc

SEQ ID NO: 137257 - DNA, 52 bp, Artificial
  Synthetic oligonucleotide
attccgcggggtcaaaaataatagttttttcgtaacattgggatgatataaa

SEQ ID NO: 137258 - DNA, 59 bp, Artificial
  Synthetic oligonucleotide
tccattcagcgatcctgttgcagacggaccaacgattcaagcggcagatgtaagggcac

SEQ ID NO: 137259 - DNA, 59 bp, Artificial
  Synthetic oligonucleotide
tgaacaatatcatctcgttctttgtagacatcaaatattcttcctgtgtggtttgtgag

SEQ ID NO: 137260 - DNA, 58 bp, Artificial
  Synthetic oligonucleotide
gaagatggataatatccaaagaaggacaaataaatacattaccaagagccgataagga

SEQ ID NO: 137261 - DNA, 58 bp, Artificial
  Synthetic oligonucleotide
attgatagagttgttcctatactatgtttcgcataggcactgataattgaaattgtat

SEQ ID NO: 137262 - DNA, 58 bp, Artificial
  Synthetic oligonucleotide
caactccaatcatgccgcaggtgtcgagttctgaagctctgagcgcccccatcgaacc

SEQ ID NO: 137263 - DNA, 53 bp, Artificial
  Synthetic oligonucleotide
ccaggtactgtccccgatttcggtcctttcctggaccacccctgcagtaagac

SEQ ID NO: 137264 - DNA, 56 bp, Artificial
  Synthetic oligonucleotide
tactgtatatgtaaataactgattaattaaacaactaaacacagtgattaaacacg

SEQ ID NO: 137265 - DNA, 53 bp, Artificial
  Synthetic oligonucleotide
tcttactgcaggggtggtccaggaaaggaccgaaatcggggacagtacctggg

SEQ ID NO: 137266 - DNA, 52 bp, Artificial
  Synthetic oligonucleotide
actttagaaaaccacccgatagtaattaacgccccaatagcgaatatattaa

SEQ ID NO: 137267 - DNA, 58 bp, Artificial
  Synthetic oligonucleotide
tcatgcttgtgtctgatgcgagtgcaccttcacatggccagccgtatgctgaagccct

SEQ ID NO: 137268 - DNA, 58 bp, Artificial
  Synthetic oligonucleotide
cggcggaaagcagatggctgtgcaagttccaaccgcaagattggacgtagctgcagaa

SEQ ID NO: 137269 - DNA, 51 bp, Artificial
  Synthetic oligonucleotide
aggggtggtccaggaaaggaccgaaatcggggacagtacctgggtcataaa

SEQ ID NO: 137270 - DNA, 53 bp, Artificial
  Synthetic oligonucleotide
cggaagttttggttaaagttggactaattgattacaaaccattagatatcacg

SEQ ID NO: 137271 - DNA, 57 bp, Artificial
  Synthetic oligonucleotide
tacttgtccacggcgtaaatgcatgagctgggcccataagtccgcctaaatcccgta

SEQ ID NO: 137272 - DNA, 55 bp, Artificial
  Synthetic oligonucleotide
cgtatgtgttattccgaactcatggcttagttaataggaaataaacgaaaatcga

SEQ ID NO: 137273 - DNA, 57 bp, Artificial
  Synthetic oligonucleotide
ctgcagctacgtccaatcttgcggttggaacttgcacagccatctgctttccgccgt

SEQ ID NO: 137274 - DNA, 56 bp, Artificial
  Synthetic oligonucleotide
ccgataatatcggacataggataccatggatactacataaacatatttcttgctgg

SEQ ID NO: 137275 - DNA, 56 bp, Artificial
  Synthetic oligonucleotide
ggggataatgaaaccgtgaccaacgccaaccagtatacaagcacgtacgccccgca

SEQ ID NO: 137276 - DNA, 54 bp, Artificial
  Synthetic oligonucleotide
aatcaagggatatgtctctaccaggtaaaaaagaacaaccttgtggtgataagg

SEQ ID NO: 137277 - DNA, 56 bp, Artificial
  Synthetic oligonucleotide
cagcatatgtagcatggcttttaagagctacaagaggatatgctataaaaatcgtt

SEQ ID NO: 137278 - DNA, 52 bp, Artificial
  Synthetic oligonucleotide
cgagtaagtggggcttactcgctaccgatacccccttaaattaatgtcccca

SEQ ID NO: 137279 - DNA, 55 bp, Artificial
  Synthetic oligonucleotide
gcattggaatacggaggaagtgctgtaaaagccctaaacatggatgaaagaatgg

SEQ ID NO: 137280 - DNA, 55 bp, Artificial
  Synthetic oligonucleotide
gcccagtttccaatgtttctaccctgttcaagtactaattctcttatacaggtac

SEQ ID NO: 137281 - DNA, 55 bp, Artificial
  Synthetic oligonucleotide
ggaacgttcataggtgggtttattaacctgataagtgcttcatctgcgctgtttg

SEQ ID NO: 137282 - DNA, 55 bp, Artificial
  Synthetic oligonucleotide
gcccttcatgtcttgtcgtaggatttatctctaccgtcttacccattagatcacc

SEQ ID NO: 137283 - DNA, 55 bp, Artificial
  Synthetic oligonucleotide
ggaaacatcgcagataccatgaagatgttgagattacaccgagtaaaccactgtg

SEQ ID NO: 137284 - DNA, 55 bp, Artificial
  Synthetic oligonucleotide
gcctacatcgcaataggtgcggggctttgcacggtgtgtgttacgggtgtatctc

SEQ ID NO: 137285 - DNA, 55 bp, Artificial
  Synthetic oligonucleotide
gcggagcttgttcaatttgcactaatgggaggggcaagcaacatagcaaccgtaa

SEQ ID NO: 137286 - DNA, 60 bp, Artificial
  Synthetic oligonucleotide
agcccacactcccctgaacataaacggtgccacctctcatagagtgtcccgtagcatcgc

SEQ ID NO: 137287 - DNA, 55 bp, Artificial
  Synthetic oligonucleotide
gcgcatccacgtggtgtgatgaagttccaattacgggaacaattgtaccatgcta

SEQ ID NO: 137288 - DNA, 55 bp, Artificial
  Synthetic oligonucleotide
gcattaccatttagtctatatgttcttgctacggaatactccaacgccgaggagc

SEQ ID NO: 137289 - DNA, 55 bp, Artificial
  Synthetic oligonucleotide
gcatccgccatattcaaagtacattgcccagttgtttccagggaagctagttcca

SEQ ID NO: 137290 - DNA, 55 bp, Artificial
  Synthetic oligonucleotide
gcaggaggtcagtctgcaagaaggctagagagacttatcgatgatgctgcacacc

SEQ ID NO: 137291 - DNA, 55 bp, Artificial
  Synthetic oligonucleotide
gataggtttgagtcataccttcctaattttggattacatgctgccaatgttgcac

SEQ ID NO: 137292 - DNA, 55 bp, Artificial
  Synthetic oligonucleotide
gagacgacttgaaaatgatgggcgctacaaacgatatggttctctacggaggtag

SEQ ID NO: 137293 - DNA, 55 bp, Artificial
  Synthetic oligonucleotide
gagacactgttggatttatacctggtgtagatgatgagctccctccaatgtatgg

SEQ ID NO: 137294 - DNA, 55 bp, Artificial
  Synthetic oligonucleotide
gacgggattgcttaccctgcatttcggggttcaaacatgattacttcaattgcga

SEQ ID NO: 137295 - DNA, 55 bp, Artificial
  Synthetic oligonucleotide
gacagtgaaccatctatcagtccccttataacataacgggtatcgaactcctgct

SEQ ID NO: 137296 - DNA, 55 bp, Artificial
  Synthetic oligonucleotide
gacagccccaattttatgaagtccaagcatgcagaaccagaattcgtacctgctc

SEQ ID NO: 137297 - DNA, 57 bp, Artificial
  Synthetic oligonucleotide
tagaaaaactccacaattatggaggttgtatcttagcaaattctgttgggctgggga

SEQ ID NO: 137298 - DNA, 55 bp, Artificial
  Synthetic oligonucleotide
gaagtctgccatatgtgcggatcatataaacgaaaactctggcaagaccctcaaa

SEQ ID NO: 137299 - DNA, 55 bp, Artificial
  Synthetic oligonucleotide
cttgcagttccacccggagcatttggctcgtcacaatatatgcagtcaagtgggc

SEQ ID NO: 137300 - DNA, 55 bp, Artificial
  Synthetic oligonucleotide
ctcgcagaagagtgctctgtaagggatgcaatttacgaacaccgaactggaactt

SEQ ID NO: 137301 - DNA, 52 bp, Artificial
  Synthetic oligonucleotide
ctcccggaatatctcctaaaacgatagggccaccaacttttctaatttcaac

SEQ ID NO: 137302 - DNA, 55 bp, Artificial
  Synthetic oligonucleotide
ctcatagctgagttatacagtccagatatagcattgcttccagtgggtggaagat

SEQ ID NO: 137303 - DNA, 55 bp, Artificial
  Synthetic oligonucleotide
gttgcagttatcggggattctacgttctggcattccggtgttactggattaatcg

SEQ ID NO: 137304 - DNA, 55 bp, Artificial
  Synthetic oligonucleotide
taagtaataagtctggggtacataagcagtcccgtgtacattacttattgtgaag

SEQ ID NO: 137305 - DNA, 55 bp, Artificial
  Synthetic oligonucleotide
taatccctcaaatgaacaggacaaaatccgtaggcataatatttatccccggagc

SEQ ID NO: 137306 - DNA, 55 bp, Artificial
  Synthetic oligonucleotide
tacccgctgtttgtgtaccttggaccttggggttcaggaatgattccattcaacg

SEQ ID NO: 137307 - DNA, 55 bp, Artificial
  Synthetic oligonucleotide
tataacacaatcgtgacaactcagatacacgaagaccaaagtgacgagctaaggg

SEQ ID NO: 137308 - DNA, 60 bp, Artificial
  Synthetic oligonucleotide
gagcgggatctattctcatagtcctatcttcacatctaacagcgtcaataggaacatgaa

SEQ ID NO: 137309 - DNA, 55 bp, Artificial
  Synthetic oligonucleotide
tcacatgttccccacaggtaaatatatccattgcagcatacccgagctcaggcca

SEQ ID NO: 137310 - DNA, 55 bp, Artificial
  Synthetic oligonucleotide
tcatggcatactgagagcatagccgaaactgaatcaagtattcttccgcaagaag

SEQ ID NO: 137311 - DNA, 55 bp, Artificial
  Synthetic oligonucleotide
tccgtaagaggacaaatattcgaaggaatcgttacaagtgacaaaggacacgaca

SEQ ID NO: 137312 - DNA, 55 bp, Artificial
  Synthetic oligonucleotide
tccgtgttccataatgcatatttgtcgaaagtccgccgatatcatgagaatcgca

SEQ ID NO: 137313 - DNA, 55 bp, Artificial
  Synthetic oligonucleotide
tccttctgaaactgcagtaattatcgaagaattacttccaaggctcattatcgtg

SEQ ID NO: 137314 - DNA, 55 bp, Artificial
  Synthetic oligonucleotide
tcggtgtaatctcaacatcttcatggtatctgcgatgtttcctctaacacctacg

SEQ ID NO: 137315 - DNA, 55 bp, Artificial
  Synthetic oligonucleotide
tgaggtatggcgtccgtcgatttactatggtatgtttgggtagatatgttcggag

SEQ ID NO: 137316 - DNA, 55 bp, Artificial
  Synthetic oligonucleotide
tgtaccttggaccttggggttcaggaatgattccattcaacgattacgctggaag

SEQ ID NO: 137317 - DNA, 55 bp, Artificial
  Synthetic oligonucleotide
ttgatttacctaaagcgtctaatggtctttgtgtatccatcatattcgcacctcg

SEQ ID NO: 137318 - DNA, 55 bp, Artificial
  Synthetic oligonucleotide
ttgcaagaataacgcccgttataatctgtggcatagctgacgggactacaatttg

SEQ ID NO: 137319 - DNA, 54 bp, Artificial
  Synthetic oligonucleotide
gaccgtgattttatcaacggggttataagaccggttaaagttccagagtgctgc

SEQ ID NO: 137320 - DNA, 55 bp, Artificial
  Synthetic oligonucleotide
ttggtgttaaataccaattcaatccctcaagagctccgggtaatgttagtcctct

SEQ ID NO: 137321 - DNA, 53 bp, Artificial
  Synthetic oligonucleotide
ttttaggaaacgttctctcttacgcaagacttttagctttatgtttagctacg

SEQ ID NO: 137322 - DNA, 55 bp, Artificial
  Synthetic oligonucleotide
ggacaggtaagtccaacaaaggcaataggtcccgtaaatgctacaatggtggctg

SEQ ID NO: 137323 - DNA, 54 bp, Artificial
  Synthetic oligonucleotide
ggacccgcagggttaatcatcctttcaacttcgagagttgtaattacgttgtcg

SEQ ID NO: 137324 - DNA, 55 bp, Artificial
  Synthetic oligonucleotide
ggaggtcaatcatgtagtgttctccaccgggtttgattgatgcaatgtgtggaac

SEQ ID NO: 137325 - DNA, 55 bp, Artificial
  Synthetic oligonucleotide
ggatctccatgctatttccaaaacataaccgtcctgtataagcactaatgcgtcc

SEQ ID NO: 137326 - DNA, 55 bp, Artificial
  Synthetic oligonucleotide
gggcataactaccactatggcaattaatacacgattaggcagagctcctacaacg

SEQ ID NO: 137327 - DNA, 55 bp, Artificial
  Synthetic oligonucleotide
gggtaaatgcaggattacactacgtatatgttggcaacgttccttatggtactgg

SEQ ID NO: 137328 - DNA, 55 bp, Artificial
  Synthetic oligonucleotide
ggtcccctttaagtgcttcgactgcaccaaactgtgcgaatgatgttgcacatgc

SEQ ID NO: 137329 - DNA, 55 bp, Artificial
  Synthetic oligonucleotide
ggtcgacgttaacaaaaggtggaatagtatgtatgacggctaccgatactgcagt

SEQ ID NO: 137330 - DNA, 55 bp, Artificial
  Synthetic oligonucleotide
caactcgattgcctgcatctccgtcggattcaaagggacccttccggacatctcc

SEQ ID NO: 137331 - DNA, 54 bp, Artificial
  Synthetic oligonucleotide
gccttcccaaaagagggttacatgaacttgatcactcttcaccccaattacccc

SEQ ID NO: 137332 - DNA, 55 bp, Artificial
  Synthetic oligonucleotide
gcctttggtaagatccgtgtccgaatacaccggaggatacagttgggcaaacgag

SEQ ID NO: 137333 - DNA, 55 bp, Artificial
  Synthetic oligonucleotide
ggtgctcccttttcgagcatcatcgtctttacgtcttcgatttccgtcggtggga

SEQ ID NO: 137334 - DNA, 55 bp, Artificial
  Synthetic oligonucleotide
cctcagtcagagcgagttcgaaacgcttgcaacgaaatacactgcatatccctgc

SEQ ID NO: 137335 - DNA, 55 bp, Artificial
  Synthetic oligonucleotide
gtgctcagcaaaggcttcttacttttcactgcgaccatgtctgtatgtaaactta

SEQ ID NO: 137336 - DNA, 55 bp, Artificial
  Synthetic oligonucleotide
gtgctggttcgccagtctcggcgtttgtaggagtaacctcgacaaggatatcgta

SEQ ID NO: 137337 - DNA, 55 bp, Artificial
  Synthetic oligonucleotide
gtgtacgtatatcagtacggtgcagtcaacgcaagctctacctataccctgtggg

SEQ ID NO: 137338 - DNA, 55 bp, Artificial
  Synthetic oligonucleotide
gtgttcgtgtgtcatgtatcggaccttccggtgagaaactcgttttgatgtcgtg

SEQ ID NO: 137339 - DNA, 55 bp, Artificial
  Synthetic oligonucleotide
ccggatacggttagataatatcgcacggtcggcggagttgtttccatcacccttc

SEQ ID NO: 137340 - DNA, 55 bp, Artificial
  Synthetic oligonucleotide
tccgtgcgtgcatttcaccgaattcttgaaaggatgccctatcgtaaaacacgac

SEQ ID NO: 137341 - DNA, 55 bp, Artificial
  Synthetic oligonucleotide
cgggaagacacctcgtttggcatgagaaggaccgaagtgaaaagcagatcaggga

SEQ ID NO: 137342 - DNA, 55 bp, Artificial
  Synthetic oligonucleotide
tcgctcccacaacgagagaagaccgtctgccagaccttttgccgtttcgctgtcc

SEQ ID NO: 137343 - DNA, 55 bp, Artificial
  Synthetic oligonucleotide
ccgccgcgggccaaatagaacaagcacttacgcgttgttgaggtggattcaatac

SEQ ID NO: 137344 - DNA, 55 bp, Artificial
  Synthetic oligonucleotide
ccgacacctcgacaaccgtcgtccacatagattttccgttcatgaatgatacggt

SEQ ID NO: 137345 - DNA, 54 bp, Artificial
  Synthetic oligonucleotide
aggtcgtatcccgttgactccacgcactattagtacgccgcgccaggtaaacta

SEQ ID NO: 137346 - DNA, 54 bp, Artificial
  Synthetic oligonucleotide
ttctactaccgtgtcgaagataccgatccaaaacgcgttgacccgtctgcatac

SEQ ID NO: 137347 - DNA, 53 bp, Artificial
  Synthetic oligonucleotide
ctagggatcttagtgaattttggcacatatcccaaggtgtacgtgcaaaggat

SEQ ID NO: 137348 - DNA, 52 bp, Artificial
  Synthetic oligonucleotide
gtcaggtaggctcatatgtagcacatgccgtatcccaatttccgcatgtgca

SEQ ID NO: 137349 - DNA, 52 bp, Artificial
  Synthetic oligonucleotide
tatcacaccgaatctgcattacgacagcacgtcaaggacgaaggagttcggt

SEQ ID NO: 137350 - DNA, 51 bp, Artificial
  Synthetic oligonucleotide
cacttcgaaggatacggatttcaaaacctcgagatctccatacgatttgca

SEQ ID NO: 137351 - DNA, 50 bp, Artificial
  Synthetic oligonucleotide
cgtaattacagggctcctcttaatgctcgttctattcactgcgggatgta

SEQ ID NO: 137352 - DNA, 55 bp, Artificial
  Synthetic oligonucleotide
cgttttcctgaagagagatgtcgttacggatacctgcacgtttctcttcctgctc

SEQ ID NO: 137353 - DNA, 50 bp, Artificial
  Synthetic oligonucleotide
ccgcccgttactgaaatccccggcctcccggaaacgtgcagaggcgtcta

SEQ ID NO: 137354 - DNA, 50 bp, Artificial
  Synthetic oligonucleotide
ccgcataagggcggaggcacgaacggtgatggcacatgcggggtatgcat

SEQ ID NO: 137355 - DNA, 50 bp, Artificial
  Synthetic oligonucleotide
tttcagtcccgcggaggtaattctgacgaacctggcattcgtccgcatag

SEQ ID NO: 137356 - DNA, 50 bp, Artificial
  Synthetic oligonucleotide
aaaggcggcgatcgttcagtggctcccaacggaaacggcagctccctgct

SEQ ID NO: 137357 - DNA, 50 bp, Artificial
  Synthetic oligonucleotide
aacactcgccgtccctcttgcctgtgccggatgtcaggtcaccacaatcg

SEQ ID NO: 137358 - DNA, 50 bp, Artificial
  Synthetic oligonucleotide
aaccggagagttaccccgaatccatacgcccaggcaatgcgcgggtcaaa

SEQ ID NO: 137359 - DNA, 50 bp, Artificial
  Synthetic oligonucleotide
aagctcgtcagcggagctgcgaccctccccgataaggtatggacggtcat

SEQ ID NO: 137360 - DNA, 50 bp, Artificial
  Synthetic oligonucleotide
aaggccccctcctccgttgaggccgcccctaacgggagaacgtcagatga

SEQ ID NO: 137361 - DNA, 50 bp, Artificial
  Synthetic oligonucleotide
aagggtcgtgcggaccgcagaatgatgtggtttcaacggggtgagccgat

SEQ ID NO: 137362 - DNA, 50 bp, Artificial
  Synthetic oligonucleotide
acacgctgagcaacggggaccgtgatacggcctggtccgcatcccatatc

SEQ ID NO: 137363 - DNA, 55 bp, Artificial
  Synthetic oligonucleotide
cctgctcacaatgttgctcccggcacgaaatatgaggacattccggattcctgga

SEQ ID NO: 137364 - DNA, 50 bp, Artificial
  Synthetic oligonucleotide
acgctttcgcagacgacgagtgcccctgcggagtttgtttctccggaagc

SEQ ID NO: 137365 - DNA, 50 bp, Artificial
  Synthetic oligonucleotide
acgttcgggcactctgcttcggcttatcgcctacgcaggaatcgcgccct

SEQ ID NO: 137366 - DNA, 50 bp, Artificial
  Synthetic oligonucleotide
actcgtaacgggccccgtcaccaatcagatggccgacagactccgccggg

SEQ ID NO: 137367 - DNA, 50 bp, Artificial
  Synthetic oligonucleotide
agccgcggtggggattttcgtataagcacgtcatgcagcggcccgattct

SEQ ID NO: 137368 - DNA, 50 bp, Artificial
  Synthetic oligonucleotide
agcgcccatgagttcaaaggccggtttttcgaccggtgtctgcgggaaag

SEQ ID NO: 137369 - DNA, 50 bp, Artificial
  Synthetic oligonucleotide
agcggggtcggtgcgatgcacttcgtcaatgcattccttgcccatctgac

SEQ ID NO: 137370 - DNA, 50 bp, Artificial
  Synthetic oligonucleotide
aggataataacggtggacgccctcccccgggtaaacggctggaagctcct

SEQ ID NO: 137371 - DNA, 50 bp, Artificial
  Synthetic oligonucleotide
aggcacgaacggtgatggcacatgcggggtatgcatagcgctggggattc

SEQ ID NO: 137372 - DNA, 50 bp, Artificial
  Synthetic oligonucleotide
aggcagaacttatgcgccgtgccgagacctacgaggaaatgaccggctgc

SEQ ID NO: 137373 - DNA, 50 bp, Artificial
  Synthetic oligonucleotide
atacaggcggatctgcaggtttggcggatacacacgcagcgcgggtgata

SEQ ID NO: 137374 - DNA, 55 bp, Artificial
  Synthetic oligonucleotide
gaaagacgtacccgaagcatccctctaattcctttctttcgcaggaaagactcag

SEQ ID NO: 137375 - DNA, 50 bp, Artificial
  Synthetic oligonucleotide
atattgtccgtccgtggcgcggcgaatatcacctcgtctgcggaaccgtc

SEQ ID NO: 137376 - DNA, 50 bp, Artificial
  Synthetic oligonucleotide
atccgccagaggcgcaacgctcgagacagaagacggggaatcactcgtcg

SEQ ID NO: 137377 - DNA, 50 bp, Artificial
  Synthetic oligonucleotide
caaagcgcgatgctgactgccggattgatgtgggctccagacaccgtgcc

SEQ ID NO: 137378 - DNA, 50 bp, Artificial
  Synthetic oligonucleotide
cacatcctcctccataaagagggccccgtcggcataggcagatgcggcag

SEQ ID NO: 137379 - DNA, 50 bp, Artificial
  Synthetic oligonucleotide
caccatcataacccggccgcccgttactgaaatccccggcctcccggaaa

SEQ ID NO: 137380 - DNA, 50 bp, Artificial
  Synthetic oligonucleotide
caccggtgatacaggcggatctgcaggtttggcggatacacacgcagcgc

SEQ ID NO: 137381 - DNA, 50 bp, Artificial
  Synthetic oligonucleotide
cacggtagtaccagtcgcgtgcctgcgaaagggagccggcgtcttcgtat

SEQ ID NO: 137382 - DNA, 50 bp, Artificial
  Synthetic oligonucleotide
cagtcgccaaacggtgcagtcagggttgcacaggcggttttgtctgctgc

SEQ ID NO: 137383 - DNA, 50 bp, Artificial
  Synthetic oligonucleotide
catgcatgcgaccgaaagcgatacgacctgtgctcttcaccgggcgaccc

SEQ ID NO: 137384 - DNA, 50 bp, Artificial
  Synthetic oligonucleotide
cccacatcaccgacactccggtcctcagaggaaacatcgcggcacgcctt

SEQ ID NO: 137385 - DNA, 55 bp, Artificial
  Synthetic oligonucleotide
cacccaatattctctggctgactgaaatccgcaacactgatatcccctcagttgg

SEQ ID NO: 137386 - DNA, 50 bp, Artificial
  Synthetic oligonucleotide
cccgatgctgaccgaactcattcttgcggcacgttccggggtggatgtga

SEQ ID NO: 137387 - DNA, 55 bp, Artificial
  Synthetic oligonucleotide
gaagtgagccggcagcccctaagggtgacgatggatacatcaatgtatgaagggc

SEQ ID NO: 137388 - DNA, 55 bp, Artificial
  Synthetic oligonucleotide
gcacgacccgccagttctgtccgtatcctgggtcgagagtactccatacggcatt

SEQ ID NO: 137389 - DNA, 55 bp, Artificial
  Synthetic oligonucleotide
gccaagaccgggcgacatcagatactcggtcgccgacatatcgaaagcgaaaccg

SEQ ID NO: 137390 - DNA, 55 bp, Artificial
  Synthetic oligonucleotide
gatgtggtgacaggtgtcaacgaggtcctgaacgctatcgtgactccgcttaacg

SEQ ID NO: 137391 - DNA, 51 bp, Artificial
  Synthetic oligonucleotide
cggagagaaggagtacggagttcggatggttccctcggggttcgtctaccc

SEQ ID NO: 137392 - DNA, 50 bp, Artificial
  Synthetic oligonucleotide
agcggaagcactcgaacacgtatccgcgcaggagggcattcccgtaggag

SEQ ID NO: 137393 - DNA, 50 bp, Artificial
  Synthetic oligonucleotide
agccgcgaaatgcaacgttccaccggaatgcgactgccgtacaggcaggg

SEQ ID NO: 137394 - DNA, 50 bp, Artificial
  Synthetic oligonucleotide
agcccctcccccaaggcgatactcccacggtccagtgcatggggctctct

SEQ ID NO: 137395 - DNA, 50 bp, Artificial
  Synthetic oligonucleotide
agccagccgatccatacggcctcctgttcttcgaactcccccgggaagcg

SEQ ID NO: 137396 - DNA, 50 bp, Artificial
  Synthetic oligonucleotide
agattcgggcatatgcacggcaacggtcgcaactgccgaaggagcgatca

SEQ ID NO: 137397 - DNA, 50 bp, Artificial
  Synthetic oligonucleotide
agatcccccaccgcaaatgccctgtatgtaaacgggggaacacccgaggg

SEQ ID NO: 137398 - DNA, 55 bp, Artificial
  Synthetic oligonucleotide
cgaatgcggatacacgtccatagagtttcacgacccgataatcaccgactcaagg

SEQ ID NO: 137399 - DNA, 55 bp, Artificial
  Synthetic oligonucleotide
ccggattccactacctttgttctcagccaggtttgtatcgtgcagaaccgctgca

SEQ ID NO: 137400 - DNA, 54 bp, Artificial
  Synthetic oligonucleotide
ccgataatagtcggggactccgtgatctcgaaagtcgacgcaaacgggaccacc

SEQ ID NO: 137401 - DNA, 55 bp, Artificial
  Synthetic oligonucleotide
cattggtgtactatatccgattgagcaacataaggacttcgcatgcacgtagcca

SEQ ID NO: 137402 - DNA, 55 bp, Artificial
  Synthetic oligonucleotide
catatgtcccatggtacacccttaagtgcttgattaattccaatgaagataggct

SEQ ID NO: 137403 - DNA, 55 bp, Artificial
  Synthetic oligonucleotide
caggagggaatagggattggatctcgcaagactcgcgataatctcgcaaaaggag

SEQ ID NO: 137404 - DNA, 55 bp, Artificial
  Synthetic oligonucleotide
caaggcccggccctattcgcggtcatatgaaggattgatccgttctgtccttcta

SEQ ID NO: 137405 - DNA, 55 bp, Artificial
  Synthetic oligonucleotide
ataacgtcaatatcccatacggtgccgcccaatgagagaacgcaaccatcctacg

SEQ ID NO: 137406 - DNA, 55 bp, Artificial
  Synthetic oligonucleotide
attccgagcgactgggtagtatacggcgagcagcggaggcacagtcccgcactct

SEQ ID NO: 137407 - DNA, 55 bp, Artificial
  Synthetic oligonucleotide
gatgaatgtcgttcttcgcgtgaattacttgccggggataacgatacagtctcag

SEQ ID NO: 137408 - DNA, 55 bp, Artificial
  Synthetic oligonucleotide
ttattccgacaggcacgtttacgtagaatatgtactgccacgaaaggaccgtggt

SEQ ID NO: 137409 - DNA, 55 bp, Artificial
  Synthetic oligonucleotide
gcaggtgtatcatgctgtccggccttccgtgtcatctgcgaccgacctcccggat

SEQ ID NO: 137410 - DNA, 55 bp, Artificial
  Synthetic oligonucleotide
gcagtaagaggggctaggtgcagacgtatgccccaattggttacaccggaggccc

SEQ ID NO: 137411 - DNA, 55 bp, Artificial
  Synthetic oligonucleotide
tgcgctttagggatttaaacctgcaaaatgttgatattgagtggctacctgatgt

SEQ ID NO: 137412 - DNA, 55 bp, Artificial
  Synthetic oligonucleotide
gcattgcgtcacgtacctccctggagagggaaaccggcacattggagagggtttt

SEQ ID NO: 137413 - DNA, 55 bp, Artificial
  Synthetic oligonucleotide
tccggtcatctcttcacctccgatcttatcgctccctggggacagatatccgcac

SEQ ID NO: 137414 - DNA, 55 bp, Artificial
  Synthetic oligonucleotide
gggaaatatgcactcctggctgggacaagtatggtggcctatccgtctgtttact

SEQ ID NO: 137415 - DNA, 55 bp, Artificial
  Synthetic oligonucleotide
ggtctgaaataaccggcgacatatatgttaacggagatgcctttcttggcgaagg

SEQ ID NO: 137416 - DNA, 54 bp, Artificial
  Synthetic oligonucleotide
gtacccgcgttgtttgaaggtggactctcagttgttatatcctttgtctccggg

SEQ ID NO: 137417 - DNA, 55 bp, Artificial
  Synthetic oligonucleotide
tcacgccgtggaacgttgttcttgtggctatcatagttcccatgcacggctttcc

SEQ ID NO: 137418 - DNA, 55 bp, Artificial
  Synthetic oligonucleotide
gataagaacagtcctcgacagggaaagattaaggggagttggaatcatcgccccg

SEQ ID NO: 137419 - DNA, 55 bp, Artificial
  Synthetic oligonucleotide
tattccctcttgcatgtctcacaggtgcacccttatgctcgaaagatcctatcgg

SEQ ID NO: 137420 - DNA, 55 bp, Artificial
  Synthetic oligonucleotide
tataacaggtgtaagtgacgttttaactggtgttatggctctgtctttagcaagc

SEQ ID NO: 137421 - DNA, 54 bp, Artificial
  Synthetic oligonucleotide
gcaatcggaggaagtccccgtattgtttccgcacataatggtaactccggacat

SEQ ID NO: 137422 - DNA, 53 bp, Artificial
  Synthetic oligonucleotide
ccctgatgcataacgggaggctcaacgtccggcactggccctacaaccgggta

SEQ ID NO: 137423 - DNA, 53 bp, Artificial
  Synthetic oligonucleotide
gtccgtaatgacgcatatctctcgaccaatacggcctgctctctccagattgg

SEQ ID NO: 137424 - DNA, 52 bp, Artificial
  Synthetic oligonucleotide
gtgtaaccccggtgatgcagtcgcaatgcctcccggcaccgctttctggtag

SEQ ID NO: 137425 - DNA, 52 bp, Artificial
  Synthetic oligonucleotide
tcgaaaacgttgcaatcagcggtggagtggcgtacaaccataatatcaggac

SEQ ID NO: 137426 - DNA, 52 bp, Artificial
  Synthetic oligonucleotide
gcatgcgaagtctaccgggcggtctttacgatcgaggacaagatcgggtttt

SEQ ID NO: 137427 - DNA, 51 bp, Artificial
  Synthetic oligonucleotide
gttcattccctggaactgattgggactgccgtcgcgtacgaagcgatgaga

SEQ ID NO: 137428 - DNA, 51 bp, Artificial
  Synthetic oligonucleotide
ggatttcgcaccgatcagaagtgtaacacccaactttgatacgaggggttt

SEQ ID NO: 137429 - DNA, 55 bp, Artificial
  Synthetic oligonucleotide
gaacggattacgacgattacccgcctgaagctctctccgttccgtctgtaggcgg

SEQ ID NO: 137430 - DNA, 50 bp, Artificial
  Synthetic oligonucleotide
atgcgccccaggtggcagttggcgtagggcttggtgttgtggcagtcatt

SEQ ID NO: 137431 - DNA, 50 bp, Artificial
  Synthetic oligonucleotide
atgcgggagacctctcttgcggggttgttccctcacacccgtcgattgct

SEQ ID NO: 137432 - DNA, 50 bp, Artificial
  Synthetic oligonucleotide
atggcccgcaatcgacgaactgaaggctacagtcggggatcacgtgctga

SEQ ID NO: 137433 - DNA, 50 bp, Artificial
  Synthetic oligonucleotide
atgtgcgtcctcccgcacgggcactggtccctggataaaacccgtgtcag

SEQ ID NO: 137434 - DNA, 50 bp, Artificial
  Synthetic oligonucleotide
attctcgatcctcatgtgcgtcctcccgcacgggcactggtccctggata

SEQ ID NO: 137435 - DNA, 50 bp, Artificial
  Synthetic oligonucleotide
attgggggccggctccacgattacagggaaaccgctgtactggggctctc

SEQ ID NO: 137436 - DNA, 50 bp, Artificial
  Synthetic oligonucleotide
attgtgggtgcagtctgggacccctcgccccggacatcgcgtcttatagg

SEQ ID NO: 137437 - DNA, 50 bp, Artificial
  Synthetic oligonucleotide
atttgagaggagagccggcattccgcttccgaggccctgtgcatggacaa

SEQ ID NO: 137438 - DNA, 50 bp, Artificial
  Synthetic oligonucleotide
caaagagcccgccggggtagcggagcgtcaggttccgtatcgtaaacggc

SEQ ID NO: 137439 - DNA, 50 bp, Artificial
  Synthetic oligonucleotide
caacaccccctgcaggtcatgccggctcagtgcctgttcacaacggtata

SEQ ID NO: 137440 - DNA, 55 bp, Artificial
  Synthetic oligonucleotide
ctcgttaataaggtctgtccaaacggagttggcgtcattaggtgttgcaagtaag

SEQ ID NO: 137441 - DNA, 50 bp, Artificial
  Synthetic oligonucleotide
caacccttaagggacgggagattggcgaggccggtgtctcggattcgtgg

SEQ ID NO: 137442 - DNA, 50 bp, Artificial
  Synthetic oligonucleotide
cacaaggactcatcgggggtgcagaattcagggttccacagggaggcgga

SEQ ID NO: 137443 - DNA, 50 bp, Artificial
  Synthetic oligonucleotide
cacctcgccgcatgcaaagagcccggggacattagtcaccccatgaggat

SEQ ID NO: 137444 - DNA, 50 bp, Artificial
  Synthetic oligonucleotide
cactcgaggagaagtgcgacctgctccgggcgattgagtcttcggcccgt

SEQ ID NO: 137445 - DNA, 50 bp, Artificial
  Synthetic oligonucleotide
cagggactgcccgtacctcccgacctgtagcgggggctgtgcgtttaagg

SEQ ID NO: 137446 - DNA, 50 bp, Artificial
  Synthetic oligonucleotide
agaggaggcggggctccgacttgaccgctttctgcaccccctccgaccgg

SEQ ID NO: 137447 - DNA, 50 bp, Artificial
  Synthetic oligonucleotide
agaagctggttgtacccattcgcaagagcccagacggtgagggaacggct

SEQ ID NO: 137448 - DNA, 50 bp, Artificial
  Synthetic oligonucleotide
acttcggggtcgtccggaggctcgagggtgccgattatctcttccggggg

SEQ ID NO: 137449 - DNA, 50 bp, Artificial
  Synthetic oligonucleotide
actcgagagcgggaccatcgtagagggagccgacctgcactaccccggaa

SEQ ID NO: 137450 - DNA, 50 bp, Artificial
  Synthetic oligonucleotide
actccagaaacgcgcccgagaagacatggtcggggagccggaaccctgct

SEQ ID NO: 137451 - DNA, 52 bp, Artificial
  Synthetic oligonucleotide
ctcctcaaagggttaataaccccgggcgaccaaaatgtatgggaataccaca

SEQ ID NO: 137452 - DNA, 50 bp, Artificial
  Synthetic oligonucleotide
actaccggggtgatcccgagttacggggccggattgtccacgcgatcctc

SEQ ID NO: 137453 - DNA, 50 bp, Artificial
  Synthetic oligonucleotide
acgggttgaccggatagaggttcccgggaaacgagaggaggttgcgcaga

SEQ ID NO: 137454 - DNA, 50 bp, Artificial
  Synthetic oligonucleotide
acgggcattcccctccaaaagccacacgggtcctcagaccggacgattcc

SEQ ID NO: 137455 - DNA, 50 bp, Artificial
  Synthetic oligonucleotide
acgcggcgttctcgtctgccgttaaagcgccctcgtccggacttttagga

SEQ ID NO: 137456 - DNA, 50 bp, Artificial
  Synthetic oligonucleotide
accttacgccgctcatgaaccttgcaaagcgcggaacagaggcctgcgga

SEQ ID NO: 137457 - DNA, 50 bp, Artificial
  Synthetic oligonucleotide
accgggctctttcggatgctgacacgctacgcccggaaggtcacggccgg

SEQ ID NO: 137458 - DNA, 50 bp, Artificial
  Synthetic oligonucleotide
accgggagcctacagcgctacctatacgatcgagcgggacgtctcgtggg

SEQ ID NO: 137459 - DNA, 50 bp, Artificial
  Synthetic oligonucleotide
accggctcaatcttgagttccggggccatgcagacgtcgtttcggcacac

SEQ ID NO: 137460 - DNA, 50 bp, Artificial
  Synthetic oligonucleotide
acccggtaactcctctctgacggggctgcctctccccggttgaagacggg

SEQ ID NO: 137461 - DNA, 50 bp, Artificial
  Synthetic oligonucleotide
accagtagcggagttgtctataccggacaatcagaggtgaggttcgcatg

SEQ ID NO: 137462 - DNA, 55 bp, Artificial
  Synthetic oligonucleotide
agacggagatcttcggattgggttttcatatgccctgcgggaagtgctccttccc

SEQ ID NO: 137463 - DNA, 50 bp, Artificial
  Synthetic oligonucleotide
accagacctacgtctcccttgacgcccccgaccgggagacctatcttgcc

SEQ ID NO: 137464 - DNA, 50 bp, Artificial
  Synthetic oligonucleotide
acacgccttgagtacaccgcgtcccgccacgcaggggatacttgtctatc

SEQ ID NO: 137465 - DNA, 50 bp, Artificial
  Synthetic oligonucleotide
acaccggcgaggttctcctgcgaaactctcgccaccgcatacggattccc

SEQ ID NO: 137466 - DNA, 50 bp, Artificial
  Synthetic oligonucleotide
aatcgcccctggtgaggtttacggatgcaccggacatcagccacgagcca

SEQ ID NO: 137467 - DNA, 50 bp, Artificial
  Synthetic oligonucleotide
aagggtcgaggcaggaaccgggctctttcggatgctgacacgctacgccc

SEQ ID NO: 137468 - DNA, 50 bp, Artificial
  Synthetic oligonucleotide
aaggaatggaggacgccgtaagcacggtccttgcccagtgcgagatgtgg

SEQ ID NO: 137469 - DNA, 50 bp, Artificial
  Synthetic oligonucleotide
aagagttgcggacccagacacgggtttcaagagccggggtgcgatggacc

SEQ ID NO: 137470 - DNA, 50 bp, Artificial
  Synthetic oligonucleotide
aacgtagagtcaggcagccacacgattacggccaggctcagcgggtacca

SEQ ID NO: 137471 - DNA, 50 bp, Artificial
  Synthetic oligonucleotide
aacgctatcccgcccccggtccaaccgtaccagcacatcaggttctgtga

SEQ ID NO: 137472 - DNA, 50 bp, Artificial
  Synthetic oligonucleotide
aaccttcgcgatcaggatagggtctcgggggagcagacagggtgcgagcg

SEQ ID NO: 137473 - DNA, 55 bp, Artificial
  Synthetic oligonucleotide
cgtcattcaccttaactgcgaactcatcgacacacagtacagggttctagctcag

SEQ ID NO: 137474 - DNA, 50 bp, Artificial
  Synthetic oligonucleotide
aaacgtaccggcccggcaggtcgtcaccttaatcccgtgcccggagagac

SEQ ID NO: 137475 - DNA, 50 bp, Artificial
  Synthetic oligonucleotide
atgagcaggaccgaaggtcgctcaggcatctcaagccaccaggccccaag

SEQ ID NO: 137476 - DNA, 50 bp, Artificial
  Synthetic oligonucleotide
atcgttccggggcccgacccgatgtcaagaacccttaagccgggtgaaag

SEQ ID NO: 137477 - DNA, 50 bp, Artificial
  Synthetic oligonucleotide
atcggccctatggcgaagccgaggttccctccgacaacgaacagcgatgt

SEQ ID NO: 137478 - DNA, 50 bp, Artificial
  Synthetic oligonucleotide
atcggatgggtgaacgtcccgcgtgcccggaggctaatgatgcagttggc

SEQ ID NO: 137479 - DNA, 50 bp, Artificial
  Synthetic oligonucleotide
atcctgaggggcacgaaatacggacgggggatctccacgtgaactcccct

SEQ ID NO: 137480 - DNA, 50 bp, Artificial
  Synthetic oligonucleotide
atattcctcttctccggtgcgacacttcgtgcatgggccaccttcggggc

SEQ ID NO: 137481 - DNA, 50 bp, Artificial
  Synthetic oligonucleotide
ataggcgcaatgcatggagagccggtgcgtcccgaaacacaccccgatca

SEQ ID NO: 137482 - DNA, 50 bp, Artificial
  Synthetic oligonucleotide
atacggatataccgggcctccgccgattgtgggtgcagtctgggacccct

SEQ ID NO: 137483 - DNA, 50 bp, Artificial
  Synthetic oligonucleotide
agtcccctgcagattccggctccgttctccatgcagtagacgtcctccct

SEQ ID NO: 137484 - DNA, 55 bp, Artificial
  Synthetic oligonucleotide
cggcggggagcttgatgctccgggtttaaatctcaaagtgtagacttgcgggaac

SEQ ID NO: 137485 - DNA, 49 bp, Artificial
  Synthetic oligonucleotide
agtacctcgttcccgaaggataccccgagaacccgactgccggggaccc

SEQ ID NO: 137486 - DNA, 50 bp, Artificial
  Synthetic oligonucleotide
agtaccggacgatgtcctctcccgacggccggcagtagtggtaccgcact

SEQ ID NO: 137487 - DNA, 50 bp, Artificial
  Synthetic oligonucleotide
agtacaccgcgtcccgccacgcaggggatacttgtctatccccggagtgg

SEQ ID NO: 137488 - DNA, 50 bp, Artificial
  Synthetic oligonucleotide
aggttgcaaagcaggcgcgtctgaaggggatcgatccgaggaccagtgtg

SEQ ID NO: 137489 - DNA, 50 bp, Artificial
  Synthetic oligonucleotide
aggttctggtaggtcccacggtcccagacgagaaccgttcccgcaccgta

SEQ ID NO: 137490 - DNA, 50 bp, Artificial
  Synthetic oligonucleotide
aggtcgctcaggcatctcaagccaccaggccccaaggtcctgcagattcc

SEQ ID NO: 137491 - DNA, 50 bp, Artificial
  Synthetic oligonucleotide
agggttaccgggaactccccttcacacctaacggtgctcatgccccggtt

SEQ ID NO: 137492 - DNA, 50 bp, Artificial
  Synthetic oligonucleotide
agggggaacgtaccctccgcatcgtaggtgttctgggttgccagtgcgaa

SEQ ID NO: 137493 - DNA, 50 bp, Artificial
  Synthetic oligonucleotide
aggcagggagtcgtggtcggccttttcaacactgcatcctacggcggaat

SEQ ID NO: 137494 - DNA, 50 bp, Artificial
  Synthetic oligonucleotide
aggacgccgtaagcacggtccttgcccagtgcgagatgtggaccgacaac

SEQ ID NO: 137495 - DNA, 55 bp, Artificial
  Synthetic oligonucleotide
attccggacagggactcggctccttaccccgagggagcacgacgtcgtccagaca

SEQ ID NO: 137496 - DNA, 54 bp, Artificial
  Synthetic oligonucleotide
cggggttatcggcctcctccatccctgaacagcccggcccttatcaacccttga

SEQ ID NO: 137497 - DNA, 55 bp, Artificial
  Synthetic oligonucleotide
aatccgagcgtcccgcgtgtggaaggggcatcaccgggcactctataacggatcc

SEQ ID NO: 137498 - DNA, 55 bp, Artificial
  Synthetic oligonucleotide
gatccttcaagacatgcctcttacgcgctaacgttgttaaccgcgggtgagcccc

SEQ ID NO: 137499 - DNA, 55 bp, Artificial
  Synthetic oligonucleotide
gatgacgggagatctgctatgcctcatatatgtataagatgcggcgaagtgtacg

SEQ ID NO: 137500 - DNA, 52 bp, Artificial
  Synthetic oligonucleotide
ggaggtaggattcgtcggtggtttgaggttagcccgagacgcccgggaagag

SEQ ID NO: 137501 - DNA, 55 bp, Artificial
  Synthetic oligonucleotide
ggctccctccttcaatcgctgcggttgtgcgctaagagctccgccgtcgatcgat

SEQ ID NO: 137502 - DNA, 54 bp, Artificial
  Synthetic oligonucleotide
ggggccttctcgtaaatgtccggtcttacgaacttccagacaagtccggtcata

SEQ ID NO: 137503 - DNA, 55 bp, Artificial
  Synthetic oligonucleotide
ggtaggatgaccgcaggtagtgtgtatccgttcataagacgcccgcaccctacgg

SEQ ID NO: 137504 - DNA, 55 bp, Artificial
  Synthetic oligonucleotide
aagacatcgcactccggctacggcgtgtgagcagagtctggggagcggcactgta

SEQ ID NO: 137505 - DNA, 55 bp, Artificial
  Synthetic oligonucleotide
gtcgagcgggctatttcctccagtcggtcgggcatctcgtactcccgacacgtgt

SEQ ID NO: 137506 - DNA, 55 bp, Artificial
  Synthetic oligonucleotide
cagtcacccctggcgtatttacagtactcccggaagtagtcatgacacatgcgca

SEQ ID NO: 137507 - DNA, 54 bp, Artificial
  Synthetic oligonucleotide
gtctgggacgtcaacgtagaggcgttactcgtagccaggaggttagggcgtcgg

SEQ ID NO: 137508 - DNA, 55 bp, Artificial
  Synthetic oligonucleotide
tggcacttccactccttatcaccatgtaaatgtgccagccgtagggatcgccgtc

SEQ ID NO: 137509 - DNA, 55 bp, Artificial
  Synthetic oligonucleotide
gtgggtagattacgccaggaaaggcgaacccgatgtcatcttagtcggtcggcgg

SEQ ID NO: 137510 - DNA, 55 bp, Artificial
  Synthetic oligonucleotide
tagagccctccctgtaggtgattccgggaatattcgaaaggtctgactcctccca

SEQ ID NO: 137511 - DNA, 55 bp, Artificial
  Synthetic oligonucleotide
tacgcgaagggattctccacatggcgaggctactcggtggcagacgcaaagccgc

SEQ ID NO: 137512 - DNA, 54 bp, Artificial
  Synthetic oligonucleotide
ctatctccccgggagtttcgtactgctcgagagatagtttcggttccggaaatc

SEQ ID NO: 137513 - DNA, 52 bp, Artificial
  Synthetic oligonucleotide
acggtaggcggtcataacgttttcacaccagcccaccgggagagtgagaaaa

SEQ ID NO: 137514 - DNA, 51 bp, Artificial
  Synthetic oligonucleotide
taaggggtacacctcggaggaactcgtaggtttcgtcgacgggatgatgga

SEQ ID NO: 137515 - DNA, 51 bp, Artificial
  Synthetic oligonucleotide
gtcttgtagcctagcatgtcgctgagtgggtatcccatgaacgggtccagt

SEQ ID NO: 137516 - DNA, 51 bp, Artificial
  Synthetic oligonucleotide
gcgtgatcctcgtaccaacgtgctcaccccgaaggaatcggtcgacgtttt

SEQ ID NO: 137517 - DNA, 55 bp, Artificial
  Synthetic oligonucleotide
ccccataatgtaccgcctgaagtacgttgaagtggatctcatcatacccggcacg

SEQ ID NO: 137518 - DNA, 50 bp, Artificial
  Synthetic oligonucleotide
agcctatcctctaccgccccactcagctcctcgctcgaaccaagtaggtc

SEQ ID NO: 137519 - DNA, 50 bp, Artificial
  Synthetic oligonucleotide
acgagggcgtagcctaccactggctccccgtacccgggacagtactccac

SEQ ID NO: 137520 - DNA, 50 bp, Artificial
  Synthetic oligonucleotide
accttcgaggcttgtcgcgaggaggggctagggtgcgtctacgtgaccaa

SEQ ID NO: 137521 - DNA, 50 bp, Artificial
  Synthetic oligonucleotide
acctcggctcttcgagttgtacgggctccaggtagcgaccgcaggcctcg

SEQ ID NO: 137522 - DNA, 50 bp, Artificial
  Synthetic oligonucleotide
accgggagcgcggcccacctcacctcacgatgatccgtcgagaggaccgg

SEQ ID NO: 137523 - DNA, 50 bp, Artificial
  Synthetic oligonucleotide
aaaaccggttcccctgtgtgcccacgtcgagcgacggtaccgatggaccg

SEQ ID NO: 137524 - DNA, 50 bp, Artificial
  Synthetic oligonucleotide
aaacggaacccacgaacgtgccgcgacgtttagtcccgccgcgtgtcata

SEQ ID NO: 137525 - DNA, 50 bp, Artificial
  Synthetic oligonucleotide
aacccacaccctccgcggggtactctagcccttcagagcaacccgctcag

SEQ ID NO: 137526 - DNA, 50 bp, Artificial
  Synthetic oligonucleotide
aacccccactcgcaccgtgggatccgggatgaagaggtcccgcagagccg

SEQ ID NO: 137527 - DNA, 50 bp, Artificial
  Synthetic oligonucleotide
aacgcgcgagtcgctgatgtgagctcccgcacctactacggaccatctcc

SEQ ID NO: 137528 - DNA, 55 bp, Artificial
  Synthetic oligonucleotide
ccccgaatcaccttacccgtctccgggtgcttccagatgacttccttaccgatca

SEQ ID NO: 137529 - DNA, 50 bp, Artificial
  Synthetic oligonucleotide
aacgcgggttcctcgccgagtagttccgaaactatgtgcgcccctaaccc

SEQ ID NO: 137530 - DNA, 50 bp, Artificial
  Synthetic oligonucleotide
aactcaccgcgaatccgggacgtgttagaggaactccccgaccggttgga

SEQ ID NO: 137531 - DNA, 50 bp, Artificial
  Synthetic oligonucleotide
aagacagttcggagcgtgggcggggagtcagagctccgtttcgaactcct

SEQ ID NO: 137532 - DNA, 50 bp, Artificial
  Synthetic oligonucleotide
aagacgaggaccacggacctcgggacggatctaatcagcgcccgaacggg

SEQ ID NO: 137533 - DNA, 50 bp, Artificial
  Synthetic oligonucleotide
aagattaacgtcgacctgtacgtctcgggcgtgctcgtgcgtcccggtga

SEQ ID NO: 137534 - DNA, 50 bp, Artificial
  Synthetic oligonucleotide
aagccctactcgagggggtacgggcttgcgagagacggctgagaagggtt

SEQ ID NO: 137535 - DNA, 50 bp, Artificial
  Synthetic oligonucleotide
aaggccgcatatcccctcagcggatactcgagcctgccgtaccggactcc

SEQ ID NO: 137536 - DNA, 50 bp, Artificial
  Synthetic oligonucleotide
aagggagctccaccgtaggtctctgaaggtagttcgggctgcgaagcggg

SEQ ID NO: 137537 - DNA, 50 bp, Artificial
  Synthetic oligonucleotide
aaggtcgtctcctactcatcgcacccacggggaaacgtccgacggcgtat

SEQ ID NO: 137538 - DNA, 50 bp, Artificial
  Synthetic oligonucleotide
aagtggggcgcagagtggtcgttcggagggctaaaaggtccgacatcccg

SEQ ID NO: 137539 - DNA, 54 bp, Artificial
  Synthetic oligonucleotide
cccgagctacgtcgaccctggggcacgctatacccacgaccgtccattaagacc

SEQ ID NO: 137540 - DNA, 50 bp, Artificial
  Synthetic oligonucleotide
acaccgagtgctccattccgctcgactgtcgcctagttcgcaccgctcgg

SEQ ID NO: 137541 - DNA, 50 bp, Artificial
  Synthetic oligonucleotide
acacggtggctcgacctgacacgttcctaggatcctgccgagagtgggta

SEQ ID NO: 137542 - DNA, 50 bp, Artificial
  Synthetic oligonucleotide
acagctccctaacggcggataaagcgatcccccacgtcaggcacgcccct

SEQ ID NO: 137543 - DNA, 50 bp, Artificial
  Synthetic oligonucleotide
acaggcgcggggtttgaacttgcgattgacggtactctccggtggcaccg

SEQ ID NO: 137544 - DNA, 50 bp, Artificial
  Synthetic oligonucleotide
accaacgggctctcctttctagcggccaggattacgtcgggctcgcgggt

SEQ ID NO: 137545 - DNA, 50 bp, Artificial
  Synthetic oligonucleotide
accagcgctccgtgatcaggacgtggggcctcttcgacaacccttccacg

SEQ ID NO: 137546 - DNA, 50 bp, Artificial
  Synthetic oligonucleotide
acccatggggtcaccacccaccgtttagcgttgttcggactgacgtcggg

SEQ ID NO: 137547 - DNA, 50 bp, Artificial
  Synthetic oligonucleotide
accccggttgtatagcagggccaagaccatgccttccccggagagcctgt

SEQ ID NO: 137548 - DNA, 50 bp, Artificial
  Synthetic oligonucleotide
acccgaactctggcacgagggcgtagcctaccactggctccccgtacccg

SEQ ID NO: 137549 - DNA, 50 bp, Artificial
  Synthetic oligonucleotide
acccgagcgtaccgacgggagttggacgggcgtcagaaggcgtatccccc

SEQ ID NO: 137550 - DNA, 55 bp, Artificial
  Synthetic oligonucleotide
cctcacctcacgatgatccgtcgagaggaccggaagacacacggacacccatgcg

SEQ ID NO: 137551 - DNA, 50 bp, Artificial
  Synthetic oligonucleotide
accctgccaatcgaagtccgcgtgcaccgagagtgcggtcgcctccggtt

SEQ ID NO: 137552 - DNA, 50 bp, Artificial
  Synthetic oligonucleotide
acccttcggttgggttagtggggacctcggaccggcctgtgcaggggcac

SEQ ID NO: 137553 - DNA, 50 bp, Artificial
  Synthetic oligonucleotide
accgaagcgtaccggcgaggttgggtgtactcccagggtctgccctccat

SEQ ID NO: 137554 - DNA, 50 bp, Artificial
  Synthetic oligonucleotide
accgcacgagatgccacgtcagggatccgggtatatccgctgtccggtta

SEQ ID NO: 137555 - DNA, 50 bp, Artificial
  Synthetic oligonucleotide
accgctcgtcggtaggcctcggggatggaatttcgcgatcgggtacctca

SEQ ID NO: 137556 - DNA, 50 bp, Artificial
  Synthetic oligonucleotide
accggaggtgcgtacttcgcggcccgattagcggccctagagtggtgttc

SEQ ID NO: 137557 - DNA, 55 bp, Artificial
  Synthetic oligonucleotide
cgacacgcgtcggagtacatctccataattctacggagggcctgttgcgagtccc

SEQ ID NO: 137558 - DNA, 55 bp, Artificial
  Synthetic oligonucleotide
cgaggccaccactcggtccgatataccgtagcaggtcatgtacacgtactcctgg

SEQ ID NO: 137559 - DNA, 55 bp, Artificial
  Synthetic oligonucleotide
cgcgtaccagcacagtctacccatttcatggtccaactccatgttacggactgac

SEQ ID NO: 137560 - DNA, 60 bp, Artificial
  Synthetic oligonucleotide
tttaactccatcaggcatagcctcctcttcaagaaattcgtctggagtgctcgctcttat

SEQ ID NO: 137561 - DNA, 55 bp, Artificial
  Synthetic oligonucleotide
tatagaggagccggggataggcaaaatctatccccggcacttttttagagtctcc

SEQ ID NO: 137562 - DNA, 51 bp, Artificial
  Synthetic oligonucleotide
taaatggcagtagtacgatggacgagctaatattcgccgaaaagaggtatg

SEQ ID NO: 137563 - DNA, 51 bp, Artificial
  Synthetic oligonucleotide
tagagcactctgaaagatcagttaacgaagagtctatgcagtctccactat

SEQ ID NO: 137564 - DNA, 50 bp, Artificial
  Synthetic oligonucleotide
cagggatgatgccagacggttggccaccactcggccgttgaggtcgcccc

SEQ ID NO: 137565 - DNA, 50 bp, Artificial
  Synthetic oligonucleotide
caggggaagatacctctgctcctcccgtgtggcattcctcaccgccaggg

SEQ ID NO: 137566 - DNA, 50 bp, Artificial
  Synthetic oligonucleotide
catctccgacggggcgaggataagttcaggggcttatggccgaaggtgga

SEQ ID NO: 137567 - DNA, 50 bp, Artificial
  Synthetic oligonucleotide
ccaggggcccgtacctggccttgatagcgtacctgtccaggagaatgctg

SEQ ID NO: 137568 - DNA, 50 bp, Artificial
  Synthetic oligonucleotide
tcggctttacaggtcttttacgtcccaccgtcatatctgtccgatgggcc

SEQ ID NO: 137569 - DNA, 50 bp, Artificial
  Synthetic oligonucleotide
ggccccttcactccgctgaaacggcctaaacggaatatgaccaccctctc

SEQ ID NO: 137570 - DNA, 50 bp, Artificial
  Synthetic oligonucleotide
cgagctttgaaaggccctcgaatcctcaactggctgatcatctcttaacc

SEQ ID NO: 137571 - DNA, 50 bp, Artificial
  Synthetic oligonucleotide
ggggtctctgcttgtggaaacgcttcctctggtatttacgaacccctctc

SEQ ID NO: 137572 - DNA, 55 bp, Artificial
  Synthetic oligonucleotide
gagaccgcatctctgtactctgtcgttgcgacgagccccttcccaccatatctcg

SEQ ID NO: 137573 - DNA, 50 bp, Artificial
  Synthetic oligonucleotide
acgacagtgtcccgacaagagccgggatggctgtatcaggcacgcttcgg

SEQ ID NO: 137574 - DNA, 50 bp, Artificial
  Synthetic oligonucleotide
acgcattcctccacactcgcgcggatgttctcagcggtgctgtccagggg

SEQ ID NO: 137575 - DNA, 50 bp, Artificial
  Synthetic oligonucleotide
acgccgccccctattcctgcgagcccggagataactccaaccactacccc

SEQ ID NO: 137576 - DNA, 50 bp, Artificial
  Synthetic oligonucleotide
acgcgatgctcctcgccacatctatgccgctcctcacgccacctgatgat

SEQ ID NO: 137577 - DNA, 50 bp, Artificial
  Synthetic oligonucleotide
acggcacacgggtcgtcgtcgatgcaagaagggaggtagtggtgctcccc

SEQ ID NO: 137578 - DNA, 50 bp, Artificial
  Synthetic oligonucleotide
acggcctattgatgctcgggggactcgccgccctctccgtggtattcgcc

SEQ ID NO: 137579 - DNA, 50 bp, Artificial
  Synthetic oligonucleotide
acggtctccacatggcgggagtgggggctgaggggcaacacacatttcgg

SEQ ID NO: 137580 - DNA, 50 bp, Artificial
  Synthetic oligonucleotide
actcactgagccgcctgaagggctcccagcgattgaagtgcctgcgtact

SEQ ID NO: 137581 - DNA, 50 bp, Artificial
  Synthetic oligonucleotide
actcgtgggggatatcgagaggggtggggtcttcgcgagcctctacggga

SEQ ID NO: 137582 - DNA, 50 bp, Artificial
  Synthetic oligonucleotide
actggaggatccctgagggccatcgtgcccagtatgacgcgatccacgcc

SEQ ID NO: 137583 - DNA, 55 bp, Artificial
  Synthetic oligonucleotide
gaggttataatctctgccgggcctgatccacataattcagcgaagagccggttaa

SEQ ID NO: 137584 - DNA, 50 bp, Artificial
  Synthetic oligonucleotide
agaccatagacttccccgtcacaaggatgcctgtggtcgttccgccggcc

SEQ ID NO: 137585 - DNA, 50 bp, Artificial
  Synthetic oligonucleotide
agacgggaggcgttggaaccctcgggatggattgtgctgcacacgatggc

SEQ ID NO: 137586 - DNA, 50 bp, Artificial
  Synthetic oligonucleotide
agagataccggcgtgtagtctgcagctccccggttgatcgcgtttcgcgt

SEQ ID NO: 137587 - DNA, 50 bp, Artificial
  Synthetic oligonucleotide
agagatgttcaccgcagagctacacgggaagagagcctgcggcgctgaga

SEQ ID NO: 137588 - DNA, 50 bp, Artificial
  Synthetic oligonucleotide
agaggctcagtctatcgccctcgcccctatgacgtctctctccctgccga

SEQ ID NO: 137589 - DNA, 50 bp, Artificial
  Synthetic oligonucleotide
agaggtacggcctcttggagatccagaccggtgggagcaccgctattcgc

SEQ ID NO: 137590 - DNA, 50 bp, Artificial
  Synthetic oligonucleotide
agaggtccgccgcgagggaagaacccttgtggtgaaccccggagagatat

SEQ ID NO: 137591 - DNA, 50 bp, Artificial
  Synthetic oligonucleotide
agatttcggatcccggctttcaatccgacggtccgcctccgttcagggac

SEQ ID NO: 137592 - DNA, 50 bp, Artificial
  Synthetic oligonucleotide
agcaccacccagacaacgcctatgagccatcctggcggggtgtacgatgg

SEQ ID NO: 137593 - DNA, 50 bp, Artificial
  Synthetic oligonucleotide
agcacctgtggcggcatcgaacttcgccgatgagaggaacgtcccgagcc

SEQ ID NO: 137594 - DNA, 55 bp, Artificial
  Synthetic oligonucleotide
gagtcgtctcgacatctatcgaggccagcggagctaacccgaaatcgacgtccgt

SEQ ID NO: 137595 - DNA, 50 bp, Artificial
  Synthetic oligonucleotide
agcacttcgcctcttcgtgcgcgctgtaccatcccacagtacggcagcgg

SEQ ID NO: 137596 - DNA, 50 bp, Artificial
  Synthetic oligonucleotide
agcagaactggtccgctgaggcaaaatgggagtggcgtccatcccaacga

SEQ ID NO: 137597 - DNA, 50 bp, Artificial
  Synthetic oligonucleotide
agcagcgaggtatatcccgacgagcgctcccccaagcccgtagatcctga

SEQ ID NO: 137598 - DNA, 50 bp, Artificial
  Synthetic oligonucleotide
agcaggcacaccgcatatccgctccgctacctcaggagtgtattctgcga

SEQ ID NO: 137599 - DNA, 50 bp, Artificial
  Synthetic oligonucleotide
aaacgcgcccgaatgctcgcagaagagcgggttatctgccgggggagtat

SEQ ID NO: 137600 - DNA, 50 bp, Artificial
  Synthetic oligonucleotide
aaagcccgggagctcgggtgcaaggctgctgttacgtacaggagcgtagt

SEQ ID NO: 137601 - DNA, 50 bp, Artificial
  Synthetic oligonucleotide
aaatggagaccccacatcccggcagcctctcttgctccgagcgcgagatc

SEQ ID NO: 137602 - DNA, 50 bp, Artificial
  Synthetic oligonucleotide
aaattggcgtctcggcaagatcgcaggaccctctctgcatcgggagagga

SEQ ID NO: 137603 - DNA, 50 bp, Artificial
  Synthetic oligonucleotide
aaccccggaggctactcatcctggcggatgtatcagcaggggacggtcgg

SEQ ID NO: 137604 - DNA, 50 bp, Artificial
  Synthetic oligonucleotide
aacccgcctctctcgccacgcggccgtacctctccttcacggttattttg

SEQ ID NO: 137605 - DNA, 55 bp, Artificial
  Synthetic oligonucleotide
gacggctcttttgcggtgataaactcgtgcatcggccacagagcgaatgatgcgt

SEQ ID NO: 137606 - DNA, 50 bp, Artificial
  Synthetic oligonucleotide
aacccgtccgataagaacagcgccggggctcacccatgcggtctcatcca

SEQ ID NO: 137607 - DNA, 50 bp, Artificial
  Synthetic oligonucleotide
aaccgaatcccacccaccgatccaaaccggtcgctccagacaggctgata

SEQ ID NO: 137608 - DNA, 50 bp, Artificial
  Synthetic oligonucleotide
aaccgcgtgtacggttccacaggatgccagccgacatgcacctcgcgatg

SEQ ID NO: 137609 - DNA, 50 bp, Artificial
  Synthetic oligonucleotide
aacgacggccgagtctccattgccacgggctatttcaacgtggagggcta

SEQ ID NO: 137610 - DNA, 50 bp, Artificial
  Synthetic oligonucleotide
aactctgcaggcgtctttccgggatgtcccccacgcgggtaaactctgaa

SEQ ID NO: 137611 - DNA, 50 bp, Artificial
  Synthetic oligonucleotide
aagaccgatgaccagggaaacaagctatgggagaggacgtttggcggagc

SEQ ID NO: 137612 - DNA, 50 bp, Artificial
  Synthetic oligonucleotide
aagggcgtcccagtggtcaccggattcatagcccaggacgagaaggggac

SEQ ID NO: 137613 - DNA, 50 bp, Artificial
  Synthetic oligonucleotide
acagcctcatgggactatggcgaaacagcctgcaggaggagcggcagacc

SEQ ID NO: 137614 - DNA, 50 bp, Artificial
  Synthetic oligonucleotide
acaggcgcgttgggaggatgcttctcgcatccaaggctcgtggcgaggcc

SEQ ID NO: 137615 - DNA, 50 bp, Artificial
  Synthetic oligonucleotide
acatcggagtccagcggcctccaggcctactcgatcggttccgggagccc

SEQ ID NO: 137616 - DNA, 55 bp, Artificial
  Synthetic oligonucleotide
gatgcaatgtcagggcaggagctctcagattctaaatggatcggagattgtacgg

SEQ ID NO: 137617 - DNA, 50 bp, Artificial
  Synthetic oligonucleotide
accaagcgatgtggcaagtgcctggtccggaagcaggtaacctccggtga

SEQ ID NO: 137618 - DNA, 50 bp, Artificial
  Synthetic oligonucleotide
accacgtcctgggtccctatccggagcacagtctcctcagcagaggcgca

SEQ ID NO: 137619 - DNA, 50 bp, Artificial
  Synthetic oligonucleotide
accctaggagcctgcccgctggccctatcgttccccgctccgtctggcag

SEQ ID NO: 137620 - DNA, 50 bp, Artificial
  Synthetic oligonucleotide
accctcatgcgtaagttcaatggtgaggtgcggcggagggtcatggggta

SEQ ID NO: 137621 - DNA, 50 bp, Artificial
  Synthetic oligonucleotide
accgacagcgtactccgtcccccataactcctccctcgggatcacccgtc

SEQ ID NO: 137622 - DNA, 50 bp, Artificial
  Synthetic oligonucleotide
accgttgcaccctctgtacctacggcccctgcgacctgacgggggacaag

SEQ ID NO: 137623 - DNA, 50 bp, Artificial
  Synthetic oligonucleotide
aggtgtttccggcatgcaaacggagaaggtccggatttcccggccaaagc

SEQ ID NO: 137624 - DNA, 50 bp, Artificial
  Synthetic oligonucleotide
agtacgagggctcagcgaaatgcgaaggcctctgcgaggtcagaacgcct

SEQ ID NO: 137625 - DNA, 50 bp, Artificial
  Synthetic oligonucleotide
agtgcagcccatactgtggctgggcgtcttcggaacgatcatgggccggg

SEQ ID NO: 137626 - DNA, 50 bp, Artificial
  Synthetic oligonucleotide
atacctaccgtcgtccaggggcggtcggttatcgcagatccgcatgctga

SEQ ID NO: 137627 - DNA, 55 bp, Artificial
  Synthetic oligonucleotide
gacgcttctgtggacgcaatagtctctgatacaccatacggcagatccgcggtga

SEQ ID NO: 137628 - DNA, 50 bp, Artificial
  Synthetic oligonucleotide
ataggccgcattgggtaggcggacggcgtagctcgagattcacagccggc

SEQ ID NO: 137629 - DNA, 50 bp, Artificial
  Synthetic oligonucleotide
ataggcggccaccaccctatagccgtaaaccggaggggccatgccgacgg

SEQ ID NO: 137630 - DNA, 50 bp, Artificial
  Synthetic oligonucleotide
atagtctcagagcccgaaacgcgcccgaatgctcgcagaagagcgggtta

SEQ ID NO: 137631 - DNA, 50 bp, Artificial
  Synthetic oligonucleotide
atcacggaaggtgagcgcgaggcacgacagctttcagagcgggctcagtc

SEQ ID NO: 137632 - DNA, 50 bp, Artificial
  Synthetic oligonucleotide
atcatctcctcaggcgcgaggacggctgtgcccgtggctaaaagccgatc

SEQ ID NO: 137633 - DNA, 50 bp, Artificial
  Synthetic oligonucleotide
atcctgggtgggctggagaacgacgactgcgcggttatcgatgcgggaga

SEQ ID NO: 137634 - DNA, 50 bp, Artificial
  Synthetic oligonucleotide
atcgccaaaaggtcgatgtaggcccaccggcgctttcgaaaagccctccg

SEQ ID NO: 137635 - DNA, 50 bp, Artificial
  Synthetic oligonucleotide
atcgctacaccggatagggctgaagttccagagcggacggcaatctgggc

SEQ ID NO: 137636 - DNA, 50 bp, Artificial
  Synthetic oligonucleotide
atcggttccgggagcccgtatcagtacacatcggagtccagcggcctcca

SEQ ID NO: 137637 - DNA, 50 bp, Artificial
  Synthetic oligonucleotide
atcgtctgtcgggacggatccacccacaggataaggagggaggagctcga

SEQ ID NO: 137638 - DNA, 55 bp, Artificial
  Synthetic oligonucleotide
gaccgcactagtagtgatgtttctcgttccttgctcctctaagagaatgatgcta

SEQ ID NO: 137639 - DNA, 50 bp, Artificial
  Synthetic oligonucleotide
atctcccggagcaaggccggtcctgtccatgatgtggattggtcctgacg

SEQ ID NO: 137640 - DNA, 50 bp, Artificial
  Synthetic oligonucleotide
atctgggccctcttgccgttgccggtctgagagtagatgctagcgaggga

SEQ ID NO: 137641 - DNA, 50 bp, Artificial
  Synthetic oligonucleotide
atgagctgcagcgaaaggtcctggcggcgttggatgtctcctacaccgat

SEQ ID NO: 137642 - DNA, 50 bp, Artificial
  Synthetic oligonucleotide
atgcaccactctggattttgggccagtgcgaagccgcagttatgctgcga

SEQ ID NO: 137643 - DNA, 50 bp, Artificial
  Synthetic oligonucleotide
atggggccccgacgggagctcgccatccctaacccgaattagaggcgtac

SEQ ID NO: 137644 - DNA, 50 bp, Artificial
  Synthetic oligonucleotide
attaagactgcaggccactatcaccccctggcaccggggtctgccgttac

SEQ ID NO: 137645 - DNA, 50 bp, Artificial
  Synthetic oligonucleotide
attcctcgccctgggaatgagcccggatagggtggaccgcttccgtaagg

SEQ ID NO: 137646 - DNA, 50 bp, Artificial
  Synthetic oligonucleotide
caaggtccggatgatcccgtcccggtaagctggggcgttgacgacgcaga

SEQ ID NO: 137647 - DNA, 50 bp, Artificial
  Synthetic oligonucleotide
cacggcatccctccataggccaatgccctccatccagttggggcgctgtc

SEQ ID NO: 137648 - DNA, 50 bp, Artificial
  Synthetic oligonucleotide
cactggactatcacgcagcgtccatctcgcgggagcccgattcaccgaag

SEQ ID NO: 137649 - DNA, 55 bp, Artificial
  Synthetic oligonucleotide
gcacatagtgctctgtgtcagggacaaagtgctgaagactcctctacggatgcct

SEQ ID NO: 137650 - DNA, 50 bp, Artificial
  Synthetic oligonucleotide
agccacgggcaccaggactatcgcatccaggtgcggatccactatgggcc

SEQ ID NO: 137651 - DNA, 50 bp, Artificial
  Synthetic oligonucleotide
agccagatcccgcgcacagaccaagaggctccggcgcatcacctgaatgg

SEQ ID NO: 137652 - DNA, 50 bp, Artificial
  Synthetic oligonucleotide
agccattgcgttgagttgttcgcgtggcatttcgctcatagggctcggct

SEQ ID NO: 137653 - DNA, 50 bp, Artificial
  Synthetic oligonucleotide
agccccaggcttgtccccggggtgaccacgtacaggagagatcgcgaatc

SEQ ID NO: 137654 - DNA, 50 bp, Artificial
  Synthetic oligonucleotide
agcctggaggacagccggaaggtccactacataaggcccctcgcgggata

SEQ ID NO: 137655 - DNA, 50 bp, Artificial
  Synthetic oligonucleotide
agcgcgaggcacgacagctttcagagcgggctcagtcgaagatctcggac

SEQ ID NO: 137656 - DNA, 50 bp, Artificial
  Synthetic oligonucleotide
agcggcagccctgatctcatcggcggtggtaacaacccgagataccgtcc

SEQ ID NO: 137657 - DNA, 50 bp, Artificial
  Synthetic oligonucleotide
agcggcccggcagcaaagctcatggaggcccggggagttccggccagcga

SEQ ID NO: 137658 - DNA, 50 bp, Artificial
  Synthetic oligonucleotide
agcggcgtggccattgttctcccataggctctggtgatgaacctcccgcc

SEQ ID NO: 137659 - DNA, 50 bp, Artificial
  Synthetic oligonucleotide
agctctcgccacagagggcatccagcgggggcacatgtcgctgcacgcaa

SEQ ID NO: 137660 - DNA, 55 bp, Artificial
  Synthetic oligonucleotide
gcactcaaccccgccactcttcagaacgggagctatctcctctgcagatctcagg

SEQ ID NO: 137661 - DNA, 50 bp, Artificial
  Synthetic oligonucleotide
agctgcagtgctccgtaactcctgtctgatgcgagcgtgccgtttccgag

SEQ ID NO: 137662 - DNA, 50 bp, Artificial
  Synthetic oligonucleotide
agctggctgacctcatactcagggcgagctttggcggactgccggagagc

SEQ ID NO: 137663 - DNA, 50 bp, Artificial
  Synthetic oligonucleotide
aggacgtgacctcctcagacacggcatccctccataggccaatgccctcc

SEQ ID NO: 137664 - DNA, 50 bp, Artificial
  Synthetic oligonucleotide
aggagcgaaccctaacgagcgtactggcaacgggacgggtccaaacgact

SEQ ID NO: 137665 - DNA, 50 bp, Artificial
  Synthetic oligonucleotide
aggagcttccgggtggcatcggagcttccgaatttgggaacgaccctcga

SEQ ID NO: 137666 - DNA, 50 bp, Artificial
  Synthetic oligonucleotide
aggcccaatctggccagtcggaacaggctctcctcatccgtcccacctac

SEQ ID NO: 137667 - DNA, 50 bp, Artificial
  Synthetic oligonucleotide
aggcctctggggcaactccccagatttcgccgtttgagcctcttcagagc

SEQ ID NO: 137668 - DNA, 50 bp, Artificial
  Synthetic oligonucleotide
aggcctggctccctccagtcgatctcagagcgtcgggatgtaggtgggtt

SEQ ID NO: 137669 - DNA, 50 bp, Artificial
  Synthetic oligonucleotide
aggctcggcccatcgtcgtctacaccaatgtcggcgttgaggcctcttta

SEQ ID NO: 137670 - DNA, 50 bp, Artificial
  Synthetic oligonucleotide
agggaggtgatcgcagggacacctggggagacgatccacagggagaacgg

SEQ ID NO: 137671 - DNA, 60 bp, Artificial
  Synthetic oligonucleotide
ttatgaatccagcaacaattagtgagatggctctatgaaatctgacgaatatgcatatct

SEQ ID NO: 137672 - DNA, 55 bp, Artificial
  Synthetic oligonucleotide
gcactcttagccaatccctgccttgttaccaaatgagtaatatcgatagctgatt

SEQ ID NO: 137673 - DNA, 50 bp, Artificial
  Synthetic oligonucleotide
agggctaaagatgcggccttagcgagcatatcggtccccagcttgccctc

SEQ ID NO: 137674 - DNA, 50 bp, Artificial
  Synthetic oligonucleotide
aggggcgcgagccctcgagaggtgacagacatttgcccaatctgcaacta

SEQ ID NO: 137675 - DNA, 50 bp, Artificial
  Synthetic oligonucleotide
aggggtggggacgatggctacctggactgggtatccaggtcggtgggagg

SEQ ID NO: 137676 - DNA, 50 bp, Artificial
  Synthetic oligonucleotide
aggtatgcgggaagatctactggagggggacccactggcaggggattcga

SEQ ID NO: 137677 - DNA, 50 bp, Artificial
  Synthetic oligonucleotide
aggtccgccaacgagattatcacggaaggtgagcgcgaggcacgacagct

SEQ ID NO: 137678 - DNA, 55 bp, Artificial
  Synthetic oligonucleotide
gcccattcctatgccgcatagcatgaaacccacctggttgatgaggctataggag

SEQ ID NO: 137679 - DNA, 55 bp, Artificial
  Synthetic oligonucleotide
gccgcatctacatcaaacccacggatcagcacgagatctgtgaggcggtatctgg

SEQ ID NO: 137680 - DNA, 55 bp, Artificial
  Synthetic oligonucleotide
gcctgactctcgttgggacagacgcctttgacccttcgaggacatatctcacagc

SEQ ID NO: 137681 - DNA, 55 bp, Artificial
  Synthetic oligonucleotide
gcgataagccgctcggggagctgcaaattcctagcgatcagatcattgtgagtgc

SEQ ID NO: 137682 - DNA, 55 bp, Artificial
  Synthetic oligonucleotide
gcgatacactagaacaagcatcctgcgctggcagaaagctatttattgctgaggc

SEQ ID NO: 137683 - DNA, 55 bp, Artificial
  Synthetic oligonucleotide
gcggaacctgttcaacatctcgaagttcgctatctgcctcgtactcgacaatttg

SEQ ID NO: 137684 - DNA, 55 bp, Artificial
  Synthetic oligonucleotide
gctccttgaagtgccctatcgcaggaagttctcccctcctcctcaactctgcaat

SEQ ID NO: 137685 - DNA, 55 bp, Artificial
  Synthetic oligonucleotide
gcttaaaggagcacgagataatacagcgttgcccattaacgttcttaaagctcta

SEQ ID NO: 137686 - DNA, 55 bp, Artificial
  Synthetic oligonucleotide
gcttaagccagaagccgggccttactgcttttggatgttctgagacactaatcct

SEQ ID NO: 137687 - DNA, 59 bp, Artificial
  Synthetic oligonucleotide
ttaataaatgtcgcgcttttgccatagctaaggcgactgccttaccgttagctatgtct

SEQ ID NO: 137688 - DNA, 55 bp, Artificial
  Synthetic oligonucleotide
ggaactccgcagattatgtcatagtgctcagaaacggcgagtacgtcacagagtc

SEQ ID NO: 137689 - DNA, 55 bp, Artificial
  Synthetic oligonucleotide
cataaagatctgatcgttgccacaataactggcgacgaagtgccgtcgattcgag

SEQ ID NO: 137690 - DNA, 55 bp, Artificial
  Synthetic oligonucleotide
catcattccgcctcagccagggtagcctatcgatggacaaactggtcatggtcct

SEQ ID NO: 137691 - DNA, 55 bp, Artificial
  Synthetic oligonucleotide
ccaccagaggtattcgcagtgcttcgaagctggatatggtcttttgggcggtctc

SEQ ID NO: 137692 - DNA, 55 bp, Artificial
  Synthetic oligonucleotide
ccccataagtaatctttaagacgctatagcttaggtaatgaggcatatcgaggca

SEQ ID NO: 137693 - DNA, 55 bp, Artificial
  Synthetic oligonucleotide
ccccgaggctctgaccatcaagaaccacccgcacttcaatgagatctcccaggga

SEQ ID NO: 137694 - DNA, 55 bp, Artificial
  Synthetic oligonucleotide
ccccgtctgctccaccagatagtccatcgatcggggttggtctgccagcataaga

SEQ ID NO: 137695 - DNA, 55 bp, Artificial
  Synthetic oligonucleotide
cccgagctgtacttatcgaggatcgcctttgcatgggctcgtgctgcagttaatg

SEQ ID NO: 137696 - DNA, 55 bp, Artificial
  Synthetic oligonucleotide
cccgtgcaatcgttatgctaggttgtcctttataccttcagattccggacaatta

SEQ ID NO: 137697 - DNA, 55 bp, Artificial
  Synthetic oligonucleotide
cctctgcgccaagaactacgaggtgggatcgatctattccgagagctactctgag

SEQ ID NO: 137698 - DNA, 55 bp, Artificial
  Synthetic oligonucleotide
caactcaaggtgggaaaggagcccatgtcccaaaaacttacttcatgagcaaacc

SEQ ID NO: 137699 - DNA, 55 bp, Artificial
  Synthetic oligonucleotide
atatctcccttattcccggtaatgaccacagttgccacattcggataaccgctta

SEQ ID NO: 137700 - DNA, 53 bp, Artificial
  Synthetic oligonucleotide
cgggccgaacgctctaggtcaggtcaaaccgaacgtactagcccctggctacc

SEQ ID NO: 137701 - DNA, 52 bp, Artificial
  Synthetic oligonucleotide
agtgggtccgctcggaacttaaggactggtggataaccccgcaaaaggcctg

SEQ ID NO: 137702 - DNA, 55 bp, Artificial
  Synthetic oligonucleotide
cggggaggtcactcgtatgctatacagtacaccacggacacgccgcattttgggg

SEQ ID NO: 137703 - DNA, 55 bp, Artificial
  Synthetic oligonucleotide
cgtagatctcggttgaatgggcttcggtagacggattttaaccacaaaagtgcac

SEQ ID NO: 137704 - DNA, 55 bp, Artificial
  Synthetic oligonucleotide
cgtgatgacggggctccgctcaaccagcgatgctcgtagcagtgcctttgcggtt

SEQ ID NO: 137705 - DNA, 52 bp, Artificial
  Synthetic oligonucleotide
ctacgccccaatctttggccatcgttgagaccgggaataaccgtttaataag

SEQ ID NO: 137706 - DNA, 55 bp, Artificial
  Synthetic oligonucleotide
ctacgtaggcctctttagatctcctcacagcctcggggatctctcttttaaggac

SEQ ID NO: 137707 - DNA, 55 bp, Artificial
  Synthetic oligonucleotide
ctcggtccagtcaggagacgtcccattggttcaggccagcgtcctcttaatcggg

SEQ ID NO: 137708 - DNA, 55 bp, Artificial
  Synthetic oligonucleotide
ctctccgcaggttagctttgctcaggttagccccaatcaagttagccccacccag

SEQ ID NO: 137709 - DNA, 59 bp, Artificial
  Synthetic oligonucleotide
aacaccatcctacctaaacgctgttgatctgcaaagcatctataagtcttcttttccag

SEQ ID NO: 137710 - DNA, 55 bp, Artificial
  Synthetic oligonucleotide
ctcttcatcgtagggctctgaccttatatcgtcaatcctggctaaaggcgggagt

SEQ ID NO: 137711 - DNA, 55 bp, Artificial
  Synthetic oligonucleotide
ctgtctgaaggatggtgtagtcgccaagcctaaaggggattatggcatcggagac

SEQ ID NO: 137712 - DNA, 55 bp, Artificial
  Synthetic oligonucleotide
gacagcgcttctcaggtttcttcaagcgaacgcctctgatgctgtgaaacccgtt

SEQ ID NO: 137713 - DNA, 55 bp, Artificial
  Synthetic oligonucleotide
gggtcttgtagcgcatgatcaagaggtgcgtcctgccgaagcgaagcacattacg

SEQ ID NO: 137714 - DNA, 55 bp, Artificial
  Synthetic oligonucleotide
gggttccagacttcttactggtaccagagggccaacgagactgtcaccatacccg

SEQ ID NO: 137715 - DNA, 55 bp, Artificial
  Synthetic oligonucleotide
ggtgcccgtaacagtgatgtacacggatccggtggctatgttatcgcccacgttc

SEQ ID NO: 137716 - DNA, 55 bp, Artificial
  Synthetic oligonucleotide
ggttgtttgccagaatgacttttgagggctgttgaacgctggatgcgaagttcta

SEQ ID NO: 137717 - DNA, 55 bp, Artificial
  Synthetic oligonucleotide
gtaaaggcaacaacggccatattagcacacttgagcctctaatacctatttctcg

SEQ ID NO: 137718 - DNA, 55 bp, Artificial
  Synthetic oligonucleotide
gtgacccaacggccggcgatcccaaaccctaatatgaggtgccttaaacgacagc

SEQ ID NO: 137719 - DNA, 55 bp, Artificial
  Synthetic oligonucleotide
tacctggtttatggaatccattggagcgaaatcccggtagaccatgtctgcatcg

SEQ ID NO: 137720 - DNA, 60 bp, Artificial
  Synthetic oligonucleotide
gggcgaactgcagggacagatcaaggggctcacaaggattgagatgggcgacgatgggac

SEQ ID NO: 137721 - DNA, 55 bp, Artificial
  Synthetic oligonucleotide
acatagtcgcctctacatggctaccacccgtccccagcggccccttcaagaggct

SEQ ID NO: 137722 - DNA, 55 bp, Artificial
  Synthetic oligonucleotide
tcagaaaaggatcaggcatcagcagagattattggcctcaatcgcgatctagagc

SEQ ID NO: 137723 - DNA, 55 bp, Artificial
  Synthetic oligonucleotide
aatgcgaagtcgagtggacggagcgattgaggttctgcgggccatagggcggtcg

SEQ ID NO: 137724 - DNA, 55 bp, Artificial
  Synthetic oligonucleotide
tcatcttttgatttcgaggtcccagtacggggatgctcctaaagctcttcggaac

SEQ ID NO: 137725 - DNA, 55 bp, Artificial
  Synthetic oligonucleotide
tcatgcgcgggattccgtaaaagtcgcgatcctcatcaagctgtacgggccctct

SEQ ID NO: 137726 - DNA, 55 bp, Artificial
  Synthetic oligonucleotide
tcctttgagtccaaagacgcgcgctatggttactaccttcgacctgtagccagcc

SEQ ID NO: 137727 - DNA, 55 bp, Artificial
  Synthetic oligonucleotide
tctccataacagcatgttccgaatgaaacttcttgaaagcggttgctagcttttc

SEQ ID NO: 137728 - DNA, 55 bp, Artificial
  Synthetic oligonucleotide
tctgcattgatgttgcccagaagcaccattctcgctatctcaagcgtctccctgt

SEQ ID NO: 137729 - DNA, 55 bp, Artificial
  Synthetic oligonucleotide
tggggtcgcacggaatgtgggacttcctgtacacacctgcgatcgagccatcagc

SEQ ID NO: 137730 - DNA, 55 bp, Artificial
  Synthetic oligonucleotide
ggaggtctggagggcacagagcatcctcggaagggatttcaagtatcctgagacg

SEQ ID NO: 137731 - DNA, 60 bp, Artificial
  Synthetic oligonucleotide
cgaatgcattttaagattgtatgagcttcagggctcaaattttctaatatcattgcggat

SEQ ID NO: 137732 - DNA, 55 bp, Artificial
  Synthetic oligonucleotide
ggacgggagaccacatctgcaacatctgtgagacaatcgtctacatagtggaagc

SEQ ID NO: 137733 - DNA, 55 bp, Artificial
  Synthetic oligonucleotide
ggatatctcccacaattcttctaggcagaggcttctctaaaacagatccatggtc

SEQ ID NO: 137734 - DNA, 55 bp, Artificial
  Synthetic oligonucleotide
ggatcgccacaagatctatgaagatccgcttagcatagcctcaatacataagaga

SEQ ID NO: 137735 - DNA, 55 bp, Artificial
  Synthetic oligonucleotide
ggattagtaatactaccttcaggcgcgatggagagcggtaatcctgcgttataca

SEQ ID NO: 137736 - DNA, 55 bp, Artificial
  Synthetic oligonucleotide
ggcgagaacccgtaggcctggctccctccagtcgatctcagagcgtcgggatgta

SEQ ID NO: 137737 - DNA, 51 bp, Artificial
  Synthetic oligonucleotide
gggatctacctctcggggaagggagaacgccttaaacgggtaggggcaaga

SEQ ID NO: 137738 - DNA, 55 bp, Artificial
  Synthetic oligonucleotide
agacagagaatatggcctctgttcctctgcgattctattccccgatgccaccggg

SEQ ID NO: 137739 - DNA, 55 bp, Artificial
  Synthetic oligonucleotide
agaatctcaatacatcggtcgcatctagtcccttcttccgcctataccaggcagc

SEQ ID NO: 137740 - DNA, 54 bp, Artificial
  Synthetic oligonucleotide
acgtggtccggatatacggcaaagacgggtcctacctctcctggtcgtgcgacc

SEQ ID NO: 137741 - DNA, 55 bp, Artificial
  Synthetic oligonucleotide
gggatgtagactcggcatagaggcgaacgcatccatcgggagcataatatcagcg

SEQ ID NO: 137742 - DNA, 53 bp, Artificial
  Synthetic oligonucleotide
cctacttgaaaataacccctcccggtgctggtatttcgattcgtgccgtctac

SEQ ID NO: 137743 - DNA, 55 bp, Artificial
  Synthetic oligonucleotide
actgtgaaagatcagggaaaggaggtgtctgcgaagctatcgtttgggttgctgt

SEQ ID NO: 137744 - DNA, 55 bp, Artificial
  Synthetic oligonucleotide
agaactgatgccaggagatacgctatgcggctcatttcgacttatcccaattgtt

SEQ ID NO: 137745 - DNA, 54 bp, Artificial
  Synthetic oligonucleotide
gaaggggagaggttgccaacatatccggagccacgatcgctggagaggaggagc

SEQ ID NO: 137746 - DNA, 54 bp, Artificial
  Synthetic oligonucleotide
tctcccggggagaagtcctataacttcagaggatcttcctgccgaacatgaatg

SEQ ID NO: 137747 - DNA, 54 bp, Artificial
  Synthetic oligonucleotide
gagtggcaaaggcataatcgccagcagtcacataaggtttcatcattgatcctg

SEQ ID NO: 137748 - DNA, 53 bp, Artificial
  Synthetic oligonucleotide
agatcggaggtgtgtgaggttggatgtctgaaatcatttgttgtggacacagg

SEQ ID NO: 137749 - DNA, 53 bp, Artificial
  Synthetic oligonucleotide
tcataagggcaactgacctgtctacacaaagtcccttcttgcttgtaagcgca

SEQ ID NO: 137750 - DNA, 53 bp, Artificial
  Synthetic oligonucleotide
ggatagatggggccataactccggcgagcgacgatcttgtgaagactgctata

SEQ ID NO: 137751 - DNA, 53 bp, Artificial
  Synthetic oligonucleotide
gggtcatatagcagacgatcaccaccgctcttccgggaggggatctgcggtcg

SEQ ID NO: 137752 - DNA, 52 bp, Artificial
  Synthetic oligonucleotide
acaggggcagtatatgtatagacgggagtgtaggtcgggtaatagtaggtcg

SEQ ID NO: 137753 - DNA, 57 bp, Artificial
  Synthetic oligonucleotide
gctacaacaaagaataccaagtttatatatcgaatagtcggacattcaagctcaagg

SEQ ID NO: 137754 - DNA, 52 bp, Artificial
  Synthetic oligonucleotide
ccagcatcttagcggggctcgccgataggagggcgatctcgtttgtagccgg

SEQ ID NO: 137755 - DNA, 52 bp, Artificial
  Synthetic oligonucleotide
cgcatccgctcagacgattctcacgtgtacattccagttcttgattcaatca

SEQ ID NO: 137756 - DNA, 52 bp, Artificial
  Synthetic oligonucleotide
tgtcaggaattcatgccacttaacagacgttattttaagcacagatctgccg

SEQ ID NO: 137757 - DNA, 52 bp, Artificial
  Synthetic oligonucleotide
caggggctcgccaaggaccagattccgaaagccgaactttccctcaatcccc

SEQ ID NO: 137758 - DNA, 52 bp, Artificial
  Synthetic oligonucleotide
gtcctcaatagctcgctctgagatcccaccagcccatccttcatctccctga

SEQ ID NO: 137759 - DNA, 52 bp, Artificial
  Synthetic oligonucleotide
tcggctttacggcgtaggggtggctctcggagcccgcgtagatcgccccgat

SEQ ID NO: 137760 - DNA, 51 bp, Artificial
  Synthetic oligonucleotide
gtcggagtaaacccctgcaagcgacagaaggagggctagcaggagtatcat

SEQ ID NO: 137761 - DNA, 51 bp, Artificial
  Synthetic oligonucleotide
tctcaaatgtggctttgtgatccggcctggatgccaggtacttctcgatct

SEQ ID NO: 137762 - DNA, 51 bp, Artificial
  Synthetic oligonucleotide
ccctttgtgcggggagacgtctacatcttcgccgcagatttcaacggtacg

SEQ ID NO: 137763 - DNA, 51 bp, Artificial
  Synthetic oligonucleotide
acaggcatggaatcgggcgagctcgcagagaggatgctgcacgagggcgtt

SEQ ID NO: 137764 - DNA, 56 bp, Artificial
  Synthetic oligonucleotide
tgacgactccgaagctttttggaattacataagagacgaccacaacgaaggcaatt

SEQ ID NO: 137765 - DNA, 58 bp, Artificial
  Synthetic oligonucleotide
gttgaagccaccggcttatatgggagtcatatctaccggtggctaagattggggcaaa

SEQ ID NO: 137766 - DNA, 55 bp, Artificial
  Synthetic oligonucleotide
gaggtgttaactacctgcgcgatagattacacaacctggaagaatgaatatactg

SEQ ID NO: 137767 - DNA, 55 bp, Artificial
  Synthetic oligonucleotide
gagtctctccgataacgtattgattcagatcctctcttgttataccgtctccgaa

SEQ ID NO: 137768 - DNA, 55 bp, Artificial
  Synthetic oligonucleotide
gcttcgacgttcaggtatggaaaggacattcattcaggaattaaggggagattcg

SEQ ID NO: 137769 - DNA, 55 bp, Artificial
  Synthetic oligonucleotide
gagttgcgatgtaatctcaacagtacgcagccttttcacttcactcaggaggacg

SEQ ID NO: 137770 - DNA, 55 bp, Artificial
  Synthetic oligonucleotide
aaccattcctttaacgttcagagtttccagagctatagcttggttttcgcttatg

SEQ ID NO: 137771 - DNA, 55 bp, Artificial
  Synthetic oligonucleotide
gcttacaagttcctcgagactgcagttgtagtactggaaaggtgtgccaagcgga

SEQ ID NO: 137772 - DNA, 55 bp, Artificial
  Synthetic oligonucleotide
gatttgagatgtcggcgtacaatggatcaacatttatgtctgtagtcggggcgac

SEQ ID NO: 137773 - DNA, 55 bp, Artificial
  Synthetic oligonucleotide
aaagtctgcgtctttgagggctccccacggaagacatagagcaaacatattctcc

SEQ ID NO: 137774 - DNA, 55 bp, Artificial
  Synthetic oligonucleotide
gcaacccgagttacgagtgtccttgaggataccgactactcctttgaagtgaaag

SEQ ID NO: 137775 - DNA, 55 bp, Artificial
  Synthetic oligonucleotide
gcactacgatattcccttgttgcagattcctgtatcaactgcggacaatgcgaag

SEQ ID NO: 137776 - DNA, 60 bp, Artificial
  Synthetic oligonucleotide
agaaccagagtcgacactccatgtgttttcgaaatccaaagccatgttatccattgcagc

SEQ ID NO: 137777 - DNA, 55 bp, Artificial
  Synthetic oligonucleotide
gcagggcgattgaatgccgtaagtccccttaatacttttgaacgtggatactgtg

SEQ ID NO: 137778 - DNA, 55 bp, Artificial
  Synthetic oligonucleotide
gcaggtgatgtcattgcggggtatacatgctttaatgatgtgactgctcgggacc

SEQ ID NO: 137779 - DNA, 55 bp, Artificial
  Synthetic oligonucleotide
gctcattgcaagatcctttgatataaacaggccgggtcttccgatcgaccagatc

SEQ ID NO: 137780 - DNA, 55 bp, Artificial
  Synthetic oligonucleotide
gctatgagaacaccattgtaaagtccattgcaggtgtcccgattgcccaggaagg

SEQ ID NO: 137781 - DNA, 55 bp, Artificial
  Synthetic oligonucleotide
gcgtgcagtctcggttgccagctcctctacttcaggcgtcatgtcgaattttcgt

SEQ ID NO: 137782 - DNA, 55 bp, Artificial
  Synthetic oligonucleotide
gccctcggttgtaacttctccagtcgagtatgataggttcacggtgccaggggag

SEQ ID NO: 137783 - DNA, 55 bp, Artificial
  Synthetic oligonucleotide
gcgatttcggttcaaaaggttggccacaataagcgcatattctatctttagagtc

SEQ ID NO: 137784 - DNA, 55 bp, Artificial
  Synthetic oligonucleotide
gcccttgatgaggagcaaagtagtcaggataaacatatgcgacagccgataagag

SEQ ID NO: 137785 - DNA, 55 bp, Artificial
  Synthetic oligonucleotide
tagaccggatttgaatgatacaaccgggtcgggtctcttcattatattctcagcg

SEQ ID NO: 137786 - DNA, 55 bp, Artificial
  Synthetic oligonucleotide
cttccggaatagcacctctaacggtattattcactgataccagcactggtggagt

SEQ ID NO: 137787 - DNA, 59 bp, Artificial
  Synthetic oligonucleotide
attcagctaactggtatctatgaaccgcttgataatgaaagacttataagtttattcac

SEQ ID NO: 137788 - DNA, 55 bp, Artificial
  Synthetic oligonucleotide
cttcgccttcaaaccttatgaagacgcctgaacctgtaatagagacctgaatcga

SEQ ID NO: 137789 - DNA, 55 bp, Artificial
  Synthetic oligonucleotide
aatttgtagtatcggtaggcgtgaaagtggtctgtagggtatgagtaccagctcc

SEQ ID NO: 137790 - DNA, 55 bp, Artificial
  Synthetic oligonucleotide
aatctgttcccggttattaaagatggagtagcccagggacatgtctgtaattgtc

SEQ ID NO: 137791 - DNA, 54 bp, Artificial
  Synthetic oligonucleotide
cttttaccaaaaggacgattcatctaaaagacgatatagcggaaccggtgcagg

SEQ ID NO: 137792 - DNA, 50 bp, Artificial
  Synthetic oligonucleotide
cttttgagaacaagaccctaaaccctttcccgcgaaaagcaacaattaag

SEQ ID NO: 137793 - DNA, 55 bp, Artificial
  Synthetic oligonucleotide
ttcaacaaggcttttgggctcgaaggtccggataagatgcttaaagcctaaagtg

SEQ ID NO: 137794 - DNA, 55 bp, Artificial
  Synthetic oligonucleotide
gaaggggacggttctcgctgggcgactaatgtttataacggatcgagtgccagac

SEQ ID NO: 137795 - DNA, 55 bp, Artificial
  Synthetic oligonucleotide
aagccgtttgtggatgtgattctcactccttcatcgtttaccgttgatctgggtc

SEQ ID NO: 137796 - DNA, 55 bp, Artificial
  Synthetic oligonucleotide
gaatcttttaccatggatttcgttggcggagacagggattttcgtgagctcctcg

SEQ ID NO: 137797 - DNA, 55 bp, Artificial
  Synthetic oligonucleotide
ggagaagtgctttctgtctgtaccggcacatttaacttcattggtctatcccgct

SEQ ID NO: 137798 - DNA, 60 bp, Artificial
  Synthetic oligonucleotide
taactatcacttgtccagagatagttcagtgataggtctttgtttgcatcccatactctg

SEQ ID NO: 137799 - DNA, 55 bp, Artificial
  Synthetic oligonucleotide
gacaagtattgttgaagcacttgtccccggaggcaaagcgaatcccggaccacca

SEQ ID NO: 137800 - DNA, 55 bp, Artificial
  Synthetic oligonucleotide
gacctttatcatgtatagtgtaagtcattggtgcccctactctggagcgtttcat

SEQ ID NO: 137801 - DNA, 55 bp, Artificial
  Synthetic oligonucleotide
gacgcaaaagctgcacttatggcactcacagacgaccaggatactttcatgagcg

SEQ ID NO: 137802 - DNA, 55 bp, Artificial
  Synthetic oligonucleotide
ttgccgtctgctagacggaccctatgttccagttcgtaagtactcttcgtccgga

SEQ ID NO: 137803 - DNA, 55 bp, Artificial
  Synthetic oligonucleotide
gacgtgagggttaccagctcacttctaacccgtcaggaatttcttaatggatcat

SEQ ID NO: 137804 - DNA, 55 bp, Artificial
  Synthetic oligonucleotide
ggaattacataagagacgaccacaacgaaggcaatttaaacaagatcgcggactt

SEQ ID NO: 137805 - DNA, 55 bp, Artificial
  Synthetic oligonucleotide
gactctcagcagacgagctaaatgcagccagttgagatatcatagcataaacgac

SEQ ID NO: 137806 - DNA, 55 bp, Artificial
  Synthetic oligonucleotide
gacttaagtctgtctactgcagtaaatattcaactatcccacttcctaagcagag

SEQ ID NO: 137807 - DNA, 55 bp, Artificial
  Synthetic oligonucleotide
gacttccacgagggtcaggtaaggtttggatacttgttgcgaaaggtcttcagtc

SEQ ID NO: 137808 - DNA, 55 bp, Artificial
  Synthetic oligonucleotide
ttgcctgtccgagagcctggaaaagggttactgtgaccacgttcaggcctatcag

SEQ ID NO: 137809 - DNA, 60 bp, Artificial
  Synthetic oligonucleotide
tatgccgtgccgtaggcagtaccggtggagtacttgccaagcagtcgatagaagggctcg

SEQ ID NO: 137810 - DNA, 55 bp, Artificial
  Synthetic oligonucleotide
gagaaacggttgggtcatccatagcacgcccgacttcatccatactcctgcgcgc

SEQ ID NO: 137811 - DNA, 55 bp, Artificial
  Synthetic oligonucleotide
ttgcgtggggagaatgcacttccagtaacggcgggcaaatagttacaacgccggt

SEQ ID NO: 137812 - DNA, 55 bp, Artificial
  Synthetic oligonucleotide
cagacctgttaagctcaggaatggtcgtgttaagctcgatagtatcattccttgc

SEQ ID NO: 137813 - DNA, 55 bp, Artificial
  Synthetic oligonucleotide
gtggtcattcacccatgccggagtgttagtgtagtcgatgcttgcagcatcgtgt

SEQ ID NO: 137814 - DNA, 55 bp, Artificial
  Synthetic oligonucleotide
caggagctccttctgttccggttacgttccaggctgctatttgccctacaccgtc

SEQ ID NO: 137815 - DNA, 55 bp, Artificial
  Synthetic oligonucleotide
caggcacatagaagctcgcacctctgtcctcacacatgagatcaagcatttcacg

SEQ ID NO: 137816 - DNA, 55 bp, Artificial
  Synthetic oligonucleotide
gtggtcaaggtccggtattattaattggatattaccaaggctcccgatgttatcc

SEQ ID NO: 137817 - DNA, 55 bp, Artificial
  Synthetic oligonucleotide
gtgggtctagatgtcgggattaaggattttgctatactttccacaggagaaacga

SEQ ID NO: 137818 - DNA, 52 bp, Artificial
  Synthetic oligonucleotide
caggttttccccgaagaaaaccctggaaaggactgcaacaaatgccggagcc

SEQ ID NO: 137819 - DNA, 55 bp, Artificial
  Synthetic oligonucleotide
cagtgacaggcttaactatggtgtcgcgccaaattcataccagagtgcaatacct

SEQ ID NO: 137820 - DNA, 57 bp, Artificial
  Synthetic oligonucleotide
agcggtatccaggtagagataagaacagacgatggtaccaaactgtcaaacgacaaa

SEQ ID NO: 137821 - DNA, 55 bp, Artificial
  Synthetic oligonucleotide
gtggcagagtgatagacgagacgcgcaatatgcttattatcgaaacggaagacac

SEQ ID NO: 137822 - DNA, 55 bp, Artificial
  Synthetic oligonucleotide
tcgtaagtcaatacaatatcatatacctgaccagcaacaagactcgcatccgagt

SEQ ID NO: 137823 - DNA, 54 bp, Artificial
  Synthetic oligonucleotide
catccgggcagcaaataatcagggttccggaaaacggcgggatcttttccgcag

SEQ ID NO: 137824 - DNA, 55 bp, Artificial
  Synthetic oligonucleotide
catcgaggctgtggactatgatagagctggaaccgcgagtttcgacaaccccaac

SEQ ID NO: 137825 - DNA, 55 bp, Artificial
  Synthetic oligonucleotide
catgttccagtggcacacggtgcatttaccgtagcctatccttacataagccatg

SEQ ID NO: 137826 - DNA, 55 bp, Artificial
  Synthetic oligonucleotide
cattcgctgttgcgttagtgtaatttacaacatcggtaggcataaaatcaacatg

SEQ ID NO: 137827 - DNA, 55 bp, Artificial
  Synthetic oligonucleotide
ccacgcacacataacaaaacgagcttgctggtaaggagggtgagccgaacaatcc

SEQ ID NO: 137828 - DNA, 51 bp, Artificial
  Synthetic oligonucleotide
ccactacccttgtgggagccgatgtgaacggaaaaccaaactaccttacgg

SEQ ID NO: 137829 - DNA, 55 bp, Artificial
  Synthetic oligonucleotide
ccagaagcggtggtccccagattaactggtctattcctgtaaggatctcaagtac

SEQ ID NO: 137830 - DNA, 55 bp, Artificial
  Synthetic oligonucleotide
ccagctaggaagatttgtaagcacctactattacccacatggtgagagactacca

SEQ ID NO: 137831 - DNA, 59 bp, Artificial
  Synthetic oligonucleotide
taagctcttctgaacttgtaacgtttacccatgcatgtgtatcgtttattcgtttgata

SEQ ID NO: 137832 - DNA, 55 bp, Artificial
  Synthetic oligonucleotide
atgacatcaggttatagtccctgtaaatcaggcgggatagttgcagaagggagtt

SEQ ID NO: 137833 - DNA, 55 bp, Artificial
  Synthetic oligonucleotide
tcttaatggtcttcactatctggcgcatcgtgcgtaaattgggttcccggttgcc

SEQ ID NO: 137834 - DNA, 55 bp, Artificial
  Synthetic oligonucleotide
cccatggaacaactgcagctcttgcactcttaaatgatgctgttaagaagggagg

SEQ ID NO: 137835 - DNA, 55 bp, Artificial
  Synthetic oligonucleotide
atcttccgggacaggttgtggtctaagtgcatttctaagtacccattcctgttct

SEQ ID NO: 137836 - DNA, 55 bp, Artificial
  Synthetic oligonucleotide
cccctccctgataagattccgactctacatctatcctgtcgcatccgtggagtgt

SEQ ID NO: 137837 - DNA, 55 bp, Artificial
  Synthetic oligonucleotide
atgctactaacaccgcgtactccagcatagacggtgtcgtgtacgataaggccgg

SEQ ID NO: 137838 - DNA, 55 bp, Artificial
  Synthetic oligonucleotide
tattgctctttacagtaattagacattcaatggaatgaccctcttgctgcatgag

SEQ ID NO: 137839 - DNA, 55 bp, Artificial
  Synthetic oligonucleotide
taaaccgttggctttcacgtaccctgttgccccatcctcgtaagccacatgatac

SEQ ID NO: 137840 - DNA, 55 bp, Artificial
  Synthetic oligonucleotide
gtttcttattgtagaaatttggtggtccgatatacgatgcagcagcagacgacgt

SEQ ID NO: 137841 - DNA, 55 bp, Artificial
  Synthetic oligonucleotide
attacatctgtcagtgactgtgcacggaaaatgaagcggaacaggattgaccagg

SEQ ID NO: 137842 - DNA, 58 bp, Artificial
  Synthetic oligonucleotide
atctgtaaatactactcttgtcctgacttcgatttttctaaatgctctaagtatcgtc

SEQ ID NO: 137843 - DNA, 55 bp, Artificial
  Synthetic oligonucleotide
tcaactgcatatatcatatcgcctacataatctccgcctgcggtttctataacgt

SEQ ID NO: 137844 - DNA, 55 bp, Artificial
  Synthetic oligonucleotide
tcaggttagtcacaaatgtactgaagaagtctggatctatcgcgaatagtggtgc

SEQ ID NO: 137845 - DNA, 55 bp, Artificial
  Synthetic oligonucleotide
gttctcctgcattcagttttacccaacgggtgaagggtcgctcgatcctgtttac

SEQ ID NO: 137846 - DNA, 55 bp, Artificial
  Synthetic oligonucleotide
caaactggtattatattcggagcaggaacgctgcctttcagagggcaccttgacc

SEQ ID NO: 137847 - DNA, 55 bp, Artificial
  Synthetic oligonucleotide
taagcaaggtctgaatgtttctgataattgagacgaaaatgggttttgggatcag

SEQ ID NO: 137848 - DNA, 55 bp, Artificial
  Synthetic oligonucleotide
tcctcagtggacgattcttgtcggaggtgccctctgtattgctggcagtttcatt

SEQ ID NO: 137849 - DNA, 55 bp, Artificial
  Synthetic oligonucleotide
caaccagttatttgcccctcctgaacctgtatagaggagataatcgggcagttcg

SEQ ID NO: 137850 - DNA, 55 bp, Artificial
  Synthetic oligonucleotide
caagcagacatacacccagtacggaggggttcgcccttacggaaccgcactcctg

SEQ ID NO: 137851 - DNA, 55 bp, Artificial
  Synthetic oligonucleotide
tatcttttatctgaaggctcaaagaagggcgggcagaaagatgagtttcgagtcg

SEQ ID NO: 137852 - DNA, 55 bp, Artificial
  Synthetic oligonucleotide
caataccggaattagcttaagcagcgaagtaacaggtggagtcttagccgagggg

SEQ ID NO: 137853 - DNA, 59 bp, Artificial
  Synthetic oligonucleotide
tacgatattgtcacatctgccgcttcctctatcggactccataaccccgaggggagact

SEQ ID NO: 137854 - DNA, 55 bp, Artificial
  Synthetic oligonucleotide
cacactctatatacttggtatcagtgcgcctgaatcgatgtaaacacacccacaa

SEQ ID NO: 137855 - DNA, 55 bp, Artificial
  Synthetic oligonucleotide
caccttcggagcatatcgaatctaccccttgttgtgggtgtcacctgagtgagac

SEQ ID NO: 137856 - DNA, 55 bp, Artificial
  Synthetic oligonucleotide
cacggttgtaggagtcctgagtgacgttgatattctccggaatgcggaacttccc

SEQ ID NO: 137857 - DNA, 55 bp, Artificial
  Synthetic oligonucleotide
cacggtttcaagtcttggttcggctttgagccatatatctctttcttcgctcccc

SEQ ID NO: 137858 - DNA, 55 bp, Artificial
  Synthetic oligonucleotide
gtgttgtctcatctgcgtatggagtgttgtcaaaataggccggtatgatctccac

SEQ ID NO: 137859 - DNA, 55 bp, Artificial
  Synthetic oligonucleotide
cactatcttgtcccgtgtaaaataagcctgcgacagtatactgctttctaacgcg

SEQ ID NO: 137860 - DNA, 55 bp, Artificial
  Synthetic oligonucleotide
gtgtgctcccgaaagaacgctctgtccttaaggcatctatagattatctccacac

SEQ ID NO: 137861 - DNA, 55 bp, Artificial
  Synthetic oligonucleotide
gtgtgcctgtcaggataactccggaacctgccactatccggttgactgattcgtt

SEQ ID NO: 137862 - DNA, 55 bp, Artificial
  Synthetic oligonucleotide
gtcattatttcggacatgatcactggactaaagtaccgactgcaaaccctgtact

SEQ ID NO: 137863 - DNA, 55 bp, Artificial
  Synthetic oligonucleotide
tataggagggtttatctatagatgggatgacaatcgaatatataggctatgccgg

SEQ ID NO: 137864 - DNA, 59 bp, Artificial
  Synthetic oligonucleotide
atccaacaacgtcagatgtttgtatgaatagttatcgtaaccatcatctatcccccgta

SEQ ID NO: 137865 - DNA, 55 bp, Artificial
  Synthetic oligonucleotide
ccgggcctatttacaagtctcttatgtgatctacggaatgcaaccagtcaagacg

SEQ ID NO: 137866 - DNA, 55 bp, Artificial
  Synthetic oligonucleotide
gtatgcgaatttagagttgtgacgtggatgggagtttgcaggatccgctccccag

SEQ ID NO: 137867 - DNA, 55 bp, Artificial
  Synthetic oligonucleotide
ccgtataccaacatgatctgtacttcgtcccaaatgaaagagaagtccttagtgt

SEQ ID NO: 137868 - DNA, 55 bp, Artificial
  Synthetic oligonucleotide
gtatattcggatcatatatgggtatagcaacttctacccgtttgttaagattgcg

SEQ ID NO: 137869 - DNA, 55 bp, Artificial
  Synthetic oligonucleotide
cctaccgggccgtcagtatatatccttctgaggaccgcagcacagcgagtatacc

SEQ ID NO: 137870 - DNA, 55 bp, Artificial
  Synthetic oligonucleotide
tgaactgagaaggtctccgataagcctgcgaaggtaaactgcaaaatcaagagtc

SEQ ID NO: 137871 - DNA, 55 bp, Artificial
  Synthetic oligonucleotide
cctattgcccttcgttcatcgtctgcttgcaatcccatgtatgacaccggcggct

SEQ ID NO: 137872 - DNA, 55 bp, Artificial
  Synthetic oligonucleotide
cctcaaccaggtagtaaaccaatgtcttgtacagcgggtagtaaacttctgatcc

SEQ ID NO: 137873 - DNA, 55 bp, Artificial
  Synthetic oligonucleotide
gtatagtggcttgagaccttcggtagccagacaggccagagcctcgtctgcagca

SEQ ID NO: 137874 - DNA, 55 bp, Artificial
  Synthetic oligonucleotide
gtacccgagcaaaagaaatcaggactttaaggagtatgagtaacttaagaagatc

SEQ ID NO: 137875 - DNA, 55 bp, Artificial
  Synthetic oligonucleotide
gtaagtaaacaaatgccttacgtccaccgtttcacaaacatatacaggcggggca

SEQ ID NO: 137876 - DNA, 58 bp, Artificial
  Synthetic oligonucleotide
agtatagggattttcagcgcttctaccactaacattcaggtcaaatgcattagaaaat

SEQ ID NO: 137877 - DNA, 55 bp, Artificial
  Synthetic oligonucleotide
cctgcctgatcataccgcttctcaaatcttcggtcccggaatttcaaagccgctg

SEQ ID NO: 137878 - DNA, 55 bp, Artificial
  Synthetic oligonucleotide
cctgcgtgggatttgccacgagagtggggctggataggcatagcactggtgacag

SEQ ID NO: 137879 - DNA, 54 bp, Artificial
  Synthetic oligonucleotide
gtacagagtttaaaccatccggggtggacatcgggacttcagtaactccttgag

SEQ ID NO: 137880 - DNA, 55 bp, Artificial
  Synthetic oligonucleotide
cctttcgcggtacccttctgcaagagttctccctacaaaaggctcgctctctccc

SEQ ID NO: 137881 - DNA, 55 bp, Artificial
  Synthetic oligonucleotide
cgaaagggctctcccaatatttctggaagccttcgaatctgaccccacgagtgaa

SEQ ID NO: 137882 - DNA, 55 bp, Artificial
  Synthetic oligonucleotide
acgggagacccactgggtatggatgaagtcataatcgcactggatgaaattgttc

SEQ ID NO: 137883 - DNA, 55 bp, Artificial
  Synthetic oligonucleotide
cgaaggcggacatgttaaacctctcatagataccaggaaaatggcctatattgcg

SEQ ID NO: 137884 - DNA, 55 bp, Artificial
  Synthetic oligonucleotide
cgaatcccatacgaatctgctgatgtgcgtaatgcactaaagcacagtatcgtgc

SEQ ID NO: 137885 - DNA, 54 bp, Artificial
  Synthetic oligonucleotide
cgactcaagcgacctttatgttgtccctaaataccgcactgcttttgtaaaccc

SEQ ID NO: 137886 - DNA, 55 bp, Artificial
  Synthetic oligonucleotide
cgagagtgatcatgggccctcgcggttttattctgggaggacctgtatagtgctt

SEQ ID NO: 137887 - DNA, 58 bp, Artificial
  Synthetic oligonucleotide
atatagaatctcgctttggtgctttgttccggtggcatcctgataaagttgtaagttc

SEQ ID NO: 137888 - DNA, 55 bp, Artificial
  Synthetic oligonucleotide
ggttctatgaagaaccagttttattaatactctggatacaatgctctagcctgcc

SEQ ID NO: 137889 - DNA, 55 bp, Artificial
  Synthetic oligonucleotide
cgatcacatctagtttcttacgttcagtttctgcggaaaccgattgtcctaccct

SEQ ID NO: 137890 - DNA, 55 bp, Artificial
  Synthetic oligonucleotide
cccctcttttaataacagatggaactatcacatcaccgatgtcatccacctgatt

SEQ ID NO: 137891 - DNA, 55 bp, Artificial
  Synthetic oligonucleotide
cccctttgtattataaggagccacctgtgaaaggtctgttcatgggtgagggttg

SEQ ID NO: 137892 - DNA, 55 bp, Artificial
  Synthetic oligonucleotide
cccgaatttgtaaaactctctccactgatgttaataatgctgtcccatctagtga

SEQ ID NO: 137893 - DNA, 55 bp, Artificial
  Synthetic oligonucleotide
cccgatacggtactttcgactaccggatgccttccgtctcttatgagaatcttgc

SEQ ID NO: 137894 - DNA, 55 bp, Artificial
  Synthetic oligonucleotide
gtgagttctcaggcacaaggacatcgatctttagaagttctccgagggcttttgg

SEQ ID NO: 137895 - DNA, 55 bp, Artificial
  Synthetic oligonucleotide
gtgacaccggaagagtgtgtggggctaacctgttatcgtgccattcatgggacga

SEQ ID NO: 137896 - DNA, 55 bp, Artificial
  Synthetic oligonucleotide
gtcggagtaaacgtaacttgtaatgtatgagtccctgcactaagtatcgttccag

SEQ ID NO: 137897 - DNA, 55 bp, Artificial
  Synthetic oligonucleotide
ccctacagtttgagtctcaccccatacagtacgccaggattaatcgcaagccgct

SEQ ID NO: 137898 - DNA, 59 bp, Artificial
  Synthetic oligonucleotide
atagtgaccccagtcattatttcggacatgatcactggactaaagtaccgactgcaaac

SEQ ID NO: 137899 - DNA, 55 bp, Artificial
  Synthetic oligonucleotide
ccctgatgactgtggataatgggcgtgtgatcaccaatcctatagcagggacatg

SEQ ID NO: 137900 - DNA, 55 bp, Artificial
  Synthetic oligonucleotide
gtcgacaaggactgggtaaaagagaacaatgcaggaccaaccgatgtaggcgtca

SEQ ID NO: 137901 - DNA, 55 bp, Artificial
  Synthetic oligonucleotide
ccctgcgtacattctcgatatactcgttaagctctcctgaaaaggtcgatctggc

SEQ ID NO: 137902 - DNA, 55 bp, Artificial
  Synthetic oligonucleotide
cccttagagggcgcatggctacactcacttccggttgtctgagtccggaaacgag

SEQ ID NO: 137903 - DNA, 55 bp, Artificial
  Synthetic oligonucleotide
cccttcccatgagacagaagcacatgagttctataatgagtcagcatactgcggc

SEQ ID NO: 137904 - DNA, 55 bp, Artificial
  Synthetic oligonucleotide
ccgagccaccggatcccatgacaacatgaacgccagaacccctgatagcagttgc

SEQ ID NO: 137905 - DNA, 55 bp, Artificial
  Synthetic oligonucleotide
gtcccatctggggtgattgcgtagattttactgtcgtaactccctatgtagatgg

SEQ ID NO: 137906 - DNA, 55 bp, Artificial
  Synthetic oligonucleotide
gtccagagatagttcagtgataggtctttgtttgcatcccatactctgtaaccgg

SEQ ID NO: 137907 - DNA, 55 bp, Artificial
  Synthetic oligonucleotide
ccgatctgggttataaggcaattcttacggaaggagcggaccatatgcttgaggg

SEQ ID NO: 137908 - DNA, 55 bp, Artificial
  Synthetic oligonucleotide
ccgattcgaaccagtcaaggacgtacattcgagtattcacagacaactacctcgg

SEQ ID NO: 137909 - DNA, 59 bp, Artificial
  Synthetic oligonucleotide
gcgatgcccagtacacctacaagcaagaccgggttagcagtcggtactccagcccagtg

SEQ ID NO: 137910 - DNA, 54 bp, Artificial
  Synthetic oligonucleotide
ccggaaggatggtctttgtatactgctggtaatatttcggaccttccaggccgg

SEQ ID NO: 137911 - DNA, 55 bp, Artificial
  Synthetic oligonucleotide
ccggagcttgaagggttccttgttcacataagagatgaaaggcagtacacactcg

SEQ ID NO: 137912 - DNA, 54 bp, Artificial
  Synthetic oligonucleotide
ttccccgacgatttcatacactttctgatcgagtatatcctttacacgctggct

SEQ ID NO: 137913 - DNA, 54 bp, Artificial
  Synthetic oligonucleotide
ttctgtcagggcaggatcatactggagcacacgtcggcaaatccaaatgggcca

SEQ ID NO: 137914 - DNA, 54 bp, Artificial
  Synthetic oligonucleotide
gctcccggccccactgctgcccgtgagatatggaaggatgtgccatgtatcata

SEQ ID NO: 137915 - DNA, 54 bp, Artificial
  Synthetic oligonucleotide
ggccgtgcatcgcaacctcgggaagctccgtaaggccaaactcagacatccgct

SEQ ID NO: 137916 - DNA, 54 bp, Artificial
  Synthetic oligonucleotide
tacctccccgaaggttatgccttcaactattcgatggtctccaacgaaagcttg

SEQ ID NO: 137917 - DNA, 54 bp, Artificial
  Synthetic oligonucleotide
taggcgattcatccatacaaaccacggggaacaactcagaataactacgcttat

SEQ ID NO: 137918 - DNA, 54 bp, Artificial
  Synthetic oligonucleotide
actcttaatcaaagcgaacttcagaaaagcctggatagtgagtttgccagcact

SEQ ID NO: 137919 - DNA, 54 bp, Artificial
  Synthetic oligonucleotide
aaacgccagtgctcccggccccactgctgcccgtgagatatggaaggatgtgcc

SEQ ID NO: 137920 - DNA, 58 bp, Artificial
  Synthetic oligonucleotide
gctgtctaacataatcggtctaaatcgtttcaacaagctaccgaaaatcgatctacag

SEQ ID NO: 137921 - DNA, 54 bp, Artificial
  Synthetic oligonucleotide
ctggagattcggtcgatcttccggtaaatgagatacatcgaattaagaatatag

SEQ ID NO: 137922 - DNA, 54 bp, Artificial
  Synthetic oligonucleotide
ccctgcaatgactgagaattaacgtctttgagccattcgtgctctccgtctctc

SEQ ID NO: 137923 - DNA, 54 bp, Artificial
  Synthetic oligonucleotide
agcaagcgtttcccgggtattggtggaaccccagcgaatatgcacgggaccatc

SEQ ID NO: 137924 - DNA, 54 bp, Artificial
  Synthetic oligonucleotide
ccgggtattggtggaaccccagcgaatatgcacgggaccatcaaggtgccagct

SEQ ID NO: 137925 - DNA, 54 bp, Artificial
  Synthetic oligonucleotide
atgagcctctcgtccgtgagttctgctccggtttcagggatcagtatgccactg

SEQ ID NO: 137926 - DNA, 54 bp, Artificial
  Synthetic oligonucleotide
atcgcacttgcaagccggggaattggaccggataccgcatccagggtcattgaa

SEQ ID NO: 137927 - DNA, 54 bp, Artificial
  Synthetic oligonucleotide
cttcgggatcatttttcgggtggaagacaggctctacatgcttatttgaaggaa

SEQ ID NO: 137928 - DNA, 54 bp, Artificial
  Synthetic oligonucleotide
acatctccatcttttgtcaggatacgatattctttgttgaactgcctgttaccc

SEQ ID NO: 137929 - DNA, 54 bp, Artificial
  Synthetic oligonucleotide
acggccaatgagggccctgcggtacttggatccatgcggacctactatcacagg

SEQ ID NO: 137930 - DNA, 54 bp, Artificial
  Synthetic oligonucleotide
cgcaattttagtaccatccggattccaagttggatacatatcatctgcagaatt

SEQ ID NO: 137931 - DNA, 55 bp, Artificial
  Synthetic oligonucleotide
tttattcacttctgattgtatcggaaggggttactctaaaagaacaatagaagga

SEQ ID NO: 137932 - DNA, 53 bp, Artificial
  Synthetic oligonucleotide
actcctgcaacggatttaactatggtgttctcgtaaccacagtctttaccggg

SEQ ID NO: 137933 - DNA, 53 bp, Artificial
  Synthetic oligonucleotide
ctaacacatacaataaacttaaaaagtaatctttattctactctatcaaccat

SEQ ID NO: 137934 - DNA, 53 bp, Artificial
  Synthetic oligonucleotide
tatgccggggacaggacggggcacaacttgttgcataccctgtacgaacaggt

SEQ ID NO: 137935 - DNA, 53 bp, Artificial
  Synthetic oligonucleotide
tatgacgagcttctaaagctagagtcggtggggtaaagtatggcattttcgac

SEQ ID NO: 137936 - DNA, 53 bp, Artificial
  Synthetic oligonucleotide
ggtgaaaggcgatccaagggggtttcggagtatggactgcatcacgacccccg

SEQ ID NO: 137937 - DNA, 53 bp, Artificial
  Synthetic oligonucleotide
taactaacttagtttgtccatgacaagaaaatgcggtagtaaggctgtgtgcg

SEQ ID NO: 137938 - DNA, 53 bp, Artificial
  Synthetic oligonucleotide
gtgtcgtagttatccagggcatcgactataatatctactccctgcgctagttc

SEQ ID NO: 137939 - DNA, 53 bp, Artificial
  Synthetic oligonucleotide
ttttccggcctctgcatccgagaattctcacactggagaaacgagtacagtcc

SEQ ID NO: 137940 - DNA, 52 bp, Artificial
  Synthetic oligonucleotide
cgcagcataacccgatgccctgagtgtcgattctaccgcccggttaacggca

SEQ ID NO: 137941 - DNA, 52 bp, Artificial
  Synthetic oligonucleotide
cgccccctgctaaaagaaagcgacacggcagtgaaccagccaaggtctgcga

SEQ ID NO: 137942 - DNA, 59 bp, Artificial
  Synthetic oligonucleotide
gcttcactgagtaccttttttgacttccttgaattcaagcatataatcgagagaaacaa

SEQ ID NO: 137943 - DNA, 52 bp, Artificial
  Synthetic oligonucleotide
tatcggcgagggaagcttcacatacactgtagcagcctccggaactgcaggt

SEQ ID NO: 137944 - DNA, 52 bp, Artificial
  Synthetic oligonucleotide
ggtacagggcatccttctacaacctgcttgaatgaatccgggtcccctgtgt

SEQ ID NO: 137945 - DNA, 52 bp, Artificial
  Synthetic oligonucleotide
cggacgggcacgcacgatacggttagcacttatcggcccaattccgggaacc

SEQ ID NO: 137946 - DNA, 52 bp, Artificial
  Synthetic oligonucleotide
tatcagacgccaatgggataaagagcgttaccgcggatgcaaattctttcgg

SEQ ID NO: 137947 - DNA, 52 bp, Artificial
  Synthetic oligonucleotide
ccggcaaagttcctgctcggaaactatcggacgggcacgcacgatacggtta

SEQ ID NO: 137948 - DNA, 52 bp, Artificial
  Synthetic oligonucleotide
cagacatcgttacagaactttccccgcctgagaacagtgctttcggcacaag

SEQ ID NO: 137949 - DNA, 52 bp, Artificial
  Synthetic oligonucleotide
cagggatccagtagattccgaatcagtagatgtcgtgcttaattcaagcaat

SEQ ID NO: 137950 - DNA, 52 bp, Artificial
  Synthetic oligonucleotide
ctcgcaccaagggacaagatcctcaggtggggtcagttcatgaacaagtcct

SEQ ID NO: 137951 - DNA, 52 bp, Artificial
  Synthetic oligonucleotide
ggcgatggatggagagatttcaaatcgggcgcaccaatggttgcggattacc

SEQ ID NO: 137952 - DNA, 52 bp, Artificial
  Synthetic oligonucleotide
gccatgggcgttccgccacgtgtacctacacatgtgatggatgggacctcca

SEQ ID NO: 137953 - DNA, 60 bp, Artificial
  Synthetic oligonucleotide
ggaatgtagctctaattctgtctgctattgcattagagcatactgctgatacgttgaggt

SEQ ID NO: 137954 - DNA, 52 bp, Artificial
  Synthetic oligonucleotide
aactttactggcaataacccgtttagaaccgcttacatggacaggttttcca

SEQ ID NO: 137955 - DNA, 52 bp, Artificial
  Synthetic oligonucleotide
aagagcaccgtatctctggtatatatagatagcatgcgtgatgttgtcatca

SEQ ID NO: 137956 - DNA, 52 bp, Artificial
  Synthetic oligonucleotide
gagttgcgccggtcaggaaagaacttggatttcggtctatctttaatctgct

SEQ ID NO: 137957 - DNA, 52 bp, Artificial
  Synthetic oligonucleotide
ggaaatcttagtcagcgtggaccaacaaagactattttatcctatctctatc

SEQ ID NO: 137958 - DNA, 52 bp, Artificial
  Synthetic oligonucleotide
tgcccagagtatgccgattgctgaatcctctggcaaactggaacgttttgta

SEQ ID NO: 137959 - DNA, 52 bp, Artificial
  Synthetic oligonucleotide
accggcgcacttcacatgctaccccatggaccaaccgggccacttgctcaac

SEQ ID NO: 137960 - DNA, 52 bp, Artificial
  Synthetic oligonucleotide
acgatgccctcaaggtttcggatacatataatagttgcggttcggcctgttt

SEQ ID NO: 137961 - DNA, 52 bp, Artificial
  Synthetic oligonucleotide
tgaccctgggaagccatacaggtactcacgtagagtccaaactgcatcttcg

SEQ ID NO: 137962 - DNA, 52 bp, Artificial
  Synthetic oligonucleotide
acggggcaaaatcctcaggacttcgaatatacttatgggcagcgattacgca

SEQ ID NO: 137963 - DNA, 52 bp, Artificial
  Synthetic oligonucleotide
actaccacacccacccggcaaagttcctgctcggaaactatcggacgggcac

SEQ ID NO: 137964 - DNA, 55 bp, Artificial
  Synthetic oligonucleotide
gagaaacaacattcccacgttcagaaaacgctatctaagaagctacaaaaaatac

SEQ ID NO: 137965 - DNA, 52 bp, Artificial
  Synthetic oligonucleotide
tctctcaaagtgctgcaataaggctccagatctgtctgatactcatagtttt

SEQ ID NO: 137966 - DNA, 52 bp, Artificial
  Synthetic oligonucleotide
ctcgtccgtttcgtggcacaggaggtcgtacgtgatggccacatcccgccat

SEQ ID NO: 137967 - DNA, 51 bp, Artificial
  Synthetic oligonucleotide
cataccgtggggctcgcgggaatgaacggctgtggagatggtacctctacg

SEQ ID NO: 137968 - DNA, 51 bp, Artificial
  Synthetic oligonucleotide
tttctgaagcccgaagatgtggtgtacctactcctattattcgtgatattc

SEQ ID NO: 137969 - DNA, 51 bp, Artificial
  Synthetic oligonucleotide
aacactcctacgcccgggctcactacacgtgccgttctggttactacggga

SEQ ID NO: 137970 - DNA, 51 bp, Artificial
  Synthetic oligonucleotide
ttgggcttttccgggaattgggtttgcgcccgggcacagtgttcaacaaga

SEQ ID NO: 137971 - DNA, 51 bp, Artificial
  Synthetic oligonucleotide
cacgttctgagtcgaaccgtgtgttcgagcttgatggacagccggcctgga

SEQ ID NO: 137972 - DNA, 51 bp, Artificial
  Synthetic oligonucleotide
atgtcgcgaccgtcctcagacatgcccccaaacccgggccctgcgaaaacg

SEQ ID NO: 137973 - DNA, 51 bp, Artificial
  Synthetic oligonucleotide
aactccaagttacgtaaagggatgagtgcatggcgcgctctgggcaattat

SEQ ID NO: 137974 - DNA, 51 bp, Artificial
  Synthetic oligonucleotide
tcggatgacatttctataacttactagttttgatgtagtttcttactacaa

SEQ ID NO: 137975 - DNA, 56 bp, Artificial
  Synthetic oligonucleotide
gaccctcttgactcacatagaataatcgttacaaccttagaaacggtagcggctaa

SEQ ID NO: 137976 - DNA, 51 bp, Artificial
  Synthetic oligonucleotide
tcgctgcaacgtaccagaggtcattgaagggactgccttgcatggagggcg

SEQ ID NO: 137977 - DNA, 51 bp, Artificial
  Synthetic oligonucleotide
aagcaacaccccttcagcaccatagtcccaccaggctactccctgtgggca

SEQ ID NO: 137978 - DNA, 51 bp, Artificial
  Synthetic oligonucleotide
taaggtcggcatgtttttgaggggtgaaccggaagggaccgagggttccga

SEQ ID NO: 137979 - DNA, 51 bp, Artificial
  Synthetic oligonucleotide
tcgcgggaatgaacggctgtggagatggtacctctacgactggtctcggta

SEQ ID NO: 137980 - DNA, 51 bp, Artificial
  Synthetic oligonucleotide
tacgattgtagcgacgttaagttccctgttcctcatgtttgcacgttcgag

SEQ ID NO: 137981 - DNA, 51 bp, Artificial
  Synthetic oligonucleotide
aggcggggtcctgtcccacaaggatagttgcaaggcccgggactataccgg

SEQ ID NO: 137982 - DNA, 51 bp, Artificial
  Synthetic oligonucleotide
aaggagtatgcaggatcccggtctggacaaggctttgatgaaccctcctaa

SEQ ID NO: 137983 - DNA, 51 bp, Artificial
  Synthetic oligonucleotide
tcggcgcactcaggttggtcctgccagtgccaatataatcgggagaccctg

SEQ ID NO: 137984 - DNA, 51 bp, Artificial
  Synthetic oligonucleotide
accagtagactaccgcagccaccccctgtggactcctgaggcccgagagga

SEQ ID NO: 137985 - DNA, 51 bp, Artificial
  Synthetic oligonucleotide
tctccacagccgttcattcccgcgagccccacggtatgcgtagttggatta

SEQ ID NO: 137986 - DNA, 60 bp, Artificial
  Synthetic oligonucleotide
cctatattttctgggcatattttggcattgtgtacatctcgttttatatagagttcatcc

SEQ ID NO: 137987 - DNA, 59 bp, Artificial
  Synthetic oligonucleotide
gaatataattagccgtatcagtcggagtaaacgtaacttgtaatgtatgagtccctgca

SEQ ID NO: 137988 - DNA, 51 bp, Artificial
  Synthetic oligonucleotide
accggacaggatctcacggccggatgcggtatctgtaatggactgggctgc

SEQ ID NO: 137989 - DNA, 51 bp, Artificial
  Synthetic oligonucleotide
tcccagcaacgtgataaatgggcttgagatcaacagtattactcgtatcta

SEQ ID NO: 137990 - DNA, 51 bp, Artificial
  Synthetic oligonucleotide
agcaagtggagggtgtgtgcttgggtaatcgctacctggtgcacggtgtcc

SEQ ID NO: 137991 - DNA, 51 bp, Artificial
  Synthetic oligonucleotide
gactccgcgcacttgtatacgccgcgcctctccgaagatgcacgcttgttg

SEQ ID NO: 137992 - DNA, 51 bp, Artificial
  Synthetic oligonucleotide
cttaattcgatcattggtttctcggacgtactgtacaatgaaagtcacggt

SEQ ID NO: 137993 - DNA, 51 bp, Artificial
  Synthetic oligonucleotide
ccggctcgcctataccatctgcctctacgaacgcttccattgcccatgcga

SEQ ID NO: 137994 - DNA, 51 bp, Artificial
  Synthetic oligonucleotide
gaggtaccatctccacagccgttcattcccgcgagccccacggtatgccca

SEQ ID NO: 137995 - DNA, 51 bp, Artificial
  Synthetic oligonucleotide
gggtacataggcacctacggatcttaagggtacggttttctgtccggcttt

SEQ ID NO: 137996 - DNA, 51 bp, Artificial
  Synthetic oligonucleotide
gatgtttagaacgcccagatgatgatagaagcataactgtaagaggatccg

SEQ ID NO: 137997 - DNA, 51 bp, Artificial
  Synthetic oligonucleotide
ggcccgactacaactcccggaggtgcaggctcaccaaagagtgtggctgtg

SEQ ID NO: 137998 - DNA, 54 bp, Artificial
  Synthetic oligonucleotide
gaaggtcgagaagtaaaactcgtttataatggagagttgaagtgggaaggacag

SEQ ID NO: 137999 - DNA, 51 bp, Artificial
  Synthetic oligonucleotide
gccacttgcggggcgccagtactcccgtacgatgcatcactgtctgcaccg

SEQ ID NO: 138000 - DNA, 51 bp, Artificial
  Synthetic oligonucleotide
cggggcgccagtactcccgtacgatgcatcactgtctgcaccgcatcgttt

SEQ ID NO: 138001 - DNA, 51 bp, Artificial
  Synthetic oligonucleotide
ctatgttcagttgctctagtccccgtgcgaaatccacgattccagtcttgt

SEQ ID NO: 138002 - DNA, 51 bp, Artificial
  Synthetic oligonucleotide
gcgaatccgagggcgttaagtcctgcgtagagtggtccgacagcgtttgcc

SEQ ID NO: 138003 - DNA, 50 bp, Artificial
  Synthetic oligonucleotide
ctcatgatcccgccaggtgccagccctgcaacctatgagccaagcccggg

SEQ ID NO: 138004 - DNA, 50 bp, Artificial
  Synthetic oligonucleotide
tcgctcaggatcgcacttgcggtctcgatagaacccgcacccctgccagt

SEQ ID NO: 138005 - DNA, 50 bp, Artificial
  Synthetic oligonucleotide
ctctacaccgtgaaactcgaaaccgatcacgcaaacgaaatccttgtgag

SEQ ID NO: 138006 - DNA, 50 bp, Artificial
  Synthetic oligonucleotide
ctgcctccgactgcaagcccacttccatccacgccgtgcgggacctgaat

SEQ ID NO: 138007 - DNA, 50 bp, Artificial
  Synthetic oligonucleotide
ctgtagggacggccaatgagggccctgcggtacttggatccatgcggacc

SEQ ID NO: 138008 - DNA, 50 bp, Artificial
  Synthetic oligonucleotide
ctaccgcagccaccccctgtggactcctgaggcccgagaggatgtcataa

SEQ ID NO: 138009 - DNA, 56 bp, Artificial
  Synthetic oligonucleotide
gaaactaagggaacttatcacaaatcgcatttgtgaaggtcacacaccggactatt

SEQ ID NO: 138010 - DNA, 50 bp, Artificial
  Synthetic oligonucleotide
ctgtgctggggtttcttgtaaccggggtgctgataggccctcacgggctt

SEQ ID NO: 138011 - DNA, 50 bp, Artificial
  Synthetic oligonucleotide
tcctgcaaacaccatgtcacgcaactgtgccggatgtcatgccacaggcg

SEQ ID NO: 138012 - DNA, 50 bp, Artificial
  Synthetic oligonucleotide
ggaggttatgtcggtatccaaagtaagcaagtgaaagtcccactataacg

SEQ ID NO: 138013 - DNA, 50 bp, Artificial
  Synthetic oligonucleotide
ctttgctattcgactccaaatgtctggggttacggatcactggaccctac

SEQ ID NO: 138014 - DNA, 50 bp, Artificial
  Synthetic oligonucleotide
gaatgctgcaaagaacggcatccctgtccttggcacctgcgccggcttga

SEQ ID NO: 138015 - DNA, 50 bp, Artificial
  Synthetic oligonucleotide
gacgcaggcacatcaccgggcacaatggcaggaacatcgctcccccaatc

SEQ ID NO: 138016 - DNA, 50 bp, Artificial
  Synthetic oligonucleotide
gccctgttaatttctgacgtaccgagtccttgatatatttgcggtcacga

SEQ ID NO: 138017 - DNA, 50 bp, Artificial
  Synthetic oligonucleotide
gcggcaggggtatcagtgcatcgaacatacgccggtcccagtcctttgct

SEQ ID NO: 138018 - DNA, 50 bp, Artificial
  Synthetic oligonucleotide
tttcatgcctcccgactctccccagcctacaaggacggtaccctgcagga

SEQ ID NO: 138019 - DNA, 50 bp, Artificial
  Synthetic oligonucleotide
gcgtgtaagctcgtttattctactccggttaattacgagctcgcctacga

SEQ ID NO: 138020 - DNA, 56 bp, Artificial
  Synthetic oligonucleotide
ggaggaatttaaaggacaggctggaacgctggggcgtaactgctggtactacaatc

SEQ ID NO: 138021 - DNA, 50 bp, Artificial
  Synthetic oligonucleotide
gcatacatgcaccaggtgcttagccgggaaattgcccgcggcagaatcgg

SEQ ID NO: 138022 - DNA, 50 bp, Artificial
  Synthetic oligonucleotide
gcagtccgcacctatcttgtcagcccacgcctgggttgcaggggcaccgc

SEQ ID NO: 138023 - DNA, 50 bp, Artificial
  Synthetic oligonucleotide
gcaaccccgcttttagtctccctgtggtctatcactattctgagggattc

SEQ ID NO: 138024 - DNA, 50 bp, Artificial
  Synthetic oligonucleotide
aagcactgtgataggccggcggtgagaggtgagatattccctgcctgcgc

SEQ ID NO: 138025 - DNA, 50 bp, Artificial
  Synthetic oligonucleotide
gagtgcccgaaataactgcagtcaggggcagaacctgtgcggttgcaggc

SEQ ID NO: 138026 - DNA, 50 bp, Artificial
  Synthetic oligonucleotide
aatgcccacgtgcggataatatcgtggccctggggtcgcagctgtgcagg

SEQ ID NO: 138027 - DNA, 50 bp, Artificial
  Synthetic oligonucleotide
accaacctgcccaggactcctgcggatgtgtgtggtgccaggccgattag

SEQ ID NO: 138028 - DNA, 50 bp, Artificial
  Synthetic oligonucleotide
tgtgttttgtggtcgccatccatcctggcgttgccacttgcggggcgcca

SEQ ID NO: 138029 - DNA, 50 bp, Artificial
  Synthetic oligonucleotide
gagctcgcaaacagctgcgttaaccacgccaggcccgcttacgcccacat

SEQ ID NO: 138030 - DNA, 50 bp, Artificial
  Synthetic oligonucleotide
tggggaatgtgcctgtatcagtgtgcatggggcaaaccggctgggaggca

SEQ ID NO: 138031 - DNA, 58 bp, Artificial
  Synthetic oligonucleotide
ttagaatcaagtacaacaacgaatgctagtggatattacaacttcagtgtaaccccag

SEQ ID NO: 138032 - DNA, 50 bp, Artificial
  Synthetic oligonucleotide
gagacggacagagtgaccgtgcacagttgcaccacgcatacctgcgaggg

SEQ ID NO: 138033 - DNA, 50 bp, Artificial
  Synthetic oligonucleotide
ggacctgaagaaatagtgcttctcaagaccagaaactcggcccttgggta

SEQ ID NO: 138034 - DNA, 50 bp, Artificial
  Synthetic oligonucleotide
tgacttcatccatagtagcggaactggaggtatacatctcaacacttcga

SEQ ID NO: 138035 - DNA, 50 bp, Artificial
  Synthetic oligonucleotide
taagggtaggtatgggcgtaccaaggaaatagtcctgagtgtacctgttg

SEQ ID NO: 138036 - DNA, 50 bp, Artificial
  Synthetic oligonucleotide
ccgtcactcgtgtccatcatggacgtgaccgcacccgactcagcaagctg

SEQ ID NO: 138037 - DNA, 50 bp, Artificial
  Synthetic oligonucleotide
atgcagagaggttactgcctccgactgcaagcccacttccatccacgccg

SEQ ID NO: 138038 - DNA, 50 bp, Artificial
  Synthetic oligonucleotide
atgcttcagccgcacatacaattgcgaggcggggtcctgtcccacaagga

SEQ ID NO: 138039 - DNA, 50 bp, Artificial
  Synthetic oligonucleotide
taacccaatgcataccgtggggctcgcgggaatgaacggctgtggagatg

SEQ ID NO: 138040 - DNA, 50 bp, Artificial
  Synthetic oligonucleotide
atggctggtcccgtgttcaaggtcgtattcccggatgaggggtgcaagct

SEQ ID NO: 138041 - DNA, 50 bp, Artificial
  Synthetic oligonucleotide
ccgagttgcgattcgggagcccgccgtccttttcgctacgctcaagagga

SEQ ID NO: 138042 - DNA, 54 bp, Artificial
  Synthetic oligonucleotide
ggagtcttcttcgggtatggttcttagaagggcttcctgatccccctgccggct

SEQ ID NO: 138043 - DNA, 50 bp, Artificial
  Synthetic oligonucleotide
attccccaggagggacctgccttccggtagatggtgggcgtacccgtgct

SEQ ID NO: 138044 - DNA, 50 bp, Artificial
  Synthetic oligonucleotide
atttcccgtaagtttctcgatctcataccggacagaaagggtatcgctgt

SEQ ID NO: 138045 - DNA, 50 bp, Artificial
  Synthetic oligonucleotide
caaagaacggcatccctgtccttggcacctgcgccggcttgatccttgtt

SEQ ID NO: 138046 - DNA, 50 bp, Artificial
  Synthetic oligonucleotide
ccgaggctccgtaccagtttgtccaccctggcctcgataggttcctggcc

SEQ ID NO: 138047 - DNA, 50 bp, Artificial
  Synthetic oligonucleotide
gtcctagtttcgatactcctgtagtagagtaggtgaatgattcacctggc

SEQ ID NO: 138048 - DNA, 50 bp, Artificial
  Synthetic oligonucleotide
cccggcaaacttgcccaaacccgaaaacatgggatccccggtggaaagca

SEQ ID NO: 138049 - DNA, 50 bp, Artificial
  Synthetic oligonucleotide
cagcactgaacagaacccctcatatacttacgataaggtaggtacttaca

SEQ ID NO: 138050 - DNA, 50 bp, Artificial
  Synthetic oligonucleotide
cccgccgcgggtactatgatcgtggagagttcgaaacaaccgtgggaggg

SEQ ID NO: 138051 - DNA, 50 bp, Artificial
  Synthetic oligonucleotide
caggggtcgagtccctattctcgaggtccctacctgcgatccaacccgag

SEQ ID NO: 138052 - DNA, 50 bp, Artificial
  Synthetic oligonucleotide
cccgcagcctccaaccccgcacattatctcgcacggggcacagtgcttgc

SEQ ID NO: 138053 - DNA, 60 bp, Artificial
  Synthetic oligonucleotide
ctcccacaaatagccacctgttcttatcatatccctgagttctaagtctgcttgccctcg

SEQ ID NO: 138054 - DNA, 50 bp, Artificial
  Synthetic oligonucleotide
ccagtgggcagggaacgtgaagaccggagttcacaaagaccttccgccga

SEQ ID NO: 138055 - DNA, 50 bp, Artificial
  Synthetic oligonucleotide
tcctgagagagagccactcttcggcccataccacgtgcaaggcccagcat

SEQ ID NO: 138056 - DNA, 50 bp, Artificial
  Synthetic oligonucleotide
acttactttacttgcatcgaatgtccaaagttgcagttcgcctacgtcaa

SEQ ID NO: 138057 - DNA, 50 bp, Artificial
  Synthetic oligonucleotide
tcccggcatgtgacgagcctttccgcccatcttaccggttgcgagagatt

SEQ ID NO: 138058 - DNA, 50 bp, Artificial
  Synthetic oligonucleotide
tcccgactctccccagcctacaaggacggtaccctgcaggataacgggta

SEQ ID NO: 138059 - DNA, 50 bp, Artificial
  Synthetic oligonucleotide
acttcattcgctatcccgcccgagttgcgattcgggagcccgccgtcctt

SEQ ID NO: 138060 - DNA, 50 bp, Artificial
  Synthetic oligonucleotide
agacaccgggtcccagatgaatttcatgcctcccgactctccccagccta

SEQ ID NO: 138061 - DNA, 50 bp, Artificial
  Synthetic oligonucleotide
cgggattggtcccttgttggtgtgcaccatgacacgctggctgtgcagag

SEQ ID NO: 138062 - DNA, 50 bp, Artificial
  Synthetic oligonucleotide
cggaggggttcgcccttacggaaccgcactcctgattgcaggcgtggacg

SEQ ID NO: 138063 - DNA, 50 bp, Artificial
  Synthetic oligonucleotide
cggaattacttcctccggagaagcctgggaaacctttgcctcggtttagt

SEQ ID NO: 138064 - DNA, 52 bp, Artificial
  Synthetic oligonucleotide
ttactacaaactcaaacctaacggattacaagacggtaaaacattaagcctg

SEQ ID NO: 138065 - DNA, 50 bp, Artificial
  Synthetic oligonucleotide
agctgctccgaagaccttatggcctccgtccataattgcaatccctgcaa

SEQ ID NO: 138066 - DNA, 50 bp, Artificial
  Synthetic oligonucleotide
cgagtcccgcctcgggagggcggtgtccttttcgctacgctcaagaggac

SEQ ID NO: 138067 - DNA, 50 bp, Artificial
  Synthetic oligonucleotide
gtaacctacggacttcataataccgatctcccttgtgcgttcagtgaccg

SEQ ID NO: 138068 - DNA, 50 bp, Artificial
  Synthetic oligonucleotide
cgaacttttctgacaggacggcgtgtgtgggcgtgttcgggggaatgcgc

SEQ ID NO: 138069 - DNA, 50 bp, Artificial
  Synthetic oligonucleotide
agggcacgaatggattatgggcacttccgccctggtagggctcaggtacg

SEQ ID NO: 138070 - DNA, 50 bp, Artificial
  Synthetic oligonucleotide
aggtggcagagtggacgaaagcgccggtcttgagaatcggtggtgctgac

SEQ ID NO: 138071 - DNA, 50 bp, Artificial
  Synthetic oligonucleotide
agtcaaggtctctgcgtgccctgcccattgcaaggtcctggtccctcttt

SEQ ID NO: 138072 - DNA, 50 bp, Artificial
  Synthetic oligonucleotide
ccttccgccgaccaacgatgactggtggtacgtaaggtgcgcagcagtcc

SEQ ID NO: 138073 - DNA, 50 bp, Artificial
  Synthetic oligonucleotide
atccggtaggatccctgctttccatctctgcggacgcgctggaatcggta

SEQ ID NO: 138074 - DNA, 50 bp, Artificial
  Synthetic oligonucleotide
cctgccaggcaacggtcacctgcggactgctgtgggctgcgatgagctgc

SEQ ID NO: 138075 - DNA, 56 bp, Artificial
  Synthetic oligonucleotide
ctcaccaccaacttactcttttaatcgacgtcattctattgggtaaagatgcgttg

SEQ ID NO: 138076 - DNA, 50 bp, Artificial
  Synthetic oligonucleotide
cctgcaagactccgggaggtcgccagttcaagactgacatcggggtggct

SEQ ID NO: 138077 - DNA, 60 bp, Artificial
  Synthetic oligonucleotide
ctacgaagctatcgatcacaataccagagtcggaaacagaaaatctagagagtggtacgc

SEQ ID NO: 138078 - DNA, 57 bp, Artificial
  Synthetic oligonucleotide
acgttgaggtctccccatgtacttcttttattgtactctttaatcattgctctaaca

SEQ ID NO: 138079 - DNA, 58 bp, Artificial
  Synthetic oligonucleotide
accatgtggagatatcacaacggtgaatgggaggtatacagtccaggtgtaaaacacg

SEQ ID NO: 138080 - DNA, 58 bp, Artificial
  Synthetic oligonucleotide
accctttcaacgttcttatcctattgcccttcgttcatcgtctgcttgcaatcccatg

SEQ ID NO: 138081 - DNA, 60 bp, Artificial
  Synthetic oligonucleotide
ggcttcctggtggttgactctcatcaatgggagcatgatggctgtataattgaagaatcg

SEQ ID NO: 138082 - DNA, 60 bp, Artificial
  Synthetic oligonucleotide
tgactctcatcaatgggagcatgatggctgtataattgaagaatcgcctgaaatgccttc

SEQ ID NO: 138083 - DNA, 55 bp, Artificial
  Synthetic oligonucleotide
ggactacgaccctaactctgagaagaggaccccgataggtgggcagtttgcctgg

SEQ ID NO: 138084 - DNA, 58 bp, Artificial
  Synthetic oligonucleotide
tttctcattccgaaaacctgaggatacagtacgctccattcgtaactacttgatgaag

SEQ ID NO: 138085 - DNA, 59 bp, Artificial
  Synthetic oligonucleotide
tcgaatcagcgatatgttctggtaagaacacatttgattggtcttattacataaccgct

SEQ ID NO: 138086 - DNA, 58 bp, Artificial
  Synthetic oligonucleotide
ctgttcggactctcagctactggagatattgataactcaattgaataagtattctatc

SEQ ID NO: 138087 - DNA, 54 bp, Artificial
  Synthetic oligonucleotide
ccccaggcaaactgcccacctatcggggtcctcttcgcagagttagggtcgtag

SEQ ID NO: 138088 - DNA, 57 bp, Artificial
  Synthetic oligonucleotide
ctgcaggtatgatatagatgacacctctacccagaacccggtaagacacggaacaat

SEQ ID NO: 138089 - DNA, 60 bp, Artificial
  Synthetic oligonucleotide
ccatagggcttgaattcatgaattgatcctatgaactcaatcgatataggactggaaatg

SEQ ID NO: 138090 - DNA, 55 bp, Artificial
  Synthetic oligonucleotide
gtcaattcagagaacgcccatttacctaacctatctttctgcgctttagtaaccg

SEQ ID NO: 138091 - DNA, 57 bp, Artificial
  Synthetic oligonucleotide
actatttttggatacttgaaccacacgaaagtggctatccacacatgcacctttgtt

SEQ ID NO: 138092 - DNA, 56 bp, Artificial
  Synthetic oligonucleotide
cgagctgacatagatctggaaaagtgtacggtgagactcaagaagacagctaaaag

SEQ ID NO: 138093 - DNA, 56 bp, Artificial
  Synthetic oligonucleotide
gttctagacctggcgccgtttcctatgctccagagtgtagagattttgcgacgtgt

SEQ ID NO: 138094 - DNA, 55 bp, Artificial
  Synthetic oligonucleotide
ggctaaaagtagcgtccatgtaagacggtcttgtggttattcagccagtatgcca

SEQ ID NO: 138095 - DNA, 55 bp, Artificial
  Synthetic oligonucleotide
acaatgcagtcgagctaatggtaaggacttaccggaagttgtgtattatatcgag

SEQ ID NO: 138096 - DNA, 52 bp, Artificial
  Synthetic oligonucleotide
ctcccttgaggcgtcttccggaaacaccctggacggtaatactgtcggtaaa

SEQ ID NO: 138097 - DNA, 55 bp, Artificial
  Synthetic oligonucleotide
ctcctagctggtccgtcgggatcagtaccgaacatagatagagggtcattgctgc

SEQ ID NO: 138098 - DNA, 55 bp, Artificial
  Synthetic oligonucleotide
ggcgttagtgaaaagctcacttccgacagcatctatgtaagcatcgagttcactc

SEQ ID NO: 138099 - DNA, 55 bp, Artificial
  Synthetic oligonucleotide
ggccagatgatagattacttcgcctgagatattctcaaaagattcggtcccgcgc

SEQ ID NO: 138100 - DNA, 59 bp, Artificial
  Synthetic oligonucleotide
gtggagtgaatgcagggtttccggagcttgaagggttccttgttcacataagagatgaa

SEQ ID NO: 138101 - DNA, 55 bp, Artificial
  Synthetic oligonucleotide
ctctcttttatacaggagcactccaaacagacaagccaccccgcaagctattcca

SEQ ID NO: 138102 - DNA, 55 bp, Artificial
  Synthetic oligonucleotide
ctctgatcggggatgattggatccacaaacttggttaccagaaagatcggttggt

SEQ ID NO: 138103 - DNA, 55 bp, Artificial
  Synthetic oligonucleotide
ctgaacaggtccatggaacatggtgtgcaccctttcacaacatagggttctccac

SEQ ID NO: 138104 - DNA, 55 bp, Artificial
  Synthetic oligonucleotide
ctgatcttatgtatggaacccgcttccagaagacctgttttcgggaggatgccgg

SEQ ID NO: 138105 - DNA, 55 bp, Artificial
  Synthetic oligonucleotide
taggtgcccttacatccggaaggattttcatgacatatctgggtcttggaatggt

SEQ ID NO: 138106 - DNA, 55 bp, Artificial
  Synthetic oligonucleotide
ggcatgttggaatctacagtttgcctgcgccagggacacgacaacctaaccagca

SEQ ID NO: 138107 - DNA, 55 bp, Artificial
  Synthetic oligonucleotide
ggcatactgtgctccgcagggctggcatgtgaatatagggttgataattcccgga

SEQ ID NO: 138108 - DNA, 55 bp, Artificial
  Synthetic oligonucleotide
ctggcttgcaatagggataagctgggcgttgagataagctgtaattcccctttca

SEQ ID NO: 138109 - DNA, 55 bp, Artificial
  Synthetic oligonucleotide
ctgggacggaagagccacaggtgaaatgcttggaaatcccgccgcagaccaggct

SEQ ID NO: 138110 - DNA, 55 bp, Artificial
  Synthetic oligonucleotide
ggcagcagtaaaacctactccctcaataggaaaagtccagcaaaccgttgacctc

SEQ ID NO: 138111 - DNA, 59 bp, Artificial
  Synthetic oligonucleotide
catatgaactcgatgacagattcaccgttatagtgtataaaacccgaaagtattcatcg

SEQ ID NO: 138112 - DNA, 55 bp, Artificial
  Synthetic oligonucleotide
ctgtctgctattgcattagagcatactgctgatacgttgaggtctccccatgtac

SEQ ID NO: 138113 - DNA, 55 bp, Artificial
  Synthetic oligonucleotide
ctgtgaacgcccgcaacataatcgatgaggacagtgctaactcgggaataacagg

SEQ ID NO: 138114 - DNA, 55 bp, Artificial
  Synthetic oligonucleotide
ggatgatctgtgatctcgtctccactccgtgaccctgcaagcgacgtatgcccgc

SEQ ID NO: 138115 - DNA, 54 bp, Artificial
  Synthetic oligonucleotide
cttaaagcatctccaaacccctgcgttatagcaagaacagtccgttcccctttc

SEQ ID NO: 138116 - DNA, 55 bp, Artificial
  Synthetic oligonucleotide
ggatccagattatctttctaacttgctggatcctattgtagatggaaaagctgga

SEQ ID NO: 138117 - DNA, 55 bp, Artificial
  Synthetic oligonucleotide
ggtgggcagtcctgaagggaatccctgcctcccggacaaaggtatccgcaagctc

SEQ ID NO: 138118 - DNA, 55 bp, Artificial
  Synthetic oligonucleotide
cgcactcatgcggtagatgtgccagccgtcaacaggcccggctccgaagtattcg

SEQ ID NO: 138119 - DNA, 55 bp, Artificial
  Synthetic oligonucleotide
ggtctgctaccacttctatcattcggggatctaccgtaaagccggaaacatcgtt

SEQ ID NO: 138120 - DNA, 55 bp, Artificial
  Synthetic oligonucleotide
cgcagtcgcaggattccacgaactccctgatttcgggattcacaagctgtcccat

SEQ ID NO: 138121 - DNA, 55 bp, Artificial
  Synthetic oligonucleotide
cgcccaattgtagacaaatctacagctacctatatgttgattcaattgaacagac

SEQ ID NO: 138122 - DNA, 60 bp, Artificial
  Synthetic oligonucleotide
caagcttaaaatcacgctccatgatgtttgggggtgattgagatgccacgttcaacaagg

SEQ ID NO: 138123 - DNA, 55 bp, Artificial
  Synthetic oligonucleotide
ggtatgttagctttgcgtatatttaagcttgcctgattctgcctcttgggtaata

SEQ ID NO: 138124 - DNA, 55 bp, Artificial
  Synthetic oligonucleotide
cgcgcccaagagccctcataagtccgtcaatacttagatatccgagtgaatccgc

SEQ ID NO: 138125 - DNA, 55 bp, Artificial
  Synthetic oligonucleotide
cgcgcccctttacgatgatatgtcagaagcgtactacggaggatatcggcagctg

SEQ ID NO: 138126 - DNA, 55 bp, Artificial
  Synthetic oligonucleotide
cgcgtgtactgacaactgcaatagttctggagacacgaaaaggaaattttggtgt

SEQ ID NO: 138127 - DNA, 55 bp, Artificial
  Synthetic oligonucleotide
ggtatagtggacggatattgtacaggctttctgtggtcttggggtcgatagtgta

SEQ ID NO: 138128 - DNA, 55 bp, Artificial
  Synthetic oligonucleotide
gggtcattatatcttcaaccctcatagccatacgatcagccggactgacaccccg

SEQ ID NO: 138129 - DNA, 55 bp, Artificial
  Synthetic oligonucleotide
ggggtcctgccacgggagagatgcacccacaccggtaactgtgatatagtccgtc

SEQ ID NO: 138130 - DNA, 54 bp, Artificial
  Synthetic oligonucleotide
ggggtcacagttgtgcgtgtaaaggtacaccgtggaagcagacgtaattcccgt

SEQ ID NO: 138131 - DNA, 55 bp, Artificial
  Synthetic oligonucleotide
gggacataatgtcgacattgctctcgagcagttttcctctgtcgtcgtagatgtc

SEQ ID NO: 138132 - DNA, 55 bp, Artificial
  Synthetic oligonucleotide
cgggtaatgtgccgtatcggacttatgaagaggttaaagcttcagattggtcgcc

SEQ ID NO: 138133 - DNA, 60 bp, Artificial
  Synthetic oligonucleotide
caaatgttctgaagctctacatgattaactaacttagtttgtccatgacaagaaaatgcg

SEQ ID NO: 138134 - DNA, 55 bp, Artificial
  Synthetic oligonucleotide
cggtgtctctgctccggcacagaaaggaggttctcctgtagctaaagaatcgcca

SEQ ID NO: 138135 - DNA, 55 bp, Artificial
  Synthetic oligonucleotide
cgtccatatgaggtcgccatttcagtagttctgccagcacctatgtatgtgaata

SEQ ID NO: 138136 - DNA, 55 bp, Artificial
  Synthetic oligonucleotide
tgacttccttgaattcaagcatataatcgagagaaacaacattcccacgttcaga

SEQ ID NO: 138137 - DNA, 55 bp, Artificial
  Synthetic oligonucleotide
gggacagtgccaagataaaacgcacccctgcgaactggtgtttccagtatttgtg

SEQ ID NO: 138138 - DNA, 55 bp, Artificial
  Synthetic oligonucleotide
tgagtcgagccttgcagtgcctgttattgtccagtacttgcaaataggacagtac

SEQ ID NO: 138139 - DNA, 55 bp, Artificial
  Synthetic oligonucleotide
tggtgatagatgcagagggtgcacttactctgcctgccgggattgatgtacacgt

SEQ ID NO: 138140 - DNA, 55 bp, Artificial
  Synthetic oligonucleotide
ggctcctgtgagagttcggcttgcggctaccttactacaggaggtaccgaatcca

SEQ ID NO: 138141 - DNA, 55 bp, Artificial
  Synthetic oligonucleotide
ttaactgtgtcgctgtcggcatacgggctgtcttgggtagtctcattggggggtg

SEQ ID NO: 138142 - DNA, 55 bp, Artificial
  Synthetic oligonucleotide
ggaaggcccacggctcacatcccagatcatagcacaaccagaggatgtgaacatc

SEQ ID NO: 138143 - DNA, 55 bp, Artificial
  Synthetic oligonucleotide
gcttgtagatggcatagatcacactcttccgatcattttgctagaccaccagccc

SEQ ID NO: 138144 - DNA, 55 bp, Artificial
  Synthetic oligonucleotide
ccagtcgagttatctgtaaaggtgacacatagaggtagaacgcctgtggtagatg

SEQ ID NO: 138145 - DNA, 55 bp, Artificial
  Synthetic oligonucleotide
ctctcaatatcgcgataatttatatagagcgagcgtttgtaaggatattcacggg

SEQ ID NO: 138146 - DNA, 55 bp, Artificial
  Synthetic oligonucleotide
ctgcatggtttcccatatgatccaggcaatctgcaaccttttgaaatgcccgccc

SEQ ID NO: 138147 - DNA, 55 bp, Artificial
  Synthetic oligonucleotide
gaaccgatgctatcgcggagaggactgcgtcatcaatcttccatgtttcatcagc

SEQ ID NO: 138148 - DNA, 55 bp, Artificial
  Synthetic oligonucleotide
tcgtgaggggcatctgtataggggtatcagaacatcagaccatgaactgggcggg

SEQ ID NO: 138149 - DNA, 55 bp, Artificial
  Synthetic oligonucleotide
tacctgataccgacatgatcccaggtttcgttctgaaatgagatggtggcgggaa

SEQ ID NO: 138150 - DNA, 55 bp, Artificial
  Synthetic oligonucleotide
gggagtgagcgggtcgaatacaaagttctggatgaggtaccctacattgcatctg

SEQ ID NO: 138151 - DNA, 55 bp, Artificial
  Synthetic oligonucleotide
ggactcatccaggtagctgcacgatataatatcacctttgaccggtttgatccct

SEQ ID NO: 138152 - DNA, 54 bp, Artificial
  Synthetic oligonucleotide
ggacccagctccttgatatgaaccgggatcttgattaccgggtacggaaaagga

SEQ ID NO: 138153 - DNA, 55 bp, Artificial
  Synthetic oligonucleotide
gctcaggaaccgggagagagcacccttctcttaccatcatggaatgagttaccgg

SEQ ID NO: 138154 - DNA, 55 bp, Artificial
  Synthetic oligonucleotide
gcggttagatctgtgatggagcagtatgcatgcagacgcattctgacagtgggtg

SEQ ID NO: 138155 - DNA, 53 bp, Artificial
  Synthetic oligonucleotide
ccatagggttttctccaaacgtgtcaagtttaactgcctggaaaataaagcca

SEQ ID NO: 138156 - DNA, 54 bp, Artificial
  Synthetic oligonucleotide
gcaggtcggcagtataccgggtaagaggaaatccctgggttatttcacgggcga

SEQ ID NO: 138157 - DNA, 54 bp, Artificial
  Synthetic oligonucleotide
agtcatcggtgtataatcgatgtttaggatgagcatggctacagcattccaccc

SEQ ID NO: 138158 - DNA, 54 bp, Artificial
  Synthetic oligonucleotide
gtccgagtcgaataaccacagcgaacaacgatcaatacttatcggaatgtaatt

SEQ ID NO: 138159 - DNA, 53 bp, Artificial
  Synthetic oligonucleotide
tactcccctggctgaagttgtttgctctcaaaatccggacatggatctggtat

SEQ ID NO: 138160 - DNA, 52 bp, Artificial
  Synthetic oligonucleotide
gccctgattacgcaatcatcgcatcagatcagtggtacaaggactgttatga

SEQ ID NO: 138161 - DNA, 52 bp, Artificial
  Synthetic oligonucleotide
gagggttgcaggtggtcttttatgagagatgactggttcagagaggatcgtc

SEQ ID NO: 138162 - DNA, 52 bp, Artificial
  Synthetic oligonucleotide
cccctttgactcgacaatccagtaaccaaccagactggggatgtctgaagga

SEQ ID NO: 138163 - DNA, 52 bp, Artificial
  Synthetic oligonucleotide
tgaggaggcggtgttatcaactgcctttaccagcggagtcagctctaccggg

SEQ ID NO: 138164 - DNA, 51 bp, Artificial
  Synthetic oligonucleotide
ccgggaggtcagggagtcatttaaccgacagatccttaccgtgctccagga

SEQ ID NO: 138165 - DNA, 51 bp, Artificial
  Synthetic oligonucleotide
tgtggtctctgatccgtctcatttggtcgtaaagcctctggaagctacgct

SEQ ID NO: 138166 - DNA, 55 bp, Artificial
  Synthetic oligonucleotide
cccctcgagcacatgagtaatcatccgttccgcatactgccacatgagcgattta

SEQ ID NO: 138167 - DNA, 50 bp, Artificial
  Synthetic oligonucleotide
aggttcagcacagacgcccctgaagcaccgatctggacctttgaacgggc

SEQ ID NO: 138168 - DNA, 50 bp, Artificial
  Synthetic oligonucleotide
aggcacgagcgggggatgggacttctcttccggggataccaaaccgtacc

SEQ ID NO: 138169 - DNA, 50 bp, Artificial
  Synthetic oligonucleotide
aggagagtgtccctatcaggccggtggttgcatttgaccctggcaccgtg

SEQ ID NO: 138170 - DNA, 50 bp, Artificial
  Synthetic oligonucleotide
agccgggacgtagaggcaacggttatcggaacattcaccaacaccggccg

SEQ ID NO: 138171 - DNA, 50 bp, Artificial
  Synthetic oligonucleotide
agcccctggtcaggcacgggagaacaagaccggatcatggcgtgtcttcc

SEQ ID NO: 138172 - DNA, 50 bp, Artificial
  Synthetic oligonucleotide
agcagggcacgacgagtgttaagatccggccgtggaaccacaatctgcct

SEQ ID NO: 138173 - DNA, 50 bp, Artificial
  Synthetic oligonucleotide
accggggttgcaacaccattgagtaccccctgaatctcctttccggcgcg

SEQ ID NO: 138174 - DNA, 50 bp, Artificial
  Synthetic oligonucleotide
accggagggtttccagccgggaccactgaggttcgtgagtgcccagattc

SEQ ID NO: 138175 - DNA, 50 bp, Artificial
  Synthetic oligonucleotide
acccctgacggggtgatggcccatggacagctcgagcattcaccggagtt

SEQ ID NO: 138176 - DNA, 50 bp, Artificial
  Synthetic oligonucleotide
acaggattcactgcttcagtcggcatccgaccgccaaacccccagggtcc

SEQ ID NO: 138177 - DNA, 55 bp, Artificial
  Synthetic oligonucleotide
caccccggaacatggtccacgggtcagatgggttaccgttctaatatcagcccca

SEQ ID NO: 138178 - DNA, 50 bp, Artificial
  Synthetic oligonucleotide
acacgcacgtgcaggtagggacgcccagaatggattgggtggcgttaccg

SEQ ID NO: 138179 - DNA, 50 bp, Artificial
  Synthetic oligonucleotide
acaatcctccgttgacccgatgacagccccggctccacacatggtcggaa

SEQ ID NO: 138180 - DNA, 50 bp, Artificial
  Synthetic oligonucleotide
acaagccgctgatccaggttccccaccggtcggttgtggggcctactatc

SEQ ID NO: 138181 - DNA, 50 bp, Artificial
  Synthetic oligonucleotide
aatgaccgcaagggtatccctcccgtccatggtcttccgccctgaatggc

SEQ ID NO: 138182 - DNA, 50 bp, Artificial
  Synthetic oligonucleotide
aagtaaccacgggggaagatggaataccgggacatatggcgggggtgggc

SEQ ID NO: 138183 - DNA, 50 bp, Artificial
  Synthetic oligonucleotide
aacggcccctgccatctcggccatctccggacatatgtacctgcggattt

SEQ ID NO: 138184 - DNA, 50 bp, Artificial
  Synthetic oligonucleotide
tggacatgttctgctctgtagcgaagtgattgagccggtttataatttcc

SEQ ID NO: 138185 - DNA, 50 bp, Artificial
  Synthetic oligonucleotide
aaacccggtggagtttgtgggccagcataccacagctcccactcccatgg

SEQ ID NO: 138186 - DNA, 50 bp, Artificial
  Synthetic oligonucleotide
catggtaccagtgggaccaggtacggggaactcccggccaggttgcgttt

SEQ ID NO: 138187 - DNA, 50 bp, Artificial
  Synthetic oligonucleotide
ccactcactgatgggaccactatcgggggacggacagactcggccccggc

SEQ ID NO: 138188 - DNA, 55 bp, Artificial
  Synthetic oligonucleotide
cccttgccaccctctcagtacaggcggccggtagcgggactgcacagattacgat

SEQ ID NO: 138189 - DNA, 50 bp, Artificial
  Synthetic oligonucleotide
cagggtctgcctgccattatcccagtgactgcactggtcccgatccggta

SEQ ID NO: 138190 - DNA, 50 bp, Artificial
  Synthetic oligonucleotide
cagcggtatgcatccgaagcccgtccgattgagtcagactggggcactcc

SEQ ID NO: 138191 - DNA, 50 bp, Artificial
  Synthetic oligonucleotide
cccatttccggcattggacgccatcaggcttggggatgtgcccctatgat

SEQ ID NO: 138192 - DNA, 50 bp, Artificial
  Synthetic oligonucleotide
ccccggttcctacggtgacccgcactccaactcccagtccgactccaacg

SEQ ID NO: 138193 - DNA, 50 bp, Artificial
  Synthetic oligonucleotide
cagcgaacacaagcgatctcccaatcgcacccgggtttcgtgccgttgca

SEQ ID NO: 138194 - DNA, 50 bp, Artificial
  Synthetic oligonucleotide
cagatccctcgtcccccggaatacctgcaccatggccctggtcgttgttg

SEQ ID NO: 138195 - DNA, 50 bp, Artificial
  Synthetic oligonucleotide
cccgcagggaccatggcacctgacaggccggcaaatatggtaacatccgg

SEQ ID NO: 138196 - DNA, 50 bp, Artificial
  Synthetic oligonucleotide
cccgccctttccctgcataggatgcccagttcgaacctgcgccttttgaa

SEQ ID NO: 138197 - DNA, 50 bp, Artificial
  Synthetic oligonucleotide
ccctgcattacaggggaaagtcgccgcacagggacgggtgaaccttggtg

SEQ ID NO: 138198 - DNA, 50 bp, Artificial
  Synthetic oligonucleotide
cacatgtgcggagccattgagggcatcagagtcacggtccccaaggctgg

SEQ ID NO: 138199 - DNA, 53 bp, Artificial
  Synthetic oligonucleotide
ccggggttccggactcaatgctttgtaataatcgtggtacggtatactcgccc

SEQ ID NO: 138200 - DNA, 50 bp, Artificial
  Synthetic oligonucleotide
ccgaccgggatctcaaccgggtccataatcgttcgtgcagcggtatccga

SEQ ID NO: 138201 - DNA, 50 bp, Artificial
  Synthetic oligonucleotide
ccgagagcagggatggttcgccttctgaaagggtgacacaggctccgtcc

SEQ ID NO: 138202 - DNA, 50 bp, Artificial
  Synthetic oligonucleotide
cacaggtcacccttgccaccctctcagtacaggcggccggtagcgggact

SEQ ID NO: 138203 - DNA, 50 bp, Artificial
  Synthetic oligonucleotide
atgcactccccggatctcgcttcccgctatcctggcatcccgtgggaggt

SEQ ID NO: 138204 - DNA, 50 bp, Artificial
  Synthetic oligonucleotide
agtacagcacccgccctttccctgcataggatgcccagttcgaacctgcg

SEQ ID NO: 138205 - DNA, 50 bp, Artificial
  Synthetic oligonucleotide
aggttccccaccggtcggttgtggggcctactatcccggcctttcctgtg

SEQ ID NO: 138206 - DNA, 55 bp, Artificial
  Synthetic oligonucleotide
atcctgctcttccgaatctgcaaaccgttcggatatgagaacggcatctgtcccc

SEQ ID NO: 138207 - DNA, 55 bp, Artificial
  Synthetic oligonucleotide
cggtacgcattcagaatccctagggacaaacccaggaacacatgaaataccccga

SEQ ID NO: 138208 - DNA, 55 bp, Artificial
  Synthetic oligonucleotide
ctatatcagggctggttcaacctcaagacttgcgacccgtgaacagcaggcacga

SEQ ID NO: 138209 - DNA, 57 bp, Artificial
  Synthetic oligonucleotide
taaacgtaaacttgtcactaggacaccaatcattgagcatgaaactccacccaaaag

SEQ ID NO: 138210 - DNA, 55 bp, Artificial
  Synthetic oligonucleotide
ctgcaagagctaatctaaatgcacgatcaagtaatactgcaacctgtccataagc

SEQ ID NO: 138211 - DNA, 55 bp, Artificial
  Synthetic oligonucleotide
ctcgtacctacaattgtagattgtcgttcttcagttaaataaggtgtgtacacac

SEQ ID NO: 138212 - DNA, 55 bp, Artificial
  Synthetic oligonucleotide
aagaggattgtcagcctcaatactcataggatcaagtccggatgttacagtttta

SEQ ID NO: 138213 - DNA, 55 bp, Artificial
  Synthetic oligonucleotide
aatagctagagttaacagacgattaacagctagagagttaacagctacagctcgc

SEQ ID NO: 138214 - DNA, 55 bp, Artificial
  Synthetic oligonucleotide
cctcctagagctgttattcgtgcccaatcattttcatacttgggctgtctatgta

SEQ ID NO: 138215 - DNA, 55 bp, Artificial
  Synthetic oligonucleotide
atttacactataggataactggtcatgtgccagttactttaaatgttcgtaggcc

SEQ ID NO: 138216 - DNA, 55 bp, Artificial
  Synthetic oligonucleotide
ccagaattcgtgtcaaaatctacttgggacacagtagtagatgtttacgtcaaag

SEQ ID NO: 138217 - DNA, 54 bp, Artificial
  Synthetic oligonucleotide
tttccacgagtttgtaatgctctatagtcccatggtgcctgatattctttagac

SEQ ID NO: 138218 - DNA, 53 bp, Artificial
  Synthetic oligonucleotide
gtaactaatagttggatgttgatagcttacatatccctgggtttcattggcag

SEQ ID NO: 138219 - DNA, 52 bp, Artificial
  Synthetic oligonucleotide
ctcacaagcctatcacctaataccatgtctccgcctacacgtaatgtacttc

SEQ ID NO: 138220 - DNA, 57 bp, Artificial
  Synthetic oligonucleotide
ctcgtgcaactcataaacttaggacttataacttcaaatagtagtgtgtcaccggat

SEQ ID NO: 138221 - DNA, 52 bp, Artificial
  Synthetic oligonucleotide
tggtccgtctggagatactggaggtattgtcgcattgactcttgaaccatca

SEQ ID NO: 138222 - DNA, 52 bp, Artificial
  Synthetic oligonucleotide
ctgggcctaagttgtcttgtaatctataacctcgcccaatagctgctaattc

SEQ ID NO: 138223 - DNA, 51 bp, Artificial
  Synthetic oligonucleotide
taatgggatcccaatatcgcctactcagacacttgtaggatccatcattgg

SEQ ID NO: 138224 - DNA, 51 bp, Artificial
  Synthetic oligonucleotide
tcgtagtattagtatatcagcatatctgttgattagtgcagcggctaccat

SEQ ID NO: 138225 - DNA, 51 bp, Artificial
  Synthetic oligonucleotide
tgcatgaagtttcttggcctccattacgtgatccaccgactgttattgcac

SEQ ID NO: 138226 - DNA, 50 bp, Artificial
  Synthetic oligonucleotide
ccgttggtaacacgtctggattaactactggatcatttccaggccctggt

SEQ ID NO: 138227 - DNA, 50 bp, Artificial
  Synthetic oligonucleotide
cttgtggaccagcagcactctctatggtcctccagaaacttggaatacag

SEQ ID NO: 138228 - DNA, 50 bp, Artificial
  Synthetic oligonucleotide
gttaagataacttgaccctatgttgcttttacctggtggataattgtagt

SEQ ID NO: 138229 - DNA, 50 bp, Artificial
  Synthetic oligonucleotide
gttcatggacacatagcaattgatggcacaagggtgagatctcctggaca

SEQ ID NO: 138230 - DNA, 50 bp, Artificial
  Synthetic oligonucleotide
gtttctgcacgaggattcacgtgttctataggaaatcaactgtatcgttc

SEQ ID NO: 138231 - DNA, 55 bp, Artificial
  Synthetic oligonucleotide
attttgctagttacacctccaacaggtaacacttcccctctaacacttaatgatc

SEQ ID NO: 138232 - DNA, 50 bp, Artificial
  Synthetic oligonucleotide
tgctacagatgcatgtcctgatggtccttcatttagttttccttcgagcc

SEQ ID NO: 138233 - DNA, 55 bp, Artificial
  Synthetic oligonucleotide
gtaatggtaactgccggagtccatggagatgaactccctccacaactagcagctg

SEQ ID NO: 138234 - DNA, 55 bp, Artificial
  Synthetic oligonucleotide
ggtgatatccacgaactacctatgcacctagaagggtacggcgaccatagcgggg

SEQ ID NO: 138235 - DNA, 55 bp, Artificial
  Synthetic oligonucleotide
gcttaaggtagcatatggtggatttaaaactgtgactgtaacggtgttacccttc

SEQ ID NO: 138236 - DNA, 55 bp, Artificial
  Synthetic oligonucleotide
gcaagtggtgtaaaggcatatcctctattatccaaaattaatccctccaaagatc

SEQ ID NO: 138237 - DNA, 55 bp, Artificial
  Synthetic oligonucleotide
gaagcatcgtttgtaagatcctgaggcttcttaaccgatccagaagttatatctg

SEQ ID NO: 138238 - DNA, 55 bp, Artificial
  Synthetic oligonucleotide
ctgttgctggaactatttcacaactctcattggaatatctaattaggaaaggctc

SEQ ID NO: 138239 - DNA, 60 bp, Artificial
  Synthetic oligonucleotide
tgccgcaccgttgtttgcaggttcagtccatgaaaggtctacctgagtattgccgcggtc

SEQ ID NO: 138240 - DNA, 55 bp, Artificial
  Synthetic oligonucleotide
cgactagccacgcttgatgttactagttcaggctctattactctagttgagacat

SEQ ID NO: 138241 - DNA, 54 bp, Artificial
  Synthetic oligonucleotide
cctttagaattatcggtgactttagcggtaaacgtttagagtgggattgtgaga

SEQ ID NO: 138242 - DNA, 55 bp, Artificial
  Synthetic oligonucleotide
ccgcatctgtcatttagtacacagaggtccccaagagatgcaaatcctggtgcac

SEQ ID NO: 138243 - DNA, 55 bp, Artificial
  Synthetic oligonucleotide
aacacggaatggcaaatagcagtattcatcacaatcctgtgcagttgattctacc

SEQ ID NO: 138244 - DNA, 55 bp, Artificial
  Synthetic oligonucleotide
agcactgacttctatgcgacctactttagaaactcgttgcagttcattcagattc

SEQ ID NO: 138245 - DNA, 55 bp, Artificial
  Synthetic oligonucleotide
caccgtttgtaccattggtaaagatcaagctaggagttccaccctcatcaatagt

SEQ ID NO: 138246 - DNA, 55 bp, Artificial
  Synthetic oligonucleotide
cactaaatggggtaccttttgcctatcaaccatctgcaatactgcaaaatactgg

SEQ ID NO: 138247 - DNA, 55 bp, Artificial
  Synthetic oligonucleotide
cagacatacaccaaactgaccatcacctagcatgcagtcatcaactagctgcttg

SEQ ID NO: 138248 - DNA, 55 bp, Artificial
  Synthetic oligonucleotide
cccatgactaaatcgcatcatcgattgccctctattaaaccatgtgagacctggt

SEQ ID NO: 138249 - DNA, 55 bp, Artificial
  Synthetic oligonucleotide
cccttgtagtatagcccggtctagaattcggccctgtcacggctgagacgcgtgt

SEQ ID NO: 138250 - DNA, 60 bp, Artificial
  Synthetic oligonucleotide
tcatgttccgttcaaaccagttgccgagcatcttcggtctgtgtctgacggcaggtgtta

SEQ ID NO: 138251 - DNA, 54 bp, Artificial
  Synthetic oligonucleotide
ctcctgatcatagatatacagatggatttagcggagaatttggttctacaggag

SEQ ID NO: 138252 - DNA, 54 bp, Artificial
  Synthetic oligonucleotide
cataatgcgcgcatacaagtactacgttattgaatcggataaagattcctagtc

SEQ ID NO: 138253 - DNA, 54 bp, Artificial
  Synthetic oligonucleotide
tcagcgtagcattatcattacgattgggtatggcaaatctacttggaggatcaa

SEQ ID NO: 138254 - DNA, 53 bp, Artificial
  Synthetic oligonucleotide
gagacaatcataaaatcctgctgcaacgttggcatatgcttctctaaaggata

SEQ ID NO: 138255 - DNA, 53 bp, Artificial
  Synthetic oligonucleotide
caaacgctgcttatcttaacgtcaatccaatcaagatgggctgtggcagttgg

SEQ ID NO: 138256 - DNA, 53 bp, Artificial
  Synthetic oligonucleotide
atctttaaagatttaagcttgccatgacagttagctccctggcccgtgtttcg

SEQ ID NO: 138257 - DNA, 53 bp, Artificial
  Synthetic oligonucleotide
gtacggtgtaaacagttctatccaaacttattccactgttggttctagtatcc

SEQ ID NO: 138258 - DNA, 53 bp, Artificial
  Synthetic oligonucleotide
tatatctgggagcattgtagactatgaagatgcaggacacgcacttactttcc

SEQ ID NO: 138259 - DNA, 53 bp, Artificial
  Synthetic oligonucleotide
tgagagtcttcaagaattctcacctgtatcgataattggaggccaatctgata

SEQ ID NO: 138260 - DNA, 52 bp, Artificial
  Synthetic oligonucleotide
ctgtagcactatattctggtttgagttgcatgacataggaaccgtctggaag

SEQ ID NO: 138261 - DNA, 55 bp, Artificial
  Synthetic oligonucleotide
ggcagtctagagagaaattagtctcattattctactcaatcatacttttacgcgg

SEQ ID NO: 138262 - DNA, 51 bp, Artificial
  Synthetic oligonucleotide
gcacatttgattggatctgtaatttcaggacatggatccataggactaaca

SEQ ID NO: 138263 - DNA, 51 bp, Artificial
  Synthetic oligonucleotide
attccattagaataccatgcctcaaccatttcgtatatccatctatgaggg

SEQ ID NO: 138264 - DNA, 50 bp, Artificial
  Synthetic oligonucleotide
aactaagctaaactgactcacggatgatgtaagtttggagctgtagtgac

SEQ ID NO: 138265 - DNA, 55 bp, Artificial
  Synthetic oligonucleotide
ggagaacacaaagagtgtggccttcatatagagcgtaaaagagtggaatagtatg

SEQ ID NO: 138266 - DNA, 55 bp, Artificial
  Synthetic oligonucleotide
gctatgcggaaactaccatagatctgagcggatacaagtcaggagtttactctgc

SEQ ID NO: 138267 - DNA, 55 bp, Artificial
  Synthetic oligonucleotide
gcccttccattaagaatctggagactgtctttgttgccttatgatagtgcacaac

SEQ ID NO: 138268 - DNA, 55 bp, Artificial
  Synthetic oligonucleotide
gatggaatagaacacttgggatgttaaagcatctcaacacacgaacggttctacg

SEQ ID NO: 138269 - DNA, 55 bp, Artificial
  Synthetic oligonucleotide
gagatcgatgttatcgccacagttacggaaggagttcagataagtgtcgaggaag

SEQ ID NO: 138270 - DNA, 55 bp, Artificial
  Synthetic oligonucleotide
cggttgcctcattagtctcagttaaagttaggtcaatacctccggcatcggagtc

SEQ ID NO: 138271 - DNA, 51 bp, Artificial
  Synthetic oligonucleotide
gagggggagggagacctacctaaattatacccgtgtatttacccgtgtatc

SEQ ID NO: 138272 - DNA, 60 bp, Artificial
  Synthetic oligonucleotide
tgttatgatatatattacctgttatcgggctttcttcaataacatcgtaatgtggatctc

SEQ ID NO: 138273 - DNA, 59 bp, Artificial
  Synthetic oligonucleotide
tgctcatgcacgaattcaccccctaccccctcttcgtgcattcgctaaattatcccgcc

SEQ ID NO: 138274 - DNA, 57 bp, Artificial
  Synthetic oligonucleotide
aaggcttaaacaaatacgaggaaggaggcataaacctcatgagtgcagtaatttaca

SEQ ID NO: 138275 - DNA, 55 bp, Artificial
  Synthetic oligonucleotide
tcttttgtggatttaaggtttgatgtaattcaaaactatttacctatatggacca

SEQ ID NO: 138276 - DNA, 53 bp, Artificial
  Synthetic oligonucleotide
aatatagcacgggattaaaagggttaaacaaaggtattaatcgatcgatagag

SEQ ID NO: 138277 - DNA, 57 bp, Artificial
  Synthetic oligonucleotide
aatttagagacaggcaaaaacgacattgtattatattaccataaaggaagcaacata

SEQ ID NO: 138278 - DNA, 54 bp, Artificial
  Synthetic oligonucleotide
acgctacccgtgtttcacacgggtgcgttcgctcggcggggaggggttcgcagc

SEQ ID NO: 138279 - DNA, 55 bp, Artificial
  Synthetic oligonucleotide
cgttccaaataaaatggtgaaagatgagtataagaataatataccgaaaatagag

SEQ ID NO: 138280 - DNA, 57 bp, Artificial
  Synthetic oligonucleotide
gaccatgagagaaaaaagaatgcacgaagatttagagataacagaaccatcgtataa

SEQ ID NO: 138281 - DNA, 54 bp, Artificial
  Synthetic oligonucleotide
gattacatttacttaaacgccctggacaatccaacctcttataagttatttgag

SEQ ID NO: 138282 - DNA, 56 bp, Artificial
  Synthetic oligonucleotide
gatgaggataaattagattacatttacttaaacgccctggacaatccaacctctta

SEQ ID NO: 138283 - DNA, 55 bp, Artificial
  Synthetic oligonucleotide
gatccaataaatgggacaacgctaccttggttagcaacctcatattcatggcatg

SEQ ID NO: 138284 - DNA, 55 bp, Artificial
  Synthetic oligonucleotide
ttacatgccggatatgttaaagatctatccaacactggttgtaaggggcacatcg

SEQ ID NO: 138285 - DNA, 55 bp, Artificial
  Synthetic oligonucleotide
gcctcatagcatctcttcattgcaagtgctgcagcccggaatgcggtaacaggga

SEQ ID NO: 138286 - DNA, 55 bp, Artificial
  Synthetic oligonucleotide
gccttacagattcggtaaagataagttgcataaaattgacaccgtgtgtcgtatc

SEQ ID NO: 138287 - DNA, 55 bp, Artificial
  Synthetic oligonucleotide
gcgcaacatttggcacattcctaatagatttgataggtacattcggcgttgttct

SEQ ID NO: 138288 - DNA, 55 bp, Artificial
  Synthetic oligonucleotide
gctcacgtgcaccggttataaggcagtatgatcatacggttcgcggtgcaaccat

SEQ ID NO: 138289 - DNA, 55 bp, Artificial
  Synthetic oligonucleotide
gctccaatgtaacgtttgaactgtacaatcctgatcatgtaatggtaagcaaggc

SEQ ID NO: 138290 - DNA, 55 bp, Artificial
  Synthetic oligonucleotide
gctttcttcaataacatcgtaatgtggatctccgtgatttaaatcaggtcgtccc

SEQ ID NO: 138291 - DNA, 55 bp, Artificial
  Synthetic oligonucleotide
taggcatcgccgcagttatacctgacggcctcaagtttccacacggatttacagt

SEQ ID NO: 138292 - DNA, 55 bp, Artificial
  Synthetic oligonucleotide
tccaatgggcaaaggagaaattaacaggcaggtatgtagtagttatcgatgaggc

SEQ ID NO: 138293 - DNA, 51 bp, Artificial
  Synthetic oligonucleotide
ggataaggattacctctgttagttttattaaccctataagaagtttgattt

SEQ ID NO: 138294 - DNA, 55 bp, Artificial
  Synthetic oligonucleotide
gttccatcaaacatagacccggttaatgcaccattattctgcccgggtgttacag

SEQ ID NO: 138295 - DNA, 55 bp, Artificial
  Synthetic oligonucleotide
gggcctacagtgccggtcatataccaggatcaagcatgtggcgctttgaggattc

SEQ ID NO: 138296 - DNA, 55 bp, Artificial
  Synthetic oligonucleotide
ggtaaaccacacacgctgccattccttgttaacggcaagtcaggctcggtctcgg

SEQ ID NO: 138297 - DNA, 55 bp, Artificial
  Synthetic oligonucleotide
atgctgcgttcataacgcttgcaaccatgtacctgtaattatgatccagtgcgta

SEQ ID NO: 138298 - DNA, 55 bp, Artificial
  Synthetic oligonucleotide
aatcggagagtttgccgccgccctttgtgcttattacaaggtcatccctgtaatc

SEQ ID NO: 138299 - DNA, 55 bp, Artificial
  Synthetic oligonucleotide
caaagcgacatgcgccgcggaaggccaagctttcacagatccgtggagacaagac

SEQ ID NO: 138300 - DNA, 55 bp, Artificial
  Synthetic oligonucleotide
caggcgggtaccagtttctgttcccaagtacaatgcacgttctaacaggtgcatc

SEQ ID NO: 138301 - DNA, 55 bp, Artificial
  Synthetic oligonucleotide
cagggtgggccatacgttgacggttactcagttgtgcttggcgttgacagggtaa

SEQ ID NO: 138302 - DNA, 55 bp, Artificial
  Synthetic oligonucleotide
catgcaataaaggttggcagtgatatacgcggatacatatcagagttccttaggg

SEQ ID NO: 138303 - DNA, 54 bp, Artificial
  Synthetic oligonucleotide
ccaacagagtaaccctttaactcccttatccttctcatcttatccccgtctatg

SEQ ID NO: 138304 - DNA, 55 bp, Artificial
  Synthetic oligonucleotide
ggataccgcagggcattggtttagattagataagggcggaagaacattacctaaa

SEQ ID NO: 138305 - DNA, 55 bp, Artificial
  Synthetic oligonucleotide
ccctcgcactggcagcttaatgcggatattccgcctgtaagtgttggatttatca

SEQ ID NO: 138306 - DNA, 52 bp, Artificial
  Synthetic oligonucleotide
ctaaaccagaggactggtataaactgaaagagttattgggaattaaggaaac

SEQ ID NO: 138307 - DNA, 55 bp, Artificial
  Synthetic oligonucleotide
ctccggtatctttattgacctcgcaagatttatgcttattgccgtggagctcatg

SEQ ID NO: 138308 - DNA, 55 bp, Artificial
  Synthetic oligonucleotide
gacgttgtattaaagtgccctgaatgcggatctgaaatgcacagggagtcatatg

SEQ ID NO: 138309 - DNA, 55 bp, Artificial
  Synthetic oligonucleotide
gaggaaggaggcataaacctcatgagtgcagtaatttacagggattataatagtg

SEQ ID NO: 138310 - DNA, 54 bp, Artificial
  Synthetic oligonucleotide
ccggggatgccagtggtgacaggaagagggttgttggctacgccgcaatgcttg

SEQ ID NO: 138311 - DNA, 54 bp, Artificial
  Synthetic oligonucleotide
tattgcaaattaaggaattacgatataagaatatttgaggataagggaatatca

SEQ ID NO: 138312 - DNA, 54 bp, Artificial
  Synthetic oligonucleotide
accttttaagtgttaaaacgagctgtgagtgcgaccatatcagcggtgatacag

SEQ ID NO: 138313 - DNA, 54 bp, Artificial
  Synthetic oligonucleotide
aggccgggcaaatgtgtgaactgcaggataggccgtgaggatgactgctcagac

SEQ ID NO: 138314 - DNA, 53 bp, Artificial
  Synthetic oligonucleotide
aagacagatgggactcagccagaagggctatcccacttgcacccatcggccgg

SEQ ID NO: 138315 - DNA, 54 bp, Artificial
  Synthetic oligonucleotide
ggattttccaactgcaaaaatcaaagatagccattttgccgtttttcccgaaga

SEQ ID NO: 138316 - DNA, 53 bp, Artificial
  Synthetic oligonucleotide
ttaactgcgcaccgcgtatcagcccaagcggatctgcaacgttctttccggcg

SEQ ID NO: 138317 - DNA, 53 bp, Artificial
  Synthetic oligonucleotide
aaaatagtggctcgaagaacccatatgttacggttgacaccttttctgctatt

SEQ ID NO: 138318 - DNA, 53 bp, Artificial
  Synthetic oligonucleotide
ggccctcagtgcggcaaagttctgggacagaccaaccgatgccaggacacatg

SEQ ID NO: 138319 - DNA, 53 bp, Artificial
  Synthetic oligonucleotide
cgctcgaaccttcgtgatgactgccctccctggtgatgcttgctcggtaccag

SEQ ID NO: 138320 - DNA, 52 bp, Artificial
  Synthetic oligonucleotide
taatggaaacggttaccatgtctcaggaagcataaaactttgcgagccctat

SEQ ID NO: 138321 - DNA, 52 bp, Artificial
  Synthetic oligonucleotide
acatcgcttgccgggtcaaccctggttgctatggcccagagaacctgtgacc

SEQ ID NO: 138322 - DNA, 52 bp, Artificial
  Synthetic oligonucleotide
tccaacaggcgccgaaacgatagcaaaatcaagcggcggcatggttgtcaaa

SEQ ID NO: 138323 - DNA, 52 bp, Artificial
  Synthetic oligonucleotide
aagtgttatcgagggccttacgtttatgggtggcacaggaagcacggttaag

SEQ ID NO: 138324 - DNA, 52 bp, Artificial
  Synthetic oligonucleotide
ggattgtacagaatgttaatgcatcatgttcatgcacatactcggcgcagtg

SEQ ID NO: 138325 - DNA, 50 bp, Artificial
  Synthetic oligonucleotide
agtattgcgccggcccttgatgcggcagttgctataccctgaaccgttga

SEQ ID NO: 138326 - DNA, 57 bp, Artificial
  Synthetic oligonucleotide
attacctgttatcgggctttcttcaataacatcgtaatgtggatctccgtgatttaa

SEQ ID NO: 138327 - DNA, 50 bp, Artificial
  Synthetic oligonucleotide
tagtaaccgtggacttaatgcctcgcaaaagctcagcacttacatcccgg

SEQ ID NO: 138328 - DNA, 50 bp, Artificial
  Synthetic oligonucleotide
ggctcgagcgcggcccaaaggaggcaaacgagggcgaccttgcaatgttt

SEQ ID NO: 138329 - DNA, 50 bp, Artificial
  Synthetic oligonucleotide
cggttatagtttcactcctttacgtgcttccacctgtgatgctggacaac

SEQ ID NO: 138330 - DNA, 50 bp, Artificial
  Synthetic oligonucleotide
aacgtccataaccggggcccttgatgatctatgctcagtttactatgggg

SEQ ID NO: 138331 - DNA, 50 bp, Artificial
  Synthetic oligonucleotide
cgttagatgaggttcatagattgttaagggcaggagagaaaacgatttac

SEQ ID NO: 138332 - DNA, 57 bp, Artificial
  Synthetic oligonucleotide
atgccttaaacgatacaatccaatgggcaaaggagaaattaacaggcaggtatgtag

SEQ ID NO: 138333 - DNA, 60 bp, Artificial
  Synthetic oligonucleotide
acatgccatcactgtaatcattcatgggaatacaagggaaactcaaagtatgcgacctgt

SEQ ID NO: 138334 - DNA, 59 bp, Artificial
  Synthetic oligonucleotide
ttaccgatatggtagagaaatccttacctgactatgcttataatatcgctaaaaagata

SEQ ID NO: 138335 - DNA, 55 bp, Artificial
  Synthetic oligonucleotide
acctggtcggctaaagtagtcctctaaagctataggccgggaatggttatcacta

SEQ ID NO: 138336 - DNA, 55 bp, Artificial
  Synthetic oligonucleotide
cttaccgagagtgattcgccgtacaagtatcgcagtctagagctggagccccgcc

SEQ ID NO: 138337 - DNA, 50 bp, Artificial
  Synthetic oligonucleotide
aatcgtgttcgtgtaaaagcgccggctagcatcgcaaaccttggccccct

SEQ ID NO: 138338 - DNA, 50 bp, Artificial
  Synthetic oligonucleotide
aatcgcggacaggctcggcctactctagggcaacgggatggaagacgacg

SEQ ID NO: 138339 - DNA, 50 bp, Artificial
  Synthetic oligonucleotide
aaggtgttggggccagcagccctcgagcactgtaggagcgaggtacaatc

SEQ ID NO: 138340 - DNA, 50 bp, Artificial
  Synthetic oligonucleotide
aaggtggggcgaagagccaaacgtgaagcgcgatatcctccgcggtgctc

SEQ ID NO: 138341 - DNA, 50 bp, Artificial
  Synthetic oligonucleotide
aaggtgaaccccctcacacccctaaccaatgcttccccgccagcagctat

SEQ ID NO: 138342 - DNA, 50 bp, Artificial
  Synthetic oligonucleotide
aaggtctacccgggctagcctcccagtccagccatacaagctacgagccc

SEQ ID NO: 138343 - DNA, 50 bp, Artificial
  Synthetic oligonucleotide
aagggtcatcactgggctcctagcgcacaccactagacgcgggctcagca

SEQ ID NO: 138344 - DNA, 50 bp, Artificial
  Synthetic oligonucleotide
aagggtagggacgtgtagcggagcagcgggttaaccctcagcggaaggtg

SEQ ID NO: 138345 - DNA, 50 bp, Artificial
  Synthetic oligonucleotide
aagggcctctaggatgggggcgagagcctggagtctacggcgggacgcga

SEQ ID NO: 138346 - DNA, 50 bp, Artificial
  Synthetic oligonucleotide
aaggctcgggccgccaagctagtcatcacgcctctcagcgtagttggcgc

SEQ ID NO: 138347 - DNA, 55 bp, Artificial
  Synthetic oligonucleotide
gacaacgtttacgacacggtatggtaggcctagcccctggaatagttcctcagca

SEQ ID NO: 138348 - DNA, 50 bp, Artificial
  Synthetic oligonucleotide
aaggctagagcggggcctctacggtcactacgtgccgccagatgaggttg

SEQ ID NO: 138349 - DNA, 50 bp, Artificial
  Synthetic oligonucleotide
aaggatcctcgtggaatagtcgacgcgtctccgggaacccatcggcccac

SEQ ID NO: 138350 - DNA, 50 bp, Artificial
  Synthetic oligonucleotide
aagcgccatgctccgagcggaaggtgccaataacctcaccaccaagcatg

SEQ ID NO: 138351 - DNA, 50 bp, Artificial
  Synthetic oligonucleotide
aagccttccggcgcaaccctcgtctagtttgggagtggtataggtggcgc

SEQ ID NO: 138352 - DNA, 50 bp, Artificial
  Synthetic oligonucleotide
aagccggtacgcagttaccctcgcagaggcatagtcgttgactcgcgcgg

SEQ ID NO: 138353 - DNA, 50 bp, Artificial
  Synthetic oligonucleotide
aagccgctactacgggttgctggtaggccgctggcatggtatccgcttag

SEQ ID NO: 138354 - DNA, 55 bp, Artificial
  Synthetic oligonucleotide
gattctcatactacgcgctaggacacatacatctctaccgcgagtttaggctagg

SEQ ID NO: 138355 - DNA, 55 bp, Artificial
  Synthetic oligonucleotide
gcgatagagcgtgagtcgtttgaccagccatatagcttgtggtaccttgaactcc

SEQ ID NO: 138356 - DNA, 55 bp, Artificial
  Synthetic oligonucleotide
gcgtagcctcgcagcgacacgctcagcttcactcatgtaacgctctacatgctcc

SEQ ID NO: 138357 - DNA, 55 bp, Artificial
  Synthetic oligonucleotide
gctcggagccaatacgcttccacgtacgcgaggcaccagcaactgtaacggctgg

SEQ ID NO: 138358 - DNA, 55 bp, Artificial
  Synthetic oligonucleotide
gctgtgtgatgagggacaccagcacggagcatcaacatactctggtgctacaagc

SEQ ID NO: 138359 - DNA, 55 bp, Artificial
  Synthetic oligonucleotide
tgaggtcgtaatactagtccctcttctagcttctacagccctagcactattgcct

SEQ ID NO: 138360 - DNA, 55 bp, Artificial
  Synthetic oligonucleotide
tcatgtagagaggctcatagatgaaattaggagcagcggcgtactaatgcgcccc

SEQ ID NO: 138361 - DNA, 55 bp, Artificial
  Synthetic oligonucleotide
accgaggtcgagtcttatggctgggagactgttgtccggctactcattgagcgtg

SEQ ID NO: 138362 - DNA, 55 bp, Artificial
  Synthetic oligonucleotide
acggtatgcgcctggctctaaaggctaccagcccatactgtcgcccacttgtcgc

SEQ ID NO: 138363 - DNA, 55 bp, Artificial
  Synthetic oligonucleotide
gtgcgcctggatactgttcggagagcaaacgggtctccatgaggtcatagggttc

SEQ ID NO: 138364 - DNA, 55 bp, Artificial
  Synthetic oligonucleotide
gtagaggacggagaatactcgcagctaggagtaaccccgtgtacatcacgactgt

SEQ ID NO: 138365 - DNA, 55 bp, Artificial
  Synthetic oligonucleotide
ggtggctagcgtggcccggagaatgcacaaagactagccttgcgccgtccaacac

SEQ ID NO: 138366 - DNA, 55 bp, Artificial
  Synthetic oligonucleotide
gggttcgttgaagcggctcctaacaagctggtatagatcctgtacatagacgggg

SEQ ID NO: 138367 - DNA, 55 bp, Artificial
  Synthetic oligonucleotide
gggattctagcccgcgtcgtatgtagggcaacatctataacgggttagacgtgtc

SEQ ID NO: 138368 - DNA, 55 bp, Artificial
  Synthetic oligonucleotide
gggacgccggataagcccgtctacgcgttgatagtggcgctgacagatactaggg

SEQ ID NO: 138369 - DNA, 55 bp, Artificial
  Synthetic oligonucleotide
ggctgagtagccactaattatttgtgacacctataaccacactctaacccggcca

SEQ ID NO: 138370 - DNA, 55 bp, Artificial
  Synthetic oligonucleotide
ggctctgtgcgtgccctcttaaacaaaacgtttcgaaatgtgcggggctttagcc

SEQ ID NO: 138371 - DNA, 55 bp, Artificial
  Synthetic oligonucleotide
ggcgcagacgcatacatgatagaatgttcatcgactatgtaatggatacggacat

SEQ ID NO: 138372 - DNA, 52 bp, Artificial
  Synthetic oligonucleotide
ggccggatacctgacccgctcccctaccgttcacccactaatccaccctaag

SEQ ID NO: 138373 - DNA, 55 bp, Artificial
  Synthetic oligonucleotide
acgtcaagctactagctacacatagcgggttcagtgaccacagtgacgggagtag

SEQ ID NO: 138374 - DNA, 55 bp, Artificial
  Synthetic oligonucleotide
ggagagccatgacgggccacgcgcatgcaatggttacacttgttctcaccggctc

SEQ ID NO: 138375 - DNA, 54 bp, Artificial
  Synthetic oligonucleotide
cgaatagccgagaagtttaggagcataggtggttggtttatcgcacttgtagca

SEQ ID NO: 138376 - DNA, 53 bp, Artificial
  Synthetic oligonucleotide
gagcgtactcctaaaccccgctgtgatagtatgggctatactcttcgtgctat

SEQ ID NO: 138377 - DNA, 52 bp, Artificial
  Synthetic oligonucleotide
ccggaccattgtgaagaacatgactactatgccgaatccgccaaaccattct

SEQ ID NO: 138378 - DNA, 52 bp, Artificial
  Synthetic oligonucleotide
agcgctactgctacccgtgatcatcaagctaggactggcaggctaggacatc

SEQ ID NO: 138379 - DNA, 51 bp, Artificial
  Synthetic oligonucleotide
tctgggcaaggagtaagacccgcgggccgtctcgtgtgacatgtcttgggg

SEQ ID NO: 138380 - DNA, 51 bp, Artificial
  Synthetic oligonucleotide
agggctgcgtacgggtttccacgcgcattttcatgcatcctaaccggccat

SEQ ID NO: 138381 - DNA, 51 bp, Artificial
  Synthetic oligonucleotide
aggctcgtgaggctggcaaatggcgcctctactacaacagcccggagggta

SEQ ID NO: 138382 - DNA, 51 bp, Artificial
  Synthetic oligonucleotide
tgaactcgcattctccctagtacttgcagtaggagggctctacatgttgac

SEQ ID NO: 138383 - DNA, 50 bp, Artificial
  Synthetic oligonucleotide
accctcgccctcctagccgggcgtagcgtagcggcgaatcctgctagtga

SEQ ID NO: 138384 - DNA, 55 bp, Artificial
  Synthetic oligonucleotide
ccaccacgctctactactttaaggagttcgcgtatgtctgaagccctgacactct

SEQ ID NO: 138385 - DNA, 50 bp, Artificial
  Synthetic oligonucleotide
acccttgacgcctctagggcccagtcctcccctctatatgcaacccccta

SEQ ID NO: 138386 - DNA, 50 bp, Artificial
  Synthetic oligonucleotide
accgcgaagctgcacggagggataggccgtggctataaccgtctatggcc

SEQ ID NO: 138387 - DNA, 50 bp, Artificial
  Synthetic oligonucleotide
acccggtccccctcgctgctaactacgcggtagacatggtcgccggtctt

SEQ ID NO: 138388 - DNA, 50 bp, Artificial
  Synthetic oligonucleotide
acccggctcgcgtgttcaacggggactcggggagcctctcgataggtgcg

SEQ ID NO: 138389 - DNA, 50 bp, Artificial
  Synthetic oligonucleotide
acccgcctctagacccccgcctactcccaggctacaaccccatagaggca

SEQ ID NO: 138390 - DNA, 50 bp, Artificial
  Synthetic oligonucleotide
acccgatggtgctcgctgcgccattaacaacgagactgcggctaggctgc

SEQ ID NO: 138391 - DNA, 50 bp, Artificial
  Synthetic oligonucleotide
acccgaggattaggcgcgcgtaggggtgagagtcaatggcgtggcacgtg

SEQ ID NO: 138392 - DNA, 50 bp, Artificial
  Synthetic oligonucleotide
acccgaggacaacgctgctatggctcgaccaccacgagtggcccagcggt

SEQ ID NO: 138393 - DNA, 50 bp, Artificial
  Synthetic oligonucleotide
accgcgctgcaataaacgctaagctccgcagcatactcgacgaggccacg

SEQ ID NO: 138394 - DNA, 50 bp, Artificial
  Synthetic oligonucleotide
accgggacactgccaggtccaggctcaactctcgcaaccttcgacgagac

SEQ ID NO: 138395 - DNA, 55 bp, Artificial
  Synthetic oligonucleotide
cgagcgattctagctcttctgctagcgctctgcccgcctcagaagctacccggta

SEQ ID NO: 138396 - DNA, 50 bp, Artificial
  Synthetic oligonucleotide
acgaaggctgtctcggggagcatatcgtcacctggcacgacacctgcagc

SEQ ID NO: 138397 - DNA, 50 bp, Artificial
  Synthetic oligonucleotide
acgcgaggctccgagaggtgtgccgtgttgagcggaggagggtactagcc

SEQ ID NO: 138398 - DNA, 50 bp, Artificial
  Synthetic oligonucleotide
acggagcctccacttggcagctcgtccgccacatactcatcccgcagcta

SEQ ID NO: 138399 - DNA, 50 bp, Artificial
  Synthetic oligonucleotide
acggaggtcacggtgatctaccggggcagcgtagtctacacaggctccct

SEQ ID NO: 138400 - DNA, 50 bp, Artificial
  Synthetic oligonucleotide
acggcgatagccctccaacgcggtatgagcttgccagcacaagcaccggg

SEQ ID NO: 138401 - DNA, 50 bp, Artificial
  Synthetic oligonucleotide
acggtactcccgcggctcgacacgcaccactagagcctccgtcattgggt

SEQ ID NO: 138402 - DNA, 50 bp, Artificial
  Synthetic oligonucleotide
tcaaggtatctaccggtatcctttacgcgatagtccacgtgaggttggtg

SEQ ID NO: 138403 - DNA, 50 bp, Artificial
  Synthetic oligonucleotide
tgctatgctcacatactgtccaagcacgtgttgcggagtgtcacagagaa

SEQ ID NO: 138404 - DNA, 50 bp, Artificial
  Synthetic oligonucleotide
aagccctgtctccccttacgctagtatcgctgctgcggtgccactcgcct

SEQ ID NO: 138405 - DNA, 50 bp, Artificial
  Synthetic oligonucleotide
aagcactaggcggtgaatggggccctggagcatgtcgagtatccccctgg

SEQ ID NO: 138406 - DNA, 55 bp, Artificial
  Synthetic oligonucleotide
cgaggttttcgagagagtagtgaaggctaggatattccggaatcgctctgtgctc

SEQ ID NO: 138407 - DNA, 50 bp, Artificial
  Synthetic oligonucleotide
aagcacgggtttacagccaagctcccgctcgagcctagagccccactcgc

SEQ ID NO: 138408 - DNA, 50 bp, Artificial
  Synthetic oligonucleotide
aagaggtatgagaggcgccgtagcaggatacacgcccacaacccgccatg

SEQ ID NO: 138409 - DNA, 50 bp, Artificial
  Synthetic oligonucleotide
aagagccgcattcctccctaacgctctcccgcagaaccctggctagctcc

SEQ ID NO: 138410 - DNA, 50 bp, Artificial
  Synthetic oligonucleotide
aagagcacgttgcatgtaacgccttacaagggggttagggcgccggtgcg

SEQ ID NO: 138411 - DNA, 50 bp, Artificial
  Synthetic oligonucleotide
aagactaccgactcagcgcgaggcacttgcactaatgggcgttgggggtt

SEQ ID NO: 138412 - DNA, 50 bp, Artificial
  Synthetic oligonucleotide
aagacgtggtaggggctacgcgccaacctggataagactcggtttccgcc

SEQ ID NO: 138413 - DNA, 50 bp, Artificial
  Synthetic oligonucleotide
aagacctagcactacacagcctcggctcaaagccccataagccggacccc

SEQ ID NO: 138414 - DNA, 50 bp, Artificial
  Synthetic oligonucleotide
aagaatacgccccgcaccctgccatagatgcggaggtacgccttgggtat

SEQ ID NO: 138415 - DNA, 50 bp, Artificial
  Synthetic oligonucleotide
aacggcaccccatatacgcggctacgaggcgccttagatggcaacgagga

SEQ ID NO: 138416 - DNA, 50 bp, Artificial
  Synthetic oligonucleotide
aacgctctcccgcagaaccctggctagctcctcgctaggcctgagaagcg

SEQ ID NO: 138417 - DNA, 52 bp, Artificial
  Synthetic oligonucleotide
cgcggtaggaacccgcctcccgtgctagacctcgggttcgcaagaatagggg

SEQ ID NO: 138418 - DNA, 50 bp, Artificial
  Synthetic oligonucleotide
aacgctctacatgctagcgctggccgcgaggacatacacgcccaacacgt

SEQ ID NO: 138419 - DNA, 50 bp, Artificial
  Synthetic oligonucleotide
aacgaggcagggatgatactcgcgctaccatcgtgaaccggtgcgaggct

SEQ ID NO: 138420 - DNA, 50 bp, Artificial
  Synthetic oligonucleotide
aaccgcgcctaggacatagcgtgcgaagaggaccggagcggttaccgccc

SEQ ID NO: 138421 - DNA, 50 bp, Artificial
  Synthetic oligonucleotide
aaccgcagctgcctcctcaacggcgtcggacggcctaagagcctcgatta

SEQ ID NO: 138422 - DNA, 50 bp, Artificial
  Synthetic oligonucleotide
aaccgaagtaggtcgaaacccccacaccacgctggcgtgtacagaccgta

SEQ ID NO: 138423 - DNA, 50 bp, Artificial
  Synthetic oligonucleotide
aacagtcggaatacccacaagggcctctaggatgggggcgagagcctgga

SEQ ID NO: 138424 - DNA, 50 bp, Artificial
  Synthetic oligonucleotide
aacagcggtttcactgtaagcgccccgtcaataccctggacgcgcgacac

SEQ ID NO: 138425 - DNA, 50 bp, Artificial
  Synthetic oligonucleotide
aacagcctacaagcgtccacgtatagcgcggggccgaccagcaaccctag

SEQ ID NO: 138426 - DNA, 50 bp, Artificial
  Synthetic oligonucleotide
aacacgcgcatcctcttcactcttgcaccccgcggtgctccggtacccag

SEQ ID NO: 138427 - DNA, 50 bp, Artificial
  Synthetic oligonucleotide
aaagtaacacggggccatgcacgctccagctgcgggatccgtagtgagct

SEQ ID NO: 138428 - DNA, 55 bp, Artificial
  Synthetic oligonucleotide
cggcaacctctataatcctctcgatctctgatggtgtagtcaacgcgtacacggc

SEQ ID NO: 138429 - DNA, 50 bp, Artificial
  Synthetic oligonucleotide
aaagggtggttccctcctcggggtttgggagcggaggctcacgcgtactg

SEQ ID NO: 138430 - DNA, 50 bp, Artificial
  Synthetic oligonucleotide
aaagcctcggctttctcgtgccacacgcaggttacatgtacagcggccca

SEQ ID NO: 138431 - DNA, 50 bp, Artificial
  Synthetic oligonucleotide
aaagacccggggctgggtggactgccacctctacggtgcagagttgcaga

SEQ ID NO: 138432 - DNA, 50 bp, Artificial
  Synthetic oligonucleotide
aaacatcgaccgcgagggtgcaaggataacgagcgagtaacgggggcctg

SEQ ID NO: 138433 - DNA, 50 bp, Artificial
  Synthetic oligonucleotide
aaaagcgccggctagcatcgcaaaccttggcccccttttcgacctagcag

SEQ ID NO: 138434 - DNA, 50 bp, Artificial
  Synthetic oligonucleotide
aaaacttgccgcctcggcaacccactcctggcactctgcctaataccccc

SEQ ID NO: 138435 - DNA, 50 bp, Artificial
  Synthetic oligonucleotide
aaaaccaggtaagcgtcttacccgcctagcctgctggcctctcgctacgc

SEQ ID NO: 138436 - DNA, 50 bp, Artificial
  Synthetic oligonucleotide
acccccgctagcggcaacgtcgcctagaaccaggtgtgcacggtaaccct

SEQ ID NO: 138437 - DNA, 50 bp, Artificial
  Synthetic oligonucleotide
acccagcctcacggagcaacacaagcctctcctggctgcgagccgtcgca

SEQ ID NO: 138438 - DNA, 50 bp, Artificial
  Synthetic oligonucleotide
acccacgaataagtggtcccgccgcgcttctaggcacatgcccgtgctaa

SEQ ID NO: 138439 - DNA, 55 bp, Artificial
  Synthetic oligonucleotide
ctcacgatacacgtgtactccggcatagcaatgggcatcctcgcaatcatacacg

SEQ ID NO: 138440 - DNA, 50 bp, Artificial
  Synthetic oligonucleotide
acccacagcatcgacgtagactgcctcggggctatcgtggacaccagcta

SEQ ID NO: 138441 - DNA, 50 bp, Artificial
  Synthetic oligonucleotide
acagtgtgcctgcacacgccgaggttcgctctatgccagccgggcgacat

SEQ ID NO: 138442 - DNA, 50 bp, Artificial
  Synthetic oligonucleotide
acagtgtaccgggcgtacgtggcagaccatgcacccgagagagcagctgg

SEQ ID NO: 138443 - DNA, 50 bp, Artificial
  Synthetic oligonucleotide
acagcacagtcgggggagtgtaaaggccttgccacgtaagcgcgacccat

SEQ ID NO: 138444 - DNA, 50 bp, Artificial
  Synthetic oligonucleotide
acacttctctgcagccccagccggagacccagcaacttccgcgtcaagcc

SEQ ID NO: 138445 - DNA, 50 bp, Artificial
  Synthetic oligonucleotide
acacttccccttaggtgggtggtgaggcgccagggccgggtttaagcggg

SEQ ID NO: 138446 - DNA, 50 bp, Artificial
  Synthetic oligonucleotide
acacacactgcccgcaaccagtgcacttctctggcctcacccgcgtgtgg

SEQ ID NO: 138447 - DNA, 50 bp, Artificial
  Synthetic oligonucleotide
acaatgctccaccgtggcctcctcatagtggcgcttcccgcccggactat

SEQ ID NO: 138448 - DNA, 50 bp, Artificial
  Synthetic oligonucleotide
acaaggtaaacgacgacacgcggtggtccctgacgacccacggctctccg

SEQ ID NO: 138449 - DNA, 50 bp, Artificial
  Synthetic oligonucleotide
aatctcgctgtgaagcctacccagctgctcagtgtcgccacgcactaggg

SEQ ID NO: 138450 - DNA, 56 bp, Artificial
  Synthetic oligonucleotide
tagtaaacttaacggagaacaatgtaaacgacgtggagctccaggtgtttgatgag

SEQ ID NO: 138451 - DNA, 54 bp, Artificial
  Synthetic oligonucleotide
tacgacatcttacaaattttaggactttcatttctatacccaaactctctgttt

SEQ ID NO: 138452 - DNA, 59 bp, Artificial
  Synthetic oligonucleotide
cgggggacgatgacccagtggtagctatcgtgagccacgccaaaatctctggggtgaga

SEQ ID NO: 138453 - DNA, 56 bp, Artificial
  Synthetic oligonucleotide
gttgtagagcccaatgaattcccagagttaaacctacctacagagattaaggaaga

SEQ ID NO: 138454 - DNA, 57 bp, Artificial
  Synthetic oligonucleotide
gttggaatagtcccgataaatcaattagtctatgcccctctacccgacacgttcaca

SEQ ID NO: 138455 - DNA, 56 bp, Artificial
  Synthetic oligonucleotide
cacctctgatagaccctataaagaacgcaattgaacaaaagacagctaggggggct

SEQ ID NO: 138456 - DNA, 57 bp, Artificial
  Synthetic oligonucleotide
cacctggtctaccaccacgcctaatatacggtttcatatattatttctgtagtcgga

SEQ ID NO: 138457 - DNA, 57 bp, Artificial
  Synthetic oligonucleotide
ggaggcaatttatcggggtggaacgctacaggagcaataagcggtgtaagaggagta

SEQ ID NO: 138458 - DNA, 57 bp, Artificial
  Synthetic oligonucleotide
gttgagactaccaggctcaataaaccacagaaacgggagagaggcaaaaataatcta

SEQ ID NO: 138459 - DNA, 56 bp, Artificial
  Synthetic oligonucleotide
cacggctttaatattatcccaatcgaccctgagagcaaaaaacctgtactgaagga

SEQ ID NO: 138460 - DNA, 55 bp, Artificial
  Synthetic oligonucleotide
cggcggaaactaaggaatacaccatagaggatattgacaggtttaagacattaac

SEQ ID NO: 138461 - DNA, 57 bp, Artificial
  Synthetic oligonucleotide
ggaggtttattataatgaactttgatgagcagttatcggacgataaaatagccgaat

SEQ ID NO: 138462 - DNA, 52 bp, Artificial
  Synthetic oligonucleotide
ggaccgatactttttacacacgttaatgaaagcctggaatgaagtaaaaccg

SEQ ID NO: 138463 - DNA, 60 bp, Artificial
  Synthetic oligonucleotide
gttctatgacccaatcttaggcgacaaagcatattcaacatggataactaagacagggaa

SEQ ID NO: 138464 - DNA, 59 bp, Artificial
  Synthetic oligonucleotide
cagggcaaagtggtaagtaggaaagacttatatgatatgctaaagctaagagcgtttga

SEQ ID NO: 138465 - DNA, 59 bp, Artificial
  Synthetic oligonucleotide
cggcacttgatgaactgtgcagaaagaccctatgtgttaacacgccccacggcgggatc

SEQ ID NO: 138466 - DNA, 52 bp, Artificial
  Synthetic oligonucleotide
gttccatcgaacggaaccgttctgtaatgccccgtgtggaagaggggttacg

SEQ ID NO: 138467 - DNA, 47 bp, Artificial
  Synthetic oligonucleotide
cggaagcccttccggagccaattccgggggggtatataccccgggtt

SEQ ID NO: 138468 - DNA, 57 bp, Artificial
  Synthetic oligonucleotide
cgcgtgtacatatattgttagtcggaccgtctggggcgggtaagtcatctacgatta

SEQ ID NO: 138469 - DNA, 56 bp, Artificial
  Synthetic oligonucleotide
gttagacggatatactcgcttaaggatagccagggaactcggtattaaagagattc

SEQ ID NO: 138470 - DNA, 59 bp, Artificial
  Synthetic oligonucleotide
ggcccttctactaagacaaggagtatctttgctgctgggagaactaacatatctcttac

SEQ ID NO: 138471 - DNA, 55 bp, Artificial
  Synthetic oligonucleotide
cgccctataaagtaaggggtagctatataatctcccacctttgatcttagcttaa

SEQ ID NO: 138472 - DNA, 57 bp, Artificial
  Synthetic oligonucleotide
cagttgctgcttgttctaggattgtccttccttccggcgtattataaacgtcccatg

SEQ ID NO: 138473 - DNA, 56 bp, Artificial
  Synthetic oligonucleotide
atgttatactctacttaatgaaacacggggttacggatccagacaagatattggaa

SEQ ID NO: 138474 - DNA, 57 bp, Artificial
  Synthetic oligonucleotide
cgcagacggagggcgtcggtactcccggtgattccctaggagtcatgagcttgttta

SEQ ID NO: 138475 - DNA, 55 bp, Artificial
  Synthetic oligonucleotide
gtgtgtttcctgtcctatcggtccgttttttgcgtaagccgtgttaatatctgta

SEQ ID NO: 138476 - DNA, 55 bp, Artificial
  Synthetic oligonucleotide
ggcgtggtttactggccagtgaactgcgttttttctactaggctttaaggcatac

SEQ ID NO: 138477 - DNA, 55 bp, Artificial
  Synthetic oligonucleotide
catctcgtaaaccagcggagtagaggggtcgtagagtaaaacgtatctcttgacc

SEQ ID NO: 138478 - DNA, 60 bp, Artificial
  Synthetic oligonucleotide
acattcgaattggaattgtgttatgaagaaggcgagaagactgtctatgtccatagaccg

SEQ ID NO: 138479 - DNA, 55 bp, Artificial
  Synthetic oligonucleotide
ttccaatcgacccaaacactaagaagcccgtggtgaaagaatggcaaaggtatag

SEQ ID NO: 138480 - DNA, 60 bp, Artificial
  Synthetic oligonucleotide
tgtgagagacactaacgatagggctttctggcacaggtgggttattgttgaattcccaca

SEQ ID NO: 138481 - DNA, 57 bp, Artificial
  Synthetic oligonucleotide
tgtgaaagatacggcattaagaagtctgaatttatccgtaacgccgtgattgaaaaa

SEQ ID NO: 138482 - DNA, 60 bp, Artificial
  Synthetic oligonucleotide
tgtcaaactagtgtatgatgaaattagggacctaacactcacagaatatgatgatgataa

SEQ ID NO: 138483 - DNA, 56 bp, Artificial
  Synthetic oligonucleotide
accaggcgtaaaataggcgggaagactatggggcatcttctagtgttcaaaataga

SEQ ID NO: 138484 - DNA, 57 bp, Artificial
  Synthetic oligonucleotide
taatgaccagctacgcagttgacaatgctgttaaaacgaacaacttagtgttaggtt

SEQ ID NO: 138485 - DNA, 60 bp, Artificial
  Synthetic oligonucleotide
gcaaacacatcgacatgaaagcagaaggagggtatttcgtagccccccctagcattcatc

SEQ ID NO: 138486 - DNA, 49 bp, Artificial
  Synthetic oligonucleotide
gaaagcctaaaatcccccgttaaaaactcagatataccccccaattccg

SEQ ID NO: 138487 - DNA, 58 bp, Artificial
  Synthetic oligonucleotide
tgggcaaacataacacggttagcattcgtgttaaagagctgttcgactcaaacaatag

SEQ ID NO: 138488 - DNA, 57 bp, Artificial
  Synthetic oligonucleotide
accccctgctgcgtcactacgcttactaacgctacaaacaacttgaacgtggagata

SEQ ID NO: 138489 - DNA, 57 bp, Artificial
  Synthetic oligonucleotide
tggctcttcaataagagtaagggagttctagtttatattacgcccgatagaatcacg

SEQ ID NO: 138490 - DNA, 53 bp, Artificial
  Synthetic oligonucleotide
ttccccatccgtcttccctttaattacgacatataagtataattcgaacaacc

SEQ ID NO: 138491 - DNA, 52 bp, Artificial
  Synthetic oligonucleotide
acctattcggtatacgctacacccggttttagcaaacatacgaaagtagaag

SEQ ID NO: 138492 - DNA, 59 bp, Artificial
  Synthetic oligonucleotide
tggcgtgttatactctacttaatgaggcacggtgttacggattcaggtaagatattaca

SEQ ID NO: 138493 - DNA, 57 bp, Artificial
  Synthetic oligonucleotide
gaaactatccattttcccgcacttactgatccatgggcttaatgaaagcgggaagtc

SEQ ID NO: 138494 - DNA, 56 bp, Artificial
  Synthetic oligonucleotide
accttagagcggaaggagtagtaaagcataaggatttagtgtacaacactgtatcc

SEQ ID NO: 138495 - DNA, 58 bp, Artificial
  Synthetic oligonucleotide
attaaaacaggacccccaattagcagttgattacgcgaacatcatagcgtggcttgtc

SEQ ID NO: 138496 - DNA, 60 bp, Artificial
  Synthetic oligonucleotide
acgattgcagtaagacggtcagtgaaatcgcgagagcgatgaattatagtatatcgaaag

SEQ ID NO: 138497 - DNA, 60 bp, Artificial
  Synthetic oligonucleotide
acgcaacgggagggacaaatcttgcatatacattcaatgaacctggaaattacataatca

SEQ ID NO: 138498 - DNA, 59 bp, Artificial
  Synthetic oligonucleotide
tgcttccaatgccttaacgacagtgttaggctatttgcaatggttaggagttgttggtg

SEQ ID NO: 138499 - DNA, 57 bp, Artificial
  Synthetic oligonucleotide
acgtaaaaaatacgtcgattgccgtcgcgactcgcgacgacatagtcgcgactccga

SEQ ID NO: 138500 - DNA, 59 bp, Artificial
  Synthetic oligonucleotide
ttcttatcaacattcagtgaccatatagagaaacactacgaattaatacccggtggaga

SEQ ID NO: 138501 - DNA, 57 bp, Artificial
  Synthetic oligonucleotide
acgtgaaaaatccagacgagaaaggagtgctatcgaaagttcacgaggagttgtaca

SEQ ID NO: 138502 - DNA, 57 bp, Artificial
  Synthetic oligonucleotide
cttggtaaaagtcgcataataatatggtaatgccgccaagaaggaaacctgctacaa

SEQ ID NO: 138503 - DNA, 60 bp, Artificial
  Synthetic oligonucleotide
tgctatctgtatgtgatcgtaagtaactatcgtagtactattcgcaatcggatctgagct

SEQ ID NO: 138504 - DNA, 59 bp, Artificial
  Synthetic oligonucleotide
actaggtagtaatgaaatcacagttatgattatgcccccgtgttaatcctgtctgaatc

SEQ ID NO: 138505 - DNA, 57 bp, Artificial
  Synthetic oligonucleotide
cttgctccaatcacccttttctcgaacacgctgaggataggcgataaggtaaaactc

SEQ ID NO: 138506 - DNA, 60 bp, Artificial
  Synthetic oligonucleotide
attagagagatagcggaaaagaatcgcatagcgttaagcgacgtttatagaatagcgata

SEQ ID NO: 138507 - DNA, 55 bp, Artificial
  Synthetic oligonucleotide
ttgaattgctttcgaacaacacgaaagacccagagaaaaacaacaggctctacct

SEQ ID NO: 138508 - DNA, 60 bp, Artificial
  Synthetic oligonucleotide
ttagcggtggccacgaatacgccggatactatctcggggtgagatcgctgataggagcta

SEQ ID NO: 138509 - DNA, 55 bp, Artificial
  Synthetic oligonucleotide
aactgaggaaattaagacgcgtcaagtgtgtatcgaaggacaacctacggtaatc

SEQ ID NO: 138510 - DNA, 60 bp, Artificial
  Synthetic oligonucleotide
gaatgtgagtagtgatggcaccggttctcagaatccccctccctctactgctttttagca

SEQ ID NO: 138511 - DNA, 58 bp, Artificial
  Synthetic oligonucleotide
gacaagtctctactcaacccacagcaaagggaaatgtaacaatgaagtgggtgtacac

SEQ ID NO: 138512 - DNA, 57 bp, Artificial
  Synthetic oligonucleotide
gaagtctagattcttctctctagaacacggggtctagaagccgtggttaatccttga

SEQ ID NO: 138513 - DNA, 58 bp, Artificial
  Synthetic oligonucleotide
gaagaagacgccacgtgacctggacattttatacgataaaatgaaggactcacttggc

SEQ ID NO: 138514 - DNA, 55 bp, Artificial
  Synthetic oligonucleotide
ttaccttgacacgactccataaaaaaggcataatctacaggaaatggcgtaggtt

SEQ ID NO: 138515 - DNA, 60 bp, Artificial
  Synthetic oligonucleotide
aagctcttcaattcggcatccgtagctatatataacgcatctatagccctatcgttgggc

SEQ ID NO: 138516 - DNA, 60 bp, Artificial
  Synthetic oligonucleotide
gcatgttgatttcgaacagtcagaagaagaagtcatgggtatctggttatcacatatcga

SEQ ID NO: 138517 - DNA, 58 bp, Artificial
  Synthetic oligonucleotide
attagcgaaggaatatagcgaaaatgtctatgcggtctaccgtttagctttagagagc

SEQ ID NO: 138518 - DNA, 53 bp, Artificial
  Synthetic oligonucleotide
aacgttaaatctacgacgtgagaataattgtataaactccccagtttagagta

SEQ ID NO: 138519 - DNA, 56 bp, Artificial
  Synthetic oligonucleotide
aaggcgaaactctctctaacacagctaatcctaatccgtttgagtaatcgtgggtg

SEQ ID NO: 138520 - DNA, 57 bp, Artificial
  Synthetic oligonucleotide
aagtaagtagtataagcgcatatgtgggatccacgctttctattctcgttagaaaaa

SEQ ID NO: 138521 - DNA, 60 bp, Artificial
  Synthetic oligonucleotide
aacgtcattcatacttcgccaaacaagagaatttctctccatgaagaagagaaagcatac

SEQ ID NO: 138522 - DNA, 52 bp, Artificial
  Synthetic oligonucleotide
aataaacaatttgttcgtgtgtttttaaatattacgcatacgaaaagccacg

SEQ ID NO: 138523 - DNA, 53 bp, Artificial
  Synthetic oligonucleotide
aataagacaggttaattcgttctttaaggctaacgttcagttactagcaggga

SEQ ID NO: 138524 - DNA, 57 bp, Artificial
  Synthetic oligonucleotide
aatacagtctccgtacctatcgctgaagtgaacgcagacggagggcgtcggtactcc

SEQ ID NO: 138525 - DNA, 57 bp, Artificial
  Synthetic oligonucleotide
aatcgggtggatgagtatcaaagagccaactctttaatctttcagttctagagttag

SEQ ID NO: 138526 - DNA, 60 bp, Artificial
  Synthetic oligonucleotide
gacctcataaacgaaagcgcaatccagttagggctgtcacagagcgaattcgtaagacag

SEQ ID NO: 138527 - DNA, 58 bp, Artificial
  Synthetic oligonucleotide
tgtttgaaatcctatcgactagaagtgcaaaaatacgacacgttaccccacatgctta

SEQ ID NO: 138528 - DNA, 55 bp, Artificial
  Synthetic oligonucleotide
ggacctacttcagatacctgggaaccggagacggagtattaagactcagagtacc

SEQ ID NO: 138529 - DNA, 60 bp, Artificial
  Synthetic oligonucleotide
aatcttagacaatcttagataatctactcctacattcgccgacattcacaaacattcgac

SEQ ID NO: 138530 - DNA, 58 bp, Artificial
  Synthetic oligonucleotide
tgtttacgcattcgtgaaagagttactagaaaccgaaagggctgaatatgatccggca

SEQ ID NO: 138531 - DNA, 56 bp, Artificial
  Synthetic oligonucleotide
aattagccctagactttcgagccttagtactatgtaacttacgcttgagtatccga

SEQ ID NO: 138532 - DNA, 56 bp, Artificial
  Synthetic oligonucleotide
aattctcctaagggtaatacttagcaaagccaggggtgctaataatggctgaccag

SEQ ID NO: 138533 - DNA, 60 bp, Artificial
  Synthetic oligonucleotide
tgttctatctcacaggtaatgagttacggcttattctcacagctttcgaaattgcaagat

SEQ ID NO: 138534 - DNA, 55 bp, Artificial
  Synthetic oligonucleotide
ttatcacgcccgcttttactaactctactttgctgcttttacttacaaatccgct

SEQ ID NO: 138535 - DNA, 58 bp, Artificial
  Synthetic oligonucleotide
acagtccgcctcacagacgcctagaaatgtgtctaattgtaagaagctgggcgaaaaa

SEQ ID NO: 138536 - DNA, 60 bp, Artificial
  Synthetic oligonucleotide
tgttaagaagctgtttgcagtctaaagcactcagtactctttttcgcgttctgcccattc

SEQ ID NO: 138537 - DNA, 59 bp, Artificial
  Synthetic oligonucleotide
acatcagtctatgttggggatactgaaacttactctgtatcgtggacacctcctataaa

SEQ ID NO: 138538 - DNA, 56 bp, Artificial
  Synthetic oligonucleotide
agagttgaaatgacaaagcacggaagagtagtaagagactttaacgcgtatagccc

SEQ ID NO: 138539 - DNA, 60 bp, Artificial
  Synthetic oligonucleotide
attatcctattaaccacgcgtgctttcagcgatcttaccttttcaggcattatgatgatg

SEQ ID NO: 138540 - DNA, 55 bp, Artificial
  Synthetic oligonucleotide
gactttgcttactaaaacgtctccgggctgtagtgtaaatacgaataacgctagc

SEQ ID NO: 138541 - DNA, 59 bp, Artificial
  Synthetic oligonucleotide
agatcaagaacatcttaagagcgggatacatgagtaacggtactgtacaaagagttgaa

SEQ ID NO: 138542 - DNA, 60 bp, Artificial
  Synthetic oligonucleotide
aaacgcacagaagaacattatgcgtttcattatgtcccgcacaagatccgtgttgaagta

SEQ ID NO: 138543 - DNA, 60 bp, Artificial
  Synthetic oligonucleotide
gcgaaaagacggcgaaagagtacatatccgcactgactaagccttatcgcgatacgagaa

SEQ ID NO: 138544 - DNA, 55 bp, Artificial
  Synthetic oligonucleotide
agcacaagtttaatcccgcctttacgctaaacggcaaaggaatagcggatttgca

SEQ ID NO: 138545 - DNA, 60 bp, Artificial
  Synthetic oligonucleotide
agcacatcaacagtatagaaacctgcgtcaagagttatcaaccttatcttgaaccccatc

SEQ ID NO: 138546 - DNA, 59 bp, Artificial
  Synthetic oligonucleotide
agcacatgataagagtataaaataggcgtaaaagcgtacggctttcagctatatatccc

SEQ ID NO: 138547 - DNA, 58 bp, Artificial
  Synthetic oligonucleotide
gagacaataaagaacctagttatgtcgtatcgtgacccttcaaagcctagcactgtcc

SEQ ID NO: 138548 - DNA, 58 bp, Artificial
  Synthetic oligonucleotide
tcgttgaggtaccgcaaaggtaaccatgagggagcaatcgcagggatagtggcgggtc

SEQ ID NO: 138549 - DNA, 60 bp, Artificial
  Synthetic oligonucleotide
agcgtttgagttgttggagttgtgcgagaagagaaacatatgtcactggattgatgaaga

SEQ ID NO: 138550 - DNA, 60 bp, Artificial
  Synthetic oligonucleotide
attccgtcatttgtcgcggcatatctcgggacaagaactctagaagtcatcagctgatat

SEQ ID NO: 138551 - DNA, 59 bp, Artificial
  Synthetic oligonucleotide
aaacaagacttacgctgatgtaaatattgataggagtagaggggattggcatgttatac

SEQ ID NO: 138552 - DNA, 58 bp, Artificial
  Synthetic oligonucleotide
gcgagtggattccttacgccgacgatatggaaatagacgtcgacgttagcgacgtcga

SEQ ID NO: 138553 - DNA, 58 bp, Artificial
  Synthetic oligonucleotide
tcgctgaagtgaacgcagacggagggcgtcggtactcccggtgattccctaggagtca

SEQ ID NO: 138554 - DNA, 60 bp, Artificial
  Synthetic oligonucleotide
agctggtgctaagtcagaggcaatagggaacgtgatggcacaggaatctaagttccacgc

SEQ ID NO: 138555 - DNA, 57 bp, Artificial
  Synthetic oligonucleotide
tttccaggttgtttgtcaaggcaagaagtacagtgacttaggaatcgatagaagtag

SEQ ID NO: 138556 - DNA, 57 bp, Artificial
  Synthetic oligonucleotide
tcgcccggtatcttcttcgattcgataaagtcgcgaattgagggggctaacgccata

SEQ ID NO: 138557 - DNA, 59 bp, Artificial
  Synthetic oligonucleotide
ctgatggagatagtataaacaaactgttaatcctgatacccccgccgtgacttgcgcat

SEQ ID NO: 138558 - DNA, 59 bp, Artificial
  Synthetic oligonucleotide
gagtgccatttttaagcctgtaatcgagtataattatagaatgtattttgttgataaga

SEQ ID NO: 138559 - DNA, 60 bp, Artificial
  Synthetic oligonucleotide
aggagtagctgatttacagagcttcgactcttatgtactaggcccaggctcttgcattaa

SEQ ID NO: 138560 - DNA, 59 bp, Artificial
  Synthetic oligonucleotide
tcctatcgaatagaatatttcaattagctactaggactacttccagtttcacgtcagaa

SEQ ID NO: 138561 - DNA, 53 bp, Artificial
  Synthetic oligonucleotide
cgttgtcgtgatgaaggacgaaaaggaaataacggggatagcggatagatttt

SEQ ID NO: 138562 - DNA, 51 bp, Artificial
  Synthetic oligonucleotide
attcgggcttcaaacccaacttccggtccgaattggaggaggctaagttcc

SEQ ID NO: 138563 - DNA, 59 bp, Artificial
  Synthetic oligonucleotide
ctgaactatgcaaaaatgtttgttgagcacggttttgctatctttccgatagacccaga

SEQ ID NO: 138564 - DNA, 55 bp, Artificial
  Synthetic oligonucleotide
ctcttataactgctgttggcttagttagggttattaataaagccaaaagtggtca

SEQ ID NO: 138565 - DNA, 56 bp, Artificial
  Synthetic oligonucleotide
aggcaaagaagatagcccgcaaaataataactgaagcagttctagaacgttacaaa

SEQ ID NO: 138566 - DNA, 54 bp, Artificial
  Synthetic oligonucleotide
gcgtacaagtaaaagaagggtaatcgctgcggatttacggttggctacaaggag

SEQ ID NO: 138567 - DNA, 60 bp, Artificial
  Synthetic oligonucleotide
gagtctagagtccataaacactgctgcataacagcatgacaaccgtgataaagtctgagt

SEQ ID NO: 138568 - DNA, 58 bp, Artificial
  Synthetic oligonucleotide
ctccttgttcaacgattgaagaatctacgaaggggtaaaggtagctgagcctcacatc

SEQ ID NO: 138569 - DNA, 59 bp, Artificial
  Synthetic oligonucleotide
aaattccatcctatcttgtacaagcgtctgtgattacttcgctcttctactgggtacta

SEQ ID NO: 138570 - DNA, 57 bp, Artificial
  Synthetic oligonucleotide
cttgcgcatttctgtagtgtcgaaagatatttaacagtttgttaatcctactttaca

SEQ ID NO: 138571 - DNA, 52 bp, Artificial
  Synthetic oligonucleotide
aaatgggtagggtaagtataaagtagtttccgtgcttatataggctccttag

SEQ ID NO: 138572 - DNA, 56 bp, Artificial
  Synthetic oligonucleotide
actcatcttaatccgcctaagcaatagagggtgtcaaaccctggaagaacttcaaa

SEQ ID NO: 138573 - DNA, 55 bp, Artificial
  Synthetic oligonucleotide
attgcaagattgccggtgtactttaacgaggagcctgttgttgaactaggggaat

SEQ ID NO: 138574 - DNA, 60 bp, Artificial
  Synthetic oligonucleotide
tgatatctattatggcgtaaatcctagggcaaatgagccaaaaagcgggaaaggctcaga

SEQ ID NO: 138575 - DNA, 57 bp, Artificial
  Synthetic oligonucleotide
aaatattgataggagtagaggggattggcatgttatactctacttaatgaaacacgg

SEQ ID NO: 138576 - DNA, 59 bp, Artificial
  Synthetic oligonucleotide
aaataaagagtctagactctctattatgaagtctagtctatccactctggtttattcac

SEQ ID NO: 138577 - DNA, 60 bp, Artificial
  Synthetic oligonucleotide
actcgacccaatagcgatggatgcacagtttctgtttacagtcgcatatttcgtgttcgg

SEQ ID NO: 138578 - DNA, 52 bp, Artificial
  Synthetic oligonucleotide
cttcaactaacacgttctttactctatcccccagaacctgaactaatttttc

SEQ ID NO: 138579 - DNA, 60 bp, Artificial
  Synthetic oligonucleotide
actctctgccagcctatactcacacctatgattctgccccgccttaatcacagccgtgat

SEQ ID NO: 138580 - DNA, 60 bp, Artificial
  Synthetic oligonucleotide
gacgcattaacgacaattctaactaggactgctgcatacagattgattgttaccctgact

SEQ ID NO: 138581 - DNA, 58 bp, Artificial
  Synthetic oligonucleotide
actgcgcccgtgatacaagaagcgttgaacgagttcatatctcaaataaacaaactag

SEQ ID NO: 138582 - DNA, 60 bp, Artificial
  Synthetic oligonucleotide
cttcaaaacatactattgaagatgaaaacacactagatctactggagtctgtatatattg

SEQ ID NO: 138583 - DNA, 59 bp, Artificial
  Synthetic oligonucleotide
ttgcggaatatatagaatcgaaattattgtacgcaccagtcgtgaaaattgacgaatcc

SEQ ID NO: 138584 - DNA, 60 bp, Artificial
  Synthetic oligonucleotide
taatatagcgatagctagctcgttgaggtaccgcaaaggtaaccatgagggagcaatcgc

SEQ ID NO: 138585 - DNA, 58 bp, Artificial
  Synthetic oligonucleotide
acttggttggaagacacacacaatggggtacatgtttatctaagagtgaaagacgcag

SEQ ID NO: 138586 - DNA, 58 bp, Artificial
  Synthetic oligonucleotide
cttaatgaggcacggtgttacggattcaggtaagatattacagttattgccgagtgac

SEQ ID NO: 138587 - DNA, 50 bp, Artificial
  Synthetic oligonucleotide
agacaaattcccgtaacccccaatccccccgtgctaacccaatctttgat

SEQ ID NO: 138588 - DNA, 55 bp, Artificial
  Synthetic oligonucleotide
agacagagttagttaaggttttaccggcacaatctgttggtcaagctgcgttaat

SEQ ID NO: 138589 - DNA, 58 bp, Artificial
  Synthetic oligonucleotide
tgaagctccttggggtagagccttgggagggcctactgcgcatactgaacgcccccga

SEQ ID NO: 138590 - DNA, 60 bp, Artificial
  Synthetic oligonucleotide
tcttgttaccaactccacaatgtttataatgaccacgtcatatgtggtatatagaggtgt

SEQ ID NO: 138591 - DNA, 60 bp, Artificial
  Synthetic oligonucleotide
agagctctatcaggcttatgccgaatggtgtaatgagaatgataggaaacctgaagccca

SEQ ID NO: 138592 - DNA, 56 bp, Artificial
  Synthetic oligonucleotide
ctgtttgtctttttgtagtatgccttaatcatctcgtctttagccaaaacactaag

SEQ ID NO: 138593 - DNA, 53 bp, Artificial
  Synthetic oligonucleotide
agaggcataccctactgctgtagaagtttacgaaaaccccgtaggtgggataa

SEQ ID NO: 138594 - DNA, 58 bp, Artificial
  Synthetic oligonucleotide
gatcacggaccaatccagaaacctggactatgcgttgtattatgtttcagtagggtta

SEQ ID NO: 138595 - DNA, 55 bp, Artificial
  Synthetic oligonucleotide
ggacctatcacgtttactccttacgctaaactaatcatagcctctaacaagttac

SEQ ID NO: 138596 - DNA, 52 bp, Artificial
  Synthetic oligonucleotide
agaggttagaagggttagttgctagtaaggtaaaataggaccctggaactgc

SEQ ID NO: 138597 - DNA, 55 bp, Artificial
  Synthetic oligonucleotide
ctgggtttacgcgtggatggtccacttggctaattctgtagtcggtagggctccg

SEQ ID NO: 138598 - DNA, 52 bp, Artificial
  Synthetic oligonucleotide
gatagatcccttagtttcattacctttctttcgacctccggcgttaccctat

SEQ ID NO: 138599 - DNA, 59 bp, Artificial
  Synthetic oligonucleotide
gagcattattcacccacggcgtggcagatttagatgtggtagacaaattattgcccgcc

SEQ ID NO: 138600 - DNA, 52 bp, Artificial
  Synthetic oligonucleotide
cccggggatcttgcccctccacgaataagcgataccttccccggcgggagtg

SEQ ID NO: 138601 - DNA, 59 bp, Artificial
  Synthetic oligonucleotide
gagggccgctgagattccgcccttgatgtgtgccccatatcttgcgagctaagcaggct

SEQ ID NO: 138602 - DNA, 57 bp, Artificial
  Synthetic oligonucleotide
tccaccccttactgtagggtcgtcgatgggagatctctcgccataaagccacggtag

SEQ ID NO: 138603 - DNA, 58 bp, Artificial
  Synthetic oligonucleotide
ctccctaccaaccggggtctcagctcacgacggccctatctacactaacgcagtgctc

SEQ ID NO: 138604 - DNA, 59 bp, Artificial
  Synthetic oligonucleotide
agctgttaagggactgccttgagggccgctgagattccgcccttgatgtgtgccccata

SEQ ID NO: 138605 - DNA, 59 bp, Artificial
  Synthetic oligonucleotide
agatatgtcgaactcatctatgtccatatctaatccacccctaactcccttaatatcga

SEQ ID NO: 138606 - DNA, 55 bp, Artificial
  Synthetic oligonucleotide
taaggtgttccattaacagttttgggagtctcctcgtttcacttagatattcacg

SEQ ID NO: 138607 - DNA, 59 bp, Artificial
  Synthetic oligonucleotide
tatatgcggaggtaggtccgctaacagtcacctgtagttgcactagcgtaatttgtacg

SEQ ID NO: 138608 - DNA, 56 bp, Artificial
  Synthetic oligonucleotide
atggctacgccagatgcgtttaagattgtggttcacggaaagggcggtcacggttc

SEQ ID NO: 138609 - DNA, 59 bp, Artificial
  Synthetic oligonucleotide
attgaggatatactttcaacttgatgagattctcagtttcgcaatggaagagttaggag

SEQ ID NO: 138610 - DNA, 59 bp, Artificial
  Synthetic oligonucleotide
tggctcggtgcaggcgagtacaacagccagtctaggggcgtcgagaacagttgtagcaa

SEQ ID NO: 138611 - DNA, 50 bp, Artificial
  Synthetic oligonucleotide
gttacccctccgcccctttagcgggataaccccaacccacatccgcggaa

SEQ ID NO: 138612 - DNA, 54 bp, Artificial
  Synthetic oligonucleotide
ggattaatcgggtgcgtgccccacaggtcgcgggtctaccccttgcctttcaat

SEQ ID NO: 138613 - DNA, 59 bp, Artificial
  Synthetic oligonucleotide
cggggtctcagctcacgacggccctatctacactaacgcagtgctcggatacgcaaaca

SEQ ID NO: 138614 - DNA, 52 bp, Artificial
  Synthetic oligonucleotide
gttctaaacttcctaacaaaggaagataacgtatctttaacttggtcaatta

SEQ ID NO: 138615 - DNA, 57 bp, Artificial
  Synthetic oligonucleotide
aagaacatgtgttaccaaagaggagttgacacatgggaaatctctttgtaacacgcg

SEQ ID NO: 138616 - DNA, 57 bp, Artificial
  Synthetic oligonucleotide
gatagagttaggagtttattttgccgcttacgctcgatcgggatacctgggcttata

SEQ ID NO: 138617 - DNA, 53 bp, Artificial
  Synthetic oligonucleotide
caaagtgtattactaatatgtaaaaaatgacttgggtattaccaatttcttta

SEQ ID NO: 138618 - DNA, 58 bp, Artificial
  Synthetic oligonucleotide
gcgacatccaggcaggattaacatggtccatagatggaccagaggtccactggtggac

SEQ ID NO: 138619 - DNA, 57 bp, Artificial
  Synthetic oligonucleotide
gccgtagcgttgtcctcgacagagccccaaagggttaggctagtgatccctcacaag

SEQ ID NO: 138620 - DNA, 57 bp, Artificial
  Synthetic oligonucleotide
gtaaatagaggtctcgaaaagacgctaaacttacataggctcatagaaaatgagaaa

SEQ ID NO: 138621 - DNA, 58 bp, Artificial
  Synthetic oligonucleotide
ataacaaagtaccgcactgtgtgggcatctaaagttagacagaagccaattgaggtag

SEQ ID NO: 138622 - DNA, 58 bp, Artificial
  Synthetic oligonucleotide
gggcgttagagtgagtgtacagcctagcgtacaatctactactcctcagcttaagccc

SEQ ID NO: 138623 - DNA, 58 bp, Artificial
  Synthetic oligonucleotide
ataggggaatttgtggaaggaagaatatcaacagtaccgaaaccatggcatgtataca

SEQ ID NO: 138624 - DNA, 55 bp, Artificial
  Synthetic oligonucleotide
cttagccttttgatggaaagaacgaatcctatacaagatccccttattctccctc

SEQ ID NO: 138625 - DNA, 54 bp, Artificial
  Synthetic oligonucleotide
tacgcccttaactccttagctagtcccgaacccaggctttgtctagtctagctt

SEQ ID NO: 138626 - DNA, 58 bp, Artificial
  Synthetic oligonucleotide
taccggcacaatctgttggtcaagctgcgttaattgtcacgccacgtaaacctgggga

SEQ ID NO: 138627 - DNA, 54 bp, Artificial
  Synthetic oligonucleotide
atgtttgggtttttcggtaggaaatatagcatatcaactttccacaagaactgt

SEQ ID NO: 138628 - DNA, 57 bp, Artificial
  Synthetic oligonucleotide
caaatcgacgaggcatacgaaatacctgtgtaactaccatttcgtatggattcctaa

SEQ ID NO: 138629 - DNA, 58 bp, Artificial
  Synthetic oligonucleotide
attacgaccggtggtatctaggagtatcatctaagcatgaggtaagagaggcagtact

SEQ ID NO: 138630 - DNA, 58 bp, Artificial
  Synthetic oligonucleotide
tgattcatataagttgaaaattgacgggatgattacgctacctagagatattgcggaa

SEQ ID NO: 138631 - DNA, 57 bp, Artificial
  Synthetic oligonucleotide
gctgttctgtagattatcgcaataattttcgcaacgctctggtactcgaaaaggaag

SEQ ID NO: 138632 - DNA, 57 bp, Artificial
  Synthetic oligonucleotide
ctactactttgacgcatcaatccccaacttctctgtgaacccgcttcaattgcccaa

SEQ ID NO: 138633 - DNA, 52 bp, Artificial
  Synthetic oligonucleotide
ggacgaaagaaatcgtaggatacgaaagattaaagttactaacgtttctgtc

SEQ ID NO: 138634 - DNA, 57 bp, Artificial
  Synthetic oligonucleotide
gcgattgttcttgttgtggcagttattttgacatatcttattaccaggaagaagaag

SEQ ID NO: 138635 - DNA, 57 bp, Artificial
  Synthetic oligonucleotide
gggctgaatatagactgctagcagacgaactttataactttacaatacaattcactg

SEQ ID NO: 138636 - DNA, 56 bp, Artificial
  Synthetic oligonucleotide
gcccgcgggattatctaccgcaagtggaggaggtttggcgggcgtaagtacagaga

SEQ ID NO: 138637 - DNA, 57 bp, Artificial
  Synthetic oligonucleotide
acagacatagatatgttacaacaattgatacctaatgattccaaagttttcgccccc

SEQ ID NO: 138638 - DNA, 57 bp, Artificial
  Synthetic oligonucleotide
tgctcgttttgagtgcccttgcggttcggtagattatcgcaataatttgagcgatag

SEQ ID NO: 138639 - DNA, 56 bp, Artificial
  Synthetic oligonucleotide
taacttagacagtttcaaacaaactattcctacttatgccgacttatgccgacttc

SEQ ID NO: 138640 - DNA, 57 bp, Artificial
  Synthetic oligonucleotide
actcgtgtttatgaatattacgcaatggacgtccaaggtacagcgtatttgtacgct

SEQ ID NO: 138641 - DNA, 55 bp, Artificial
  Synthetic oligonucleotide
tcttcggtaccttcctgtacaagttctggaggccctatgggaccacggtgtggag

SEQ ID NO: 138642 - DNA, 53 bp, Artificial
  Synthetic oligonucleotide
cagaaggcgaaagatatttaacattctgttaaccctatttaacgtatggaaaa

SEQ ID NO: 138643 - DNA, 55 bp, Artificial
  Synthetic oligonucleotide
tcctggaataagcagggttttaggccctaaattagcagctaaggctataggacct

SEQ ID NO: 138644 - DNA, 56 bp, Artificial
  Synthetic oligonucleotide
aaaaagcaatacagagggagtctgaataacacgcggtaataccatgtttcaaggta

SEQ ID NO: 138645 - DNA, 56 bp, Artificial
  Synthetic oligonucleotide
aggccttatgagcctaaataggtgaatccctcccctcgaatcgccacgtgggttga

SEQ ID NO: 138646 - DNA, 56 bp, Artificial
  Synthetic oligonucleotide
caattgaacgatccacgcgtgatagacctggtaaagaggattgtggacgctttagc

SEQ ID NO: 138647 - DNA, 56 bp, Artificial
  Synthetic oligonucleotide
tcgacacactttcacatcttcgcgtgatgcaatatttgaaacaggcacagaccagg

SEQ ID NO: 138648 - DNA, 55 bp, Artificial
  Synthetic oligonucleotide
tcggtttactccccagtaaaatgtcgagtttgcagaactcttagggaagctcgta

SEQ ID NO: 138649 - DNA, 55 bp, Artificial
  Synthetic oligonucleotide
ctccagctaaacaaagccctaatttagaatcgaggccggacctagttgcaatacc

SEQ ID NO: 138650 - DNA, 49 bp, Artificial
  Synthetic oligonucleotide
caaccctccgtaacccctcttccacaagggacattaaagaacggttccg

SEQ ID NO: 138651 - DNA, 54 bp, Artificial
  Synthetic oligonucleotide
tgaattagtgccaattgttgaaactgtaagggggcttaaagaattcctaaagtg

SEQ ID NO: 138652 - DNA, 56 bp, Artificial
  Synthetic oligonucleotide
ctatagcaagactatcagtgatgttcgcgattagaataaacaatattctcgcagag

SEQ ID NO: 138653 - DNA, 56 bp, Artificial
  Synthetic oligonucleotide
gccgaaaacctactcgcgtgctaacgcaacattacgttagcttattcggaatagcg

SEQ ID NO: 138654 - DNA, 53 bp, Artificial
  Synthetic oligonucleotide
ctaacatctaaaggtaacttcactacttgtctattaactgaggaaaggtaaac

SEQ ID NO: 138655 - DNA, 56 bp, Artificial
  Synthetic oligonucleotide
ccttagccatgctggttttcacaagcaacagggtttatcctaaagactcgtcgtta

SEQ ID NO: 138656 - DNA, 56 bp, Artificial
  Synthetic oligonucleotide
aagataaaggaggacatcgctaagaacggtataaaagtaccgctcattgttaatca

SEQ ID NO: 138657 - DNA, 55 bp, Artificial
  Synthetic oligonucleotide
ccacaggcttgagttcccccagtccctagggtacgacccagctcttacagccgag

SEQ ID NO: 138658 - DNA, 53 bp, Artificial
  Synthetic oligonucleotide
gtcccccacggcggatccaggacctgtgaccacgtttactacacccttaggta

SEQ ID NO: 138659 - DNA, 56 bp, Artificial
  Synthetic oligonucleotide
gtccagttatctcgtttattgcttctaacgcctcatcgggtgttattcccaactgt

SEQ ID NO: 138660 - DNA, 50 bp, Artificial
  Synthetic oligonucleotide
ggttttctaccctattcttgggaaccaaggagaaaactggcgggaaacac

SEQ ID NO: 138661 - DNA, 55 bp, Artificial
  Synthetic oligonucleotide
cgtacgcgggaggctggttatggctagtagggccgatcttccttttcacgtggat

SEQ ID NO: 138662 - DNA, 55 bp, Artificial
  Synthetic oligonucleotide
gcgtactgctcatattgtaggaacccttgtggggtgaaagttatgcctgcaccta

SEQ ID NO: 138663 - DNA, 55 bp, Artificial
  Synthetic oligonucleotide
tccactaatcgttgtgcatggggaaaattcagacatagaagaggatacagacgca

SEQ ID NO: 138664 - DNA, 55 bp, Artificial
  Synthetic oligonucleotide
tcccgcacttactgatccatgggcttaatgaaagcgggaagtcggtattgctaga

SEQ ID NO: 138665 - DNA, 54 bp, Artificial
  Synthetic oligonucleotide
tccgttagggcgtggtagttcacgagagtaaaccaaaaccttgactccttcatc

SEQ ID NO: 138666 - DNA, 55 bp, Artificial
  Synthetic oligonucleotide
gcgctattccgactcacagttcatagcaactacacattcgccactaattatcgac

SEQ ID NO: 138667 - DNA, 55 bp, Artificial
  Synthetic oligonucleotide
gagtgtccgccaacacttgaagacaggatctacagtgagatcagagaaggcgtgt

SEQ ID NO: 138668 - DNA, 55 bp, Artificial
  Synthetic oligonucleotide
gagttaagacgtttaacctactgtgggacgttataggatctgaagcagggatgag

SEQ ID NO: 138669 - DNA, 55 bp, Artificial
  Synthetic oligonucleotide
ttgtgttatgaagaaggcgagaagactgtctatgtccatagaccgccacttcaag

SEQ ID NO: 138670 - DNA, 55 bp, Artificial
  Synthetic oligonucleotide
ttgtcgaaagaggtgacgataatggtagtgctaaagaaaactaaagacgggcatt

SEQ ID NO: 138671 - DNA, 55 bp, Artificial
  Synthetic oligonucleotide
tctcaacgaacgtcatgaactcggaatatttatccgcgaggctgtcaaccctcac

SEQ ID NO: 138672 - DNA, 57 bp, Artificial
  Synthetic oligonucleotide
tagaccgcgtattgttgatagagggggcaaaaagtactatgcgggtgacgaatattg

SEQ ID NO: 138673 - DNA, 56 bp, Artificial
  Synthetic oligonucleotide
gtttttttgcactttcgtgcaaacaattctatattccaattccagactcctatacc

SEQ ID NO: 138674 - DNA, 55 bp, Artificial
  Synthetic oligonucleotide
tctccagtcatatgattcaacaggctagcaggagcgatccgggacacgtaatgtg

SEQ ID NO: 138675 - DNA, 55 bp, Artificial
  Synthetic oligonucleotide
gccgtgaactgcacacgagcaaggggagtatttaataacagtttatgtgcacacc

SEQ ID NO: 138676 - DNA, 54 bp, Artificial
  Synthetic oligonucleotide
gccgtccctaggaaccggctcgtcatgaggatccaaaacgtccatttcgaaacc

SEQ ID NO: 138677 - DNA, 55 bp, Artificial
  Synthetic oligonucleotide
tctcgaacacgctgaggataggcgataaggtaaaactcgatggtgaggagttcgt

SEQ ID NO: 138678 - DNA, 55 bp, Artificial
  Synthetic oligonucleotide
tctgaaggtgagtagctgtggatgatttaaagctaaattacgccaagtggttcat

SEQ ID NO: 138679 - DNA, 55 bp, Artificial
  Synthetic oligonucleotide
gccggtacagctgttattcctccatacttagctgataatgtgtaggctggcttga

SEQ ID NO: 138680 - DNA, 55 bp, Artificial
  Synthetic oligonucleotide
gagggtccatagagttgacaggagatagagcaaacttcacactgaacgagttccc

SEQ ID NO: 138681 - DNA, 55 bp, Artificial
  Synthetic oligonucleotide
tagttacaataccgttatgggctacgttatggattttcgaatggacacggaagat

SEQ ID NO: 138682 - DNA, 55 bp, Artificial
  Synthetic oligonucleotide
tattactctatcgttcaaaactgtttcaccggtgtttgagctccacaggctaagc

SEQ ID NO: 138683 - DNA, 55 bp, Artificial
  Synthetic oligonucleotide
tattccgggcgcaggctattacgcaacgccgaatgtagctgtttctagtaccgga

SEQ ID NO: 138684 - DNA, 60 bp, Artificial
  Synthetic oligonucleotide
ggactgccttgagggccgctgagattccgcccttgatgtgtgccccatatcttgcgagct

SEQ ID NO: 138685 - DNA, 55 bp, Artificial
  Synthetic oligonucleotide
gctgaggttctaacagactccattgaagctccaatagtcgcaactccatgagacc

SEQ ID NO: 138686 - DNA, 55 bp, Artificial
  Synthetic oligonucleotide
gctgagggaatcctatgccgactacaactcgtatgaggtcctaggtgagggatcg

SEQ ID NO: 138687 - DNA, 55 bp, Artificial
  Synthetic oligonucleotide
tattcgcactctggatgttgggagacagtgcgctagcaataatattcatcgtatc

SEQ ID NO: 138688 - DNA, 55 bp, Artificial
  Synthetic oligonucleotide
tattgtaatttgccatgtcccgggaacattggggaaagcataggcattaggtacg

SEQ ID NO: 138689 - DNA, 55 bp, Artificial
  Synthetic oligonucleotide
tcatctggttaattagagacccaagaaggagagcggacgtttcagatgaacgccc

SEQ ID NO: 138690 - DNA, 55 bp, Artificial
  Synthetic oligonucleotide
tttgtctgggtattcgtaaattactgtaggcctgtccttcagtgggtcagttgta

SEQ ID NO: 138691 - DNA, 55 bp, Artificial
  Synthetic oligonucleotide
gctcggttagtctaattattgacagtagcgttgataagtccgtatccttcaccta

SEQ ID NO: 138692 - DNA, 55 bp, Artificial
  Synthetic oligonucleotide
gctatatccactaggcttgcctgataggcatgagctaaggcttctccggaaatca

SEQ ID NO: 138693 - DNA, 55 bp, Artificial
  Synthetic oligonucleotide
gctatacaacgatggttatgtggttgttgctggcaaacaagagggtgacataaga

SEQ ID NO: 138694 - DNA, 53 bp, Artificial
  Synthetic oligonucleotide
tttgcctctcggcaaaacttttttcaatcacgcccgctcgtgattttttcttt

SEQ ID NO: 138695 - DNA, 60 bp, Artificial
  Synthetic oligonucleotide
tccaccttaagcgagtatacttctcctaccctgagccctgattctgatagcaataagaag

SEQ ID NO: 138696 - DNA, 55 bp, Artificial
  Synthetic oligonucleotide
tccaaagccctcatctccaaggctaattgttccacctacggagaagtccattatg

SEQ ID NO: 138697 - DNA, 55 bp, Artificial
  Synthetic oligonucleotide
gcgttctaccaggtcacagggcataaccaggctatcgtgggtacatttgtgtggg

SEQ ID NO: 138698 - DNA, 55 bp, Artificial
  Synthetic oligonucleotide
gcgttaattggctttatcgcgctagtaggaggtatagtcgagtataggagactaa

SEQ ID NO: 138699 - DNA, 55 bp, Artificial
  Synthetic oligonucleotide
tttaatgatattaacagagccgtagagctgtttcaatttttcgaaaacaccgtga

SEQ ID NO: 138700 - DNA, 55 bp, Artificial
  Synthetic oligonucleotide
gatcagccagggatacaattatgcagtcccgggtggacaaaagaatttagtaatc

SEQ ID NO: 138701 - DNA, 55 bp, Artificial
  Synthetic oligonucleotide
gatcagcgtgaaatactaataggccttagaagcctatataagcacggaaactact

SEQ ID NO: 138702 - DNA, 55 bp, Artificial
  Synthetic oligonucleotide
ttactaactaaggcaagaagctggctctgcgggtaaacataaacgggtatctggg

SEQ ID NO: 138703 - DNA, 55 bp, Artificial
  Synthetic oligonucleotide
gcagtgaacttacgaccaccttcagtctctggttccttagctccttaatcccgaa

SEQ ID NO: 138704 - DNA, 55 bp, Artificial
  Synthetic oligonucleotide
gcagcttacctattctttacgcccgccctgtctatctaactcactcacgcccgcc

SEQ ID NO: 138705 - DNA, 55 bp, Artificial
  Synthetic oligonucleotide
ttagatttgcttagcgttttactatcattatccgacgacgacgttgacaatctaa

SEQ ID NO: 138706 - DNA, 59 bp, Artificial
  Synthetic oligonucleotide
tcatttcgttactctcacgtctgaagccctttgtcgagaatagagtgttgaacttagta

SEQ ID NO: 138707 - DNA, 55 bp, Artificial
  Synthetic oligonucleotide
ttaggcatagccaaatactacggcatagcagaggcagacgtgataaggattgcaa

SEQ ID NO: 138708 - DNA, 55 bp, Artificial
  Synthetic oligonucleotide
gcagccaccctacaagcgttaaggagggcaatggggaagttaattaggaattatg

SEQ ID NO: 138709 - DNA, 55 bp, Artificial
  Synthetic oligonucleotide
gcacgttataagtacagaatggaattactcttccgtcaggtgctacgtagtgtat

SEQ ID NO: 138710 - DNA, 55 bp, Artificial
  Synthetic oligonucleotide
gcacatggagacaacgtccatgaagagagctggcgtaaatcaattacctgagccc

SEQ ID NO: 138711 - DNA, 55 bp, Artificial
  Synthetic oligonucleotide
gcaaagccagaggctcaacgccaaggagtatggatcctaacatcaagttggcggt

SEQ ID NO: 138712 - DNA, 55 bp, Artificial
  Synthetic oligonucleotide
ttataaggaatcccgaggtagcgtttcattccgttctagtggaacgtgagtagcc

SEQ ID NO: 138713 - DNA, 55 bp, Artificial
  Synthetic oligonucleotide
ttccagttacaacgcgtcgatcgaccctcatggcgttctacattacgctgaatcg

SEQ ID NO: 138714 - DNA, 53 bp, Artificial
  Synthetic oligonucleotide
gattagtgacgtaaaggttggtagtagcgaaggaggggcaaaacctagcgaag

SEQ ID NO: 138715 - DNA, 55 bp, Artificial
  Synthetic oligonucleotide
gatgcacagtttctgtttacagtcgcatatttcgtgttcggactgaagccaggcg

SEQ ID NO: 138716 - DNA, 55 bp, Artificial
  Synthetic oligonucleotide
ttgacatgaatggaccgaactcgtagacccatgttgataagtagccgaatactga

SEQ ID NO: 138717 - DNA, 55 bp, Artificial
  Synthetic oligonucleotide
gctgactattattttgacgccacaatccctaacttctccgtaaaccccttacagc

SEQ ID NO: 138718 - DNA, 55 bp, Artificial
  Synthetic oligonucleotide
gatctattgctaggactccaaatgatgccgctaatatgacgcctagagcagtcac

SEQ ID NO: 138719 - DNA, 55 bp, Artificial
  Synthetic oligonucleotide
gatcgtaagtaactatcgtagtactattcgcaatcggatctgagctccacgtagt

SEQ ID NO: 138720 - DNA, 51 bp, Artificial
  Synthetic oligonucleotide
tgacgctacaattcctaacttctccgtaaaccccctacaactaccccgcgt

SEQ ID NO: 138721 - DNA, 55 bp, Artificial
  Synthetic oligonucleotide
tgataactaacctaagaggtggttatgagaacggggaggagtggcataaagctgg

SEQ ID NO: 138722 - DNA, 55 bp, Artificial
  Synthetic oligonucleotide
ttggggaacgaaagctaggaggagcaccatattctgatacttcgtgagagtgtcc

SEQ ID NO: 138723 - DNA, 55 bp, Artificial
  Synthetic oligonucleotide
gccgcttcccacgccaattcttgtggagtctctaacattctccttctaaataacg

SEQ ID NO: 138724 - DNA, 55 bp, Artificial
  Synthetic oligonucleotide
gccgagactcaatattcgcgtaacccaactctccttaagttctacgaaacccaca

SEQ ID NO: 138725 - DNA, 55 bp, Artificial
  Synthetic oligonucleotide
gatagagttttgtgaatatcccgcttgtgctagatcttccagagtggctatctct

SEQ ID NO: 138726 - DNA, 55 bp, Artificial
  Synthetic oligonucleotide
tgatcagcatgctgtctgaggatcgcgacccaggtttacccacggtgtgctatcc

SEQ ID NO: 138727 - DNA, 55 bp, Artificial
  Synthetic oligonucleotide
tgcctaccagagagcatatagagtggttcggttctcaatacttacgaagccctgc

SEQ ID NO: 138728 - DNA, 60 bp, Artificial
  Synthetic oligonucleotide
tcatcacgttcattcaaaaacacggaaatggcgaatcgattgtaggaatatttcgatgga

SEQ ID NO: 138729 - DNA, 55 bp, Artificial
  Synthetic oligonucleotide
ttgggagttactaacttcgtcacatccaacctagagtacgctctaccggctagcc

SEQ ID NO: 138730 - DNA, 55 bp, Artificial
  Synthetic oligonucleotide
gccctcgcaccgatcaccctcttttcgaacacgttgaggataggcgataaggtaa

SEQ ID NO: 138731 - DNA, 55 bp, Artificial
  Synthetic oligonucleotide
tggaggctcattcagtgaagaaggattctataacgtatacggtaattcgtacagc

SEQ ID NO: 138732 - DNA, 55 bp, Artificial
  Synthetic oligonucleotide
tggtttaatccatgggcattaactgcgggatggactactggaattataagcggga

SEQ ID NO: 138733 - DNA, 55 bp, Artificial
  Synthetic oligonucleotide
tgtatctaaatacggtggtgctctcacggttcccgcgttaataacatcgaccatg

SEQ ID NO: 138734 - DNA, 55 bp, Artificial
  Synthetic oligonucleotide
gatatatgagctatacttcctatcgaagtagtggcaaaccatagtagaacgggcg

SEQ ID NO: 138735 - DNA, 55 bp, Artificial
  Synthetic oligonucleotide
gccagaatagggtgaaacgtagtgccttaacgtagttattcacaagggctaggag

SEQ ID NO: 138736 - DNA, 55 bp, Artificial
  Synthetic oligonucleotide
gccaccctttctggttctcggtactctgagtcttaatactccgtctccagtcccc

SEQ ID NO: 138737 - DNA, 55 bp, Artificial
  Synthetic oligonucleotide
ttggctcagcaaatcgcatatgagtaataccgtacttaggatctgagtctgttag

SEQ ID NO: 138738 - DNA, 55 bp, Artificial
  Synthetic oligonucleotide
gccaatatataaggtggcgatctctactatctacgccgaaggtgtgagcagtgac

SEQ ID NO: 138739 - DNA, 59 bp, Artificial
  Synthetic oligonucleotide
agggcgggcttaaatcacatctgtgattgctgaactattttgtctttcagttgaggtaa

SEQ ID NO: 138740 - DNA, 51 bp, Artificial
  Synthetic oligonucleotide
ggggtgggtccctaaattttcgtgattttacgctcttacaggctaatttta

SEQ ID NO: 138741 - DNA, 54 bp, Artificial
  Synthetic oligonucleotide
ggggtagctatataatctcccacctttgatcttagcttaaagggttccctaatc

SEQ ID NO: 138742 - DNA, 55 bp, Artificial
  Synthetic oligonucleotide
gtccgagtgagtcgacctcttaacccaggacattattctagagactgaggagacg

SEQ ID NO: 138743 - DNA, 55 bp, Artificial
  Synthetic oligonucleotide
gtcctccatagaacctggacctcagcaacacaggaccatctacggacctctggac

SEQ ID NO: 138744 - DNA, 55 bp, Artificial
  Synthetic oligonucleotide
ggggcctccatgtatactcacctatataggttttattagtcggggagagtaatac

SEQ ID NO: 138745 - DNA, 55 bp, Artificial
  Synthetic oligonucleotide
gtccttatgatctctcctagtccggtaacgctcttagcaccgattaaccaatctc

SEQ ID NO: 138746 - DNA, 55 bp, Artificial
  Synthetic oligonucleotide
gtccttattatgtgtgggaatctgcgttcatacctccacttatacctggtactga

SEQ ID NO: 138747 - DNA, 55 bp, Artificial
  Synthetic oligonucleotide
ggggcataactaaaattagaggtactgatatagaatcgcctcatgggattcctct

SEQ ID NO: 138748 - DNA, 55 bp, Artificial
  Synthetic oligonucleotide
gtctgaatccccggtaatttaagttgaaagaggtcactctcacaataatggtcac

SEQ ID NO: 138749 - DNA, 54 bp, Artificial
  Synthetic oligonucleotide
ggggaccaacttattccgtgttaagactatagggatgggagaggtcggatacga

SEQ ID NO: 138750 - DNA, 56 bp, Artificial
  Synthetic oligonucleotide
tcagaaagtacaattttgtctgggtattcgtaaattactgtaggcctgtccttcag

SEQ ID NO: 138751 - DNA, 49 bp, Artificial
  Synthetic oligonucleotide
ggggaaaatacgtacgggctaaaaggtctacttgaggggataaagaaac

SEQ ID NO: 138752 - DNA, 55 bp, Artificial
  Synthetic oligonucleotide
gtgatggggtacctattccacaagttagcaaatctcacggctgaaactaaggagt

SEQ ID NO: 138753 - DNA, 55 bp, Artificial
  Synthetic oligonucleotide
gtgcatgttcttaagcggttggttagccgtcgctggaatacacccgctgcaagct

SEQ ID NO: 138754 - DNA, 55 bp, Artificial
  Synthetic oligonucleotide
gtgcgggattcttaagaatgggattagacgccatttataacataacgccctctgg

SEQ ID NO: 138755 - DNA, 55 bp, Artificial
  Synthetic oligonucleotide
gggattatcacgactgctatcgcatccatatcacgtgcgtttgcacaagggcatg

SEQ ID NO: 138756 - DNA, 55 bp, Artificial
  Synthetic oligonucleotide
gggaatacctaatgttgttattcccgagaaggcgtgcgaagatgaagattgccct

SEQ ID NO: 138757 - DNA, 55 bp, Artificial
  Synthetic oligonucleotide
ggcttactctaaaccagcgtttggagataggagagggtatcagatggatcctagg

SEQ ID NO: 138758 - DNA, 55 bp, Artificial
  Synthetic oligonucleotide
ggctccttagttcttgtagactccattcagtcagcaggagcgatgaagatagacg

SEQ ID NO: 138759 - DNA, 55 bp, Artificial
  Synthetic oligonucleotide
ggctattccagtcatctgtgatagcaaatcatacacacaattgggaattgatagg

SEQ ID NO: 138760 - DNA, 55 bp, Artificial
  Synthetic oligonucleotide
gtggactcttgagggctgataagtactatagcaagtctacactggatgatttcct

SEQ ID NO: 138761 - DNA, 60 bp, Artificial
  Synthetic oligonucleotide
tcacagatatgattaaactgctgcatgcagccacgaaatcacaactatgattatgcagtc

SEQ ID NO: 138762 - DNA, 55 bp, Artificial
  Synthetic oligonucleotide
ggctacttatcaacatgggtctacgagttcggtccattcatgtcaatgttattcg

SEQ ID NO: 138763 - DNA, 54 bp, Artificial
  Synthetic oligonucleotide
gtataaaataggcgtaaaagcgtacggctttcagctatatatccccaaacctac

SEQ ID NO: 138764 - DNA, 55 bp, Artificial
  Synthetic oligonucleotide
gtagtctagtaatagcgtaggatataatcgagtcgtcatgtttactgaccttatc

SEQ ID NO: 138765 - DNA, 55 bp, Artificial
  Synthetic oligonucleotide
gtaggggccagagcctctaattacgtctacataatcttccttgcactattggtac

SEQ ID NO: 138766 - DNA, 55 bp, Artificial
  Synthetic oligonucleotide
gtatagaaagagttcggtccactggccagtaaaccacgtctctagactccagggt

SEQ ID NO: 138767 - DNA, 55 bp, Artificial
  Synthetic oligonucleotide
gtcaagaccactttcacgtcttaatacctgaagttcagtcaaacctggctcactc

SEQ ID NO: 138768 - DNA, 55 bp, Artificial
  Synthetic oligonucleotide
gtaagccaaagacggggcaacgaataaaactgctgatccgataaggtaagagccc

SEQ ID NO: 138769 - DNA, 55 bp, Artificial
  Synthetic oligonucleotide
gtaaccactctattacagctaaatgacctaagtggaatggctgaaatcgtcccgg

SEQ ID NO: 138770 - DNA, 55 bp, Artificial
  Synthetic oligonucleotide
gtcactagttgacactactgatggtctattcatgaggttcgcctatggctgggca

SEQ ID NO: 138771 - DNA, 55 bp, Artificial
  Synthetic oligonucleotide
gtccacgaggcgttgtacgagaagttaagggaggagtacaatctaccatcaaagg

SEQ ID NO: 138772 - DNA, 60 bp, Artificial
  Synthetic oligonucleotide
tcacaatcccgctaatcacacttgtgactttactaactctgcagctttctaactaagccc

SEQ ID NO: 138773 - DNA, 52 bp, Artificial
  Synthetic oligonucleotide
gtaaaacccaaccgagttatttccaacgtactctaccgctaccattgtgcct

SEQ ID NO: 138774 - DNA, 52 bp, Artificial
  Synthetic oligonucleotide
ggttagtattaggctaagggaattgtttgacccaaataacaggtttgtggcg

SEQ ID NO: 138775 - DNA, 55 bp, Artificial
  Synthetic oligonucleotide
ggtcagctattagctctgaagcgtctgtggcatctatgaaaccctctcttacaaa

SEQ ID NO: 138776 - DNA, 54 bp, Artificial
  Synthetic oligonucleotide
ggtcacgcgggtataagggttcgttttacttatttcatgtcacgcctttgcaaa

SEQ ID NO: 138777 - DNA, 55 bp, Artificial
  Synthetic oligonucleotide
ggtcacatactgtccggaaacctacagatggtgatttcgagtttcgcattcctaa

SEQ ID NO: 138778 - DNA, 55 bp, Artificial
  Synthetic oligonucleotide
ggtcaagatgcatagcggagtgtttgccacaactcccgagagtgctggaaccctc

SEQ ID NO: 138779 - DNA, 50 bp, Artificial
  Synthetic oligonucleotide
ggtaacgcaaaggaaacctacgtaggacctttagttgacgttgttgaaac

SEQ ID NO: 138780 - DNA, 55 bp, Artificial
  Synthetic oligonucleotide
gggtgctaataatggctgaccaggcgatttgctcagttatgcacaattgtactta

SEQ ID NO: 138781 - DNA, 55 bp, Artificial
  Synthetic oligonucleotide
gggtcacgatatgaatttctggctgggcctccaatgaataaagaacctgctgtcc

SEQ ID NO: 138782 - DNA, 55 bp, Artificial
  Synthetic oligonucleotide
ggggtttcataattctcatgttggttctagcgaaggtgtgagggatgtcgggaga

SEQ ID NO: 138783 - DNA, 59 bp, Artificial
  Synthetic oligonucleotide
atccttcactggtcctccatagaacctggacctcagcaacacaggaccatctacggacc

SEQ ID NO: 138784 - DNA, 60 bp, Artificial
  Synthetic oligonucleotide
tcaagacactaaactttgtattggatgttatcaagcaattgaacgatccacgcgtgatag

SEQ ID NO: 138785 - DNA, 55 bp, Artificial
  Synthetic oligonucleotide
ggggtgtatttgacgacggggaacttcacgagtggttagctcgaatgtgggacga

SEQ ID NO: 138786 - DNA, 55 bp, Artificial
  Synthetic oligonucleotide
gtccctagcgtctccaaagataactaccttacctccatgcatggtgtcacaacag

SEQ ID NO: 138787 - DNA, 55 bp, Artificial
  Synthetic oligonucleotide
ggagctaccaacactgacatttcacttcttccatggcaaatagacaaattcattt

SEQ ID NO: 138788 - DNA, 55 bp, Artificial
  Synthetic oligonucleotide
ggagccattaagaattgcatttaagaatggcacgctagaatggacagacaaaggt

SEQ ID NO: 138789 - DNA, 55 bp, Artificial
  Synthetic oligonucleotide
gttggaaggaaggatagatcggtatacctaagagggtgggaagattggtacgcat

SEQ ID NO: 138790 - DNA, 55 bp, Artificial
  Synthetic oligonucleotide
gttgtagggtggagtagtggcctgtgtaatcagtgtaccgaaggtctctgacacg

SEQ ID NO: 138791 - DNA, 55 bp, Artificial
  Synthetic oligonucleotide
gttgtgccgaattggtcatacggagtaaataatttgccacgatatactgcaacat

SEQ ID NO: 138792 - DNA, 55 bp, Artificial
  Synthetic oligonucleotide
ggagagaaggttaatcccagaatttgtagcttaacgacgacactatcgagtgtgg

SEQ ID NO: 138793 - DNA, 55 bp, Artificial
  Synthetic oligonucleotide
ggagaaagcaaacaggtttgtagcatggtgtgagaagaagaatatgtgttttagg

SEQ ID NO: 138794 - DNA, 55 bp, Artificial
  Synthetic oligonucleotide
gtttcccgatcctccttgcgacgtggtaggagagcctgagggttatggagtcctc

SEQ ID NO: 138795 - DNA, 54 bp, Artificial
  Synthetic oligonucleotide
aggtttggcggtaggaagtatagagaatattgtttgaaaagccgtgacgaactc

SEQ ID NO: 138796 - DNA, 55 bp, Artificial
  Synthetic oligonucleotide
ggacggggctggcgttatctttataggttataatggtgatgtctatcctagtggc

SEQ ID NO: 138797 - DNA, 51 bp, Artificial
  Synthetic oligonucleotide
taaaattacgtaaaatctcctttaataggtttactaatgtcgtaatagtat

SEQ ID NO: 138798 - DNA, 55 bp, Artificial
  Synthetic oligonucleotide
ggacgataaggggagatggcataccattaagggagttattgttaaggagcatgat

SEQ ID NO: 138799 - DNA, 55 bp, Artificial
  Synthetic oligonucleotide
taaacaccccagtgaggatttataatctaacgatacttccaaaagggaacgctga

SEQ ID NO: 138800 - DNA, 55 bp, Artificial
  Synthetic oligonucleotide
taatagtgaggggtaagcaggagggtgacataagaccagatctggtagctttccc

SEQ ID NO: 138801 - DNA, 55 bp, Artificial
  Synthetic oligonucleotide
taatcccagaatttgtagcttaacgacgacactatcttcacactcagtatgggcg

SEQ ID NO: 138802 - DNA, 55 bp, Artificial
  Synthetic oligonucleotide
taccggtccaattatcactttgcttaacgcctcaagatagtctctccatgtgtcc

SEQ ID NO: 138803 - DNA, 55 bp, Artificial
  Synthetic oligonucleotide
tactatgcacgtgcaaaacctggcctgtttctgttcacgtcgttgattttctccc

SEQ ID NO: 138804 - DNA, 55 bp, Artificial
  Synthetic oligonucleotide
tagaaaccagcgtcaagagttatcaaccttatcttgaaccccatcgcgacgactt

SEQ ID NO: 138805 - DNA, 55 bp, Artificial
  Synthetic oligonucleotide
ggaagtatagagaatattgtttgaaaagccgtgacgaactcctgtgaaactcccc

SEQ ID NO: 138806 - DNA, 59 bp, Artificial
  Synthetic oligonucleotide
ctagacttcaccagagaggcgtgatttatcgtaagtggaggcatttcagtgggcgtaag

SEQ ID NO: 138807 - DNA, 55 bp, Artificial
  Synthetic oligonucleotide
taggaggaactgacatattagctcctcacggaactatatgcgtaatggtaatacc

SEQ ID NO: 138808 - DNA, 55 bp, Artificial
  Synthetic oligonucleotide
tagtccgcgtttatgcaaacgagtgagtgtcaccaataatacatctctctttgcc

SEQ ID NO: 138809 - DNA, 55 bp, Artificial
  Synthetic oligonucleotide
gcttagttctgtgcttaggagtggagtaactcgtctgaactccctcaacgcctct

SEQ ID NO: 138810 - DNA, 55 bp, Artificial
  Synthetic oligonucleotide
gtggttcgtaggtggagagcttaacgcctcttatctaactgtagataggcacgtt

SEQ ID NO: 138811 - DNA, 55 bp, Artificial
  Synthetic oligonucleotide
gtgtggctgctccagtattcttcaaagtgactgtcagagtttgactactagcact

SEQ ID NO: 138812 - DNA, 55 bp, Artificial
  Synthetic oligonucleotide
ggcggtactgttatcgtgagcatgatagattacgagttatatgctttagcctcag

SEQ ID NO: 138813 - DNA, 55 bp, Artificial
  Synthetic oligonucleotide
ggcggagtgctatcacagagggatagaccagaacatccccagctaagttacgagg

SEQ ID NO: 138814 - DNA, 55 bp, Artificial
  Synthetic oligonucleotide
ggccttaatagcagttaggcaaaggtttaacgcaatgcaaaacagtaaggccatg

SEQ ID NO: 138815 - DNA, 55 bp, Artificial
  Synthetic oligonucleotide
gttaaccactctaatcctagtctcgtcaactgcataataaccgctacacgagggg

SEQ ID NO: 138816 - DNA, 55 bp, Artificial
  Synthetic oligonucleotide
gttaaggatacaatacaatgtgtttcagacccctatttcctcagagcgaatgtcc

SEQ ID NO: 138817 - DNA, 60 bp, Artificial
  Synthetic oligonucleotide
tattgcttccagatgcttattcatctggttaattagagacccaagaaggagagcggacgt

SEQ ID NO: 138818 - DNA, 55 bp, Artificial
  Synthetic oligonucleotide
ggcacaggcgtgacgagcccctaccgtcggactgaacattgtgaaaatactcacg

SEQ ID NO: 138819 - DNA, 55 bp, Artificial
  Synthetic oligonucleotide
ggattattgcatggataatgggtttcctggagtatcactgaaaacgtttgctaac

SEQ ID NO: 138820 - DNA, 55 bp, Artificial
  Synthetic oligonucleotide
gttaggagatataaggagaatttaccagtggagatcaacgttgcagtaatgggtc

SEQ ID NO: 138821 - DNA, 55 bp, Artificial
  Synthetic oligonucleotide
gttcattaataccgcttacatagcatgcgtaccgccggacgtcagagacccgaaa

SEQ ID NO: 138822 - DNA, 55 bp, Artificial
  Synthetic oligonucleotide
ggatggtatgtaagcgtaacttatcagtccaaacatgagacctccttcaatgata

SEQ ID NO: 138823 - DNA, 55 bp, Artificial
  Synthetic oligonucleotide
ggatactccttatccgctaaagctatcaagtctgtgtagtgtactgcacctactg

SEQ ID NO: 138824 - DNA, 55 bp, Artificial
  Synthetic oligonucleotide
ggatactcctatttcagatcataggatatacactgtacccgggcattaagttcag

SEQ ID NO: 138825 - DNA, 55 bp, Artificial
  Synthetic oligonucleotide
gttccatcctgcaggtacgtaaattctcatttgaccattagaagtgccattatag

SEQ ID NO: 138826 - DNA, 55 bp, Artificial
  Synthetic oligonucleotide
ggagttgtgcgagaagagaaacatatgtcactggattgatgaagagcacgtgcgg

SEQ ID NO: 138827 - DNA, 55 bp, Artificial
  Synthetic oligonucleotide
ggagtcatgagcttgtttacgtctaagttctgctgtaacgtccaagctgccctac

SEQ ID NO: 138828 - DNA, 54 bp, Artificial
  Synthetic oligonucleotide
agtgagttgtttgcctttaagatcacaaacacagacctgtttaaaaaactcacg

SEQ ID NO: 138829 - DNA, 55 bp, Artificial
  Synthetic oligonucleotide
ggagtacaatctaccatcaaaggttgctcaggattgctatagggaagctctcgcg

SEQ ID NO: 138830 - DNA, 55 bp, Artificial
  Synthetic oligonucleotide
gttcgcagtaactatgtaatgtagggatttcaaacgccgaacactttgtaacttg

SEQ ID NO: 138831 - DNA, 55 bp, Artificial
  Synthetic oligonucleotide
gttctgttcaatatccctcatatgcctgggcaaactaactccaagaacaaaagtc

SEQ ID NO: 138832 - DNA, 55 bp, Artificial
  Synthetic oligonucleotide
gttgcagttaaacctcgatatcagcgtaagggttacggtaagaggttgatgagtg

SEQ ID NO: 138833 - DNA, 55 bp, Artificial
  Synthetic oligonucleotide
ccttgtttacgagaggttcaagagggctagaaccgcatacctaaagaactggaca

SEQ ID NO: 138834 - DNA, 55 bp, Artificial
  Synthetic oligonucleotide
ccttaacacaagtctttgcagatttgagcaaatttcaacgcgtaaaataacggcg

SEQ ID NO: 138835 - DNA, 55 bp, Artificial
  Synthetic oligonucleotide
cctggggtataagctgggttgagagcttgtggattgttgcctcagatttcgatag

SEQ ID NO: 138836 - DNA, 55 bp, Artificial
  Synthetic oligonucleotide
atgtgctggagtgaggtcgggtactatgactctaactagcttaccctcccctaag

SEQ ID NO: 138837 - DNA, 52 bp, Artificial
  Synthetic oligonucleotide
cctgacgttaacgccgaacatatttgggaaacgatattagaaagaacgaaag

SEQ ID NO: 138838 - DNA, 55 bp, Artificial
  Synthetic oligonucleotide
cctgaccaagctatactggtatatgacagtcccgaggacgctaaagccatacctc

SEQ ID NO: 138839 - DNA, 55 bp, Artificial
  Synthetic oligonucleotide
agtgcaaatcggcaatttaatccacttcataatagactccaaaaccgtggaaaaa

SEQ ID NO: 138840 - DNA, 55 bp, Artificial
  Synthetic oligonucleotide
cctattaagtacaaagataagaaacccgcattagagagctggaaggaataccaag

SEQ ID NO: 138841 - DNA, 55 bp, Artificial
  Synthetic oligonucleotide
attgtggtaaagagtttagcagtccccaggctcttagtggtcatatagggagagt

SEQ ID NO: 138842 - DNA, 55 bp, Artificial
  Synthetic oligonucleotide
atttcgtaggcatgttactaggggtcctaattgccgtggttggggcaatagctag

SEQ ID NO: 138843 - DNA, 55 bp, Artificial
  Synthetic oligonucleotide
caaccggtatagaggtataatcaaccttgactgtgacgtcttctccgcttacgtt

SEQ ID NO: 138844 - DNA, 55 bp, Artificial
  Synthetic oligonucleotide
ccgtgccataagtgaactcgtggatcctaaagacactatgttctatctcacaggt

SEQ ID NO: 138845 - DNA, 55 bp, Artificial
  Synthetic oligonucleotide
caacgtccctactgaagacatagacgcggaaatccaggtcattcgtaacaaaatt

SEQ ID NO: 138846 - DNA, 55 bp, Artificial
  Synthetic oligonucleotide
ccgtgattatatggaaccgcgagttctttcatctctaggtccgacaattttcttt

SEQ ID NO: 138847 - DNA, 55 bp, Artificial
  Synthetic oligonucleotide
ccgtagcattcctaagttctgttgcattcgttgcggccgtcttaacgttaattgc

SEQ ID NO: 138848 - DNA, 55 bp, Artificial
  Synthetic oligonucleotide
caactcctggagaaagtggcgatagcgtgatatgacgtttgagcccttccgtcgt

SEQ ID NO: 138849 - DNA, 55 bp, Artificial
  Synthetic oligonucleotide
ccgtaaagcggtgccctgtacttaagcacacggtgaatcgtcctccacacagtcc

SEQ ID NO: 138850 - DNA, 60 bp, Artificial
  Synthetic oligonucleotide
agtgctatgttagcatatgacaactaaaaatacacgcgtagtagtttatctgccaggtga

SEQ ID NO: 138851 - DNA, 53 bp, Artificial
  Synthetic oligonucleotide
ccggtgtactttaacgaggagcctgttgttgaactaggggaattcgcccacag

SEQ ID NO: 138852 - DNA, 55 bp, Artificial
  Synthetic oligonucleotide
ccggagatactataggtgcagtagctctagaccaacatggtaatctagttgccgg

SEQ ID NO: 138853 - DNA, 55 bp, Artificial
  Synthetic oligonucleotide
ccggagacggagtattaagactcagagtaccgagaaccagaaagggtggcttcag

SEQ ID NO: 138854 - DNA, 55 bp, Artificial
  Synthetic oligonucleotide
caagcgtctgtgattacttcgctcttctactgggtactacaaagatcgctcagat

SEQ ID NO: 138855 - DNA, 55 bp, Artificial
  Synthetic oligonucleotide
ccgctagcgcgtccctcagttctggatccttaatattcttcacgaaatacgctat

SEQ ID NO: 138856 - DNA, 55 bp, Artificial
  Synthetic oligonucleotide
ccgcctactgtacaaagagtcatgaacagacctacaatacagacacaagcatcca

SEQ ID NO: 138857 - DNA, 55 bp, Artificial
  Synthetic oligonucleotide
cgggattgtcgcggagattgcttctatcctaggcacacagaagggatctggtggg

SEQ ID NO: 138858 - DNA, 55 bp, Artificial
  Synthetic oligonucleotide
cggcagccgtgatagctgcttattttaatatagcctgagtttgagatccaggaca

SEQ ID NO: 138859 - DNA, 55 bp, Artificial
  Synthetic oligonucleotide
cggcaaaggaatagctgatctgcaatctttcaacagttatgtcgttggtccaggc

SEQ ID NO: 138860 - DNA, 53 bp, Artificial
  Synthetic oligonucleotide
cggaggagggataaaggtcaaccctaagaggaagaggtttgcagtagtaggcg

SEQ ID NO: 138861 - DNA, 53 bp, Artificial
  Synthetic oligonucleotide
agtgtgcgttagaggagttctcctaattatttccctcccgtaaacattcctta

SEQ ID NO: 138862 - DNA, 55 bp, Artificial
  Synthetic oligonucleotide
atataaactgtgccaggcaatactgggaaatagactgtgccagaatatcctactg

SEQ ID NO: 138863 - DNA, 55 bp, Artificial
  Synthetic oligonucleotide
cggagaatgcgttgtaacgaacacctgaaatacatcgttattagtccactcctta

SEQ ID NO: 138864 - DNA, 55 bp, Artificial
  Synthetic oligonucleotide
cggaagagtagtaagagactttaacgcgtatagccccaaagtgattattgaccag

SEQ ID NO: 138865 - DNA, 55 bp, Artificial
  Synthetic oligonucleotide
cgcttaacctcgattagtgcaacggtttcctttattccggatgccatgtagctaa

SEQ ID NO: 138866 - DNA, 55 bp, Artificial
  Synthetic oligonucleotide
cgctaagctctttcgcggtgtaacttttgccgtccgatttataatagccgtgtaa

SEQ ID NO: 138867 - DNA, 55 bp, Artificial
  Synthetic oligonucleotide
atatcgttccctatggattcttcgccatatccgtcttgattccaaggaggattgg

SEQ ID NO: 138868 - DNA, 55 bp, Artificial
  Synthetic oligonucleotide
atcagctttgagggctacccctattccctctagatattacgcaatcgtggatccc

SEQ ID NO: 138869 - DNA, 55 bp, Artificial
  Synthetic oligonucleotide
cgcctacagctaacacatagggaattgacgctggaaccaactgggatcccatagg

SEQ ID NO: 138870 - DNA, 55 bp, Artificial
  Synthetic oligonucleotide
cgcacgaaatcataaatttttagccgacaacgaatgaggtgatttaccacagcag

SEQ ID NO: 138871 - DNA, 55 bp, Artificial
  Synthetic oligonucleotide
atccttaccaactactatctcactcatattaatgtctacggcaatactttcccct

SEQ ID NO: 138872 - DNA, 53 bp, Artificial
  Synthetic oligonucleotide
tattagcttttcacacgggtaatactgaaaaatctaccgttgtcaattttaag

SEQ ID NO: 138873 - DNA, 55 bp, Artificial
  Synthetic oligonucleotide
cgattacgaagtagttgtatgtatcccacgtcctcatatgatcgttcagcatcgt

SEQ ID NO: 138874 - DNA, 55 bp, Artificial
  Synthetic oligonucleotide
cgacagactggtatccgaggagcttcttaagttcgcgagaaaggacgccgagctc

SEQ ID NO: 138875 - DNA, 53 bp, Artificial
  Synthetic oligonucleotide
cgaacctacgtactttatcttctacgaaagtgtaaactgggtcaactaatatc

SEQ ID NO: 138876 - DNA, 55 bp, Artificial
  Synthetic oligonucleotide
cgaaatacctgtgtaactaccatttcgtatggattcctaaatatcgtagagacct

SEQ ID NO: 138877 - DNA, 47 bp, Artificial
  Synthetic oligonucleotide
cgaaaagaaacgtttactttcaactggggttaagggtttgaccccaa

SEQ ID NO: 138878 - DNA, 54 bp, Artificial
  Synthetic oligonucleotide
cctttgaaggtagattgtactcctcccttaacctcgtgtataactcctcgtgga

SEQ ID NO: 138879 - DNA, 55 bp, Artificial
  Synthetic oligonucleotide
atctaagggcgttagagtgagtgtacagcctagcgtacaatctactactcctcag

SEQ ID NO: 138880 - DNA, 55 bp, Artificial
  Synthetic oligonucleotide
cagggattatacgtaacaactattgataacaatgagctgccttcaagcttagatg

SEQ ID NO: 138881 - DNA, 55 bp, Artificial
  Synthetic oligonucleotide
caggtataagtggaggtatgaacgcagattcccacacataataaggactgtaagc

SEQ ID NO: 138882 - DNA, 55 bp, Artificial
  Synthetic oligonucleotide
caggtctgaataatttagctacaacatatttaggcatagacaaggtaccctccat

SEQ ID NO: 138883 - DNA, 53 bp, Artificial
  Synthetic oligonucleotide
agttatgattatgcccccgtgttaatcctgtctgaatccccggtaatttaagt

SEQ ID NO: 138884 - DNA, 55 bp, Artificial
  Synthetic oligonucleotide
cccaagataatgggtggagtcaagatacagtactcggacgttggactagtgaggg

SEQ ID NO: 138885 - DNA, 55 bp, Artificial
  Synthetic oligonucleotide
cagtaactgcttaaatatcgacttgtttacgttctctctcgcctgacctgatgag

SEQ ID NO: 138886 - DNA, 55 bp, Artificial
  Synthetic oligonucleotide
cagtataatcaagtaggcgaatctgttccagtagccttatctaccgctatagcta

SEQ ID NO: 138887 - DNA, 55 bp, Artificial
  Synthetic oligonucleotide
ccagtggagagagtgagtggaaagatagtggttcgaaaatgatccatgctgcacc

SEQ ID NO: 138888 - DNA, 53 bp, Artificial
  Synthetic oligonucleotide
ccagtcgattacgggctccttgtttacataaacggtttccctaatgacgtgga

SEQ ID NO: 138889 - DNA, 55 bp, Artificial
  Synthetic oligonucleotide
cagtatacatggggctacactctggcactcatatagacctccctttacatttcgt

SEQ ID NO: 138890 - DNA, 55 bp, Artificial
  Synthetic oligonucleotide
cagtgccagtcccgaaggacgctatctctgatacaatagctactcccactccagc

SEQ ID NO: 138891 - DNA, 55 bp, Artificial
  Synthetic oligonucleotide
ccagccatatactgcagggaatgcgtcgataatcccatgtgcaacatggtcgtca

SEQ ID NO: 138892 - DNA, 55 bp, Artificial
  Synthetic oligonucleotide
ccagcacaagacctgaacgggacgttagaacctcaggagactgtagtcctcttag

SEQ ID NO: 138893 - DNA, 55 bp, Artificial
  Synthetic oligonucleotide
ccagatgtaatcgttgagaacttcacacatgttactaaaacgtctaaagacgagc

SEQ ID NO: 138894 - DNA, 58 bp, Artificial
  Synthetic oligonucleotide
atcggtgtgtttatatgtgccatacgcataaatattaacgtatgctttaaatttaagc

SEQ ID NO: 138895 - DNA, 51 bp, Artificial
  Synthetic oligonucleotide
agttgaaatacctaagtaccacgtttcgtatttagacgctttaacgaaatc

SEQ ID NO: 138896 - DNA, 53 bp, Artificial
  Synthetic oligonucleotide
ccagaattcacgggttttgttgtaaatcataacggtgaggttgtggagtttac

SEQ ID NO: 138897 - DNA, 55 bp, Artificial
  Synthetic oligonucleotide
cagtttgaaagaggactcactagccaaagcccaaccgtcattataatacctccag

SEQ ID NO: 138898 - DNA, 55 bp, Artificial
  Synthetic oligonucleotide
cataccctggtattgcttcgaacttgaaccctaactgtggtatatagaatgcgtg

SEQ ID NO: 138899 - DNA, 55 bp, Artificial
  Synthetic oligonucleotide
ccacttcaacaagagcgttccagagacctccttcagttgcgtcatgcatcatgtg

SEQ ID NO: 138900 - DNA, 54 bp, Artificial
  Synthetic oligonucleotide
catcgtagatttaagggtgagtttgcgaagaagagggtaggagtttcttcggct

SEQ ID NO: 138901 - DNA, 55 bp, Artificial
  Synthetic oligonucleotide
ccaattagcagttgattacgcgaacatcatagcgtggcttgtcccgcttaccgcg

SEQ ID NO: 138902 - DNA, 55 bp, Artificial
  Synthetic oligonucleotide
catttacgccattactaatccttacaattcccacaacgtagtcactgtaatggga

SEQ ID NO: 138903 - DNA, 55 bp, Artificial
  Synthetic oligonucleotide
catttccaattagatatactgtataacggtctggggctctcagagagggacgtag

SEQ ID NO: 138904 - DNA, 55 bp, Artificial
  Synthetic oligonucleotide
ccaacgtactctaccgctaccattgtgccttgcatattagggcttaccatatagg

SEQ ID NO: 138905 - DNA, 55 bp, Artificial
  Synthetic oligonucleotide
caccaagtcaacaactagtcgcagtagcagatggtccaagcggtatcttagctct

SEQ ID NO: 138906 - DNA, 58 bp, Artificial
  Synthetic oligonucleotide
ctaatattaattagactaagccaggggtgcaaaacattagaggagttagagagataca

SEQ ID NO: 138907 - DNA, 54 bp, Artificial
  Synthetic oligonucleotide
ccgattaagtacgtatatttagcgtcgcataaaggcgtattcttagtaacgggc

SEQ ID NO: 138908 - DNA, 55 bp, Artificial
  Synthetic oligonucleotide
ccgatactagggagaagcaatctggaattcctgaccttttacgcgatctgggtgc

SEQ ID NO: 138909 - DNA, 55 bp, Artificial
  Synthetic oligonucleotide
ccgacggtaggggttagtcacgccctcacccgaagactttgcttcagatagtgtc

SEQ ID NO: 138910 - DNA, 52 bp, Artificial
  Synthetic oligonucleotide
ccgacggtaggggttagtcacgccactacccgaagacttcgcttcagtttcc

SEQ ID NO: 138911 - DNA, 55 bp, Artificial
  Synthetic oligonucleotide
ccgaataccgtgaaaggtacgtaatatactacagggtgcccatagaaccagaata

SEQ ID NO: 138912 - DNA, 55 bp, Artificial
  Synthetic oligonucleotide
cccttaactagagactcagcgttggtttcatctactatatcgagtatcgcctcca

SEQ ID NO: 138913 - DNA, 55 bp, Artificial
  Synthetic oligonucleotide
ccctgcaaggactccggaacccacttttgacagcctaaaggatactgcggagatt

SEQ ID NO: 138914 - DNA, 55 bp, Artificial
  Synthetic oligonucleotide
cacccagaagggacagagtacagctttaggttaggaccaagtgatggggctaaga

SEQ ID NO: 138915 - DNA, 52 bp, Artificial
  Synthetic oligonucleotide
cccgttggagggtgacgagttaatagtttacggtgagacctcgttcaagcgt

SEQ ID NO: 138916 - DNA, 53 bp, Artificial
  Synthetic oligonucleotide
cccgtgttaatcctgtctgaatccccggtaatttaagttgaaagaggtcactc

SEQ ID NO: 138917 - DNA, 56 bp, Artificial
  Synthetic oligonucleotide
tatgaaaccggtggaaatgtcactgggtttccggaactccaggctttatgtgaaga

SEQ ID NO: 138918 - DNA, 55 bp, Artificial
  Synthetic oligonucleotide
cccgtggcataacttatccaattccgtcattggcattcttcttaggggatcatat

SEQ ID NO: 138919 - DNA, 55 bp, Artificial
  Synthetic oligonucleotide
cacccgttaatcctaacgaatcgctgcactcttcattgagggataggctcgtacg

SEQ ID NO: 138920 - DNA, 55 bp, Artificial
  Synthetic oligonucleotide
cccgaaccgatagtggtgagcctcttagaatagaactcccgtcccttcaggatgt

SEQ ID NO: 138921 - DNA, 55 bp, Artificial
  Synthetic oligonucleotide
cacgaaacgataataatttcgttaatagccttacttaacggcccatcacatatgc

SEQ ID NO: 138922 - DNA, 55 bp, Artificial
  Synthetic oligonucleotide
cccctctctccttgaagtattgtgaaggccttattgcgtatactccggtaggctc

SEQ ID NO: 138923 - DNA, 55 bp, Artificial
  Synthetic oligonucleotide
cccctcgtcctcataccccttgtccggctctccacgcctaggcttaagattaata

SEQ ID NO: 138924 - DNA, 55 bp, Artificial
  Synthetic oligonucleotide
cccctcatccatcacgttgagatcctgatcgtatagaactttatgactccagcca

SEQ ID NO: 138925 - DNA, 55 bp, Artificial
  Synthetic oligonucleotide
cacgtctgaagccctttgtcgagaatagagtgttgaacttagtaacgtcgggtag

SEQ ID NO: 138926 - DNA, 53 bp, Artificial
  Synthetic oligonucleotide
ccccgttaactaaaggagttgcttcgaagtttattcttagagctctatctcct

SEQ ID NO: 138927 - DNA, 55 bp, Artificial
  Synthetic oligonucleotide
cagacgagaaaggagtgctatcgaaagttcacgaggagttgtacacaaggctaag

SEQ ID NO: 138928 - DNA, 58 bp, Artificial
  Synthetic oligonucleotide
ataaattcacggaagtgatagaaaatgtcatctgaacaacacgcttccaaattaccaa

SEQ ID NO: 138929 - DNA, 55 bp, Artificial
  Synthetic oligonucleotide
cccatatgagtgtgaaggagaaactaactctgactcaactcatcttaatccgcct

SEQ ID NO: 138930 - DNA, 55 bp, Artificial
  Synthetic oligonucleotide
accacggtatgggaatgccagaggctacaataaatgtagctgtaagcggaccagg

SEQ ID NO: 138931 - DNA, 55 bp, Artificial
  Synthetic oligonucleotide
gaccggactcttacatggaatcgagccctttgtgagacgaactgtatatttacag

SEQ ID NO: 138932 - DNA, 55 bp, Artificial
  Synthetic oligonucleotide
acctaatgatagaaggctatggatattgacttgcatggacgagcgagttcacgtg

SEQ ID NO: 138933 - DNA, 55 bp, Artificial
  Synthetic oligonucleotide
gaccaacaaagctcgctaccggatattgacctaagatgtaggataatgagcctag

SEQ ID NO: 138934 - DNA, 55 bp, Artificial
  Synthetic oligonucleotide
gacattaccggcagtgttcctaggtttatacactaaatggtttaatccatgggca

SEQ ID NO: 138935 - DNA, 51 bp, Artificial
  Synthetic oligonucleotide
acgtgatattccgcgggtgtgggttggggttatcccgctaaaggggcggag

SEQ ID NO: 138936 - DNA, 55 bp, Artificial
  Synthetic oligonucleotide
gaagtttacatagtttctgctgtgaggacgcctattggtcgctttggcggctcgc

SEQ ID NO: 138937 - DNA, 55 bp, Artificial
  Synthetic oligonucleotide
gaacttgacagacgccagaaatctattttacgtaggtgatgcacttgctaggagg

SEQ ID NO: 138938 - DNA, 55 bp, Artificial
  Synthetic oligonucleotide
gaactctacatcgtttaggtcgtgaactgggtagatataggttatgtttgaaggc

SEQ ID NO: 138939 - DNA, 59 bp, Artificial
  Synthetic oligonucleotide
ataagtgaaccggcacttgacgatttatgcaaacaaacgttatgtgtgcaaacaccaca

SEQ ID NO: 138940 - DNA, 55 bp, Artificial
  Synthetic oligonucleotide
gaaccttagcccaggctgtttgtatatcccttagcatattcctcaccgttaacgt

SEQ ID NO: 138941 - DNA, 55 bp, Artificial
  Synthetic oligonucleotide
gaacacgttcttaccattccatagaacctccccagagagaggtttctgaaggttc

SEQ ID NO: 138942 - DNA, 55 bp, Artificial
  Synthetic oligonucleotide
gaaatgggtgtcggtaggcaaacaggggatctatgtcttttccagagctgcgggg

SEQ ID NO: 138943 - DNA, 54 bp, Artificial
  Synthetic oligonucleotide
acttaatgaaacacggggttacggatccagacaagatattggaattattaccgc

SEQ ID NO: 138944 - DNA, 55 bp, Artificial
  Synthetic oligonucleotide
gaaaggagttaagcaaataggacagacccatttatacaccgccctgagtgaaacg

SEQ ID NO: 138945 - DNA, 55 bp, Artificial
  Synthetic oligonucleotide
ctttctcgcgaaatggagaccatgagtgcagaacgcatcatagggtgggcagtag

SEQ ID NO: 138946 - DNA, 55 bp, Artificial
  Synthetic oligonucleotide
cttctagtgtaatgggaggagtccgtgataacaacgtatccgcgactctctgggg

SEQ ID NO: 138947 - DNA, 55 bp, Artificial
  Synthetic oligonucleotide
agaattccaattgtagcaactaagctaaacggagccacagaggatgcatagtttg

SEQ ID NO: 138948 - DNA, 55 bp, Artificial
  Synthetic oligonucleotide
cttcaagaagatctcatctgcaattccataatactcaaataggaagccgtcgggc

SEQ ID NO: 138949 - DNA, 53 bp, Artificial
  Synthetic oligonucleotide
agacgttaacttgggatttattactgttgacggttctgacgcaaaggaggcct

SEQ ID NO: 138950 - DNA, 56 bp, Artificial
  Synthetic oligonucleotide
ataggagagtattacaacattacgagttacagtccagttatgggttactgggtaca

SEQ ID NO: 138951 - DNA, 55 bp, Artificial
  Synthetic oligonucleotide
cttactctgctaaacacgtgtctgttcttacttttgcttactctaactctgcagc

SEQ ID NO: 138952 - DNA, 55 bp, Artificial
  Synthetic oligonucleotide
gaggggattggcatgttatactctacttaatgaaacacggggttacggatccaga

SEQ ID NO: 138953 - DNA, 55 bp, Artificial
  Synthetic oligonucleotide
aaaaggcgagtatttgatcgtacattcagatccaattaccgaggctaaaagtgac

SEQ ID NO: 138954 - DNA, 55 bp, Artificial
  Synthetic oligonucleotide
gaggacttaacgatctaaacccagtatcagattacgcactggtagccaataggca

SEQ ID NO: 138955 - DNA, 55 bp, Artificial
  Synthetic oligonucleotide
gagcttccctatagcaatcctcagcaacctttgatggtagattgtactcctccct

SEQ ID NO: 138956 - DNA, 55 bp, Artificial
  Synthetic oligonucleotide
aaacacataatttgtgaaggtaaaagttacgctgaggcggggatcgatagaagca

SEQ ID NO: 138957 - DNA, 55 bp, Artificial
  Synthetic oligonucleotide
gagatacataatcggggtagacgaccacgactctcctgtaggaggctgcactact

SEQ ID NO: 138958 - DNA, 55 bp, Artificial
  Synthetic oligonucleotide
aaagagatatgggatagaggcgggacagcaatacgcggtggctaggctgattgac

SEQ ID NO: 138959 - DNA, 55 bp, Artificial
  Synthetic oligonucleotide
aaagggaggtctatatgagtgccagagtgtagccccatgtatactgttgaaagtg

SEQ ID NO: 138960 - DNA, 55 bp, Artificial
  Synthetic oligonucleotide
gagacgtcttctctcaaattaactggggagttataaccatgtatgacgggataac

SEQ ID NO: 138961 - DNA, 60 bp, Artificial
  Synthetic oligonucleotide
tatattccacaggaatggcatgacagattaatggaaatcgctaaggaaaagaatcttacg

SEQ ID NO: 138962 - DNA, 52 bp, Artificial
  Synthetic oligonucleotide
aacgagactaagcgtgaaactggggagtttacagagaagtccgaaagtaaac

SEQ ID NO: 138963 - DNA, 55 bp, Artificial
  Synthetic oligonucleotide
aactcttcggcgaatttggtatgttttacttcatattcgcgtttgaacgagacag

SEQ ID NO: 138964 - DNA, 55 bp, Artificial
  Synthetic oligonucleotide
gacgtaacagactgggacagctgtaacgcgttctacaacaaagccctcagttctc

SEQ ID NO: 138965 - DNA, 55 bp, Artificial
  Synthetic oligonucleotide
gacggtcagtgaaatcgcgagagcgatgaattatagtatatcgaaagggaacgtt

SEQ ID NO: 138966 - DNA, 55 bp, Artificial
  Synthetic oligonucleotide
gacggtagccatgggatagggcgtatttccgtctcgagattgtttaccatgatgc

SEQ ID NO: 138967 - DNA, 54 bp, Artificial
  Synthetic oligonucleotide
aagaagggtaatcgctgcggatttacggttggctacaaggagttttaacgcatc

SEQ ID NO: 138968 - DNA, 55 bp, Artificial
  Synthetic oligonucleotide
gacggagcacccactctcccctagactcttccctactactcttgcaattagcgta

SEQ ID NO: 138969 - DNA, 55 bp, Artificial
  Synthetic oligonucleotide
gacgctatagcgataaaatatttccgcaaattcgtcgcgtctaaaatggcggagt

SEQ ID NO: 138970 - DNA, 55 bp, Artificial
  Synthetic oligonucleotide
gacgatagaggagtgcaaaacgacgacagagaaattaatgagtttatggcgtata

SEQ ID NO: 138971 - DNA, 55 bp, Artificial
  Synthetic oligonucleotide
gacgacgtactccagcccggtaacgtgataataattaatgcgtcaaacgcaatga

SEQ ID NO: 138972 - DNA, 58 bp, Artificial
  Synthetic oligonucleotide
atagtgagcaatttggtcgctacattttcacctttcgttatgggaatcttaccatgga

SEQ ID NO: 138973 - DNA, 55 bp, Artificial
  Synthetic oligonucleotide
aaggagcatgatttatacaggttcttattcccacaagacgcagataaggaataac

SEQ ID NO: 138974 - DNA, 55 bp, Artificial
  Synthetic oligonucleotide
aatctactcctacattcgccgacattcacaaacattcgacaacatttacagacat

SEQ ID NO: 138975 - DNA, 55 bp, Artificial
  Synthetic oligonucleotide
agtaggtgacgtaattatcgtgagcgatgacttctctggactcgatcgcgtcgtg

SEQ ID NO: 138976 - DNA, 55 bp, Artificial
  Synthetic oligonucleotide
ctagttctgggatagtgagtaatttggcctctgcattttcacctttcgttatggg

SEQ ID NO: 138977 - DNA, 55 bp, Artificial
  Synthetic oligonucleotide
agtagtgcaccggagagtattggcccttgatacgagagtaacctatccactggat

SEQ ID NO: 138978 - DNA, 55 bp, Artificial
  Synthetic oligonucleotide
agtgatttatgacttgactaggctaggtcgagatctattcgatctagtaaccact

SEQ ID NO: 138979 - DNA, 55 bp, Artificial
  Synthetic oligonucleotide
ctacatgggtctacgagttcggtccattcatgtcaatgttattcgtcatattgtc

SEQ ID NO: 138980 - DNA, 55 bp, Artificial
  Synthetic oligonucleotide
ctaacttagtagtgttagctgcaaacggaggaagttctgggaacagtttggcaac

SEQ ID NO: 138981 - DNA, 53 bp, Artificial
  Synthetic oligonucleotide
ctaaatataccttcgtttgacggttacgtactcttcatcgaacaaattgacgg

SEQ ID NO: 138982 - DNA, 55 bp, Artificial
  Synthetic oligonucleotide
cgttttagatcagtgtgacgaaagcgactgtaaggagttaaaagaatgtaacgag

SEQ ID NO: 138983 - DNA, 56 bp, Artificial
  Synthetic oligonucleotide
gcttagggtcagtaactacgtccttgactctcacgtcgtttacattattcagggcc

SEQ ID NO: 138984 - DNA, 55 bp, Artificial
  Synthetic oligonucleotide
cgttggtctcaagtctttctagttttgagagaaattcaacacgtcaaaattacgc

SEQ ID NO: 138985 - DNA, 55 bp, Artificial
  Synthetic oligonucleotide
cgttaagacatagcggatgggcaaacggtcaaccagtaactgcgtatgatatatt

SEQ ID NO: 138986 - DNA, 55 bp, Artificial
  Synthetic oligonucleotide
cgtgtggctaacgtttgaaggctatatttatcttaagggcggtgacgcaaacgac

SEQ ID NO: 138987 - DNA, 55 bp, Artificial
  Synthetic oligonucleotide
cgtgaaagagttactagaaaccgaaagggctgaatatgatccggcaaacggcgat

SEQ ID NO: 138988 - DNA, 55 bp, Artificial
  Synthetic oligonucleotide
cgtcgcttttgatcctaacgtctgatctcaacacctcgagagcgtaaaggagggc

SEQ ID NO: 138989 - DNA, 55 bp, Artificial
  Synthetic oligonucleotide
cgtcacaaggataatacgttctaccattaactggagagacgaaatgctgttccca

SEQ ID NO: 138990 - DNA, 55 bp, Artificial
  Synthetic oligonucleotide
cgtacattgttggagattagaaccagaggatgttggactagagtgggacgatacg

SEQ ID NO: 138991 - DNA, 55 bp, Artificial
  Synthetic oligonucleotide
cgtaaggactaccgcaatctcttacataatcggtgcacttgttcctatcataccg

SEQ ID NO: 138992 - DNA, 55 bp, Artificial
  Synthetic oligonucleotide
cggttctggatatccatattctggatctgtagcattccctgcaaatacttacgct

SEQ ID NO: 138993 - DNA, 52 bp, Artificial
  Synthetic oligonucleotide
cggttacgctattggctaagtttaaccaggctaaaaccatcgaagttcctaa

SEQ ID NO: 138994 - DNA, 59 bp, Artificial
  Synthetic oligonucleotide
tagtctgataggaggagtatctaacttagtagtgttagctgcaaacggaggaagttctg

SEQ ID NO: 138995 - DNA, 55 bp, Artificial
  Synthetic oligonucleotide
cggtgtgctccctgcaggaattatctgttcagccttaatcacggaaagcgttacg

SEQ ID NO: 138996 - DNA, 55 bp, Artificial
  Synthetic oligonucleotide
agtttgagcaatactgtctctagtttgagtagcacagtctctaagctcaacggca

SEQ ID NO: 138997 - DNA, 54 bp, Artificial
  Synthetic oligonucleotide
cgggcgggagttccctagaaatcttaagcgatcttttagccacgacgaggctgg

SEQ ID NO: 138998 - DNA, 55 bp, Artificial
  Synthetic oligonucleotide
agactactccatagatgacatggatagggtgaagagacttacgggtgacgactgg

SEQ ID NO: 138999 - DNA, 55 bp, Artificial
  Synthetic oligonucleotide
ctgggcggatccccggtaatttaagttgaaagatttcactctcacgctgatggag

SEQ ID NO: 139000 - DNA, 55 bp, Artificial
  Synthetic oligonucleotide
ctggcgagcctggagctaaactggtcttcacataaggcttgcttcttaaccctag

SEQ ID NO: 139001 - DNA, 55 bp, Artificial
  Synthetic oligonucleotide
agatcgttctccttctcgaaatacgaaatcgaatagaagcctagaggagtgtgaa

SEQ ID NO: 139002 - DNA, 55 bp, Artificial
  Synthetic oligonucleotide
ctgcgactgcaaacttagctaccctgaatactagatagagcttaacgaggacgta

SEQ ID NO: 139003 - DNA, 55 bp, Artificial
  Synthetic oligonucleotide
ctgcatgcagccacgaaatcacaactatgattatgcagtccatatgttaatcctg

SEQ ID NO: 139004 - DNA, 55 bp, Artificial
  Synthetic oligonucleotide
ctgatatgattgaactggtacttgtaacactacaccaggacctaaggatggcgag

SEQ ID NO: 139005 - DNA, 58 bp, Artificial
  Synthetic oligonucleotide
ggaattcgcccacaggctaaagcactatctagttagcaagggcgggcgtggtagaaga

SEQ ID NO: 139006 - DNA, 60 bp, Artificial
  Synthetic oligonucleotide
ggaagacactgttttaacgacagtagtatatgcggtcacatagggtattatgcagaatgc

SEQ ID NO: 139007 - DNA, 55 bp, Artificial
  Synthetic oligonucleotide
agatcttcagccaagtataatctcatatactctgtagttatgccaggggaagcgt

SEQ ID NO: 139008 - DNA, 55 bp, Artificial
  Synthetic oligonucleotide
agccttgtttacagttaacatgttgacaccgagcattgatgctaactctcttata

SEQ ID NO: 139009 - DNA, 55 bp, Artificial
  Synthetic oligonucleotide
ctattctcagctcctcgacgtctctcacgcctatggctacgtgtggtagagccgg

SEQ ID NO: 139010 - DNA, 55 bp, Artificial
  Synthetic oligonucleotide
aggatagtaaggctcctatcatttgcattaatgacacaggccacattaacagtcc

SEQ ID NO: 139011 - DNA, 55 bp, Artificial
  Synthetic oligonucleotide
ctccttctggaccatatataaggatagaatgctttctctttctggccatcaggtg

SEQ ID NO: 139012 - DNA, 55 bp, Artificial
  Synthetic oligonucleotide
agggctggacaaagtaatatactacagggtttggtaaccaagcgtatggtgcttg

SEQ ID NO: 139013 - DNA, 55 bp, Artificial
  Synthetic oligonucleotide
agggatcagtgccagatgaaactattgcggctagaactggaggttggtgggccgc

SEQ ID NO: 139014 - DNA, 54 bp, Artificial
  Synthetic oligonucleotide
tttttctccagaagagagacaaaattacgggccaggtggccgtattttgtccag

SEQ ID NO: 139015 - DNA, 54 bp, Artificial
  Synthetic oligonucleotide
gttgcaaaatgtacgtttgtcctttcggcaatagagaattcgatacgttaatgt

SEQ ID NO: 139016 - DNA, 54 bp, Artificial
  Synthetic oligonucleotide
agtagagggcgaggaattctgaggactggcgctattacgacgcatattcaaatc

SEQ ID NO: 139017 - DNA, 60 bp, Artificial
  Synthetic oligonucleotide
atcagagctacagtttcaatgaagatcgccctctctgattccctcctagccctcgtgaac

SEQ ID NO: 139018 - DNA, 54 bp, Artificial
  Synthetic oligonucleotide
agaggagtcagtacgacattttaacactagtagaaagcgagaaattataaacga

SEQ ID NO: 139019 - DNA, 54 bp, Artificial
  Synthetic oligonucleotide
aaaatacccgccttgatgttcttcccagcttctagaagcagttagtagctcact

SEQ ID NO: 139020 - DNA, 54 bp, Artificial
  Synthetic oligonucleotide
gtttcatagccgggttagcgctattaggaggagctatagctagtacgttcgaca

SEQ ID NO: 139021 - DNA, 52 bp, Artificial
  Synthetic oligonucleotide
aacactcccgccggggaaggtatcgcttattcgtggaggggcaagatccccg

SEQ ID NO: 139022 - DNA, 53 bp, Artificial
  Synthetic oligonucleotide
aggccttatgagcctaaataggtaagccctcccccgaatcgccacgtgggttg

SEQ ID NO: 139023 - DNA, 53 bp, Artificial
  Synthetic oligonucleotide
actacaggaaggggtggaaatagttaagggtattaacgtcgatgaggtctcta

SEQ ID NO: 139024 - DNA, 54 bp, Artificial
  Synthetic oligonucleotide
cagtgaactgcgttttttctactaggctttaaggcatactagaggatccctggt

SEQ ID NO: 139025 - DNA, 54 bp, Artificial
  Synthetic oligonucleotide
aactaagcccgccctgtctaactctgctaactatcccccgccttaatcacaccc

SEQ ID NO: 139026 - DNA, 54 bp, Artificial
  Synthetic oligonucleotide
caaattagggtggaactacagggacctaagcagttcgtagaggatgtaatgaag

SEQ ID NO: 139027 - DNA, 54 bp, Artificial
  Synthetic oligonucleotide
tcgcgaggaggtgcgtctcagagctgaacggctctacgttctggaggagtcctc

SEQ ID NO: 139028 - DNA, 60 bp, Artificial
  Synthetic oligonucleotide
cgagatctgcacagttgcccacaacgaccgtggaaagaagtgatatcctaataggacatt

SEQ ID NO: 139029 - DNA, 54 bp, Artificial
  Synthetic oligonucleotide
tcctcagtcttaagacctatgaccacgaactctttagcacttaggtctaagggg

SEQ ID NO: 139030 - DNA, 54 bp, Artificial
  Synthetic oligonucleotide
gccacgtggaggtatataatcatagtatccgctggagtaaccttagccctattc

SEQ ID NO: 139031 - DNA, 54 bp, Artificial
  Synthetic oligonucleotide
gacgaaagcagttttacgctctttcttagtccagtcttccgtgtaggggtcttg

SEQ ID NO: 139032 - DNA, 54 bp, Artificial
  Synthetic oligonucleotide
ggggcaaatgccgtatagcttgtcaacctggggtatacgttctttatcctcccc

SEQ ID NO: 139033 - DNA, 54 bp, Artificial
  Synthetic oligonucleotide
ggggcggaaagagatagggcgtttgtagggattgctgtggaccctatcgacttg

SEQ ID NO: 139034 - DNA, 54 bp, Artificial
  Synthetic oligonucleotide
ctatcgttttactcaatgcgtctactattttacccaatgcaccgtatttcctct

SEQ ID NO: 139035 - DNA, 53 bp, Artificial
  Synthetic oligonucleotide
ggttcgttaacaaaggctggtaaagtgaggggacagacccctaagatacaagc

SEQ ID NO: 139036 - DNA, 54 bp, Artificial
  Synthetic oligonucleotide
cccgcaatttaggcgcctgatttctatgcccccgtgcattaaattcaaggcgcc

SEQ ID NO: 139037 - DNA, 49 bp, Artificial
  Synthetic oligonucleotide
gatttaaaacactagtagaaaaaccgtaaaattttactacggctgttta

SEQ ID NO: 139038 - DNA, 54 bp, Artificial
  Synthetic oligonucleotide
gtactagcattttcacgagtgttacagcagaagaagtttgatttcgaagatagt

SEQ ID NO: 139039 - DNA, 60 bp, Artificial
  Synthetic oligonucleotide
gtgggaaagaaaatcagatagtgtctatgcatttgtgaaagatctaatagagaacaatga

SEQ ID NO: 139040 - DNA, 54 bp, Artificial
  Synthetic oligonucleotide
gatagcaccgggtccgtattgggcaactgcagatttagctggggccctacagcc

SEQ ID NO: 139041 - DNA, 54 bp, Artificial
  Synthetic oligonucleotide
gtagatctagctaaacccgtggaacttgctgaagcgggctatacgttacaatcg

SEQ ID NO: 139042 - DNA, 54 bp, Artificial
  Synthetic oligonucleotide
gcgaaaaagttatcgtaaatgccaagcagaaagaccgacatagtatcagagacc

SEQ ID NO: 139043 - DNA, 54 bp, Artificial
  Synthetic oligonucleotide
ccccacacattattcaaggtcttgagggtggcgagatcatgaatgagaagttac

SEQ ID NO: 139044 - DNA, 54 bp, Artificial
  Synthetic oligonucleotide
ctgcgtgcaatgttacacctgttcaatgaggtgcccattcaataacgaaatagc

SEQ ID NO: 139045 - DNA, 54 bp, Artificial
  Synthetic oligonucleotide
ccaactaacggagttttaggtaccgtgaagaagcttggaagtgcaatataagct

SEQ ID NO: 139046 - DNA, 54 bp, Artificial
  Synthetic oligonucleotide
ctcttaactatcctaccagctacaatataagcaccctcgataaccctcgaaggt

SEQ ID NO: 139047 - DNA, 54 bp, Artificial
  Synthetic oligonucleotide
ccagaagatatactcgcaattacgtatggattagtccaaccagtagccgaagaa

SEQ ID NO: 139048 - DNA, 53 bp, Artificial
  Synthetic oligonucleotide
taactataacgaaatagtaatcctcaacccattgcagactaggtaccaaatga

SEQ ID NO: 139049 - DNA, 53 bp, Artificial
  Synthetic oligonucleotide
gtgaaccttcaaaatctcaaaccttgcagtcttatcaggtggaggaacataaa

SEQ ID NO: 139050 - DNA, 53 bp, Artificial
  Synthetic oligonucleotide
cgacaagggggttttcaaacaaatatttcgccaaaaaatagacattgaaggca

SEQ ID NO: 139051 - DNA, 53 bp, Artificial
  Synthetic oligonucleotide
gccggaaaagtattcgataacgaggaagttcaagtgctttacttatctagagg

SEQ ID NO: 139052 - DNA, 52 bp, Artificial
  Synthetic oligonucleotide
actgctacctacgtaaatctaaataaaggacctgtaaacaaatcgtctttaa

SEQ ID NO: 139053 - DNA, 53 bp, Artificial
  Synthetic oligonucleotide
atttgacctggacctaggttctggacctaggacttagggcctcctggactact

SEQ ID NO: 139054 - DNA, 53 bp, Artificial
  Synthetic oligonucleotide
taataggtaatataggcatgcttggtggagctaacgtaggtgacaacgcaggt

SEQ ID NO: 139055 - DNA, 53 bp, Artificial
  Synthetic oligonucleotide
ccaatattttgacgatatcgtcgacatattgctatacgaatacagagacgaat

SEQ ID NO: 139056 - DNA, 53 bp, Artificial
  Synthetic oligonucleotide
atgttcataatagttctctaaccattctcttcgaacctctggattgacgcgtg

SEQ ID NO: 139057 - DNA, 52 bp, Artificial
  Synthetic oligonucleotide
tgggttggggttatcccgctaaaggggcggaggggtgtgaacggggcaatgc

SEQ ID NO: 139058 - DNA, 53 bp, Artificial
  Synthetic oligonucleotide
atatatcgtaaatggcgtagatttggcgggcggaaattccgcgaatattgctt

SEQ ID NO: 139059 - DNA, 53 bp, Artificial
  Synthetic oligonucleotide
tagtctgggtatagtgctatcttagtaacgtttttgttagcccaaagtctttg

SEQ ID NO: 139060 - DNA, 53 bp, Artificial
  Synthetic oligonucleotide
atgaggggatgatgagtagggtcagaattgacctatgataggacactcggcag

SEQ ID NO: 139061 - DNA, 51 bp, Artificial
  Synthetic oligonucleotide
catttcacgcaaaaaacttcccatacccaatcccgccgtgctttttttcct

SEQ ID NO: 139062 - DNA, 53 bp, Artificial
  Synthetic oligonucleotide
cgatatatcgatagtcctatcatagtcagtaattcttaacttgttgtctagag

SEQ ID NO: 139063 - DNA, 53 bp, Artificial
  Synthetic oligonucleotide
taggtctatctggatatcccgtagaatccatcataccgcttaatgcttgaact

SEQ ID NO: 139064 - DNA, 53 bp, Artificial
  Synthetic oligonucleotide
tgattccacgtcccaccacggataggagttctttagccatttacggctctcac

SEQ ID NO: 139065 - DNA, 53 bp, Artificial
  Synthetic oligonucleotide
taggcgcaataggcgaggctggcggtctagcgttagagtcggggttagcgaag

SEQ ID NO: 139066 - DNA, 53 bp, Artificial
  Synthetic oligonucleotide
tcagaggcggatgttgtcaagttagggttgaagagattggcacaagaatgggg

SEQ ID NO: 139067 - DNA, 53 bp, Artificial
  Synthetic oligonucleotide
ttgattctacgatagggaatttagtcccttcaaactcgtactcacctggagcc

SEQ ID NO: 139068 - DNA, 53 bp, Artificial
  Synthetic oligonucleotide
tcacgtttcaattgtgccccacggactagcatttcctcgatttgactactgct

SEQ ID NO: 139069 - DNA, 52 bp, Artificial
  Synthetic oligonucleotide
aaagaaattaggagaaggtgttttgtggggatcacgattaactatggggcgt

SEQ ID NO: 139070 - DNA, 53 bp, Artificial
  Synthetic oligonucleotide
aaactctcgtccttatcacagtgtccaccctttgatatcagaccaacgtaaac

SEQ ID NO: 139071 - DNA, 53 bp, Artificial
  Synthetic oligonucleotide
aggaggaaataatatagctggcgcgagtagcaatgcgacggcgaacgtgatag

SEQ ID NO: 139072 - DNA, 55 bp, Artificial
  Synthetic oligonucleotide
gggcagtttgtgatagcagaaaggcggggggctagttgtagttaataggtgaggg

SEQ ID NO: 139073 - DNA, 53 bp, Artificial
  Synthetic oligonucleotide
gtcccgtaaattggtttacttccggaaatttgatagataggcaaagcacctac

SEQ ID NO: 139074 - DNA, 53 bp, Artificial
  Synthetic oligonucleotide
ccagcccatcggtagcgctaggggccgcagtggtattagttgacacccgttat

SEQ ID NO: 139075 - DNA, 53 bp, Artificial
  Synthetic oligonucleotide
ctgctaaactatgaattacagtactacacctctgagataagtaacatcgagca

SEQ ID NO: 139076 - DNA, 53 bp, Artificial
  Synthetic oligonucleotide
gtctaagccctaaggtagttaacgcacgtctttatgccctatttatgggagtg

SEQ ID NO: 139077 - DNA, 53 bp, Artificial
  Synthetic oligonucleotide
aaaaggcataatctacaggaaatggcgtaggtttggcggtaggaagtatagag

SEQ ID NO: 139078 - DNA, 53 bp, Artificial
  Synthetic oligonucleotide
ggtagaggagtagtagacgctaaaggtcccttaatttcgatgttgcttgctac

SEQ ID NO: 139079 - DNA, 53 bp, Artificial
  Synthetic oligonucleotide
aggtttagagaagtagagggagaaccgctatcgtggaacgtgtggcttaacaa

SEQ ID NO: 139080 - DNA, 52 bp, Artificial
  Synthetic oligonucleotide
gatttcgaatttgcgaaaataattctaaggtgagaaaaaacggtcgtggttc

SEQ ID NO: 139081 - DNA, 53 bp, Artificial
  Synthetic oligonucleotide
aggctactgatggtagattattcggtaatcgtaattccttgcactgcaaacat

SEQ ID NO: 139082 - DNA, 53 bp, Artificial
  Synthetic oligonucleotide
acataatcgtaggggttatagtaatagcagcttcgctgataataacgtttggg

SEQ ID NO: 139083 - DNA, 60 bp, Artificial
  Synthetic oligonucleotide
gggctatagagattgcactgcagatcaaagactataacgctcaaactaggcatctgaagg

SEQ ID NO: 139084 - DNA, 52 bp, Artificial
  Synthetic oligonucleotide
actccgccatagtgtctataataagacccacagccttttcgaagtactatgt

SEQ ID NO: 139085 - DNA, 52 bp, Artificial
  Synthetic oligonucleotide
tcctcacggtctgtggggatacgtcatacgccctcgacttgctctccacaga

SEQ ID NO: 139086 - DNA, 52 bp, Artificial
  Synthetic oligonucleotide
atattcgaggcactagatactacagtactgactatagtactcactacagtgc

SEQ ID NO: 139087 - DNA, 52 bp, Artificial
  Synthetic oligonucleotide
tcgataaagggaaggcaatactcctaagaccattcaacccagtactagtatt

SEQ ID NO: 139088 - DNA, 52 bp, Artificial
  Synthetic oligonucleotide
ctgaagcttacgctattacagtcgagatgctgtctcatgatttacagaccaa

SEQ ID NO: 139089 - DNA, 52 bp, Artificial
  Synthetic oligonucleotide
ctactaaaggttttgctcagagaaaagattaaatgaaagcttaggcccaggg

SEQ ID NO: 139090 - DNA, 52 bp, Artificial
  Synthetic oligonucleotide
cattcctaattttggccggctggatatttaagacgtggtactatgctttggc

SEQ ID NO: 139091 - DNA, 52 bp, Artificial
  Synthetic oligonucleotide
gagggtgtagcgctagccggatacgccggaataagagacacgaggcctggta

SEQ ID NO: 139092 - DNA, 52 bp, Artificial
  Synthetic oligonucleotide
gttattagaagagtcacttagaattgcgtttcgtaatgggacactggaatgg

SEQ ID NO: 139093 - DNA, 52 bp, Artificial
  Synthetic oligonucleotide
gataatgggagttcatgtaatggctgagaacgctgcagaatttataggcgag

SEQ ID NO: 139094 - DNA, 56 bp, Artificial
  Synthetic oligonucleotide
gtgaattttgacgatagaaacgtgtggctaacgtttgaaggctatatttatcttaa

SEQ ID NO: 139095 - DNA, 52 bp, Artificial
  Synthetic oligonucleotide
gtatgcccgtcactgaatctaatgtttagcgtcttgttttgtaattcgtacg

SEQ ID NO: 139096 - DNA, 51 bp, Artificial
  Synthetic oligonucleotide
cacgcttaggactaactctaactcaacgtaagttaaaagcccgtaattacc

SEQ ID NO: 139097 - DNA, 52 bp, Artificial
  Synthetic oligonucleotide
gggttttacagaggtcactcaaatctagtgatagaatgcccattttgactta

SEQ ID NO: 139098 - DNA, 52 bp, Artificial
  Synthetic oligonucleotide
taaagtaccgttcgtaaacgcgatgcgcagtggctctttgggcaggggtgta

SEQ ID NO: 139099 - DNA, 52 bp, Artificial
  Synthetic oligonucleotide
taagccctagcatgttcagaagtacaacaaaccaagacgtaaggctaaatag

SEQ ID NO: 139100 - DNA, 52 bp, Artificial
  Synthetic oligonucleotide
accaacagactccagaagaggtaagaggcttatggctcaacaacattgacag

SEQ ID NO: 139101 - DNA, 52 bp, Artificial
  Synthetic oligonucleotide
cctatcggcaactagtgcgtgtaataatgctccgcttagctcagatatataa

SEQ ID NO: 139102 - DNA, 52 bp, Artificial
  Synthetic oligonucleotide
gaatccgcgaattcattatagttatcggcacaaaaccaatctccgacctttt

SEQ ID NO: 139103 - DNA, 52 bp, Artificial
  Synthetic oligonucleotide
gacacccttggcaaactcgttgcggttagagactggaaacttgcgtctaagc

SEQ ID NO: 139104 - DNA, 52 bp, Artificial
  Synthetic oligonucleotide
atcttcgtcccgtggattgggcaaacggtagaagtgcgagacggattaacta

SEQ ID NO: 139105 - DNA, 54 bp, Artificial
  Synthetic oligonucleotide
gtctttcccacccccttggcattggaggtcttgttggcgttatggtttcaactg

SEQ ID NO: 139106 - DNA, 51 bp, Artificial
  Synthetic oligonucleotide
aggagtctcgatccgtctctcacccccattggtccgaatctggctcctggc

SEQ ID NO: 139107 - DNA, 51 bp, Artificial
  Synthetic oligonucleotide
gaggctagccaacgaccagagctaaacagccacctagggaccgactgcgca

SEQ ID NO: 139108 - DNA, 51 bp, Artificial
  Synthetic oligonucleotide
ttttcgaggctgttatacaaccttctctagaaagagacggaatttcgccaa

SEQ ID NO: 139109 - DNA, 51 bp, Artificial
  Synthetic oligonucleotide
gataaatgaagcagcataagtgtatattgtgatcccacctaccgcaaataa

SEQ ID NO: 139110 - DNA, 51 bp, Artificial
  Synthetic oligonucleotide
agctgctccgagcccgaagcccatagataccaagccggttatgaggcccct

SEQ ID NO: 139111 - DNA, 51 bp, Artificial
  Synthetic oligonucleotide
tctagtattgtcctaccttctggcgtgctataaacatcccacggtctctgc

SEQ ID NO: 139112 - DNA, 51 bp, Artificial
  Synthetic oligonucleotide
actcatcaatgcaactaatgagttaccggaagtaaaagatcaaagttatgg

SEQ ID NO: 139113 - DNA, 51 bp, Artificial
  Synthetic oligonucleotide
aaccgttagaatagcctacacatttctcgcagattaagcttccacatttct

SEQ ID NO: 139114 - DNA, 51 bp, Artificial
  Synthetic oligonucleotide
gcaactcccttcaccagaacgtacatcataataggggaggcgagcaaggac

SEQ ID NO: 139115 - DNA, 51 bp, Artificial
  Synthetic oligonucleotide
accggaagcgatagcccaaccgaagcgctcttccctctaccacgtggcgct

SEQ ID NO: 139116 - DNA, 57 bp, Artificial
  Synthetic oligonucleotide
atcttcctaaatgaggctctgcctaagtacatactaccgagaccagaaggagggttc

SEQ ID NO: 139117 - DNA, 58 bp, Artificial
  Synthetic oligonucleotide
ggggaggggctctcccctggagcaagttgattatcatcggtgagactccctgctttaa

SEQ ID NO: 139118 - DNA, 51 bp, Artificial
  Synthetic oligonucleotide
ttagccccagttcagctcagtagaatagataattcgaacgagaagaaagca

SEQ ID NO: 139119 - DNA, 51 bp, Artificial
  Synthetic oligonucleotide
accactgcagctaaagtggctccgaagccccagaataggccgaagcccaga

SEQ ID NO: 139120 - DNA, 51 bp, Artificial
  Synthetic oligonucleotide
gccgtaaatcgcaagaaggcttattgcgtcgtatacataactagcccatcc

SEQ ID NO: 139121 - DNA, 51 bp, Artificial
  Synthetic oligonucleotide
gatttctgcggtaaactggggagtttaacgggtgaaagacggtgataggcg

SEQ ID NO: 139122 - DNA, 51 bp, Artificial
  Synthetic oligonucleotide
cttctaaccttatgaagaacccctttgcaagtattcgccttattcctcccg

SEQ ID NO: 139123 - DNA, 51 bp, Artificial
  Synthetic oligonucleotide
gcccctttaaaatgcgagatagcacatagtaaggagaagttagattagctt

SEQ ID NO: 139124 - DNA, 51 bp, Artificial
  Synthetic oligonucleotide
caggggttggctgccctaccgggtgtgagcagatcagggatgacaacttcg

SEQ ID NO: 139125 - DNA, 51 bp, Artificial
  Synthetic oligonucleotide
cgcgtcctggacagctcccatagtggtggcgattctagcatatctccttat

SEQ ID NO: 139126 - DNA, 51 bp, Artificial
  Synthetic oligonucleotide
cccatatccccattacttccctggacatgcggtgcctccccatccgctagc

SEQ ID NO: 139127 - DNA, 51 bp, Artificial
  Synthetic oligonucleotide
gctagtgtgatttagactatacgggtgatgtcagtgtgtaatagtgctaat

SEQ ID NO: 139128 - DNA, 60 bp, Artificial
  Synthetic oligonucleotide
ccacgtcatatgtggtatatagaggtgtatgagttggattcaccagtaagaaaagactat

SEQ ID NO: 139129 - DNA, 51 bp, Artificial
  Synthetic oligonucleotide
tagcgtacaatctactactcctcagcttaagcccgaagatcttgagcctaa

SEQ ID NO: 139130 - DNA, 51 bp, Artificial
  Synthetic oligonucleotide
gctgatctgcaatctttcaacagttatgtcgttggtccaggctcgtgtatc

SEQ ID NO: 139131 - DNA, 51 bp, Artificial
  Synthetic oligonucleotide
cccaacgcaggggccgtctgccttgaaaactggagcggatctaggtggagg

SEQ ID NO: 139132 - DNA, 51 bp, Artificial
  Synthetic oligonucleotide
ggggtactttctttagctgcatatatgttgcaaaatgcctcctcaaggcgt

SEQ ID NO: 139133 - DNA, 51 bp, Artificial
  Synthetic oligonucleotide
agttaccaaccacaactgtagaaagaaacgacattacggtagggcatttgg

SEQ ID NO: 139134 - DNA, 51 bp, Artificial
  Synthetic oligonucleotide
atggactttggaagagacgtttccaaaactaaaagagctctacgacagctt

SEQ ID NO: 139135 - DNA, 51 bp, Artificial
  Synthetic oligonucleotide
atggccgcgaagggacctagggcggtcgctacgtaaccgtagtagcctcca

SEQ ID NO: 139136 - DNA, 51 bp, Artificial
  Synthetic oligonucleotide
agggacctagggcggtcgctacgtaaccgtagtagcctccagcgctagcgt

SEQ ID NO: 139137 - DNA, 51 bp, Artificial
  Synthetic oligonucleotide
aggctatctataacctccagcctagatctgaaagtttcgtcactcaggagg

SEQ ID NO: 139138 - DNA, 51 bp, Artificial
  Synthetic oligonucleotide
cctactggacgagacctgtcgcgagatacaagactgaagacggtcatttta

SEQ ID NO: 139139 - DNA, 57 bp, Artificial
  Synthetic oligonucleotide
gtctccgtacctatcgctgaagtgaacgcagacggagggcgtcggtactcccggtga

SEQ ID NO: 139140 - DNA, 51 bp, Artificial
  Synthetic oligonucleotide
cctgagtgaaagccctggcccctcgatgcatgaatttgtatgatcgatgca

SEQ ID NO: 139141 - DNA, 51 bp, Artificial
  Synthetic oligonucleotide
agtttatcatggctcagagtagcccacgcggacaagaattagccgtaaagt

SEQ ID NO: 139142 - DNA, 51 bp, Artificial
  Synthetic oligonucleotide
catgcccagacctaaccccgcgatcggtcctccgatgggagagtactgaga

SEQ ID NO: 139143 - DNA, 50 bp, Artificial
  Synthetic oligonucleotide
cacctcacttggggacctgaacgcccagatctcggctaaccttgtgggga

SEQ ID NO: 139144 - DNA, 50 bp, Artificial
  Synthetic oligonucleotide
aactgtgcccactcccaagggaggcggatccttcgggctagcgagggaga

SEQ ID NO: 139145 - DNA, 50 bp, Artificial
  Synthetic oligonucleotide
cacgcgatggcagaggccctagccaactctccgcaggggtatagggtgta

SEQ ID NO: 139146 - DNA, 50 bp, Artificial
  Synthetic oligonucleotide
ttactgcatagaacaaggctttagaggagtaggtagaaaatcattttcac

SEQ ID NO: 139147 - DNA, 50 bp, Artificial
  Synthetic oligonucleotide
gacggccttagtcagggtgggagccacgctagctaggtacggggtgaaga

SEQ ID NO: 139148 - DNA, 50 bp, Artificial
  Synthetic oligonucleotide
aagcccgtggttgtttgcgtctactcagggaggacgaaggacagcggagc

SEQ ID NO: 139149 - DNA, 50 bp, Artificial
  Synthetic oligonucleotide
caccggaatggtacgtggccagagtggacaggctccctacatggggccta

SEQ ID NO: 139150 - DNA, 58 bp, Artificial
  Synthetic oligonucleotide
ccagaagaagtaagggacctatggctctataatatagacagtgtatggagtttcgtta

SEQ ID NO: 139151 - DNA, 50 bp, Artificial
  Synthetic oligonucleotide
ccgctcgcccctatggggtgacccttagagttcagccctccgcttgtgtt

SEQ ID NO: 139152 - DNA, 50 bp, Artificial
  Synthetic oligonucleotide
acaacctcagctcctatcccaggtaagggcagggcgttggtcccaggctt

SEQ ID NO: 139153 - DNA, 50 bp, Artificial
  Synthetic oligonucleotide
taagctccctggaagagtttcagctatacggcttagactatgatgaagct

SEQ ID NO: 139154 - DNA, 50 bp, Artificial
  Synthetic oligonucleotide
ggggagggcttacctatttaggctcataaggcctataccaaacactccaa

SEQ ID NO: 139155 - DNA, 50 bp, Artificial
  Synthetic oligonucleotide
gtggcccaggtaatcaataacgttgtttgcggttacggagataatcccgg

SEQ ID NO: 139156 - DNA, 50 bp, Artificial
  Synthetic oligonucleotide
aaaagcattataactcctagcaatatcgctaaaccattggccagagggtt

SEQ ID NO: 139157 - DNA, 50 bp, Artificial
  Synthetic oligonucleotide
ccaccctcacaatgggaggacccctacatacaggtgggcgtggtcaggga

SEQ ID NO: 139158 - DNA, 50 bp, Artificial
  Synthetic oligonucleotide
ccagggaacgcctcacggcctgggtaaggttcgcggttaaccctgagacg

SEQ ID NO: 139159 - DNA, 50 bp, Artificial
  Synthetic oligonucleotide
gagcgaaccccctgtctacccctcctcgagcactctgcttagcgtctcgg

SEQ ID NO: 139160 - DNA, 50 bp, Artificial
  Synthetic oligonucleotide
aaaatggggcgttcctccctactcgggtcccatgggctccatgtggtcat

SEQ ID NO: 139161 - DNA, 55 bp, Artificial
  Synthetic oligonucleotide
gtcggcattagcttgtaaaagcgtcattacgaagttagggttgtaaactattatc

SEQ ID NO: 139162 - DNA, 50 bp, Artificial
  Synthetic oligonucleotide
gagatagctaacatggacacacctaacgaatctcctaactccctagcctt

SEQ ID NO: 139163 - DNA, 50 bp, Artificial
  Synthetic oligonucleotide
ccatagctatgccgtctattacaaccggtgtcgtgaacgttctaggagtc

SEQ ID NO: 139164 - DNA, 50 bp, Artificial
  Synthetic oligonucleotide
caggttactggtgcccgcattacgccaagcgggtaaagaggctggcgaga

SEQ ID NO: 139165 - DNA, 50 bp, Artificial
  Synthetic oligonucleotide
aaagctgaggagcgcctgcctgagctagggcgtgagccaatgacggcccc

SEQ ID NO: 139166 - DNA, 50 bp, Artificial
  Synthetic oligonucleotide
cccagaccccgtgagaaggcctacggcagggcaagtggcgactaacctgg

SEQ ID NO: 139167 - DNA, 50 bp, Artificial
  Synthetic oligonucleotide
aacacgataaggcaaacagtattaataaagcgttaatcctacctccaccg

SEQ ID NO: 139168 - DNA, 50 bp, Artificial
  Synthetic oligonucleotide
gatacgtaggatcccggaattatgtctaatgaaacttttacttcccccct

SEQ ID NO: 139169 - DNA, 50 bp, Artificial
  Synthetic oligonucleotide
aaccctgagacggtcacgtgggcctccctcctatccacgacggagcgaac

SEQ ID NO: 139170 - DNA, 50 bp, Artificial
  Synthetic oligonucleotide
aacgacgtggcttggaatcttcgcttctgcgaccctggcactcggggttg

SEQ ID NO: 139171 - DNA, 50 bp, Artificial
  Synthetic oligonucleotide
gactctccatggggcgaatattatgagaagctaggtaaaagcggccataa

SEQ ID NO: 139172 - DNA, 59 bp, Artificial
  Synthetic oligonucleotide
cctaaggcgttagagactttcaaacagtgggtagatgaccaatggattctcctatatga

SEQ ID NO: 139173 - DNA, 50 bp, Artificial
  Synthetic oligonucleotide
aacgccacaggcataactgtgcccactcccaagggaggcggatccttcgg

SEQ ID NO: 139174 - DNA, 50 bp, Artificial
  Synthetic oligonucleotide
aacggagtcctcaccaacatgcctcccacgggaccctataggggtctggg

SEQ ID NO: 139175 - DNA, 50 bp, Artificial
  Synthetic oligonucleotide
ccccgttccacgatctcccaatggcgaaacctatcactgtgagcgggcgg

SEQ ID NO: 139176 - DNA, 50 bp, Artificial
  Synthetic oligonucleotide
gcgcgttgggggagggaaagccgaagagcgaacacacgtcacacgtccct

SEQ ID NO: 139177 - DNA, 50 bp, Artificial
  Synthetic oligonucleotide
tcacatagggtattatgcagaatgcccattgacatttgaggataagctct

SEQ ID NO: 139178 - DNA, 50 bp, Artificial
  Synthetic oligonucleotide
agggtgattgcgttcgctggggcatggcttaggactaggaggaggttcga

SEQ ID NO: 139179 - DNA, 50 bp, Artificial
  Synthetic oligonucleotide
agcgcgtcatacgccgtgtacctatccgtggcgaggacacatgcaagggg

SEQ ID NO: 139180 - DNA, 50 bp, Artificial
  Synthetic oligonucleotide
agctccacatagggtagaggtctctgagttggccccgtcaggactgcggc

SEQ ID NO: 139181 - DNA, 50 bp, Artificial
  Synthetic oligonucleotide
gcggccaagactgtgcccgtccttcccttaccagctacgcagtgaacgac

SEQ ID NO: 139182 - DNA, 50 bp, Artificial
  Synthetic oligonucleotide
tcgccggcgttgacactatgtccggcaattcaggaggcatgtctggccag

SEQ ID NO: 139183 - DNA, 55 bp, Artificial
  Synthetic oligonucleotide
cctaaacaccccgtgatagctatcatattttcagaacaccgaaaggtatttaaca

SEQ ID NO: 139184 - DNA, 50 bp, Artificial
  Synthetic oligonucleotide
aggaaccccctgattggggagccctcggccagatactgcacagtgaagcc

SEQ ID NO: 139185 - DNA, 50 bp, Artificial
  Synthetic oligonucleotide
tcgcaaaagagacttgaatcgccccattcacccaatttcgccggagctct

SEQ ID NO: 139186 - DNA, 50 bp, Artificial
  Synthetic oligonucleotide
agggattaccccacccggtctgcgctgagccatagggcataagggcgtag

SEQ ID NO: 139187 - DNA, 50 bp, Artificial
  Synthetic oligonucleotide
tcgacagaggcttgaacggtttggggacgcacttcgaggttccacgaggg

SEQ ID NO: 139188 - DNA, 50 bp, Artificial
  Synthetic oligonucleotide
aggacagggcatacgggagagggacttctgacatgaagggggccatcgcg

SEQ ID NO: 139189 - DNA, 50 bp, Artificial
  Synthetic oligonucleotide
gctaccgcgtccttaacgtattcgttctcagggtctatcccatttatccc

SEQ ID NO: 139190 - DNA, 50 bp, Artificial
  Synthetic oligonucleotide
aggcggagtccagaaggctctgccctatacccctgtggctaactacgcga

SEQ ID NO: 139191 - DNA, 50 bp, Artificial
  Synthetic oligonucleotide
ctcgtgggtcatctaagcggtttcctagttagacgtgggatcccgcttca

SEQ ID NO: 139192 - DNA, 50 bp, Artificial
  Synthetic oligonucleotide
tccggaccctccctcaagtaccccgagagcgtaagggataccccaacgag

SEQ ID NO: 139193 - DNA, 50 bp, Artificial
  Synthetic oligonucleotide
aggatcctcgactggcttaggtccgacggcgcacaggttaccaggccgtc

SEQ ID NO: 139194 - DNA, 59 bp, Artificial
  Synthetic oligonucleotide
gggggagtttgtcaagaacaacatctgccgggatattgcatcaaggtttgttgaattgc

SEQ ID NO: 139195 - DNA, 50 bp, Artificial
  Synthetic oligonucleotide
ctcctaacttcagtgacgtatgacgcgacttcacctggtttccgtaatat

SEQ ID NO: 139196 - DNA, 50 bp, Artificial
  Synthetic oligonucleotide
attatagcccctccacgcgttgccaaggtgcctgagggatagcccgacat

SEQ ID NO: 139197 - DNA, 50 bp, Artificial
  Synthetic oligonucleotide
acccatcccgtgggttggtgtcccgttcacaacctccccgttggaatgca

SEQ ID NO: 139198 - DNA, 50 bp, Artificial
  Synthetic oligonucleotide
accccctgaactttccgtaactcagggcaccaaccagtgtcgtgggcgga

SEQ ID NO: 139199 - DNA, 50 bp, Artificial
  Synthetic oligonucleotide
accccctgcgggaccacggccttacctgaagaggacaccagacggtctac

SEQ ID NO: 139200 - DNA, 50 bp, Artificial
  Synthetic oligonucleotide
acctccccgccagggaacgcctcacggcctgggtaaggttcgcggttaac

SEQ ID NO: 139201 - DNA, 50 bp, Artificial
  Synthetic oligonucleotide
acctgccagtcaatgttgtcgtgggggcatgccttgtagcagtccgaggc

SEQ ID NO: 139202 - DNA, 50 bp, Artificial
  Synthetic oligonucleotide
acggcgcagttgccgcggtgcccctcttcctagcagagatatcctgggga

SEQ ID NO: 139203 - DNA, 50 bp, Artificial
  Synthetic oligonucleotide
actattaggttggatcctaagaatggagacttgtgggtacctaaagacca

SEQ ID NO: 139204 - DNA, 50 bp, Artificial
  Synthetic oligonucleotide
tgccctatgccgctcgcccctatggggtgacccttagagttcagccctcc

SEQ ID NO: 139205 - DNA, 53 bp, Artificial
  Synthetic oligonucleotide
gggggtgtgcatgtatgcctaataaatactctgttaaacgtattaaaaaagtt

SEQ ID NO: 139206 - DNA, 50 bp, Artificial
  Synthetic oligonucleotide
tgccctaagagtcctggccccagttcgactgaaaggggtgccccgcttcc

SEQ ID NO: 139207 - DNA, 50 bp, Artificial
  Synthetic oligonucleotide
cgcgcatagcgttgtctgatcgcgaggaggtgcgtctcagagctgaacgg

SEQ ID NO: 139208 - DNA, 50 bp, Artificial
  Synthetic oligonucleotide
ggagttcctatatcggcccatattccgtcgtacttataaactgaaacgca

SEQ ID NO: 139209 - DNA, 50 bp, Artificial
  Synthetic oligonucleotide
atagggggcaacgagacgttctccggagctcctgcgttagccgcactagc

SEQ ID NO: 139210 - DNA, 50 bp, Artificial
  Synthetic oligonucleotide
cgggggaaggtagggctttctcagtaggggcggacctaggctcgatctcg

SEQ ID NO: 139211 - DNA, 50 bp, Artificial
  Synthetic oligonucleotide
ctatttcacgataggtgaccctaatagggatcctaatttcgggataaatc

SEQ ID NO: 139212 - DNA, 50 bp, Artificial
  Synthetic oligonucleotide
tcaaggtaagggatccgacaacttgcctgcaatgtagaactgtagactgt

SEQ ID NO: 139213 - DNA, 50 bp, Artificial
  Synthetic oligonucleotide
aggtgggcgatatacccttcctctcggcgaatctcgctaaggcctccgct

SEQ ID NO: 139214 - DNA, 50 bp, Artificial
  Synthetic oligonucleotide
aggtaggatagcggagagacctcaaccgtcaggtacctccccgccaggga

SEQ ID NO: 139215 - DNA, 52 bp, Artificial
  Synthetic oligonucleotide
ccggcgattgtcgacgaaatgggaggcgttctaacggggaaaaacgcacagg

SEQ ID NO: 139216 - DNA, 60 bp, Artificial
  Synthetic oligonucleotide
cgttcggccctgacagaagcttgagcttcgaaaatcaattacaagcgatgatatactact

SEQ ID NO: 139217 - DNA, 53 bp, Artificial
  Synthetic oligonucleotide
gggtgcgtgccccacaggtcgcgggtctaccccttgcctttcaattccttttg

SEQ ID NO: 139218 - DNA, 55 bp, Artificial
  Synthetic oligonucleotide
ccagtaaagtaaaccgttaaccactctaatcctagtctcgtcaactgcataataa

SEQ ID NO: 139219 - DNA, 60 bp, Artificial
  Synthetic oligonucleotide
ggtttgctaaggagacgaaagcattatgacgtgatactcatagatgacgcgggcgtacat

SEQ ID NO: 139220 - DNA, 59 bp, Artificial
  Synthetic oligonucleotide
gtcatatcatctgggtaatcaattatgcaaaagaactctaactcgtaaaattgacaatt

SEQ ID NO: 139221 - DNA, 59 bp, Artificial
  Synthetic oligonucleotide
gtcacgtctaaagcccttcgtcgaaaacagagtgttgaacaaagtcacatcgagcagta

SEQ ID NO: 139222 - DNA, 60 bp, Artificial
  Synthetic oligonucleotide
gtcacagctataactgatcagcgtgaaatactaataggccttagaagcctatataagcac

SEQ ID NO: 139223 - DNA, 58 bp, Artificial
  Synthetic oligonucleotide
gtactcccggtgattccctaggagtcatgagcttgtttacgtctaagttctgctgtaa

SEQ ID NO: 139224 - DNA, 57 bp, Artificial
  Synthetic oligonucleotide
gtatcaaattctctattgcaaaggggacaaatgtacatacttacacctcagttaacg

SEQ ID NO: 139225 - DNA, 58 bp, Artificial
  Synthetic oligonucleotide
gtagcttttccttacgaccgctccactttcagacccacatataacgacgctatagctg

SEQ ID NO: 139226 - DNA, 60 bp, Artificial
  Synthetic oligonucleotide
ccccagactatgagacacaacaagagattgagaacccatacacagttacgaaccgtgcca

SEQ ID NO: 139227 - DNA, 59 bp, Artificial
  Synthetic oligonucleotide
atgccccaggtcactagatactttcaaacaatgggcgggtgacaagtggatcacattgt

SEQ ID NO: 139228 - DNA, 58 bp, Artificial
  Synthetic oligonucleotide
cccccactggatttttctcactgccttagatgcagaatacagtgggtctaaattggat

SEQ ID NO: 139229 - DNA, 56 bp, Artificial
  Synthetic oligonucleotide
cccccccagccccgacgaaatggggcgtgccgtgatattgcattagtaggagtctc

SEQ ID NO: 139230 - DNA, 56 bp, Artificial
  Synthetic oligonucleotide
ccccgccacaaaattcaagttagccttcatgctcttaggaccccgtgattccggca

SEQ ID NO: 139231 - DNA, 59 bp, Artificial
  Synthetic oligonucleotide
caattcgcttatgtcattgacggagcacccactctcccctagactcttccctactactc

SEQ ID NO: 139232 - DNA, 56 bp, Artificial
  Synthetic oligonucleotide
ggacttagtgttatacctattaagtacaaagataagaaacccgcattagagagctg

SEQ ID NO: 139233 - DNA, 58 bp, Artificial
  Synthetic oligonucleotide
cacaggctaaagcactatctagttagcaagggcgggcgtggtagaagagacgtggtaa

SEQ ID NO: 139234 - DNA, 60 bp, Artificial
  Synthetic oligonucleotide
cacaggtaatgagttacggcttattctcacagctttcgaaattgcaagattgccggtgta

SEQ ID NO: 139235 - DNA, 59 bp, Artificial
  Synthetic oligonucleotide
cacagttacgaaccgtgccataagtgaactcgtggatcctaaagacactatgttctatc

SEQ ID NO: 139236 - DNA, 60 bp, Artificial
  Synthetic oligonucleotide
gtttcatgcccatatggaagacactgttttaacgacagtagtatatgcggtcacataggg

SEQ ID NO: 139237 - DNA, 54 bp, Artificial
  Synthetic oligonucleotide
caccacctcctaaaagtgtaagtgacgcgtttctgtaaaatttactgagcttgg

SEQ ID NO: 139238 - DNA, 60 bp, Artificial
  Synthetic oligonucleotide
aagtgagtgccaggttatatagagtaagtgccgtctcacgtggggtcattgcatatctca

SEQ ID NO: 139239 - DNA, 60 bp, Artificial
  Synthetic oligonucleotide
gaaagcctgagctgcagcaggtgttaggtgaactagcagagcctgagcctattgatgtaa

SEQ ID NO: 139240 - DNA, 59 bp, Artificial
  Synthetic oligonucleotide
taatcctcttctcagcgagagtgatctaaagaaattgcgtgatatttggaagaacgtgt

SEQ ID NO: 139241 - DNA, 58 bp, Artificial
  Synthetic oligonucleotide
cagtggttccgggaacaccctggcgaagttacctctctcaaggctctatctctcaatc

SEQ ID NO: 139242 - DNA, 53 bp, Artificial
  Synthetic oligonucleotide
ggcccgtaacagggtcgaagaaggggagctccttctcaacgttagacgaccta

SEQ ID NO: 139243 - DNA, 56 bp, Artificial
  Synthetic oligonucleotide
actttgagggctgttagtttgcttacgcatactcttttgggtgttaggcagactgg

SEQ ID NO: 139244 - DNA, 54 bp, Artificial
  Synthetic oligonucleotide
aggactaagcgttatactggtaatggtgtggtgtctaagccttctaaacgtagg

SEQ ID NO: 139245 - DNA, 58 bp, Artificial
  Synthetic oligonucleotide
gcctagtaacaccttggcgaatgtaaaattccaccatccgagcaagatcttccgtgct

SEQ ID NO: 139246 - DNA, 58 bp, Artificial
  Synthetic oligonucleotide
acacattcatatcagtagagtatagtgacgatcacggcgaaaacaatgcagagtggct

SEQ ID NO: 139247 - DNA, 58 bp, Artificial
  Synthetic oligonucleotide
ttctacaccgtcatcttcaagcgccgtggaaggttctattgggtcctcgactaccatc

SEQ ID NO: 139248 - DNA, 50 bp, Artificial
  Synthetic oligonucleotide
aatcctcggaacgatagttaccccctacgtattaggagaagacccaaaac

SEQ ID NO: 139249 - DNA, 57 bp, Artificial
  Synthetic oligonucleotide
tctagatagggtagatgccacttgctaagcttaactagggaaaacttatatttagac

SEQ ID NO: 139250 - DNA, 54 bp, Artificial
  Synthetic oligonucleotide
tcccaattaacaaatcctattttgtccccgggttccttcagaatattcatccca

SEQ ID NO: 139251 - DNA, 56 bp, Artificial
  Synthetic oligonucleotide
gtgggtcgagaaaaaactacacgaggacctcacaagatattacacccacagaacgc

SEQ ID NO: 139252 - DNA, 57 bp, Artificial
  Synthetic oligonucleotide
acgagcttcgcagcgggatttatgatatggctcgacgatgtaactggtcacgcactg

SEQ ID NO: 139253 - DNA, 57 bp, Artificial
  Synthetic oligonucleotide
aggctgaggatgctcttaagtgggttctgagcctgatgcacaggcaggtagatttta

SEQ ID NO: 139254 - DNA, 55 bp, Artificial
  Synthetic oligonucleotide
ggtggttccaactatttgcgaaccagcggaggaggattgatcctagctttcgttt

SEQ ID NO: 139255 - DNA, 56 bp, Artificial
  Synthetic oligonucleotide
cacgatcaaggagtaaatgccgcagccaatgagcgctctgggatgagcgtgagtaa

SEQ ID NO: 139256 - DNA, 56 bp, Artificial
  Synthetic oligonucleotide
ggggtctctctatttgttcggtctgcagttatggatttggaatttgatgactcctc

SEQ ID NO: 139257 - DNA, 56 bp, Artificial
  Synthetic oligonucleotide
gtagaggttgctttctaccttttcatcgctttggttgttatctgggtgttcgtcag

SEQ ID NO: 139258 - DNA, 55 bp, Artificial
  Synthetic oligonucleotide
gagacagcgcttcgccgagactgccatagagatcctcagaaagtacaacctcgac

SEQ ID NO: 139259 - DNA, 55 bp, Artificial
  Synthetic oligonucleotide
agtgtatactgacatcctttcaaacttgctaggggaacctgtctctttaagccct

SEQ ID NO: 139260 - DNA, 55 bp, Artificial
  Synthetic oligonucleotide
gagatacccggctacacggtccaagtagagaattggaggtaatgctcgtacgggg

SEQ ID NO: 139261 - DNA, 59 bp, Artificial
  Synthetic oligonucleotide
gtcgcgtcaagattgacatctataaacttcggaagaaactcttctggattaggcgtaga

SEQ ID NO: 139262 - DNA, 55 bp, Artificial
  Synthetic oligonucleotide
caaaccttattcccggaactacaaacttcccatcatagaccattccaaccagcgc

SEQ ID NO: 139263 - DNA, 55 bp, Artificial
  Synthetic oligonucleotide
gacttcaatgtttgggtgggcgataggtattactctcttcctcacgactacgttg

SEQ ID NO: 139264 - DNA, 55 bp, Artificial
  Synthetic oligonucleotide
gacgctcgacttatccattataacggccttgcttgagttgagtccactcgctccc

SEQ ID NO: 139265 - DNA, 55 bp, Artificial
  Synthetic oligonucleotide
ctcaagtagtcatctaggagccccataaccctctctgggaagacgtaaacacccg

SEQ ID NO: 139266 - DNA, 55 bp, Artificial
  Synthetic oligonucleotide
ctcaagcaaagcggagaagaatatgtagtaaccctcatcactctctctaacctct

SEQ ID NO: 139267 - DNA, 54 bp, Artificial
  Synthetic oligonucleotide
gagatctcactaacatttggggcctcgataggggagaaaactgaaaacgttagg

SEQ ID NO: 139268 - DNA, 55 bp, Artificial
  Synthetic oligonucleotide
agtccgtgtggcactcttcctcacgcctcatgtagcggaccgttccgtagacgtg

SEQ ID NO: 139269 - DNA, 55 bp, Artificial
  Synthetic oligonucleotide
caacggttaaagctaaagccatggttgcgactccaataacaattgccgtgagaac

SEQ ID NO: 139270 - DNA, 55 bp, Artificial
  Synthetic oligonucleotide
gagcataaggacaggtctgttagggttcttttctctgagcggattggtaagttgt

SEQ ID NO: 139271 - DNA, 55 bp, Artificial
  Synthetic oligonucleotide
gagcgactatgcagacttaagaccaatctctggaactaacgctaaccaggccgta

SEQ ID NO: 139272 - DNA, 52 bp, Artificial
  Synthetic oligonucleotide
agatggtgtatactaacgttaaggccgggccgaactattatgacccggcttt

SEQ ID NO: 139273 - DNA, 55 bp, Artificial
  Synthetic oligonucleotide
gagcgtccttgagatttgtcttccattcaccatgacgtaaacctgctccccgggg

SEQ ID NO: 139274 - DNA, 55 bp, Artificial
  Synthetic oligonucleotide
gaggagcacgtcgtctacatcggaaagaagccggttatgaactacgtcctggccg

SEQ ID NO: 139275 - DNA, 55 bp, Artificial
  Synthetic oligonucleotide
gaggttgccgttctgccgttagttgcaaaggagccactaacaacgatagcctaca

SEQ ID NO: 139276 - DNA, 55 bp, Artificial
  Synthetic oligonucleotide
caaggggagggcatcagcgcaattttcgaatgaggcgaagctcactcgagagggg

SEQ ID NO: 139277 - DNA, 50 bp, Artificial
  Synthetic oligonucleotide
aggggtttccttgaatccccgttcacacggaaatggttattaatccgggc

SEQ ID NO: 139278 - DNA, 55 bp, Artificial
  Synthetic oligonucleotide
gatgtgaactggaggagaactctcggcttggtagtgatactgtttctgctgagcg

SEQ ID NO: 139279 - DNA, 55 bp, Artificial
  Synthetic oligonucleotide
gattgcaacgaatgccattgcaaaggttatcggcatcttttcagctaaaccgccc

SEQ ID NO: 139280 - DNA, 54 bp, Artificial
  Synthetic oligonucleotide
ctattttgtccccgggttccttcagaatattcatcccactggagacagggaccc

SEQ ID NO: 139281 - DNA, 55 bp, Artificial
  Synthetic oligonucleotide
atggatcgttggttaccttggacagcctcatatagtaacgagatatatgagcgtt

SEQ ID NO: 139282 - DNA, 55 bp, Artificial
  Synthetic oligonucleotide
ctggagaggtcgccaggttccacatcgaggccggtgggtcctacaccttcgagct

SEQ ID NO: 139283 - DNA, 59 bp, Artificial
  Synthetic oligonucleotide
tcctcaggtcttcttcgagctcaagtatgcgtcgaggaagcttttcgtcaattttgtta

SEQ ID NO: 139284 - DNA, 55 bp, Artificial
  Synthetic oligonucleotide
ctgataggagttctgtcgccgatagcgtctttaatcccctacattggaggcgcct

SEQ ID NO: 139285 - DNA, 55 bp, Artificial
  Synthetic oligonucleotide
ctgaggaccacgagctttatgtggatactattcacagctccaagggtctcgaagc

SEQ ID NO: 139286 - DNA, 55 bp, Artificial
  Synthetic oligonucleotide
ctgacgggatcaacgacacgggatattcctacaggtacacccggcacgatagtgg

SEQ ID NO: 139287 - DNA, 54 bp, Artificial
  Synthetic oligonucleotide
ctgggataatgacctcggataccttaacgtacccgtcggaatagactgtaaggc

SEQ ID NO: 139288 - DNA, 55 bp, Artificial
  Synthetic oligonucleotide
ctggtctatcggcctgtgcctcatgcggaaacccttaatgtagggtgtctgacag

SEQ ID NO: 139289 - DNA, 55 bp, Artificial
  Synthetic oligonucleotide
attaacgctgaaggactcatactcggaaggctcgcctcgaaggttgccaagatgc

SEQ ID NO: 139290 - DNA, 55 bp, Artificial
  Synthetic oligonucleotide
ctcgccatctacactcttagaatgctgtccaaacttacaagttagcacgtaactg

SEQ ID NO: 139291 - DNA, 55 bp, Artificial
  Synthetic oligonucleotide
atgatggctccttgttatcctctcgctctacgagctccatacgctcgtttagctt

SEQ ID NO: 139292 - DNA, 55 bp, Artificial
  Synthetic oligonucleotide
attccaagttgagacgcaagttcatataggactctgcggtacgtaagatccttgg

SEQ ID NO: 139293 - DNA, 54 bp, Artificial
  Synthetic oligonucleotide
cttcaaggggctccgcatagggtcgaagaaaataaggaacgccagggtggagga

SEQ ID NO: 139294 - DNA, 60 bp, Artificial
  Synthetic oligonucleotide
agctgtagtgttgattacgtgttcaagctctctgagggtctgattgaatttatgtaattg

SEQ ID NO: 139295 - DNA, 51 bp, Artificial
  Synthetic oligonucleotide
cttccgtcggaacccacggcccaaacgtattcgtggatgctttcccttccg

SEQ ID NO: 139296 - DNA, 55 bp, Artificial
  Synthetic oligonucleotide
atcgcttgcatagaggtatatacttccgctgagaggaccgtttgcttcgtagggc

SEQ ID NO: 139297 - DNA, 55 bp, Artificial
  Synthetic oligonucleotide
ctcgcagtagccttgttatggagtgacctactggggcaaggcctaatcctcgtag

SEQ ID NO: 139298 - DNA, 55 bp, Artificial
  Synthetic oligonucleotide
gaaaccacgtgggtgaggggccgctatcgtgagtacgtcgaggaggtccctcgca

SEQ ID NO: 139299 - DNA, 55 bp, Artificial
  Synthetic oligonucleotide
gaacaatgattttcacgaagtcaagcttcctcagtatctcccagttatgcctcgc

SEQ ID NO: 139300 - DNA, 52 bp, Artificial
  Synthetic oligonucleotide
ctcgcagtaccgaagacacctccccaccggtactaacacccctaatctccgg

SEQ ID NO: 139301 - DNA, 55 bp, Artificial
  Synthetic oligonucleotide
attctcgcatactattttgaacgtggccaagagcattattgtgttcccaagagcg

SEQ ID NO: 139302 - DNA, 54 bp, Artificial
  Synthetic oligonucleotide
gaacgaaatggaggggtgtttccttcgtcgttggtgaatggagcgagaaagacg

SEQ ID NO: 139303 - DNA, 55 bp, Artificial
  Synthetic oligonucleotide
ctcgaacgcttctaacgccttgtaccttatcctcgtcatccactccggttccctg

SEQ ID NO: 139304 - DNA, 55 bp, Artificial
  Synthetic oligonucleotide
gaacggaactgttgtagtgaaagtctgggacgagacctaccatccagaggttaac

SEQ ID NO: 139305 - DNA, 60 bp, Artificial
  Synthetic oligonucleotide
gtccaacgttccgaggccttctgagacctattatcagattcagcggaatctcggtcatca

SEQ ID NO: 139306 - DNA, 55 bp, Artificial
  Synthetic oligonucleotide
gaatcagacgaaccaaaccaacgctaccctggaatgctcgacattggaggagtgc

SEQ ID NO: 139307 - DNA, 55 bp, Artificial
  Synthetic oligonucleotide
atcaccctatccgcaacgttctcgccgggaaaatccctgttgtcgatgttgtatg

SEQ ID NO: 139308 - DNA, 55 bp, Artificial
  Synthetic oligonucleotide
gaattggcgatagatccagtaacctggaaaagaagatcagggtgtccaaagccct

SEQ ID NO: 139309 - DNA, 55 bp, Artificial
  Synthetic oligonucleotide
ctccggtgtatctatcgtagcacgcgatctccatccggaaggtgaggtacctgag

SEQ ID NO: 139310 - DNA, 55 bp, Artificial
  Synthetic oligonucleotide
ctccaagacgagtctacctattggatccctgtaaagcctatccttagggttctcc

SEQ ID NO: 139311 - DNA, 54 bp, Artificial
  Synthetic oligonucleotide
gacgagaaaggtcccaacaaccacatacggaagcccgttgagggagcgggtgcc

SEQ ID NO: 139312 - DNA, 55 bp, Artificial
  Synthetic oligonucleotide
cctctttatctcaacactaccctctgactggggtactaacatatgggctggaggg

SEQ ID NO: 139313 - DNA, 55 bp, Artificial
  Synthetic oligonucleotide
cctctggataagcgacgcttgccgttgctgcatatggaatcctgtgggcgataac

SEQ ID NO: 139314 - DNA, 52 bp, Artificial
  Synthetic oligonucleotide
cctctggaagtcgtcgtcccgcgggttcagccaagttaccacgaacccggaa

SEQ ID NO: 139315 - DNA, 55 bp, Artificial
  Synthetic oligonucleotide
cctcggcctagtactcaagagcgaaaagcacctactggcaacggttcacagaagg

SEQ ID NO: 139316 - DNA, 58 bp, Artificial
  Synthetic oligonucleotide
ccgaccaaactccacagttccaagccaaaccctcctaagcatcctcgaagtctgcgca

SEQ ID NO: 139317 - DNA, 55 bp, Artificial
  Synthetic oligonucleotide
cctcgctggagcaatctacatcttcgtgggcaacaagaggctcgcagcattagtc

SEQ ID NO: 139318 - DNA, 55 bp, Artificial
  Synthetic oligonucleotide
ccgttgtcactatgtcagctatgtaacctccagtgtgctcagggtctagatccgg

SEQ ID NO: 139319 - DNA, 55 bp, Artificial
  Synthetic oligonucleotide
cggaatgtgggtgtactctccggtgtatctatcgtagcacgcgacctccatctgg

SEQ ID NO: 139320 - DNA, 54 bp, Artificial
  Synthetic oligonucleotide
ccggagaaggttaacaggttaatctcaactgttatactcgtagttgtcgcaacc

SEQ ID NO: 139321 - DNA, 55 bp, Artificial
  Synthetic oligonucleotide
cggagcaaaactctactccccgagcggttacgagcttgagatgaggtacaaggac

SEQ ID NO: 139322 - DNA, 55 bp, Artificial
  Synthetic oligonucleotide
ccgcccgatagtactcctccatcccgcgtgctatcaggtggtaaatcttctcccg

SEQ ID NO: 139323 - DNA, 54 bp, Artificial
  Synthetic oligonucleotide
ccgacggaggatacgtcaagattttcagattcgaacaccccaacgtggccgttg

SEQ ID NO: 139324 - DNA, 55 bp, Artificial
  Synthetic oligonucleotide
ccgacatttacagggagctcatgttatactatgcatgggacttccccaagatcga

SEQ ID NO: 139325 - DNA, 55 bp, Artificial
  Synthetic oligonucleotide
ccgaatggcgttatagagagcccacttcctccgcggcctataagccgtgccgatt

SEQ ID NO: 139326 - DNA, 55 bp, Artificial
  Synthetic oligonucleotide
cggagggagagcacttcgaggtcttttctcaggtcggagaacatgctcgctccgg

SEQ ID NO: 139327 - DNA, 60 bp, Artificial
  Synthetic oligonucleotide
attgatgtaagtaagctgggtaataaggtgctagctacatatatactaattaagcatgga

SEQ ID NO: 139328 - DNA, 54 bp, Artificial
  Synthetic oligonucleotide
ccctttccgatcacagggcccttcacaccggcctttataccgaagtcatcgtcc

SEQ ID NO: 139329 - DNA, 54 bp, Artificial
  Synthetic oligonucleotide
ccctcaaccctaccctgaagacgggattatagtacgtcattagaactatgggaa

SEQ ID NO: 139330 - DNA, 55 bp, Artificial
  Synthetic oligonucleotide
cccggtgagagggttcccgttgatggagttatcctcgagggaagctcaagcgttg

SEQ ID NO: 139331 - DNA, 55 bp, Artificial
  Synthetic oligonucleotide
cggcgggtggatagacaacagaattactgaggtgaccaacggttctgagatcaca

SEQ ID NO: 139332 - DNA, 55 bp, Artificial
  Synthetic oligonucleotide
cccgaggaaaacgccgtgactattgctatcagtgaggtgattatgagaaccttcc

SEQ ID NO: 139333 - DNA, 55 bp, Artificial
  Synthetic oligonucleotide
cccgactgacgacacgacacagaagcacgggcgtaaggaggacctaatctatgag

SEQ ID NO: 139334 - DNA, 55 bp, Artificial
  Synthetic oligonucleotide
cgcaggcgatataatcatcgtcacgtttagtgcaaactctgtctttggcaacgac

SEQ ID NO: 139335 - DNA, 55 bp, Artificial
  Synthetic oligonucleotide
cgcactgtctataagcccagatatacccatgtggtaggatatcttcccaagggca

SEQ ID NO: 139336 - DNA, 55 bp, Artificial
  Synthetic oligonucleotide
cgccagcccttctctaaacgacagctctccggaggctatggggttcttcttaacc

SEQ ID NO: 139337 - DNA, 55 bp, Artificial
  Synthetic oligonucleotide
cgagttcctcaagctcgctgcggaccgctacctgctgaaagaggaccgccttgag

SEQ ID NO: 139338 - DNA, 60 bp, Artificial
  Synthetic oligonucleotide
gtatcttgattttgctcgtgctctcataggttctatttccaagtctcttactctttatgc

SEQ ID NO: 139339 - DNA, 55 bp, Artificial
  Synthetic oligonucleotide
cgaggagaatcagcgtgttctgaagatgattcgcgacggattgatgcttgacgag

SEQ ID NO: 139340 - DNA, 55 bp, Artificial
  Synthetic oligonucleotide
cgacaagctatcggtctgatcatcccaaacgctccaaggcggagccatagccctg

SEQ ID NO: 139341 - DNA, 55 bp, Artificial
  Synthetic oligonucleotide
cgaaggcctcgacccttccgttccgcaggagaagtactctatcgcagacgcccga

SEQ ID NO: 139342 - DNA, 55 bp, Artificial
  Synthetic oligonucleotide
cgaagcgccatctatggagtactgcggctttcctatgtggcgaaccttcactccc

SEQ ID NO: 139343 - DNA, 55 bp, Artificial
  Synthetic oligonucleotide
cgctctattgctcttgaagttgtgttgccctggtcaaatgtataacccctcggcg

SEQ ID NO: 139344 - DNA, 53 bp, Artificial
  Synthetic oligonucleotide
cgaaagtccctatacggagaaggttcgcaagataggggtcaaggtcttcaacc

SEQ ID NO: 139345 - DNA, 55 bp, Artificial
  Synthetic oligonucleotide
ccttgaggtcgctccgaggtatcttccagcgttcatccgcgttctgaacgagcgc

SEQ ID NO: 139346 - DNA, 55 bp, Artificial
  Synthetic oligonucleotide
ccttgaaaggacacttatggacacagattccgcaaccagtacagcttgcctcctg

SEQ ID NO: 139347 - DNA, 55 bp, Artificial
  Synthetic oligonucleotide
cgcttatcctaacagtatcggataaaattatagagcgcaattagaaggactcttc

SEQ ID NO: 139348 - DNA, 55 bp, Artificial
  Synthetic oligonucleotide
cctgtcgtaaacctccttggcaaggaacttggcctccttcgggtctatgaaagca

SEQ ID NO: 139349 - DNA, 60 bp, Artificial
  Synthetic oligonucleotide
atctgttccctggaatattaagatcacgggaatgattttggcatcctcaaagatcactac

SEQ ID NO: 139350 - DNA, 55 bp, Artificial
  Synthetic oligonucleotide
acgaggtaataaagagcgtagataccagaaatcccataggaagtggtggagtaac

SEQ ID NO: 139351 - DNA, 54 bp, Artificial
  Synthetic oligonucleotide
cctgtccttaattccggtcctcttactgtggctcgttggggcgctgaaagttag

SEQ ID NO: 139352 - DNA, 52 bp, Artificial
  Synthetic oligonucleotide
cgctttggttcccggatgcttgccctttaccgggactacaacaaatggttag

SEQ ID NO: 139353 - DNA, 55 bp, Artificial
  Synthetic oligonucleotide
cctggtctttgcgatcgaccgccttggcaggaatatggaggacactgtgagcacg

SEQ ID NO: 139354 - DNA, 55 bp, Artificial
  Synthetic oligonucleotide
cctgggctgggaatagaggtttatacctattctattaagaatgatagccctatta

SEQ ID NO: 139355 - DNA, 55 bp, Artificial
  Synthetic oligonucleotide
cctgggatccaatgagtgtagcaatgatttcctctcgacgtaaagtgagtacatc

SEQ ID NO: 139356 - DNA, 55 bp, Artificial
  Synthetic oligonucleotide
cctgggaacgctcattggagggctctcaagcctaattatggtctctctagctgaa

SEQ ID NO: 139357 - DNA, 55 bp, Artificial
  Synthetic oligonucleotide
caggaaggcccgtcaaggcccgcgtggatggccaggacgtctatatctcaggagt

SEQ ID NO: 139358 - DNA, 55 bp, Artificial
  Synthetic oligonucleotide
cgtccttgacgttcttccctggggtggagccctgaaggacctcacgacggcattc

SEQ ID NO: 139359 - DNA, 55 bp, Artificial
  Synthetic oligonucleotide
cagctcgtggattgtaaatgtttccgcagaaagctcagttagcttggtgtacacc

SEQ ID NO: 139360 - DNA, 54 bp, Artificial
  Synthetic oligonucleotide
cgtcttcaagcgttggttccttaacttcgaccgagagaactttggcattgttct

SEQ ID NO: 139361 - DNA, 59 bp, Artificial
  Synthetic oligonucleotide
tcggtaaatccaaccaagccgcttcacatgggacacgcgaggaactcgattctcggaga

SEQ ID NO: 139362 - DNA, 55 bp, Artificial
  Synthetic oligonucleotide
cagcagttggcctcgtgttaaataatatcttcgaagcttccttgagttcattcca

SEQ ID NO: 139363 - DNA, 55 bp, Artificial
  Synthetic oligonucleotide
cagcaagcactgcatcaagaaaactcggtttggagggtatcctgtcctccgcacc

SEQ ID NO: 139364 - DNA, 54 bp, Artificial
  Synthetic oligonucleotide
cagcaactatcgccggaactattaggacgaaggccgtgaagaatatccccgggg

SEQ ID NO: 139365 - DNA, 55 bp, Artificial
  Synthetic oligonucleotide
cagatggaatcgtcctcgagggttacggagcaggtggtatcccatacaggggcag

SEQ ID NO: 139366 - DNA, 55 bp, Artificial
  Synthetic oligonucleotide
cagagcgctatgaggataatgttaagctggaaggcattagatactggctcttcgt

SEQ ID NO: 139367 - DNA, 55 bp, Artificial
  Synthetic oligonucleotide
cgtgttctctatggtagcctcaagggcagagtagctctccgctatgagagccagg

SEQ ID NO: 139368 - DNA, 54 bp, Artificial
  Synthetic oligonucleotide
ctaaagctaggaacaccattcccggttccctatggactactcgagaagttcttc

SEQ ID NO: 139369 - DNA, 55 bp, Artificial
  Synthetic oligonucleotide
ctaataacgagacccgcttacggtgagatagccaaggaacttatcggagggagga

SEQ ID NO: 139370 - DNA, 55 bp, Artificial
  Synthetic oligonucleotide
ctaatccttactgatggtaggaaggcattcctcgtgggtggattcggccctccac

SEQ ID NO: 139371 - DNA, 55 bp, Artificial
  Synthetic oligonucleotide
cacctggctaaggtcacgatgggtcatgagaaggaggtttacgccggcaggaggt

SEQ ID NO: 139372 - DNA, 59 bp, Artificial
  Synthetic oligonucleotide
tctaactcaacgaactccactgcctccaacaccacgagtcagaaccagaccgtctcaaa

SEQ ID NO: 139373 - DNA, 55 bp, Artificial
  Synthetic oligonucleotide
ctacaggtggtttccgtagaacgtaatcgtgtggaaagttcatggtcatcaccct

SEQ ID NO: 139374 - DNA, 55 bp, Artificial
  Synthetic oligonucleotide
ctagagtgcatgagaaagcagagaaagctgtaatagatgctatgcaggctttcgc

SEQ ID NO: 139375 - DNA, 55 bp, Artificial
  Synthetic oligonucleotide
cacacagtccacagtaccctggacctttgagtcggagacggttacccacgagagg

SEQ ID NO: 139376 - DNA, 55 bp, Artificial
  Synthetic oligonucleotide
caatccgagtggacctatagctggaccaagtggaggaccaggagtagccttccca

SEQ ID NO: 139377 - DNA, 54 bp, Artificial
  Synthetic oligonucleotide
caatcattccgagggctccaaagtaatatccgggcagaaggttacctgggaacg

SEQ ID NO: 139378 - DNA, 53 bp, Artificial
  Synthetic oligonucleotide
caagtgggatccaactaaggccaaggtcagggacgtttacaagcccgctcccg

SEQ ID NO: 139379 - DNA, 55 bp, Artificial
  Synthetic oligonucleotide
cccgacactctcaagggcctcctcactgcaacggcaaagccccttgatgctccag

SEQ ID NO: 139380 - DNA, 55 bp, Artificial
  Synthetic oligonucleotide
cggcggtttgctccatgttaccggtctgtggattagccagggtttatctccaacc

SEQ ID NO: 139381 - DNA, 54 bp, Artificial
  Synthetic oligonucleotide
cccctcattactaagcttcaaaagagtgtccccaacgaagtccgtgccagattt

SEQ ID NO: 139382 - DNA, 55 bp, Artificial
  Synthetic oligonucleotide
cggctacatagtgatgcgcaccgagcccataaaagctaactatttcaacggctcc

SEQ ID NO: 139383 - DNA, 59 bp, Artificial
  Synthetic oligonucleotide
gacccagggctttagggctacccatgtagtttcgtcccagctcatgctactaaggcatg

SEQ ID NO: 139384 - DNA, 55 bp, Artificial
  Synthetic oligonucleotide
cgggccgtccaagaatagattagcttggagtcttgaaagctggggaacgtgaaca

SEQ ID NO: 139385 - DNA, 55 bp, Artificial
  Synthetic oligonucleotide
ccattaacttgctcctagcttcggcgagaccctttcgtctggcatatttgtagag

SEQ ID NO: 139386 - DNA, 55 bp, Artificial
  Synthetic oligonucleotide
ccagcgattgccctcaagttaggaaggatctactacctcatgctactctcaaacc

SEQ ID NO: 139387 - DNA, 55 bp, Artificial
  Synthetic oligonucleotide
ccactcattatgaatctcggagaatttagggcctggtagaactccttagatgcta

SEQ ID NO: 139388 - DNA, 55 bp, Artificial
  Synthetic oligonucleotide
ccacggcaactagtctatctacggtagtgggtcccctgaagaccctgtacatgct

SEQ ID NO: 139389 - DNA, 55 bp, Artificial
  Synthetic oligonucleotide
ccacagttccaagccaaaccctcctaagcatcctcgaagtctgcgcactcctgag

SEQ ID NO: 139390 - DNA, 53 bp, Artificial
  Synthetic oligonucleotide
cggttacaacgcaaccggaacgacgagcgatggaatcggtgttttcgctttcc

SEQ ID NO: 139391 - DNA, 55 bp, Artificial
  Synthetic oligonucleotide
catgtcctcaacggacaaggtgtcggtccgctttccttcaggcctgatgaggcag

SEQ ID NO: 139392 - DNA, 55 bp, Artificial
  Synthetic oligonucleotide
catggttgggttcgtggtcggatacaaaagatatgtgcgaaactctggaggagtc

SEQ ID NO: 139393 - DNA, 55 bp, Artificial
  Synthetic oligonucleotide
catggttgatttcaaccccgtccaggtcggcaacctctcaatcgtctcaagccgg

SEQ ID NO: 139394 - DNA, 58 bp, Artificial
  Synthetic oligonucleotide
attgtgcgtgtttcaaagcatacgaaggtggagaacgatgtttactacctcaattata

SEQ ID NO: 139395 - DNA, 54 bp, Artificial
  Synthetic oligonucleotide
catcggtgcaatagttccaatccccgttacagttaggggtgaatacgttaggct

SEQ ID NO: 139396 - DNA, 55 bp, Artificial
  Synthetic oligonucleotide
catcaggcttagcagtcttatctgcatcacaccgccgctcatgagcctgtaggga

SEQ ID NO: 139397 - DNA, 55 bp, Artificial
  Synthetic oligonucleotide
catcaagcacacgataacgcttgactacggggaggttagggatatatctccagac

SEQ ID NO: 139398 - DNA, 52 bp, Artificial
  Synthetic oligonucleotide
catagtaggctcctagggtgtcgttaaatacccctgtaacgttaagcttaac

SEQ ID NO: 139399 - DNA, 55 bp, Artificial
  Synthetic oligonucleotide
cgtagttcataaccggcttctttccaatgtagacgacgtgctcctcagccatttc

SEQ ID NO: 139400 - DNA, 55 bp, Artificial
  Synthetic oligonucleotide
cagttgactgacttcgacgaagggacattcagaggagcgatattctacgcaggac

SEQ ID NO: 139401 - DNA, 55 bp, Artificial
  Synthetic oligonucleotide
caggcaatgtacgatggagttgatctaacgaggtacaaagttgggagattagccc

SEQ ID NO: 139402 - DNA, 55 bp, Artificial
  Synthetic oligonucleotide
gttcattgacccctttgtaataaggtccatcaatcgaagtgaactccgcaagagg

SEQ ID NO: 139403 - DNA, 55 bp, Artificial
  Synthetic oligonucleotide
gttccgtctttccgtgtgaggttcctttgtcttgtgcgaggtggtggagatggaa

SEQ ID NO: 139404 - DNA, 52 bp, Artificial
  Synthetic oligonucleotide
gttctttgttgaggttccccaagattacgcaaagttaatccaaaagctcggg

SEQ ID NO: 139405 - DNA, 60 bp, Artificial
  Synthetic oligonucleotide
agcctacagcgggggctggcataggcatggagagattagtgaggttcattgtcggagcaa

SEQ ID NO: 139406 - DNA, 55 bp, Artificial
  Synthetic oligonucleotide
gttgcgattcttgagaagaggacttttagtgagcttggagaggctactaggttcg

SEQ ID NO: 139407 - DNA, 55 bp, Artificial
  Synthetic oligonucleotide
gttgcggagtgggtgttaaatcacgtgcatacttcaggtgaagctctgctcgcaa

SEQ ID NO: 139408 - DNA, 55 bp, Artificial
  Synthetic oligonucleotide
taaactcgaaggtcagcgtaagcgttagggctggagaggatatattcaccatccc

SEQ ID NO: 139409 - DNA, 54 bp, Artificial
  Synthetic oligonucleotide
taactaagagaaagggaccagacttcgttaaagagaacttccaagacctactga

SEQ ID NO: 139410 - DNA, 55 bp, Artificial
  Synthetic oligonucleotide
taagataaggtttgagagcggggtgtacagagttctagttaacgaagaactatcg

SEQ ID NO: 139411 - DNA, 55 bp, Artificial
  Synthetic oligonucleotide
taaggtaacgacattatcatcccgaattatctcgaaggtcgcgtatgtgttccca

SEQ ID NO: 139412 - DNA, 55 bp, Artificial
  Synthetic oligonucleotide
acacgctttgctaaccaatcaaagttctccgagcgacaaatctacaggtacataa

SEQ ID NO: 139413 - DNA, 55 bp, Artificial
  Synthetic oligonucleotide
tacaagggtacggcaacgtgtgtagttgagcttagaaatccaactcggagtgggg

SEQ ID NO: 139414 - DNA, 55 bp, Artificial
  Synthetic oligonucleotide
tacaccttcctgctcgcttacattgccaacgaataacgccaatcccgtgggaggg

SEQ ID NO: 139415 - DNA, 55 bp, Artificial
  Synthetic oligonucleotide
tacctaagctcacaagagcccagagagataaagttgccagcttaataaccctttc

SEQ ID NO: 139416 - DNA, 56 bp, Artificial
  Synthetic oligonucleotide
taagagggttcttagggatttgcttgtgcttagtgaacttcttgagggttctcttg

SEQ ID NO: 139417 - DNA, 55 bp, Artificial
  Synthetic oligonucleotide
tagagagcactcctgcactgccacacctcgtacatcatgagttgtgaatcggccc

SEQ ID NO: 139418 - DNA, 55 bp, Artificial
  Synthetic oligonucleotide
tagaggagttatcgaagatcgttgaccccagggagataacccacataatcgttca

SEQ ID NO: 139419 - DNA, 55 bp, Artificial
  Synthetic oligonucleotide
tagcccaggcccgactaagagaagcggggcaaaatagttcttaaggtacgagctc

SEQ ID NO: 139420 - DNA, 54 bp, Artificial
  Synthetic oligonucleotide
aagtttctcttaacccagaggggagcctccattatccatttgggaacgcagtag

SEQ ID NO: 139421 - DNA, 55 bp, Artificial
  Synthetic oligonucleotide
taggtagatgtaattcggcagtgtgtctctcacgattccgcttattctaaccagg

SEQ ID NO: 139422 - DNA, 55 bp, Artificial
  Synthetic oligonucleotide
taggtcctttgtgagtttcatctttgattataagaaccggactgagaggtatggt

SEQ ID NO: 139423 - DNA, 55 bp, Artificial
  Synthetic oligonucleotide
ggtatctacctggatcactagaagtcgttgtgtaaacgccacaagttggggatcc

SEQ ID NO: 139424 - DNA, 55 bp, Artificial
  Synthetic oligonucleotide
ggtctaggtaaattaacactcctccctcctgggatatcgttcggagtgcattctc

SEQ ID NO: 139425 - DNA, 55 bp, Artificial
  Synthetic oligonucleotide
ggtgcagatctttccctgtctcgtaatccttcggcctgttaacggcccatcttgg

SEQ ID NO: 139426 - DNA, 55 bp, Artificial
  Synthetic oligonucleotide
actctacagctttctcggtgcccatacgcgttgacaagatattggatgggtacgc

SEQ ID NO: 139427 - DNA, 60 bp, Artificial
  Synthetic oligonucleotide
acaggtatgcaagcacgctgagaaggcagattgattcagcacagcgcgagctcgctcgtg

SEQ ID NO: 139428 - DNA, 55 bp, Artificial
  Synthetic oligonucleotide
ggtgggatggtccatgaggttgcacgtccatattaatgacaagttgggtgaactg

SEQ ID NO: 139429 - DNA, 55 bp, Artificial
  Synthetic oligonucleotide
ggtgtagagccattccggcagtttagcgaaataactaagccctctagcccctgtt

SEQ ID NO: 139430 - DNA, 55 bp, Artificial
  Synthetic oligonucleotide
ggttatggaaagggctaaggctcttggcattgatttgggaacttggcaaaggcgt

SEQ ID NO: 139431 - DNA, 55 bp, Artificial
  Synthetic oligonucleotide
gtaagcaccataccctgaacctcagacttcgaacccttcatagggctttagatcc

SEQ ID NO: 139432 - DNA, 55 bp, Artificial
  Synthetic oligonucleotide
gtacataacccacgtcttcggaaagatgttagctggaacgaaggcccacaggaac

SEQ ID NO: 139433 - DNA, 55 bp, Artificial
  Synthetic oligonucleotide
gtactccgcggtgacgttaggtttgttcaggatcactacctctccctctggcagt

SEQ ID NO: 139434 - DNA, 55 bp, Artificial
  Synthetic oligonucleotide
gtatctcggtgaggtacttgtagtaaacgaagcccggctgccacttggcgtggtc

SEQ ID NO: 139435 - DNA, 55 bp, Artificial
  Synthetic oligonucleotide
gtcagacagtcacgacggtagaactaggcagggatctaggaacatcagagggttc

SEQ ID NO: 139436 - DNA, 55 bp, Artificial
  Synthetic oligonucleotide
gtccacaattttagctggactcgctggaggtttcgccttagcatttgcgctatac

SEQ ID NO: 139437 - DNA, 55 bp, Artificial
  Synthetic oligonucleotide
gtcccacatatgcttctttcctattcccggaagcagttccaagctgtgaagtctg

SEQ ID NO: 139438 - DNA, 53 bp, Artificial
  Synthetic oligonucleotide
cggtgtttgcccatacaacaattccgctccccggacctaagtgagggtctttg

SEQ ID NO: 139439 - DNA, 55 bp, Artificial
  Synthetic oligonucleotide
gtcctggggaggtgccgagtagtggaagtcgtattcgtagacgtagagcccgccc

SEQ ID NO: 139440 - DNA, 54 bp, Artificial
  Synthetic oligonucleotide
gtccttgaagggaacgagcttcgctattgtggggttcctgccgaacttgtaggg

SEQ ID NO: 139441 - DNA, 55 bp, Artificial
  Synthetic oligonucleotide
gtctatctgcagtgatgtgcatctcctctctgagtactccaagcattctctcgag

SEQ ID NO: 139442 - DNA, 52 bp, Artificial
  Synthetic oligonucleotide
accgtcccctttgccagtccaagggttttcgaaagtttctcgtagctgaagc

SEQ ID NO: 139443 - DNA, 55 bp, Artificial
  Synthetic oligonucleotide
gttaacgaaggtcattgctctgtgaacgaagttacctaagttgtttactagctcc

SEQ ID NO: 139444 - DNA, 55 bp, Artificial
  Synthetic oligonucleotide
gttatctctctgaggaaaagggcttacgttgaggttgtggaactaaggcttcacc

SEQ ID NO: 139445 - DNA, 55 bp, Artificial
  Synthetic oligonucleotide
tgatacttgggtaaatgtccttgagagggatgaaataacgataagggactcaagg

SEQ ID NO: 139446 - DNA, 55 bp, Artificial
  Synthetic oligonucleotide
tgatagagtggtagttcaagggagttcgcagcggcctttgcaacggcaagagaga

SEQ ID NO: 139447 - DNA, 55 bp, Artificial
  Synthetic oligonucleotide
tgcagctattagcagggtattgggggttactagaaggcaggttaggaactacatt

SEQ ID NO: 139448 - DNA, 55 bp, Artificial
  Synthetic oligonucleotide
tgctagatccttccttgttagggcatcgcttccggaggaggccgtgggccatgtt

SEQ ID NO: 139449 - DNA, 60 bp, Artificial
  Synthetic oligonucleotide
taagcatggacatagaagtactgcagctattagcagggtattgggggttactagaaggca

SEQ ID NO: 139450 - DNA, 55 bp, Artificial
  Synthetic oligonucleotide
tgctcggatacaaagatgccgcggaaaacttccaccatttagcttatgagcacgt

SEQ ID NO: 139451 - DNA, 55 bp, Artificial
  Synthetic oligonucleotide
tgggacgagagcacagatgaggagaaattagtgatcacagactggcgaatagtcg

SEQ ID NO: 139452 - DNA, 55 bp, Artificial
  Synthetic oligonucleotide
tggggataatgtcatcatctcgacatcaggagggatgacactcctcatcggttcg

SEQ ID NO: 139453 - DNA, 55 bp, Artificial
  Synthetic oligonucleotide
tggtcacctcgctcctgggcagggtgtaaacgcccctgaggacgggctttatcct

SEQ ID NO: 139454 - DNA, 55 bp, Artificial
  Synthetic oligonucleotide
tggtgtagggcgttccatagatgggaacgtcaggatagtggggagctagcttccc

SEQ ID NO: 139455 - DNA, 54 bp, Artificial
  Synthetic oligonucleotide
tgtctcccttacagagggcaaaatacttggttacgttaccgacataaacgttga

SEQ ID NO: 139456 - DNA, 55 bp, Artificial
  Synthetic oligonucleotide
ttacctatctccacactctccggataggttccagcaaggactacgaccgttccac

SEQ ID NO: 139457 - DNA, 55 bp, Artificial
  Synthetic oligonucleotide
ttaggtggttagtatgtttaacgtttgtatgagggactgttatgatacctgctcg

SEQ ID NO: 139458 - DNA, 55 bp, Artificial
  Synthetic oligonucleotide
ttccctccgagacgagcccgtatccaactccgactatcgcgctccacgttccgtg

SEQ ID NO: 139459 - DNA, 55 bp, Artificial
  Synthetic oligonucleotide
ttcgtggcagatgtccggtatttaaggttggggacagaatagttatagagggacc

SEQ ID NO: 139460 - DNA, 56 bp, Artificial
  Synthetic oligonucleotide
tataagctgtttaatcctgggctgggaatagaggtttatacctattctattaagaa

SEQ ID NO: 139461 - DNA, 50 bp, Artificial
  Synthetic oligonucleotide
acagggaaacaaccgcaagggggaaaatcgggtatctcctaaccgccgcg

SEQ ID NO: 139462 - DNA, 55 bp, Artificial
  Synthetic oligonucleotide
aaagctcttgggattaatccgtctgatgtaggggtctctctatttgttcggtctg

SEQ ID NO: 139463 - DNA, 55 bp, Artificial
  Synthetic oligonucleotide
ttgcttgtgcttagtgaacttcttgagggttctcttgttagctacaggagtgggg

SEQ ID NO: 139464 - DNA, 55 bp, Artificial
  Synthetic oligonucleotide
ttggtaaattatgcccaccctatcgcagattaattcagctaacgctagaacgtgg

SEQ ID NO: 139465 - DNA, 55 bp, Artificial
  Synthetic oligonucleotide
tttcgctactcgttatctttgcggccctcctactagcgacgcatcccgattacgg

SEQ ID NO: 139466 - DNA, 53 bp, Artificial
  Synthetic oligonucleotide
aaaagcccactatttaagttatccggggtgataacgtgagggttcactatgaa

SEQ ID NO: 139467 - DNA, 55 bp, Artificial
  Synthetic oligonucleotide
tataaacttcggaagaaactcttctggattaggcgtagacttgagcgtgtggacc

SEQ ID NO: 139468 - DNA, 55 bp, Artificial
  Synthetic oligonucleotide
tatcatagaactgacagtattcacgtgagcaacactggaatagagatagcgaagg

SEQ ID NO: 139469 - DNA, 55 bp, Artificial
  Synthetic oligonucleotide
aaggtcacccgggctgtcaagaagggcgtaatagctgtcccgtggcactggggag

SEQ ID NO: 139470 - DNA, 55 bp, Artificial
  Synthetic oligonucleotide
tattgtgtcgcctataccgaccgttgacttcggcttgaccactatctttgtcgga

SEQ ID NO: 139471 - DNA, 55 bp, Artificial
  Synthetic oligonucleotide
tcagatttagaactaagggcaataagtgggtttatctgttcaactttgacagggt

SEQ ID NO: 139472 - DNA, 59 bp, Artificial
  Synthetic oligonucleotide
acattccgagattcacgttaattccaagttgagacgcaagttcatataggactctgcgg

SEQ ID NO: 139473 - DNA, 55 bp, Artificial
  Synthetic oligonucleotide
tcattcgcagactcgaacaagacatttgtgcgggttatagtcgatggaacagagc

SEQ ID NO: 139474 - DNA, 54 bp, Artificial
  Synthetic oligonucleotide
tcccagaattccacgtgatccgggtagaggactaccttgaaggtccggtaatcc

SEQ ID NO: 139475 - DNA, 50 bp, Artificial
  Synthetic oligonucleotide
tcccctcgtactccacggtcgcccgtgtttccttcggggagggtcaaccc

SEQ ID NO: 139476 - DNA, 55 bp, Artificial
  Synthetic oligonucleotide
tcctgccattcacgctgtaaatctttccatgattgcaccgagcccaccaaagact

SEQ ID NO: 139477 - DNA, 54 bp, Artificial
  Synthetic oligonucleotide
tcgaggttaatttcgtcccgatttcctacacggacatggttacgaggctcgagg

SEQ ID NO: 139478 - DNA, 55 bp, Artificial
  Synthetic oligonucleotide
tcgatgattcacattggacgcttaccaactccacgaaaccacccctgcagtttcc

SEQ ID NO: 139479 - DNA, 55 bp, Artificial
  Synthetic oligonucleotide
tcggagcatctaagtgctattaacctagccttatcatactgacctagggccatgg

SEQ ID NO: 139480 - DNA, 54 bp, Artificial
  Synthetic oligonucleotide
tcggattgtttctttgttggagagtcttcacggaaaacgggttgttggtctctc

SEQ ID NO: 139481 - DNA, 55 bp, Artificial
  Synthetic oligonucleotide
tctacactgcgggaacggaggatagtaaagacgttgagtgggccagaaaagttag

SEQ ID NO: 139482 - DNA, 55 bp, Artificial
  Synthetic oligonucleotide
tctatagctctcccatggtctatttgaactctgggatattcatgttgctcactga

SEQ ID NO: 139483 - DNA, 60 bp, Artificial
  Synthetic oligonucleotide
gttgccctactaatgcagttgactgacttcgacgaagggacattcagaggagcgatattc

SEQ ID NO: 139484 - DNA, 55 bp, Artificial
  Synthetic oligonucleotide
tctcggtaaatggaagcatagtatcaaggatggacgcctattcctacgtaacccc

SEQ ID NO: 139485 - DNA, 55 bp, Artificial
  Synthetic oligonucleotide
tgaacaaaggacgcaacgtttccgataacatatgcatggagctttatcatgtccc

SEQ ID NO: 139486 - DNA, 55 bp, Artificial
  Synthetic oligonucleotide
aactcatcggtaggagggaggacctgaacgtaatattcctctcagcaacgcccca

SEQ ID NO: 139487 - DNA, 55 bp, Artificial
  Synthetic oligonucleotide
tgagatgctcgacttcctgaacatactcccaccccagttggctttcgctgtgggg

SEQ ID NO: 139488 - DNA, 53 bp, Artificial
  Synthetic oligonucleotide
aacgttaaggccgggccgaactattatgacccggcttttgattacatggagcg

SEQ ID NO: 139489 - DNA, 55 bp, Artificial
  Synthetic oligonucleotide
gcctcaatagcaaccgtcttagcatttaggaatgccttctggattattgcctcga

SEQ ID NO: 139490 - DNA, 55 bp, Artificial
  Synthetic oligonucleotide
gcctggagcctacaccttgaggattgaggccatcgcccagaacactaccaccggc

SEQ ID NO: 139491 - DNA, 55 bp, Artificial
  Synthetic oligonucleotide
gccttgttatggagtgacctactggggcaaggcctaatcctcgtagaaccgcctt

SEQ ID NO: 139492 - DNA, 55 bp, Artificial
  Synthetic oligonucleotide
gcgaatagggattttctgtacgctggggagggtaggcatctaacgctctctccgc

SEQ ID NO: 139493 - DNA, 55 bp, Artificial
  Synthetic oligonucleotide
gcgcttctctagggctcgcctgaaggcctcctcgatgcatgagtacgtatcggcg

SEQ ID NO: 139494 - DNA, 55 bp, Artificial
  Synthetic oligonucleotide
cggtataaagttggtgatacttgggtaaatgtccttgagagggatgaaataacga

SEQ ID NO: 139495 - DNA, 55 bp, Artificial
  Synthetic oligonucleotide
gcggaaagtccgcgaacttagggcaaagggagttagctatcgcgatatagctcgc

SEQ ID NO: 139496 - DNA, 55 bp, Artificial
  Synthetic oligonucleotide
gcgggaaggtctgccacaggggctatgagtacaggtactcgctttcgagccaggg

SEQ ID NO: 139497 - DNA, 55 bp, Artificial
  Synthetic oligonucleotide
gcggtaagggttccgtaatgcctcatggaagcaccaacgcgtgtaaggtggaggg

SEQ ID NO: 139498 - DNA, 55 bp, Artificial
  Synthetic oligonucleotide
gcggtacctgagacctagtgccctcgtgttcagggagatagcgacacataaggaa

SEQ ID NO: 139499 - DNA, 55 bp, Artificial
  Synthetic oligonucleotide
gcgtggagttcaatgcaaccctcgtaaagtcaactggggccaagataaacaacac

SEQ ID NO: 139500 - DNA, 55 bp, Artificial
  Synthetic oligonucleotide
agctccgcaacggcgttatcatcaagccttgcactcatctcgagtttcagttccc

SEQ ID NO: 139501 - DNA, 55 bp, Artificial
  Synthetic oligonucleotide
gctatgataagtcttcaaccaaatggtttaggcttaatcctcttctcagcgagag

SEQ ID NO: 139502 - DNA, 55 bp, Artificial
  Synthetic oligonucleotide
gctcagggagctcacgagaaaccacttcctcgggaacccgataaggttagggatc

SEQ ID NO: 139503 - DNA, 55 bp, Artificial
  Synthetic oligonucleotide
gctccagaggtacataccttacgtgactttctggggctcgctcacggtagccctc

SEQ ID NO: 139504 - DNA, 55 bp, Artificial
  Synthetic oligonucleotide
gctccgaaagttcggggttcatgtcactcagcattttggttatggccagtctggc

SEQ ID NO: 139505 - DNA, 59 bp, Artificial
  Synthetic oligonucleotide
atgttactggtgataagaacccctttgagcctcacttccatattgatgctatcgttact

SEQ ID NO: 139506 - DNA, 55 bp, Artificial
  Synthetic oligonucleotide
gctcctctctctaatccctgtaacgattctctgggcaataggtgtcattcagggg

SEQ ID NO: 139507 - DNA, 55 bp, Artificial
  Synthetic oligonucleotide
gctcgtgctctcataggttctatttccaagtctcttactctttatgcggataggt

SEQ ID NO: 139508 - DNA, 55 bp, Artificial
  Synthetic oligonucleotide
agcggtataaataactatcgctcacaggggctttacctgtctgtgcctgtgtact

SEQ ID NO: 139509 - DNA, 54 bp, Artificial
  Synthetic oligonucleotide
gctcgtggtcgtattcgaggactgccgagtcgaacccttcccgcgggccgtaaa

SEQ ID NO: 139510 - DNA, 55 bp, Artificial
  Synthetic oligonucleotide
gctctcaagattcggagagccagtggaccttcccaagttaatacgtctaaaccca

SEQ ID NO: 139511 - DNA, 55 bp, Artificial
  Synthetic oligonucleotide
gattgttggaatggaagagcctgataacccgctcctcccttatagaacctggctt

SEQ ID NO: 139512 - DNA, 54 bp, Artificial
  Synthetic oligonucleotide
gcaacgtaggcgaagcttatccccgtcattaacccaattataaagggtgtcaag

SEQ ID NO: 139513 - DNA, 55 bp, Artificial
  Synthetic oligonucleotide
gcaacgttggaatcctcgtcagggaggatgccatacccgtgaagccagaggtaag

SEQ ID NO: 139514 - DNA, 55 bp, Artificial
  Synthetic oligonucleotide
gcaactcccgcagctatcccagcatctattaacccttcccctaagaccatggcca

SEQ ID NO: 139515 - DNA, 55 bp, Artificial
  Synthetic oligonucleotide
gcagagctcgaggagccggcagtagtggactatctcggaggggtgacctggagtt

SEQ ID NO: 139516 - DNA, 55 bp, Artificial
  Synthetic oligonucleotide
agcggaggtgtttgagatacccggctacacggtccaagtagagaattggaggtaa

SEQ ID NO: 139517 - DNA, 55 bp, Artificial
  Synthetic oligonucleotide
agggagcttgtcaagagactctgggaagaactttccaaggccaagcttaggagcg

SEQ ID NO: 139518 - DNA, 55 bp, Artificial
  Synthetic oligonucleotide
gcaggactcagcctcttcgccgcaacgatactctactacatcgctccggaaaccg

SEQ ID NO: 139519 - DNA, 55 bp, Artificial
  Synthetic oligonucleotide
gcagtattgtgcccgttatcgtggcggagactattttgacgctctcaggatacca

SEQ ID NO: 139520 - DNA, 55 bp, Artificial
  Synthetic oligonucleotide
gcatacaagctatccagacattaggaagcttgcgtacgaagggaggtttattcaa

SEQ ID NO: 139521 - DNA, 55 bp, Artificial
  Synthetic oligonucleotide
gcatctacaccaggcatgaagtaggcggcatgtcttgtttgaagtacgggtgtgc

SEQ ID NO: 139522 - DNA, 55 bp, Artificial
  Synthetic oligonucleotide
aggctatcacggcgactccgttctgacctagcttgacatccgcctttacggtaac

SEQ ID NO: 139523 - DNA, 55 bp, Artificial
  Synthetic oligonucleotide
gccaagccctgacgtactcagaccccgtagcatctaagaccaaccgaccgtccga

SEQ ID NO: 139524 - DNA, 55 bp, Artificial
  Synthetic oligonucleotide
gccacccttctatagggaactgtgtcaaaggctatgaccgaagcggcttgctgcg

SEQ ID NO: 139525 - DNA, 55 bp, Artificial
  Synthetic oligonucleotide
gccagaggcccatctccgtcccaaattcgcctctctaccttttggtgtctggcat

SEQ ID NO: 139526 - DNA, 55 bp, Artificial
  Synthetic oligonucleotide
gccagtatggatacttcttcagcccagagactaccttaacgcctacattctctgg

SEQ ID NO: 139527 - DNA, 60 bp, Artificial
  Synthetic oligonucleotide
gttcgtatccacgagcagggttgctgagatagctaaccatgtgttcatcagcaacgtaga

SEQ ID NO: 139528 - DNA, 55 bp, Artificial
  Synthetic oligonucleotide
gcccactccggatactcacccgtgagacatgccagacagagatcttccctgccaa

SEQ ID NO: 139529 - DNA, 55 bp, Artificial
  Synthetic oligonucleotide
gcccagcccgccgtcaggagggccacaacaccgttcttaaactctatcagggcag

SEQ ID NO: 139530 - DNA, 55 bp, Artificial
  Synthetic oligonucleotide
gccgtactctatcagggccttcgctattctcctgctctcgtcaggatagtttgct

SEQ ID NO: 139531 - DNA, 55 bp, Artificial
  Synthetic oligonucleotide
gcctattctatgtaatgaggttcatccaacccttaccctcgacactttcatctcg

SEQ ID NO: 139532 - DNA, 55 bp, Artificial
  Synthetic oligonucleotide
ggagattgcactcctgaacctgttaacagccccaatctttcacaagctcgatatt

SEQ ID NO: 139533 - DNA, 55 bp, Artificial
  Synthetic oligonucleotide
ggaggactgcagccgcctataaggaatggagcgttctaagggatgaaattgtgag

SEQ ID NO: 139534 - DNA, 55 bp, Artificial
  Synthetic oligonucleotide
agattcctgaggtatggggttatctccgagtgcttcatccccgtgaagtccctta

SEQ ID NO: 139535 - DNA, 55 bp, Artificial
  Synthetic oligonucleotide
gggccttggagattcctctatcaacctgcagctccgcgcttggaccaagaccgag

SEQ ID NO: 139536 - DNA, 55 bp, Artificial
  Synthetic oligonucleotide
gggccgaatccacccacgaggaatgccctcctaccatcagtaaggattaggtagg

SEQ ID NO: 139537 - DNA, 55 bp, Artificial
  Synthetic oligonucleotide
ggaggggtcatccactattatggctttggacccgagggcgacccttacggatggc

SEQ ID NO: 139538 - DNA, 55 bp, Artificial
  Synthetic oligonucleotide
cgggtttgccccccatctgatgatactcaatcatccggtggggggcaacaaaatt

SEQ ID NO: 139539 - DNA, 55 bp, Artificial
  Synthetic oligonucleotide
gggcactcgtaattccagtagaaccctctgaggttgtagtctgaggagattacga

SEQ ID NO: 139540 - DNA, 55 bp, Artificial
  Synthetic oligonucleotide
gggaaggagttccttccgatggaggcccagctttctcgcttaatcggccagtccc

SEQ ID NO: 139541 - DNA, 53 bp, Artificial
  Synthetic oligonucleotide
agataccagaaatcccataggaagtggtggagtaacggttttagaagaagacc

SEQ ID NO: 139542 - DNA, 55 bp, Artificial
  Synthetic oligonucleotide
ggctacaactactggaaggagggctggggccaggccaacacagagtacgtgaccg

SEQ ID NO: 139543 - DNA, 55 bp, Artificial
  Synthetic oligonucleotide
ggcgtggggaagagtaccataacccggctggctctcagaaaagcccgagctaagt

SEQ ID NO: 139544 - DNA, 55 bp, Artificial
  Synthetic oligonucleotide
agagtaagtgccgtctcacgtggggtcattgcatatctcaacgccttcttaagca

SEQ ID NO: 139545 - DNA, 55 bp, Artificial
  Synthetic oligonucleotide
ggagtgcactcccgtttatctcccttagctcctccaccgtccttgcagccctctc

SEQ ID NO: 139546 - DNA, 54 bp, Artificial
  Synthetic oligonucleotide
ggataactggaatcccgagggagttctacgacagggaagttgacggaacctgga

SEQ ID NO: 139547 - DNA, 55 bp, Artificial
  Synthetic oligonucleotide
ggccgtccaaggttagctctggcgtaggtcgagcaactacccagaagcttctcgc

SEQ ID NO: 139548 - DNA, 55 bp, Artificial
  Synthetic oligonucleotide
ggccgtaatagtggatcttagaactcaagtacttgacgtccccgtccaggagaca

SEQ ID NO: 139549 - DNA, 55 bp, Artificial
  Synthetic oligonucleotide
tacgaaggtggagaacgatgtttactacctcaattatactccgtaggagttataa

SEQ ID NO: 139550 - DNA, 55 bp, Artificial
  Synthetic oligonucleotide
ggcccttgagattaatgggaccatctatgctcagtctggagccttcctcgcgggc

SEQ ID NO: 139551 - DNA, 55 bp, Artificial
  Synthetic oligonucleotide
ggatagtaggccttttcgctggagtagaacataacactgttccttatcgggacgg

SEQ ID NO: 139552 - DNA, 54 bp, Artificial
  Synthetic oligonucleotide
gctctgttaacccgtagtagttgagggcggaccagtacgcaactgccccgttag

SEQ ID NO: 139553 - DNA, 55 bp, Artificial
  Synthetic oligonucleotide
gggctcggggttaagggactctatctcctcatagtgagggctcacgaaacggtgg

SEQ ID NO: 139554 - DNA, 55 bp, Artificial
  Synthetic oligonucleotide
gctgcgtgcccataactccccagttccatagggatggtagaacttaggttggatg

SEQ ID NO: 139555 - DNA, 55 bp, Artificial
  Synthetic oligonucleotide
ggacgaaagagctcttagcacaaagggatatgcaaccgttgagtgagccaacgca

SEQ ID NO: 139556 - DNA, 55 bp, Artificial
  Synthetic oligonucleotide
gcttaggctgaaccagaccgctctccgagagagtgtacgctataagaacgggacc

SEQ ID NO: 139557 - DNA, 51 bp, Artificial
  Synthetic oligonucleotide
ggaagttaccggcgggaaagtaaaacctggggacttcatagcagttccaag

SEQ ID NO: 139558 - DNA, 53 bp, Artificial
  Synthetic oligonucleotide
ggaaggcatccacgaatacgtttgggccgtgggttccgacggaagtgaagtcg

SEQ ID NO: 139559 - DNA, 55 bp, Artificial
  Synthetic oligonucleotide
ggaaagcggtgagaatacgccttacaagaagtttatttgcctacactgtgggcac

SEQ ID NO: 139560 - DNA, 60 bp, Artificial
  Synthetic oligonucleotide
ctctcgtgcacttagtaggtgggatggtccatgaggttgcacgtccatattaatgacaag

SEQ ID NO: 139561 - DNA, 55 bp, Artificial
  Synthetic oligonucleotide
gcttcccaacgtccctgaggctcctgaggagaaagttcctgatctccttgatatg

SEQ ID NO: 139562 - DNA, 51 bp, Artificial
  Synthetic oligonucleotide
ggaaacggtgtgtcctcttgggtcgcggtttgggtcggagtaaacgccaac

SEQ ID NO: 139563 - DNA, 55 bp, Artificial
  Synthetic oligonucleotide
gggtggccttcgggcgttacgggaatcacgtcaatcgtcaggggcttctcgtgga

SEQ ID NO: 139564 - DNA, 55 bp, Artificial
  Synthetic oligonucleotide
ggggtaggcatgttttctataaggctaatgggtatccttcacatgatgaggttgc

SEQ ID NO: 139565 - DNA, 55 bp, Artificial
  Synthetic oligonucleotide
gctttcaatccaataaagataccctcaacctttttgtcgtacggatagtcaagcg

SEQ ID NO: 139566 - DNA, 54 bp, Artificial
  Synthetic oligonucleotide
aaaagccaagagtgtttaacaagctgagagttgactatcctcttgccccatggc

SEQ ID NO: 139567 - DNA, 54 bp, Artificial
  Synthetic oligonucleotide
tttgtagttctcggcccctatattctggccaaccatagttcccatggcttgact

SEQ ID NO: 139568 - DNA, 54 bp, Artificial
  Synthetic oligonucleotide
cgacgccggctttatggtcgtaattgaccccgtatcagcggcgccaccctcctc

SEQ ID NO: 139569 - DNA, 54 bp, Artificial
  Synthetic oligonucleotide
gtaacgctctgttgagtagcttaccatagtggatccgaagagagccaaggatac

SEQ ID NO: 139570 - DNA, 54 bp, Artificial
  Synthetic oligonucleotide
ttatctacacagagggctcaaacttcaagcaagtactgaaggttccaggtgtcg

SEQ ID NO: 139571 - DNA, 56 bp, Artificial
  Synthetic oligonucleotide
atcgttactttcatttgctatgataagtcttcaaccaaatggtttaggcttaatcc

SEQ ID NO: 139572 - DNA, 55 bp, Artificial
  Synthetic oligonucleotide
cgggggatactctcacaaaggacttcaatgtttgggtgggcgataggtattactc

SEQ ID NO: 139573 - DNA, 54 bp, Artificial
  Synthetic oligonucleotide
ttccttcacaatcctcgatactaacgggaaagttatcgcctattacaacatgcc

SEQ ID NO: 139574 - DNA, 54 bp, Artificial
  Synthetic oligonucleotide
ggtggatcgtctaccccaacaagagccttctgtctcctcagtggaacggggagg

SEQ ID NO: 139575 - DNA, 54 bp, Artificial
  Synthetic oligonucleotide
ggtggaagtagagctcaatccaggctatgtggtgctcgggtgtattaggatggg

SEQ ID NO: 139576 - DNA, 54 bp, Artificial
  Synthetic oligonucleotide
ctttcatctactccctcaggtatcttcacaactatctcgctcatatggaggagt

SEQ ID NO: 139577 - DNA, 54 bp, Artificial
  Synthetic oligonucleotide
tcatgaagcccctgtatgagcacctttcgttcatcccgctcttctcgtatcccc

SEQ ID NO: 139578 - DNA, 52 bp, Artificial
  Synthetic oligonucleotide
gcgtacctcaaggggtacaaggtcatgaaaacggtcggaaagggaatagtcc

SEQ ID NO: 139579 - DNA, 54 bp, Artificial
  Synthetic oligonucleotide
gaaattcaccacgctgtgggaacttcatcagcggctgttgtgtttacttcgctt

SEQ ID NO: 139580 - DNA, 54 bp, Artificial
  Synthetic oligonucleotide
cggttataatccccttctacgggataatctccctcatcgtggcatactcaacgg

SEQ ID NO: 139581 - DNA, 54 bp, Artificial
  Synthetic oligonucleotide
gttaagcactaccccaccactatgtatgagattcttgaggctctctttaaacgc

SEQ ID NO: 139582 - DNA, 54 bp, Artificial
  Synthetic oligonucleotide
ccccgcaaggagttgcatttcgaacagcttatgcccttggagcatcttctaagg

SEQ ID NO: 139583 - DNA, 60 bp, Artificial
  Synthetic oligonucleotide
tagaggttgccaaagctggtttactaaagcctacagcgggggctggcataggcatggaga

SEQ ID NO: 139584 - DNA, 54 bp, Artificial
  Synthetic oligonucleotide
gacatagactggcgcgacaaggacatacacggcaatcagataaccggcatgtac

SEQ ID NO: 139585 - DNA, 52 bp, Artificial
  Synthetic oligonucleotide
aagaagggaacccaggccccgggaatcatcaaggccctcggtccccacctga

SEQ ID NO: 139586 - DNA, 53 bp, Artificial
  Synthetic oligonucleotide
cctccaagtaggggtcctattacccaaccgagggtcatcattgtacttaggag

SEQ ID NO: 139587 - DNA, 54 bp, Artificial
  Synthetic oligonucleotide
ccagtaaccctgaggctggacactaaaaaaggacgctggttagtgcattttggc

SEQ ID NO: 139588 - DNA, 54 bp, Artificial
  Synthetic oligonucleotide
gagaaaagcctataagtgggctgtgagaccaaggccaggaccgcacaacatgag

SEQ ID NO: 139589 - DNA, 53 bp, Artificial
  Synthetic oligonucleotide
ttgtgttggtgttaggtcaattagctcgttgtcgtcactcactatcgctacgg

SEQ ID NO: 139590 - DNA, 53 bp, Artificial
  Synthetic oligonucleotide
taactccaaagagttcacacatatctatccctcacggcactacttcgtaaatc

SEQ ID NO: 139591 - DNA, 53 bp, Artificial
  Synthetic oligonucleotide
tagcgaagttaataccaactccctttatagcagtgagcgcccatcttaactgc

SEQ ID NO: 139592 - DNA, 53 bp, Artificial
  Synthetic oligonucleotide
ttttgcagggagttttgccgacccagggctttagggctacccatgtagtttcg

SEQ ID NO: 139593 - DNA, 53 bp, Artificial
  Synthetic oligonucleotide
tcgctcaagctctcaatcacccattctggatcccaaggtagcggggtccccag

SEQ ID NO: 139594 - DNA, 49 bp, Artificial
  Synthetic oligonucleotide
attatcctttagaaacgcgttgggtattgggggagccccccttagtggg

SEQ ID NO: 139595 - DNA, 53 bp, Artificial
  Synthetic oligonucleotide
cggaggagctccataaggtgcttttcaagaataacgtgcttggtaagaaagag

SEQ ID NO: 139596 - DNA, 53 bp, Artificial
  Synthetic oligonucleotide
gtggacattgcgttggcaatgccagtcccctaagcacagctccacatatgcat

SEQ ID NO: 139597 - DNA, 53 bp, Artificial
  Synthetic oligonucleotide
ggttggctaactctatcaggccgtcagtcacaggttgaatgaactctcttgcc

SEQ ID NO: 139598 - DNA, 53 bp, Artificial
  Synthetic oligonucleotide
gaccttctctattgccagggctgagacggcgtgtatgtcaacgcggtccttct

SEQ ID NO: 139599 - DNA, 53 bp, Artificial
  Synthetic oligonucleotide
gacttctccgaggcttatgtacttgagcactataacgccatccaccacgaatt

SEQ ID NO: 139600 - DNA, 53 bp, Artificial
  Synthetic oligonucleotide
tgcactctcgggaacgtactcctccatgtaggttagggtaatgttaagcctct

SEQ ID NO: 139601 - DNA, 53 bp, Artificial
  Synthetic oligonucleotide
aggctgaaccggctaagtggccgaggtaagttccccaggctgcatctctctca

SEQ ID NO: 139602 - DNA, 53 bp, Artificial
  Synthetic oligonucleotide
agggatccaaactggccgggcctaaagggtaggccacagcagttcatcgttga

SEQ ID NO: 139603 - DNA, 53 bp, Artificial
  Synthetic oligonucleotide
aggggagtctgcggcaaggatccagaccttaactcactgcaggaggctctcct

SEQ ID NO: 139604 - DNA, 53 bp, Artificial
  Synthetic oligonucleotide
attacgaagacaagaacgttggaactttgatgactagggaaagctcagttgaa

SEQ ID NO: 139605 - DNA, 60 bp, Artificial
  Synthetic oligonucleotide
cccatagcgggtattcctgaggaccacgagctttatgtggatactattcacagctccaag

SEQ ID NO: 139606 - DNA, 53 bp, Artificial
  Synthetic oligonucleotide
atggcttcctggaatcctgacaactcgaccagggtctacgccatccgcactga

SEQ ID NO: 139607 - DNA, 53 bp, Artificial
  Synthetic oligonucleotide
cccggaggccagccaacgtacggtgccaaatacccgagctcaactgttaccat

SEQ ID NO: 139608 - DNA, 53 bp, Artificial
  Synthetic oligonucleotide
ccgaagcactcaggtcactcggacttgagtttccgggatgaggtcccacgggg

SEQ ID NO: 139609 - DNA, 53 bp, Artificial
  Synthetic oligonucleotide
acatttgaggcgttctgttctcgtttccgaaggaatccctcgcacgaatgtac

SEQ ID NO: 139610 - DNA, 53 bp, Artificial
  Synthetic oligonucleotide
aagtgccgattctgcagcccaacctcccctaggagttgctactccccctccga

SEQ ID NO: 139611 - DNA, 53 bp, Artificial
  Synthetic oligonucleotide
atctgcgagtgagtccctttcgttttgctcccgcgcccttagactccccgaat

SEQ ID NO: 139612 - DNA, 53 bp, Artificial
  Synthetic oligonucleotide
aacgtccctgctgtgggatttaatgtggtcgtagagaaccgtaaacccgatcc

SEQ ID NO: 139613 - DNA, 53 bp, Artificial
  Synthetic oligonucleotide
agttgcgataggtgaaaacggtagacccctacccttccaatacgtactcagga

SEQ ID NO: 139614 - DNA, 53 bp, Artificial
  Synthetic oligonucleotide
atatctaagtccgagggaagccccacatccctggcaagcggtatggccagcat

SEQ ID NO: 139615 - DNA, 52 bp, Artificial
  Synthetic oligonucleotide
aagccccgaagttgcggggatagcggttcacgagagcgttggccatccatat

SEQ ID NO: 139616 - DNA, 55 bp, Artificial
  Synthetic oligonucleotide
gttaagataaacatgcggaaagtccgcgaacttagggcaaagggagttagctatc

SEQ ID NO: 139617 - DNA, 52 bp, Artificial
  Synthetic oligonucleotide
ggcccacctgggttagcccgcctgagaatgcatacatgctacgatgagggcg

SEQ ID NO: 139618 - DNA, 52 bp, Artificial
  Synthetic oligonucleotide
atcaggaagctcggcctccagtagttccgcttctcctgggacggcctgtcta

SEQ ID NO: 139619 - DNA, 52 bp, Artificial
  Synthetic oligonucleotide
agggccccgtgtccaatatgtgcatccgttctcctgggcctagccaaggcga

SEQ ID NO: 139620 - DNA, 52 bp, Artificial
  Synthetic oligonucleotide
aagagatagcggttgcgctctttcccaaggggcccgaagcgtatggggtcga

SEQ ID NO: 139621 - DNA, 52 bp, Artificial
  Synthetic oligonucleotide
attttgaggctcgtggagtggtttgccccgatcggatttgcccttgggtcga

SEQ ID NO: 139622 - DNA, 52 bp, Artificial
  Synthetic oligonucleotide
tggaagggcgtaaagttggccgtgaggatgctttaagcttaccccaatttcc

SEQ ID NO: 139623 - DNA, 52 bp, Artificial
  Synthetic oligonucleotide
ttcagggggaggctacgggtaaggttcacaagacggttagcaagtacaccct

SEQ ID NO: 139624 - DNA, 52 bp, Artificial
  Synthetic oligonucleotide
gatcgcagtagggttcctctccagctaatatatgatgtggggagttgtcccc

SEQ ID NO: 139625 - DNA, 52 bp, Artificial
  Synthetic oligonucleotide
aacttgcacacccatccacgccggagctaagctcttgagctgagtcgccagc

SEQ ID NO: 139626 - DNA, 52 bp, Artificial
  Synthetic oligonucleotide
ggggttccttcttacgcttgtcacgctctttcgggcgtagtaggccgtgccc

SEQ ID NO: 139627 - DNA, 60 bp, Artificial
  Synthetic oligonucleotide
tagcttattctcaactctgtaaagctcttgggattaatccgtctgatgtaggggtctctc

SEQ ID NO: 139628 - DNA, 52 bp, Artificial
  Synthetic oligonucleotide
ctctagatggagttcccgggtggttggtgcactatggagcccgcaggatcga

SEQ ID NO: 139629 - DNA, 52 bp, Artificial
  Synthetic oligonucleotide
gaggtccaagacgtctggtttggctacgagggaagggatgtcctaaagggcg

SEQ ID NO: 139630 - DNA, 52 bp, Artificial
  Synthetic oligonucleotide
ttaaggatgtgctctacaactggatcggcagctacacaggcaatttcgtagg

SEQ ID NO: 139631 - DNA, 52 bp, Artificial
  Synthetic oligonucleotide
ggggaagggctcaaactgatagccgagaagtataacggagaggttatggaca

SEQ ID NO: 139632 - DNA, 52 bp, Artificial
  Synthetic oligonucleotide
aaccgtcgctgttgagttctcagcacccctggctatcctaacgagaccgcgg

SEQ ID NO: 139633 - DNA, 52 bp, Artificial
  Synthetic oligonucleotide
aaccgtgagacccatcccgaggccgtacgtgcccataaccacgactccactt

SEQ ID NO: 139634 - DNA, 52 bp, Artificial
  Synthetic oligonucleotide
tgacccttgcttcattcgttaaagtgtttgcgtcagcgttcttggggccacc

SEQ ID NO: 139635 - DNA, 52 bp, Artificial
  Synthetic oligonucleotide
atcttataacaagtgcactcatgcaagactccgttatctatgtcgctgggta

SEQ ID NO: 139636 - DNA, 52 bp, Artificial
  Synthetic oligonucleotide
cgcacgataaaacccttgcggaaacgatttatagggtcccttcatacctccc

SEQ ID NO: 139637 - DNA, 52 bp, Artificial
  Synthetic oligonucleotide
cgcgatgaggagcctccacgagcacatcgcaaggacgataacagaggatatc

SEQ ID NO: 139638 - DNA, 60 bp, Artificial
  Synthetic oligonucleotide
aatagatgctatgcaggctttcgctgagaaatggggggatagaaagactggggtagagaa

SEQ ID NO: 139639 - DNA, 52 bp, Artificial
  Synthetic oligonucleotide
gtcataaaccgctatgagcgtctccccggagtaatgccctaggaactcattc

SEQ ID NO: 139640 - DNA, 52 bp, Artificial
  Synthetic oligonucleotide
agcccattccgccggttattgggcccacatcaccctcatacgcatgggggta

SEQ ID NO: 139641 - DNA, 52 bp, Artificial
  Synthetic oligonucleotide
cccatgaacgtcaacttcttcgctttcctagtagcgatcttcgtcagcttga

SEQ ID NO: 139642 - DNA, 52 bp, Artificial
  Synthetic oligonucleotide
ccatctttcaaggacaccgtcgttaagtacataaccgaccccactatagcct

SEQ ID NO: 139643 - DNA, 52 bp, Artificial
  Synthetic oligonucleotide
gcgatgtaagcagttatgagaagcatcaccccggagtctcctgcaattcccc

SEQ ID NO: 139644 - DNA, 52 bp, Artificial
  Synthetic oligonucleotide
ccaatagtcggggcaaccgctggagtaataggaactatccaggcaagtgagg

SEQ ID NO: 139645 - DNA, 52 bp, Artificial
  Synthetic oligonucleotide
agagggcagaacttgcacacccatccacgccggagctaagctcttgagctga

SEQ ID NO: 139646 - DNA, 52 bp, Artificial
  Synthetic oligonucleotide
ttggaatagcggctatcgatttaagcggaaacatagtagctctccacagcga

SEQ ID NO: 139647 - DNA, 52 bp, Artificial
  Synthetic oligonucleotide
tccgagggaagccccacatccctggcaagcggtatggccagcataaaagtgc

SEQ ID NO: 139648 - DNA, 52 bp, Artificial
  Synthetic oligonucleotide
cactgtgttgcctgtccaatacgtgcccccagcatgctcctaggcctaaggc

SEQ ID NO: 139649 - DNA, 53 bp, Artificial
  Synthetic oligonucleotide
cttaccgctcctaaggacgttagtttcagtatttgggcttctctcaagaaggg

SEQ ID NO: 139650 - DNA, 52 bp, Artificial
  Synthetic oligonucleotide
acacaggcatctgggttcctgacaatttctgggactgggtcacgggctcagt

SEQ ID NO: 139651 - DNA, 51 bp, Artificial
  Synthetic oligonucleotide
acatccacacctaccctaccaaacgctccaccgaggacccaaatggccgcc

SEQ ID NO: 139652 - DNA, 51 bp, Artificial
  Synthetic oligonucleotide
tagccccctccgtagggaatgagccttgccgatacgtcggaggttgtcaca

SEQ ID NO: 139653 - DNA, 51 bp, Artificial
  Synthetic oligonucleotide
ggggcggggccaactgctaataccgtcacggttcctgggggtatctcagtc

SEQ ID NO: 139654 - DNA, 51 bp, Artificial
  Synthetic oligonucleotide
aatgagctggacgacccccaaaaaggccataatgcttgctgcagctgccga

SEQ ID NO: 139655 - DNA, 51 bp, Artificial
  Synthetic oligonucleotide
gctcggtgctggatactgtccgagctgtgggtcgacaggtccaagaacggc

SEQ ID NO: 139656 - DNA, 51 bp, Artificial
  Synthetic oligonucleotide
agaactaattgaggcagcgcttgagatagcgagggagtactcaacggagga

SEQ ID NO: 139657 - DNA, 51 bp, Artificial
  Synthetic oligonucleotide
aataggcgggcacttcactatgggggttaaggaggctgcgaaggccgttga

SEQ ID NO: 139658 - DNA, 51 bp, Artificial
  Synthetic oligonucleotide
agaactcccccgttttcctcacgggcaactactgcgtgacggtagagcgcg

SEQ ID NO: 139659 - DNA, 51 bp, Artificial
  Synthetic oligonucleotide
tccgtcagctcgcttatgtgcttcagcgggaccccatagccagagggcccg

SEQ ID NO: 139660 - DNA, 60 bp, Artificial
  Synthetic oligonucleotide
gtgtgtggtgtcagttctaagtcatctgagggtgatggcagtagttttatctggtttgat

SEQ ID NO: 139661 - DNA, 51 bp, Artificial
  Synthetic oligonucleotide
agtctcctcgcatgggctcggtatacccgccttcgcaaggtatcgggttct

SEQ ID NO: 139662 - DNA, 51 bp, Artificial
  Synthetic oligonucleotide
tagggcctacaatccagacggtaccctagttcccaggggaagaccaggggc

SEQ ID NO: 139663 - DNA, 51 bp, Artificial
  Synthetic oligonucleotide
tagggtgccccgctccaaataagtgcacgggcctgtctggtcttagtgcca

SEQ ID NO: 139664 - DNA, 51 bp, Artificial
  Synthetic oligonucleotide
tgagggctggtggcgcggggttaaaccgctcatagatgctggccttctaga

SEQ ID NO: 139665 - DNA, 51 bp, Artificial
  Synthetic oligonucleotide
gctgtgcaaaccggacaagtactgccgcggaataaagaacccgttgagcta

SEQ ID NO: 139666 - DNA, 51 bp, Artificial
  Synthetic oligonucleotide
aggtcgatggagagaatcacaccgtcatgatgccgcgggcggacaaatgcg

SEQ ID NO: 139667 - DNA, 51 bp, Artificial
  Synthetic oligonucleotide
aattgcatccaaaggtctcgagctctccggtgttttcacttctctagcgat

SEQ ID NO: 139668 - DNA, 51 bp, Artificial
  Synthetic oligonucleotide
gcctgtccaatacgtgcccccagcatgctcctaggcctaaggccgtggctg

SEQ ID NO: 139669 - DNA, 51 bp, Artificial
  Synthetic oligonucleotide
agaccgggccctcgggctgaaccgaaaggggtaatccgagtaggtgatggg

SEQ ID NO: 139670 - DNA, 51 bp, Artificial
  Synthetic oligonucleotide
tactgccaagaccatttagcattggaagtgttatcatctcatcacatgaca

SEQ ID NO: 139671 - DNA, 60 bp, Artificial
  Synthetic oligonucleotide
cccctgatgctcttttgcttatgtgggattctattgattggtcgagggtgaggactaagc

SEQ ID NO: 139672 - DNA, 51 bp, Artificial
  Synthetic oligonucleotide
gccctctctgcgggaagcctcataaaggggcgaggtttgtccgtgggctgt

SEQ ID NO: 139673 - DNA, 51 bp, Artificial
  Synthetic oligonucleotide
gagggccattctgaccggaactccgctccatacctgccggaaatatgcgga

SEQ ID NO: 139674 - DNA, 49 bp, Artificial
  Synthetic oligonucleotide
agggtctttccccaattacccctacctgccgttaaggcgggaaggctcg

SEQ ID NO: 139675 - DNA, 51 bp, Artificial
  Synthetic oligonucleotide
tatggagtgtaatgggcggctatctcattgagggacaagttaacgggaaaa

SEQ ID NO: 139676 - DNA, 51 bp, Artificial
  Synthetic oligonucleotide
gttggggcccggacctctcccaccgactatgtatatcctccgaccgtccca

SEQ ID NO: 139677 - DNA, 51 bp, Artificial
  Synthetic oligonucleotide
tcccccggctttgggtgcgttattacgtagaccaatgttgccacggaggcc

SEQ ID NO: 139678 - DNA, 51 bp, Artificial
  Synthetic oligonucleotide
tcacgctctttcgggcgtagtaggccgtgcccacaaggtatggaagaacga

SEQ ID NO: 139679 - DNA, 51 bp, Artificial
  Synthetic oligonucleotide
acattcgtcataataggaccaaatcacactggcttaggctcacctgttgcc

SEQ ID NO: 139680 - DNA, 51 bp, Artificial
  Synthetic oligonucleotide
gcaacctaatcctcgtcggtggacctgtcgtcaacaaggtaaccgcggccc

SEQ ID NO: 139681 - DNA, 51 bp, Artificial
  Synthetic oligonucleotide
gatgaccccgagacaaagcggagggaagtagaagcgctcctgagggccgct

SEQ ID NO: 139682 - DNA, 56 bp, Artificial
  Synthetic oligonucleotide
tatgaacttccttgctctaataactaagagaaagggaccagacttcgttaaagaga

SEQ ID NO: 139683 - DNA, 57 bp, Artificial
  Synthetic oligonucleotide
ttacagtgctcgcattagtcggagtttgggactctgaagtgggccccctcaaacgga

SEQ ID NO: 139684 - DNA, 51 bp, Artificial
  Synthetic oligonucleotide
gcgaagccttcgagacgaatggtgcgggtattgccacaaaagtcagtgagg

SEQ ID NO: 139685 - DNA, 51 bp, Artificial
  Synthetic oligonucleotide
aaccccacactcgacttgaaatactcccggccaagctcttgccttttgggt

SEQ ID NO: 139686 - DNA, 51 bp, Artificial
  Synthetic oligonucleotide
gtgggaggtagccccaggacggaaagtagcagtcaccggaagtaaggccga

SEQ ID NO: 139687 - DNA, 51 bp, Artificial
  Synthetic oligonucleotide
ttccggcccctataacgttccccacgagggctagcggaagtgccagtaggg

SEQ ID NO: 139688 - DNA, 51 bp, Artificial
  Synthetic oligonucleotide
ctcaagcccgctctacgggaggagcgatgtcacactgaacctccagccctt

SEQ ID NO: 139689 - DNA, 51 bp, Artificial
  Synthetic oligonucleotide
ctatggacgctaatactgtgaattccggcatagatgcgtttaaacagatag

SEQ ID NO: 139690 - DNA, 51 bp, Artificial
  Synthetic oligonucleotide
caccctcacgcgttgaggtatgcccccgtaattaaggcgagcagaagggct

SEQ ID NO: 139691 - DNA, 51 bp, Artificial
  Synthetic oligonucleotide
aaactagtactaccacatccatacgctgcaatcctcaacgtagtagctgac

SEQ ID NO: 139692 - DNA, 51 bp, Artificial
  Synthetic oligonucleotide
accttgtcagggtggcgtcataaccagtctagaccacgggcccgcccaaat

SEQ ID NO: 139693 - DNA, 51 bp, Artificial
  Synthetic oligonucleotide
cgtatttagggaggctattgaggtatgaagagggattacactctatacctc

SEQ ID NO: 139694 - DNA, 54 bp, Artificial
  Synthetic oligonucleotide
ccttaccctcgacactttcatctcgggtgggtcatctggttctcgaccccgccc

SEQ ID NO: 139695 - DNA, 51 bp, Artificial
  Synthetic oligonucleotide
catagtaccaatttgcagggttctcccatctggcattataacttcagcccc

SEQ ID NO: 139696 - DNA, 51 bp, Artificial
  Synthetic oligonucleotide
tttactacagcgaagtttacgaggcggaattttccatccaggttcttccct

SEQ ID NO: 139697 - DNA, 51 bp, Artificial
  Synthetic oligonucleotide
cggtggacctgtcgtcaacaaggtaaccgcggccctcgcagaggatcttgg

SEQ ID NO: 139698 - DNA, 51 bp, Artificial
  Synthetic oligonucleotide
ccactcgccttcaacgccagtgccgctgactccctggaagagcctatacca

SEQ ID NO: 139699 - DNA, 51 bp, Artificial
  Synthetic oligonucleotide
cggtagcgtccgggttaccataggggacacacctataacgaacggtcccga

SEQ ID NO: 139700 - DNA, 51 bp, Artificial
  Synthetic oligonucleotide
cccagctaacccacccccacatctcctgcatccaacggtcgcaacacctgc

SEQ ID NO: 139701 - DNA, 51 bp, Artificial
  Synthetic oligonucleotide
ccccagaactgtggaggtcatgcctatggagaggggatttgagatacctcc

SEQ ID NO: 139702 - DNA, 51 bp, Artificial
  Synthetic oligonucleotide
aaaatccgaaaatatcaaaggagagcgtcataggcacggtggtgacacttg

SEQ ID NO: 139703 - DNA, 51 bp, Artificial
  Synthetic oligonucleotide
ccgaggccgtcaaatccttcgttcccccactagcacccccgcttatcacca

SEQ ID NO: 139704 - DNA, 51 bp, Artificial
  Synthetic oligonucleotide
ccgccgttctggcccagtatttgtcgggaagcctaacctgtgcccagacaa

SEQ ID NO: 139705 - DNA, 52 bp, Artificial
  Synthetic oligonucleotide
agtaaccttttttaaccagcgcttctattttttctatgaggggaacaggcac

SEQ ID NO: 139706 - DNA, 51 bp, Artificial
  Synthetic oligonucleotide
ccggccggagtgactgggagataagcaccacccgcaaatattgccccacac

SEQ ID NO: 139707 - DNA, 51 bp, Artificial
  Synthetic oligonucleotide
aaaatagaaccaccctctcgaagtctatgtgtccagttaggtaaacgtcaa

SEQ ID NO: 139708 - DNA, 51 bp, Artificial
  Synthetic oligonucleotide
cctctgcccttaacgcgtacccatccaccgccgaacgatcaaagggagggc

SEQ ID NO: 139709 - DNA, 51 bp, Artificial
  Synthetic oligonucleotide
cgaacacgtacagcccgctttcaggccctctgaccttcaccataataaggg

SEQ ID NO: 139710 - DNA, 51 bp, Artificial
  Synthetic oligonucleotide
tggctcgccgggaagtctacaccagctccaagggctgctgtggttacgacg

SEQ ID NO: 139711 - DNA, 51 bp, Artificial
  Synthetic oligonucleotide
gaacccgaacgccatatatgttcattcgattgatgtccactaatgctcccc

SEQ ID NO: 139712 - DNA, 51 bp, Artificial
  Synthetic oligonucleotide
gggtgcgggaacaggggtgttatccattggtgcggctctgcttggagcaaa

SEQ ID NO: 139713 - DNA, 51 bp, Artificial
  Synthetic oligonucleotide
gaaagcctcataagattcgctaggagggccgcgagcactttcgcgtctcag

SEQ ID NO: 139714 - DNA, 51 bp, Artificial
  Synthetic oligonucleotide
atcctcgtcggtggacctgtcgtcaacaaggtaaccgcggccctcgcagag

SEQ ID NO: 139715 - DNA, 51 bp, Artificial
  Synthetic oligonucleotide
cttcaaaacagtagggcagaaattcagcatgcatgaattcttgaccctctt

SEQ ID NO: 139716 - DNA, 54 bp, Artificial
  Synthetic oligonucleotide
ggtagatttagagttagctttcagatttagaactaagggcaataagtgggttta

SEQ ID NO: 139717 - DNA, 51 bp, Artificial
  Synthetic oligonucleotide
ctgtcccttcgattgtggactctgcgcaaggcaccgctcccacacgagcct

SEQ ID NO: 139718 - DNA, 51 bp, Artificial
  Synthetic oligonucleotide
atgattccagagatgccactcgccttcaacgccagtgccgctgactccctg

SEQ ID NO: 139719 - DNA, 51 bp, Artificial
  Synthetic oligonucleotide
ctctgagcggattggtaagttgtttgatgatttggggcttcctgaggggtc

SEQ ID NO: 139720 - DNA, 50 bp, Artificial
  Synthetic oligonucleotide
acaaagcggggcgccgttgtgggttccctccagtatcatcgggtcgtacg

SEQ ID NO: 139721 - DNA, 50 bp, Artificial
  Synthetic oligonucleotide
accccctgttatcggtcctacgtcgccctcgtatgcgtgggggtagtcct

SEQ ID NO: 139722 - DNA, 50 bp, Artificial
  Synthetic oligonucleotide
aattgtcggccctctcgggaaacgccgttaggcctagcctgtagggagcg

SEQ ID NO: 139723 - DNA, 50 bp, Artificial
  Synthetic oligonucleotide
accacagcacaccgtgtgaggtcatgaaccacagcggagacccggttccg

SEQ ID NO: 139724 - DNA, 50 bp, Artificial
  Synthetic oligonucleotide
tacgagtactcccttgcccctgacaccgagcctcttacatgcctcgggga

SEQ ID NO: 139725 - DNA, 50 bp, Artificial
  Synthetic oligonucleotide
gttcaccccgggaacagctgcacatagaccacagtgggccccagggatta

SEQ ID NO: 139726 - DNA, 50 bp, Artificial
  Synthetic oligonucleotide
acccgtccattccatgctcctcgccgatgcgtgggagttgattgaggggt

SEQ ID NO: 139727 - DNA, 60 bp, Artificial
  Synthetic oligonucleotide
ttcagtcgcggcaatactcggagccttgactctaagaggagggagggactatggacgcta

SEQ ID NO: 139728 - DNA, 50 bp, Artificial
  Synthetic oligonucleotide
acccccgctatctgggcactcttgatcgggattagcctgtccgccccata

SEQ ID NO: 139729 - DNA, 50 bp, Artificial
  Synthetic oligonucleotide
accctctcggtgtagtgcctctccaccgtgcgacagcgggtgtttccctt

SEQ ID NO: 139730 - DNA, 50 bp, Artificial
  Synthetic oligonucleotide
acatctgcgctggaacgtgcctcactcctacccaatgggcgggggtatgg

SEQ ID NO: 139731 - DNA, 50 bp, Artificial
  Synthetic oligonucleotide
accacccaacgggaacctacgcctgcatggagggcccacgcttcgagacg

SEQ ID NO: 139732 - DNA, 50 bp, Artificial
  Synthetic oligonucleotide
aattccgaggatcgtggggtcaacgccaaccacgaacaaagcgccagcat

SEQ ID NO: 139733 - DNA, 50 bp, Artificial
  Synthetic oligonucleotide
accattcggtgccctccttgttgtgagcccacgctaccgctaggtcgggg

SEQ ID NO: 139734 - DNA, 50 bp, Artificial
  Synthetic oligonucleotide
aatgcctaagagggccattctgaccggaactccgctccatacctgccgga

SEQ ID NO: 139735 - DNA, 50 bp, Artificial
  Synthetic oligonucleotide
gttgcccctgatggaatcgaatgagataggtttcctccaattgaataaaa

SEQ ID NO: 139736 - DNA, 50 bp, Artificial
  Synthetic oligonucleotide
gtgggctcctttagcggacacccccgagccatgcatggtgatcatgcatt

SEQ ID NO: 139737 - DNA, 50 bp, Artificial
  Synthetic oligonucleotide
accagtagccaggcttggccgccactatgatatccccgctgttgagcgta

SEQ ID NO: 139738 - DNA, 58 bp, Artificial
  Synthetic oligonucleotide
ccttgatggagtacattaagcccgactggaagaggactattaaacttgagcggattca

SEQ ID NO: 139739 - DNA, 50 bp, Artificial
  Synthetic oligonucleotide
accagcctcgtgtacgctccgctgaggacgattcccagcgtcaacgccgg

SEQ ID NO: 139740 - DNA, 50 bp, Artificial
  Synthetic oligonucleotide
acgagggaaacgttccgggccgagctcctaaaggcggggttctcagaggg

SEQ ID NO: 139741 - DNA, 50 bp, Artificial
  Synthetic oligonucleotide
accctgtcgtccctccgggttccatcgctcaccctttccacttcgggaag

SEQ ID NO: 139742 - DNA, 50 bp, Artificial
  Synthetic oligonucleotide
accggtggggcgatactcgacgctaaaagcggtgccagtgacgctatcct

SEQ ID NO: 139743 - DNA, 50 bp, Artificial
  Synthetic oligonucleotide
acccgaggactgaggcgcccctgcttgttttgatcctgctcccgagaact

SEQ ID NO: 139744 - DNA, 50 bp, Artificial
  Synthetic oligonucleotide
acagggttccgcgcttcctctgcaggtgggttcacctccgcgtaaacgac

SEQ ID NO: 139745 - DNA, 50 bp, Artificial
  Synthetic oligonucleotide
taaggagtgcgacgagcggaagggcactatggagtacagagcacgctgga

SEQ ID NO: 139746 - DNA, 50 bp, Artificial
  Synthetic oligonucleotide
taagggccagctttaactgtccctccggcatctccccctggagccatctg

SEQ ID NO: 139747 - DNA, 50 bp, Artificial
  Synthetic oligonucleotide
acctcaagcccaactccctcttcgtggcgaccttcataggcgctcccgag

SEQ ID NO: 139748 - DNA, 50 bp, Artificial
  Synthetic oligonucleotide
acctcggcaggtccgggcttgatgtcccctccgatcttgtcctgagctgg

SEQ ID NO: 139749 - DNA, 59 bp, Artificial
  Synthetic oligonucleotide
agaaaatcatcgtctcaatgagccttgggagcccgttcggctcgcccaatgaccctatg

SEQ ID NO: 139750 - DNA, 50 bp, Artificial
  Synthetic oligonucleotide
acaggccggatggcttcagcgggggcaaacctttctcgcccctgagtccg

SEQ ID NO: 139751 - DNA, 50 bp, Artificial
  Synthetic oligonucleotide
acctctgctgggtacccctcatcctcagccatacctcacaccccgcggtg

SEQ ID NO: 139752 - DNA, 50 bp, Artificial
  Synthetic oligonucleotide
acagcacccccgctcacgaatggaagtacgagcattgacgccagcagcca

SEQ ID NO: 139753 - DNA, 50 bp, Artificial
  Synthetic oligonucleotide
acacccgtccactcctcaacggtgcttatcactgcctccctcggaacgcc

SEQ ID NO: 139754 - DNA, 50 bp, Artificial
  Synthetic oligonucleotide
acaggtacaacaccgacgttctgagcgtcatcgagaggcacccacgcgga

SEQ ID NO: 139755 - DNA, 50 bp, Artificial
  Synthetic oligonucleotide
acccctgggctggtgcactcatggttctctcggtttacccgaacaccgcg

SEQ ID NO: 139756 - DNA, 49 bp, Artificial
  Synthetic oligonucleotide
accttccaccgggtttttccgggatgttacacccttcgcagggggcgct

SEQ ID NO: 139757 - DNA, 50 bp, Artificial
  Synthetic oligonucleotide
acatactgcctcacccaggggaactagactccgcgggagcggggctagtc

SEQ ID NO: 139758 - DNA, 50 bp, Artificial
  Synthetic oligonucleotide
acaccaacgttttcctatacgcggcggttgaggagatgccccgccacagg

SEQ ID NO: 139759 - DNA, 50 bp, Artificial
  Synthetic oligonucleotide
acgacccgaagggagagccggggcttatagctggccaaccttacatccga

SEQ ID NO: 139760 - DNA, 57 bp, Artificial
  Synthetic oligonucleotide
ctactccggttctgctctttatggtgaccgctttgttattgatgtccccgtagctta

SEQ ID NO: 139761 - DNA, 50 bp, Artificial
  Synthetic oligonucleotide
accgctggtcatcgcgtgtggggctttgagcggattccactcaatcgtcg

SEQ ID NO: 139762 - DNA, 50 bp, Artificial
  Synthetic oligonucleotide
acaaccacggccgagtcaaccttgggcctcggatagaaggctcccctccc

SEQ ID NO: 139763 - DNA, 50 bp, Artificial
  Synthetic oligonucleotide
taccacgcggtgattgggcggggaatcgttaaaatcggagggtctggcaa

SEQ ID NO: 139764 - DNA, 50 bp, Artificial
  Synthetic oligonucleotide
taccgcccatgaccctcatcctcgaggggaagccgaacccacctttgagg

SEQ ID NO: 139765 - DNA, 50 bp, Artificial
  Synthetic oligonucleotide
acgactctctcaggggcggtaacgagggaaacgttccgggccgagctcct

SEQ ID NO: 139766 - DNA, 50 bp, Artificial
  Synthetic oligonucleotide
aacgggccgatgtaaagcaggagagggttgaacaggagcagaaccgccct

SEQ ID NO: 139767 - DNA, 50 bp, Artificial
  Synthetic oligonucleotide
aacgctcgccttcccaaagagaaccgccttcctgagcaggccctcccagc

SEQ ID NO: 139768 - DNA, 50 bp, Artificial
  Synthetic oligonucleotide
aacgctcgcctcgacgtccctcgacataatcccggaccacgtgacgctcc

SEQ ID NO: 139769 - DNA, 50 bp, Artificial
  Synthetic oligonucleotide
tgccctccgaaggaagctatacgctcgaactccagttcaatggccagaca

SEQ ID NO: 139770 - DNA, 50 bp, Artificial
  Synthetic oligonucleotide
aacgccaaagggcccgatatacgagacggttgccaggtttgagctggccg

SEQ ID NO: 139771 - DNA, 56 bp, Artificial
  Synthetic oligonucleotide
gggtagacttcttgtttggatctattttattgtgcgttgtgtttctatggtcggtc

SEQ ID NO: 139772 - DNA, 50 bp, Artificial
  Synthetic oligonucleotide
aacgattgagagcaccacaagcgggactgctattgagcccgccccaccga

SEQ ID NO: 139773 - DNA, 50 bp, Artificial
  Synthetic oligonucleotide
aacgaggtctccaggccttacgtcggtcgggtaggggtgctggtaggttc

SEQ ID NO: 139774 - DNA, 50 bp, Artificial
  Synthetic oligonucleotide
tgggcctaggcttggtggcccaggttaggggatacgagggtgtattcccg

SEQ ID NO: 139775 - DNA, 50 bp, Artificial
  Synthetic oligonucleotide
tgggcgtgtcatactcggggaacttgtaagccttcataagactaatccta

SEQ ID NO: 139776 - DNA, 50 bp, Artificial
  Synthetic oligonucleotide
aacgaggctggtgctagggctttcatagcttaccgtgagggaaccgggga

SEQ ID NO: 139777 - DNA, 50 bp, Artificial
  Synthetic oligonucleotide
aacgagaaaggccccaacttccgggaatcgcagagtctggagcccaaggg

SEQ ID NO: 139778 - DNA, 50 bp, Artificial
  Synthetic oligonucleotide
aacgactacctgggagggatactcccccagtgcatacaccccggcttcgg

SEQ ID NO: 139779 - DNA, 50 bp, Artificial
  Synthetic oligonucleotide
aacctgcaacctctgcgcgactttgaaggtcttgctcccgagcgttgccg

SEQ ID NO: 139780 - DNA, 50 bp, Artificial
  Synthetic oligonucleotide
tggtttctggcgtgtagctccaaccaactgcagcaggctgcttgccccat

SEQ ID NO: 139781 - DNA, 50 bp, Artificial
  Synthetic oligonucleotide
aaccgggtccgagaagtccctaacatttccgtgggcgcagaggacggccg

SEQ ID NO: 139782 - DNA, 55 bp, Artificial
  Synthetic oligonucleotide
ttctctcaaagcgctttggttcccggatgcttgccctttaccgggactacaacaa

SEQ ID NO: 139783 - DNA, 50 bp, Artificial
  Synthetic oligonucleotide
aaccgcttgagctgtcgtcgttcctcctggcgtggactccccgattacga

SEQ ID NO: 139784 - DNA, 50 bp, Artificial
  Synthetic oligonucleotide
aaccctcacgaccgtgtcgggtcttgagaggttgacgcgaaagccttgcg

SEQ ID NO: 139785 - DNA, 50 bp, Artificial
  Synthetic oligonucleotide
aacccggggccggcaaccatccccgaaaaatcatgctaatgggtgatgct

SEQ ID NO: 139786 - DNA, 50 bp, Artificial
  Synthetic oligonucleotide
aacccctcgcaaaggccgggctaacgccgaacgcggttactgtgataggc

SEQ ID NO: 139787 - DNA, 50 bp, Artificial
  Synthetic oligonucleotide
aaccaatactgagacgggcacggggacagttacggaaacgccgacgccta

SEQ ID NO: 139788 - DNA, 50 bp, Artificial
  Synthetic oligonucleotide
aacatcttattctcaccaaccttcgtggtagggaactcatcgctatgaca

SEQ ID NO: 139789 - DNA, 50 bp, Artificial
  Synthetic oligonucleotide
aaagtggttccttgagcggcatcctggggccgagcttgtgcccttaaacg

SEQ ID NO: 139790 - DNA, 50 bp, Artificial
  Synthetic oligonucleotide
aaaggtctacggggtggacataaggcccgacatggtcgagggggccaaaa

SEQ ID NO: 139791 - DNA, 50 bp, Artificial
  Synthetic oligonucleotide
aaaggccatccccggagaagggccgatgtgggccgaaaagggtgaggagc

SEQ ID NO: 139792 - DNA, 50 bp, Artificial
  Synthetic oligonucleotide
aaagctcgaagccgatgtgggggtcggcaaaaacgagggccttcccgcgg

SEQ ID NO: 139793 - DNA, 54 bp, Artificial
  Synthetic oligonucleotide
tattgagttcgagaagggtaactcttcccgtgaggttctactaagggttgcttg

SEQ ID NO: 139794 - DNA, 60 bp, Artificial
  Synthetic oligonucleotide
caagccgcttcacatgggacacgcgaggaactcgattctcggagacactatggcaagggt

SEQ ID NO: 139795 - DNA, 50 bp, Artificial
  Synthetic oligonucleotide
aaaccggtccctcccgcgacccaacgatgttcgtcgccaggttctcggga

SEQ ID NO: 139796 - DNA, 50 bp, Artificial
  Synthetic oligonucleotide
aaaccggacactcggaaagctccaccacgccgaggggatccccgtactcc

SEQ ID NO: 139797 - DNA, 50 bp, Artificial
  Synthetic oligonucleotide
aaaccctcgccttgtcccccatcagctcgaccctcgttgccgaggctatc

SEQ ID NO: 139798 - DNA, 50 bp, Artificial
  Synthetic oligonucleotide
aaacaggctccgtggagtccctgagggggcctatgaactgctcgcaatgg

SEQ ID NO: 139799 - DNA, 50 bp, Artificial
  Synthetic oligonucleotide
aaaaggcccgatgggttcccagtaccgggagccgaagatatacacggcga

SEQ ID NO: 139800 - DNA, 50 bp, Artificial
  Synthetic oligonucleotide
aaaacgttaaaagggtggtgtcgtaattatgacacgcaagacatatttag

SEQ ID NO: 139801 - DNA, 50 bp, Artificial
  Synthetic oligonucleotide
aatcagcgctctcctcagccggttctggttaggcaggctcgtgagtgggt

SEQ ID NO: 139802 - DNA, 50 bp, Artificial
  Synthetic oligonucleotide
aagtgcctcgaccgttgaacggccctttctgatctcgcccacgaccctct

SEQ ID NO: 139803 - DNA, 50 bp, Artificial
  Synthetic oligonucleotide
tagttccggcccttataggtagcctgcccagacctgtcgggttggcgaag

SEQ ID NO: 139804 - DNA, 50 bp, Artificial
  Synthetic oligonucleotide
aagtccgcccacagaaccgtccttggcggggagccggagataatctacgg

SEQ ID NO: 139805 - DNA, 59 bp, Artificial
  Synthetic oligonucleotide
ggcttgtttattgtgtatgagcataaggacaggtctgttagggttcttttctctgagcg

SEQ ID NO: 139806 - DNA, 50 bp, Artificial
  Synthetic oligonucleotide
aaggttcgacgctaccgacgcgcccataacccacttcaagccgagggaga

SEQ ID NO: 139807 - DNA, 50 bp, Artificial
  Synthetic oligonucleotide
aaggttcagagtcgcctgccttatgagaagagggccaaacctcgcccccg

SEQ ID NO: 139808 - DNA, 50 bp, Artificial
  Synthetic oligonucleotide
aaggggctggccaagaccccatcagctacccgaaccagggacccgctaag

SEQ ID NO: 139809 - DNA, 50 bp, Artificial
  Synthetic oligonucleotide
aagggcgtcatagagaggatggccaagggatacaagccgcccggcaacat

SEQ ID NO: 139810 - DNA, 50 bp, Artificial
  Synthetic oligonucleotide
aagggccattctcaccgctatgaggtccctgcccctaaccttacccgcta

SEQ ID NO: 139811 - DNA, 50 bp, Artificial
  Synthetic oligonucleotide
aagggcaagggccttaccccaaatggtccccgccttctcggagtcagtcg

SEQ ID NO: 139812 - DNA, 50 bp, Artificial
  Synthetic oligonucleotide
aaggcctatggtatctgagcgacgggagggccgtagactcgaaagggccg

SEQ ID NO: 139813 - DNA, 50 bp, Artificial
  Synthetic oligonucleotide
aaggcatacgaaggcgagacgatagccacagctttacacgccgcggggat

SEQ ID NO: 139814 - DNA, 50 bp, Artificial
  Synthetic oligonucleotide
aaggcagagggggcacacctgaccgctggggtgtagctcaatacacctcc

SEQ ID NO: 139815 - DNA, 50 bp, Artificial
  Synthetic oligonucleotide
aaggacatgcacgtttcaggccacgcgagcagggaggatcaccgctacct

SEQ ID NO: 139816 - DNA, 58 bp, Artificial
  Synthetic oligonucleotide
aaagaactccgctctataaacaagcagttatcgaggcttttccttgatgatagggaga

SEQ ID NO: 139817 - DNA, 50 bp, Artificial
  Synthetic oligonucleotide
aagcggtggttccgctcgctattccaaggtagagcaccgttgagccgggc

SEQ ID NO: 139818 - DNA, 50 bp, Artificial
  Synthetic oligonucleotide
aagcgctgagagcggcgttcccacattcaggggattcaacggcctttgga

SEQ ID NO: 139819 - DNA, 50 bp, Artificial
  Synthetic oligonucleotide
aagccgtgcctctccgcaacgcgcctgagggcctcggtgtcaacgtccct

SEQ ID NO: 139820 - DNA, 50 bp, Artificial
  Synthetic oligonucleotide
aagccctatcgcaacccagaagggaacacccgtccactcctcaacggtgc

SEQ ID NO: 139821 - DNA, 50 bp, Artificial
  Synthetic oligonucleotide
tcgattgtggattgtgcgcaaggcaccgctcccacacgagcctcctaaac

SEQ ID NO: 139822 - DNA, 50 bp, Artificial
  Synthetic oligonucleotide
aagccccctttactacgttggccgtctcgcggcaaaggaggagcagtcga

SEQ ID NO: 139823 - DNA, 50 bp, Artificial
  Synthetic oligonucleotide
aagcatggtcttagcaatcgattcccagagcccccagaggcgcttccgct

SEQ ID NO: 139824 - DNA, 50 bp, Artificial
  Synthetic oligonucleotide
aagcacgttccccacgagcgcaggatactcatcggtgagggcataaccgg

SEQ ID NO: 139825 - DNA, 50 bp, Artificial
  Synthetic oligonucleotide
aagatggtagtcgcagcgaagagcccgctcactggtggctacggtgacgg

SEQ ID NO: 139826 - DNA, 50 bp, Artificial
  Synthetic oligonucleotide
aagagtcagctcctccgctacgtggccaatctggcgccgagggcgattta

SEQ ID NO: 139827 - DNA, 58 bp, Artificial
  Synthetic oligonucleotide
ttgggaacttggcaaaggcgttatcattcaatcattaaacgtcttatgagggctgggc

SEQ ID NO: 139828 - DNA, 50 bp, Artificial
  Synthetic oligonucleotide
aagaggccgccagtaatgtgtcccggctgtcctcaccgcggctcatacag

SEQ ID NO: 139829 - DNA, 50 bp, Artificial
  Synthetic oligonucleotide
aagacctgtccgtgtatgccggcccagacccactcgtcctgactccactc

SEQ ID NO: 139830 - DNA, 50 bp, Artificial
  Synthetic oligonucleotide
aagacctgcctgaagtagagtgcgcgctccgtcctatcgacctccgggtg

SEQ ID NO: 139831 - DNA, 50 bp, Artificial
  Synthetic oligonucleotide
tctcccacgggcacttggatcacataggggcagtgggaaagctagccccc

SEQ ID NO: 139832 - DNA, 50 bp, Artificial
  Synthetic oligonucleotide
tctcggaaaggcttacccttaaaatcggtcttgagtatgcaacgggactt

SEQ ID NO: 139833 - DNA, 50 bp, Artificial
  Synthetic oligonucleotide
aactgttatgacgcgttccggcctcggccttaaccgggcgacgtagctta

SEQ ID NO: 139834 - DNA, 50 bp, Artificial
  Synthetic oligonucleotide
aacgtttgccgcaacgttaaggccggctatgaggtactccctctcccgga

SEQ ID NO: 139835 - DNA, 50 bp, Artificial
  Synthetic oligonucleotide
aacgtcggtgttgctgaacgggggcatggtgtaccctgaaacgctggcaa

SEQ ID NO: 139836 - DNA, 50 bp, Artificial
  Synthetic oligonucleotide
aggggcattcccgttgttatcccgcccaacacacccccgtggttgttcgt

SEQ ID NO: 139837 - DNA, 50 bp, Artificial
  Synthetic oligonucleotide
gatcgagctctatgtactccagatccttgtacgtctttatcctgtcagag

SEQ ID NO: 139838 - DNA, 60 bp, Artificial
  Synthetic oligonucleotide
gcagagtcattgaacaactccaactaaaggaggggttatgatggcagatgccgtgctttt

SEQ ID NO: 139839 - DNA, 50 bp, Artificial
  Synthetic oligonucleotide
aggggcttcgtcgtaatcttcagcaacccgaggggaagcgacggctatgg

SEQ ID NO: 139840 - DNA, 50 bp, Artificial
  Synthetic oligonucleotide
aggggcttctccgtcccttcctcctcgggtatcacaagggctgccaggaa

SEQ ID NO: 139841 - DNA, 50 bp, Artificial
  Synthetic oligonucleotide
agggttatcacgctcggtcaggagccgagggtcggtagcgtttccgtcat

SEQ ID NO: 139842 - DNA, 50 bp, Artificial
  Synthetic oligonucleotide
aggttgagggaacgcccatagtcaacgcaggctccgtgagctgggagctc

SEQ ID NO: 139843 - DNA, 50 bp, Artificial
  Synthetic oligonucleotide
agtattccagagcccacggcggttccaacggcctttgcactgtcgttcgc

SEQ ID NO: 139844 - DNA, 50 bp, Artificial
  Synthetic oligonucleotide
agtccccgtgcgggaagccgccaacgattacaatcgggttctccagcccc

SEQ ID NO: 139845 - DNA, 50 bp, Artificial
  Synthetic oligonucleotide
agtgaacgttcaggtggtaccgaaccccggctactcacagccgaggggag

SEQ ID NO: 139846 - DNA, 50 bp, Artificial
  Synthetic oligonucleotide
agttcgtcgaccctcatttgccctcagctccacatccctttgaccggcgg

SEQ ID NO: 139847 - DNA, 50 bp, Artificial
  Synthetic oligonucleotide
agtttccgacgtcgtagcagggcacgaggtcaacgcgcactcccctgtat

SEQ ID NO: 139848 - DNA, 50 bp, Artificial
  Synthetic oligonucleotide
ataaccgacttctcaagccgcggcccaacagccgacaacaggctcaagcc

SEQ ID NO: 139849 - DNA, 59 bp, Artificial
  Synthetic oligonucleotide
ttgtcctgactcttcccgaagaaatcagctattatatctggtccaagcttcgtgagggg

SEQ ID NO: 139850 - DNA, 50 bp, Artificial
  Synthetic oligonucleotide
ataacgggcgaccacagcacaccgtgtgaggtcatgaaccacagcggaga

SEQ ID NO: 139851 - DNA, 50 bp, Artificial
  Synthetic oligonucleotide
atagagctctccctagcgaccgcaattataacgccggccccggtggttgc

SEQ ID NO: 139852 - DNA, 50 bp, Artificial
  Synthetic oligonucleotide
ataggcggaatatggccctttgtcggctctccggcgaaggctgcccttct

SEQ ID NO: 139853 - DNA, 50 bp, Artificial
  Synthetic oligonucleotide
atagggaccgagggcacagctcccgcagacccctatgccgcacttcatat

SEQ ID NO: 139854 - DNA, 50 bp, Artificial
  Synthetic oligonucleotide
atcaacgccaggtggaacgacaaccgcccaagctgtcctgtggaccctcg

SEQ ID NO: 139855 - DNA, 50 bp, Artificial
  Synthetic oligonucleotide
aggatgccaggctctcaacgcccccaagagagggcgaggggaataccctc

SEQ ID NO: 139856 - DNA, 50 bp, Artificial
  Synthetic oligonucleotide
aggccagatgggctcaaccgacatgagtgccctcgaccttgcctggacga

SEQ ID NO: 139857 - DNA, 50 bp, Artificial
  Synthetic oligonucleotide
aggccattccatcgaccccgcggttgtagggggcactgagccattgggtg

SEQ ID NO: 139858 - DNA, 50 bp, Artificial
  Synthetic oligonucleotide
gcccttacctacgcaaaggctaaccttcggagtggggtatttaaagagat

SEQ ID NO: 139859 - DNA, 50 bp, Artificial
  Synthetic oligonucleotide
aggcccctctccacagacactccggttcttcgcttgagctcttccgcgaa

SEQ ID NO: 139860 - DNA, 57 bp, Artificial
  Synthetic oligonucleotide
ttgtgcgaggtggtggagatggaaagcggtgagaatacgccttacaagaagtttatt

SEQ ID NO: 139861 - DNA, 50 bp, Artificial
  Synthetic oligonucleotide
aggccccttttgctcgcctccttgtgcgtggccgttatggggacttctct

SEQ ID NO: 139862 - DNA, 50 bp, Artificial
  Synthetic oligonucleotide
aggccctacgggaggggcgactcggagatagcgaggctccttagagaggc

SEQ ID NO: 139863 - DNA, 50 bp, Artificial
  Synthetic oligonucleotide
aggccctcgtaaggggaggtgccgagctctacgtcgtctcgaagcacaaa

SEQ ID NO: 139864 - DNA, 50 bp, Artificial
  Synthetic oligonucleotide
aggcctcggatcgtagggcggagcgtgcatgacgataacggcccttcttc

SEQ ID NO: 139865 - DNA, 50 bp, Artificial
  Synthetic oligonucleotide
aggcgggcttcctattcacaactggcaaggacgtgccgaggagcggtgtg

SEQ ID NO: 139866 - DNA, 50 bp, Artificial
  Synthetic oligonucleotide
aggctacccaggcaaccatcccaagcgtcctcatacccataaaccgcgcg

SEQ ID NO: 139867 - DNA, 50 bp, Artificial
  Synthetic oligonucleotide
aggctcgcaagggtaaagctggtgaggccagaacttgctaggcaggtcga

SEQ ID NO: 139868 - DNA, 50 bp, Artificial
  Synthetic oligonucleotide
agggaactgggcttcgtcgagagggaatggaacgaccccattgacctgcg

SEQ ID NO: 139869 - DNA, 50 bp, Artificial
  Synthetic oligonucleotide
agggctggaagggttatcacgctcggtcaggagccgagggtcggtagcgt

SEQ ID NO: 139870 - DNA, 50 bp, Artificial
  Synthetic oligonucleotide
agggcttgctcggctaccacggcttctccgccttagttgagcaccgcggt

SEQ ID NO: 139871 - DNA, 59 bp, Artificial
  Synthetic oligonucleotide
gagttaaaaccggagtctgaccaggagcctcaaaactctgagtctgtggactctccaga

SEQ ID NO: 139872 - DNA, 50 bp, Artificial
  Synthetic oligonucleotide
aggggagagcacgtgagggatgctctactattctcggccttagccgcggc

SEQ ID NO: 139873 - DNA, 50 bp, Artificial
  Synthetic oligonucleotide
aggggagccttccctattcgaccaaaggttttgaggctcgtcccgacggc

SEQ ID NO: 139874 - DNA, 50 bp, Artificial
  Synthetic oligonucleotide
atttccatgggaagggccgcggttccaagcggtgcctcaaccggaactca

SEQ ID NO: 139875 - DNA, 50 bp, Artificial
  Synthetic oligonucleotide
ctcagcgtgtgctttcccgcctctgttatctcgaccctgaaggttacgtt

SEQ ID NO: 139876 - DNA, 50 bp, Artificial
  Synthetic oligonucleotide
caacgccgattagggcctccgcacgccatgcctcgatgcctatccccctc

SEQ ID NO: 139877 - DNA, 50 bp, Artificial
  Synthetic oligonucleotide
caaggtccaccgtgagcgttcccccgctccttggagtgaacctgacgaag

SEQ ID NO: 139878 - DNA, 50 bp, Artificial
  Synthetic oligonucleotide
cacactacttcatgccccttccaggaaccccgtgggcacggtgcaagcct

SEQ ID NO: 139879 - DNA, 50 bp, Artificial
  Synthetic oligonucleotide
cacagtgggattccgctcttgtacgctgcccttatgagtgcgtgggcgct

SEQ ID NO: 139880 - DNA, 50 bp, Artificial
  Synthetic oligonucleotide
cacccccaacgcaagaagagccgggctgcacagacacggaagcgttatta

SEQ ID NO: 139881 - DNA, 50 bp, Artificial
  Synthetic oligonucleotide
cacgggcctccccagaacggccttctatagggccctctcactagcctcca

SEQ ID NO: 139882 - DNA, 60 bp, Artificial
  Synthetic oligonucleotide
gataagtcgtctcatacgtggtaccgtttgaatcctgtccttgatgaggcggatcttgag

SEQ ID NO: 139883 - DNA, 50 bp, Artificial
  Synthetic oligonucleotide
cacgtcgtcgttggcacccccggaagggttctcgatcatataaggcgcgg

SEQ ID NO: 139884 - DNA, 50 bp, Artificial
  Synthetic oligonucleotide
cactacgccccctactgggagggtaaggttcacgtagagggcaccgtcga

SEQ ID NO: 139885 - DNA, 50 bp, Artificial
  Synthetic oligonucleotide
cagcgtttgctaatatccagccgcatgaagtaaactgggatgtgctcgct

SEQ ID NO: 139886 - DNA, 50 bp, Artificial
  Synthetic oligonucleotide
caggaacgcgggttggattcgtgtcgttgacgtgaaagaccgccttggcg

SEQ ID NO: 139887 - DNA, 50 bp, Artificial
  Synthetic oligonucleotide
catagcctggccgacgtcgctgttaatgtcgcctctccagaggtgcggga

SEQ ID NO: 139888 - DNA, 50 bp, Artificial
  Synthetic oligonucleotide
ccaccggggctgataactccttccttaacgtcaaaagcggcgacgccccc

SEQ ID NO: 139889 - DNA, 50 bp, Artificial
  Synthetic oligonucleotide
cccgaaccccgaagacgagaacatgcctaggataaagacggtgcccgcct

SEQ ID NO: 139890 - DNA, 50 bp, Artificial
  Synthetic oligonucleotide
ccgtggttatcgactttgcggcaaccagtggagcgtaagcttgggcccag

SEQ ID NO: 139891 - DNA, 50 bp, Artificial
  Synthetic oligonucleotide
cggaaccaccggagagattcgaggccggaacccctaacataggcggagca

SEQ ID NO: 139892 - DNA, 50 bp, Artificial
  Synthetic oligonucleotide
ccttagactcttccccactaaaatggagcctttgttcacccttacccttc

SEQ ID NO: 139893 - DNA, 58 bp, Artificial
  Synthetic oligonucleotide
cgatgcctaggccagttaagcatgtgtataagtttgagattggggggctaccagtaac

SEQ ID NO: 139894 - DNA, 50 bp, Artificial
  Synthetic oligonucleotide
atcaggacctttgcaggtctgaggcccgagccgactggaggggacttcat

SEQ ID NO: 139895 - DNA, 50 bp, Artificial
  Synthetic oligonucleotide
atcatgggaacgtgggttatttgagttgcgggagtgggtgggacgcccgc

SEQ ID NO: 139896 - DNA, 50 bp, Artificial
  Synthetic oligonucleotide
atcccacgccccacagccgacaaagcgaacgagcaatggatccttgctct

SEQ ID NO: 139897 - DNA, 50 bp, Artificial
  Synthetic oligonucleotide
atccctccagtttccgacgtcgtagcagggcacgaggtcaacgcgcactc

SEQ ID NO: 139898 - DNA, 50 bp, Artificial
  Synthetic oligonucleotide
atccctcttgaggtcacgcaggcgccttccaaggatttcactcggggcag

SEQ ID NO: 139899 - DNA, 50 bp, Artificial
  Synthetic oligonucleotide
atcgagagcgctcccccgtcctctccaacaacgggtccgctcgtccctat

SEQ ID NO: 139900 - DNA, 50 bp, Artificial
  Synthetic oligonucleotide
atgacagacattgactcaatcctctacaagccagtgtatgataagtttgg

SEQ ID NO: 139901 - DNA, 50 bp, Artificial
  Synthetic oligonucleotide
atgcctctcctgcggacgtggcctattcagtccacctggccctcggaagg

SEQ ID NO: 139902 - DNA, 50 bp, Artificial
  Synthetic oligonucleotide
atgcgacgagtgcccgctgagggagctgtgtccctattcaaaggggcttg

SEQ ID NO: 139903 - DNA, 50 bp, Artificial
  Synthetic oligonucleotide
atgtaagcgggaagggaaaccgacccgttcagtctgccgctcccaacagc

SEQ ID NO: 139904 - DNA, 60 bp, Artificial
  Synthetic oligonucleotide
gtgaggctagagcagtttactagagtgcatgagaaagcagagaaagctgtaatagatgct

SEQ ID NO: 139905 - DNA, 59 bp, Artificial
  Synthetic oligonucleotide
gatgactttgataggtcctttgtgagtttcatctttgattataagaaccggactgagag

SEQ ID NO: 139906 - DNA, 50 bp, Artificial
  Synthetic oligonucleotide
atgtccgctccacgcttcatgacacccaagcttggataggccggcttgta

SEQ ID NO: 139907 - DNA, 50 bp, Artificial
  Synthetic oligonucleotide
atgttggaacttcgacaggcttccctcccgcgaggattactgcgggggca

SEQ ID NO: 139908 - DNA, 50 bp, Artificial
  Synthetic oligonucleotide
attccgggacgaaaggccttctgcacgcctaagagcgggggaaagaccga

SEQ ID NO: 139909 - DNA, 50 bp, Artificial
  Synthetic oligonucleotide
attcgtttacagggggagcccatcaaagacaggccccctcggaacccaga

SEQ ID NO: 139910 - DNA, 50 bp, Artificial
  Synthetic oligonucleotide
attctgccgtccggctgagatgagggcgggagttacgggcgggccacact

SEQ ID NO: 139911 - DNA, 50 bp, Artificial
  Synthetic oligonucleotide
attgggccctcaggctacggagtcccgctgaagcacataagcgagctgac

SEQ ID NO: 139912 - DNA, 50 bp, Artificial
  Synthetic oligonucleotide
ctccccgctaacggggttcctggtggggcttaagtgaactaccgcgaagc

SEQ ID NO: 139913 - DNA, 50 bp, Artificial
  Synthetic oligonucleotide
ctcccaattcaagttgccgaggggagttaagagggcggcagcccagggat

SEQ ID NO: 139914 - DNA, 50 bp, Artificial
  Synthetic oligonucleotide
ggtagggtagcattcaccagccatgacgatccccttacggagccgagggc

SEQ ID NO: 139915 - DNA, 50 bp, Artificial
  Synthetic oligonucleotide
acttgcacgggaacttcatggcggccctcctagtgccctcgatggcgaac

SEQ ID NO: 139916 - DNA, 59 bp, Artificial
  Synthetic oligonucleotide
gggctatgggaggcctttaggcatagattttccggagctcagatctccttagtgaagga

SEQ ID NO: 139917 - DNA, 50 bp, Artificial
  Synthetic oligonucleotide
agaacatgaggctctggtcgaggggacagcggtagtcctccagcgagtga

SEQ ID NO: 139918 - DNA, 50 bp, Artificial
  Synthetic oligonucleotide
agaacccatccgaggcgttcttcttcccacgggggcagaaaagcggaagc

SEQ ID NO: 139919 - DNA, 50 bp, Artificial
  Synthetic oligonucleotide
agaacccgttaaggaggtgttgcgaatggccgagcttccgattgccccga

SEQ ID NO: 139920 - DNA, 50 bp, Artificial
  Synthetic oligonucleotide
ggggagtgtcgactagctcctggggctcgaggtagctgtatctcagggcc

SEQ ID NO: 139921 - DNA, 50 bp, Artificial
  Synthetic oligonucleotide
agaactaacagggagggcgggccatcgagcctcgcagccgcgatagttgg

SEQ ID NO: 139922 - DNA, 50 bp, Artificial
  Synthetic oligonucleotide
agacaagctcggccctctgggcacccctaacgtcgctgttgagggagtta

SEQ ID NO: 139923 - DNA, 50 bp, Artificial
  Synthetic oligonucleotide
agaccaggatgccgcttccggggtattcggaggagggcttaacgctggca

SEQ ID NO: 139924 - DNA, 50 bp, Artificial
  Synthetic oligonucleotide
agaccgcttggggagccgctgtggattagagggggctgaaccgccttaaa

SEQ ID NO: 139925 - DNA, 50 bp, Artificial
  Synthetic oligonucleotide
gggatgaacttgcccgtgctgtgagaaccgagctctttgacttagataag

SEQ ID NO: 139926 - DNA, 50 bp, Artificial
  Synthetic oligonucleotide
agacctgccgagagggcctccctaacgaggtgctcctggtatgcgtgggc

SEQ ID NO: 139927 - DNA, 56 bp, Artificial
  Synthetic oligonucleotide
aaaactctatcgtccgacgcgcacgttcttccatcgtgttcaggttatctactact

SEQ ID NO: 139928 - DNA, 50 bp, Artificial
  Synthetic oligonucleotide
agaccttcctcgtcctaaggcgtctcttgacggcactcctcaggggcggc

SEQ ID NO: 139929 - DNA, 50 bp, Artificial
  Synthetic oligonucleotide
agacgagggcattcatgctccccaacatagactgcggcctctgcggcttt

SEQ ID NO: 139930 - DNA, 50 bp, Artificial
  Synthetic oligonucleotide
agacgattccgtagccgactataccgccgattatcgaatgggtcgttgaa

SEQ ID NO: 139931 - DNA, 50 bp, Artificial
  Synthetic oligonucleotide
agactcccgagggtggttacttccctccttgtcggggcttccctttcgct

SEQ ID NO: 139932 - DNA, 50 bp, Artificial
  Synthetic oligonucleotide
agagaaaaagccctactgccggcgctgtgcgtacagggacttctgctggg

SEQ ID NO: 139933 - DNA, 50 bp, Artificial
  Synthetic oligonucleotide
acgagggactctacgccgttcagacacaggcctacgggccggagtctaga

SEQ ID NO: 139934 - DNA, 50 bp, Artificial
  Synthetic oligonucleotide
acgccaacggggttcggagagtcgttgcccagcgctatgttcgtccctgc

SEQ ID NO: 139935 - DNA, 50 bp, Artificial
  Synthetic oligonucleotide
acgcgaggtgtccgggctttggaatagcgtgcatcggttgcagaggtgcg

SEQ ID NO: 139936 - DNA, 50 bp, Artificial
  Synthetic oligonucleotide
acgcggtgctttccccgataattccatcgccggacagggtcgagagctcc

SEQ ID NO: 139937 - DNA, 50 bp, Artificial
  Synthetic oligonucleotide
acgctcaaccgctatagggctccaccccagatggctctccgggggtgcat

SEQ ID NO: 139938 - DNA, 50 bp, Artificial
  Synthetic oligonucleotide
caagggggaaaatcgggtatctcctaaccgccgcgtcccttttagaggcc

SEQ ID NO: 139939 - DNA, 50 bp, Artificial
  Synthetic oligonucleotide
acgctctccgaggtatgccccgctctggtgggcctacgccgttggaatcg

SEQ ID NO: 139940 - DNA, 50 bp, Artificial
  Synthetic oligonucleotide
acggcactgagagcacaggaaacggcaagcgtgatttgaggagcggcgga

SEQ ID NO: 139941 - DNA, 50 bp, Artificial
  Synthetic oligonucleotide
acgggcccgcctcccgaaggggtctagcatcgatggcacccggttaatgt

SEQ ID NO: 139942 - DNA, 50 bp, Artificial
  Synthetic oligonucleotide
acgggccttgagcctcggtggggctgagtaaaccgttgcaagggcaacca

SEQ ID NO: 139943 - DNA, 50 bp, Artificial
  Synthetic oligonucleotide
acggtgtcccctacatcctctggggaagcggagtatcccagtggggcgag

SEQ ID NO: 139944 - DNA, 50 bp, Artificial
  Synthetic oligonucleotide
acgtcgcctccaggcgtttcaagcctatccctaagcccgccggccctttc

SEQ ID NO: 139945 - DNA, 50 bp, Artificial
  Synthetic oligonucleotide
acgtttggcatggccgcccgagaattgtagcgggtcccaaacaggtcgat

SEQ ID NO: 139946 - DNA, 50 bp, Artificial
  Synthetic oligonucleotide
actccccagagcctcgcggtaaagcggagctcctcggtgtagtcaccggg

SEQ ID NO: 139947 - DNA, 50 bp, Artificial
  Synthetic oligonucleotide
actccctgtcgggtcgagcaccctcacgacgagctcagagccctcttgcc

SEQ ID NO: 139948 - DNA, 50 bp, Artificial
  Synthetic oligonucleotide
actcccttaccaccggatcgctgggagttacccacgcggccaagagggga

SEQ ID NO: 139949 - DNA, 52 bp, Artificial
  Synthetic oligonucleotide
aaaaagtaccgaccaaactccacagttccaagccaaaccctcctaagcatcc

SEQ ID NO: 139950 - DNA, 50 bp, Artificial
  Synthetic oligonucleotide
actgcccgttgtccatttgctcgcccttaaagtgcgtcctccggacgcga

SEQ ID NO: 139951 - DNA, 50 bp, Artificial
  Synthetic oligonucleotide
acttagctccgaagaggccgccagtaatgtgtcccggctgtcctcaccgc

SEQ ID NO: 139952 - DNA, 50 bp, Artificial
  Synthetic oligonucleotide
acttctggacgcttgacccggacagggaaacctgtggcgacccgccgtgt

SEQ ID NO: 139953 - DNA, 50 bp, Artificial
  Synthetic oligonucleotide
acttgacaacctcgttacggcgatgaccggtgaccagccgaacccgggaa

SEQ ID NO: 139954 - DNA, 50 bp, Artificial
  Synthetic oligonucleotide
agcgttcaatgctgccgttcgaagtccgaagccctatgccctcgggactg

SEQ ID NO: 139955 - DNA, 50 bp, Artificial
  Synthetic oligonucleotide
gctcctcaagttgctctatggcaccggccctaaacgtatcgctcgccgct

SEQ ID NO: 139956 - DNA, 50 bp, Artificial
  Synthetic oligonucleotide
agctattcttgccagttcgggctccttacgccccagaactcccgcgatcc

SEQ ID NO: 139957 - DNA, 50 bp, Artificial
  Synthetic oligonucleotide
agctcacgatacacggctacgacgttttggccataagggccctcgcgagg

SEQ ID NO: 139958 - DNA, 50 bp, Artificial
  Synthetic oligonucleotide
agctcagcacgggtcagaaggagagggccaggatagcctcgctcctcgct

SEQ ID NO: 139959 - DNA, 50 bp, Artificial
  Synthetic oligonucleotide
agctcccagttccagcgaccactaagcttccatcgatcgccaagctccgg

SEQ ID NO: 139960 - DNA, 52 bp, Artificial
  Synthetic oligonucleotide
cggaatttggcgaaaagcggctttttgcagggagttttgccgacccagggct

SEQ ID NO: 139961 - DNA, 50 bp, Artificial
  Synthetic oligonucleotide
agctccggaaccggattcatggaagccgccgttagaaacaccgtgccgag

SEQ ID NO: 139962 - DNA, 50 bp, Artificial
  Synthetic oligonucleotide
agctcgcccctcggcgcctcatacctgcctattccctcgccgtcaaccat

SEQ ID NO: 139963 - DNA, 50 bp, Artificial
  Synthetic oligonucleotide
agctctccgggaatcggaccggccgagatgtcaaagcgcggactctttcc

SEQ ID NO: 139964 - DNA, 50 bp, Artificial
  Synthetic oligonucleotide
agctgcgtgggggataagcagactcggctcacgggagtcagtggtgagcg

SEQ ID NO: 139965 - DNA, 50 bp, Artificial
  Synthetic oligonucleotide
agctgctgcaaccctgccgagcattgtcagtcacctcagatcagcccggg

SEQ ID NO: 139966 - DNA, 50 bp, Artificial
  Synthetic oligonucleotide
agctgtgttgatgaagttccgttgtagtcgccagtgaacagagtaacgtc

SEQ ID NO: 139967 - DNA, 50 bp, Artificial
  Synthetic oligonucleotide
agcttcccaaccaccgcctcccatgacggtatagcgagtgccaacgcctc

SEQ ID NO: 139968 - DNA, 50 bp, Artificial
  Synthetic oligonucleotide
gcgagaacctcatccgttgctcccgaccaaatgacacccccgccgactat

SEQ ID NO: 139969 - DNA, 50 bp, Artificial
  Synthetic oligonucleotide
agctttgccctcgcccgcacagtccaccaggttattgccataaacgcggc

SEQ ID NO: 139970 - DNA, 50 bp, Artificial
  Synthetic oligonucleotide
aggaacgttctctttttgcccgccccgagcgccctgctctcaagtgctat

SEQ ID NO: 139971 - DNA, 57 bp, Artificial
  Synthetic oligonucleotide
tctcacgggagagcgggtagcaaagactccggttaggggattctgcggattgccgtg

SEQ ID NO: 139972 - DNA, 50 bp, Artificial
  Synthetic oligonucleotide
aggacctcattgagcgcagggaggtgagggcatgaagttctacgcgattt

SEQ ID NO: 139973 - DNA, 50 bp, Artificial
  Synthetic oligonucleotide
aggacgaccccgtacttcggctcctcctccttaacgctcagggcctccat

SEQ ID NO: 139974 - DNA, 50 bp, Artificial
  Synthetic oligonucleotide
agagaaccgagcggaggggtgccataccgagtccaccggcgaccaggagt

SEQ ID NO: 139975 - DNA, 50 bp, Artificial
  Synthetic oligonucleotide
agagcgctatggggttgggtctgacgggcgaacgggtggcaaagactccc

SEQ ID NO: 139976 - DNA, 50 bp, Artificial
  Synthetic oligonucleotide
agaggagctcctggacggtgtttgccatgcccctcttcagaaccacgggg

SEQ ID NO: 139977 - DNA, 50 bp, Artificial
  Synthetic oligonucleotide
agaggcaaacgtctacgagatgggggactccgagagggccagactcggga

SEQ ID NO: 139978 - DNA, 50 bp, Artificial
  Synthetic oligonucleotide
agatccccgtcgggggttacctcagctatcgttatcccgtgggctccctc

SEQ ID NO: 139979 - DNA, 50 bp, Artificial
  Synthetic oligonucleotide
agcaactctgctcacaagcgttgtcttcccaactcctgccgggccggtta

SEQ ID NO: 139980 - DNA, 50 bp, Artificial
  Synthetic oligonucleotide
agcaggccacgccagtgcccatatttttcgctgggtctcgttgcggaaca

SEQ ID NO: 139981 - DNA, 50 bp, Artificial
  Synthetic oligonucleotide
agcaggcccctccagccggataaacgctatctgaacaaagcgctcgccgt

SEQ ID NO: 139982 - DNA, 58 bp, Artificial
  Synthetic oligonucleotide
cagaatcaagtggtcagagctaccttatcacggcggtactcaaggattcgggtggaaa

SEQ ID NO: 139983 - DNA, 50 bp, Artificial
  Synthetic oligonucleotide
agcatcctgcgataaggctgagggacgaggttggggcgagcgttaaggtt

SEQ ID NO: 139984 - DNA, 50 bp, Artificial
  Synthetic oligonucleotide
agcatctctgagaaccaggcaggtatggttggcttcgcaccctcgcgcgg

SEQ ID NO: 139985 - DNA, 50 bp, Artificial
  Synthetic oligonucleotide
agcattcatcctcggctcgttagccggttaccttttcgccctcggaggga

SEQ ID NO: 139986 - DNA, 50 bp, Artificial
  Synthetic oligonucleotide
agccaagatgacggtcgcctcgccccttatcgcatcgccacctgcgaaga

SEQ ID NO: 139987 - DNA, 50 bp, Artificial
  Synthetic oligonucleotide
agccaggagtaaggggcggcgattcgggtctcctcatgggctctgagagc

SEQ ID NO: 139988 - DNA, 50 bp, Artificial
  Synthetic oligonucleotide
agcccgcgctttatagccaggctctgaacgggaaggagttcgctaacgcc

SEQ ID NO: 139989 - DNA, 50 bp, Artificial
  Synthetic oligonucleotide
agccgctacgctcaggggcgtaacgaaaacgtcgcagcccttaccgtact

SEQ ID NO: 139990 - DNA, 50 bp, Artificial
  Synthetic oligonucleotide
agcctcttggcaacgctcacggtttcccctgccaagttctcgcccaaaag

SEQ ID NO: 139991 - DNA, 50 bp, Artificial
  Synthetic oligonucleotide
agcctcttggtaaggggtgagcctcttgaactccatgccaccaccggggg

SEQ ID NO: 139992 - DNA, 50 bp, Artificial
  Synthetic oligonucleotide
agcctgccaccctatcttgagccgacgttctacgcaacaagggggcttga

SEQ ID NO: 139993 - DNA, 58 bp, Artificial
  Synthetic oligonucleotide
ggtttcgtgacaagtgacatggttgggttcgtggtcggatacaaaagatatgtgcgaa

SEQ ID NO: 139994 - DNA, 50 bp, Artificial
  Synthetic oligonucleotide
agcgtaacctccgctcccctgaagtccgcctcttcggctatggcaactcc

SEQ ID NO: 139995 - DNA, 56 bp, Artificial
  Synthetic oligonucleotide
cctagtagaggctgaaaagaggggtaggcatgttttctataaggctaatgggtatc

SEQ ID NO: 139996 - DNA, 58 bp, Artificial
  Synthetic oligonucleotide
ctttagggctacccatgtagtttcgtcccagctcatgctactaaggcatggggtggga

SEQ ID NO: 139997 - DNA, 60 bp, Artificial
  Synthetic oligonucleotide
aactctagccgtcacaatagccctcgtcttgagaggaatagacgaagttgtggatgacta

SEQ ID NO: 139998 - DNA, 60 bp, Artificial
  Synthetic oligonucleotide
aactccattagcaatgcgctctattgctcttgaagttgtgttgccctggtcaaatgtata

SEQ ID NO: 139999 - DNA, 58 bp, Artificial
  Synthetic oligonucleotide
ggatttgcacgaactaaaggttgcgattcttgagaagaggacttttagtgagcttgga

SEQ ID NO: 140000 - DNA, 55 bp, Artificial
  Synthetic oligonucleotide
cctcgtactgttaaagagaatcggattgtttctttgttggagagtcttcacggaa

SEQ ID NO: 140001 - DNA, 51 bp, Artificial
  Synthetic oligonucleotide
cggaaaacgggttgttggtctctctgttgagtatatccgttaccttacccg

SEQ ID NO: 140002 - DNA, 60 bp, Artificial
  Synthetic oligonucleotide
acgtcgagatatcattcgcagactcgaacaagacatttgtgcgggttatagtcgatggaa

SEQ ID NO: 140003 - DNA, 58 bp, Artificial
  Synthetic oligonucleotide
caccttcagtccacgaattcgttcttgcctccctcttcgtaaagccaagtgccatagc

SEQ ID NO: 140004 - DNA, 60 bp, Artificial
  Synthetic oligonucleotide
caccttagctatgatgaccagcctattctatgtaatgaggttcatccaacccttaccctc

SEQ ID NO: 140005 - DNA, 55 bp, Artificial
  Synthetic oligonucleotide
ttaagggctgggatttgtgggaagggtataataagcaaaaacgctatgtgtataa

SEQ ID NO: 140006 - DNA, 53 bp, Artificial
  Synthetic oligonucleotide
tgttctttactcgttgtttgttccgtctttccgtgtgaggttcctttgtcttg

SEQ ID NO: 140007 - DNA, 58 bp, Artificial
  Synthetic oligonucleotide
agcaccccgacgagaaaatcatcgtctcaatgagccttgggagcccgttcggctcgcc

SEQ ID NO: 140008 - DNA, 58 bp, Artificial
  Synthetic oligonucleotide
gagcgactaggggtttctgttaggactgtgcagaataagattaagaggctggtagatt

SEQ ID NO: 140009 - DNA, 60 bp, Artificial
  Synthetic oligonucleotide
caccacaacttgaccgacatttacagggagctcatgttatactatgcatgggacttcccc

SEQ ID NO: 140010 - DNA, 60 bp, Artificial
  Synthetic oligonucleotide
aggcgtagacttgagcgtgtggaccttactgatgaggagcgctcctctcttgaggctgag

SEQ ID NO: 140011 - DNA, 55 bp, Artificial
  Synthetic oligonucleotide
tgggggtgtgcctgtatgacaccttccaactttattgtaagtttgggtgtcattt

SEQ ID NO: 140012 - DNA, 60 bp, Artificial
  Synthetic oligonucleotide
ggtgaatatcgctatgaccctcatagcgggaagctcattgttcgtattggtaattggacg

SEQ ID NO: 140013 - DNA, 57 bp, Artificial
  Synthetic oligonucleotide
gccactgttatggcactgttatggtattgtgataccaattttttggggtctggtacc

SEQ ID NO: 140014 - DNA, 56 bp, Artificial
  Synthetic oligonucleotide
ctacacggaatgaaaaggttatggaaagggctaaggctcttggcattgatttggga

SEQ ID NO: 140015 - DNA, 55 bp, Artificial
  Synthetic oligonucleotide
actctaaaagccgaaaccacaactgcatgggggcacgtgacaggaaacacggacg

SEQ ID NO: 140016 - DNA, 60 bp, Artificial
  Synthetic oligonucleotide
tgcccctgcctttagaacagttgcaggtgctctatatggaggtacggcaaagcggtataa

SEQ ID NO: 140017 - DNA, 59 bp, Artificial
  Synthetic oligonucleotide
taatgacaagttgggtgaactgttcaagaagcgtgtccaccttgtgtatggggataggc

SEQ ID NO: 140018 - DNA, 59 bp, Artificial
  Synthetic oligonucleotide
tcgaagtgaggatacctcttgctcatcgagaaacacgagaccggaggagtataaaagcg

SEQ ID NO: 140019 - DNA, 57 bp, Artificial
  Synthetic oligonucleotide
gtcaagtagcgtagcaagcccctaggtagcttggaggaatcgactactaggagtttc

SEQ ID NO: 140020 - DNA, 56 bp, Artificial
  Synthetic oligonucleotide
gtaccgctcgctagcattacgcctacgcttacctcgggtacgtctactccctcgtc

SEQ ID NO: 140021 - DNA, 57 bp, Artificial
  Synthetic oligonucleotide
cgcgtcctccaagctgacggctaggactaggagcgtgaacaacaggtggtagccggg

SEQ ID NO: 140022 - DNA, 57 bp, Artificial
  Synthetic oligonucleotide
ggtaaccgtcacggttgactgtccaccgccagtagggctctacgagcttgtctggta

SEQ ID NO: 140023 - DNA, 56 bp, Artificial
  Synthetic oligonucleotide
ggggtgctaccccctgtatcccaccctgtgcgctaggactaacgtggtgtgcacgg

SEQ ID NO: 140024 - DNA, 59 bp, Artificial
  Synthetic oligonucleotide
gctcgtcctcgacgtctatgctcagcctctcggcgtggctcctccacagcgccctaaac

SEQ ID NO: 140025 - DNA, 58 bp, Artificial
  Synthetic oligonucleotide
aggtgcttctgcggggaggtagccgttatacgcgtgggtgacgtactgctctgcaaga

SEQ ID NO: 140026 - DNA, 55 bp, Artificial
  Synthetic oligonucleotide
cccctcgacggctagctccctcagcactcttacgtctttccacgtgtaggggtac

SEQ ID NO: 140027 - DNA, 57 bp, Artificial
  Synthetic oligonucleotide
ctagccacgtagccaagctgtggagccacgtagaacgagtttctccgagccagtata

SEQ ID NO: 140028 - DNA, 57 bp, Artificial
  Synthetic oligonucleotide
taggatacagctgagggttaggttcgagaacgggaaggacgtcgtgatagtggacta

SEQ ID NO: 140029 - DNA, 60 bp, Artificial
  Synthetic oligonucleotide
aaatagttgtctctcccttcttagcccgatgagcaatgattagcccgataatcctgctcc

SEQ ID NO: 140030 - DNA, 53 bp, Artificial
  Synthetic oligonucleotide
actccctaacatcggctaggaagtctcggactaactgctttacctcggggtct

SEQ ID NO: 140031 - DNA, 55 bp, Artificial
  Synthetic oligonucleotide
gtggttccttgtaaccttgtggcgcgatccaagcaagctgtaagcactttcgaga

SEQ ID NO: 140032 - DNA, 55 bp, Artificial
  Synthetic oligonucleotide
cgaaagccctgtcatccgagacaataacgccgtctacggctagcgccgaggctgc

SEQ ID NO: 140033 - DNA, 55 bp, Artificial
  Synthetic oligonucleotide
cctccccaggtttctgtcggcgggactgtaggagtaaatgctcctaacgccaatg

SEQ ID NO: 140034 - DNA, 55 bp, Artificial
  Synthetic oligonucleotide
cctactctctaggccgcttaaccttttctcgacgtaagcaatcctcctctcgatg

SEQ ID NO: 140035 - DNA, 55 bp, Artificial
  Synthetic oligonucleotide
acgcctagctccttgacggactccagtattctcgcctcgcgtagaagcgagaccc

SEQ ID NO: 140036 - DNA, 55 bp, Artificial
  Synthetic oligonucleotide
actcgttagaatagcgtgaagccccaaggtctacgtggtgcaggtccccgtatac

SEQ ID NO: 140037 - DNA, 55 bp, Artificial
  Synthetic oligonucleotide
actgtccaccgccagtagggctctacgagcttgtctggtacgtgagctggggagg

SEQ ID NO: 140038 - DNA, 55 bp, Artificial
  Synthetic oligonucleotide
agggagtcgctacgcagagtcgagctccagagggttgaggggacctacgtctacg

SEQ ID NO: 140039 - DNA, 55 bp, Artificial
  Synthetic oligonucleotide
ccgtgattagctcgcctagcccttgtcctcgcctgttcactcccccgtacttcac

SEQ ID NO: 140040 - DNA, 54 bp, Artificial
  Synthetic oligonucleotide
cacgctcatagcggggtatagaacgcgggggtagctaataaaggtttcgcttta

SEQ ID NO: 140041 - DNA, 55 bp, Artificial
  Synthetic oligonucleotide
aacactccgcggggttgtccgtgcactcgaatggtctaagcctctcgtataccgc

SEQ ID NO: 140042 - DNA, 55 bp, Artificial
  Synthetic oligonucleotide
aggttacactggccggtggtgtgcactatgtatagcacgggttaacctggtcctc

SEQ ID NO: 140043 - DNA, 55 bp, Artificial
  Synthetic oligonucleotide
atagggtacctcgactctgcgagccttccacccgtgatactgttccacgagtaca

SEQ ID NO: 140044 - DNA, 55 bp, Artificial
  Synthetic oligonucleotide
caagtcccgcagtggatgcacgtggattcgttgacctttatccctccgttctctg

SEQ ID NO: 140045 - DNA, 55 bp, Artificial
  Synthetic oligonucleotide
caccgtgatctcctcaacgctaaacgtcacgagcataggatccaactggaccctg

SEQ ID NO: 140046 - DNA, 55 bp, Artificial
  Synthetic oligonucleotide
gcgtaaggcattgagggatcttcgctacgcgtttgtaaccgtgagtacttctcgc

SEQ ID NO: 140047 - DNA, 55 bp, Artificial
  Synthetic oligonucleotide
gcgctcacagaggctggtaaggcgaccgccctgcttgcaatcccgctcatctact

SEQ ID NO: 140048 - DNA, 54 bp, Artificial
  Synthetic oligonucleotide
gggaccgtactcctttctcacgttgttaaggttctctgcaacctcccttatggc

SEQ ID NO: 140049 - DNA, 55 bp, Artificial
  Synthetic oligonucleotide
gcgagaaggctggggcttaagtccgtgaaagggcttgtttacgatagccgttaca

SEQ ID NO: 140050 - DNA, 55 bp, Artificial
  Synthetic oligonucleotide
gataccgggtattcggcgagactctagatataccgctcggaaactgcctcgacac

SEQ ID NO: 140051 - DNA, 60 bp, Artificial
  Synthetic oligonucleotide
aatcacgggggcttgtagaccgtactgcatcctgctgggcacgtgcatgaagaggaacca

SEQ ID NO: 140052 - DNA, 55 bp, Artificial
  Synthetic oligonucleotide
gacgacatagcgaatcaccgttggcacgagataaacgaagctgtaccgccgggtc

SEQ ID NO: 140053 - DNA, 55 bp, Artificial
  Synthetic oligonucleotide
gcgtaatgctctaatactttccccgttctaggcggatacatgcccgtcgttcggg

SEQ ID NO: 140054 - DNA, 55 bp, Artificial
  Synthetic oligonucleotide
ggctacccgtctgggcaacgttcgttacatgggcaggttacttcgcgctaggcgc

SEQ ID NO: 140055 - DNA, 55 bp, Artificial
  Synthetic oligonucleotide
ctagtcccaggactactagctttaaactttcgcgtagagctgtgctttatgctct

SEQ ID NO: 140056 - DNA, 55 bp, Artificial
  Synthetic oligonucleotide
cgtcttcgaagtgggacgagtggtacataaagcccgttatagacatcctagctcg

SEQ ID NO: 140057 - DNA, 55 bp, Artificial
  Synthetic oligonucleotide
cggggctcctgatggagtgcgcgtggagaaccgtttgatagcctgtacgtatagt

SEQ ID NO: 140058 - DNA, 52 bp, Artificial
  Synthetic oligonucleotide
ggttaggctgaaccctaacgtacccttgaagaccaggggtaacggtgcagta

SEQ ID NO: 140059 - DNA, 55 bp, Artificial
  Synthetic oligonucleotide
gtgaggaggagcgagctagtggttatagcagtcaagccgtaccacttcccacagc

SEQ ID NO: 140060 - DNA, 54 bp, Artificial
  Synthetic oligonucleotide
tcccgctggacgtggctttatgtagcggtgtttctccgtccttggttctcgcgt

SEQ ID NO: 140061 - DNA, 54 bp, Artificial
  Synthetic oligonucleotide
ttcgctgtagacgaccctcagcgctaccgcgtactcatagctcctagagtcccc

SEQ ID NO: 140062 - DNA, 58 bp, Artificial
  Synthetic oligonucleotide
agcgtagagcgctttagcctctacggggtcgaatactagtagccacatacgattctcc

SEQ ID NO: 140063 - DNA, 54 bp, Artificial
  Synthetic oligonucleotide
tagtgccagagaggaacccacgagagaactcgggcacccggcccgtaccacccc

SEQ ID NO: 140064 - DNA, 53 bp, Artificial
  Synthetic oligonucleotide
ggtcggctagcagttcatagccccatatcgacgtgtccacgcctaggattatc

SEQ ID NO: 140065 - DNA, 53 bp, Artificial
  Synthetic oligonucleotide
tagccgtcacggagtcaaaggctagaatcatcttagccaagaccccccaccta

SEQ ID NO: 140066 - DNA, 52 bp, Artificial
  Synthetic oligonucleotide
gcttgaaggcgggacggggccctgcatattccagatggagcacgtgtggtct

SEQ ID NO: 140067 - DNA, 52 bp, Artificial
  Synthetic oligonucleotide
gccacgagatgaacgcggctgggtcaggcttacccgtatcctctacgaactt

SEQ ID NO: 140068 - DNA, 51 bp, Artificial
  Synthetic oligonucleotide
aagcgtggtcttggggtacgcggttagaaagggggtcaacttcatactggg

SEQ ID NO: 140069 - DNA, 52 bp, Artificial
  Synthetic oligonucleotide
tattatgccccatacttggtgcttgactccctgtactagccagcggtagccg

SEQ ID NO: 140070 - DNA, 51 bp, Artificial
  Synthetic oligonucleotide
cccagagaggcgtaacaaggacgtagtcctagacacgcccctcggtagcta

SEQ ID NO: 140071 - DNA, 51 bp, Artificial
  Synthetic oligonucleotide
aggtagccataacgcagaccccgcttcctaggctggtggcggtcttctaca

SEQ ID NO: 140072 - DNA, 50 bp, Artificial
  Synthetic oligonucleotide
aaggctcaccttttaccgtgcggggcacatactcgggtcggccatggtcc

SEQ ID NO: 140073 - DNA, 59 bp, Artificial
  Synthetic oligonucleotide
taggggctaaatcgcggttacgccttatggctaggcgcaatcgctctacctcgctattg

SEQ ID NO: 140074 - DNA, 50 bp, Artificial
  Synthetic oligonucleotide
aaggcccgggaggcttaacgtgaacctctatgtcgacgcattccccgagc

SEQ ID NO: 140075 - DNA, 50 bp, Artificial
  Synthetic oligonucleotide
aaggccccttcattcgtcacgtagacccccacgttgccaacagggaggat

SEQ ID NO: 140076 - DNA, 50 bp, Artificial
  Synthetic oligonucleotide
aaacacccgggggtagctcgagttgcactacgccttgctcggcgttcctc

SEQ ID NO: 140077 - DNA, 50 bp, Artificial
  Synthetic oligonucleotide
aaacgttatactaggcgtgcgtgcgatggcggctacgggtaggcggctcc

SEQ ID NO: 140078 - DNA, 50 bp, Artificial
  Synthetic oligonucleotide
aagccgcgagaaacctggccgagtggctagtgaggcgcgctaagggtatt

SEQ ID NO: 140079 - DNA, 50 bp, Artificial
  Synthetic oligonucleotide
aacacgaggtcggaggggtccatctcggagagggcgttcctgtaggacgc

SEQ ID NO: 140080 - DNA, 50 bp, Artificial
  Synthetic oligonucleotide
aagccacccggtggagccttacgaggttagagccctctccgtgctgacct

SEQ ID NO: 140081 - DNA, 50 bp, Artificial
  Synthetic oligonucleotide
aagaggctcgcgtacaggctcctcctagtcttcggcgggtccccgtccct

SEQ ID NO: 140082 - DNA, 50 bp, Artificial
  Synthetic oligonucleotide
aagacgcctagcctccaccactccccgagaacactacacgcagagccccc

SEQ ID NO: 140083 - DNA, 50 bp, Artificial
  Synthetic oligonucleotide
aacttcgttaggagagttcgcgggcgcgttttctgcaggggagaccccct

SEQ ID NO: 140084 - DNA, 56 bp, Artificial
  Synthetic oligonucleotide
actgcgaaaggcgtgtagccccgcttaacctcgctcacgaaagtgttgtagaccat

SEQ ID NO: 140085 - DNA, 50 bp, Artificial
  Synthetic oligonucleotide
aacctgaagtggagctccgtgaaagccccgggggatatgggcaggaagtc

SEQ ID NO: 140086 - DNA, 50 bp, Artificial
  Synthetic oligonucleotide
aacgtcttccccttcgcgtgcaaacgccactacgcgcaagccgcttgtct

SEQ ID NO: 140087 - DNA, 50 bp, Artificial
  Synthetic oligonucleotide
aactagaaggccagcgactttagagctgcgcttgcgaggagggttgggcg

SEQ ID NO: 140088 - DNA, 50 bp, Artificial
  Synthetic oligonucleotide
aactacgcccctctggatgtttacccctcggtgctttcccggagcacccg

SEQ ID NO: 140089 - DNA, 50 bp, Artificial
  Synthetic oligonucleotide
accggcgtgggggtcgttgtatcagcggagttcaacgcggtagaggtgga

SEQ ID NO: 140090 - DNA, 50 bp, Artificial
  Synthetic oligonucleotide
accgctcgggctacccgtctgggcaacgttcgttacatgggcaggttact

SEQ ID NO: 140091 - DNA, 50 bp, Artificial
  Synthetic oligonucleotide
accgcgtacggaggcaactgggtgggtagcgtattcctagcgttcctcgc

SEQ ID NO: 140092 - DNA, 50 bp, Artificial
  Synthetic oligonucleotide
accgaggggcccaggtactccgggaaagtgttcgctatggggcacgcaga

SEQ ID NO: 140093 - DNA, 50 bp, Artificial
  Synthetic oligonucleotide
acccgagaaccgagaccacaatctacccgccgacgcttaacctgcgcgga

SEQ ID NO: 140094 - DNA, 50 bp, Artificial
  Synthetic oligonucleotide
acccgagaaaccccgtcagggtccaggtcataagggcgttccggaggctt

SEQ ID NO: 140095 - DNA, 55 bp, Artificial
  Synthetic oligonucleotide
cgaactcgcagtacttgacggggtactttgcctcggtcttcctaattatgtactc

SEQ ID NO: 140096 - DNA, 50 bp, Artificial
  Synthetic oligonucleotide
acccctgccgggccagactacgtcctgggttgttacctggtgcaacggga

SEQ ID NO: 140097 - DNA, 50 bp, Artificial
  Synthetic oligonucleotide
acccctaaagcctgtactggaagcgtactccctagccgcgcccagacacc

SEQ ID NO: 140098 - DNA, 50 bp, Artificial
  Synthetic oligonucleotide
accccggtagggttcagagaggatgcgcggcgagagagtgctcgttaagc

SEQ ID NO: 140099 - DNA, 50 bp, Artificial
  Synthetic oligonucleotide
accccaggtaacgttcgtcaacgttacggacgcgtagcccgaggatgcct

SEQ ID NO: 140100 - DNA, 50 bp, Artificial
  Synthetic oligonucleotide
accaggagcctggggtatccttgaacctcgacgcggggagattcgcccct

SEQ ID NO: 140101 - DNA, 50 bp, Artificial
  Synthetic oligonucleotide
ctaataaacctttcgttttacacaaaacggggctaaacgcatgctagccg

SEQ ID NO: 140102 - DNA, 50 bp, Artificial
  Synthetic oligonucleotide
acagggctaaagccgcgagaaacctggccgagtggctagtgaggcgcgct

SEQ ID NO: 140103 - DNA, 50 bp, Artificial
  Synthetic oligonucleotide
acagcctcgccgagcaactttaagtcgggcatcgctactgtcagcgccca

SEQ ID NO: 140104 - DNA, 50 bp, Artificial
  Synthetic oligonucleotide
acagagctcaagccggggctcgttctcgaaacccccttcatacacgcgga

SEQ ID NO: 140105 - DNA, 50 bp, Artificial
  Synthetic oligonucleotide
acacatgcctctttgatggagcacgcccgttacgacgtggctctgcgagc

SEQ ID NO: 140106 - DNA, 60 bp, Artificial
  Synthetic oligonucleotide
cgactcccctcagcaagaccatgagcctctcgaccggtctagacgccgctattatgccta

SEQ ID NO: 140107 - DNA, 50 bp, Artificial
  Synthetic oligonucleotide
aatcctagcacgaacacagggcttccgtggccgctgtacatccccgccca

SEQ ID NO: 140108 - DNA, 50 bp, Artificial
  Synthetic oligonucleotide
aatcatacccctcagtatgtcggccgtgtaggtccccggggcggagtacc

SEQ ID NO: 140109 - DNA, 50 bp, Artificial
  Synthetic oligonucleotide
aagtattggtgcggagagctgggaaaccccctcacgcgctgcgcctcagt

SEQ ID NO: 140110 - DNA, 50 bp, Artificial
  Synthetic oligonucleotide
aaggtacgggcgttgctcgagccaagctccggcgtagaggcttctaggct

SEQ ID NO: 140111 - DNA, 50 bp, Artificial
  Synthetic oligonucleotide
aaggcttgaacccccgcttctcgcgcgaatgcttaatagggctctcggcg

SEQ ID NO: 140112 - DNA, 50 bp, Artificial
  Synthetic oligonucleotide
aaggctggaccagggcgttacaccggtaactctctccgcagcggctagcg

SEQ ID NO: 140113 - DNA, 59 bp, Artificial
  Synthetic oligonucleotide
aacggcacatacatattaggatcccagacggacacgaatcactttacgccgatactgga

SEQ ID NO: 140114 - DNA, 56 bp, Artificial
  Synthetic oligonucleotide
aatcgtatgactggtcaatagggggatccctatacgcagggaagacaatcccctac

SEQ ID NO: 140115 - DNA, 50 bp, Artificial
  Synthetic oligonucleotide
agggcctccactatgcctatgtgcgacgcaacgcgcctgaacatctgcct

SEQ ID NO: 140116 - DNA, 50 bp, Artificial
  Synthetic oligonucleotide
cgttctctgaggagctcgctagcctgatcacagacttgagcctgtcaata

SEQ ID NO: 140117 - DNA, 50 bp, Artificial
  Synthetic oligonucleotide
gtagctgtatgtggctcccggacttaccgccccgccaacgagcgaactgt

SEQ ID NO: 140118 - DNA, 54 bp, Artificial
  Synthetic oligonucleotide
gaacccacaaaacgcccaatatgccgtaaaagaccctcgataacaaccagtatc

SEQ ID NO: 140119 - DNA, 55 bp, Artificial
  Synthetic oligonucleotide
cgtagatgtcatgatttccgcagtacttatctcactgctctctgcaattccagtc

SEQ ID NO: 140120 - DNA, 55 bp, Artificial
  Synthetic oligonucleotide
cgggttaagaccgtagtataccacaaggtgccagatcggatccaaaatggctagg

SEQ ID NO: 140121 - DNA, 55 bp, Artificial
  Synthetic oligonucleotide
cggccatggacagcttaggagccgagacaacgatatcccacacgatactgatcga

SEQ ID NO: 140122 - DNA, 55 bp, Artificial
  Synthetic oligonucleotide
cggcaccatatcctatttcgccgattgatctctcccttcgtgtatctttacggct

SEQ ID NO: 140123 - DNA, 55 bp, Artificial
  Synthetic oligonucleotide
cggatacctagcaatatctggtatggttataggcgttgccggccttcaactatac

SEQ ID NO: 140124 - DNA, 55 bp, Artificial
  Synthetic oligonucleotide
cggacttctgacggacagattgtatctttctatggctcatcagtattgaacgagc

SEQ ID NO: 140125 - DNA, 55 bp, Artificial
  Synthetic oligonucleotide
cgctgagaagcgtggagatctcgtcaaagccgctggtagtcttcataccccttcc

SEQ ID NO: 140126 - DNA, 55 bp, Artificial
  Synthetic oligonucleotide
cgacagaagctttatgcaagtacgatgctggcatgggaatatctatgctcgtacc

SEQ ID NO: 140127 - DNA, 59 bp, Artificial
  Synthetic oligonucleotide
tatcggcactggtagcacgaaactacaggggagatactcgaatagcaataaagaccctg

SEQ ID NO: 140128 - DNA, 55 bp, Artificial
  Synthetic oligonucleotide
ccttgtcacccattatacggtgactggtacggcgctgaccgagataaatcccggt

SEQ ID NO: 140129 - DNA, 55 bp, Artificial
  Synthetic oligonucleotide
cccatcctccacagacgcaaaccagcccatcacactgacagcgagcataagcgga

SEQ ID NO: 140130 - DNA, 55 bp, Artificial
  Synthetic oligonucleotide
cttgccttagaaactggttttacatctttgacaggctcgaacttcagcattccgg

SEQ ID NO: 140131 - DNA, 55 bp, Artificial
  Synthetic oligonucleotide
gcatgcagaaacctagcctatggcgaagtgagatgcacagttaatccttactttg

SEQ ID NO: 140132 - DNA, 55 bp, Artificial
  Synthetic oligonucleotide
gcatttgccctgtctattgcgtcttcaaggccgttcacggctctcgcatccgtcc

SEQ ID NO: 140133 - DNA, 55 bp, Artificial
  Synthetic oligonucleotide
gcgaggcgttgaggagaagtacgcaataattccttcggatagagtccttgaactg

SEQ ID NO: 140134 - DNA, 55 bp, Artificial
  Synthetic oligonucleotide
ggagccataccatggaataaagcactactatggtgtctacgaccagacaaacgac

SEQ ID NO: 140135 - DNA, 54 bp, Artificial
  Synthetic oligonucleotide
ggcgaaacggaaactggaatataacgtcattcgcaacgtctaaaagttcacgta

SEQ ID NO: 140136 - DNA, 52 bp, Artificial
  Synthetic oligonucleotide
gggaaggtaaccaacggccccgaggatacgataggtaaataccaatccataa

SEQ ID NO: 140137 - DNA, 55 bp, Artificial
  Synthetic oligonucleotide
ggttagaggaataagatggacgctacttacgttggagcttatggaaggctaaagg

SEQ ID NO: 140138 - DNA, 60 bp, Artificial
  Synthetic oligonucleotide
catccggcaacgccacatcgcacacataccagcacacggccgtaattgtggacaacctaa

SEQ ID NO: 140139 - DNA, 55 bp, Artificial
  Synthetic oligonucleotide
ggtttacaatgctctagcgctatcctacaggtgagccactcctatgtcgaggcgt

SEQ ID NO: 140140 - DNA, 55 bp, Artificial
  Synthetic oligonucleotide
gtacctgtaaacagtacccggctctgagtacttaaccggaaggtctctgtagctg

SEQ ID NO: 140141 - DNA, 55 bp, Artificial
  Synthetic oligonucleotide
gtgcgtccatagtcgcaaattcaaagggcattctagtcgggcgtgacactacacc

SEQ ID NO: 140142 - DNA, 55 bp, Artificial
  Synthetic oligonucleotide
gttttgggccaagcctaccgcagccagtacccctgcgaattcagttgcgttgcta

SEQ ID NO: 140143 - DNA, 55 bp, Artificial
  Synthetic oligonucleotide
tacgcgatgcctagggatgcctatatttcgattattgtagtattgtcgggtgttc

SEQ ID NO: 140144 - DNA, 55 bp, Artificial
  Synthetic oligonucleotide
tatgtcctcaacaccctttatcttgttgttcgatctggcgtagtcctgtattgca

SEQ ID NO: 140145 - DNA, 55 bp, Artificial
  Synthetic oligonucleotide
tgcttgccgtatctctggcgctaataggcttcggcacaaaggtaggtgtattccc

SEQ ID NO: 140146 - DNA, 55 bp, Artificial
  Synthetic oligonucleotide
ttaggatcccagacggacacgaatcactttacgccgatactggaaggcacggcca

SEQ ID NO: 140147 - DNA, 55 bp, Artificial
  Synthetic oligonucleotide
ccatacggaactgttcgatgcattgtagtattcgaatgtgccgtatccgatcatc

SEQ ID NO: 140148 - DNA, 55 bp, Artificial
  Synthetic oligonucleotide
atcgcatgtgagatcgaagctccgatcattctccgcatggtatcctattatgacg

SEQ ID NO: 140149 - DNA, 60 bp, Artificial
  Synthetic oligonucleotide
tacgcctggtatattcaggaggcacggcaaactcaacatgataatcccgcagaaccctga

SEQ ID NO: 140150 - DNA, 55 bp, Artificial
  Synthetic oligonucleotide
caaaggcaccctatgatcacgtacaatcctgtgtattaaatatggatcggccctc

SEQ ID NO: 140151 - DNA, 55 bp, Artificial
  Synthetic oligonucleotide
cacacggccgtaattgtggacaacctaacgatcgccgagctatcggactattccg

SEQ ID NO: 140152 - DNA, 55 bp, Artificial
  Synthetic oligonucleotide
ccaggggagaaataccgagcggtccctgaagcattattatggctatgagcaacgc

SEQ ID NO: 140153 - DNA, 55 bp, Artificial
  Synthetic oligonucleotide
cacaggttgtacaccttgtatccggtatagccgtacatcataacctggagcacgg

SEQ ID NO: 140154 - DNA, 55 bp, Artificial
  Synthetic oligonucleotide
ccaagatccctggccttattaactatggacaacgcaaccggatggtttgatccgg

SEQ ID NO: 140155 - DNA, 55 bp, Artificial
  Synthetic oligonucleotide
cagcaccctctctcagcggatcctggaacctcccgccggctataaggccaagtac

SEQ ID NO: 140156 - DNA, 54 bp, Artificial
  Synthetic oligonucleotide
acgtgcgaagacaacctgtacattgccacagtccttgcactttatcttgagaaa

SEQ ID NO: 140157 - DNA, 54 bp, Artificial
  Synthetic oligonucleotide
aattcaggtataactgcaagatatccagctagggttccaatgcctatagcagat

SEQ ID NO: 140158 - DNA, 54 bp, Artificial
  Synthetic oligonucleotide
tatctctggagcatccgccctccgaagttctattcctctcaccttatacgatcc

SEQ ID NO: 140159 - DNA, 54 bp, Artificial
  Synthetic oligonucleotide
tgccatatcgtactgcagagtagaaacgacatgcttctgcctcataccgtatac

SEQ ID NO: 140160 - DNA, 59 bp, Artificial
  Synthetic oligonucleotide
acacataccagcacacggccgtaattgtggacaacctaacgatcgccgagctatcggac

SEQ ID NO: 140161 - DNA, 53 bp, Artificial
  Synthetic oligonucleotide
gcttaccataacggataagaacggcaacacggcatcagcaacatacacggaga

SEQ ID NO: 140162 - DNA, 53 bp, Artificial
  Synthetic oligonucleotide
atagaccgcataggcagaagggtgctacaggcggccgggtttggcctagctgg

SEQ ID NO: 140163 - DNA, 53 bp, Artificial
  Synthetic oligonucleotide
tcagaggctcgtaatcaccgccatactctatcattccgctgtcgttgtagggt

SEQ ID NO: 140164 - DNA, 53 bp, Artificial
  Synthetic oligonucleotide
agcgagccggaagtcttgcgtagcaagaccgagtggtgtaagcgttagcggtg

SEQ ID NO: 140165 - DNA, 53 bp, Artificial
  Synthetic oligonucleotide
atcccgtcgggcatacggcctttcaggatcaacgacagacatgatcccgccat

SEQ ID NO: 140166 - DNA, 52 bp, Artificial
  Synthetic oligonucleotide
agtcgtcaaggctaggtgcatcccactcgcatacggccattcgctcgcttcc

SEQ ID NO: 140167 - DNA, 52 bp, Artificial
  Synthetic oligonucleotide
gaggcatcgggccattcagctacaactggacaatagacggatccacagcagg

SEQ ID NO: 140168 - DNA, 52 bp, Artificial
  Synthetic oligonucleotide
ataggcagaagggtgctacaggcggccgggtttggcctagctggtatatccc

SEQ ID NO: 140169 - DNA, 52 bp, Artificial
  Synthetic oligonucleotide
agctcagaagagctggttggcccggagactatgaggtgggcctccgaacatg

SEQ ID NO: 140170 - DNA, 52 bp, Artificial
  Synthetic oligonucleotide
agcacgactgccaacggactcgtatggggtctcggtaacactgtagggggcg

SEQ ID NO: 140171 - DNA, 60 bp, Artificial
  Synthetic oligonucleotide
atgccatacgcatccggcaacgccacatcgcacacataccagcacacggccgtaattgtg

SEQ ID NO: 140172 - DNA, 52 bp, Artificial
  Synthetic oligonucleotide
cctggcaccactatgaagcataccgtggaacttgccagacgtccccgaggcg

SEQ ID NO: 140173 - DNA, 52 bp, Artificial
  Synthetic oligonucleotide
aagggccagatcgcggattggagatgcacgttccctggagatcccaggagtg

SEQ ID NO: 140174 - DNA, 52 bp, Artificial
  Synthetic oligonucleotide
tatgcccacgctgaatcccctcagtggcaagggccctaactgcagagaagtt

SEQ ID NO: 140175 - DNA, 51 bp, Artificial
  Synthetic oligonucleotide
aaaatggccgacgaaaagactgtaaatgagttcagggaagtgctccaggtt

SEQ ID NO: 140176 - DNA, 51 bp, Artificial
  Synthetic oligonucleotide
ggcgtcggtgttaagacggcaagtgtggttctggccgaaggcctaggcata

SEQ ID NO: 140177 - DNA, 51 bp, Artificial
  Synthetic oligonucleotide
ggccccagcaactactggcctttggcgcactgtaggttacgggggagattc

SEQ ID NO: 140178 - DNA, 51 bp, Artificial
  Synthetic oligonucleotide
gccggaagtcgtgctacgcaagaccgagtggcgtaagcgttagcggtgggt

SEQ ID NO: 140179 - DNA, 51 bp, Artificial
  Synthetic oligonucleotide
gccctaactgcagagaagttttgggccaagcctaccgcagccagtacccct

SEQ ID NO: 140180 - DNA, 51 bp, Artificial
  Synthetic oligonucleotide
taggtgccggccacttggtagcggaaggcaggaggaatagcggtataaccg

SEQ ID NO: 140181 - DNA, 51 bp, Artificial
  Synthetic oligonucleotide
attggggaaccaaagggccagatcgcggattggagatgcacgttccctgga

SEQ ID NO: 140182 - DNA, 60 bp, Artificial
  Synthetic oligonucleotide
cggtatcactaacggccatggacagcttaggagccgagacaacgatatcccacacgatac

SEQ ID NO: 140183 - DNA, 51 bp, Artificial
  Synthetic oligonucleotide
gcaccacccagaataggcaatatccgtaaaagcggccattcagcaatgaaa

SEQ ID NO: 140184 - DNA, 50 bp, Artificial
  Synthetic oligonucleotide
gtagggacccaccgggagggcttcatcgaacgcctttccctgcacccagt

SEQ ID NO: 140185 - DNA, 50 bp, Artificial
  Synthetic oligonucleotide
cggggccactgacggatcgaaggcacaacccggtactatccgcggtgatt

SEQ ID NO: 140186 - DNA, 50 bp, Artificial
  Synthetic oligonucleotide
caaggcctatggccgaaccccagttcaccgcggttgacggatgcagtaca

SEQ ID NO: 140187 - DNA, 50 bp, Artificial
  Synthetic oligonucleotide
cggcagtcctccgcctgaatggcagaccgtccagaatgcagcagaatcgc

SEQ ID NO: 140188 - DNA, 50 bp, Artificial
  Synthetic oligonucleotide
aatcaaggtgccggaatcggttggcggatacacgggctactccggtgcgt

SEQ ID NO: 140189 - DNA, 50 bp, Artificial
  Synthetic oligonucleotide
cagcggatcctggaacctcccgccggctataaggccaagtacatgcgccc

SEQ ID NO: 140190 - DNA, 50 bp, Artificial
  Synthetic oligonucleotide
cagggccttcgcaaaggcttctatagccagctgctccctaccaccgacgc

SEQ ID NO: 140191 - DNA, 50 bp, Artificial
  Synthetic oligonucleotide
cgaagcctgaacataagcggatccaaggaacgccatgaggcctgccacga

SEQ ID NO: 140192 - DNA, 50 bp, Artificial
  Synthetic oligonucleotide
ccttcgtggccctatccgaggcgcaacagtcagtttctggcatcgcgcaa

SEQ ID NO: 140193 - DNA, 60 bp, Artificial
  Synthetic oligonucleotide
cggcacaggaagttttacgatgccatacgcatccggcaacgccacatcgcacacatacca

SEQ ID NO: 140194 - DNA, 50 bp, Artificial
  Synthetic oligonucleotide
ccgtggcccagtgcggtacgatctgtgcattgactatgagcaccctcggg

SEQ ID NO: 140195 - DNA, 50 bp, Artificial
  Synthetic oligonucleotide
tcccataagtatccacagcagataggcaaacgactgtggggccagaggat

SEQ ID NO: 140196 - DNA, 50 bp, Artificial
  Synthetic oligonucleotide
tccccatccatggcgtatgcaagtgcaccatcgcaggctcctatgtctgc

SEQ ID NO: 140197 - DNA, 50 bp, Artificial
  Synthetic oligonucleotide
ccggtgtacgcatgtccgttgaggagacggcggtgaaccctcgtttcaga

SEQ ID NO: 140198 - DNA, 50 bp, Artificial
  Synthetic oligonucleotide
aacgaagtcgtagcgcgttatgaacctctcgccagctgcgatgggcacgc

SEQ ID NO: 140199 - DNA, 50 bp, Artificial
  Synthetic oligonucleotide
ccccgttcgcatcgctcggtgtctacgagggcacatcggccaggtctttc
